United States Patent Application Publication US 2013/0129668 A1 - sequence listing, part 16

SEQ ID NO: 258178 - DNA, 122 bp, Homo sapiens
gtgggctgttttctttctgagttctgagcaaatcgagctgggggactccggggcatgctgcgctatcctgggagtctcggccttaggcggtttggtgatcttcccctggaaataatcagtgg

SEQ ID NO: 258179 - DNA, 122 bp, Homo sapiens
cgggcggagcctcggaagatctaggaactgagactggcgggaaaacctggctgggagtgccggcggctgagagctgcggggcagcccctgtcacgtagcccttctaggttcctgtgtatggc

SEQ ID NO: 258180 - DNA, 122 bp, Homo sapiens
ctctgggagagttttggaggccagggctggctggtttgtgggataccctggtttaagcctcgtgcttcttctgcattcctccctcttggcagtacggctcatgggagaagcccacctctgaa

SEQ ID NO: 258181 - DNA, 122 bp, Homo sapiens
gcacacgtgtatgtggctaaacatgtctgtgcacatgtgtgttgcttctctggccaggcccggctgccccactcatgtgtgcacccagttcctcatcactgtcacccccgaggcccagggcc

SEQ ID NO: 258182 - DNA, 122 bp, Homo sapiens
tttaaaatgttgaagatgcaccagggaacttgtcacagatgcaaatgcccagtccttgcccgttcctccctgccttcccctccattctgattgagcacatctgggctggagcccaataacgc

SEQ ID NO: 258183 - DNA, 122 bp, Homo sapiens
atatagagatcatttctgtttaatgttgagttgtgtgaggacaacacacacttgggcacacgtggatgacagaagttttaccctcaggctactctggcccaaagagattaagattctcctaa

SEQ ID NO: 258184 - DNA, 122 bp, Homo sapiens
tctttatttcccttcctcacgtggtgcaggcaggaagtgacgcgcctggcccgggagctgcggtcgcagaggccgacggagccggagtcgcggacgccgcggggtctccgggacaggtgacc

SEQ ID NO: 258185 - DNA, 122 bp, Homo sapiens
ccagctcctgacctcaggtgatccgcctgccttggcctcccaaagtgttgggatgtcaggcgtgagccaccgcacctggcctggtgtgccttctgtatgcctgtttaccctcttctgccccc

SEQ ID NO: 258186 - DNA, 122 bp, Homo sapiens
tggcagagactctggccatggtcctgccatcggagtggggctggggctgggtcggggggccgcgacccggtgcactttacctttttcttcgctgcggccaatttgctctgtcgggtttcttc

SEQ ID NO: 258187 - DNA, 122 bp, Homo sapiens
gattcccacaaccacttatttatggcttagtgtggtttgactttgaatcccacaaaagggcggggaggagagcggccccacggctgcgtagcgttcggggtaaaggtcctagtggccactga

SEQ ID NO: 258188 - DNA, 122 bp, Homo sapiens
gccgcaatcctgttcctacgtggatgcccagaagaaatgaaacctatgtccacccaggaacgtgtgtgtgactgctcacaacagtgttattcactattgctggaaagtggaaccaacccagt

SEQ ID NO: 258189 - DNA, 122 bp, Homo sapiens
cgaactcctaggctcagacgatactctcgcctcggcctcccgagcagctgggactacacgcgtgagccaccgcccccggcataaagtttgaattagtccttacgcaaaaagggaagagggca

SEQ ID NO: 258190 - DNA, 122 bp, Homo sapiens
ggtgcgtgcgctagtgcccgcacccggtgtgtagaagggcgcgagcgttggcgtgagagccggtgtggcctggaagctctgcaggaacgtgtgggggtaggaggtgaggggaccctcagtta

SEQ ID NO: 258191 - DNA, 122 bp, Homo sapiens
taattttccttttctgagcactgaccccacctctcctattctattcctccactgttgaaccggaacaaaggtcacttgaaagcgaagcaaaactcagctgttaccaaaggcgcaaagatcaa

SEQ ID NO: 258192 - DNA, 122 bp, Homo sapiens
catggagagaccacctctagatgcctactcgattcaaggacaacacaccatttctgcactcggtctggctggaaatatgttttgtgtgtttttttgtttgtttgttgcttttaataatattt

SEQ ID NO: 258193 - DNA, 122 bp, Homo sapiens
gggcctcggcatcttctccaagacgtggatcaaggcgggaaccgagatgggccccttcaccggccgcgtgatcgccccggagcacgtggacatctgcaagaacaacaacctcatgtgggagg

SEQ ID NO: 258194 - DNA, 122 bp, Homo sapiens
tcgaaatcgcttttcgtactgagttggtctgcagaaagaagaacagatttaggaggaaggcggtcataggaaactgaaagtgcgtcacgcccactcccgtcacggaaactggtctctgaaag

SEQ ID NO: 258195 - DNA, 122 bp, Homo sapiens
agagagtgctaatgcattgagataatcccctgggggctcttccaggaaaacaactgacatcgtgctgttttgtcattgtagttggctgatatttttaatatgaaatcagattgtaagacttt

SEQ ID NO: 258196 - DNA, 122 bp, Homo sapiens
gatctaggtggtcagctttattgtagctttattgtcttctagtgtaccacagtgattgtacggactacaaaactgaggttacagaaggaggtcatgtccccaaggtcacacagcaggatcag

SEQ ID NO: 258197 - DNA, 122 bp, Homo sapiens
ctggcgatgtctgggcggcccacgcagcaacaggcgtgagggtccctcgcacctgggcttcgtggtaatctcgctgatgagtatttcaagtcgtccagcctcagtttgcaggatttctgggc

SEQ ID NO: 258198 - DNA, 122 bp, Homo sapiens
gcagcctggcgcgtcctgacacgccgccagcacccacactttggcaggtcccagagccggcggggcgcaggcgaacagctccggactgggcccacacccctggaaccttccgcgcgaacccg

SEQ ID NO: 258199 - DNA, 122 bp, Homo sapiens
cacacatttacacactcatgctcacacacatacacaggttcacacatgctcacatacatccgttcacattcatgctcacatgtacactcatgcgctcacacgctcacactcatacacgctca

SEQ ID NO: 258200 - DNA, 122 bp, Homo sapiens
ggcgccctttcagcgtgcgcagtgaacgtgcgctcggagcggtagattgggcaggattcgcgcctccatttttccaggagagagcgggataccaagagaaccggaccagctggtactgggac

SEQ ID NO: 258201 - DNA, 122 bp, Homo sapiens
cggagccttggtcgggaaccggcgccgcgtgcgcactggccggcgaggcctctggcccgccggggaaggagcccagagcgcctgtctccccggtagaaaccaacacacacaaataattatcc

SEQ ID NO: 258202 - DNA, 122 bp, Homo sapiens
gggaggtgggtccaggccagctaagctgccctaagactattagaagattccccaggtggccgggtgcggtggctcatgcctgtaatcccagcactttgggaggccgaggtgggtggatcaca

SEQ ID NO: 258203 - DNA, 122 bp, Homo sapiens
atctcggccatgctgtgcagggcggccaggggagggctgctgagcaggaatgcgctctgccgggtgccctccattgcccccaccgctaacatcccacggccacgccggagaccgtagccttg

SEQ ID NO: 258204 - DNA, 122 bp, Homo sapiens
gcagggtccagcggggcgccagaagcaggtggcggcgctgcatgctgggaactgtagtctcgacggccccctgagaggaagtaggaggaatgttgcattctgggactcggagttccaaagta

SEQ ID NO: 258205 - DNA, 122 bp, Homo sapiens
cggcacggtaggtggccttgaagttgccctgctgcttctccagtaccttgagacagtactcgcgcacgcgctcgtagtttaccagctccgactgcagcaggcaagctgcgagggccccgcgg

SEQ ID NO: 258206 - DNA, 122 bp, Homo sapiens
atactctctgtaatcttctgtctctatcatctttgaggaaactgctacatctaaagcattcgagcaaaatttgattttgtctctcaggcctgcaattttgcagcttgctctgttctggatgg

SEQ ID NO: 258207 - DNA, 122 bp, Homo sapiens
atgatgacggtgatgatgctgccagtgcgtctcagagagagaaaggacgaacgcacaacccgggatccaaggggcctggaagctgctgagaaaggccctcaggaaatcccaataccgtgcaa

SEQ ID NO: 258208 - DNA, 122 bp, Homo sapiens
ccgccgcgggttcccagggctggtggtagttgccgtcccacacgtacgtggcggggtcctcgtcagcgaagacctcgcggaacatgtcgaccatgtagaggtcctcggcgcggttgccatcc

SEQ ID NO: 258209 - DNA, 122 bp, Homo sapiens
cgcggccccgcctcgtccgttatttaccatatctttatctaggcaacctttattaagttccgttcgagatccgctcctcgtcaccagggcgatcttatcccacaatcctacccaagcctccc

SEQ ID NO: 258210 - DNA, 122 bp, Homo sapiens
gagccgaggcgtggaggagagcgcggacgcgggcgcgcggtgcatgtcacgtgatcgcgccggcttaccttggtgcccatatttgattagggcacccgggttccgccgtcctgctctcctta

SEQ ID NO: 258211 - DNA, 122 bp, Homo sapiens
gcagcggcggcggatgcgtggaagggggcctcgaggaaccaccggcggcatcaggagacccggtcctgtaaaagactgagagctccgcctctccgatactcgcgggcagccattgcggcgca

SEQ ID NO: 258212 - DNA, 122 bp, Homo sapiens
tgcccctcccgccgtctccgggggccttttctccgctcggcaccagggtgtccccggcgccgcctgatcctgttagcgcggtactctgagtgcagtcagtcctcggcgctgttttccctgat

SEQ ID NO: 258213 - DNA, 122 bp, Homo sapiens
ccctgatccgaggccccgcctgctgccctgctggaatggaggcctaggctgtggggccctcggctgctaagggggttctgtggggcctggacagatggggctccctgggcttcaccgacacc

SEQ ID NO: 258214 - DNA, 122 bp, Homo sapiens
ccccctccacccgcccgaagccctcgccgccccggcgccccatcgctgtccccggccccgcgctccggagagctagggctgcctggagctccggagtcctcaactgcctccgccccgggaga

SEQ ID NO: 258215 - DNA, 122 bp, Homo sapiens
gtgctgcctagtgcttacgcaaaagctgctgactagctccagcctggccaaatccgcaaacgtctcttatgtgatggctgaaccacattttatgacatctgaacccctttcaaatctgtgct

SEQ ID NO: 258216 - DNA, 122 bp, Homo sapiens
gtggcccccgtggacggtgcgtggcatgggggtgggcagggcgccacaggcgggcaggtgcggcccctccccgccgccgcagagggccgggtcccactgcccgtctgcctcctcctcctcct

SEQ ID NO: 258217 - DNA, 122 bp, Homo sapiens
aatcaattactatagagctgaaaaacagagagagagagaaagcagccgggttgggcaagccgtcgacagtctgcgacatttttgcgcttcctgggagggaattcctccaagaagaggggtaa

SEQ ID NO: 258218 - DNA, 122 bp, Homo sapiens
tgtaaacacatatgattcaatgatagcctgctgcaactgggaactggtctggctcatctacgtgactttgcaaatatctgctttgacccatcatgtgtttggttgaagttcaacgttcgtgg

SEQ ID NO: 258219 - DNA, 122 bp, Homo sapiens
cgtttgtacgaggcaggggcagcaacggcagccgggcatgcaccaacggtgcctctgccccggcagcgatgactctacagcccatgatttccgcagcccacgattggctggggcacagcgat

SEQ ID NO: 258220 - DNA, 122 bp, Homo sapiens
aatgaaaacaaataaaaccaagagggacttcaggcagagtgaggcccccccagcatcccacgaggacctccggcatccaatgggtgcctggtgtccatttgaggagcagcccagcagctgta

SEQ ID NO: 258221 - DNA, 122 bp, Homo sapiens
tcaggtatttctttatagcagtgcgagaacagactaacagtaatcaatgagttatctgcccgtttttgaaaaagtaattaagatgaagaaaaaacgtatagcagaattctgatacaaaatgc

SEQ ID NO: 258222 - DNA, 122 bp, Homo sapiens
ctggttaaaaagtgaaagtgaaatagagggtcggggcagtgctttcccagaaggattgctcggcatcctgcccttcccagaagcagctctggtgctgaagagagcactgcctccctgtgtga

SEQ ID NO: 258223 - DNA, 122 bp, Homo sapiens
ggccgaatgggaggcagaagtgtgcggtggacagggggccaggctaggccaggagggcctcgaagtagctgaccagtcacctgcccataggtctggcccacgctgaaccgaagtagtgggca

SEQ ID NO: 258224 - DNA, 122 bp, Homo sapiens
cgcagtcggtctcgcgagagatggagctgcccacggtgttggtgacgcccacggtgagagcgccgcggtccttacagtagcgcagcgccaggagggtgtccgcggtctcgcctgccgcccag

SEQ ID NO: 258225 - DNA, 122 bp, Homo sapiens
ccttagctccctcttgtctccctgtctgtggttcaccatctgtccacgttgccaatgacacgtttctgtggttcgatctctatgtgtctttgtttctctctaggtctctgtttccgctcttg

SEQ ID NO: 258226 - DNA, 122 bp, Homo sapiens
ccaccccatcagttacaacaggggagtttcaggggccggggaaggtgcctgtgtccgctgcgggtcttcgtgctgcctccgcagggactcctagccccagggacaccagcccgagaggggtg

SEQ ID NO: 258227 - DNA, 122 bp, Homo sapiens
gttgtcagagaagtcggcgcggaagctccagaggccgtccagctccttgcactcccgcgacgggctctcctgggggtacagcatcccgccctgcagccccagcgcgcagccccacaacaacg

SEQ ID NO: 258228 - DNA, 122 bp, Homo sapiens
catctcccggccgaatgctaaccgggcgtgcaggctggggttcgcaggaggctcgcgatccgccgctcggagctccatggcccccgggccgggccgactgggctggaagctgatccgcgcgg

SEQ ID NO: 258229 - DNA, 122 bp, Homo sapiens
gtctagaattactatcctaaatctccgaaaatgtacagggggtggcgggcggggcagggacggctctaggtgagcaggaaaaagcttggaactcagtcttccaatggcgaaagggaacgtgc

SEQ ID NO: 258230 - DNA, 122 bp, Homo sapiens
gctcgtgccgccaccacccacgcctccttgctgcagccagcgtgacgacagcggctgctccggaccacccgcaagcggccatcacggcaagggactaaccgtcgtgtaactactgtctgcca

SEQ ID NO: 258231 - DNA, 122 bp, Homo sapiens
gagtcggccctccccaggaattttttgttccttagccctagtgaaccttctgcgtcccctcgaagaggggagccaagggaccttggggacagttgaggttcgggtttttaaaacaccaatag

SEQ ID NO: 258232 - DNA, 122 bp, Homo sapiens
ctcccggtcagggcgcagtcggcctgggcgctagagcccctctcagctcccggcctagggcggggaagcgccagctcccgcagcccctgtgaaaggtcccctgtgcctcctgcctaggtgcg

SEQ ID NO: 258233 - DNA, 122 bp, Homo sapiens
tactactgctgcggaaaagaggacaacactccacatttctggcattgtaaatgacaacaccgcaactgaaagcaagcttgaatttctgggagtagcattaggatacaggacccctgctgagc

SEQ ID NO: 258234 - DNA, 122 bp, Homo sapiens
caggtgcgccttctgcagaaaggtactctgattcccaccttctgcaaactctaatactttcgatactcctctgtgcccaccaactcgtaccccttccacgagttttaagggaataaatcgat

SEQ ID NO: 258235 - DNA, 122 bp, Homo sapiens
gccagctctccatctcagagcagtgaacagtcctgggctccagctccagtcatgcgattccgtggcagttgtgtgacagggaccaaggagaaatcaggacatcggcaaagcctctggaagca

SEQ ID NO: 258236 - DNA, 122 bp, Homo sapiens
gcagaagcccagcgactgcagaaccctgccccaggcaccctgggcgctctgccctaccggcggcgcctctcactgctcacggaacgttctggaagtttgggaaaccctgagcggtctctgag

SEQ ID NO: 258237 - DNA, 122 bp, Homo sapiens
aaggagaagacgtgctggaggcagctttctgatggtgacgtatgcgaagacagctctggtcggagcgtggggcatttcccacatgattttccagcaggtgtgagtggcaggttcctcctccc

SEQ ID NO: 258238 - DNA, 122 bp, Homo sapiens
tcccgggcactcctgagtttgagccgggcctggaggacctgggccaagactttcgagcggcggccgcccgaggtgcgaggagccagcccggctttcctcactgggtcccgcgcaggcgtccc

SEQ ID NO: 258239 - DNA, 122 bp, Homo sapiens
cgtacacacaggcacgcatgccaggagttccagaataaaccagaagcacacacaataattcggccgatatgacctacatgaactgggaaactgatgcttggtaaacagagaccaataggcat

SEQ ID NO: 258240 - DNA, 122 bp, Homo sapiens
tcctgtttgcgaggtgtcttcatataacaaatgcgagcaataacaaacatccatagaactcgaattccagaaacgggaattcttttttccaagttcacagacctttagttaatcttttaaag

SEQ ID NO: 258241 - DNA, 122 bp, Homo sapiens
tgggcatgcacggggcccaggggacattgggcatcactgattcgtgaccatggagctcctcgggtccacgggggccagcccaaggcggcagaaatgcttgaatggggaggttgaggcccctg

SEQ ID NO: 258242 - DNA, 122 bp, Homo sapiens
gggactgggctgggggtcgccagacggacgggggctccggggtgctggtcgcagccgggacgccgaatctccgcgaaaacttgggacaaagtcttttctcctccctcccggggccccgcggg

SEQ ID NO: 258243 - DNA, 122 bp, Homo sapiens
gcttaaaaacgaacccacgccagaaacctcgcggaatgcgtgtaaatcacaccacaccaacgtcactttccacatctgctcatctacctggctggtcccaacatggcccctgccaggagcaa

SEQ ID NO: 258244 - DNA, 122 bp, Homo sapiens
gcaggtaatgctatctcctgcgctgagagggccgatgaaccgtgatgagcgatgcagggccgtcactaggcatctgcttcccagtttggccataaacgtcagcctcctctgacctcactttg

SEQ ID NO: 258245 - DNA, 122 bp, Homo sapiens
gagatgtgccaagatctctctgctgaagtgattccccgcaggcctgtttgttgttgtgcccggtgccgaatcacttgcaggctgaatcacttacagccctcacagaggctgatgaaagagcc

SEQ ID NO: 258246 - DNA, 122 bp, Homo sapiens
ccctctgacatgacaccgcccatcctgcctcgcgtgtacatacatcacgggccctaggaacgccgccaggagcagcgtccatgagcttgccaagtgttctctgctggctctttcctgccact

SEQ ID NO: 258247 - DNA, 122 bp, Homo sapiens
gtatagtctatctgctgtaggaaagtttgctaggagggatttttttgtgattgggtgtatcgacgagctggcttgccaccacctggccagggctctgggcagcccatcccctagaatgtctt

SEQ ID NO: 258248 - DNA, 122 bp, Homo sapiens
aggggaaaggtttcctagcacatcatggtggagataggtgtaaaattggactgaatatcccgcctacttagactcattaaactttttgaggagaggtgggggtagggagcaggttctgcccc

SEQ ID NO: 258249 - DNA, 122 bp, Homo sapiens
gaaaagacgcattgtctgccatcctcagggagcttactgatgagtggagagacgtgtacacgctgtgtgattattgcccaggacagtgctgagtagggtgacaaactcagaaaagatagtat

SEQ ID NO: 258250 - DNA, 122 bp, Homo sapiens
ctgcacccagggcagagattacggggttctgaggttcccccgccccgcggcctctcttggcggctgtgcgtgttcagttgccttcattgaaacccaagcatccgtcctcggctgccaccgac

SEQ ID NO: 258251 - DNA, 122 bp, Homo sapiens
cgcaggctgtcaggcagccatgtaatctctctgtggttttattacttaaaaacggcgcagcgtccgggctggggaattttccaaggtgtttgaggctgccacgggccccatttatattgtgc

SEQ ID NO: 258252 - DNA, 122 bp, Homo sapiens
tgtatgcttagcatgctacatttgaggtgacagcctgatgagtagtgggaggcatttatgcggtatgtggatttcttagatgttgtctattggagccatataggcctgcttactaaacttat

SEQ ID NO: 258253 - DNA, 122 bp, Homo sapiens
ttcgtgttcacgcgaggctgcacgggtcgcaacatccggcagctcagcctggacgtgcggcgggtcatggagccgctcactgccagccgtctgcaggtttgtaccccacccccagcccgcct

SEQ ID NO: 258254 - DNA, 122 bp, Homo sapiens
ttgggagaggtataggaggaaggtgggactggcggcggcgccgcgcggctggaagagccacgagcagcccgacgtcgggttggacagcagcacctggcacttcagctccactgtctcgccca

SEQ ID NO: 258255 - DNA, 122 bp, Homo sapiens
cggaaacatactcgcgttaaggaactgggaaagcttcctggcccggagctaggagcccgacgttggggctccttgctgagtgagacgctcagtcctgtgctccccgccccgccccaggcgcc

SEQ ID NO: 258256 - DNA, 122 bp, Homo sapiens
ttacctctcctcagcggcagcagggcagagtgctgaacccaggaccccacagatcctccccgctcctgtctcccggtgacaagggtcctggaacggggcgtctctgactccctgctccagga

SEQ ID NO: 258257 - DNA, 122 bp, Homo sapiens
taacccaggacagggcaagagcagaggtctgtgcctgtgagggagacaggcaagggcagacggcccaactctgttatgtggcagacagactcaggagaacactctggtacctgaaatgatac

SEQ ID NO: 258258 - DNA, 122 bp, Homo sapiens
gtatgattatcattacggctgtttccaattattctcattctccttcattaggcatgaccacgtgacttgctttagccagcaaaatatgcatggaagggatagttgtagtttccacgtaaaag

SEQ ID NO: 258259 - DNA, 122 bp, Homo sapiens
gccgccaatgcgcccgtgccctaactgccgacaaatggggcactggaggtcagactgccccggcctcagagcggccgctgtgtctccacatggcgacccctccccggatggtgaaggcgcct

SEQ ID NO: 258260 - DNA, 122 bp, Homo sapiens
cgtcccggtagctcccggaataggagcgttgcgagacggtcggttccaagtgggcctgggcgcgggggagaggcgggtctgtcctcgggaactgcaaggccctgtgagcgggaggactggga

SEQ ID NO: 258261 - DNA, 122 bp, Homo sapiens
ctggcggtgggtccctgagcagagtgctgccgctgccagtctgcgttttctgccgaaatgcgtccctgagattgagaaagttcacaccctaagtgtttttagaaggctgggtgccctgtttc

SEQ ID NO: 258262 - DNA, 122 bp, Homo sapiens
ccggagccccgagcccagggccagacctcctaccgccgctcctcgccgaccccacctcggcgtctggcacctaacttgtacctgagaagcctgagtccagcccgggagcctctgcggctccg

SEQ ID NO: 258263 - DNA, 122 bp, Homo sapiens
gcctggttccaggcccacctgattagcccacctttggcaataagtcacatttctcttcctcggctctgtgtcccaccataaccccttacgtccccttccctggacttttcacctttgccctc

SEQ ID NO: 258264 - DNA, 122 bp, Homo sapiens
gttgtgaaacaggaataacatttgtgacactggaacaaactcacaatgaatggctggttccgctgaccagcagctcaatttcacttctgcatttaattgcctgcaaaagctgtttattgcct

SEQ ID NO: 258265 - DNA, 122 bp, Homo sapiens
aaaacagcttgagggagccctctcttgcccttctgtcccttctgctgtgtgaagacacagcgtttgttgcttccagaggatgcagcgatgggatgccatcttcgatgcagagcatagccctc

SEQ ID NO: 258266 - DNA, 122 bp, Homo sapiens
ctggctcagcggctgttgcaggctctgctgccgcatcagggtgcggggtcgctggcatttcggctctcccgtggagctggggatagactcaagggtagtggccgtggacagggtggagtcct

SEQ ID NO: 258267 - DNA, 122 bp, Homo sapiens
ttgtggaaaaaaatgtatacacataacgtttattattttaaccatccgtaagtaagtatacgattcagtggcattaaacacattcacaacgttgtataaccatcaccactatctatacacaa

SEQ ID NO: 258268 - DNA, 122 bp, Homo sapiens
atgttcccgtgtgtgtggtgggcggtgtgccaggtccactgcaaggcgtgtgcgccgcgacgcgcggggctgctgcctgtagctcgttagcgggggaggggggcttgtgaaactagaccctg

SEQ ID NO: 258269 - DNA, 122 bp, Homo sapiens
gagatcgcgccactgcactccagcctgggtgacagagcgagactccatctcaaaaagaatcgggtgccacccagtgaactcttacgtggagtccagtattgtatgaagcagttgtgtgctgt

SEQ ID NO: 258270 - DNA, 122 bp, Homo sapiens
taccttcctccgaggggggtgacgtctgaaatttcctgaggtgaaccccatgttcccttccgcgcagccctaaaactttaggaaaaaaaatctctggagtgagatcacgttggagacgtttt

SEQ ID NO: 258271 - DNA, 122 bp, Homo sapiens
cagaaaataatctcaggcagatccagctgccctgacacttgcagtgcagctggcaggtgccggagcttcagacacgtggcccacaggtgcaacaaacccaccttgcttgggctctgcaacca

SEQ ID NO: 258272 - DNA, 122 bp, Homo sapiens
taccgtggggggtgaaccctagccccagctttgggaggatgttcaataaaggaccaatgccggaacacctggccacctcggctcagttccttcttgggggcggcagagtcatttctggccct

SEQ ID NO: 258273 - DNA, 122 bp, Homo sapiens
cctactcctctgatggactccccaatttcagttcatggcaacttcatctttcccgttgctcggaacaaaaagcctcttttgattacaccccacacccaatctgatggcaaactggtttgtgt

SEQ ID NO: 258274 - DNA, 122 bp, Homo sapiens
atgtacctgtgtacacgcgtacatgtgcaagtgttcacagcatggtggctggttccgtgccgtaatcacgggccctgggttggccagagcgctgaggctgattgaggtgtggtcgtgctgtc

SEQ ID NO: 258275 - DNA, 122 bp, Homo sapiens
cgggctcttcaatatggcaaggccttcgtctcctagcttctaggctctgagtccagtacccgtctgtactattccatctcttccgctccattagctcctcggtgactccaccatagcccctg

SEQ ID NO: 258276 - DNA, 122 bp, Homo sapiens
ggggtcagggagttccttttcctagtcaaagaaaggggtgatggacggcacctggaaaatcgggtcactcccacccaaatactgcgctttgccgaagggcttaaaaaacggcacaccaggag

SEQ ID NO: 258277 - DNA, 122 bp, Homo sapiens
cttcccttcaagccctcccttgcatgacatttaaacagatgcctggctccatggagggctcgggatgcagaaggtcaagagctccaggtgcacagtggcatgacgggatctctccttgtctc

SEQ ID NO: 258278 - DNA, 122 bp, Homo sapiens
caggcggcagagcgcaggcagccccgggccgtgggaaccagacagggctggactgggtggcggggcaggcctgaggacgcctggaggggctccccacggtccgcggctccctttggacccga

SEQ ID NO: 258279 - DNA, 122 bp, Homo sapiens
gttctgcccccagggcggcggctggaggcttgctgtgtgacctcaggcagaacccctgctcgctggggcctcagtctcactgtctgtggcagtggggggctgggcccggtactctcgtggat

SEQ ID NO: 258280 - DNA, 122 bp, Homo sapiens
ggcctctgccagccactccccctccccatacccctagtcatcctcggcaggtctcagtcccggctccatctgtgccctcgccccagccgcagctatgttgcacaccgagggccacgctcttc

SEQ ID NO: 258281 - DNA, 122 bp, Homo sapiens
taaattagtcaggtcgtgaaaacgtgctctatgtgactagtcatcagggaaatgagttttcggtagggaagtccacctaacggcctcatctgaactttgcatctgcaaagaccttgtttcca

SEQ ID NO: 258282 - DNA, 122 bp, Homo sapiens
aggctagaggccagtcccaaagtttccaggcatcagggctgcagcccaggagcctcaaggcggcccggcgggcgactggacggccggacaggtgagctcttgatcgtccgcggcctgatagt

SEQ ID NO: 258283 - DNA, 122 bp, Homo sapiens
ggggcttgggagctgaggggaggccgagtccggagatgcgcggcgcgagcccggccggcccgcacatggtcactccgccaggcttggaggaccctggaggggccctcagagtggccactgcg

SEQ ID NO: 258284 - DNA, 122 bp, Homo sapiens
ttgggctgggaggagtccgcgggggcgggaaaggggcggggcctgagcttttctccatctcgctctccgcgcctctgttttcaaggttttagaggtgaaacccgccagtgaggctggagcag

SEQ ID NO: 258285 - DNA, 122 bp, Homo sapiens
ttctgggcgttcgaggagacagacaggtgaggaaggtagaagaaaaacatccagagaggtcgagtagttggcactgaatgggaatagtttccaaaaggctcgcgtgtaccgaagcctggtct

SEQ ID NO: 258286 - DNA, 122 bp, Homo sapiens
ttccagaacaaatgctacaacacaaaacagaaacacatgtgcggccgcgcggcaagcgagcgcgcggcggggcgggaggcgcggggcgcggggcgcgcgcgccccctgccggccggcggacc

SEQ ID NO: 258287 - DNA, 122 bp, Homo sapiens
agctgcccgtgcgggtacctctagccccggggcctggaggagcggtgggagctgggggcgcggcaggcaggggcagagcaggcgttccgagggccagagacccacccaggtgggggtagggg

SEQ ID NO: 258288 - DNA, 122 bp, Homo sapiens
cgggagcgtggggccggctcactatgcctcgctgggttggaagatatgcacaccagctgccgtctcaaacacgtccggggagcccgaccagctgcacgtggaatccaccaggcctcctgctc

SEQ ID NO: 258289 - DNA, 122 bp, Homo sapiens
ccatctcttgcaagcttcagacacacatccctattgcttttctccgcgtgggtcgctcggcgatggggttggggattttcacggtgctgtcccccaactcgaacttcacaccttgaccgagg

SEQ ID NO: 258290 - DNA, 122 bp, Homo sapiens
cagcactcttggaattttggccaaagtggcttcttcttttgctgagacttgactcactcccggcagagggatgatagcggccttgccccgagcgtttatccggctgcaggcgtcattcttgg

SEQ ID NO: 258291 - DNA, 122 bp, Homo sapiens
cacaaaacagacacactcgcgcggaccgcggaccagggacactgtacctggcgctgccgacggcgccgcaggaacacagttttaaatcggcaattcaagctgccaccagccccctcctctcc

SEQ ID NO: 258292 - DNA, 122 bp, Homo sapiens
ggaggggctcctcacttctcagagagggcggctggtcagagaggctcctcacctcccagacgggatggcggcggggcagagacactcctcagttcccagacggcgtcgcggccgggcagagg

SEQ ID NO: 258293 - DNA, 122 bp, Homo sapiens
ttccctcccggggcaagagatgggcaggagacaccccagaatgcgacagccgcaggcccgcgcacctaggccctccgcagccggcgtcacttacttctcgccctcgaagagcaagaacgact

SEQ ID NO: 258294 - DNA, 122 bp, Homo sapiens
cgcgtgaccagggccaccggtttactgcacagctcccccgtccccagaacgcagcctccccgccaaccccaggaaccaagggtgcccaaaggcctcctacccggaaccccggggcgcctcgg

SEQ ID NO: 258295 - DNA, 122 bp, Homo sapiens
cagctccctggaagatcgtggttcctcccatgtgcgcacatgtgtatggcgtgtgtcatccgccctgctcctctttgctcgatgctgggaagaacagcctcgtgtcacacgcctgggtaaga

SEQ ID NO: 258296 - DNA, 122 bp, Homo sapiens
tgctaacaagtcgatcgccacagattgtgattccgtttctgtgaggtgtggtgtggacatcgggcttttcggaatgccccagggattctgatgggcggtaaagttcgagaactcctggccca

SEQ ID NO: 258297 - DNA, 122 bp, Homo sapiens
ctcaccgcggcagagccggggctgggtggcggggacgctgcctctgcaggcgaggcgctccggggcataagggattatcaggagtcgcggcctttcttggacatccctggctggggtcaggc

SEQ ID NO: 258298 - DNA, 122 bp, Homo sapiens
ttgcgtttctccagggcgatctcaggcttccacagggtctccaggggacaccgctgagagcggactgtcagagcgtccagaaggctcgtcttaccgcagcccttttgatgtcttggttcccg

SEQ ID NO: 258299 - DNA, 122 bp, Homo sapiens
caagccagtgggccgggcctgtctgggcagctcagccaagggcgctggactcacactcaacgcctcagccgactgtgcagacagagggtgcattgagccaggcgcagcgggccttccgccca

SEQ ID NO: 258300 - DNA, 122 bp, Homo sapiens
gattctttataagatactcaatgcttgctttgggattctaaagggaacattaatatgtctcgtaaaaataaggaatccttaaatgagtaatttgtgtacaacactgcagatagtgcctggca

SEQ ID NO: 258301 - DNA, 122 bp, Homo sapiens
tcccgaaggcaaaaccgcggcagagcgagggtcagtgccttggccaaggtcgcggggacgcgaccccgggcccctgggcacccggcgcaggagtgcagctgtctgccccacctccgggaggg

SEQ ID NO: 258302 - DNA, 122 bp, Homo sapiens
aagagggagactgagccgttagtgaggaagttcggtctgtggacaagtgtggtgccaggccgccgcgaggctcggctgcaacctgttcctcgcccgccggtgctcgccgcccgcccgctcgc

SEQ ID NO: 258303 - DNA, 122 bp, Homo sapiens
ggtggtctcaggagttcgggttcagccagggagcctagtgggtggaggaacatgcaggcccggtcccttgggattctcggggcacggggccgtggctccctccgagtcgagccccgggcttg

SEQ ID NO: 258304 - DNA, 122 bp, Homo sapiens
ccggcacctcgggaggccgaggctggcagatcactcgcgtttaggagctggagatcagcccggccaacacagcgaaaccccgtctccaccaaaaaaatacgaaaaccagtcaggcgtggcgg

SEQ ID NO: 258305 - DNA, 122 bp, Homo sapiens
catgaaatcgtaccttccgcccaggcagggctttgcatttcacattctagtttgcatccccgttccagacaattccagggcttttgaatagtgcctcaaccttactggccggtctcgactcc

SEQ ID NO: 258306 - DNA, 122 bp, Homo sapiens
catgagcccactctagctaattttaacaccattttctgcaaacttgaggtccccaacacccggatagctgagctaggtgggctgctgagactaaaggatctatgggtcctgggggaggaaaa

SEQ ID NO: 258307 - DNA, 122 bp, Homo sapiens
ctccaagaaccgcctgggtccccaggcccgaacacagtcagcacttgctcccagcccccacgctcgcactcaccaagaagcccaccaagtagagacagagcaggaagcggcgggctccgacg

SEQ ID NO: 258308 - DNA, 122 bp, Homo sapiens
agcatcttacgtggatgcagtgacaaagatgcgtcatccgcctgcgaccgaaggaagctgcgggaagaacacccaagggccttgtggcatctctcctgcgccctgcacttccctggggccaa

SEQ ID NO: 258309 - DNA, 122 bp, Homo sapiens
tagcagatgcatttgaggttaggtcttcgcaaccatgaaaacacagttataaattgttctcggagctaacccactcaacatcttggcacttggttgtttttaacttttcaacaataggcact

SEQ ID NO: 258310 - DNA, 122 bp, Homo sapiens
tctatcagtgtaggcaatgggcagctccaactgctctcacagaaagctagaggaacatttcggtattcagagccttcagacacatgggctggggttgctcagcatctggcctccatggggaa

SEQ ID NO: 258311 - DNA, 122 bp, Homo sapiens
tcgcgttcccaggactgtgacaattatagaccgcaatttgagtcttgagtaaccacgcagcgccaggcagatgtgacactccacttgcagaatctattaactgaactacgctatcatttttg

SEQ ID NO: 258312 - DNA, 122 bp, Homo sapiens
gtcaggattcaagggctgactctggaagtcatgtgaactcaaacactagaacacagcaatcgcctctaaccaatgggctggcagaggataaatgggactttgaaggagatcatcaaaatgca

SEQ ID NO: 258313 - DNA, 122 bp, Homo sapiens
ggagatgtcttttgttaaacaaattaaggaaactgggttttagaaggtttagttcttcctcgggctttgacctagcatttaaaggcgggaagcaaagttgcccagtgaaagccagttgccct

SEQ ID NO: 258314 - DNA, 122 bp, Homo sapiens
aagccaccgcagaagttgcccggcagaagactccggaggcattggctcagtaacttttcacgtcattttctgctcgggagccccttctagcctctccgcgcagcctttcccaccgcaaatca

SEQ ID NO: 258315 - DNA, 122 bp, Homo sapiens
gatgcctcccacagctgtctggccgcagagcctcaggaggttgcctctgtgcccgcaggacgcagagcagcaggaagctgatccgagcagactccgtcagcgagctccccgccccccggagg

SEQ ID NO: 258316 - DNA, 122 bp, Homo sapiens
acatgccctccctcctccctccatctccctggcctttgcgtctctgagtgggtgcacatgcgctccctccatctccgtggcctttgcgcctctgtgtgggtgcacatgcgctccctccatct

SEQ ID NO: 258317 - DNA, 122 bp, Homo sapiens
ggcgactagggcaactgcagggctctcttgcttagagtggtggccaccgccccctgctggcgccggggcactgcagggtcctcttgcttactgtatagtggtggcacgccgcctgctggcag

SEQ ID NO: 258318 - DNA, 122 bp, Homo sapiens
cctccctcttgtctttccttcccaccaaccagctcccaaacagaaagtgtttttcacactcgcagctctccctcctcaggccctgccaggcccgaagctgggcccagaggccagctggcacc

SEQ ID NO: 258319 - DNA, 122 bp, Homo sapiens
cctcccactgcccatcacccatggagtgtggaaaatcccggtcaagacagcagcccgggccgtgaaatcgaatctgggggtcccaagcatcggcgtttgtgcagctctcggtggttccaaag

SEQ ID NO: 258320 - DNA, 122 bp, Homo sapiens
gtcttatttttactttgcatttgtttcctaattaaaaatagaacttttaaaaaaacagttcgccatggtttcatcagggaaagactcatctgattcaaaatctgggcctttggatttgctgc

SEQ ID NO: 258321 - DNA, 122 bp, Homo sapiens
ggggcgggctgactggagcagaggagccaagacctgcgtgctcctccgtctcgccccgggcgcaactagaaccaataagtccctcaggctgagcaaagtctggccaggctccgacacggacc

SEQ ID NO: 258322 - DNA, 122 bp, Homo sapiens
cctcagagggaagagacatcgggaagattgctccgcccacagaaaggaagatttcgttctcgcgagatcccaatgacaattcgggagcccgttctcgcgggattttccaagaccgggttgga

SEQ ID NO: 258323 - DNA, 122 bp, Homo sapiens
tctctgcccccaccagaccatgttctcccaggctctcatgtgcagtggctgagacactgccgtgtctttgcccctggaaaaagcaacatggcctttcagtctagatgggcaaagagtgagaa

SEQ ID NO: 258324 - DNA, 122 bp, Homo sapiens
ctcaaaattatttgaccacagaacccttttttcattgaacacctattaaaactggtatcacggccaggcgcggtggctcatgcctgtaatcccagcactttgggaggccgaggtgggtggat

SEQ ID NO: 258325 - DNA, 122 bp, Homo sapiens
ggtagggaggcaaagaggggcctgggtttcttgggggcaattcaattgtcccccactgcccggccccctcagggcctggctaagaacatgacgggaaggaatctcactggctgagccaataa

SEQ ID NO: 258326 - DNA, 122 bp, Homo sapiens
tccgtgcccttgcgcaccccacaccactgactacagcggccgagccttcgcagcgcccggcgccgccgcctcagagccagaggcaaggccaccgccccctccgggcatccgaagagcgtcgg

SEQ ID NO: 258327 - DNA, 122 bp, Homo sapiens
tcaactcctggagcctctaaatccatcctcctgcctcagcctccctagtagctgggactacgggtgagtaccactgtgcaaggctacaaaataactttttagtaaaagtatatcccaaactt

SEQ ID NO: 258328 - DNA, 122 bp, Homo sapiens
gccgcctctgactgacagcccaatggcgcaggcgcgcgatggccgagaaactcgatggaacgcgcagagcagacccatggagaagagaagaccgccgagcgatggatgacggaggggaagca

SEQ ID NO: 258329 - DNA, 122 bp, Homo sapiens
gcaagactccgtctcaaaaaaaaaagaaaaaaaaagacatctgataatagtgtaaattgccgccaaatcaagtagggatgatattaaagtagcccaagtataagataatgaagacccaaact

SEQ ID NO: 258330 - DNA, 122 bp, Homo sapiens
cagggggtggggtgggctggggaatgggatgccgtcgtggtaatgggatagctggggtcgcggcagtgtcggtggcacttgcaggacgcctgattcctgaagaatggaaagggtggggtctc

SEQ ID NO: 258331 - DNA, 122 bp, Homo sapiens
tagaacccagcagggggctgtgacagacaggctggtgctcggagcttcatctctttctgccgttttcctctcagtttttgctctggttatgtcatatttctcattttcaacaccaacatgag

SEQ ID NO: 258332 - DNA, 122 bp, Homo sapiens
gggcttgttggcgagcgccgcgggctctgcagtgcctgaggccagaatctggctggggagcggcctcgggcttaggccatggcgagggagcgcccgcggccaccggggccggcgccaccccg

SEQ ID NO: 258333 - DNA, 122 bp, Homo sapiens
cggtgtgtccgagaaaacttccgagttaagccgccgctgaggccggaaggagctagacggcggtcgggtaggtgacggcttggttggggtcgctgcgaggggactactaggagcgccgaggc

SEQ ID NO: 258334 - DNA, 122 bp, Homo sapiens
ccacctcccgggcgctcgccccgccgcccgaagttgcatcttcccctatcctggaattgacgagcagagcaactacccaccgggaaagccaagtagccctccccgcgcccggggggcccctc

SEQ ID NO: 258335 - DNA, 122 bp, Homo sapiens
aacttaagaggaagatgagaagcctggttggccaggaggcttatctgtcaggacagggggcggggcctggggggccgtacctttgcttaccgcgagtgggcggggcaggttttaccgccgcg

SEQ ID NO: 258336 - DNA, 122 bp, Homo sapiens
aggccttgctgcctctgggacctgactctgtctcctgtgtctcttatcaccccccacccccgctcccatcttggtgtcacccatgggggctaatccggtccccttggataatgctttatatt

SEQ ID NO: 258337 - DNA, 122 bp, Homo sapiens
ggtcgggggtcagcactcaggacggggtcggggtcgggggacgcggccagggctcagggccggggtcgcgtcgggccctcaccgcgctcacgcagttcccgcagggcgctctcctgctccat

SEQ ID NO: 258338 - DNA, 122 bp, Homo sapiens
atgcggccggcgctcgccgccgccgcagttcggggagggggacgtcacatgaccgcggagcgctccttccccggcgccgctccccactcactgcggagcccaagccgcgggcgcgggagcgg

SEQ ID NO: 258339 - DNA, 122 bp, Homo sapiens
gcaaaaagaacagaactcaaggaagcagactaaccagtttctccaaagcagatcggtgctcgagtaccaggagtttaggagttgggcagcagagaacctctttatagggccagctaccccac

SEQ ID NO: 258340 - DNA, 122 bp, Homo sapiens
ccatagccaagactaaagacacccggagatgtccctcctgtctctaaaacacccaacccccgcttccccaggtagggctgactgggcacgtaaacagagtcctgggtcctgagtccacagct

SEQ ID NO: 258341 - DNA, 122 bp, Homo sapiens
ggaccgggcggggtctgggggtccgggtgaggactgagcggagcgcggcgtgacggggaccgggcggggaccggcgagcgggcacggggtccgggcggggtgcgcgcgtgcgagtgtgcacg

SEQ ID NO: 258342 - DNA, 122 bp, Homo sapiens
ggtggtccctcgggataggaattgggaactaaaacgcccagaattggcctcatcttcatacgggatgggcaaggagacgcgggttacgacagagggggaagccctggtcattatttcgaaaa

SEQ ID NO: 258343 - DNA, 122 bp, Homo sapiens
tcacctgggcgctgcgagagcttgttcccgtgttggcgcctggagcagccagccggatcccgcactcgctcgctcacatgctccctcctgcaagcgctggagaatggcaggctgagtaaaca

SEQ ID NO: 258344 - DNA, 122 bp, Homo sapiens
aacccgacaagggcgggtgctggatcgcggggaagggtttccaaggcagtcaccgcagaccgcccgggagcggggaacggccgccatctgctggcggctgcgctcactgcacgccttcgtct

SEQ ID NO: 258345 - DNA, 122 bp, Homo sapiens
catgtcttatagaacctccccaacttaaagaatcttgaaatcttgttctgatcctagcctcggcaaccaaccagttacaactccacttctgaccactgattaacctggacctctaagagatg

SEQ ID NO: 258346 - DNA, 122 bp, Homo sapiens
gtttcctcacccattgttacaagaccagcagatccacatgcctgctccaccgtgacaccacgacacaccagtacaccgtgcagcagggttcgcagcagggaagagtttaatgattgcagggc

SEQ ID NO: 258347 - DNA, 122 bp, Homo sapiens
cgcaggagacgcggtggcctgagagcctgagggtccccggactcgcccaggctctgagcgcgcgcccaccatgagcgcccggaccgcccccaggccgcaggtgctcctgctgccgctcctgc

SEQ ID NO: 258348 - DNA, 122 bp, Homo sapiens
ctctaatcatcaggtcttccctcacaagctctaatcaccgggtcatcctgcacgggccctcgtcaccgggtcaccctgcacgggccctcgtcaccgggtcatcccccacgggccctcgtcac

SEQ ID NO: 258349 - DNA, 122 bp, Homo sapiens
gtgggaagttcgcgcaagtgcggctctgcagggaggagggagggccgaggggaaggccctcgagagagtggagggcaacagtggccacggttcctctgtacttcgtttcttccgtaagaaat

SEQ ID NO: 258350 - DNA, 122 bp, Homo sapiens
aagtaagttgggaaatcctatgtccgcaatcccatctgggattatttatttcgccgcgtccgcagccggtggaagtcgtgagacggtgcaacgctgagcggctttccgcagaaggaggtgcc

SEQ ID NO: 258351 - DNA, 122 bp, Homo sapiens
ggtattcggatacatgagtaatttcttcagctgtgatttgtgagattttggtgcacccatcgcccgagcagtgtacactgaacccaatttgtaatcttttatccctcacccccttcctaccc

SEQ ID NO: 258352 - DNA, 122 bp, Homo sapiens
tgagggtgcctctgtgggtgccgggcccaaggcctccctctgccgtccttcctcgtgtcgcgcagtcacacaattgcattctgtgcgcttctgcgggactcatcacgaaaagggtgtgacgt

SEQ ID NO: 258353 - DNA, 122 bp, Homo sapiens
gggcgtgcagagtctgagaagtctcagccctggtgagccgtggcgccgtggccgggcctgcgtgctggggtccacaccatgaaccgaatcccgaatcgcttcgagagggagctttaggggtg

SEQ ID NO: 258354 - DNA, 122 bp, Homo sapiens
ggacttaaatatttcatcatgggctgccatccagctctgctttgattacaaatgtgtgtccgatgaggacggggaggccgccgtggcaggtggacggcagccttttgcagggctggcttttg

SEQ ID NO: 258355 - DNA, 122 bp, Homo sapiens
agcccagaatcccctgccctcccccagccccacccaggccaccctttccacgagggtgcccgaggttccatctccgggcttccgcctgcccaagctgttagggccatgctgactggcttatc

SEQ ID NO: 258356 - DNA, 122 bp, Homo sapiens
ctagtggaacgtgtctgggtcataaagacagatccctcatgaacatctagacgctgtgctcgctcatattgttaccatgagatctgactgttaaaaaaagcctgtcacttcctcccctccct

SEQ ID NO: 258357 - DNA, 122 bp, Homo sapiens
gtccagcgcctcaccaggcattggcacccccttctcctatgcggtgccagggcaggccaacgagatcgtgctgatcgagtggggcaacaaccccatcgagctgctcatcaacgacaaggtga

SEQ ID NO: 258358 - DNA, 122 bp, Homo sapiens
gcctggctgtcctaccacgtggtgcaggccagtgagcccgggctcttcagcctggggctgcgaacaggcgaggtgcgcatggtgcgtgctttgggtgacaaggactcggtccgccagcgcct

SEQ ID NO: 258359 - DNA, 122 bp, Homo sapiens
acgcggtctttttggtgaacgagggcgcagggtctggagagccgctgtacggcctggatccgcgtcacgccgtgcccagcgccacaaacctgtgcttcgacgtggcggacgccggcgctgca

SEQ ID NO: 258360 - DNA, 122 bp, Homo sapiens
gcgagcgcggttgctaagctctccaaggcctcggagggacaggatctgggcgcacctcaccggttgccatggtaacgcagcgccccagcccctcgcgctccgcggtggagggaggcgcagcc

SEQ ID NO: 258361 - DNA, 122 bp, Homo sapiens
ccttgtcctggctccgcccggttcatcgctcctgcccctgtcctggctccgctgcgaggccgctcgcttcccacactctggaaatgtcgctggaaactctgagtggcccgtgtcgggccgcc

SEQ ID NO: 258362 - DNA, 122 bp, Homo sapiens
agcagagggcgctctgcagaggccacagctatgaactttgcttgggtgatgcccacaggacgccgacggctgtcccatcgacatcaaggtgatccccaacggcgacggcaccttccgctgct

SEQ ID NO: 258363 - DNA, 122 bp, Homo sapiens
aaataaataaaaccattggcctggttgagggcgtgaccaccaagacatatatgttgtgcccgtgttcatcctgtgtatttatactgtatatgtagagtctagatttatatactgcaatgtaa

SEQ ID NO: 258364 - DNA, 122 bp, Homo sapiens
ggaacgaacggaaaagaaagaaagtttttttacaattgtaggtgttgacatgtgtgtggacgcctagagagatttctttgatgaacttcctgcatagtcagagacaggaatgacgatttcta

SEQ ID NO: 258365 - DNA, 122 bp, Homo sapiens
cataaaacgtctccccattcccaagatcctggagcctctctcccagcgtcagctgtggaccgcgggttttgcagaacgggaattcaggcactgtgatctcagccagtgaggaggtcagatca

SEQ ID NO: 258366 - DNA, 122 bp, Homo sapiens
cgccagccgaattcacacggtccttggggacatttcagttgactgtcacctgcctccgtacggtggtgtgagaggaatgcgcgccaccacggcggccaggttttgacatcgttccctactct

SEQ ID NO: 258367 - DNA, 122 bp, Homo sapiens
tcaaaagcctttttggactcaccctggggcaaaaggcatgaaaaacagtatttgactgggcgtggtggctcacacctgtgatcccagcactttgggaggctgaggtgggcagatcacctgag

SEQ ID NO: 258368 - DNA, 122 bp, Homo sapiens
gaggtgctgactccatgtccagcgtccttgttaagaatgctgcagggagggaagggatcccgagacatctgtccggcacacaccagcccagcagtgaagaaactgagcccacaaccctcctg

SEQ ID NO: 258369 - DNA, 122 bp, Homo sapiens
gccgatggctgcgagtccatggtcagaactggacgatgtcttcaaataaaacggcggcagcgcgacctctcgacctttgcccctgcgcaattgtacccacgacgacgcccccctccccgcgc

SEQ ID NO: 258370 - DNA, 122 bp, Homo sapiens
ctgcccctcctgcttagcacagcgaaagcagctctgggcacccagcccccaggcacgccccggcatccgccgctgccttcctgggtgcaaacagctggccagagtgtccctgcatggctctg

SEQ ID NO: 258371 - DNA, 122 bp, Homo sapiens
ggggctttcctcgcaggttacataaggcagccgcgggtggaggcagcagaggcgagcgcacgtccgtcgagggggaaaggggcgtggggaggcggccggggcggccggtatcccccgggcgt

SEQ ID NO: 258372 - DNA, 122 bp, Homo sapiens
cattgccatggcaacagtacagggactgaatctctggtttatttcaatttcatatctacccggtagaggcccaccaaatacgatccagcccctgctctcaaggagaagtaaggaggacagtc

SEQ ID NO: 258373 - DNA, 122 bp, Homo sapiens
gcagtggccacgataccgggttgctgctcaacggggttcggaagtgtgacgcattctttgcggccatgtgtgtgtgtgtgcgtgtgtgtgtgggtctgtgcgcgcgcgtgtccgagtgtcct

SEQ ID NO: 258374 - DNA, 122 bp, Homo sapiens
agcccctaacatgcctaattcaaagcaatctgcatgtgcttgtcattcagtctgtcctgccgctctgtggagctgcgcctgccaactcattgctttctgctgtgctgtgatcctgcagtcag

SEQ ID NO: 258375 - DNA, 122 bp, Homo sapiens
cagcgcccagctcaggcagtgtgcccagagggccgctttgcggtggtggttgatctttcccgacagcactcccctgggcagcggccgagattctaactaagctttgtgtctttgcagcctgg

SEQ ID NO: 258376 - DNA, 122 bp, Homo sapiens
ctgcacacctccgcaccccacttccggcgcacttccgtacccctcttccggcgcactccccgcactccacttccgcagattagggggctggcacgagtcacagcacctcgtgcgtcacttgg

SEQ ID NO: 258377 - DNA, 122 bp, Homo sapiens
ggagatgttcgcggtacgcggccccggacccgtgggggacgtcgaggggtctcggggcgccgcgctcagctccccggccccgcggccctggacaccgctccaggaccctggcggctgggacc

SEQ ID NO: 258378 - DNA, 122 bp, Homo sapiens
tcctagttcccaatcccttaacttcccccagggacctggttctgtgctgaggcccctcaacgcagtcagacccaggttctaccctcaggagacccttggcctggtggactcagaaagaccgg

SEQ ID NO: 258379 - DNA, 122 bp, Homo sapiens
cggcgtgaggggggtgttggaagttgcagcggagctgggaccggagacccgcggcccccgcgcagcgatgggtctgatctgagccccagcctctccccctgcccaagagcagtagaggctgg

SEQ ID NO: 258380 - DNA, 122 bp, Homo sapiens
tgtggtagtcagcgtttccagctttgagggctatcgatagcctctgtcagaagcacttaacgctgccattgtagtgcagaagcagccgtagacaatatgtaaacgaatgcgcatgattgtgt

SEQ ID NO: 258381 - DNA, 122 bp, Homo sapiens
ggcagagatccacgtgcacttaagggcacccacttgaacacgcacacacgtaaatgcctgcgtgcacacttgaacacgcacacacgtaaatgctggcatgtacacttgaagacatgcacaca

SEQ ID NO: 258382 - DNA, 122 bp, Homo sapiens
gccctccagtgggctctgagggtttgaatgtttattctaaatgggctccaacacggagtgcgcgtgcgctcaaggaccagctggctaggagcgccttctctccccgaggggatctggaatgt

SEQ ID NO: 258383 - DNA, 122 bp, Homo sapiens
gcagactaggagaaaaatattgttcttatgcaaggaactggcaaaagccatctagatagacggtgtgagtagtagcatgaaatgtagtgtggacaggtaagctaaggccagaccaaagaaag

SEQ ID NO: 258384 - DNA, 122 bp, Homo sapiens
gaaatctgccacttggcccagatccacttctccaaggcctcctggcttatctgaagctcccgggacaactgaatattcatggctgattctgctctttgatgaaatgcagcttctttcaattc

SEQ ID NO: 258385 - DNA, 122 bp, Homo sapiens
gttcgtgctgcacctgctggtcggctttgtcttcgtggtgagtggtctggtcatcaacttcgtccagctgtgcacgctggcgctctggccggtcagcaagcagctctaccgccgcctcaact

SEQ ID NO: 258386 - DNA, 122 bp, Homo sapiens
caaggcgaaaagcagggaggctgtttcaaatcacgcccgccccctttttggaagaatgtccgccaaattcctgaggtgtgagaaggaaagcggagacggacggtcactgcagcacaggtgtg

SEQ ID NO: 258387 - DNA, 122 bp, Homo sapiens
gccccggaacgggccagcgtccgagcgcatgcgcaacagctcccgtttcctctgcgcgtccgagtgtttcatgttttgagtcccgcccgagtgacccaagccagtaccggggtgggcgcttt

SEQ ID NO: 258388 - DNA, 122 bp, Homo sapiens
ccccaggagcctgagaggacgtggcgtgaaaccctgtgggttagagcgacccgcaccttccgtttcccggagccgcctgcgtgaatgttcttcccggctctgctgccccctggaggctagtg

SEQ ID NO: 258389 - DNA, 122 bp, Homo sapiens
gcaaccattggataatatcgctgccactccagccaacggaaagccgcctttaagtagggtcgcgaaggaaggcgctgcctcgcgttggaggagcttgctctgagctgctgccacctgctggg

SEQ ID NO: 258390 - DNA, 122 bp, Homo sapiens
catcgccctggcaaacctggtgtccatttgcgtgagtgtggatttgccccagagctggcacggaagtgccggttcccgcccaccttgcaggggagcctgcccctcctgcctcgcccagcgct

SEQ ID NO: 258391 - DNA, 122 bp, Homo sapiens
gcctcgcgcatgcgcgtagctccctgggcgcttcgaagatccagcggcttgctgtgagtccgggaggcaaaattgtacccatttcaaagatgtgatgactaaagtctcgagagggccaaggc

SEQ ID NO: 258392 - DNA, 122 bp, Homo sapiens
gtaaccttgggaagtgacttcatgtctttgtccctcagtttcctcatctgtgaaatgtcccgaataatatctatacacagcagtgggaagagtgtctggtctttggtaagagctcaattgat

SEQ ID NO: 258393 - DNA, 122 bp, Homo sapiens
ggccgtggggagcggggcgggaagcgcttcagggcagcggatcccatgtcggccctgaggcgctcgggctacggccccagtgacggtccgtcctacggccgctactacgggcctgggggtgg

SEQ ID NO: 258394 - DNA, 122 bp, Homo sapiens
ccacagcctcagggtgtgcaggggagcctgctgcacagatatgatacaagggtgggatggcgcagggcttaaactgacataataaagatctatttcctgtcctccagctacacccacgagag

SEQ ID NO: 258395 - DNA, 122 bp, Homo sapiens
atgatccaccatgcccagcctgaaaatattgtccttgtaggcaggaaatggtctcttagacgtggtggttacatgtgggtaaaatgtcagtggctattatgtcctaacctgtattgtacctt

SEQ ID NO: 258396 - DNA, 122 bp, Homo sapiens
gcacaggggtgtggaggagagccgggccagcctcggactcagcctccctggagcccgagacgtccacttctgtggggtcccgagggaagcggatgtggtcctctcctagccagccacatttg

SEQ ID NO: 258397 - DNA, 122 bp, Homo sapiens
agtcctctggctcgcctgagtcatcctcactgtcctggcctgtctccaggctcgccgggtcggtcttggacagctcaacagccaggtcccctgtcccgtccgagtcccccgtcagcccagcc

SEQ ID NO: 258398 - DNA, 122 bp, Homo sapiens
ccgcgtggtgctcaacaaggccgacatggtggagacgcagcagctgatgcgcgtctacggcgcgctcatgtgggcgctgggcaaggtggtgggcacgcccgaggtgctgcgcgtctacatcg

SEQ ID NO: 258399 - DNA, 122 bp, Homo sapiens
cagaactgtgtgcggcctggtcgccgggtacctgggtctcggagaggttaagctgccgggcgagctcggtcctctcgcggcccaccacgtactggcagcgctggaactccatctccagccga

SEQ ID NO: 258400 - DNA, 122 bp, Homo sapiens
ccgaggcggtggcggcctcgctgctttcagttttcattgagtctgctggttactgtttaacgtccccacccacgtttcagtttgtttagtaaatcgataggactgtgagagtcaggccgctg

SEQ ID NO: 258401 - DNA, 122 bp, Homo sapiens
gagatgccgttacaccccacgtgatccctgcgcccggccagtccttccagaggcgtctcgcggggtgttaattaaaggtcacaacaaaacagacctgctggctcaccagaagaaatgtcctc

SEQ ID NO: 258402 - DNA, 122 bp, Homo sapiens
aagttttcaaatattaaaatgatgttcacttttttttttacataattcttcctcatgttacgctatttattatgatcatgtcatccctggcagggagagtgagtgagaggctgccctagccc

SEQ ID NO: 258403 - DNA, 122 bp, Homo sapiens
accgtcaaggaagataactgtggggtctgcaacggagatgggtccacctgccggctggtccgagggcagtataaatcccagctctccgcaaccaaatgtaagacacacagagatgggcgacc

SEQ ID NO: 258404 - DNA, 122 bp, Homo sapiens
gtccagcagtagcaaaaggcgtcaaggaacaacacccgctacttagcagaccaggaaaggcggggggggggggggggtctccctttccccgagggagtttagagaagactctgctcctccac

SEQ ID NO: 258405 - DNA, 122 bp, Homo sapiens
ttatcactaccccaagtactgattactcaatcagggtctccaaaaagtatagcatgttttcgttcaaacgcaagctaaaaatgacagccttgttcacacattgtaagactttacctaaatta

SEQ ID NO: 258406 - DNA, 122 bp, Homo sapiens
aagacttaggtttgtagcaactagagctgccctctgggaaaagggtgattttatcatcaacgactgctcaaactgggtttggagaacaacccagtatggcttttacagagcagagttgtgcc

SEQ ID NO: 258407 - DNA, 122 bp, Homo sapiens
cagactgattcaagctgcctttgcaaagtgcaattgtatacagacagttatggatctgagcgtgggaatgagttcatgctatcctttggaagattcttcgacttcaagagttatgggctact

SEQ ID NO: 258408 - DNA, 122 bp, Homo sapiens
aggctgctgaacgagacaactcgagggcagatgaggccactcagactgtctagagacagacgtcagcttttctccaacaggccaggtggaaggaggggggttggccgttaaatgctgcaaga

SEQ ID NO: 258409 - DNA, 122 bp, Homo sapiens
cacagttcccactccagtctgctgtcttctcccagctttttcccagcgccccgcctcccccgaccttacctagggacgcagccaggaagagagcgaagagcagggatccccagcgccagctg

SEQ ID NO: 258410 - DNA, 122 bp, Homo sapiens
cggggaggccaaggacagcagggagcccgatgcttgctcctcctcagcccagactccacacgccctccggcaccacttacaaaacaccgggggaggagaggattatcaggaggatttggaat

SEQ ID NO: 258411 - DNA, 122 bp, Homo sapiens
ggcctgtcagtctttggccacgctctcaggcccccctcgctgtggctgtgtgtttgcaggcgcccctcagactccaactggaatgtgtccgtgatggtgggaggccgggctgtggtgctcct

SEQ ID NO: 258412 - DNA, 122 bp, Homo sapiens
ttttgaagaaaaatactacatgtttccttttacagctcccatgtgccctaccggggaaggcgcaagatgccctctgaaagggtgacctatcccagcagttctaagccgccgttgcgtgtttt

SEQ ID NO: 258413 - DNA, 122 bp, Homo sapiens
cagcctcacgtccccaggcctggcaaggagatgaccagggtcgtttgcagtaatgaattgcggacgggtggcggccgggtgaaggagtgcgccggccatggcccgtaatgcctcacacgcca

SEQ ID NO: 258414 - DNA, 122 bp, Homo sapiens
taatctctaaaacccaacctagttttgctccaaggatactattccctggccctaccacagcgcctcctgtctaccctacaatgcaacagcaggcctcatagtattttactctccaccttaat

SEQ ID NO: 258415 - DNA, 122 bp, Homo sapiens
gttgtaggtgctggagatacggcagagaacaaaacaaagtccctgttcccgtggagtttacgttctaggagcgggtatatgtcagccaacagccggtagccaaaacacagaaattctgtctg

SEQ ID NO: 258416 - DNA, 122 bp, Homo sapiens
gcactcagttggcgcccgccctcctgctttttctctagccgccctttcctctttctttcgcgctctagccacccgggaaggcctgcccagcgtagctgggctctgattggctgctttgaaag

SEQ ID NO: 258417 - DNA, 122 bp, Homo sapiens
gtggccaagagcaagagccgccgcaggaagggcgccatggtggtgtcggtggagccgcaccggcacgagggcgtcttcatctaccgcggggcggaggacgcgctggtcacgctgaacatggt

SEQ ID NO: 258418 - DNA, 122 bp, Homo sapiens
tggggaggacgttggcgagcatccgcctgcccgtcagggagccacagctggatgatacatcgacagacagcagagggacggtgtagcacacaggcgagggcttgtcctcctcagcctggggg

SEQ ID NO: 258419 - DNA, 122 bp, Homo sapiens
cagcacccccgtctgctttccggagctgttcagactgcagggtaaatgctgtctggaacccgatccagggtttaaaaataatccaaaggtctgacccactgagatccttctctagatcttcc

SEQ ID NO: 258420 - DNA, 122 bp, Homo sapiens
atacatcattttatttaatatgggagggagaagaacagcagaaatagctccttaaagccccgttctacaggatgtagtggggaagagggaagctctgacgttagtctctcccttcatccatt

SEQ ID NO: 258421 - DNA, 122 bp, Homo sapiens
gtgacctaaaaaagacgggtcctcattttttttcaaggggtcctgcgcagcaagcacttccggggtcagagggtacgcggggttgaaagcgggcttcccgccccgcccagaccgccgaggct

SEQ ID NO: 258422 - DNA, 122 bp, Homo sapiens
gcccccacctgtgacctggattccgcggttcctgcgcgggggtggagggcgtaaaggacacgcgcaaataaaggtctgtggcccaggaaaacttcaagtcctgaaatcggtgcaccaaggat

SEQ ID NO: 258423 - DNA, 122 bp, Homo sapiens
tcacgatggcacacgtggctggcaggcaggtgggctcagtgtcatgtggaagcctggccacggttccgtgggcctgggttcccctccacatgggcccctctacgagctgctgggcttcccca

SEQ ID NO: 258424 - DNA, 122 bp, Homo sapiens
gccatgggtactgagtaccccctggtgaacgtgcccagccaccggggtctcacttgcaaccgctccagcacccgccaccacgagcagcccgagacctccaatatgtccatctgtaccaacct

SEQ ID NO: 258425 - DNA, 122 bp, Homo sapiens
ctccaggttacaggtcaagaaactgagactcagaaagtttgagtgatattcccaaggtcacgtgaataacgaatttcagagctgggctcaaacccaggtatcctcctccaggtcctaagccc

SEQ ID NO: 258426 - DNA, 122 bp, Homo sapiens
gagggtgtgtttcctaccacaggaacatgcagtccacccactgatgaggccgagaagttgcgggagggtgtgggcctctgttgagcagccagtgggagccttttagtggtgcctcctttatc

SEQ ID NO: 258427 - DNA, 122 bp, Homo sapiens
ggcgccagaagggagggcccctaggggctcaccccctgcctcaccaggtcagtgaaaaaacgatcagagtagtagtattccatgggcagcccacaggaccccaccccaccccctcacgggga

SEQ ID NO: 258428 - DNA, 122 bp, Homo sapiens
agaatgcaggtctgcgagcccctaggaccggaccataacgaccttaacagccataacggccgtaactgccataacggccggctgcgcgaggcccttccagcatttccactttcgtcaggtac

SEQ ID NO: 258429 - DNA, 122 bp, Homo sapiens
gaagctgcaccaggtggacaaggactcggtgctgtggcaggacatgaaggagaccaacaccgagttcatcctgctcaacctcaccttccccgacaacttccccttctcgccgcccttcatgc

SEQ ID NO: 258430 - DNA, 122 bp, Homo sapiens
ctccagacagaatgcatctgattcctgttggcgtgtccctaaatagctgaccccaagttccgttataatagcactagaacctttaacacttttgttagtgttgtttctggggcgtgcactca

SEQ ID NO: 258431 - DNA, 122 bp, Homo sapiens
aggcagccccgcccccggcccgcccccgcctttccattggctgccgcgcggggcggggagcggggtcggctcagtggccctgagaccctagctctgctctcggtccgctcgctgtccgctag

SEQ ID NO: 258432 - DNA, 122 bp, Homo sapiens
ttaggtgacgatgtcatctccgcgttccaagcgttatgtgcgcactgagggacacatccacgttcccggggttggatgtggaaggcagctaccccgacgggtgtgctctctgcatacgacgg

SEQ ID NO: 258433 - DNA, 122 bp, Homo sapiens
cgtgtgatacacagacgctctgaaacactactgcacacgcacaccaacatggggcctctgcggagcttgtgaaagaaccagatctggagggctggtcgtgtccctggtctcggccctcgccc

SEQ ID NO: 258434 - DNA, 122 bp, Homo sapiens
tgctttccccccgttgttttcctggaaagattccaggggtggagggtagcagggccatctcgggatggggtccttcatctagtaccacatagtaccacagcccacccaccgtcagttccacc

SEQ ID NO: 258435 - DNA, 122 bp, Homo sapiens
gtgaaacaatattttcattgatttgtaaaatttatgtatttatttatttgacacatgtatcgagttctatgcgttttgtcttagtattggtgatacagaaatgacgaaatcatgctctctgt

SEQ ID NO: 258436 - DNA, 122 bp, Homo sapiens
tggacgactgcccagagagctgctgtgagcccccctgctgcgccaccagctgctgcgccccggccccctgcctgaccctggtctgcaccccagtgagccgtgtatccagcccctgctgccag

SEQ ID NO: 258437 - DNA, 122 bp, Homo sapiens
gctgtaatacggaaaacttactacgctgctgtgggacttgtgctcgctccgccaggaggccgagggcgtctttagttcgttaacagaggagcaggcggaggcgggtggaatttaggaggttt

SEQ ID NO: 258438 - DNA, 122 bp, Homo sapiens
ggatcaatggcaatccatgtcccagggatgtgagctgcatcctcagggcagccagagctgcggggtgaggtttagagcctggactctctgctgcctggttctctcctctaacaaggatttgg

SEQ ID NO: 258439 - DNA, 122 bp, Homo sapiens
cttggtgcagcacatggtgagcgccatgcagaggctgggcttcacgcccagtgtcaccatcgagcagaggcggctggccgtggacctgtctgaagtcgtcatcaagtgggagctgcagagga

SEQ ID NO: 258440 - DNA, 122 bp, Homo sapiens
gcgcggttggggggcagtgagggtcgccgcgggggcgcgcagcagggcgggaacatggcgcgcggaactggcgcgcgcgcctacctggcgggaccgttagctcgaggccgacgcggccagga

SEQ ID NO: 258441 - DNA, 122 bp, Homo sapiens
atcacttcctctgggatgccttcctggattctccccccagaaaattatgtttctcctggtcgctgtttccagcacttctccacggtaattcttaggacactggatacttgctatagccccga

SEQ ID NO: 258442 - DNA, 122 bp, Homo sapiens
ctgggcccgctatcccacagggcgccaacctgcagcgagggacagcagcgcaaacacacccgcccagcaagagactcacggtaaccgccatgtcgacgcaaaccagccttcagcagtccgct

SEQ ID NO: 258443 - DNA, 122 bp, Homo sapiens
gggcgccccgggaggagtttccggcgcggggcggggtcgggggcggggtcgggggcggggcggggcggcgggtgggccccaccccccagctgagcccggccgggcggactcggactcgccaa

SEQ ID NO: 258444 - DNA, 122 bp, Homo sapiens
agggaatgtcctcaatgaaaccagactgaccctatccttgttcttcttactttcatggtacggccagccagactggcctaagccttcgaaaagcacaatgccatggggaagaggcatcgtgg

SEQ ID NO: 258445 - DNA, 122 bp, Homo sapiens
acttaaaactagtgcttccgaaaagggcgtgctgacagaagaacgtggagcagaaagacacgtggtggagaaaaagtcagtgttaaagagaagccatgagacggaggctgacatggccaaga

SEQ ID NO: 258446 - DNA, 122 bp, Homo sapiens
aggcaaccgtgcttcaacactgcactcagcgcagatattgctcacgggagggcaggttaccgatcctgaagctgccgtgcgtgtgtacagggatgaaacggcagctgggctcctcgttcttg

SEQ ID NO: 258447 - DNA, 122 bp, Homo sapiens
agctgcccccaccatgtgatggggccaccctgtgtccccacccctcggtcctgcctctcccgtgccaccctccccaggagcagccacagctccagcctgcactgggggcccagggctctgcc

SEQ ID NO: 258448 - DNA, 122 bp, Homo sapiens
gtaccccatagaagggccagaatcccaagcactgacaacacattcgggaaacgccgggagcgcaggttcattcctgtgggaagtggaacccgcaggccctgtggagaacagcttggcagctg

SEQ ID NO: 258449 - DNA, 122 bp, Homo sapiens
gccacggaaattaatattccaagtgattccttgctgggcttgctgtcaatgaggcaattgcggttcgctgagctgatggacacagtacccacccactacccgttagttcagggactgctaat

SEQ ID NO: 258450 - DNA, 122 bp, Homo sapiens
aacggaaaagccccaagcagcggcggaacggcgcgcccgtgcacaagtgcgacccgcgcccgtgtcccaaggaaagaagataaaagataaaacgaaaaatgccccggggctttgcggtgact

SEQ ID NO: 258451 - DNA, 122 bp, Homo sapiens
agatgctcctctaagtcattcccggtggcccgggcaggagtctgccactctgcctctggccgcagtctctcctgggctggccatccggtctattctgaatcaggctccctcttctgtgtgtc

SEQ ID NO: 258452 - DNA, 122 bp, Homo sapiens
ataatactttctaaaaagatgaactttagaagatgccagtgcctggctaatggcaccagccgcatgctggctgttgggaaggcgagggctctgatgctccgccctccgcgggtggggaagac

SEQ ID NO: 258453 - DNA, 122 bp, Homo sapiens
ggtatatttcttcctcaaacacatcttgctgtttcctcctcttggtgggcaggatgctaacgtggcacatgatacaggagctgttccacgctgctgctcacacccactcctgccagagaggg

SEQ ID NO: 258454 - DNA, 122 bp, Homo sapiens
aacctagagagacagggttatctaacagagtaagaaagccagggctggcttctttcccctcggaatgaagttcaagcctcctctgtcccataagtgcacaaatgtccaccgtgctaacttta

SEQ ID NO: 258455 - DNA, 122 bp, Homo sapiens
ctctcgctccttaggtaaccttctcccgcagtatcctggttcccatgctttctgtacccacgtgcctactcttgcaatctatacattgttcctgttcagcagagtttggatgaatacccaac

SEQ ID NO: 258456 - DNA, 122 bp, Homo sapiens
agattcagtaaccacctgtcaggaattttgtaaagacgtctacggccatatcaccctgaacgcgcctgatctcatctgatctcggaagctaagcagggtcgggcctggttagtacttggatg

SEQ ID NO: 258457 - DNA, 122 bp, Homo sapiens
acacctctgaagtgtccttgcaggaagttagtgaatcatttccaacagagcccttgctagcgcttaaatcaccaccaaaatcccttccccttccaaggtcctggtggcctcggaaccccctt

SEQ ID NO: 258458 - DNA, 122 bp, Homo sapiens
aaatcgtgtccttcggttctgtaaaatttggctgaattactttttcaataatttatcctccgttttctcggttctatctttccaaagttcctaccattgggtcattggatctcctgaatgga

SEQ ID NO: 258459 - DNA, 122 bp, Homo sapiens
gagccctggccggagcactgttgcgggatcttagcccagagagccccagaaggctgtgggcggccagagccggcctgggaggagggcaggagagggtggggttaggggaaggacgagaaaag

SEQ ID NO: 258460 - DNA, 122 bp, Homo sapiens
ggtgcccgtaagggtggagggagtgcaagggaggaggcttgccggccgccagggggcgagcgaggccaagggcccagaaactgcccgcaaaggcagagccggccacaggccaggttgcttgg

SEQ ID NO: 258461 - DNA, 122 bp, Homo sapiens
acccgcacctcggaagcgctcggggttcgtgcggacccggcagggcccgggcgccgccgccgcggcagggagcacacacgcgctcgcgcaagcagctaaatccatcaaagccccgcgcccgg

SEQ ID NO: 258462 - DNA, 122 bp, Homo sapiens
tatatgaaaattatatctcaataaacctgacttaagaaaataataaaacaaacctaaaaacgcaacaaggtgaaaataagtctaagaaaaaaataacttacagtttttccagttcaacggtc

SEQ ID NO: 258463 - DNA, 122 bp, Homo sapiens
gcagggccaagaactgcacctgggttctcaatttgttttgcaaatgagccctaaggctcacgtatatggtttgccttgtcacttttggacgtttccatcatcctcaacagatagtgatgggt

SEQ ID NO: 258464 - DNA, 122 bp, Homo sapiens
acagaggctcagagagacttaagaaataggcaaagccacacagctgggaagcagtggagtcggcctccagatctcatctctgtgaccagaatgggatgcagggggtggtgagtctcttgaaa

SEQ ID NO: 258465 - DNA, 122 bp, Homo sapiens
tcgcaatgagaccagggtgccctgctccaccgtccccgtcaccacggaggtttcgtacgccggctgcaccaagaccgtcctcatgaatcattgctccgggtcctgcgggacatttgtcatgt

SEQ ID NO: 258466 - DNA, 122 bp, Homo sapiens
ctgccaggtctgagaagccttgttctaaagcctgggagcgggtgtggtgtcctgggtcttcgttgggcagcaggatggcaggtggggctgtcccctgggggaggtgggcctatgtctagata

SEQ ID NO: 258467 - DNA, 122 bp, Homo sapiens
agggcccccctcaagtcggagcccaggtgcttacatcagaaagtcgccgacaactgcctgcggtggctgggaacgttgcttcatttccttttctagcaggatgcatgattgggcaagaactt

SEQ ID NO: 258468 - DNA, 122 bp, Homo sapiens
tggccaacatggtgaaatcccctgtctactaaaagtacaaaaacgatccgggcgtagtggcgttgcagtgagctgagatcacgccactgcactccagcctgggtgacagagcgagactgtct

SEQ ID NO: 258469 - DNA, 122 bp, Homo sapiens
ggacgcggccggcgcggggaagcctcccgcgactgagtgcgagcgagtgagcgctgcgggcggccccagcgccgtgctccaggcacccgcccccttcgcgcagcgcccccggggggccgtgt

SEQ ID NO: 258470 - DNA, 122 bp, Homo sapiens
atctgggtcagctgccccagttgggtagccttataattaggcagctctttattttccagccgctttacctaagacaacctgaagctttgaggatgactgagcagcagtttccctcaacagaa

SEQ ID NO: 258471 - DNA, 122 bp, Homo sapiens
accccagtccaccttccggaccatgctgttctcagcaatcccaagcaaacggcggccgaacgcaggagccagaagggagctcaaccttcacttacctggggggcagacacattcggatggag

SEQ ID NO: 258472 - DNA, 122 bp, Homo sapiens
gtggaaaagcggagggcaggagcctgtgccgtgcaagagctccggggagccaacaccgagcggcccttttgagagggtcccagcccctgagatgcgggagcccgcaagagggaacctcttgt

SEQ ID NO: 258473 - DNA, 122 bp, Homo sapiens
gcactgggcggcgttctccggctgcgtggacatagccgagatcctgctggctgccaagtgcgacctccacgccgtgaacatccacggagactcgccactgcacattgccgcccgggagaacc

SEQ ID NO: 258474 - DNA, 122 bp, Homo sapiens
ccttcactgacctcaatcgttgatttcggctgcacttcctatccctgggggagctttcaacgctccgccgtccaggccgccgggccccgcagcccgcgccccgctctctagggctgggcccc

SEQ ID NO: 258475 - DNA, 122 bp, Homo sapiens
cctgagagaggaagtcaacaggacggacgccgcgcaaagaaagagctcccgctgattgtgcgctgcccgctgcaaagaactgaataacatggtctgcaacgctccagacaaaaccaaaacgg

SEQ ID NO: 258476 - DNA, 122 bp, Homo sapiens
tcctctgcactttatgagaaaagaaacggaacttcacgttcagaaacggcctcccaaagccgcaatggcttctcgcagctcgctggccttccccaatcacgctttgagtctgcgcagtagct

SEQ ID NO: 258477 - DNA, 122 bp, Homo sapiens
cccgcccacacgcaacgaggcctggccaattgggtgtgtcgagggcctggagggcccgcccgtccccgctccgggccctgcgcttgtgcagcgaactgcaggagggaggccacgagggggcg

SEQ ID NO: 258478 - DNA, 122 bp, Homo sapiens
atttcctccccattggtttgtgatgtctgcattttcatccacaagagctgggaccaggcccgctcctgtgggccagctgctgcctcgtctgccctcttgttccagaagcccagggctatgct

SEQ ID NO: 258479 - DNA, 122 bp, Homo sapiens
tcagtcattccacatgccttagggatgagctatctgtgccatgacgagcgatttccttttcgagttttgtaatccccaaatactaaatactattatcaataaaagttaattaaggaaatgta

SEQ ID NO: 258480 - DNA, 122 bp, Homo sapiens
agatcggttccgcaggagctgggatcaccatcggggccgcggtggtgatggtgcttgtgccgctccttgtggcccttatgcttgggcccggccgcgctcaccgtcagaggcgagaaggtgaa

SEQ ID NO: 258481 - DNA, 122 bp, Homo sapiens
ctaccatatgaaagatttattaaaggagaagaagataagcccctgcctccaatcaaacctcggaaacaggagaacagttcacaggaaaatgagaacaaaacaaaagtatctggaaccaaacg

SEQ ID NO: 258482 - DNA, 122 bp, Homo sapiens
gcccagccagccccttacaaaactactcccagtggaaagtttttggcaatgggacggggccgcctgccatcctctgaacatggtttgagtgtggttagctgccaaccatgagacattttaca

SEQ ID NO: 258483 - DNA, 122 bp, Homo sapiens
tctcctcctctttctaagctcttcacattgaggcaaaggagaccccggcacctgcctccgcggcagccaggaccacactgccatggcaacagcgtgcctctgcgtcctccatccgggcctct

SEQ ID NO: 258484 - DNA, 122 bp, Homo sapiens
ttgtagtgaaaattctacaatcataaagccctcacttcttgttttttagagacagggtctcgttttgtcatccaggctggaatgcactggcaggatcatagctctcggtaacttcaaactct

SEQ ID NO: 258485 - DNA, 122 bp, Homo sapiens
ggagcccgggagtccctggtgggcgtctgtgttcctgcaaggagccagtggagatggccccgtgaactctcatcccccttgccttggtggggtctctggcaggtttatggagccgtacatct

SEQ ID NO: 258486 - DNA, 122 bp, Homo sapiens
gtaggacttgtttctaaaattatcagggatctgtcttcctcctatttgcttgagcagacccgccctgagtctaattgacacaccaggtgggtttatgggcttctccttcctcccaagcatcc

SEQ ID NO: 258487 - DNA, 122 bp, Homo sapiens
ctgtttcctcggcgaggccagaggcatcggacatctcagtgctcagggtcatagctgtggcgcggcggcggcggggcggcgcatgggggcgccgggctccgggctccctctgcgccccagcc

SEQ ID NO: 258488 - DNA, 122 bp, Homo sapiens
tgctctcaggattgtgagttccagacaaaccagaacccaaaaagtataagggtttaagggcgggaggagcacaggagtctggacagtcacttaaaggaactaagacttcaattaggtagctt

SEQ ID NO: 258489 - DNA, 122 bp, Homo sapiens
ttctttgcatggggggacacatcccctaggcagcatcatgggcatgtcgtgagtgacagacgcatatctaagttagcatgcaagattagaagcacaagggcgtcctggaggagtctgaagtg

SEQ ID NO: 258490 - DNA, 122 bp, Homo sapiens
ttgagggtgcggctgcaagagccaggctgcgagagcttagactgccggcccagagcctctcgaaccgccgccaaccccccgccacccctaacagcgtccgccttacgggcgccgccatcttt

SEQ ID NO: 258491 - DNA, 122 bp, Homo sapiens
ttcatctcccgctctgggaaccgggagcgccccctgtccaatcagctttcaaatcccctgcgtcagcgagtgggcggggctcacctagattccttggcctccgcttctccggcttggccacg

SEQ ID NO: 258492 - DNA, 122 bp, Homo sapiens
cctgtgtggctgctgtcccggcggcaatctctccaatcttatgtccctgctggttgacggcgacatgaacctcaggtacggatctgtctattccttgggcatctgtctcatcccagacgcgc

SEQ ID NO: 258493 - DNA, 122 bp, Homo sapiens
aaaaatgtgatttattagtctgacatttttaatagggcaaagctcagaggtttattgcaacggctttctagtgtccatgttgccctaggctgctaccaacatgcaaaagctgtcaagatatc

SEQ ID NO: 258494 - DNA, 122 bp, Homo sapiens
gcattagatgcaacagaatcgatgagtcaatttaaatcgttttttttcccagtctctaagcgaatggttgcataaagtcgtctccttcactaaaaggggagtgtatgtaggaacgtgatcat

SEQ ID NO: 258495 - DNA, 122 bp, Homo sapiens
actgaacggtgccgggcttcactgaggagactgcactgaggtcacagaccaggtggagcccggcttccctgaaggagaatgcactgaaatcacagaccgagtggtgccaccttctctgagga

SEQ ID NO: 258496 - DNA, 122 bp, Homo sapiens
gcttggcggccgctgatccccaaccccacaaccctgcggccggtgcgggcttagcaactgcggcctcgcaacctccttccgagacccgctccgcgaagcccgccgcgatccccgcgcgcccc

SEQ ID NO: 258497 - DNA, 122 bp, Homo sapiens
tgtgatctctatcaaaattctaacagcatttttcacagaaacggaaaaattcctgaaatccgtatgaaccataaaagatctcaaatggctaaagcaagcttaaacaagaagaaaaaactaaa

SEQ ID NO: 258498 - DNA, 122 bp, Homo sapiens
tgcgccagaagccctcggttaacggaaccgctctgctccaaggggaaggagcaccgaactcgagttagagcccagcacattaaccaggcacttgggtgacgccaggccacctccagcctccg

SEQ ID NO: 258499 - DNA, 122 bp, Homo sapiens
ctgccatctgtcactcgtagagctcctattatttgaataaatcctagctagttagctcaccgaagttccaattccacagtgcatgcctgagtcttgatgttatctaaatagcaaggagctta

SEQ ID NO: 258500 - DNA, 122 bp, Homo sapiens
gccctggagatggaccgggctccgcccccacacgcccaagagcgggaggcagaagccggccgaacagatggcaaaggctcaaaataaccgcaaaatgtaaataaggggttttgttcaaaaag

SEQ ID NO: 258501 - DNA, 122 bp, Homo sapiens
acctccgccaaacttttcctggcttcccggggagccgggcgcacggcagggagcgctgcgcgggtgaatttctgtgggtccaggatgtccaggacagagaaagaaatcttgtggtgggaggg

SEQ ID NO: 258502 - DNA, 122 bp, Homo sapiens
tagggtggagtccattcccccaaagggctctccttggtcttggggtagaagggaatggaacggtggctctgaagagatgtgtgctcaccagcatgagggtcttcagaataaagtaatctgct

SEQ ID NO: 258503 - DNA, 122 bp, Homo sapiens
gtggacggggacagctcccgcgtgatggaaggacatctctgtggacggggacagcccatgcgtgatggaaggacatctccgtggacagggacagtccatgcgtggatggaggacaactccgt

SEQ ID NO: 258504 - DNA, 122 bp, Homo sapiens
gcagaggatctaactgagctgattaacgcaagctgcctacaaacgacaaaactaaaagagcgcgctataacacatgcccactggggcttcaaaagagctgtaagcattcacccctaggcact

SEQ ID NO: 258505 - DNA, 122 bp, Homo sapiens
aatacactgagagaaagttccttctgctccagttctagcagcctccactgactacccgcccggtgaccgtcagccagccttcagccccagctgcacagaaatcagtcccatcttctcccact

SEQ ID NO: 258506 - DNA, 122 bp, Homo sapiens
cataaaaactggagggactcgtcccagagtttgctgccgccgccgccgctgccattagagcggttttaattagctgcaggatttttaatgagctgaaatcaagaagagccccatctcagaag

SEQ ID NO: 258507 - DNA, 122 bp, Homo sapiens
cgcggcgcgcgtaggggtccacgcccgccgtgggctcgtccaggatgatggcgcgagagccgcccacgaaggcgatggccacggacagcttgcgcttcatgccacccgacaatgtctgcacc

SEQ ID NO: 258508 - DNA, 122 bp, Homo sapiens
ccaaagcctgggctgccatcttgccccccgacgcaggggctggcccagcggcccagttcccggggcgctttcctgaacctcgcgagatctgatcacagcctccttgtccctgagatggctat

SEQ ID NO: 258509 - DNA, 122 bp, Homo sapiens
ctataatttacttagacaagcaagccatttgccttgaggctagacatgtaaacaaacacacgtctaaaggcttggtctgagttggatttttaataatttcttctcccttacacacacacata

SEQ ID NO: 258510 - DNA, 122 bp, Homo sapiens
agctttcatccttagtgaaaagccatggcttctagaaatgtctaccatctgatagtcattcgacaaatgtctattgagcacccatatatgccaggtactgttctggacccttgggatacatc

SEQ ID NO: 258511 - DNA, 122 bp, Homo sapiens
gctacatgcatgttcacgtgcctgtgtaggtacatgtggctgcgtgtctggagggagcagcgtgcgcctgcgcggggtctccctccagcctcgcctgggggcgctcggccccctcccctcgg

SEQ ID NO: 258512 - DNA, 122 bp, Homo sapiens
ctcgaactcgtgacctcgtgatccacctgcctcggcctcccaaagtgctaggattacaggcgtgggccaccatgcccagccttggctatatttcgtatagctgtgattcaatgcagattttt

SEQ ID NO: 258513 - DNA, 122 bp, Homo sapiens
ctcaggtgatccgcccgcctcggccttccaaagtgctgggattacaggcgtgagccaccgcgcccgacctccattaacgctttttaatggatgagtgaaggttcctgtcaggcaatgtcagg

SEQ ID NO: 258514 - DNA, 122 bp, Homo sapiens
tccttgttctggccttgttctgagaagcggcgggcagggtggccgttgccatgtgacacacggcctgattctgagaagcggcgggcagggtggccgttgccatgtcatgcgacacacggcct

SEQ ID NO: 258515 - DNA, 122 bp, Homo sapiens
cccagacttctgcaccgaggtgcagctcgacgcctccttgtcagggcttctccgcagaggcggggcttctgtgctagccaatcagcagcctcaccgccctctccgggccccctcaccacagc

SEQ ID NO: 258516 - DNA, 122 bp, Homo sapiens
gccccctcggtgccactgggagatttccgctgtgcgggggacagggagggtctcggtcgccgggaaaggagttatttttagagggcgctttgctgtctcctctgccgcaaaggccgagaccc

SEQ ID NO: 258517 - DNA, 122 bp, Homo sapiens
cgcctttctccgcgttcctaggccttccagccccttcactcttctcttttggctggccgccggcggccctcaccctgtcacctcacctgggccctccagagatctcctttccctgttcccca

SEQ ID NO: 258518 - DNA, 122 bp, Homo sapiens
agaacctcaagtcctgctcataattattcttgttaccacgacagatttttgactatgctgcgtactttctagggccctcattatattttcaaaaacattgctgacaattttctttttgacag

SEQ ID NO: 258519 - DNA, 122 bp, Homo sapiens
acaccagtgaatgggagagggtagtgaaggggacggagaaggacttgcaacctatcttggcgttccatgagatagaaagctaagttcttctcagaatggcaggaaacagaagcagtgacagt

SEQ ID NO: 258520 - DNA, 122 bp, Homo sapiens
aagcctgctctgctcaccggattccgcgagcctcccctccaactccaacgttcacctaaacgatgttcaaccaccacaaaccactggagcagaacaggccattcattaattcattcatgcag

SEQ ID NO: 258521 - DNA, 122 bp, Homo sapiens
ggcaggggcccccatttgcctggcactgaaattatattagtatctttactgtatgagcaccgtgcccatcagggcaagctgtgactcctgtcaccaaacactcaggaaccattgcttttggg

SEQ ID NO: 258522 - DNA, 122 bp, Homo sapiens
ttttctccagtggcccagatcttgagcccctcatcaaggagattgtccggcgcaatatcacgggcaagatctggctggccagcgaggcctgggccagctcctccctgatcgccatgcctcag

SEQ ID NO: 258523 - DNA, 122 bp, Homo sapiens
tgcactccagcctgggcaatgggagtgagacactgtctcaaaaaagaataataataatcacgttgaatatcagtggtttaaatgcacctaaaagacaaagattgtcagagtaaattaaaaaa

SEQ ID NO: 258524 - DNA, 122 bp, Homo sapiens
agggaaagagggctgcttcggtagccagccttccagatggggtcagtatgaacagcctcacgagcagctgcagtttaacccaaacaatcacacatgtttgtaagtgcctttggtccaacttg

SEQ ID NO: 258525 - DNA, 122 bp, Homo sapiens
gcctgggctttgcttgtatgcttgtttctctcctcagccagtcctgagcaccatgagcgccgggcttcatctgtctgccaaccactgtgttccagagcccagtttgctgcccaggactgaga

SEQ ID NO: 258526 - DNA, 122 bp, Homo sapiens
atgatctaacgaatttctgcaaaaattacaactaccccgcctttctcctaggtttcaaggcgactgccgggtgcgaaaggaaccgcacacccctcagaggcgaaagaagcgtttcagacccg

SEQ ID NO: 258527 - DNA, 122 bp, Homo sapiens
gtggttgaggtgatgcctttctgagaatgtacttgctattatcttgggtctgtttgtagacgtttctaatgaaacaaatctggatttaggtaaggagtgatttattttatttttatttattt

SEQ ID NO: 258528 - DNA, 122 bp, Homo sapiens
ttgtggaaagcgatggagaagagctcgctcacgcagcactcgtggcagtccctgaaggaccgctacctcaagcacctgcggggccaggagcataagtacctgctgggggacgcgccggtgag

SEQ ID NO: 258529 - DNA, 122 bp, Homo sapiens
cccaagattgcttgcctctcccagacatgcagggctgtgaatggggaagactacatatcacgggcaaagtacagggttaggggtcctggctctaccaccaacttccaagcttccttttccct

SEQ ID NO: 258530 - DNA, 122 bp, Homo sapiens
ggcaggcagcggggtggtggccttcacgctcggccctgaagtaagggggccctaatggggcggggagtggaccagtgcccctgagtgccggcctcctcatacatgatcagtgcaccctgagc

SEQ ID NO: 258531 - DNA, 122 bp, Homo sapiens
cagatgcccacacctgagaagtcttgttatatttgaagaatttatcattagagtttgaatcgacaggacttactgagagattagaagtgggttctttgtaagaaaaaaacaaccccatcaaa

SEQ ID NO: 258532 - DNA, 122 bp, Homo sapiens
gagaaagggcaaagtcaggagtgtgtcagcaccaaaggccagctcacctgtccctcccaacgtggacccctcctgcagccacctatgacaggcagagaaggtgtagaaggaagggatggtag

SEQ ID NO: 258533 - DNA, 122 bp, Homo sapiens
attcctggggtgttcatggagtgtctattgttggactagatcactctgttgtgttttttccgatgcagtggaaccacaactgccctcaaaagagggtcctgaaccaccagaagaggttcctc

SEQ ID NO: 258534 - DNA, 122 bp, Homo sapiens
tgccccgccctgcgggtggtttgctagtttcaagcactttgtgagtatggggtgaatcggcgtcggccttccactgtggggttaaatctcatcccgcggctctcctcctgtcggtcctgcag

SEQ ID NO: 258535 - DNA, 122 bp, Homo sapiens
atcatcgtcttcctcttcctcgtgggcagatcttctctggtgggggctggctgctggctccgagggggcatccgcagtccgtctggtcgtctcctcctgcaggctgggcagctggccaccac

SEQ ID NO: 258536 - DNA, 122 bp, Homo sapiens
cgccatgacggactgaacaggcatgggccaggtgtttccgggctccccacatctgcagcacgcgtgggccgggtgtttccagactccccacatctgcagcacgcgtgggccgggtgtttcca

SEQ ID NO: 258537 - DNA, 122 bp, Homo sapiens
ctggagctaaactctggcttcgtgcagcctgccacgcagctcggggactccggcgctgggcgaggaactcggctccaggtgcatcttgttaaaggctgagccccatttctcacatgcgttgc

SEQ ID NO: 258538 - DNA, 122 bp, Homo sapiens
ggaattttcaccttctgatatttaggagaaacatactctgttgtatttaaattatgaaaccggaagcagaactgtagtcttccagttaaaaagtcctttctgaaaagaaagaagactcttga

SEQ ID NO: 258539 - DNA, 122 bp, Homo sapiens
cagggcggccgcggctgggcaactacgacagcggagcccctggggaagccaagatgccgtcgaagggaaaggacaaaaagaaaggcaagagcaaaggcaaagacacgaagtaaggagaagcc

SEQ ID NO: 258540 - DNA, 122 bp, Homo sapiens
ggggcagctgctcccgggccgctctcacaccgggcgcgcggctctcaagccgggagctggcgagctgaaagcccgggataattagcgctaattacatgtgtgcaaacagccgcggcagaggg

SEQ ID NO: 258541 - DNA, 122 bp, Homo sapiens
tggcagcgcagggggccgcctagcgccggcgcttcctgctcgggctgcgggccgggcctgcgccagtgagcatgcctggctcgctgcagccccgcggggttgtcttttctgggttgaggagg

SEQ ID NO: 258542 - DNA, 122 bp, Homo sapiens
ataaattcaaaaatttataaaactatagtccagggtggggggctggcttctccacatctgcgggttttatctggagtactttatgcagtgactaagaatgtgtatttctgacaagccctcaa

SEQ ID NO: 258543 - DNA, 122 bp, Homo sapiens
cgagaagaagccactcggctcttggctgagaagcggcgccaggcccgggagcagcgggagcgcgaggagcaggagcggaggctgcaggcagaaagggacaagtgagtgcgcctcggggactg

SEQ ID NO: 258544 - DNA, 122 bp, Homo sapiens
tagatagtgggataagataaatgaatatcagtcttttttttgtactggaaatagcagattcggaaacatggcttggaggagaggctataattaggttacctaattgcttccccatgagttga

SEQ ID NO: 258545 - DNA, 122 bp, Homo sapiens
aagcgctagctgcgggggtctcggcgtctcggggaccattacaaaacgcagccaggagagcgcgtcgctgccactgccgtcgcctctcctcctcaagacaagcccgggagaaaggcggcagc

SEQ ID NO: 258546 - DNA, 122 bp, Homo sapiens
cgcgctgccccagtgaaatgaaatcctggtgcttgtggcgtgcgctgcgcggttccactccgctgtgccttcctttccgcccgcccccgacggctggacgcccctctgtcgattggagcggt

SEQ ID NO: 258547 - DNA, 122 bp, Homo sapiens
cttaaaataggcctctcttcagggacaaggtggccttataccaagccaaagtgctgagggcgcagggagacccgcgagacagggccccctgaagtcctggcggtttctagccagcctcttga

SEQ ID NO: 258548 - DNA, 122 bp, Homo sapiens
cactttcgtaacagcctttttggagcccttcttgggagcaggagcggatttcgctggatccggcatttttgcgcgaaaaaagagaacagagacttaaagaagtaatccgaactaccgcaaaa

SEQ ID NO: 258549 - DNA, 122 bp, Homo sapiens
gtcacctttaaagtcaattcctgtggttgaaatgaggactatatgcatctgtcctgcttccggctccaaccagaagtggtaatgaggagagacagacggatgcacaatgatagtcttcacaa

SEQ ID NO: 258550 - DNA, 122 bp, Homo sapiens
gcggacccaggggtgggggcagcggctccgccatcttgtggatgagaggccaagtgacagcgggagcttaatcgaggagggggctccaggcggcgcgcggggccctggagggaaaggggcgt

SEQ ID NO: 258551 - DNA, 122 bp, Homo sapiens
tataaacagatggtggtcaagcaaagattagttttgtttcatagagcatttgttgatcttcgtccatggtaagcaagaaaggaattccttcttgttaagggatacactccagtttctaatag

SEQ ID NO: 258552 - DNA, 122 bp, Homo sapiens
caagggaaccccttgaatctggcgagggcccgccatgagacgctcggggaaccagactgccgagcccccctctctgggccgacgccagcccggctgtggactggagaaaaccgcaaggccac

SEQ ID NO: 258553 - DNA, 122 bp, Homo sapiens
agtgcgtcagtgctctgcaagtcaccgcgtcacggagaaactacaatccccagaatgcttcgcggcgcggggctcgtgctccgcaaatcccggcctgcgtcattggagtctctttcactaga

SEQ ID NO: 258554 - DNA, 122 bp, Homo sapiens
cttggatggcctccgtgcctatatagctgtaggtactttactgcctagtcaccaccaccccgtatggaattgcagggttattgacctacctcccatgacggcggagaccatcttccatgtct

SEQ ID NO: 258555 - DNA, 122 bp, Homo sapiens
gtgggaacctcacaactcctgctgtgcgggccagaccattggacagttgctgattctgtgcgaagtggcctcctctcctgcacctggtcgcggtggcgcgcccccatctcccgctgaaaccc

SEQ ID NO: 258556 - DNA, 122 bp, Homo sapiens
atccgcccgcctcggcctcccaaagtgttgggattacaggcgtgagccaccgcgcccggtcggagaacagggactatctttgtaactccaatgccaaattggcatcatgtctggcacatagt

SEQ ID NO: 258557 - DNA, 122 bp, Homo sapiens
tctgtaaaccaccaccagcaacagcagccacctgggagcttattagaaatgcagaagctccggccccacccaaaacctgctgattcatctgcatttgtttttgttgttgttgttgtttgttt

SEQ ID NO: 258558 - DNA, 122 bp, Homo sapiens
taaaggaagctccatgctataagttccgcacctcgcttgaagtaggaaaaggccacggcacgcaggactcactgagtggctaccaaaagaaaccaacgctgagctatagcatggcaagctaa

SEQ ID NO: 258559 - DNA, 122 bp, Homo sapiens
tacctggggagttttcggcctagtcctgcccatgaaggcaccggcagtctctagctcagccgcccagtagataaagcactagatctagcctgcagaccacgcccggccctgctcacttcctc

SEQ ID NO: 258560 - DNA, 122 bp, Homo sapiens
ctgcatgctcaggctggggaggaaatgtcccacgagggccaggcagtccacaggagtgagcgtggcacagatgcagtctcagagagaggcaggagtggctggcacccgacctcgctcccatg

SEQ ID NO: 258561 - DNA, 122 bp, Homo sapiens
tcactcacacctcagggggccaacctctgggatttagggtgcgggtagcggtcgaggcttcgaggaccggaaggggcggggcggggccggtcactcaccactccgccgagcaggaccgcggg

SEQ ID NO: 258562 - DNA, 122 bp, Homo sapiens
cttagatgactaacagacaactcaaacttaatctgtccaaaacagaactcctgattagcacgtacctcataactcctttccgctgagtgtcctccatatcagtaaatgaccatccacccctg

SEQ ID NO: 258563 - DNA, 122 bp, Homo sapiens
gtttcccaggaacacctctcgggcccatctgcgtctgaggctgggagtggcatctgaggccgggagtggcatctgaggccaggagtggcaggctggtgggctgggcgtggggttttctgggc

SEQ ID NO: 258564 - DNA, 122 bp, Homo sapiens
tggagagtcagtcacacagccatagggagtcagtcacacggcctcggggactcaatcagacggctgtggaaagtcagtcacaccacaacgagtaagtcttgcagccgcagggaatcaaatga

SEQ ID NO: 258565 - DNA, 122 bp, Homo sapiens
caagctatagagcaaacccttcagcctggcattcaaggcctgcagtctgcccaacaccaccgaggtaacctatcacagatagcaaagagaccatggtgcaatttcagggaaaacaaaaaagc

SEQ ID NO: 258566 - DNA, 122 bp, Homo sapiens
tgctaagcccctcactgcccagggtcggtggcaccggctggccgcttagagtgcggggcccgccgagcccacgcctacttggaactctcactggcccgcaagcgctgcacgcagccctggtt

SEQ ID NO: 258567 - DNA, 122 bp, Homo sapiens
ccctgctgaccctgactttagacttctgacttctgtaaaatgatatgtttcttttaagcccgctggtttgtggtactttgttctggtagcactggggcactgacacacctgctctgtgggcc

SEQ ID NO: 258568 - DNA, 122 bp, Homo sapiens
acccctatgaaataacaccattattttccccacccagatggggagctcagtaggtagctccggggcccttcactttagtgtgtcagtggagcaccctcacatcccaggctgggcgccagagg

SEQ ID NO: 258569 - DNA, 122 bp, Homo sapiens
cccctcgtcgggcgcttcccagatctgcttgagtctatggaggaaaaactccgcggggtccgcgattcccatggccgcagccgcctgcggcaccaaggccatggccctcttcaagcgcacct

SEQ ID NO: 258570 - DNA, 122 bp, Homo sapiens
ttccggcgccatttctgtgcatttggaggtggggctgcactggggctcctggctcctggccgcgccgccttgcagcctacaggtcctgagtcatcttccaggcagcgggtgacctctccata

SEQ ID NO: 258571 - DNA, 122 bp, Homo sapiens
ccgggaagagaagggccagagctctttcaggcaatgatgtcatctgcaaggcgcgccgtacgcggttcctggcttcgcctcccagaccccatgccttccagttctcgctgtctatcctttgt

SEQ ID NO: 258572 - DNA, 122 bp, Homo sapiens
ccagagggagccggcagggcagcacacaccaggtggaagtttggctttgatcccaagagacggggacgatttaaatggggacgtgaggctaaatgcgtcctcctggccgtggtgtaggaacc

SEQ ID NO: 258573 - DNA, 122 bp, Homo sapiens
cctgagcaagaagcggggcggactgtggtggacgtacttgctgagcctcatcttcaaggccgccgtggatgctggcttcctctatatcttccaccgcctctacaaggattatgacatgcccc

SEQ ID NO: 258574 - DNA, 122 bp, Homo sapiens
acgtgcgcgctcccgggagccacgcaggctgccttggatgaggcgggagtgcgacttgggcgcttgcccgccacctggtggttggaaaaggaacagcacaatctgtattgaaatgtgctgcg

SEQ ID NO: 258575 - DNA, 122 bp, Homo sapiens
cccgcccagctctgcaccgggtctttcaagcccatttctcagacttggaaacggcggctccggagagtgaagtcactctctcagggtctctccgtctaaggggcgaaggtgaaactccgagt

SEQ ID NO: 258576 - DNA, 122 bp, Homo sapiens
tgctgtagaacaacaccaaagactgttactcatctgattgcccaattaagaacctgagagcggagtctgagaaaaattgaactaaatgctgctttacccacagttggtttcaaatggacagc

SEQ ID NO: 258577 - DNA, 122 bp, Homo sapiens
cctctcgaggggtcaccagctgtggggagtctgtcccttgcagacccctgacccaatgaccggtgaataaagtacgctgacacacagatattctgagggtcccaggtgcttacaggctccct

SEQ ID NO: 258578 - DNA, 122 bp, Homo sapiens
accggccccgcagcaggcgcctggaagatgcctggggagagacaggaaccaagccccgcccggcttggcagccgcagacccagctgccaccccagcggccgcagccctgcccgcattaccct

SEQ ID NO: 258579 - DNA, 122 bp, Homo sapiens
ccatggcgagaatccagctttgacctttattcaagagaccagatgggttgccccaggatccggctgccagccctgaggccaagcacggctggagacccacgacctggcctgccgttgccctg

SEQ ID NO: 258580 - DNA, 122 bp, Homo sapiens
gtcctggatggcagatgccatgcccgccccgcgaagctcaggctcaccaagcaagcaaaccgcagctggtttaggtagacagcagctgcccacaactgctaacagcctcgggtttcttttcc

SEQ ID NO: 258581 - DNA, 122 bp, Homo sapiens
tcccgacgctcctgggttctcttctgcccgggtgcagactacagcaggtgcgcagggcttcgcacacctctgctgtgggaagtgagtcatcttcgcttatgattgcatctggccaggccagc

SEQ ID NO: 258582 - DNA, 122 bp, Homo sapiens
atcagcgttattagcggccaggacagtgtggggggcgggcgggggtaaggggcctccccgcgcctcccagcccttcgcgctcggctccagctctttggcttccttccctgggcagctctagg

SEQ ID NO: 258583 - DNA, 122 bp, Homo sapiens
gcgcacaatgggccatggagttcccgttcgatgtggacgcgctgttcccggagcggatcacggtgctggaccagcacctgaggcccccagcccgccgacccggaaccacaacgccggcccgg

SEQ ID NO: 258584 - DNA, 122 bp, Homo sapiens
caggaggcttgcacggccgcctgcagcccgctgtgcagagcccgggccgaaggcggagctcgatgggaaacggccggccgaaggctcttgcaactctgccacaggcctgccttcccgggcct

SEQ ID NO: 258585 - DNA, 122 bp, Homo sapiens
cataaccctccctcacaatagcggagcacagtactcagcacccagtaaacactcatttgtcgaattgattttaagcctccgcttttcccccaaggagggcaatcaatcccttgcacgttttg

SEQ ID NO: 258586 - DNA, 122 bp, Homo sapiens
tgggcgccctcgcatggccgttcggtaacgacagactcgggagagggcaccgggctgggccgaagcttactgagcccccttggcccatcaagccgccccggcgggatacccgaggctgaggc

SEQ ID NO: 258587 - DNA, 122 bp, Homo sapiens
ttctaaaacctggacttacagccacgtaatcccagtaccccaaagcgatcaacgtggacgcgatactaccatcgagtcacaggccctgctggcataccgtaggtggtttccatagcacttat

SEQ ID NO: 258588 - DNA, 122 bp, Homo sapiens
agagtgcagggccccaagatggctgccaggcctcgaggcctgactcttctatgtcacttccgtaccggcgagaaaggcgggccctccagccaatgaggctgcggggcgggccttcaccttga

SEQ ID NO: 258589 - DNA, 122 bp, Homo sapiens
ggggggctcccagaagattcagaacatgtgaacggggtttgctgggtctgtgtggggtcccggagtgggggcactcacttggcctgggcctcgtccaggctctggtcggtgatggtcattat

SEQ ID NO: 258590 - DNA, 122 bp, Homo sapiens
ttagcccgggtccccatatttcgctcttctccgggctcagctgcctttctccgccggtctcggcgagtgctggaactgtcgccagaaagaagcaataaagtagcaaagtgccaaacatttac

SEQ ID NO: 258591 - DNA, 122 bp, Homo sapiens
acggtccctgcgggccttgtcctgattggctgggcacgcgtttaatataagtggaggcgtcgcgctggcgggcattcctgaagctgacagcattcgggccgagatgtctcgctccgtggcct

SEQ ID NO: 258592 - DNA, 122 bp, Homo sapiens
ctcctcttcaccgtttctctggcaggtcactgctggcctcttctggaggcctagatcagccgttgcctcctgtgtgatcccacagctggtctcccaaggagagccagccctctcctccctgt

SEQ ID NO: 258593 - DNA, 122 bp, Homo sapiens
agcacataaaccaatataaagcttagtgggtttccataagacaaacacctttgaattccacgcaggtcaagaatagaactttcccagccaccccaaaggccccatgaacctggcccagctgt

SEQ ID NO: 258594 - DNA, 122 bp, Homo sapiens
tggcacagttaagtgcccgctgcacagaagttgctgtcgtatttaaccttgggtgccacccgagcgccagcccgacacaggtgcagctcaaaaaagacagcccgagagcccttgcggccaag

SEQ ID NO: 258595 - DNA, 122 bp, Homo sapiens
tccttaaggtttcagtttatccttcctgcgctgtaccattcacttctgtacagtgaggctcgagtttggagagagagagagagagagctggctttgaaccacagggcttttttgtactagct

SEQ ID NO: 258596 - DNA, 122 bp, Homo sapiens
actgtggggcctgaaatgtgctccgggggcacctgcggccaaggcccccttccgaggtcccgctgcccctcccagactgcaccgtcccggatgccatcgctggggccccaccccgcccaccc

SEQ ID NO: 258597 - DNA, 122 bp, Homo sapiens
agggattccactgctcactggctcacccatggtctccagagccaggttaacccatctccacggacccccagggagatgcatgccatgacccccgtagccaccaacacccagagaggtgcata

SEQ ID NO: 258598 - DNA, 122 bp, Homo sapiens
cagtaatcacttccatcaagccggggtttccagttcccgctaggaagcgttggggacgtccgggcactgcgcacctcgccagtgccggttaccaagcgcctcctcccccgtctgtgggacaa

SEQ ID NO: 258599 - DNA, 122 bp, Homo sapiens
tcgccagcagtagcagaggcggcggcggcggctcccggaattgggttggagcaggagcctcgctggctgcttcgctcgcgctctacgcgctcagtccccggcggtagcaggagcctggaccc

SEQ ID NO: 258600 - DNA, 122 bp, Homo sapiens
tagaacattagtttttgttgttgttgtttaatctagtttctgagtaagacaacacaggtacgttgtacagtgagaactgataacgaatatcactgtttcatatgttaagttatctaaaatgc

SEQ ID NO: 258601 - DNA, 122 bp, Homo sapiens
acgaccctgagtggtcagcatcccccaacttcttagagggacaagtggcgtgcagccacccgagattgagcaataacaggtctcttctttttatgtggctcttccacctacacgtgcctacc

SEQ ID NO: 258602 - DNA, 122 bp, Homo sapiens
caataaggggcgggctcggtgctgatggacggtgctggtggccagtggagaggcgctggccgcacttcccgtcggggagagagtgtaatatggcgaagacctacgattacctgttcaagctg

SEQ ID NO: 258603 - DNA, 122 bp, Homo sapiens
gaccatcctggccaacatcgtgacaccccatctctactaaacatacaaaaattagtgggacgcggtggcgcgcgcccgtaaccccggctagaatcgcttaaacccaggagcgggagattgca

SEQ ID NO: 258604 - DNA, 122 bp, Homo sapiens
gttaaccctcttctggcgcaaactgctgtttgctctggatgaatcatggtcctttggcgacgccaggctccgggagagcaaagcaccgtgtcagggccatgatccggggtggcctttcactg

SEQ ID NO: 258605 - DNA, 122 bp, Homo sapiens
gcaggcccgtgaggcccacgtgtgtgctgtgacatccgtgtgtgatgtctgtgtgtgccacgatgtcttgtgtgaggcctgtatgtgtgctgtggtgttgtgtgtgacatctgtgcaggccc

SEQ ID NO: 258606 - DNA, 122 bp, Homo sapiens
acctacacaacagagctgtggtccctgagggaggaagattttcagttaagctctagtttccgaagctatctctgtcactgctgtcactggtgtgcttctaaagcagaactctaacttccatc

SEQ ID NO: 258607 - DNA, 122 bp, Homo sapiens
ctagctcgctccgcctaatggcgggccgcaccccgccggcgaagcccacgtttgtaggtccgccctcacgctgatctcttgcccaatcagcgagttcggcttcgcgaggttggtgcccattg

SEQ ID NO: 258608 - DNA, 122 bp, Homo sapiens
ggcaaagcccggagtgcgtgcggcagggctgaggtagctgggtggggattctggaacttccgaccgcttaagctcggcctctggcccccttggggcctagagctccttgagagatcaggggt

SEQ ID NO: 258609 - DNA, 122 bp, Homo sapiens
catgaacaaaatcggactcaggaaccatctgagggcttaagcacacctcgttccggcttccggatctgggccagtttcctctgctggaaatgtggcactggtccaggagaccttcaaggatg

SEQ ID NO: 258610 - DNA, 122 bp, Homo sapiens
ttccggccgcgtgatatgatagggtcagggcagcaaaggcccttgggcaaacgtccgagccgggggcagggcttctgcagagccccctcccctagccccttctaaagcccccaaaactcttc

SEQ ID NO: 258611 - DNA, 122 bp, Homo sapiens
taggaggggaccatcctatcctctaaggcaaattccagcttcttccctgaaatgtacatccgctactgagcctcagaatgctatttgttccacctacttccacagttttaaggtcttcagca

SEQ ID NO: 258612 - DNA, 122 bp, Homo sapiens
ccagaccactgccaggctcaggcggcggccgggctgggcgacggcgaggacgcaccggtgcgtccgctgtgcaagccccgcggcatctgctcgcgcgcctacttcctggtgctgatggtgtt

SEQ ID NO: 258613 - DNA, 122 bp, Homo sapiens
atcctcgatccctcccgctcacccggaccaccagactccgggatccctccaagaagtggccgaagggaggtaaagcgcacgaactccactccggtgccaaaggccaggatgaaagaggcgag

SEQ ID NO: 258614 - DNA, 122 bp, Homo sapiens
aaagtgatgggtgagcttcagctggttgcagtggaaggtgtgctggatggattgaggaggcgagagggtgcaagacagcccatttaggaggcagttcctgcaatgtgggcatgaagtgttac

SEQ ID NO: 258615 - DNA, 122 bp, Homo sapiens
cctggagccccccattttggtgtgtgggcccccggctcgtggaggctcggtgctgggggccggaggggcagcgctgggggcggtgggtggctcagcaggggtggggccgggggctggggggg

SEQ ID NO: 258616 - DNA, 122 bp, Homo sapiens
atcacttatcagtcgggggcctgagcagcagagtgttcctcagccctgctgagctgtcctcggtgggtctgagccagctgcgaacagaggccctttgtctcagaacgtctctttggccaagt

SEQ ID NO: 258617 - DNA, 122 bp, Homo sapiens
gaaatgtggagggaggaagggtgtgcctgcctgctccttcccctcccttgcagggaggggcggttgccctcagcaacagaatgcccacgtgggatactggaagcttcagcttaccccacccc

SEQ ID NO: 258618 - DNA, 122 bp, Homo sapiens
gaacgatgggcctgcgccacctgcccgtggtgaacgctgtgggagaggtgagcgaggccccggccctgcccccacctttgagagaggatcccctagccaggtgctgtttgtgcacccaggct

SEQ ID NO: 258619 - DNA, 122 bp, Homo sapiens
gtctgtggctttcaagggcaatctgaaagggaactaggtctgatacgtgttgattggattcgcagtttagcattctccttattgaggaaatactgcagtacccaagatcttggctgtttcca

SEQ ID NO: 258620 - DNA, 122 bp, Homo sapiens
aaaaaccaaacacgaataaaaataaaaccaccagaggctcttagacgaccgtaaactctgcgggtggggcacgaaacaaaaataaacacagggacaggcgggcaagagagcgcgggaggagg

SEQ ID NO: 258621 - DNA, 122 bp, Homo sapiens
tttctcataaagatgccagactatgcaagaatgctggaactcagattccaacatgtatcccgaagcccaatttccatgatccagaagaaccaaattttgcccatgtctattcagcttatata

SEQ ID NO: 258622 - DNA, 122 bp, Homo sapiens
cgcccgggaaggcggaggggggcggcaggcccttctctgacaccctcgacgagcgaccgccgcaggggcctaggccacccctgcccacctcggcctggcccgctcgaaggttccgcgttccc

SEQ ID NO: 258623 - DNA, 122 bp, Homo sapiens
ggctctttaatcattcctgacaggcctctgctttctgcttggccaggccccagcaaacaccgttgggctccaccgccctcggctgctctccctaagtcctctctgcccggtaacacagctca

SEQ ID NO: 258624 - DNA, 122 bp, Homo sapiens
agtggaagcccgcagcagcccagtatgaggtgggcaggggccctgggccagggctatggccgtctggtctgtctccaggccctcaggccacctcctggcccctgcgctgccccttacacggt

SEQ ID NO: 258625 - DNA, 122 bp, Homo sapiens
actggctggtgctgggtgagctccaccgctgcccgggctgcgagcctgacggctgtgtgtcgggaatgacgagacccaggcttgcaaagacttgcacggcaactggaatttatgacaaatag

SEQ ID NO: 258626 - DNA, 122 bp, Homo sapiens
aattaaaaaaacacttcggtttcacaatataaacagaacaaaggcaatcccctccgtaagcgtaaacgaatgatgcactcaccaaatatctactctgtaactaacctaagcactgtgtgccg

SEQ ID NO: 258627 - DNA, 122 bp, Homo sapiens
ggcgggcgcagcgcagcactcgaaccaaagaggggtcctgggatgagggtgcgggcacagcgcggaaggggggggggcagaggcggggacggcggggtggggggcggggagaggacagtggg

SEQ ID NO: 258628 - DNA, 122 bp, Homo sapiens
ttccataaatagcagagattcctgaaaggctttgaggcaagctctgagaggtagccatggcgatgaggtacctcttggctccctgctgccagagagaggctgcttgctgtctcttcccaggg

SEQ ID NO: 258629 - DNA, 122 bp, Homo sapiens
gtgctcaccttcagtgtggagacgacctcgtcgccgttgtccttggtggcgatggcataccgcatgacgcggtcagggtcgatgactgtgtcccccttctcccagcggatgatgatgggccg

SEQ ID NO: 258630 - DNA, 122 bp, Homo sapiens
atacttatttagaccaagctattaatgtttagtggcagaaaagtggctccctttctcattcgattgaatgatgaaagcatgtctgtttccctgataagactgtggccagcttggctttcggt

SEQ ID NO: 258631 - DNA, 122 bp, Homo sapiens
tgaggagcggggactgggcagcatttgaatggatgcgggtgccgctggcacccgggaagacgcctgggagccggcgctggggagccgggcatgggctgggatgtgtttggattccaatctgg

SEQ ID NO: 258632 - DNA, 122 bp, Homo sapiens
attacatatagcttttctaagagtgtttataagaaggcttctccatcaaattaagaaacacggtaggcactaaaatataaaggagaattgattaatcacactgtgctttgtaaatggtaaga

SEQ ID NO: 258633 - DNA, 122 bp, Homo sapiens
gagccttcagcccttaccctcgtacgcctcccagtgttgttatagagacagaaaataacacgataagtaaatgcaatacctattagatggtgaaaaaggctaacgagaaaaaattcggtagc

SEQ ID NO: 258634 - DNA, 122 bp, Homo sapiens
tcttcacatcctgaagttggtactcttgtcaatcataattaccctaactgtgttcactctcgttattctaggatacattatattttttggtccggccacttcactaaggccatcttcatgaa

SEQ ID NO: 258635 - DNA, 122 bp, Homo sapiens
tattatgtactaaacagtctcccatacgtgactccttttaattatatggcagtccaaaaacgcatgaggattagtattcccattttaatggtctagaaaacagactcgagtctgccaaatga

SEQ ID NO: 258636 - DNA, 122 bp, Homo sapiens
cattcagaaaagactcagccgcagccggcgatgtgtgaagttcccagcacgcactcagcccggctgctcctcaccctcaaatgttgatgagcctgggcgctcctcaacacacgggagagatc

SEQ ID NO: 258637 - DNA, 122 bp, Homo sapiens
ttgacgacttcccgggcaaagccatcctaaacatacaaccctctcttcgcagagaacccccgtttctcataaagtgatagaaaagcggaggagggacaggatcaaccgctgcttgaacgagc

SEQ ID NO: 258638 - DNA, 122 bp, Homo sapiens
gtatgtgtggtactcagggctcccggcagcccgaagccagagtgtgtcctcaccctgccccgggtcagccctgtgacctggagggagcaactgaaaagctctgggcctcggattcctcatct

SEQ ID NO: 258639 - DNA, 122 bp, Homo sapiens
aaatttagccaatggtctcctcctggtacagccaaatttactgaaccctactgtggaaaccgtatgttagactccataagaacatacacaatatatatacaatagctgctatcatcaaaaag

SEQ ID NO: 258640 - DNA, 122 bp, Homo sapiens
cgccccgccacggaggcccgcgggagagggggaggggaggaagtgccgaggggtgtttgtcgggcttggcattattaatttttaaatggtgaacttacaaaatagtaacgacgagtgaaaag

SEQ ID NO: 258641 - DNA, 122 bp, Homo sapiens
gaagtgggaggatctcttgagcccagaaggtcaaggctgccctgagccatgagtgtgcctcggtactccagcctgagtgacagagtgagaccctgtctcaaaaattaaatgaatgaatgaat

SEQ ID NO: 258642 - DNA, 122 bp, Homo sapiens
cactagttaacaatgatgcctccggtgtttaaatcatagctcagactgctttcttcaagccgacactcaacaaatctggtctgtttccaaggatctgtagccgaccccttctccccctcccc

SEQ ID NO: 258643 - DNA, 122 bp, Homo sapiens
ccggacgagcgcagatcgtttggtcctgaacatgcggggcgaggaggcgaggagaaaagtcgtttgcctgctaaggagcgaacatgacctccgcacaccatgaagaagtcgggcgccgagtt

SEQ ID NO: 258644 - DNA, 122 bp, Homo sapiens
aggctaaaaccatgatacaccatggctagcctttccaatctatcaccctagaaaccctgccgaaaaagtgaaatgaggttagcttgccatggctttttctaagagacctcctgctggcactt

SEQ ID NO: 258645 - DNA, 122 bp, Homo sapiens
tcacactgcaggggaaggggaaactcacatagggaagcaggtgggggaggggtgagctcacggcaaatctgcaaagtaaggcacttcagggtgaggaatgtgatcagacactaatgaagtat

SEQ ID NO: 258646 - DNA, 122 bp, Homo sapiens
gctagtgcgcctgcgtgccggcccatccgcgcgccttgcagctgtccttgcgtcggccagcggccagacagttcctgcagcgcttaccgcctggcctctcggttccgcggcgcaccggaggg

SEQ ID NO: 258647 - DNA, 122 bp, Homo sapiens
tctcatggcgtcctccgtggtgttacctaaaaataaagttatttgtgattagaaggtaatcgcctcctggtcatgcttccgctggtcaacagtgtctgcggggcgaccccatccttgtggcc

SEQ ID NO: 258648 - DNA, 122 bp, Homo sapiens
actttaggaggcaaaggccccacgtggacatcgcctccctcctgcagaagaactgtgagacgactgccccaggaataaacccagagtcccaaaacaccataggttccgctcccctgtttgtt

SEQ ID NO: 258649 - DNA, 122 bp, Homo sapiens
ctgctatgaccaggccttccccatctcccacatccgctactgggtgctgcagttcctcttcgtcagcacacccaccctggtctacctgggccatgtcatttacctgtctcggcgagaagagc

SEQ ID NO: 258650 - DNA, 122 bp, Homo sapiens
actcacttgctcttatgtttctttccacagctgagtgctgtccaggaggcccagttaaagcggctcgaggtgacaagaccccgagtgctggggagcagggagcagggccaggtgccgaggat

SEQ ID NO: 258651 - DNA, 122 bp, Homo sapiens
gagaactataaaagaaagaaaaggccttgttcccatagcccacaagagggctgagctcagcgatacactctgtgtggctcaggagcttctggcagagcacagagccatcagagagggggccc

SEQ ID NO: 258652 - DNA, 122 bp, Homo sapiens
cgagtcccctctcctcgtaggcctctcggatctgatatcgtggggtgaggtgagcaggcccggggagggtggttaccgctgaggagctgcagtctctgtcaaggtgagtgggactgcgcggg

SEQ ID NO: 258653 - DNA, 122 bp, Homo sapiens
catcccccccaccctggttaccagcctcccccgttgttaggagccagaccggaagtggcgcgcatcttcggcgccgccgagaaatttctcacggtctctcgctgccccagggcgccaaaagg

SEQ ID NO: 258654 - DNA, 122 bp, Homo sapiens
tggccccgaatccttcccttccgaccctggaactcgacccaccccttgccaaccaagccacgcctagctctggccacgccctctccaggccgcagtgcctgcaagctccagcataaacctgg

SEQ ID NO: 258655 - DNA, 122 bp, Homo sapiens
ggccctagctactccatcacccgtagctgtagactgcttcttcagtttatttttcaaggccgagacctgcatgacagagaggaacagttaaattaacacctcagaaattggtacagcgaggt

SEQ ID NO: 258656 - DNA, 122 bp, Homo sapiens
caaagaaaaaataagtacacacctaagctctagacttttgttctatcctctctgcattttcggtgtggatgaatacaacttgggaagaaaggaaagaagaaccagcagttttaagcacttac

SEQ ID NO: 258657 - DNA, 122 bp, Homo sapiens
aacggaactaaaatttcaggctcgacaccacacagcgtgtcgagatcagcacgaacttggcgctgtgacttttccttagaggggccacttaggcttacacttccggatcctgggcacacaga

SEQ ID NO: 258658 - DNA, 122 bp, Homo sapiens
cagctggaatcggatggcagcgctgggcagggactcggagctcatctacttcacatctcacgctccacaggactccttcccgggcggcccttacgacacccacctcgtcccagcccgagcat

SEQ ID NO: 258659 - DNA, 122 bp, Homo sapiens
ccgagaatgccactttcccatgttgccgtgagccccatcctggcgggggagcctttcagacggtgctgctggaggctgtcgtccaccatcccgtggaccgtgggaggtcatgggattttccc

SEQ ID NO: 258660 - DNA, 122 bp, Homo sapiens
ggccacggtcacagtctgagccagaatcaagtgcatcctgcacctgggtcctccctccaccgcaccattggccagcccatgagcctgtcagacttcccaaggggcaggggctgtgtgtttat

SEQ ID NO: 258661 - DNA, 122 bp, Homo sapiens
agatggagctggagcaggccaacgagagggagtgtgaggtgctgaagaaaatctggggctcggcccaggggatggactccatgttaaagtacttgcagaggaagatcgatgagttctgagtg

SEQ ID NO: 258662 - DNA, 122 bp, Homo sapiens
ctggtgggcttcattctcaggctgcatcatgggagtgcagtagcagcagaaggtccagctcgcctggtgcttccagtgtcaagttctataggaaggaggcaggcctgaggccagatggcagc

SEQ ID NO: 258663 - DNA, 122 bp, Homo sapiens
aggaaataggcagctcaccctgccacctgtgcacacatttttcttcaatgtatagttcctcggcgcgcctctgaccttttcccggagctcttcaatcccagaagctatagcacaacggctga

SEQ ID NO: 258664 - DNA, 122 bp, Homo sapiens
tcgcagcaggggtgaagggagcggacgggaagcgatttttgccgactttggattcgtccccggcgtgcgcaagaatggcggcccttcccggcacggtaccgagaatgatgcggccggctccg

SEQ ID NO: 258665 - DNA, 122 bp, Homo sapiens
gctaacacggtgaaaccgtctctactaaaactacaaaaattagccgggtgtggtggcggtcgcctgtagtcccagctactcgggaggctgaggcaggagagtgacgtgaacccgagaggtag

SEQ ID NO: 258666 - DNA, 122 bp, Homo sapiens
agagcccatatagcaggtgggctttaagagataattatccagctcagaccgggagtgagacgggactgttttttcattctaatgcctctctgggcctgataatttaaaggggcttgcattct

SEQ ID NO: 258667 - DNA, 122 bp, Homo sapiens
cgagaggacacagcggcagtgagatcctgccaatgggaagtggcctcatgggcgctgggtcggccaacccccaagctgctagtgcctgagttcccagaacagtgagaaatccatatctgtga

SEQ ID NO: 258668 - DNA, 122 bp, Homo sapiens
gtcccccacaggttagaggtgagacggaagccatcgtgagtttgttttttcagcgagtgccgtttcctaggttggatgacaagccagctttggtggcccttcgctctcgctaccctaataaa

SEQ ID NO: 258669 - DNA, 122 bp, Homo sapiens
cagggagggggcgggggcggagccgccggcgggttttggcgggggatgggaggataaacgcggcttcttgggtccttctagccccgctccccaagagcgcaagcagccctggcgggtggaga

SEQ ID NO: 258670 - DNA, 122 bp, Homo sapiens
ccgtttgaggtggacagcctacaagggcgggacccaacgcctgaatcctggggtgctgggcggaggatgctgaggctgcagctccaggaagggagggagcctgggggatgaaggaggggcct

SEQ ID NO: 258671 - DNA, 122 bp, Homo sapiens
ccggccctagcgcgcatgtctgcacgccggggtctgcgcgccgcggcgggccgagggcggcgtgcgggccttccagccgctgcctattccacccaacgccggcctagtcagtaatggctcaa

SEQ ID NO: 258672 - DNA, 122 bp, Homo sapiens
tctttgtgggagtggattttgagaagtgctaattccgtggcagtttggagatattaataccgtgctggcagtagataaacagacatccgaggggcatataatgagaagataatcagccactg

SEQ ID NO: 258673 - DNA, 122 bp, Homo sapiens
caatgatttctgaatattcttagaaggtgttgccctggtgagaatggttatagccaaaagcggagaaaaaaattcttgggctcgaaatctttgaacattcatccagcatcccatcctttacc

SEQ ID NO: 258674 - DNA, 122 bp, Homo sapiens
gcctatcaccggagctggcctccattggggacggccccccggacacaccccggtgcctcgcgccgctcactggcagaccccacttccgcctctgcgctctcagctcccggcgtccctggggg

SEQ ID NO: 258675 - DNA, 122 bp, Homo sapiens
actgtcgtcactgcccggccttccagagacgcccttgtcgccatgtttgttgtgggcaggcgcctgaggctgacggctggcaagcagggcaccgcggtgcgctgaagctagagattccgaaa

SEQ ID NO: 258676 - DNA, 122 bp, Homo sapiens
actcggtcaacagaaaacgaggctgcgaagaggctcaggctgatgtcctggagacgtggacgggtccccatgggcaggcccagccccactgcctagcccagctgctgcttcactgtccactc

SEQ ID NO: 258677 - DNA, 122 bp, Homo sapiens
atgggaatggaggccgccgtgatgccggccgctaactctgcttggtgctccctgggtgggcgcagttctgagccccttgcaaacgctctgtgcgtctccgcagcggcgctgtgtgcagatgt

SEQ ID NO: 258678 - DNA, 122 bp, Homo sapiens
tctcgtggggttccgcggtgtcgtcgctggctgtgcgcgtcatttccgggcgtcacgtaacggagtggccaacggcctgcagagcaacatgcccaagtgagtggggccccgaaatctgaggg

SEQ ID NO: 258679 - DNA, 122 bp, Homo sapiens
tgtcgcccggttagccttctgtgcagcgggagcaagactttgcacagtggcgggaggactcgggaagccctgagccagccactagagggggataggatctattccaaggagaagcattacat

SEQ ID NO: 258680 - DNA, 122 bp, Homo sapiens
aagaataagaaccctaactctgcttcctgactgtggtaggattcgcgcaaactgaagattcgaagggtttccagaacttctggtccctctccctcgccgcctttcctaggtttggaatgtct

SEQ ID NO: 258681 - DNA, 122 bp, Homo sapiens
ctggtgggacccgttgagggtacagagaaaacttcaggccccaaggagcaggaccaaccgcgctctgcaaaggcagagtggaaaccaggggcctggggcttccccaggctattgtaggggag

SEQ ID NO: 258682 - DNA, 122 bp, Homo sapiens
ccaaaagctccggcccggaaatcccatcctccacccgaagaaaaccccattttcctttcccgtcaccttcgttcggaagccccggggaagcccagaccacccctccacacatgcacagcacc

SEQ ID NO: 258683 - DNA, 122 bp, Homo sapiens
ctttttccttcaccataattttagagatgagaaaatggatccctaagatccttgggctttcgtagttagacaaagatggtgctaggtccggatcccaagcctcttgtcctctaaggctttca

SEQ ID NO: 258684 - DNA, 122 bp, Homo sapiens
cgtgatctgcctgcctcagcctcccaaaatgctgggattacaggcatgagccaccatgcccggcacatattcactttaaatatgtaaaatgtgggccgggcatggtggctccttttgggagt

SEQ ID NO: 258685 - DNA, 122 bp, Homo sapiens
cgactctgcagaggcgccccaagccttcactgtccccggggcgcgccgagcggacgctggcgaggggccagctcacccccgtaagggtctcctgtgtgctttgtaaaccagcacttggagtc

SEQ ID NO: 258686 - DNA, 122 bp, Homo sapiens
gttaagatggcaggtagttagtactgtatttgcttaacctactcaactccagaaatgccacggaagatgtgtgagcctttaagtaaacctgagctttttccagtgtatgtgagatgcctcaa

SEQ ID NO: 258687 - DNA, 122 bp, Homo sapiens
tggtgtccgtggcagaagcctggacttcaggctgttgccatgggaagttcccttacctcacgctccctgaggatgcctgaaggtaggtggggctgggaaactgaggcacaagagtctggcca

SEQ ID NO: 258688 - DNA, 122 bp, Homo sapiens
cgggcgagctcgagcagccaaccccgggcgcgtcggggccatggacggcctgaggcagcgcgtggagcacttcctggagcaaaggaacctggtcaccgaagtgctgggggcgctggaggcca

SEQ ID NO: 258689 - DNA, 122 bp, Homo sapiens
ggtcccaggggccctctgacatccgagaggcccgggctggggacccgctggccgggggagcgtctcctggaagtcccgtcccccaccgacctgcatggtttctgcgctcgggacttgcaggc

SEQ ID NO: 258690 - DNA, 122 bp, Homo sapiens
aaaaaaaaaaaaaaaaaagaaagaaaagaaaaagaaagagaaaaaaagaaaaaaaaagagcgagagtataattcaatggcttttagtatattcagagttttacaaccatcaccacaattaat

SEQ ID NO: 258691 - DNA, 122 bp, Homo sapiens
tgccggctgcctgcaaggtggagggcagacacctggtctccttccggtaggtcatgcgaccgggatgagtctgctgcgggtgtggttccgggcgttagtgtgggccagcgtcacggaaggcc

SEQ ID NO: 258692 - DNA, 122 bp, Homo sapiens
ctgaacccaagcaatccagtccatgatgcttggcctgtttcatgccagtatcacatatgccgccaaaggactcgcagtgctaagaccatcacacctcataactcttgctaaataccagggtt

SEQ ID NO: 258693 - DNA, 122 bp, Homo sapiens
cggctaattttttgtatttttagtagagacggggtttcaccgtgttagccaggatggtctcgatctcctgacctcatgatcgcccgcctcggcctccccaagtgccaggattacaggcgtga

SEQ ID NO: 258694 - DNA, 122 bp, Homo sapiens
agctcctacttcttgaaacccagctcagccaggcccccgcgtttccaggacacttgccgtcggagccctaccaagacttaacacagatgcaggccaaggctacgcggaacctcattttccca

SEQ ID NO: 258695 - DNA, 122 bp, Homo sapiens
ctaaacaggctattaaaatatcacgagaatatcacagagctggaggctattaaaatatcacggaggggctgggcgtggtggctcacgcctgtaatcccagcactttgggaagctgaggcagg

SEQ ID NO: 258696 - DNA, 122 bp, Homo sapiens
tctccgctccttcgtccagtccctcccccagcctcggcgcaggggggccgggcttggctccgcgaggcccgtgcattccagagagcccagcgagctagagcaacaaaggagccgggtcgccg

SEQ ID NO: 258697 - DNA, 122 bp, Homo sapiens
ccgaggagagcgtagcctcctgttaacgtagcctcctgctgctctttggggtagaccagccgtttccacgcacaggctgcacattgtttcatggcctttgcagttgagcttgtgttggcctc

SEQ ID NO: 258698 - DNA, 122 bp, Homo sapiens
agccccacgcctgcgcactgcgagcactggaccggcgggcggggcggggagcgcctttaacgcggctctgctagtgttcccacccccgccgggccaaccccgtgcgcaggcgcactccgcca

SEQ ID NO: 258699 - DNA, 122 bp, Homo sapiens
tatggctttgggaggtgatgaaagtgctgctttcctgtgagtgtctttggggagcacacacgctcttttctgccggatattctccacccaaggggtcgccggtcatcgcagatgtgcttgtc

SEQ ID NO: 258700 - DNA, 122 bp, Homo sapiens
caaatggaagaggctttgaggccagggcagccaggccctgcgcactcctgggaagccccccgctgccatccaccttcagcgcggtctccaggaggggccccaggcttactgttccatgcacg

SEQ ID NO: 258701 - DNA, 122 bp, Homo sapiens
gtgtcctgccacaagaccaggttggggcgggaaggaggttctgaccctgtctgtcctccccgacaggcccagctaacctttgcattgcaggccctgccggaagaggcccttgaggagtttct

SEQ ID NO: 258702 - DNA, 122 bp, Homo sapiens
tgtgggcctcgcggactcggggcgccgggaccccgagcgcagggcagaggcagccgggcccggtttctgagtcagtccccaggacggccactcctcctgcctcgggacacccagcgctttcc

SEQ ID NO: 258703 - DNA, 122 bp, Homo sapiens
gtagcacaatggagcatactgtatatcattttgatttgatttcacaaaataaaacattatcgtatctgagtagctctcagatagctaaaaaatgagtggttatgagtaagcctaacaggtct

SEQ ID NO: 258704 - DNA, 122 bp, Homo sapiens
agtgaggtgggttctatggtgggcgaaggcttcatcgaagtcctgaccaagaagcagcgccgcctgctggaggaagagagaagaaagaaggagcaggccgtgcaggtgaggggcggagggtg

SEQ ID NO: 258705 - DNA, 122 bp, Homo sapiens
ggctccagaccccccgctctttgctgccggccagggccagatgcgcggggtcccctcccacgcgtggaactgcagactgggggcctggagcccctgaaccccactccccgctcggggcggct

SEQ ID NO: 258706 - DNA, 122 bp, Homo sapiens
gaaagcaaaatgcagcaaaacaaaaacaaaaccaaaaccatcgtgctcctggacagcatgcgaaccacaaagctgcagaatgcgaaagctgaatgcaggctgcaaatccttgtttctatgaa

SEQ ID NO: 258707 - DNA, 122 bp, Homo sapiens
aacaaaacgtggtccatccatacaagggaatatgattctgtcctaggaaggaaggggattcgacagttattatgacatggatggaccccgaggatgttatactgagtgaaataggccagtca

SEQ ID NO: 258708 - DNA, 122 bp, Homo sapiens
actttttactattcccacctaagcttgtcttctaacattacttctgatctttcagaagtacgttctcttcgtgtaaaggaattatggaagagtttgctgtctggctaatcttgctatatggt

SEQ ID NO: 258709 - DNA, 122 bp, Homo sapiens
gcttggggtttctggcttccagggtgggtggggacgaggtggtggagtccagctcaggtccgggctcctgataagggcagaagcgggttctgcgctgcccccaaccctgtaaccgccaggaa

SEQ ID NO: 258710 - DNA, 122 bp, Homo sapiens
tcgtcagatcccgaccactcctggagcaggaggcggcagacacactgacaaacagggtgacgcgcacaccgtgcgcacaacgcgcatcacttgtccgcagaagtggaagacgtacctggctc

SEQ ID NO: 258711 - DNA, 122 bp, Homo sapiens
ccccgcccaccacactctggtggttcggctgacggaggagatcagtcattcaggggtctgcggtcctgatgagcagtgggtgcccacaccaggcctggcatttcatccttgctttctgacct

SEQ ID NO: 258712 - DNA, 122 bp, Homo sapiens
agggaggaaggcagcatcagacacgcgtcatattttcctggcttctcctggtggagaggacgtacagttgagcccaggagcagactgtgggtggggtgtgggtgaaggggtgaggacccctg

SEQ ID NO: 258713 - DNA, 122 bp, Homo sapiens
actctgaactgcaagttcctcccactcaggtgttgcgggtacccacaaaatgagctggaccgccaaaggctgatgtgttagggctggcctgatgctggtgtctgtgccggagccagctcata

SEQ ID NO: 258714 - DNA, 122 bp, Homo sapiens
gcatgcagccgcgaatcggcacctgggcagcaagcgactagcttgcaggttcaggtggaacgcatagacgcgctcttccaacctcctcccctctcgcgccactcagctaagggccacgtcta

SEQ ID NO: 258715 - DNA, 122 bp, Homo sapiens
tcctgtcttgtctcagcccccagcacttgctctgtcaccgcagagcacaggcccaggcaacgtttacccaactgaacccgcatccctgtgggaaccttgttccaacaaaatcccgtcgttgt

SEQ ID NO: 258716 - DNA, 122 bp, Homo sapiens
ataatacacatgaaacatcaggctcagatcggttacagacgcagactctgaaatgacttgcggttcaaagcctgactctaccacttcactaccgggtggctggacgagtgtcacttcacttc

SEQ ID NO: 258717 - DNA, 122 bp, Homo sapiens
ctttcctcactcaaaccacaggccctgtgggggccccctcctctgtctctcaaccctctgcggttagggttcagatgctgggcagatgaagaccctgtttgctgcgagaagccaagaccaag

SEQ ID NO: 258718 - DNA, 122 bp, Homo sapiens
gggaagggttcccggttcatatacttaaaatcgggcctgtctgggaacgccctcctgtggcgtggaacgtggctgtgacgagagcttccaccggggccttctcctttccgttctcagcagca

SEQ ID NO: 258719 - DNA, 122 bp, Homo sapiens
accgcggcgcgcctgtcttccaggaagtccttctggctgttccagtactcagcgtcaggccgccccagctccgtcaccgcccggtactcccccacgtcgctgtcgaagcgcaagtcctcctc

SEQ ID NO: 258720 - DNA, 122 bp, Homo sapiens
gtccggggccaggtcccacgtctgtgggttcagggtagcccccaacatgccttcagctagcgaaccccaccttgacatccctttttttcagctaggagcgcttcggccgctttcttcagctt

SEQ ID NO: 258721 - DNA, 122 bp, Homo sapiens
gtgcggcctccaatctccccatttctcgtctccacagcactaacatgaggaaaaacaaaacgaagcctcatccccggaagccagcgccatttcaattccacacagctgggctcaccaggcac

SEQ ID NO: 258722 - DNA, 122 bp, Homo sapiens
tgcgtctgtctaaagcactttgtttctgtgtggttcactcctgatacagggccacttgtgcgagagttgagagggagacaggcagggctcttggggagtgatacagcacttatgtgttcgtc

SEQ ID NO: 258723 - DNA, 122 bp, Homo sapiens
cgccgctgcgcgctttggcacccgcttggggccctttgtgcgcatgcgcgctcgcgctcccgccctctagctgcgctcggctgagtcagtcagtctgtcggagtctgtcctcggagcaggcg

SEQ ID NO: 258724 - DNA, 122 bp, Homo sapiens
agagcttcttatgcttccagaagagaaagatgtcaaacgtgaaagcaaagttctagcctacgatttcctgtccagctggaatgagttgttaggtgaggatgaacaccagcagtgttagccga

SEQ ID NO: 258725 - DNA, 122 bp, Homo sapiens
aggcccggggaggccgggtcccctggtcgcatgtccttcggcgggccgcgaggtcaggctcgccgtccttcgccgccactccccgcccccggccctcggcctcctgccgcccccagcggtcc

SEQ ID NO: 258726 - DNA, 122 bp, Homo sapiens
tctgagaacagttagagtgggtgcgtgtctgaaatgggtactcctagcagctattgtgtacgcaaagcctgagtacagcctgctggtgtcatggccacgtgtgagcaggccagcgtcacacg

SEQ ID NO: 258727 - DNA, 122 bp, Homo sapiens
caagcctaattgtatgatttgaaaaggtaatgataatcatgagaaagaattaataataatcgttaaattaagtatgaaccagggactgtgcttagtccactatgcagaatattttacttaat

SEQ ID NO: 258728 - DNA, 122 bp, Homo sapiens
tttatttattttgaaagatatgcacctaatactgaaatataaaaaagcctacaggcctggcgcggtggcccacacgtataatcccagcactttgggaggccgaggcggctggttcacctgag

SEQ ID NO: 258729 - DNA, 122 bp, Homo sapiens
cgagatctgtgtcagaacgtgcgtgtgagcggatacaaaacccgagagaggcgtgagcagcgctgtgtttgcgagcgggagcgaggggcgccggctggggtgtgtgctcctggtgagtgaca

SEQ ID NO: 258730 - DNA, 122 bp, Homo sapiens
gtacatgtatcttcgcttacttgggcaattgctggggcaaatatgcttttactgttaaatcgtcatctacaacagatgacatgtagagagatgaaatgtagtctatagttgtttgaacttgc

SEQ ID NO: 258731 - DNA, 122 bp, Homo sapiens
cgcggtacaaacatcaagtcacacgcccacacgacagaattccatttacaaaatgttcctcgggaagcctccaccgaacccgtgcccaaagagagcccgaaccaagcctggggtctctgggt

SEQ ID NO: 258732 - DNA, 122 bp, Homo sapiens
ggtttctaagacaaccgtggaaccactgtgatgggaaaagccactcgcgcctcgcgcaggcgcattggctaggccgactcgcgcttcgctcctggcagtcaggctgagtcccctttaaataa

SEQ ID NO: 258733 - DNA, 122 bp, Homo sapiens
atcccgacttgggacctaatggccttgtctcctactacatcgtggccagtgacctggagccgcgggagctgtcgtcctacgtgtccgtgagcgcgcggagcggggtggtgttcgcgcagcga

SEQ ID NO: 258734 - DNA, 122 bp, Homo sapiens
cacaacgggcacagcgctcaggaacgcagcaactcagccagccgccagctctttccctggcgcgggcaccacccaacgcgcccatctggggtccagatgcgataaactggccgagggactct

SEQ ID NO: 258735 - DNA, 122 bp, Homo sapiens
tatctgcctgtctgtccatcatcttccttcctccctatctctgtgtatctggatggcagccgctgcccaggggagtggctgtggggagggcaggtactgtctttgcctgtgggtccagctga

SEQ ID NO: 258736 - DNA, 122 bp, Homo sapiens
gttcagtacatgggaacaccactgcccaagtattccccttcccgctgttgtgttcagttgcggcctggggctgagggttcagggacttcccctggccctcacccgtcccccccaccctccgc

SEQ ID NO: 258737 - DNA, 122 bp, Homo sapiens
tttgtatcccaggtaatttctttaaacctgcaatcgcgcagaaaggccaggcacgtgtctcggagccgtttccgtcagacccgcctgcgaggtgcagccctgggcatcgcgggcggagctgg

SEQ ID NO: 258738 - DNA, 122 bp, Homo sapiens
ggaagggcccgaatggcctaggtacacacattcccacaggaacgcgcacaggcactacctcggacagctaaccagtagggtgggaccttgataccccatagcattgtgggtatggtagtttt

SEQ ID NO: 258739 - DNA, 122 bp, Homo sapiens
tttggtggattgcaagtgtgaggtcacgtggttctacctgcctttcaagtcgtgcctcagcgaatgcatccccttcccttaggtgggacgcgatttgtgaggtctctgacctcctttccttc

SEQ ID NO: 258740 - DNA, 122 bp, Homo sapiens
acgccaaccgtggccgggcagtgatgggcagggcgcgaaacacctgcactcccagtcagacgtggactagccagcctgcaggaggggagaggttgtctgctacccccaagcataccacatcc

SEQ ID NO: 258741 - DNA, 122 bp, Homo sapiens
cctcccttgtccaagtgtgcgctcaccattgctccactcttctatagaagtaccttgcctcgctgagaattaaaaagaaaatattatattcaagtgctatttcttttgtggcaccaaaactt

SEQ ID NO: 258742 - DNA, 122 bp, Homo sapiens
ctgccagggccgccgtcgccgccgccaccgcgggttaaaccgcagccgcgcccacacttccggggtccgccaggcccgccccctaccggatgtgacccccttgcaacgtccggcgccccagt

SEQ ID NO: 258743 - DNA, 122 bp, Homo sapiens
gcttgtggctctgccttcccctccctcgagttcccagagcaggacccggacagggagaggcgctcacccgacgccggatccgaggtctcagacgttcgcactttatacacgcgcctcttcct

SEQ ID NO: 258744 - DNA, 122 bp, Homo sapiens
tgatagggagtgctgtaaatacagatgaagctttgcttgctgctcatctgctgtgcggcccggttccttacaggccatggaccggtaccagtccatggcctgggtgttggggacccctgcta

SEQ ID NO: 258745 - DNA, 122 bp, Homo sapiens
tgcccctcagcctcgtgaacccttcgcctccacgacccccggaacccatcccagcaagtgcggcagtgacctcgggtctcaccgcccgggggccaaacacctcggccaccccggggccccag

SEQ ID NO: 258746 - DNA, 122 bp, Homo sapiens
gcaccgctctgaactgacaaagcttgactaatttgaagatttatgggcaaaacacacagtcggcaatgggattctggggcttacatagttgctctaagttacgaattactctaaaatgcttt

SEQ ID NO: 258747 - DNA, 122 bp, Homo sapiens
ttggggaaggaggaggtcacgagtacggggacgcgcagggtgctcaggctctgacctgctcgggaggggtgggggcagcgtgggtcctgagccgctgttgccgtcggtctccggccccggac

SEQ ID NO: 258748 - DNA, 122 bp, Homo sapiens
cccagaactgggggagcacttgacaactctgaccagctccctgcagaaacgctttagaagcgtccacgatttagccaaacccagagtgcccaacggacgcgccaaagaagaaaaacggacgg

SEQ ID NO: 258749 - DNA, 122 bp, Homo sapiens
aactaaaaatccactacgagaagtatcacaatcagcctgaatttgatgtcttttcccagtcgcccccgaagctgccagtccccctcgagcccgagatgaccactgaagtgagcccttcccaa

SEQ ID NO: 258750 - DNA, 122 bp, Homo sapiens
gcacatcgttgaccggtcgtaaagtaagccgcagaaaagcagtgccaggaggtggaattgcgcatccttgtgtccggtcctctcttgagagtcggcttttactgcttttgtggttctgtaaa

SEQ ID NO: 258751 - DNA, 122 bp, Homo sapiens
caaggctgctgaggtcatcaaggaccgggaaaagctgagaaacgtcactcaggaggagcccgtggaagagagacagaatgtcacgtggtgtcctggagagaaagggaccttcagtaactaag

SEQ ID NO: 258752 - DNA, 122 bp, Homo sapiens
cgcagctcctctcagtctatctccggctgccgcaacaccccttcctcctggccccctctccggcgctgaggggctgactgctaagccactgcaagcaactccctcaggaaaaaaaaaaaaaa

SEQ ID NO: 258753 - DNA, 122 bp, Homo sapiens
cacggagtccttctggggctaggttttccgcttccggtgctcagtggctagccgaatagccgtgtttgggacctgggctcgggcttcttgcgtccccgctaagaacatgtcacggggccgaa

SEQ ID NO: 258754 - DNA, 122 bp, Homo sapiens
ggcggggagtggggcgtggcaggtggccgcgcctggggcagcgggtgcacggggcacctgcgggaatcgacagaaatgccgagcacctgaacaggagagaaaggagctgagccagaggatgt

SEQ ID NO: 258755 - DNA, 122 bp, Homo sapiens
gaagcacgtggtcctgtgtgtcagctccctcaagatcgaccttctcatggacttcctgaacgagttctacgcccacccccggctccaggtgaggccccttaccgtggcccagcagacgactc

SEQ ID NO: 258756 - DNA, 122 bp, Homo sapiens
gtgccagacagtaggcgcaggacggtgggtgcagcgcactgtgcaagagccgaagcagggcgaggcatcgcctcacccgggaagtgcaaggggtcagggaattccctttcctagtcaaagaa

SEQ ID NO: 258757 - DNA, 122 bp, Homo sapiens
gaggcagggaggctggaggccaggaggctggcctgatctccacagaaaggctctgctccccgaggccagcctggccaaccagtgaaaccccatctctattaaaaatacaaaaattagccagg

SEQ ID NO: 258758 - DNA, 122 bp, Homo sapiens
acagtcacacatacctggaagaagcaatggtccctgcatttctgtggtacgggtatcccacgccagccagccctggaagctctctactgtgccgtaagccaaccacctttcctagctcaaga

SEQ ID NO: 258759 - DNA, 122 bp, Homo sapiens
gcggtcagtcaactacatcacggccgtagattggctgatatcgagtctgtaggcgtgtcgcgaggctccagacccgcctctgggagccccgctgtggagcatgcgcggagggagggctgcgg

SEQ ID NO: 258760 - DNA, 122 bp, Homo sapiens
cctgctaatgtatcaacttttggaaaattctagaataaaatctgtagtcagattctatggcgggtggcccagaacattgggtccttgatgatcctttacctatgaattggggggaacccaga

SEQ ID NO: 258761 - DNA, 122 bp, Homo sapiens
tgtgtgcattccctcattgaatcttacaaccaccctctgggatggtttttgctattaagccgattttatagatgagaatactgagggctagaaaagataagtaccttgtccaaggtgacacg

SEQ ID NO: 258762 - DNA, 122 bp, Homo sapiens
gcggcgcgcgagagtctggtggctctggtcagcacttcggacagggactcgggcgccaaccggcagatgcgctgcgccctctactggcaggtgcacttccggctgcagcgggcctacgcggg

SEQ ID NO: 258763 - DNA, 122 bp, Homo sapiens
tgggataggcagttggccctcccatctttggtatttgtgttttttccttggaaggatttgcgcccctctgtcctctaggagaggctcctattgacattccttccacccccagaggttcctgg

SEQ ID NO: 258764 - DNA, 122 bp, Homo sapiens
tgacacaattttcatcagtgatggactaagtgtgatccggcctgacccgcctccggccggcgtgagaaggggcatgtgtcgggctaccctcgggcttcccctgccgcccattgtgatccagc

SEQ ID NO: 258765 - DNA, 122 bp, Homo sapiens
gtccataacaaggaggcacacaggccacggcaccagctctggaatcacacagcccaggttcgaagcctggctaggccactgtcatatcaatgacccaaggagcaagcagcctaaggcttaaa

SEQ ID NO: 258766 - DNA, 122 bp, Homo sapiens
ctccggactcgcagcacgtgctcagggagttggtggccatcaagaactgcagagagaggccgcgaggactggcgggaagccgggctggaggctggggccctgggccttgccaatcccgcgcg

SEQ ID NO: 258767 - DNA, 122 bp, Homo sapiens
ggcttggagggttttaagtgacttacccggcggcggagtactgatcttagtaccgcccgccgccccggactgccccgcccctccctagcccccccatccccgcccctccctagcccccccat

SEQ ID NO: 258768 - DNA, 122 bp, Homo sapiens
ggggaatagcaccttattccttggcagcagtaagtccaggacaaagactttaaagattgtcgggagggggagataggtgtagagagaagcaagagccctggattcttcaagggggcctgggc

SEQ ID NO: 258769 - DNA, 122 bp, Homo sapiens
cctgctgctcaagatcccagaggaggcggcggagcctacggagttcacggtgcaaggcatcgtccgtcactggaccagtgaggcgcaggcgcgagctccccagggggaggatgaggggcggg

SEQ ID NO: 258770 - DNA, 122 bp, Homo sapiens
agaggcttctagagggacagagcaaccaccatgccgccgtccgaggagctggcaaaggcacgcggcacctgcaagccggagaaaatggtgtccttcctcctgtgctggactgagcagggaag

SEQ ID NO: 258771 - DNA, 122 bp, Homo sapiens
aaaggctgtgggggctacgcaggtggctttggatgacagccagggtaccaggaggcagcgcgtttcattcatgcagtgactattaagcttgctgtgtgtccggggtctgcggtttgctgcgg

SEQ ID NO: 258772 - DNA, 122 bp, Homo sapiens
tggagccatcaggtcctacctttcctgcagcaggtggagctgccgcccccggggatgtcccgggaaggagactgatctggcagctcctattcaaccctgtggctcctgctgggaggggactc

SEQ ID NO: 258773 - DNA, 122 bp, Homo sapiens
gatctcctctaggaaagcagacatttattacttggcttctgtgcactatctgagctgccacgtattgggcttccacccctgcctgtgtggacagcatgggttgtcagcagagttgtgttttg

SEQ ID NO: 258774 - DNA, 122 bp, Homo sapiens
ggagacccttgctcatccctcctgctcctctaggaagccagacagagttggtcgcggtcccgtgactgtcactcagctgacacagccgcgcccggctcaccctccccctcctcttcagggtt

SEQ ID NO: 258775 - DNA, 122 bp, Homo sapiens
ggaactcctgagctcaagcgatccgccggcctcggcccctcaaagtgctgggattacaggcgtgagtcaccagtcctggcccaattactttcttcaatctgagcatgagcgctggaagaaaa

SEQ ID NO: 258776 - DNA, 122 bp, Homo sapiens
agcccctcacctccacccaccgccagtcccctgcccacccgggtggcggcggcggctcagcgactagccggccgccctccaccggcgcctccggacgcaacctcgccctggcagggcggtct

SEQ ID NO: 258777 - DNA, 122 bp, Homo sapiens
aagtcactctttgagcctttgtccaggcacaagctccttaagaatcccctggcagctccacggggaccagcctggggggggctgtgactggttaaagctcctttagacccccttcccagagg

SEQ ID NO: 258778 - DNA, 122 bp, Homo sapiens
catttaggccatttatttaaagcgggagttgaggaggctaaagacttcagttctgagtggcggctcgcagcctcactgcagcaggggagcgtaatcttcagggttttcttcccatttacggg

SEQ ID NO: 258779 - DNA, 122 bp, Homo sapiens
ggttcgatatgattttttttttccttggcaatccgcagggctctgagatcaaacccaggccgtgctgggaagagaggggggaagctgggccttggcttctctagcagttgcctaggcctcat

SEQ ID NO: 258780 - DNA, 122 bp, Homo sapiens
ccacctaagacacaaatcagcggaagcgattccgtgcctggaatcccctacgaacaccgtcgttcaccgaggagctttgggctcctggaagtccgaacaccccggatcagaggagagttggc

SEQ ID NO: 258781 - DNA, 122 bp, Homo sapiens
atggagaaaatgaaacttgtctcatttggtggttgcatgtattattaaatcacatacaaccgatcacaaaatcaatgtgtaagaaagtgtctgggaaaatcttccaaggcatacagccctga

SEQ ID NO: 258782 - DNA, 122 bp, Homo sapiens
agggtgggggccaccagtccaggggtgggagcactacagtgggtgggagtgggtggtggtcggtgtgactggcctggcacagacccctaggcttcttgacacctggaattcaccagggacat

SEQ ID NO: 258783 - DNA, 122 bp, Homo sapiens
tgtgatctgcccgcctcggcctcccaaagtgctgggattacaggcgtgagacactgcgcccggccaacattcattgtatgaatgtacattttcatttctgaagggtaaatgcctacaagtgg

SEQ ID NO: 258784 - DNA, 122 bp, Homo sapiens
caatagtaaaataacacttaacctggaggcgtccccggtgttcacagggaacagctggcacgtgagagcaacgcctaatgaacgtcttagcattaaagctacgaatggagacgagacactga

SEQ ID NO: 258785 - DNA, 122 bp, Homo sapiens
cccttgggctgtgtggtttctctctgttccgagccctgttcctccaccttagcggaatagcgcctctccatccagttctcatctttgagaacgattcttgggatgaaagccacgacgttgga

SEQ ID NO: 258786 - DNA, 122 bp, Homo sapiens
acctccccccacctcctcccacaggggccgctcagggagttggacctccagcactttccccgctttgctgtgtaacccgcatctgcacaccaagtgcggcagaccagtgggcccctgggggc

SEQ ID NO: 258787 - DNA, 122 bp, Homo sapiens
gccacggaaacaacgctccatccttacaaccaccccagcgaggtcgcgggacaggcgatgcgttcctcggcggcatgtgattcctgtgggactcttggagtctcccagactccttcggtggt

SEQ ID NO: 258788 - DNA, 122 bp, Homo sapiens
ctttgtactgactgacagtcaggagcaaggacttcaagcaggcagtggagtccattgcaccggccgcggcccggcttagggaccaccaccgcccagcgtgcgccggcctttagctttcgccg

SEQ ID NO: 258789 - DNA, 122 bp, Homo sapiens
aaagtgctgggattacagatgtgagccaccatgcccggccacatttaccctgttttatgacgtcaccttcaggtgttcatccggcccagacccctcagcttggtggcagacacccctgggca

SEQ ID NO: 258790 - DNA, 122 bp, Homo sapiens
ctgccctgccccttctgctttcagttttccaagtagaaagagcgactgaaacgaagtttgcgtttgatgacattacgggtcagcagcaagggaaggtacacagctagacgggcccggatttg

SEQ ID NO: 258791 - DNA, 122 bp, Homo sapiens
atttccaagcactctcccccttctgctgccaaaagaggatttccaggctcctgaagcgaacgcggtgaccaagaacagggttagacccagcgcggggagttctgcttttaaaactgctgttg

SEQ ID NO: 258792 - DNA, 122 bp, Homo sapiens
agagcccctcctccaggctctctcaagggaagcctagaaacctggaggaaagatagttaacgctcaggacaggggagataaacaaggttcaacctggtgaagctggtcagattccacttctt

SEQ ID NO: 258793 - DNA, 122 bp, Homo sapiens
ctctggtaggcactgaggttggtggtgaaacccagctgggagatggaggcgcccttgtcccgcagcactcggtactcctcccagcagtagtagatgccgtatgccagcacgcccagcactcc

SEQ ID NO: 258794 - DNA, 122 bp, Homo sapiens
gcacagagctcagtcgaagcgatgacaccatgaactgctacgactcagtatacatatgagcgattggccaacatctcctgatttcggagacattaaatgtgcatcatagcatcaatgataca

SEQ ID NO: 258795 - DNA, 122 bp, Homo sapiens
catcgtggcataggtagatttcttttctaaaggtgaggtcagtgctgggcacttagcaggcgcccggtgggctgcgccgtcctggaggaaggctgattcctcccaccccgactcctggctcg

SEQ ID NO: 258796 - DNA, 122 bp, Homo sapiens
gtcgatgacaagatagatggaaagcacctggaaattggcaggccctgagtgggcgctggacgtgtggggccgcgggccgaactgccccctcctggcctcatctcctggtgcgccccgggtgg

SEQ ID NO: 258797 - DNA, 122 bp, Homo sapiens
aggaaggcccagggcctggtgtacttcagggagcaggacccccagctgctgacagctgcccgtgggtgggggctgggtgtgagtttctggaggtgtgttcgagtttaggcggccgggacctg

SEQ ID NO: 258798 - DNA, 122 bp, Homo sapiens
gcccacagaaagtttgatgaatgaggcctggcttggaatcggcattggaaataagtgcttcgggtgagtcccatgcaggtagtcccaagagtatcttcagggaattcctcatagtgtcaaag

SEQ ID NO: 258799 - DNA, 122 bp, Homo sapiens
ccatttgagggcaagggctgtgtctttgggtacttcgctcctcgcagtcacaagtactggcgtgcgtacgcggggagagatcgctcctcaaaacggggtcctgaacgctgccccgcggcccc

SEQ ID NO: 258800 - DNA, 122 bp, Homo sapiens
catgtgtgctatgtccatggtgcaaggtggcacgcatgccgagtcaccaggtgagactgccgctttgggaagggataggaaggatctccggtagccttcgtgggcaggatgcctcttatttg

SEQ ID NO: 258801 - DNA, 122 bp, Homo sapiens
cctcccgcttgtcgagtttggtcttgctgtcctcctgctcgagctttggcctgaagctctcgtgcactgcgttgctctcctgcttcggggtgtggtggggagaggatacgctggtgctgtag

SEQ ID NO: 258802 - DNA, 122 bp, Homo sapiens
gcagcgtcgccctgttcttctatttcagagcgcaggtgagtggccaccttcccaggggatcgcggctgagagcgcccatctccttcccccgcacttggaaactgagtctggcggcagggctg

SEQ ID NO: 258803 - DNA, 122 bp, Homo sapiens
aacccttcctagtttagaccgtctgtattctccacatccaggaggctgcagcagctgagtcggctgaatcacagagacggcagctgccccacctgctgggaactcaaacctgtctcaggcag

SEQ ID NO: 258804 - DNA, 122 bp, Homo sapiens
caccagtccaagacttctcagagttcactacacagggttgagggctggaccggcaaaactcgatttgcccatcaagttaacttggtcggcctgggacccgaggccagggtgaagggacgaca

SEQ ID NO: 258805 - DNA, 122 bp, Homo sapiens
ccgagaaggagctggagacctagtggcgcctgatgcttcggtgctaggtacgccctggggcggtttgtcctcaggatccatgtcatcgcactctgttgggaagagagaggcctcattttcaa

SEQ ID NO: 258806 - DNA, 122 bp, Homo sapiens
aatccaaagatctgcccccggcgccccctgaggcccctcgaattccctccaggagtccgccgaagctgtggggctccaggtctcgctcataaacatccacacacgtccagcgaccgcggcga

SEQ ID NO: 258807 - DNA, 122 bp, Homo sapiens
tatgttgcattttacatgggttctaatttcctctccaaacacacattacacacaggcgcgcgcgcacacttctcaggatgatagctacaactgcagagatcgtaaattcactaagtctctca

SEQ ID NO: 258808 - DNA, 122 bp, Homo sapiens
ctcctcctttctcctttggccccagcaccaggcaggacggtctaagatacagagaccacacgagccacacggaaacgcgtccatctcctcgacaccccgtggctttgacgcacttttgggtt

SEQ ID NO: 258809 - DNA, 122 bp, Homo sapiens
accgagcttcgttttagacttcctcgggtgtcctttgataatgcatcccccactttcgcacgctctggcgttctttcaccggggtctttgtcgccccaagttgggcagccgggaatgttaga

SEQ ID NO: 258810 - DNA, 122 bp, Homo sapiens
cacgcctgtaatcacagtactttggaaggccaacgtgggcagatcacaaggtctagagatcgagaccagcctggccaacatggtaaaaccccatctctactaaaaatacaaaaattagctgg

SEQ ID NO: 258811 - DNA, 122 bp, Homo sapiens
cgcctttgcagacggtttacaaaaaaactttgctttgcactcggaacccccgttttcacacggacccgagcgtgacaaggccttgccgccccgcccaccaggcccggcacgcttccccattg

SEQ ID NO: 258812 - DNA, 122 bp, Homo sapiens
ccaacccacagcactgactgccatctggcattgagaactgctgtggagaagtcctgaggccgaggtgaattttgtccactttgtcaatttcatgttccctactcttagcctgaaactcaact

SEQ ID NO: 258813 - DNA, 122 bp, Homo sapiens
ttctttcactctcccccacattcattcaatgaaactcatttcctggttcccttccctccacgagggcgcctaccctctgctgagcaatctggagaccagaatcctgcagaaataagagtgct

SEQ ID NO: 258814 - DNA, 122 bp, Homo sapiens
cggaggaggggaaggaggcgagtccggaaaccctcggccaatcagagagggctggggcggcgcctgctagaaggcttagcactgcagggctctgggcgggaaggctaacctggtgcggagcc

SEQ ID NO: 258815 - DNA, 122 bp, Homo sapiens
ttttcctgattatacctttttcttcctttacaagtctctttggcctcctctgctttaatccgactaacagtatctgagtctgggcaagtcacttcacctctctgctcacttaacctctccaa

SEQ ID NO: 258816 - DNA, 122 bp, Homo sapiens
gtctccacgatgcatgctgcccccatccagcacgcgtgtaggtagaggagggaggggtctcggtctaggagccagccaggaccctagaaacctctagaagggaagacagaacaatggcgttg

SEQ ID NO: 258817 - DNA, 122 bp, Homo sapiens
ctcatgactgagtaataaaaccaacttgcttaattaaagttggtttcttgtagtcctggccggaggacattgacttacaaaaatataggattagtatcttcaaaataaatagacagtaaaca

SEQ ID NO: 258818 - DNA, 122 bp, Homo sapiens
ttgacagcttcgtggtcagcagcgacgaccgcaggagcgcgtgtccttgaagcggggaagcgccccttttccttgcctgacaataccgccccacacgcgatgacgcctttggaatagaactg

SEQ ID NO: 258819 - DNA, 122 bp, Homo sapiens
gggtcctggcgatgcataggagttaataaaaaatgcacagcacaaatacggcttaagcaacgattacaaagccagtatgcatatagccactacctaagtaaagaaatagaacattgtcagcg

SEQ ID NO: 258820 - DNA, 122 bp, Homo sapiens
tcccttacggccaccaagtgcacttagggcaggcctcttactacgagtcccgtgatgacccgaggccgggcagcgcctgcgtattgaagccgagggagcgtgcgggcggtactactggcggg

SEQ ID NO: 258821 - DNA, 122 bp, Homo sapiens
ggattacagcacttggctccagcttgacctttgttggtagaactactcagaaaatatgaccgatttagaaattgggtggtgccaagtaaaccccacccaaacctatccccgcaccagttctc

SEQ ID NO: 258822 - DNA, 122 bp, Homo sapiens
cagacatctacagaacacatctgttgagctgtgtagccttcaggctgggccatggttcctcgactttccaggtctgacttatctatacctccctgagttatggaggtcaatttcaggattgt

SEQ ID NO: 258823 - DNA, 122 bp, Homo sapiens
atttccccatgaactgctgacggctgtcttgtgctgtaatatttccgagcattcaacttccgagagttcagctgccccatgtagctcgtggaattcagccagaactagcgtgctgccaccca

SEQ ID NO: 258824 - DNA, 122 bp, Homo sapiens
cgcttgcgcactccgccgcctgggggaactctgtccagcgacccttgacgtcagggatcacggtgcacttgattggctgctctgtcccgaccacctgcccttcgcctgtggttgcaggcagc

SEQ ID NO: 258825 - DNA, 122 bp, Homo sapiens
cactcacctttacaggggactcaacgctggtagccagctccctatttcactttcagtttccgctcagaagcaagtctgagaggaaaggggagggaggaggaggagccgtgggaggagtgagg

SEQ ID NO: 258826 - DNA, 122 bp, Homo sapiens
ccctgcctaaaaccctgctgtgatttcccattacccttagtacagagccacattccttaacgtgtccgacgtggtccggccctcccacacgtctgcagtttcgttttccgccagccttggcc

SEQ ID NO: 258827 - DNA, 122 bp, Homo sapiens
gatctctgtcttcgtcatgagtaaattgttccctaacccaagtgccaccctcagaagactcgggtgaatcctggtacctcctaagcctcagggagacacgcttgggtttgcggtaaaagggc

SEQ ID NO: 258828 - DNA, 122 bp, Homo sapiens
accagggtctgagggcacagagtagagagatgtggtagccatgcctgagcctggagaacccggctgggtcactcctgacttggacaccagccctggggaagtgtgaggtcctggagatgtct

SEQ ID NO: 258829 - DNA, 122 bp, Homo sapiens
cggtggctgtttttcaaggagatgggtcacaaggagattttcctttgaaagaaaaaccaccgaagaataccatgtgtcctggcagccacttttcaaaacactgtggccagacctgagaacca

SEQ ID NO: 258830 - DNA, 122 bp, Homo sapiens
gtcccagtggtctgggcgtgctcgtgcagaatgtccgtgtgtggggaagcccatgttgggcgagcgtcctctttgcctcaccccgggtgctaaacttgggctgcaccattggatcatccgat

SEQ ID NO: 258831 - DNA, 122 bp, Homo sapiens
tagattttaaaagaatttacagagtaagaatacatttttgagacaatggggaaaatgatacggagtgaaaggtgatattaaagaattaatgttaatttcattatgtgataatagctgagtgg

SEQ ID NO: 258832 - DNA, 122 bp, Homo sapiens
ggtgccccatctgcaaggtggggactatgatggtgcccacctggtgggtctgtgcagtgacgggacaggtcacggcgctcgtgcacgctgggtgcccagtgcacggggcgtctttgttgcgc

SEQ ID NO: 258833 - DNA, 122 bp, Homo sapiens
gcagaaacccagcagttcagaaacccagcagaaaccttgaaagagatgcccagtggtgcccggcaggactttataaagccccaagactcctgcctccctaagccccgcctctgctcaccgtg

SEQ ID NO: 258834 - DNA, 122 bp, Homo sapiens
gggctcagtccataaagggctggaaggcccaagggctggggtagggagcggtaggacctgcgccacgaccaacaggccatcgccctggagaaaagccatccagtcacagcctggagagacca

SEQ ID NO: 258835 - DNA, 122 bp, Homo sapiens
agacactatattggagtctctttctcagacttcctcagcgcaggatgtaaatagcactaacgatcgactggaacaaagtgaccgctgtgtaaaactactgccttgccactcactgttgtata

SEQ ID NO: 258836 - DNA, 122 bp, Homo sapiens
ggaaagatgagatttttatagtgaattgattggtgtctatattggtaaatccttgacgttcgacacagtgaagatataatactggaaacaacagctgtaataactttactgcttaataagtg

SEQ ID NO: 258837 - DNA, 122 bp, Homo sapiens
cagcaggaataccactgactccctgctggggaaatccagcagcatcggccactcactggccgccagcaccagagtgcccgtggcgcatcaggcatggctggttcctcactcatgtggcctcc

SEQ ID NO: 258838 - DNA, 122 bp, Homo sapiens
ggggtctgattggacagatctcgggaagtggagactctgattggacagtgctgtcgactccgcacccctgattggagaattctccagtccgtccccctagcgcccttgattgggcagggctc

SEQ ID NO: 258839 - DNA, 122 bp, Homo sapiens
ccaagtattaataaaacccgttttaggcgctgacactgacctacagcgcctcagctccagcgccatggcgccctccaggaagttcttcgtggggaggaactggaagatgaacgggcggaaga

SEQ ID NO: 258840 - DNA, 122 bp, Homo sapiens
gcggggccggagccgcgaggccccgcccccaagccgaggcctcataaatgctgcgacgcacgcccagccgcaaacagccggggctccagcgggagaacgataatgcaaagtgctatgttctt

SEQ ID NO: 258841 - DNA, 122 bp, Homo sapiens
acttacagctcagggtcacagcctgtatgtataaccagagcctgtgggctcattgtgcctcgcattttcatctaagaaaggtccttatcatattctatgtgcatcagatacctcctcagatc

SEQ ID NO: 258842 - DNA, 122 bp, Homo sapiens
ggagaacatcgtactgccccggcatgaggccctgctcttcctcgtcttctgaggacaaggcgcacgttctccgcagtgcagagcagcttgccgaggaccccgcgtgaagaaagccagcgagg

SEQ ID NO: 258843 - DNA, 122 bp, Homo sapiens
catcagcctggagatggcgcaagagtgccatctgatgctgggcggggaagaggattgcagcgaggtaccaacacgaccacacatgcaaccacagcagtcaagtctttctaaggcattggcca

SEQ ID NO: 258844 - DNA, 122 bp, Homo sapiens
tccgtctcaaaaaaaaaaaaaaaaaaaaaaaaaaaagtaaataactaacttcaatagaaccgcatcgaaaatgtgtttatgaagtacttattgagcactatgtccaatatcacacttgtctc

SEQ ID NO: 258845 - DNA, 122 bp, Homo sapiens
tattaggggtatttggtattatttggagttatgacattgcctaatagaacttctgctatacgacaagcaaaatcactttctgccttgtgcaataggctgctctctaactagtatctctgctc

SEQ ID NO: 258846 - DNA, 122 bp, Homo sapiens
cacacaggcactgagtggactgttggtggctgcccccgagtgtggtcctgggtggcgtcacggcacgtgggcactgagtgggctgttggtggctgcccccagtgtgtgtgtcacttacaggg

SEQ ID NO: 258847 - DNA, 122 bp, Homo sapiens
gcacgagccgctggctcgccgcctcatttacatcagaaagcgggtgccggccaataggcgcgcagcctcgcgccagctggcggcgccgcacccaccagcctatataagggcgcgcagcgtag

SEQ ID NO: 258848 - DNA, 122 bp, Homo sapiens
cagcacacacccgtttgcaaaagttccatcagggcctccagactcccaaattccaccacccgcagctgctccacatagaagccccgagtcttgttccagcgaacagggaggggccggggaga

SEQ ID NO: 258849 - DNA, 122 bp, Homo sapiens
cgctcccgctcccccgcgcccgcgcaatggtacgggcctgcgctgccggaactgtggagccgttgccctggaaaccgagttcggcctggtcccgtggcccctgatttttaaccctgtgggcg

SEQ ID NO: 258850 - DNA, 122 bp, Homo sapiens
aggaggggaatgaaaaagcggggagaggagtaataagagagggattgggggtatgcagctcggcagaggaccctgcccgccccctgtgctgctgccttgctcccgccttgcttacacagggc

SEQ ID NO: 258851 - DNA, 122 bp, Homo sapiens
cccaccctcagaggcctgaggaatcgaaatctggctttctagcagtcccccaatcccctccgggagtgggttccttgttctcgcatgcccaccgcaaaggccccccgccctgctcccggcgt

SEQ ID NO: 258852 - DNA, 122 bp, Homo sapiens
cttggtgtttcctagttttctttgagattttctcaatattgtcttgctatctgagcaaggcgggcttctgcttccagaccatcactttatttttattttttcaaagtgaaagtaagattatt

SEQ ID NO: 258853 - DNA, 122 bp, Homo sapiens
tctttgccctcgaggtgtctttctttatcgacgtgccctctcatccccgcttgcctatcccgggaccttgcccgcgccttcggacaggacaagactaaatcttggctccagaggtcccacaa

SEQ ID NO: 258854 - DNA, 122 bp, Homo sapiens
agccactcctcctggttaccaggcaaaaggaaacaccttgagctggccaggagctaccagcgtctgtctacacctgggtgagccgtactggtcgtagtggccccaccctacaaggatgccct

SEQ ID NO: 258855 - DNA, 122 bp, Homo sapiens
gaattaaggcgagggtggagagggtgggtagggtggggacggacaaagtgagaagggaggcgggccaagtgaccacacgtacatgaagcctctccagttatggccaaatcattttttaaaaa

SEQ ID NO: 258856 - DNA, 122 bp, Homo sapiens
ccctcagtaggtgaaggcagtatgcttcatcttccaccggcagggggcagacctgagccacgggaggctgctgcagcgccggctcagaaattttgcagtcaactccaagtgtggtcctccca

SEQ ID NO: 258857 - DNA, 122 bp, Homo sapiens
cgaactcctagcctcaagcgatcatcccctctcggcctcccaaagtgcagggattacagacgtgggctaccgcgcctggcctatgccaaggtttcaagaaggtttagaactcagtatctgct

SEQ ID NO: 258858 - DNA, 122 bp, Homo sapiens
cagacccaggagttctggaattcaggcccctccttctcggatactaagaaatgcagactccgggttcctcatcctccagatttgggttgggggttccggactccgagacccctcaggggaaa

SEQ ID NO: 258859 - DNA, 122 bp, Homo sapiens
agactatatgaagcacttttacagaaaattatttctaacacaactctgcaagctgtcccacgacagcaaatatactcaatttaagaatgtagaaaacatattaaaacatgtaccataaaatt

SEQ ID NO: 258860 - DNA, 122 bp, Homo sapiens
tatggatccaggcaaagacaggacaaacaaaaattccctaacagatgacagtgaacacttcggtggattgaatctgggaactacaatagccctgctctcattatactatgaagccaaattaa

SEQ ID NO: 258861 - DNA, 122 bp, Homo sapiens
caggtagcacaggacactgggaacagggggatgtactggagggaaccaagagggaaaaatcggagttgcagggctatgtgtttttctcagcagcctttacagccccagatgacagcctctgc

SEQ ID NO: 258862 - DNA, 122 bp, Homo sapiens
aaatgggaatgagcctaccgacttcataggattgctgtgaggattaaatggaaatcggtacgcaaaatggccagcacagtgctaacatctagaaggtgctgcccagccccaaagagatctac

SEQ ID NO: 258863 - DNA, 122 bp, Homo sapiens
cgctgggcacctgggccgaagtcctcctgcccatctggggcgacgtacttggtccaagttcggttgcggctggcggaggttggagattctccagggcccccagctcacctccctggatggcg

SEQ ID NO: 258864 - DNA, 122 bp, Homo sapiens
tttgggaggcagaggcaggaggatcgtttgaggccaggagttcaagaccagcctgggcaacgtagtgagaccctgtctctacaaaaaagaaaaaccccagaaagttattgtgagcagccagt

SEQ ID NO: 258865 - DNA, 122 bp, Homo sapiens
ggtggcccaggcgcgccctggcttttggccacttcactccagcctctgcctccgtctccacgtggccgcttctccctgtggctctggcgtcctctccagcagtcattggatttggggcccac

SEQ ID NO: 258866 - DNA, 122 bp, Homo sapiens
tccgagagaaaaaagagtagtcatagggggaagaaatctcacaaacgcacatcaaagagtcgggagaggcacaattcaccaagcagaggaagaaataggcaccgcagctgggaccagggccg

SEQ ID NO: 258867 - DNA, 122 bp, Homo sapiens
tgaacaggatcaccatgactagatccagacgccagactttgtctgcctgtcgcaggcagtcgattctcctaatcttacccttctggtcgggattggataagacacagcacgggtgcttcttg

SEQ ID NO: 258868 - DNA, 122 bp, Homo sapiens
tgcccctggctcccgggaatgctggggtggcctgaccagggatgtccacacccaggcaggcgcaggctgcattcaggggccgtgaggtggcccggggttggggggtttctccttaatatctc

SEQ ID NO: 258869 - DNA, 122 bp, Homo sapiens
tcccccatgcccctgttcaccccagcaagctcaccagggttaaggcactaaaggtgatgacgtgacctgtttgttatgaaatattgaagtaattcatgccagggaccaacacacagatgaga

SEQ ID NO: 258870 - DNA, 122 bp, Homo sapiens
ggggagctttaaggtgacggtcgaagcccagggaccccttcctacccagatcccttcgcacgaatttcacccttgatcacagcctggagcagttgggaggaccccttctatatttctctggt

SEQ ID NO: 258871 - DNA, 122 bp, Homo sapiens
tttgaggcgtggcagccttcgtgtcggccaggccctgggtcagggtttatttgttcaccacgcttgctgtgctcgtgctcctccgtgtgcacgcccgtgcaggggcctggagttggcctggg

SEQ ID NO: 258872 - DNA, 122 bp, Homo sapiens
cctggcctctctccctggagccccgcccagtccccaggtaggcgggggagcgtacgcttccggcaggacagggtggttccagaacccaccgctcgctctcttgaaaccggctccgcgggcag

SEQ ID NO: 258873 - DNA, 122 bp, Homo sapiens
tctgctgcttccaagttgtgtgaccttggctaagtcacttaacctttctgattgtcatttcgctttttaataaagtgggtctggtgaacaagaaatgtaataaacacgtggcttgccattca

SEQ ID NO: 258874 - DNA, 122 bp, Homo sapiens
ggtagtgactgggagtggaggggaagttgattgaggtggatcacgagggatgcctctctgcggaggcgatgcccacatcgaagctctcaggatgagacggaaccagccgtgtgggcagctgt

SEQ ID NO: 258875 - DNA, 122 bp, Homo sapiens
cacaaagatgagcagcctggggtttcggggagaatgtacagacacgcaaagcggtcgggccggcctgtgactcgtgggctctgcaaaaggctttcagttgttctccgggagccgattctacc

SEQ ID NO: 258876 - DNA, 122 bp, Homo sapiens
cggagcggggcgcgggcgcgcggcggcgggggcgcgggccgggcgcgcgcggcggcggcgcgcagacacaagtagtttacattgttgggcgacttttgcaacaactcgccgcgccgcggcct

SEQ ID NO: 258877 - DNA, 122 bp, Homo sapiens
ggatttatccatacatgtggctataattaaagagaaaaataagtgagaagaataaacacccgttaccagtgatagtctctgggtaggaaagtgagaaaggggatgcagaatggaactatcac

SEQ ID NO: 258878 - DNA, 122 bp, Homo sapiens
gtgggttggggtggctccatttgtttaagacttagtcctgaggagccccagcccccatgacgtcaagattggctccatataaggtgaggggtccgcagcccatggtccccaagcagccaccc

SEQ ID NO: 258879 - DNA, 122 bp, Homo sapiens
ctatatgcaaaaattttaaagatttaacccgagccttcaaagaaagtgatcctgtaggggcgagtctcttctagccaagctccccaaagcccagaaatgagggactaggtctgagcccttca

SEQ ID NO: 258880 - DNA, 122 bp, Homo sapiens
ccgcggcggggcccgggccgtctcccgcacaccggccggggcaggggagccccatcgatgcgctccgccgctcggctccctacgcctgagccctgcccgctcgagccccttccccctcccgg

SEQ ID NO: 258881 - DNA, 122 bp, Homo sapiens
gtgatctgcccaccttggcctcccaaagtgctgggattacaggcatgaggccactgctcccggcttaatggtatcatgttttacagcttgatttaaagggttaatattttttcaaattttta

SEQ ID NO: 258882 - DNA, 122 bp, Homo sapiens
attggcgtccagcaccaggcccagggagcccctccgtcagggcggggacaggctgctatgcgcgtggggtgcccgagtcggaccctggccctcgggccccagccccgagcctcaggctcggc

SEQ ID NO: 258883 - DNA, 122 bp, Homo sapiens
tctagcagctgctgtgtcctagccacacctgttcctcctctcccacccccatccccagctcgcaagctctcccacctggaccaccacactgggacttgaaccttctgcctcgaggcttgtct

SEQ ID NO: 258884 - DNA, 122 bp, Homo sapiens
gcgcgctgttctgggaccggaggagtggggtttctaggtccaaggggaggctccctaaagcggggcaagcttgaaccaaaagagctggggtttcaggccgctcagtggaggcgaacctcgcc

SEQ ID NO: 258885 - DNA, 122 bp, Homo sapiens
ctgggggctccgcaggacagggcaggggtcagcatgcctgggcttgaactgtagagtaaccggaacgacctgcacaccacacacccccaaccaagatgaagccagccacccgctgggctccc

SEQ ID NO: 258886 - DNA, 122 bp, Homo sapiens
gggtcccatcttatggcttttccaggggacatgaggtggtgcctcccggtaccagagccccgggatgtggcctcctccatagggacgaggtttcccccatcccagctcaaaatgccccctag

SEQ ID NO: 258887 - DNA, 122 bp, Homo sapiens
ggcctcggaatctcccatctggggcatgggcagtcagagaagcaccagccaccccagccccgaaaagctgcagtccagctctgtcctgatgagcttggaggctgaggcaaggacctgctgca

SEQ ID NO: 258888 - DNA, 122 bp, Homo sapiens
caagatccataggtggtgctgagccatctctttcagggtctaaccttctgtggaaaagcacggcactgttctagcagagtcagtttcacttgagttttcttcctcctttttataacgacatt

SEQ ID NO: 258889 - DNA, 122 bp, Homo sapiens
gggtccccgtggacctggtgggcggcacgtccattggctctttcatcggagcgttgtacgcggaggagcgcagcgccagccgcacgaagcagcgggcccgggagtgggccaaggtgtgtgtt

SEQ ID NO: 258890 - DNA, 122 bp, Homo sapiens
aacaacaaaaagatcctgggaaacgacattctagacatccacggggtgggaataagcccacgcctgagagtacacactcatgtccaggaaacacctgagtccactttgatttgttcacctcc

SEQ ID NO: 258891 - DNA, 122 bp, Homo sapiens
aaaacattttaggtagttgttctaaagaatttgctgtaaattagatatgatgaattcctacggggaggaatgtatgtgcacagagctgagacatgaaaaaggagaccacagtcagccacaga

SEQ ID NO: 258892 - DNA, 122 bp, Homo sapiens
ttctgtctcaaaaaaaaaaaaaagatagtctcaatcttattgccaattaggaaagctaaccgtgctaatagaacagaatttaaagtgggtaaaaacagagccataggttatctatttagcat

SEQ ID NO: 258893 - DNA, 122 bp, Homo sapiens
aatccatagctaagatgccaggaccccctgaaagcctagacatggtgagagtgctgggtccgacatcacgagagaggggaaggagttgctcggaaccggtgggaagtggctgtggcgggact

SEQ ID NO: 258894 - DNA, 122 bp, Homo sapiens
agaccagcctgaccaacgtggagaaactccacccctattaaaaatacaaaattagccaggcgtggtggcgcatgcctgtaatcccagctactctggaggctgaggcaggagaattgcttgaa

SEQ ID NO: 258895 - DNA, 122 bp, Homo sapiens
ccgtccttcaaaggggcgggttctagagtcagttttgcctcagcgggccctgggattggccgacagcggtttaccggtggcttctattggcctcccgggccgtccgtcggagccgaggaggc

SEQ ID NO: 258896 - DNA, 122 bp, Homo sapiens
ctcctcagcacccgcaggccgggcccgggggccaggcagttgtcctctgtggagccttatcggggcccacaggccctgctgccttgaccccacccgggccccaaaactcggcctggggactg

SEQ ID NO: 258897 - DNA, 122 bp, Homo sapiens
ctcgtggtgcgctgttttttaagcctgtccgaaaatcgcaatattcgggtgggagtgacccgattttccaggtgcgtccgtcacccctttctttgacgagggaactccctgaccacttgcac

SEQ ID NO: 258898 - DNA, 122 bp, Homo sapiens
ccgagcccgtgccacgcagggtgtgtgtgtcacctgccaggtcttccaccgagcccgtgccgcccaggatgtgtgtgtcacctgctgggtcttcacaccgagcccatgccacgcagggtgtg

SEQ ID NO: 258899 - DNA, 122 bp, Homo sapiens
ttaaaatcatgaaggactgttgaatttgtagaaatattccatctgtgttccaaggatgcacgcttcagggtttgcagagggttgcaactgtcttcctgtgccacaaaagactctaaagatgc

SEQ ID NO: 258900 - DNA, 122 bp, Homo sapiens
gcgctgttccgggtcactgcaccggctgaaaaaaccaaaagcaaaaccaacacccagaaacgaagcctgcgtgcccccgggggctccgttttgctcccctcatggacatgggggtggggagc

SEQ ID NO: 258901 - DNA, 122 bp, Homo sapiens
gagaagcaggcacaacgaggccggcgtgccctggctgtgggggttgcatccagatcacggcggatctgggtcggcctgaccccacagcgctgcacttttccctgccgcaccaccaccacgtc

SEQ ID NO: 258902 - DNA, 122 bp, Homo sapiens
aggcgactattggtttttatttaggcaggggtctaatctattgtgaaagccactgggtctcgcctctggagcaatctggggagacctataaagtttattgatttgacttacttaacttacac

SEQ ID NO: 258903 - DNA, 122 bp, Homo sapiens
tgttggttctctgcatagagtcactggccaaaggcgttaacatcccattatgtcattggccgaaaactgccagctacctttgtagagaggaaagtccctgtcaacacaatttgaattttcag

SEQ ID NO: 258904 - DNA, 122 bp, Homo sapiens
cattatttatcgtagaaagcattttgcccttagagtttcttgccatgaatgaggtggtggcgggagctggttctagtaaggaacaggaaggacccaacccagggaggagtggggtaaaggtg

SEQ ID NO: 258905 - DNA, 122 bp, Homo sapiens
tgtggccctggggctgctgcccactcctctgctgcatctgtgacaaaactccgagacacccgcttctcaaagccctgcatgaaggttacgtgtggtcacgaagagatcctgcaaagaacagt

SEQ ID NO: 258906 - DNA, 122 bp, Homo sapiens
cagccattctgcttctaagaatttttctcaggaatagagtgcagggagtacttaatccggcgcctgacaggcaggtttgtttcctcctttaggactggaggctgccaccactgacatgttcc

SEQ ID NO: 258907 - DNA, 122 bp, Homo sapiens
caagttgtaatgcttgggtcaggctatcagaggatgatgtgtcagctgggtccccaggaccgccaccacccacaggacttctgcgtcctggcagcccagaggccaaggccacagaacgcagt

SEQ ID NO: 258908 - DNA, 122 bp, Homo sapiens
gttttcctcacttctctacgggccttcctgagattagcaggatcctgcaccaatcacggccgtcattagaactccgtcggtgccccaccgcgtctccatggcaactccctacaggaaggggc

SEQ ID NO: 258909 - DNA, 122 bp, Homo sapiens
cgatctgaggatccagctcaagtgaggtgccataggacgtgttcctgagtttgcattgcacggagaccttcctggaatttttcatttgcaagtcggcttaaccaattttgcattgagtccta

SEQ ID NO: 258910 - DNA, 122 bp, Homo sapiens
atttgacgacgaatctgaacaggctggtaacagccgcagccaggctagtggaaaactcgccggatctgaagctgcccccccacctttcaccgccctaggaagacctcgacaatccccgcagc

SEQ ID NO: 258911 - DNA, 122 bp, Homo sapiens
gggggacctttttttcataataggactggcagtgatgatgtcagggctgaggagcacagtcgcagctcgctgaaggtggctggagccctctagcctgaaaagtggaagtggttctcagagaa

SEQ ID NO: 258912 - DNA, 122 bp, Homo sapiens
aacaaagtgccacacggccgcagtcccaatcaattcaatgacaattgttagggacgtcctcgtcccgcccggcccgcggaccccggcccttcctccttgacaggctggggtccagccccgag

SEQ ID NO: 258913 - DNA, 122 bp, Homo sapiens
agcatctcttttaattcaggaatccatttctagaaatgtagtccaattcggcaaagtttccgacgtacacaaattagtagctcttctatgcaccaacagcgaccaagctgagaatcaaatcc

SEQ ID NO: 258914 - DNA, 122 bp, Homo sapiens
ctggccgcgcggcgggcgaggcccaggcaaaaacaaagtcttcccgctcagtaccggccccgcgaggcgctccagaggaccaagccttagctcgcgtcaccccacccccgcgcaggcgcgtt

SEQ ID NO: 258915 - DNA, 122 bp, Homo sapiens
ggtgtgggatggaaagagcaagtgctaagagagtaaaaatatggcatgccctttctattccgccctcattcagcggaggccgagtaccttcgacatgctgcacagacagacccttgggaacg

SEQ ID NO: 258916 - DNA, 122 bp, Homo sapiens
ttgcaacactttgcattctagcaaaaactttttagaacacagtagctgttgaaaacttgacgccagcttaacacttcatgagctttgacacacctgggttacaatatctttgacttaatcac

SEQ ID NO: 258917 - DNA, 122 bp, Homo sapiens
gaatgccacaggaccgaagctgcacaaagtttgcaggattgtgtgcataattacctctgccgacgaatctattcccacagaaagcttcgctggagagattacaatgctttgagccttaccgc

SEQ ID NO: 258918 - DNA, 122 bp, Homo sapiens
aagccgaaggggaagaggcggcggcggaggggctggcggagagtcacagagggcaaatagcgccaggcggccgcttggccggatccaggggcggtgcagggcggccggccctgcctgcggga

SEQ ID NO: 258919 - DNA, 122 bp, Homo sapiens
aggcaaactgttaagacaagtctttttttttcctgcactgggattgcgagaagtcatttgcgaggagtcctttggtttccagttacctcccccacaggcgcacacgctggctgcttgcgttg

SEQ ID NO: 258920 - DNA, 122 bp, Homo sapiens
gttgttgtgggaattaaatgacagacggcatgaaaaagcttggcaccttacctaatacatcggatcggctcgagaaatggtagacttctttctgtcttctccttcctttcctgcctcccttc

SEQ ID NO: 258921 - DNA, 122 bp, Homo sapiens
tctctctctgtcgcccaggctggagtgcagtggcgcaatctcggttcactgcaatctccgcgccccaccccagccgccgggttcaagccatgctcccgcgtcagcctcccgagcagctggga

SEQ ID NO: 258922 - DNA, 122 bp, Homo sapiens
cctgaggtgcttcgagctcagacagggactcagcctcctgaggccctccgagtgccctcgcgatgccaggctctgctggcttctgctgggcactttgcccaaggtcgtctccctgtgcgggg

SEQ ID NO: 258923 - DNA, 122 bp, Homo sapiens
caggggtgagccatctcgccaggctgcctctagacttttaacgaatgtgtggcgctcgctcgctgtacttcgagcacaggaggggaccctagagcgcaggtcccccccatacatactttgtt

SEQ ID NO: 258924 - DNA, 122 bp, Homo sapiens
tgggtcgcgggtggatgggcgggtcttctatgacatcatcactgttcgccgcgaagagggcgcgcgtcatcagatcaagtcgactcgctcctctccttccaggccctggtgaagtacggaat

SEQ ID NO: 258925 - DNA, 122 bp, Homo sapiens
gctgctagagttttgtcagagcctaacctacttggagaacaaaataatacccaactccagcgagctcagccttcagtaggggaaggaaaatacgcaactccagcaccctccagctgtccttt

SEQ ID NO: 258926 - DNA, 122 bp, Homo sapiens
cctcctcctgagctcacctggaggctgcgtcctcagagcggccccctccatgcacccagccggcccgccccccgcacgtaccccacctggacagggtgcggcccagcatctgccccgtgtcc

SEQ ID NO: 258927 - DNA, 122 bp, Homo sapiens
aacttttgacagcgttttacagctacaagttcacattaaacaaactattttcgcggagggcggtcgccgctgagcctaggcggccagagggtgccggggagggggcacttcctttgtgtcag

SEQ ID NO: 258928 - DNA, 122 bp, Homo sapiens
aataaatgtcgattgtgctgagtctggaagcgcggacgacccaccttgagatgcatctagcgactgctcccagcatgtaggagcagttgtaaaatcacagccgtaacagtgcctgctctcca

SEQ ID NO: 258929 - DNA, 122 bp, Homo sapiens
ttattctgcattctttcagtacgtgcacttctcttcccctttccagaggcatagatttaacggacgtagttgattcattcatttctctgtcactatttatgtgtggaacgggtcccaccgag

SEQ ID NO: 258930 - DNA, 122 bp, Homo sapiens
gccggctcgctgcagctccgggactcaacatgcgctgctcgccgggaggcgtctggctggcgctggccgcgtcgctcctgcacggtaaagccactgcctccccgccctccactcctccgtgg

SEQ ID NO: 258931 - DNA, 122 bp, Homo sapiens
cgcgcgctctcccacatgaaaccttccatcacgctcagaaagaatgtgctacaacctcggcgctgccgcggccgccaccactgcgcccgcgcccgagcccgagtcggagccggagccgccgc

SEQ ID NO: 258932 - DNA, 122 bp, Homo sapiens
cagactaaagagttctcttttcacaccctaaagtctcccaaaagaaatgggtgggccgggcgtggtggcggacgcctgtaatcccagctacttggaggctgaggcgggagaattgcttgaac

SEQ ID NO: 258933 - DNA, 122 bp, Homo sapiens
gaattatggatagtaatggatgatggagcccagaagagtggatagtcctaaatagtagctcgaataaacctttgaccttctacagggttgcttcctgagtgcctggagaaatcccctctttg

SEQ ID NO: 258934 - DNA, 122 bp, Homo sapiens
ttgatcacatagcatatgccatacatttaggtggtagaaaattagtggaggataaacacacgtagatactgtgctcatggaactctcagcccactggggagaaagccattcatcagatgtct

SEQ ID NO: 258935 - DNA, 122 bp, Homo sapiens
caggaaagggaagcctgtccctggctcccagcacctgtcacccctggcgatctcaccccgcggccatcattcccgtcctcacggcccatttcagggacactgaggctcaaagagccacgtga

SEQ ID NO: 258936 - DNA, 122 bp, Homo sapiens
gatcgttctccctcccctctccacccgggtcaactcttccagccgctccctcctgcatcacgaacacacgctgcaggaaagcgcatttacagcccgggacatccccagacctcctctccaaa

SEQ ID NO: 258937 - DNA, 122 bp, Homo sapiens
cctgcaaagacacatgtacctttctgtacttcactggcacgtctgggatgtttgccagtgcgttcatttttctgtgcagagttgtccatgttagcaaaattctgtgacgtgttccatttgtt

SEQ ID NO: 258938 - DNA, 122 bp, Homo sapiens
gagaagtcacagaaacctccacccaggcaggtaccgaggacagcagacccagtgatgatgcgctgaggggcagctccagaggctgcagaatctctttcaacccctgagcgggagcccaagtc

SEQ ID NO: 258939 - DNA, 122 bp, Homo sapiens
gggcccaagattcagatccagaacttattttaagcccatggtctgtcttctacacaataccgaagatattgaggcaaaggaatgagatgttagccacaaaggtatgaggatgaaaagagaat

SEQ ID NO: 258940 - DNA, 122 bp, Homo sapiens
gtgtgctgggaaacccagcttgaaaagcacagctctggttcaaccccctgcagcaggagacgctcaggtgcagagagaggagtggatgagcatctagtcactggtcctgctcactgaaaaag

SEQ ID NO: 258941 - DNA, 122 bp, Homo sapiens
ccatgcacgctggctctcaaaaatcatggccacacactgtccaagtctttgccctaggtccgtactcttgacaaagcctccccaacaaggtgaaatcactctcggctcaccactggtggcag

SEQ ID NO: 258942 - DNA, 122 bp, Homo sapiens
cagggatggggaacccagtgctgagccatccatcccacaaagttaaggtcatgcccatcccgttcaccccaaatctccatgacttgcagtgccaggcatgtgacggtgtgtgcttgatagtc

SEQ ID NO: 258943 - DNA, 122 bp, Homo sapiens
ccaaatgctgagcttacatctttgatttgaactgtaaactccttttcatccatgcctcggcgaagtttggtgaactgggctgccgctgtgctgactgcagatgcttcctcctctgccatgga

SEQ ID NO: 258944 - DNA, 122 bp, Homo sapiens
gtttccaaagagcatggagcccgaggttctctccaccctgcgactgagttcgctttttaccggagataaaggtccaggtaacattaggtcgcctaccctatagataacaagcagccactcag

SEQ ID NO: 258945 - DNA, 122 bp, Homo sapiens
gggaggcggttgaggcccggccaaaattcgaggcagcgccggcgggccggcactgctgagcggtgacagcgtgctggcagctttctcagcccttgctctccgtgcctcctctgcctcagcgc

SEQ ID NO: 258946 - DNA, 122 bp, Homo sapiens
ctgtgtccccagcatcctgaccatgtctgtcccgcctgcctagatcttgcaccgtggccacggggctccctcctgatagccctgaacgctccgctccatgtcctacagagagggatgtccca

SEQ ID NO: 258947 - DNA, 122 bp, Homo sapiens
tggacttatagatagtgtcttctttgttgaacatctgtatcccgctcagagtgtcagctccgagatcagcaaccctagctgtcttgttctcctctgctggctccccagatcccatcgtagca

SEQ ID NO: 258948 - DNA, 122 bp, Homo sapiens
ttcttaccagaggaaagagaataactgtctggcagataaatcccagatgtccactctaaccgtccaccttggaacctccaccttcctgtgctcgtcttagaggaattctagaactgtcgttg

SEQ ID NO: 258949 - DNA, 122 bp, Homo sapiens
ttatccccggggagcaggagtttcaagtaagcaagaactcagcagttagaaagcaaacatcgaaagggtctgaggggtagaaaagtctcctgcttgaattttgatctaagctgatttacaac

SEQ ID NO: 258950 - DNA, 122 bp, Homo sapiens
aggttgcagtgagccaagattgcaccactgcactccagcctgggtgacagagtgacagtccgtctcaaataacaatacaatggttaagatgacaaattttatgttatgtgcatgtgatttta

SEQ ID NO: 258951 - DNA, 122 bp, Homo sapiens
ggaggagagaagcgacagtcgcggggcccggaaaagagagacttagagcgaagccaaaggcgcctttcttcacagtttgggaacttactggtagtaaacgccactccatagaagcggtgacc

SEQ ID NO: 258952 - DNA, 122 bp, Homo sapiens
atcctactgccctacgacaagaaaaagcggatggtggttcctgctgccctcaaggtcgtgcgtctgaagcttacaagaaagtttgcctatctggagcgcctggctcacgatggtggctggaa

SEQ ID NO: 258953 - DNA, 122 bp, Homo sapiens
ctcccagggctggtgaggaccaggctggcctgcgggatgccctcccggccagcaaggatccgccagcctgcggcgctgagccagcgcaggtcagctccagagacacgcagctgacccaggcc

SEQ ID NO: 258954 - DNA, 122 bp, Homo sapiens
actgcgggctgccggctcagctcctcctcccagcgaagcagcaccaccgtgaggctggtccggggcgacccatcctccacttggcagcgcagggtgaagttctggcccaccggctgccaagg

SEQ ID NO: 258955 - DNA, 122 bp, Homo sapiens
acccaaagtgtccaagagagagccctccccttggaatgaggaggccggggtttgggccctcgtgccaccatctgctggttgtgactttgggcgggccctgagcctcagtttcttgctctgta

SEQ ID NO: 258956 - DNA, 122 bp, Homo sapiens
aatggcttgtattccaggcccatctgcctgcgttgggggtgcggcggggggtgttggagacgggactggggcttgagctccttgcacccgactctccccgccgccttgtagccccagttcag

SEQ ID NO: 258957 - DNA, 122 bp, Homo sapiens
ccgggacgcggtggtaaatgactccctaaagtctcctggccattccgatggcgccaaggccgcaatgggcaagcaaaagccccccgccccggcgcattcctaggagacagagccgtgagggc

SEQ ID NO: 258958 - DNA, 122 bp, Homo sapiens
acactcaccaggactggtctgcctcctccttccaactgcctcatcagggaaaccagggaacgaggtaaagttgagtcagtacagggacctaccgtttgcagagctccctcacatccaagatc

SEQ ID NO: 258959 - DNA, 122 bp, Homo sapiens
gaatctgccaggtccttttccaggggcgcagaacttcccttgtggctgggtcggcaaaaccgaggcccacatcccagatagagatcaaatcgccctcccccaccgggggacttccgaaatta

SEQ ID NO: 258960 - DNA, 122 bp, Homo sapiens
ccgggattaccaaaacaatcactttcttttgagatcattgtcttttgaaccactccagctcggggcagaacgctttagacgctggcgttgttttccgctccgcgaggaattttcccccagat

SEQ ID NO: 258961 - DNA, 122 bp, Homo sapiens
atagtcaaaacattccttattagaaagggcctattaaacacagccggggccttcacaaaacgtaatgtgaatatgtttcctgcaatttgcaagatgtatttaaatatgtgtatagactgttt

SEQ ID NO: 258962 - DNA, 122 bp, Homo sapiens
gatccctgcgcatccgccacagagcagggaacggcagaaaggaggaaggagggggagttccgtaaatcaggccctcaggggctcccaggcccgcacccctctcaagccccggggaccaccgc

SEQ ID NO: 258963 - DNA, 122 bp, Homo sapiens
ccagcacaaacagtggtgtggcgactccgtttagctgttctggagctccagcatattgcacgaacagcggcggcagatagtccacgcattgggtagcccgagcgcagcgccctctccactgt

SEQ ID NO: 258964 - DNA, 122 bp, Homo sapiens
gcggcagccctgggtggggtcccataggggcatctgagaagtcactggagctagcgtttccgggaaacctggagactcgctgagtggcgggggtcgtcggctgcccctctgcccagcaaggg

SEQ ID NO: 258965 - DNA, 122 bp, Homo sapiens
tcacaggaggaacttcacacacagacactgtcagggccgggtcacccctggaagatccaccgtccactaccccgtccactcctggggaccctgaggccagagaggatgaaagactcacccag

SEQ ID NO: 258966 - DNA, 122 bp, Homo sapiens
ggccgtgggaggcttcctgaggtgggggccgggccaggatggctgcagcgcagcgacggccggggccgggagcgggtcctgggcggcccaggagaagcagttcccgccggcgctgctgagtt

SEQ ID NO: 258967 - DNA, 122 bp, Homo sapiens
agattttacgtgttagcttggtttgaagccaagaacggtatagtgaataagaaactcaggcgacagtgagttactgtttgaatggcttgttgaaagctcagaagaagtagagtttgatggaa

SEQ ID NO: 258968 - DNA, 122 bp, Homo sapiens
gatgaataatcctctggagaaggcaaacaacttgcgttggttaagatcaagtgttctgtccgatcttttatggctgtggtttatatctcagttcagttctcaaagcattttcaatgctagtt

SEQ ID NO: 258969 - DNA, 122 bp, Homo sapiens
acctctttccaaggcgctctttcctagcctcacccgagggccgcagagccggacctgtgccgggcgagttggatttagcccagttagagttaagatggtatcattagctgcgcacagcgtga

SEQ ID NO: 258970 - DNA, 122 bp, Homo sapiens
agccgggcgacaggtgggaggcatagtcgcgggagtggtgctggtactccaggagcccgacgtcctgcaggaggggacagaggagtggtgagcgtgggcgggcacgggcatggcggggcacg

SEQ ID NO: 258971 - DNA, 122 bp, Homo sapiens
cgcggtggaagagccggtgcgtgtagacgtagcctgagtaggccgcattcatggcttcctcgtgctccagcgagtggaagtgcaggtggttgggcagcgcgcggcggtgcgtggcctcggcg

SEQ ID NO: 258972 - DNA, 122 bp, Homo sapiens
gaatggcgtgccctacgaagctctgtgctggtgagtcactgctgccagcatggagtagggcggcggagggaggcgaggctctggccagggaaggccgagccagcaggcggcatcacttccgc

SEQ ID NO: 258973 - DNA, 122 bp, Homo sapiens
gattctaacccccattccacaggggaggaaactgaggctcaaagaaacaaatcgtaagtccgaagccgtacaacggagcccgaactgagtccagacacccggacgccacccgtccctaccgc

SEQ ID NO: 258974 - DNA, 122 bp, Homo sapiens
cccgattgggacaccgcccccagccagacacatcctcctagcagaacacccatgcttagccggagccgctcccccgccagacacctccccaccgggaaaccctccccagtgggacaccccag

SEQ ID NO: 258975 - DNA, 122 bp, Homo sapiens
cctgcttcccgtaatgtatgcccagggcgacgcgagccaccctaacagcccagcgctgtgcgcggaccactccggaaggcgcccattgtgtttctgagccacatctgactttgatccttttt

SEQ ID NO: 258976 - DNA, 122 bp, Homo sapiens
tccttcatctttgtataaatctcttatagaatttgggggatgtgctttgatataacattacggatacaaaattatgttgaaaagtgagtactacatttagaatgcaaaaagagccacaacaa

SEQ ID NO: 258977 - DNA, 122 bp, Homo sapiens
acacaacattgaaatagtgtttagctggaaaatgtgatccagcttgttggaaccctgaaacgtgctgtggtatggctttgtgcagtgccttagtgaacagtacttttctcctcctccgttag

SEQ ID NO: 258978 - DNA, 122 bp, Homo sapiens
gctcgcgctcgttcctggagtcggcggccgctgcgcgcgctcgttgcccaacccggtccccgcccccagacacgccgggctctcggggcaccacagccatgtgctcgttagcgtcaggcgct

SEQ ID NO: 258979 - DNA, 122 bp, Homo sapiens
tcccttctgcgcctcccccaaccccccgccccgcattaccatatggaggccgagtccctgcgaatcacagcagcagcgggaggtatttgaataagccccgcaaccccgcgcagaccccaact

SEQ ID NO: 258980 - DNA, 122 bp, Homo sapiens
acctcatcagatgtccacagacaggtgacttttctcgggaggaagtcgccctgggcggcacgggggtctgcagcgcccgcctcctcgtctctcctgacagacccctcccaggagagggggga

SEQ ID NO: 258981 - DNA, 122 bp, Homo sapiens
aagcacgtcgttgtgtcctgtgagccccttgttgtcctcaacgcaccctggcgttctgatcgccccctgtaggtcctgagctatcctttgtgtcgtgtgcgctcctggaggtcctgagcacc

SEQ ID NO: 258982 - DNA, 122 bp, Homo sapiens
ccctccccctaaggcagctgggggagaggtgacctagtactggaaaataaatctgtgctacgccccccagcatcactgtgttggcctgctgaaattttggaggagtggacatccaggaattg

SEQ ID NO: 258983 - DNA, 122 bp, Homo sapiens
tcacgtttttttcaggatggcactggatctttaaaacgcagtggttcctttagcaaactccgggcttccattagacgcagcagtgagaagctggttaggaagctgaagggaggaagttcacg

SEQ ID NO: 258984 - DNA, 122 bp, Homo sapiens
tccagcctcccggcccgcttgctggctgcccagctgctaggacagtttgcagagcagtggcgtgcggagcggcggcggaccacctccaggtggggacggtgggtgggcggggaaggaagcgg

SEQ ID NO: 258985 - DNA, 122 bp, Homo sapiens
gcaccgccgaagagatggctttgactgctgtgcagagcgagttgagcagctgggtcaactcgcccgtgccgcgggccttcctgccctcctccatgacgaagcgggtcagggtgttgacgtcc

SEQ ID NO: 258986 - DNA, 122 bp, Homo sapiens
ccctttggtaaaagaccctagcacagtgcccggtcaattgtagaatctcagtaactgttacgtttccctcttcctttgttatcagcttatcaatatcctattcatctttcagggcccaacac

SEQ ID NO: 258987 - DNA, 122 bp, Homo sapiens
ttcacccaaaacagggacccctcccaggtaagcgccaggtgaccccagcacaggaggccacgtttctacctgagggtcgtgtccgcaggcccgtttcacttcacagccatcacggctgggtg

SEQ ID NO: 258988 - DNA, 122 bp, Homo sapiens
gagggcgacactatgggatcatgtcccctgaaaactggggtctctgctggtgctgaggggcggaagccgccgagcctcgagcccctcaaaggtctctgattgcgttacactttaggtctctg

SEQ ID NO: 258989 - DNA, 122 bp, Homo sapiens
gcaatgaattaagtgtttttgtggccctctcatccgtagctaggagcagtttgtggaccgcgtctgtgaacgcggctcataattgtttttcacacataagttatgcaaatgagcttttatgg

SEQ ID NO: 258990 - DNA, 122 bp, Homo sapiens
cgacccaggtggagcgactgcgtgtgccgaaaaagagcttatttgctgattggcttctgccgctgtctttcacaaccgcagccagtcgagcggaggcacacccaaagccccgcccccttaga

SEQ ID NO: 258991 - DNA, 122 bp, Homo sapiens
cagctaagggccacgtctacgctagcacccagagcccctagctccctgcctttctccggacgcctgaacttgagaacagcaaagagaagtaggttcctttggatagtcaggaagtctacatc

SEQ ID NO: 258992 - DNA, 122 bp, Homo sapiens
gtgcaggggagcgtggtctcttcttgcttttgcagctccgggcccacctggagtgcttggcgtggcactgggccgtggccttctgggacgcgtgggcagcaccaccgtgctttccagggagc

SEQ ID NO: 258993 - DNA, 122 bp, Homo sapiens
ggggtagaaaggtctgtgacttggtccctgcccccaggcagctcatcttctggagggagacgcagcagaagtagctgctgtgatgtggcatgtgctctgctggagaaaactggatcttgaaa

SEQ ID NO: 258994 - DNA, 122 bp, Homo sapiens
ggcgaagcccaagcatggcccagcgtggcggtcatctccctccgtgggtcaggcgtgctccgtggaggattgcccacggccagacgccctccctggtggcatctcaggacacacggggacgt

SEQ ID NO: 258995 - DNA, 122 bp, Homo sapiens
gtggttgtgagaattaaacgaaatactacatgaaaagaacaaagtgtcttccaaatataacgggaatcaacatttacatgctgcttagtaactagcgcttagctaaatgctttacaggggat

SEQ ID NO: 258996 - DNA, 122 bp, Homo sapiens
ctggccaaaggtgaaaacagtgcaggagaaactgcgggcggcaagggcgtggctggactccggcggctacccggggtgggggctgggggtgcttcggggccccgccaggcccggcgcggagc

SEQ ID NO: 258997 - DNA, 122 bp, Homo sapiens
agacaactaaattatgcacaccccactttgttttattagcttattagctactcgcactatcgactgtgtagaagtgcaaacacttctcagccccaaccataaactgcttatttataaataac

SEQ ID NO: 258998 - DNA, 122 bp, Homo sapiens
acatttccatctgaggtatcgggttcatctcactagacagtgggcgcaggtcagtgggtgcgtgcaccgtgcgtgcatgagctgaagcagggcgaggcattgcctcactcaggaagcgcagg

SEQ ID NO: 258999 - DNA, 122 bp, Homo sapiens
tttgtgacttggagccccataagggcaagaattgtgacattcctacctctgtccccttgtcgtaggctagtacacagtaggcactatataagtgttggctgattttaacttagttccccagc

SEQ ID NO: 259000 - DNA, 122 bp, Homo sapiens
cggcgacggcctcccgtgtatttttgccggtcgcgcggctcctgtcgccactggcgccagcgctgccctgcctacgctcctccggcgctcagcgcactgccccagccagagttttctcctcg

SEQ ID NO: 259001 - DNA, 122 bp, Homo sapiens
agtgcaatggcacgatctgggctcactgcaacctcagcttcctgggttcaagcgattcgccgacctcagtacctgggattacaggcagctgccaccacgccccgctaatttttgtattttta

SEQ ID NO: 259002 - DNA, 122 bp, Homo sapiens
agtgccttcctcacggctaccgtcttcccgggttcctgatggcactggtggaggaactggcgggagaggggctggcgcccagaactcgggccggccctggggtgggggttctgtgctgggca

SEQ ID NO: 259003 - DNA, 122 bp, Homo sapiens
cccatgagtgtgccagtctgatatggtgagataagcctgggacagatgtgctgccgcattcgtgactagaaaagagtccccaggaatttctggctcctgccttcagattgtgaactttccag

SEQ ID NO: 259004 - DNA, 122 bp, Homo sapiens
agatgctgcacgctgctaacaagggaaggaagccttcagctgaggcaggtaagcgccgatcggagggtttgaccgagtggcttagttaaatctctgttttcaccgttttgtaattgagaaag

SEQ ID NO: 259005 - DNA, 122 bp, Homo sapiens
gggcgtggccaccagagaacataactgttgtctcctgggtgggggctgagccctcccttccgggacctgcgtgtctgtgccctgcgtgcagggtggtgtcctccatgaccgcggccctgtct

SEQ ID NO: 259006 - DNA, 122 bp, Homo sapiens
accttcaccacccgaaaacaggtgctaggagagaagctgagaggagcaccggtcacgccccggccccgccctctgccggctctaaagcgcaaggtctctccgcctcgcgccccgcccctgcc

SEQ ID NO: 259007 - DNA, 122 bp, Homo sapiens
gaccacaggaaggtcagggatgcacttctgcttggtcctacggctggcagttgggagatgcgggcgtggggagcggagcccgatgagtgtagtgtctggagcggactgggagcagctcggcc

SEQ ID NO: 259008 - DNA, 122 bp, Homo sapiens
actaagtaataatatgctttcagctggagtgaagttgaagtgaatcagataggcgagttacggtacaatgataaatgctaagtattaatagagacaatgaggaaatgaagagaatatttaat

SEQ ID NO: 259009 - DNA, 122 bp, Homo sapiens
tcacatctaaattttaagttaaatttcaaaccttccatttataagaaaactgaatgtcagcgtgatgctagctgctttaatatttcttgctgaatttttcttggatttgttgtcataggtct

SEQ ID NO: 259010 - DNA, 122 bp, Homo sapiens
catcggggcagggaacttcttcgcggagagccggagggctgcattggcttcagctggagacgcttctttctcttcctctccccccgccgccgccgtcgccgcctcctgggaaaaagaaaaaa

SEQ ID NO: 259011 - DNA, 122 bp, Homo sapiens
cattcattcacccttctcctcctccgcccagtactcgtggccagggtcgtatcagttctccgtcaacttgcttggggccttggacgagcctcctggcgcttcctgtcagtggcgaaaaggtt

SEQ ID NO: 259012 - DNA, 122 bp, Homo sapiens
acacttactttttgtctggaaggaggctcatgtgagcaccattgttgaaaaggacaccgacggtgtggtctgagagctggtacccaaagccatatttgttagagtaatcaacccatttggtg

SEQ ID NO: 259013 - DNA, 122 bp, Homo sapiens
cagtgcaagtcccaggcaagcagaaagcttgctttgctgaaatccccgtggctccggtgacgtcaagagtctttctggataagggggcgaccggggcggttactagcgaatgttcagcaccg

SEQ ID NO: 259014 - DNA, 122 bp, Homo sapiens
ctgagacagtggcttttgagacccagcagaggtgagggagtgagctgaggataggcgggacgtgatggagttggcccagagagttcatcagggccctcacagctcttacagtctgtgttttt

SEQ ID NO: 259015 - DNA, 122 bp, Homo sapiens
aaggtcaaacggacctgtctgctgggagatcagtgagaatcgcttccaatgacagatcgccgtgtgacattcgcatactacccagaaggagtataagaattccactcccagtgacttcctta

SEQ ID NO: 259016 - DNA, 122 bp, Homo sapiens
ggcccctgtccccagcaaggggccaggatttcacaaggctttcaagggctgcccacctaccgggcacgatcttcatcggggacggtggcaggagcccacggggcagacggagcgggccaggg

SEQ ID NO: 259017 - DNA, 122 bp, Homo sapiens
aacatgggtgaagaattcagagcctaccacaactcaatgcttgtcttatccttatcgtctcgactgaatgcttggaagtgggcagagcagtataaaaaatcattgatttaaagaacagacac

SEQ ID NO: 259018 - DNA, 122 bp, Homo sapiens
cactctcagtaagaagccccacaccagcccctctccacaatggccccatgttggctgtgccgcccggctccttccattaaagtgaccccactttagagcagcaagtggatttctgtttctta

SEQ ID NO: 259019 - DNA, 122 bp, Homo sapiens
gtgctataattacagctgtgagccactgtgcccagccttcttcacaatttcaccacaatccgtaaatatatatttatttatgtgattatttgttcactgtctgttttctaagttgtaaactc

SEQ ID NO: 259020 - DNA, 122 bp, Homo sapiens
gccccgcctgatgctcacgctccggtccctgctcttctggtccctggtctactgctactgcgggctctgcgcctccatccacctgctcaaacttttgtggagcctcggcaaggggccggcgc

SEQ ID NO: 259021 - DNA, 122 bp, Homo sapiens
ttggcatctatggcctatgatcgttacattgctatttgctttcctctccactatctcatccgcatgagcaaaagagtgtgtgtgctgatgataacagggtcttggatcataggctcgatcaa

SEQ ID NO: 259022 - DNA, 122 bp, Homo sapiens
accactctagttctctgattcatatctcccttccttttctggacagatgccctgaccttccgggaaaccctcggtgagaggcccacagcctcgcttctagggtcaccactgcttcttccagt

SEQ ID NO: 259023 - DNA, 122 bp, Homo sapiens
ctaggttgcgcagcaatgtccttctcccgaatgacttgcactaagtctgtacacaactggcgacattagttgcttaactccctcaattcagcggggacacaggcaccataggaaatgtgttc

SEQ ID NO: 259024 - DNA, 122 bp, Homo sapiens
gccgcggcgcggagcgagggagggggccgggcgcgcggcgcggaggggagggggcggccacgggcctgactacaccgacactaattcccaggccgcccttaaggaatgaggggagcacgtga

SEQ ID NO: 259025 - DNA, 122 bp, Homo sapiens
catgtgcacggctacgcgggcggggggctccaacaggtgacaccggggcggggttcgcagcgcgcaggcgcgttcgggtaggtagcgcaggacaggaactctgggcggttccgccggggcgt

SEQ ID NO: 259026 - DNA, 122 bp, Homo sapiens
gcgcgagcaggaacctgggctacacatggcgcctgcgggccagctggagttcccagtcggcgtgggcttggcgggccctgcactcggagtggctggccagccctgccggcccggggcagtga

SEQ ID NO: 259027 - DNA, 122 bp, Homo sapiens
gcgcgggacagccggggctccaggggctgctgctcgtggcggcggcgctgagccagcccgcggcaccctgccccttccagtgctactgcttcggcggccccaagctgctgctgcgctgcgcg

SEQ ID NO: 259028 - DNA, 122 bp, Homo sapiens
tttcccttaacccatctaggatttagctttcctgttaatttcttcatttgtccattccttcgtttactcgtggtttacctacctttcatatttcataaggtaagtctacctgtaatattata

SEQ ID NO: 259029 - DNA, 122 bp, Homo sapiens
gatgaagggctagaggtaacatagaactccaaatattatctttctgacaaggggctaccccgacgcggctaccaaccacaccccggatgagcaaggccaaaggaattttagggaacacccaa

SEQ ID NO: 259030 - DNA, 122 bp, Homo sapiens
caaggaccgggcagccaatgggagggatgtgcacgagggcagcacgagcctccgggccagcgctcgcgtggctcttctggcccgggctactatatagagacgtttccgcctcctgcttgaaa

SEQ ID NO: 259031 - DNA, 122 bp, Homo sapiens
gggagcagccttccgaggtggccgggctggacgagatcagaggctccccgtcgatagggtcggagacccccgtccctcactgcggcagccgcggcgcccctcctgcgcaccgcgccgagtct

SEQ ID NO: 259032 - DNA, 122 bp, Homo sapiens
gacatcactgtacatgacaacatcaagtacatcattgacacgtaaggctgctctgggggccgggattttggtggggatcaaaatggaggtagggatagaaggtttggaggggcaggtcaaga

SEQ ID NO: 259033 - DNA, 122 bp, Homo sapiens
tgggcatcgtggtgaaagcctcgggatcagggagctgcgtctgcaggcaggcctgctggccggaaacctgccaggaaaggaaggggctgtcccggggcggggccagggaggggtggagacag

SEQ ID NO: 259034 - DNA, 122 bp, Homo sapiens
ctaggttgcccagcagggtggacctccagagccgcctgcacgaggcccctcccaccgtgccgcccgcccgggaccccgccctgcgctccgcccccaaacacgggttctcacgcggtccggcc

SEQ ID NO: 259035 - DNA, 122 bp, Homo sapiens
tttgccatcggggttcagagggcacgtgacaagtgctcgcatgcacacagcaaaatacaacggccgccgccctgccattctcccgatggctgtgaccgcaccgcagggaccacgctcccagg

SEQ ID NO: 259036 - DNA, 122 bp, Homo sapiens
gaatttggctgctctagtgcaccggtctcccgtaggggaataacaaaaatgaaaacattccgaaacactgatgaaattcttgatgcagtttttaaaacttcttggagacaggtggccggtta

SEQ ID NO: 259037 - DNA, 122 bp, Homo sapiens
cccttgcccacggccccatccgccacccgtgactggggcacttccctcctgccctctggccgtcagcctcttgcagcaagcatttccatgaacaccaagtcggagattcgtccacgctggtg

SEQ ID NO: 259038 - DNA, 122 bp, Homo sapiens
atgatcctccttctaacttcccagaaaggtacaagcggccagcactgtaactggaaaccacgcgggcaccagcgtgaactcagacccgacagccagcaccgtaactggagaccatgcgggca

SEQ ID NO: 259039 - DNA, 122 bp, Homo sapiens
agaggaaagtgatgacaaatgcccgttatcagcgaacgaggccgatgacaaatgggcgggcgcccgagcagccccattacgctgtaataacagaagatggatggcctggagcccccccaccc

SEQ ID NO: 259040 - DNA, 122 bp, Homo sapiens
tgtgtgtgcatgtatatgatttgtgtgtgtgtggtttacatgtgcgtgtatggtgtgtgccgtgatttgtgtgtgtgtggattatgtgtgtgtatgatgtgtgtgatatgtgtgtgtgtggt

SEQ ID NO: 259041 - DNA, 122 bp, Homo sapiens
ctcagccaggaggccaggaggcggggacagaagcacacacaccagcaaggacccacagaccggcactttcaaccaaacagagacactccggctcgtacacaaccagccgtgtggcttcctca

SEQ ID NO: 259042 - DNA, 122 bp, Homo sapiens
cttcagttgtgttttaggaacttagggcagcttctgtccagttcaaaccagttgagaccacgtacccttcaactaggcatgtgcagatacatgagagggaaacttttgatggcagaggcaaa

SEQ ID NO: 259043 - DNA, 122 bp, Homo sapiens
gaatggcgtgaacctgggaggcggagcttgcagtgagaccagatagcgtcactgcaagtccggcctgggcaaaagagcaagactccgtctcaaaaaaaaaaaaaaaaaaaaaaaaaattagc

SEQ ID NO: 259044 - DNA, 122 bp, Homo sapiens
acaaagtgattctacatttccttggacaacactggagggcccgctcagtcttggcactgacgctggaggccatctccagctccctggcccctgtggcgagctggcggcttcaggtgtcacag

SEQ ID NO: 259045 - DNA, 122 bp, Homo sapiens
gggaccgaggctgcgggctgggctggacacccagattatggggcctgggctgctgattggcggccttggaggggcgggcagaatccttaccgcgaccgtaggcttgtggctccgcagcgggg

SEQ ID NO: 259046 - DNA, 122 bp, Homo sapiens
taagtaaatagcaaatattttctcaaaaaatactaaaccaatgcaaggtagaatctaaaccggcaaatttctttaaaatactgaacacggcaaatgtacaatctctaatttacgcctaactt

SEQ ID NO: 259047 - DNA, 122 bp, Homo sapiens
gagcttaggatttcagagagaaggatactgtgtggggacttgagcttctggagagggtggcgcctcgcgtcatagtcagaagcctagtcttgttttttttacagaggcttaattttcagcat

SEQ ID NO: 259048 - DNA, 122 bp, Homo sapiens
gatctccctctgcctcccaccagtcctcttttggggaacagaacccgatgctctgtgggccgagcatgatggctccagcactcctccctctagtgactcattcccaagactgggggtggcag

SEQ ID NO: 259049 - DNA, 122 bp, Homo sapiens
gggagggaagggaaggttacatagatgtgaaagtgaactgccagccatgagcaacaaatccgagtgacatgtcttcttcatggtcctgacacggacgcgtgggttcgatctgacagcagcct

SEQ ID NO: 259050 - DNA, 122 bp, Homo sapiens
aattactctggagatcttcttgcaacaggagacaagggcggcagagttgttatttttcagcgtgaacaagaggtcagtaattttcagtccacaaatcaaatgcaattattcaacctttcgca

SEQ ID NO: 259051 - DNA, 122 bp, Homo sapiens
gcaagagagagaggggaggaggtgccaggctccttttagcaatgagatcttggccgcgtgcggtggatcacttaaggtcagcagttggagaccagcgtggccaacatagtgaaaccccatct

SEQ ID NO: 259052 - DNA, 122 bp, Homo sapiens
gggcgcctggaccggaccgctgggcgggcgggcgggcgcgggggctggtgcccacgtaggcgcctggtcactcacgtgagcaccgcgtcacgggagctaggccaccaccacccccttcccgc

SEQ ID NO: 259053 - DNA, 122 bp, Homo sapiens
tcagacactgagcctgcttggtgcccgcaggagccaaaaactggcggccagagtttttcccgcccccgccccccgcttacccacaagggtgcccagaggccaccctctgcatcctcctttcc

SEQ ID NO: 259054 - DNA, 122 bp, Homo sapiens
cctcctctcggcctcagctgacttactggcagagtggggtcctgggagagctgctgcggacgttcctgtcaagcagtgaatcactaagggcaagcctcgttctggagacatgtgcatcccac

SEQ ID NO: 259055 - DNA, 122 bp, Homo sapiens
aagcccagctgcacccacccttaagtgggagataaggcttctgcccgcgggctctgcgttcgtccacccggccccacgtttgctgtggactaaacaggagccactggactagagtacacttg

SEQ ID NO: 259056 - DNA, 122 bp, Homo sapiens
ctcaagattgtgtaatgagttcaagattaggtactcattcctctgattcttcctgaaatacgtggggtaaacagtgcatggttgcaaaagcaaggtaatctgaaagccagaatcaagattat

SEQ ID NO: 259057 - DNA, 122 bp, Homo sapiens
gtgacgcgcggccgcagctgcccgcgggcggagcgctctcagaccccggagcgcacaccgcggggccatcggtgccatcgcggatctccaggctcctcatcagtccgccggggccgcagcag

SEQ ID NO: 259058 - DNA, 122 bp, Homo sapiens
aggcgacccaaggaggaattataaaggttttcgttctccttcattatcttttttccaattcggagacttgagactgagcgcatcttggacagtgctagagggttcaaaagataacaccttta

SEQ ID NO: 259059 - DNA, 122 bp, Homo sapiens
cctgttcgctgcgatatgccggcgtcgtgttgagcgggctgcggacacagacagcctgcccggccccactgagtgtttgatccccatcctcgcagctctctagaggaccagagttggcggtg

SEQ ID NO: 259060 - DNA, 122 bp, Homo sapiens
aaactgttaaagtgcctttgtagctcccagagtgattctgaggttggactggataatgggcgtgaaagtccttgtcaaccttgtcacttggtgcagatgtgaaggcatgtggctggggtcac

SEQ ID NO: 259061 - DNA, 122 bp, Homo sapiens
gggccaccactgttcactggaatggctaaataacctcggcagtacacccatgggagtgggcgggaggtcacatggagcatccatgacacccacagcctctgggaccctcgtccccatctcaa

SEQ ID NO: 259062 - DNA, 122 bp, Homo sapiens
gagggactgggcggggctgggcggggcaggacgggggcggcgctcaggaaccctggaacccgctggccctgaggccacggaccgagacgtggtgctgagcccctgcgcggtttctggtgcgt

SEQ ID NO: 259063 - DNA, 122 bp, Homo sapiens
ggctagctctcactgtgcttggggaggatgcacagagcctgtgggtgacaggaaggcgcccgtcctccccacacacagcagggagggcttgccgtgcgtcagctgtggcaggacgcatgcct

SEQ ID NO: 259064 - DNA, 122 bp, Homo sapiens
cctgcaggatggtgtctttcacagcatggaacacgaagcggacgttctcggtgtcgatggcggtggtgaagtggtggaagagtggcttgctgcggttccgtctcttcctgtcgaagcactgg

SEQ ID NO: 259065 - DNA, 122 bp, Homo sapiens
ccgccttcgccggggagccgcaaagcctgacggaagaggctgcggttctcgcgcttcagccgccggttctcgagccgcagccgggcgttctcctgacgcagccgcgcgttctgccggtccca

SEQ ID NO: 259066 - DNA, 122 bp, Homo sapiens
aagaggctaccaagactggaatagccaggggactccacaagtagatctatgagtatcagtcggtggtcgtaaatatgtttccctaccagcaagccacagaggagctccagagagcagcctgc

SEQ ID NO: 259067 - DNA, 122 bp, Homo sapiens
agctcaggcaatccacccgcctcggcctcccacagtgctaggattccaggcgtgagccaccgcgcccggcctaaagcttattttttatgtgtatgtggaaagcggggagaagagtccccgaa

SEQ ID NO: 259068 - DNA, 122 bp, Homo sapiens
ggtctccgagggtcgggggccgcagggtctggcagcaccccatgaaggccgccccaggtccgtttcagccctccagacgcccgtacccaggaaacctgggcctccattcccgagccccccag

SEQ ID NO: 259069 - DNA, 122 bp, Homo sapiens
gcgctgacgccctcattcctcaggccatgcttccattctgtccgggcatttctactcagacgctggcctcgcctgcagcatccgcccagccctgcaccgtgtactccctgctccctcttgcc

SEQ ID NO: 259070 - DNA, 122 bp, Homo sapiens
tagggttcaataacattcgcagtttcaggcatccatttaaggtcttggaatttattctcccggcataaagggggactactgtaaactcatttttaaaatatggatttttaagcttttacagt

SEQ ID NO: 259071 - DNA, 122 bp, Homo sapiens
caaagccctcattgtggtccgaggacagccttttccccaggcctcagagcattgctcatccgtgccaaactgggtaggtggatttgagcggaaagactcccaaaatgtgccaagaatttccc

SEQ ID NO: 259072 - DNA, 122 bp, Homo sapiens
gagagaagtcggagtactgggatagacccaggaggtcagagcggaaactctgcccgggtgcgtggaaccggagtccccggtgcgcggcgccaggtactcacctgtatggctgagcgccagga

SEQ ID NO: 259073 - DNA, 122 bp, Homo sapiens
ttttcgagctgctcatgtccactctttacctgccatccttccctgtgtacgccagctcctcggcagatcaatagacctcaatcgtctgatcacccagcgcgtctcagcagccatgtataagt

SEQ ID NO: 259074 - DNA, 122 bp, Homo sapiens
tcctttttctggacaggcagttccttggccacctggtagggccgcgttgcctggcaacggcggggtccttcttggctcggcggcgctcggggcctgaggggagaaaaccgccgcggagggcg

SEQ ID NO: 259075 - DNA, 122 bp, Homo sapiens
agagagacgtcgaaccagctgggtcttcaggctccgtggcccgggcccttcagaaagtgccgtgagttgatgtgctggagagaatccacgtgtcagtccccgacaccttatttcttcatggc

SEQ ID NO: 259076 - DNA, 122 bp, Homo sapiens
gggggttggacaagatcactaagtcctcttccgtttctgacacttcacagtcaggggtcccgaggtgaggccgaaatcccagtctcccgggacgcagaggcccttgcgcggtgccatccccg

SEQ ID NO: 259077 - DNA, 122 bp, Homo sapiens
aacagactctacaatcatcgtgtctgtggtctcagttcaactttttaccagtctatatggcgaaatggctgcttgccacatccagctgtaagaaaaggcaggcccttctccatcgttgttta

SEQ ID NO: 259078 - DNA, 122 bp, Homo sapiens
aagtcggggagatcgcgcggacccctgcgagttaaccctttcggccacacgccctgggagcggcctccctgcggtccccgcccctgccccggcaaatcctggagtcagcgttctgacaacgt

SEQ ID NO: 259079 - DNA, 122 bp, Homo sapiens
cgcaggatagttttcttccctaccccgctgcgggggagggtgctgcccacagcacaaaaacgtctttccatctgggctcgagaggacagcgtggcttctctcaaatgcacccgagaaataaa

SEQ ID NO: 259080 - DNA, 122 bp, Homo sapiens
ggcatttgaacccagatctgttggatgtgtccagttgactcctgcattgcctttctggtacgtagcaagtgctggacggtaactaccttttttgttattatgatgggcttgaactaggtgtt

SEQ ID NO: 259081 - DNA, 122 bp, Homo sapiens
cgatgcgatcaactggaagaaagggtatcagcgatggaagacgaaatgaatgaaatgaagcgagaagagaagtttaaagaaaaaaaacgaacaaagccttcaagaaatatgggactatgtga

SEQ ID NO: 259082 - DNA, 122 bp, Homo sapiens
tgattgtcaccgtacgaccagtgagggggcggggcggagctgtgcctcaaagcgcctgcgcggagagcctgcaatcagggaccaggcttgggaggcgacgaagaggaacgctgggcgcagga

SEQ ID NO: 259083 - DNA, 122 bp, Homo sapiens
ggcctggcggcgtgggaggggcagtgcggcgggcggcgcttccggagagcggggcctgcgcgctgctcttccccgcggagcccgcgcagtccgcgcagccctcatcgcaactgggcccgcgc

SEQ ID NO: 259084 - DNA, 122 bp, Homo sapiens
tatgtaatggctttcgctctgtgctgatgtgtgacagtcaccttgttggccttctatgtccgggaagaattatagtcactgccctaaagggctcagatcctcagtttgcagaaggcctgtag

SEQ ID NO: 259085 - DNA, 122 bp, Homo sapiens
ttcaaaagcctcaatcctatttaggagttataagtcccaaatacagcaaaaacctcccttcgtgattctttatttccacgaaatgtctatgaagtgcaagtgcaaaggttactactaatttc

SEQ ID NO: 259086 - DNA, 122 bp, Homo sapiens
tcccctgaaagcagatttcacccccctctgccgcccctgccgaggagggagagggaaccccggggtgggctgagtatcccccctagccccgggagcccccagcgccctccctcccgtgcccc

SEQ ID NO: 259087 - DNA, 122 bp, Homo sapiens
agagtggaggcagggtcgctcagggttctacccacacgctgctgttggtcacccgggccccgaaccagcccttccagtagacggagtcctgccccccgtgctcgaagcggacgaagcggacg

SEQ ID NO: 259088 - DNA, 122 bp, Homo sapiens
aattgcagtgaacttgtaacatactaatcctcctgcctttttacattaccatagaaaacgcgaaacccaaacctcctaatcaaactgatagcttcttttatctctacctcagaatatcaact

SEQ ID NO: 259089 - DNA, 122 bp, Homo sapiens
agcaaacttcttaatctccatttagtggaggcggctagcttgaagaggttggttcccagtcgctattttgagtgactttcttgagatcttggagaaagctgaactgtagagtccagccctcc

SEQ ID NO: 259090 - DNA, 122 bp, Homo sapiens
gggttaggatttctagaccccgggatcgtcgtggtgagatttaggatttctggaccccagcgtcatcttgatatgacttaggatccataatgaccctggtctcaccctgatgcgaattggga

SEQ ID NO: 259091 - DNA, 122 bp, Homo sapiens
gggcttcacagcttgagttaaccttgcttttccgggaacaaaatgatgtcatgtcagctccgccccttgaacatgaccgtggccccaaatttgctattcccatgcattttgtttgtttcttc

SEQ ID NO: 259092 - DNA, 122 bp, Homo sapiens
ggggggatggaaatgtcaaaggcaactcgatccggcccatctccctctcctgccaggcgacggtatccgcggggatcgagtgactgcctacatagcctggaatactccacagccgccctccc

SEQ ID NO: 259093 - DNA, 122 bp, Homo sapiens
caacgctggcgtccgggcgctgctgggcagcggggtccggggatgacgtctggggctgcccgtgcccacttttccagattgctctgaatgtcctagtgagctgctcccgttgggtaggctcc

SEQ ID NO: 259094 - DNA, 122 bp, Homo sapiens
ggaagttttccctcttctgcctactaaatttaacagtgagactttcagaataatttgcatcgattttgcttcaaactgcaatgtgggtcaagagtctgcaacttaggataataaaaaactga

SEQ ID NO: 259095 - DNA, 122 bp, Homo sapiens
ccaacagcatgtgctcacttcatgtctgtgtctctcattttggtaattcttacagtagttcgaactttcttattaatattatcatatctgttatggtgatctgtgatcaccaatctttgatg

SEQ ID NO: 259096 - DNA, 122 bp, Homo sapiens
gctcagcccaactcacagccagatgctctctactcagatggagcagatcggtttcagcatcgggattaaaaaaatgggcacgtgcattttatggtaggtgaattgtaccttaatttagaaag

SEQ ID NO: 259097 - DNA, 122 bp, Homo sapiens
actacctcgcgccagcaagacccaaactacggatcccgattgactccgcgcggcgcgtcacgctgtcagctccagccaatcggcttcagacaagtcggaggggagggagacgcagaggcgga

SEQ ID NO: 259098 - DNA, 122 bp, Homo sapiens
ctgccagctcagcagccggttacatctcgcccggcaacccataggcagcgtccgctcatgcgcgctcctggaagacccagcagccccgccatgagttccgattggctccgcgtgagtggcgg

SEQ ID NO: 259099 - DNA, 122 bp, Homo sapiens
ccagcagcagcagctttgggtgtggcgcttgctgaaattcttcccaaaagttttgccgtgcggggagcacaggggagccggggctgtgtgtgctgcagacagggctcccggtaccgtcctca

SEQ ID NO: 259100 - DNA, 122 bp, Homo sapiens
cctcagcctcccaaagtgctgatattacaggcgtgagccaccgcacccggcttataaggccgaagtttagaataaatgagagatgtagcaatactggggttatatgcctcaagtataaagta

SEQ ID NO: 259101 - DNA, 122 bp, Homo sapiens
cctcaccacctttgccgtggtgcagctgcgtcgtcaggcttcctccgactatgactggaacgagagtatctgcaaggtcttcgtgtccacctactacaccctggcgctggccacctgcttca

SEQ ID NO: 259102 - DNA, 122 bp, Homo sapiens
tgacagtgacctgctcaagttcaaccagctcaaggtgaggccgggcttcacccagatcgccggggtggcggcaggacctgagaccggggctcacctctccccctcttccctcccacagttcc

SEQ ID NO: 259103 - DNA, 122 bp, Homo sapiens
ggggcacttctcagagggggcggccgggcagagacactcctcacctcccagaaggggtcgcggccgggcagaggcactcctcacatcccagacggggcagcggggcagaggtgctccccacg

SEQ ID NO: 259104 - DNA, 122 bp, Homo sapiens
aaaggaaatgaccacagccagaaacgaagcagacagacggctggagcggagactcagagacggaggccatcaactggacagctgcgtgcgagggagacatcctcaccaagtgtccccctttc

SEQ ID NO: 259105 - DNA, 122 bp, Homo sapiens
tgctggcactgggagccgcagtaccgggccacctggcagcgcccacagatgttgaactcccggagctgaaatacagaacacctgtggcttcaccatcatgcctgggacgcagtgtggggcaa

SEQ ID NO: 259106 - DNA, 122 bp, Homo sapiens
tggatttccagctttctttcctctcccttgcagaaggctgtttctcgtgcttgacttgaacgccgtccaggatggtgtgtgtgtgtgcgcccgcgtgtgcgtgtgtgcatgtatgtgtgtgt

SEQ ID NO: 259107 - DNA, 122 bp, Homo sapiens
taataactgtttttgtttgttttgctctcctagttttccatcaggacactttcaattcttcggtatcagagattatcttgttcttttctctacctcaacatctaacacagtactagtagcca

SEQ ID NO: 259108 - DNA, 122 bp, Homo sapiens
gtcaggaagcgccgaagccgcgggaaaccctggactccatcccgggatttgtccccgtgtcgaagatggtatccaggtcgccgaaaacttcccggaagtttagaccaagacctacttattat

SEQ ID NO: 259109 - DNA, 122 bp, Homo sapiens
aggtctcacggaagcactgggatcttaaccgggtcttagccgagcagccataggccaccccgcttcctctgtgcttagcctctgaaaagaagacagaggagatgtgccaaactgttaagagt

SEQ ID NO: 259110 - DNA, 122 bp, Homo sapiens
ggttgctggagcccttaatggattgcctccatagagtgaaatcgatggcagtggggatggcggaggctccctgaggactcttgagaggacctggtgacccagcagcaggcacctcccccagg

SEQ ID NO: 259111 - DNA, 122 bp, Homo sapiens
tcagacgctgtagacacggccccagcaggtgtggccttgcaggtggaggcccgaggctgccggcctcacgcctccgcttcaccctggctgcacttcctcctggcagacagcatgtgctattt

SEQ ID NO: 259112 - DNA, 122 bp, Homo sapiens
tagggttgcctgctccagagagcgggactcctgcgctgcagccgggatactgggcgccgccgtgcgcccaccccctgccagtggttcgctccgaacacccctcgtcgggcggcgggtactgc

SEQ ID NO: 259113 - DNA, 122 bp, Homo sapiens
gaaggaccacagttggcagtcagaaccctggctccaacccgccaggggagcctggacggccgcgacgttcccgggtttctcctgccgggaccccggccttcccttcagcacccatcaaagtt

SEQ ID NO: 259114 - DNA, 122 bp, Homo sapiens
ccctcgagggagaatctaggggcagggctgcaaaactgggcttggaagttaggcagacatcgtggagtccgggtgcacctgctggagcacaaagcaccacttgcagacatcctgaccgcccc

SEQ ID NO: 259115 - DNA, 122 bp, Homo sapiens
ctaaggtggggagttgcagtatggttttctcagtgtgagtgaggatggaaaccgttgtgtcgtggtgctccgtgttgccactgggcagcaccacctgttacttgtgtcctgaatcctgcact

SEQ ID NO: 259116 - DNA, 122 bp, Homo sapiens
tggtgatttcggagctggtgtctacggctgcgtctgacatggtggggcacgccggtgacgcgatgcaggggataaaaaagaaagcgacagttcagggactctggcgataaagctgccggagt

SEQ ID NO: 259117 - DNA, 122 bp, Homo sapiens
tgcagaatgttagcctgccaacttttagtagaaaagaatacagaagaacgcgaatatacacgcttcaactggatatgtgtgaaaagaaaaggaaacaaacattgattgcatctttactacgt

SEQ ID NO: 259118 - DNA, 122 bp, Homo sapiens
ggaaggaacctggtactgagttaagagttctggattttaggtcaagatcattcactgaatcgctgagtgacctttggccagccttcccaagaaggctgtttcttccttctagaactatggtt

SEQ ID NO: 259119 - DNA, 122 bp, Homo sapiens
actcgtgcctggttctccgagagcgcagcgcgggctttattctcagggggtgtggcgcctcgcccccaaacccagcagcccagcccccgctgcacagaccctttgtcatttcattaggaagg

SEQ ID NO: 259120 - DNA, 122 bp, Homo sapiens
ttcgtgaccgcagcactctttaccacccctgtcctcactgcggacactgagacgcaggagcgaatgtgcaaacacgacggcttgaccacccctgcagccgaggctgggaggccctcacctaa

SEQ ID NO: 259121 - DNA, 122 bp, Homo sapiens
tgtgcaatagttcatgctagctgcattagatttgtttcatgaaatagactctagaaacttcgataagtacctagggagagagctactacatggaggttaggatcttgcattaggaattgcat

SEQ ID NO: 259122 - DNA, 122 bp, Homo sapiens
caatgggtgagaggtggaaaggacttgaaggcctctgagggttaacaaggctaccgggaccggaaccagcatcctaggaataagtccaggatggagaaggcatcatccagagctggaggtct

SEQ ID NO: 259123 - DNA, 122 bp, Homo sapiens
ccttcttccgtccaccggcagagctaggtcccacataaaaaagggcttgaggtgggcgagcgcctgcctttgtcatccagtgccattaaggccggaatttctcatgggaaaaggagcatttt

SEQ ID NO: 259124 - DNA, 122 bp, Homo sapiens
tgtcagccagccccaagtgtgtcagtcccatcgttaacgctgggctttcccattctctcccgcagaggggcacagccgaacccttcccgaggctccacaacttgtacagcacccctcgctgc

SEQ ID NO: 259125 - DNA, 122 bp, Homo sapiens
cgagccaagctgtccccagcgcctgcctattaagtgccactaataggaaatcaacaaaagcgccgtgacatctgtgtagacgtcccaggccccaggtctgagtgcacaggtgctggccatga

SEQ ID NO: 259126 - DNA, 122 bp, Homo sapiens
taggagccttagtctcataataaagtaatcccaggcgctcctcagttgtgacaaaggagccgatcagcgtggccagaaggacgcctggtgcctgacacccggcaccaaagtgagatgttagt

SEQ ID NO: 259127 - DNA, 122 bp, Homo sapiens
ggactcaagtgatccacctgccttagcctccctaaagctgggattacaggcatgagccaccgtgcccagctggaatcagcatttttaaacaagcagtcctgatgattctgtaccaggaccat

SEQ ID NO: 259128 - DNA, 122 bp, Homo sapiens
tcctgcctggggtggtcagtttccaagcctttccagatggacttctgcagcccaaagctgcgtgctccccgtgcaggcccttgtcagagcagagaaagatggctgaagttgttgtccatcta

SEQ ID NO: 259129 - DNA, 122 bp, Homo sapiens
aaagacaggggctctgagatggccgtgtgcatggtattttcccatatccccagaccttttcgggtttgtcattgaatgttgtgcactccatcgtgcaatgatgtctgctgcctctctcacct

SEQ ID NO: 259130 - DNA, 122 bp, Homo sapiens
aaacttgcccttgctctgggccaccccaggaaccggcccacgggtccccggcctctgccccgccccattccggcttggccccgcctccgtttcttaggggtaggttctgttgctgtgggaag

SEQ ID NO: 259131 - DNA, 122 bp, Homo sapiens
cagaaatggtgctcaccatgcttccagctaacaggtctactaaacatacaaaagtttagccgggcgtggtggcgctcgcctgtagtcccagctagtccggaggctgaggcaggagaatggct

SEQ ID NO: 259132 - DNA, 122 bp, Homo sapiens
tagaggtgcgcgtcatcctgcagcaataggcgtggccgagagacaggcgcagagcgggggcgggccagttgccttgcaagcttcgcagacccagcggcccgcaggcccctaggtgtagaact

SEQ ID NO: 259133 - DNA, 122 bp, Homo sapiens
agaaaaaaaaatcaatccacgtacagggcaagcgttaaaaatgtgggcataaaaggctgacgatctacatagatgcttattttaaatggattatttgattatttttgcgtgctggaaacttt

SEQ ID NO: 259134 - DNA, 122 bp, Homo sapiens
ttaccttcagggctgccatgtcctgcttgaagtcttcctcataaagactggcgagggaagcgggggaaatattcatctgcagaaggattagatgtgcacgttaatgagtctggggcattcgc

SEQ ID NO: 259135 - DNA, 122 bp, Homo sapiens
ctggcgagtgtgcccccccggcgcctcctcacatgggctcctggcgagtgtgcccccccgcgcctcctcacatgggctctggctctagcccccgggggtggggctgctgagcacacctgggg

SEQ ID NO: 259136 - DNA, 122 bp, Homo sapiens
gggctaaaagttcagcccttcgacagagccatggaataagaggcgactctccctgtgtcccgcaagtggtttctcgaggtacccctctgaggctgcagcccccggagcagacctggctctgc

SEQ ID NO: 259137 - DNA, 122 bp, Homo sapiens
aactgaaagcaaaaccacttttaatactaagaatttattatgatctctccatgatactaccgttttttcaatcccaacaatcatcatcacatcccagagccatctcatgacaagagctttct

SEQ ID NO: 259138 - DNA, 122 bp, Homo sapiens
gttatacccatcagtcctgtgcaaaggtcctgggactggcccaggggcagccggattcttcgctggggacaggagctgtcctgctcacccagcagaagcatgccaatggacaggtgctcggg

SEQ ID NO: 259139 - DNA, 122 bp, Homo sapiens
cctcccttgttttttgttcctctgggagctccccagagagtgggccactgtgggggccatcggtgcagagaggacacaatggaactcttgtgaaactgtgggcttctcctgccccctcccca

SEQ ID NO: 259140 - DNA, 122 bp, Homo sapiens
actctattaccataggtgtgacactcagctgtcaggactatgcaccccacactcactagacgcttaccggtacttcaaagaacattcctctctcactcacctccaagcatgcggcctgctac

SEQ ID NO: 259141 - DNA, 122 bp, Homo sapiens
ataaaccttggtaccgccaactctttggtccgtgccatctaaaagcgctgtgacactcaccgcgaaggtcccggctttattcctgagaccacgaacccaccggcaggaaccaactccagact

SEQ ID NO: 259142 - DNA, 122 bp, Homo sapiens
tcccaaatctatgaagagcccgttagagtagtgcttcaggttcctctcgaaaaagctgggcgagagttcccactaaggcgaagatcattcacaggtgaagggagacagagcaggcgatgggc

SEQ ID NO: 259143 - DNA, 122 bp, Homo sapiens
tattctcatggcagtaagtatacatcgtcattatctttttaacatcttaatagtatttcacgatattaatgtgccttaatttgcgccatcttctgatattgaaagtttaggctgtgacagga

SEQ ID NO: 259144 - DNA, 122 bp, Homo sapiens
ccgagaggaagcagtgggtgtgggtgggcgtccccaggctcagtccctgaacacacatgccgggcgggagacctgccctgaggctcggcagcccctcagtggggtctgctgctggactccaa

SEQ ID NO: 259145 - DNA, 122 bp, Homo sapiens
gtgcttccagcccccacctcggacgacccgctgtccccctctcacggctgtttgcccgggcgttctaggatgctctggtattagagcaccctgcctgttcctggccccctgagcaccaacaa

SEQ ID NO: 259146 - DNA, 122 bp, Homo sapiens
cggccttctggacaagccagacaactgtcctgacatgctgtacgtacttcctgggccctccgtgctcttctgagttctcttctcaaatacctgttttcttgggtcacaggagattaggagat

SEQ ID NO: 259147 - DNA, 122 bp, Homo sapiens
ttacagctcttaaggcagcgcgtctggagctgttcgttcctcccggtgggcttgtggtctcgctggcttcaggagtgaagctgcagatcttcgtggtgagtgttacagctcataaaagcagt

SEQ ID NO: 259148 - DNA, 122 bp, Homo sapiens
ctctgatatgctgtccctggggtgatgtggagctgggatgtcaggtcactgaatgcccgccggtaccgcagttcaaactcgtcgcctgcctccctcagcgcttgctttactgctgccatggg

SEQ ID NO: 259149 - DNA, 122 bp, Homo sapiens
ctgtctcgctttctcacctgcgttccctcctttcatcccggagcccggaacctccgcttccggctccacgtccgcccggaagaagatctgctgcacacttccgtttccggtccgtgcccttg

SEQ ID NO: 259150 - DNA, 122 bp, Homo sapiens
atattcctgtatacaatcaaatgatgtaagttttaagtgttattgttaaactatcaattgcgtaaccatgtcaaagagtgtaacataggctactagctttcgttactactagattcagccat

SEQ ID NO: 259151 - DNA, 122 bp, Homo sapiens
cccagcgagcaagtgcgtgttctcgggtcctcgccccgagcagcctggccagcagcatcccgcctcgcccacttcccagtagacacagggacagcggcttccactcccgggacctctggaca

SEQ ID NO: 259152 - DNA, 122 bp, Homo sapiens
ttgatactaaattttcaattattacttcaaaataagagtctgaggatttcttcttactggcgttcttaaaggtctctaaaattaaagaacaagatgtggttttttgtttaagacgtttttag

SEQ ID NO: 259153 - DNA, 122 bp, Homo sapiens
tctcccggaccccgcagtcagtgtgggcagcaggcccagagtggtgcgagccgacggcggcgttagaaaggcggcgtcccgacgaacagagtgactcggcctcggctccccttcaaagcgcc

SEQ ID NO: 259154 - DNA, 122 bp, Homo sapiens
gagcttctcttcatgtccctaatggcgtggctgcgccagcatttaataaaagctgctgaccgggaaatccgagctaactgaattacttcctcattaaagaggcgggcagattcttgggcccc

SEQ ID NO: 259155 - DNA, 122 bp, Homo sapiens
gtccggctcctggaggacagcgggatgggagagtcccgttcacacccagccccgcagagccggatagaaacgctgccactgccgactccatgctgccgggaagtgcactgtggaggccactt

SEQ ID NO: 259156 - DNA, 122 bp, Homo sapiens
gggggtgggggctagtggggcagaggataagcaggctggaagagccgactcctacggctgcgatccaagaggtgcctgcaacagttgccccccgacttctgtcgcccccatggaggcaaaca

SEQ ID NO: 259157 - DNA, 122 bp, Homo sapiens
agaggcttggggtcttgcgtttcgcccaccatctcctggggacagggtggagtcgatatccgggacgggggggaggttgcggtgcccctcagggctacctctcaagagtgctatcatttccg

SEQ ID NO: 259158 - DNA, 122 bp, Homo sapiens
taagtggggcggtgcaggtggtcgccttgggaagggagcgcgcaggggggtaaggtggggcggcgggaagtgctagaagtcaccccagccaaactgaaggagcccagtttccagctgagagg

SEQ ID NO: 259159 - DNA, 122 bp, Homo sapiens
gtcaccctcttggttaacaactgtcaacagcctatagaagatcaaggctaaattccctaacgtgacacaaagacctatctgccccggctcctgccactctccctgtttacctgctatgtctc

SEQ ID NO: 259160 - DNA, 122 bp, Homo sapiens
ttgcttgaatgtgagaggcaagcaaagccccctggaataaaacaatgagccaggctgccgcgcagaaatgacctcttctcataccctggccctctgaggtagcaggaacctccctttatccg

SEQ ID NO: 259161 - DNA, 122 bp, Homo sapiens
tcccacctcggggagcctggccatgaccttgcgttcatttctgccacaatccctttaccacgtgccgggcacttgctggatgctggggattaagcttagtctggtgaagaggaggcaccaga

SEQ ID NO: 259162 - DNA, 122 bp, Homo sapiens
tcacttccaggaaggagccagggcaggacatgaatccagcccgctggacttgagagctcacgcccccggcagccacacatcatcacacaacctcattagcacacccgattccctcccccacg

SEQ ID NO: 259163 - DNA, 122 bp, Homo sapiens
gatattttggagcgcgtggaattagaacgagtagggggagcgcaagcgctgtcagctccgcgggaaattccagtttccccagttctcccccacgcctagggctcaacctaaccactacggcg

SEQ ID NO: 259164 - DNA, 122 bp, Homo sapiens
cctcccccagggggcagtttctccgggattaagcgagagtcgcggcggaaaaggcccagccggaacgagatttacggcgggggagtcctggagcaggaagtgcgcatgcgtagatggagcaa

SEQ ID NO: 259165 - DNA, 122 bp, Homo sapiens
caccttaaattaaaaatttgcttatttttgaggaatcgatttcttctcccggaacgccaacgtctcccaggatttgtcttcacagaagacactgtggggaacgctggcttccagcatgaacg

SEQ ID NO: 259166 - DNA, 122 bp, Homo sapiens
taaactcctgtctccttgaagttaaatatttccttcacactttaggggccttttttttttcgaaatgctcttttgcccctctctggataacaagtagtaggtgctcaattgtttgaattaca

SEQ ID NO: 259167 - DNA, 122 bp, Homo sapiens
ccatagcaacggcgcaacacgcgaggcagcgcctcctcctgcgccgcggttccggcagcgcgggaaggttattcttggttgcaaaggcgcaggaagccagagtggaaaacagccaggaatta

SEQ ID NO: 259168 - DNA, 122 bp, Homo sapiens
atactatttatttgtttgataaaatctccctgtctgttacttgtcttctccaaatgtttccgaacagctattcttgtgcattttcttttgcatataaacttgagaatcaatttgacaattcc

SEQ ID NO: 259169 - DNA, 122 bp, Homo sapiens
tggaatcctggccatgctactgacaaactgagtgatcttgagaaagtgacttaacccgtacgagccgtgtcttcctcggtaaaacagggtaatgatgttgacatcattggaatgttgtgaga

SEQ ID NO: 259170 - DNA, 122 bp, Homo sapiens
agtttcaatactaaaacatggaaaagctgcatagtcattttgtttacttacaaattctggcgaagttttaaatcgtaaaactgttagtatcaggagagcccttcgagtattctctccgctcc

SEQ ID NO: 259171 - DNA, 122 bp, Homo sapiens
ctctgagcgcagaagctagtggggtttcttcggagcgattgtttagtattcatggggcgacgcaatctctcccacatctgcttagcacagcaagtcctgtcatataactgtctcccgcactg

SEQ ID NO: 259172 - DNA, 122 bp, Homo sapiens
tgtttgtttcttgtgtaaaacgcacagatttggaacgagattatttgagcagacaagttgcgccagcgcccgaggccagatagggctcgtgggacttcttcccccgtgagtggcgggggatt

SEQ ID NO: 259173 - DNA, 122 bp, Homo sapiens
ctcaagcgattcacctgtctcaggctccggtgtagctgtgattacaggagcgcgccaccacggctaatttttgtatttttagtagagacgaagtttcaccatgttggccaggctggtctcga

SEQ ID NO: 259174 - DNA, 122 bp, Homo sapiens
gagcaccggccggttggggatcgggtgcaaggggccgtgcttcggacacactgaagcatgcgcgttattgcactcctcacaccctgcaaaagagagacagtcttgaagaaaagtccaattcc

SEQ ID NO: 259175 - DNA, 122 bp, Homo sapiens
atttggtccttcacacagctgaaaagcatacttgattcacatttgtgacttagcaaaatccgattactacatgtcatgaaacttcacagttacctgtgaaggattgacaccacagctgttaa

SEQ ID NO: 259176 - DNA, 122 bp, Homo sapiens
tcgcataaaatctggtagttggttgtggagatgggagtgagttttaaaacagcacaaaggcgatggtttgagaacattcagataagagggaagaggcaagcagaaggaagatttttaagcca

SEQ ID NO: 259177 - DNA, 122 bp, Homo sapiens
ctatgaatgtcttatcatattggagtgggtaagatcattgcaagcatgacagcagactcgcgaaggcacaagaaaatgatttatgaaagcagatataaaatgggtattaacatatataatat

SEQ ID NO: 259178 - DNA, 122 bp, Homo sapiens
gaacaatgggtgaaagacaggtttgaagcctggcgcctgagcccagcagcctggtggcagcgtggcacgctggagggacggaatggagagaagacggggtcggagttgatagaattggaaac

SEQ ID NO: 259179 - DNA, 122 bp, Homo sapiens
aaggtcaaaaaaggtgggaaagggaagatagaactttaaaagggctgtgaaagaggtaaccgcacagtgatagaagcacatggagagttccccagactgacgacataagtaaggcctcctgg

SEQ ID NO: 259180 - DNA, 122 bp, Homo sapiens
gaaccggccaggccagacagctagccaaagatgatccgtagccacagatctggttatttacggcttgcctgtggtccccagtgaccgggcagctctcggatgacagcagttcatcttaaaca

SEQ ID NO: 259181 - DNA, 122 bp, Homo sapiens
gagaggacaaagtcaaggaggccaggaaagccattgctttgttacccaaagggaacccaccggtgagaaccacttttttgacaagagatatagaggggatgtgcccctgatgtgtgcagcgc

SEQ ID NO: 259182 - DNA, 122 bp, Homo sapiens
agaggtctgggatctggacagcgcgggggctggctcacagggactggtgaaggaaactgccgggacccctgccacagccatggctccccgcaaagacgacctcgagcaggcactgcgggcag

SEQ ID NO: 259183 - DNA, 122 bp, Homo sapiens
ggcaggcctcctcctcctctcatctgcttcagagacgcatgtgggtccagctgccatggacgtcatcctgagctgtccaggcagacactcccagtctggtctcttcttgctcccttctattc

SEQ ID NO: 259184 - DNA, 122 bp, Homo sapiens
ctttcgtggagaagcccaaggtgaccccgaatccagacttgctggatctggtacagacagcggatgagaagcggcggcagagggaccagggggaggtaggcgtggaggaggagcccttcgca

SEQ ID NO: 259185 - DNA, 122 bp, Homo sapiens
ctttaggttctctatctcagaccacaccctaaccacataaaattaatgcttaacttttatcgttaggtagccaacctagaactgaaatagagttcaggaagagcctctggagtaattttatt

SEQ ID NO: 259186 - DNA, 122 bp, Homo sapiens
tgccaccccgggtgttccaaagactccggcaaagatctgcgcctcccgggtctccctacccgccagcccgactgcgccgcatcgccagactctgttggcccatcagactccgcccggcagtc

SEQ ID NO: 259187 - DNA, 122 bp, Homo sapiens
accgagaggcggcaacacttccaggagctgcgagcgcgctcagacagcaaatagcgacttcgtctttcccagacccctgccgcctgcgctcaccactccctccccgcgacccctcctgcgcc

SEQ ID NO: 259188 - DNA, 122 bp, Homo sapiens
cccacccccggtgaggtgcccatggagggtcttaggctgctaaatccctcccagggagaccgtggcgccccagcgccctctagtggtggcaggaagagtctgtggggagggcaaggaagggg

SEQ ID NO: 259189 - DNA, 122 bp, Homo sapiens
tgtccccactcccagctcacacacaggccccctgctgactggatctggtccccaccccaccgcccaccaaagacccggaaagggctgggccccagcctgggcccctctaccaacagaagcga

SEQ ID NO: 259190 - DNA, 122 bp, Homo sapiens
tgatgagagatacagagcacagaatgtatcaccgtaactacttcttcagctgtgcggagccgtggccttgaagtccacgcaggctgttgtgctaccgtcaccagcagcattccggacagagc

SEQ ID NO: 259191 - DNA, 122 bp, Homo sapiens
tcccaggcagccccagtcaacgtgctcttctccccattggaatccattttccagaaaagccggtttctacccgcgccaccctcccccagctcactccacaatgtcatggagctcccctccca

SEQ ID NO: 259192 - DNA, 122 bp, Homo sapiens
cttctaggctagtgttgagctgaccctggggaagattgtagttgcctttccctggaaaggcggctctctgagtgagaaaacttcataaagactactcttctcagtgctcataatgtgttttg

SEQ ID NO: 259193 - DNA, 122 bp, Homo sapiens
agaggcttccctaacttttgcggaggtggggtcaggtgtgctcagacctgcagtggtgtccgggggggccctgtgtgctggatggagcagagctgaggtagagggcggacagggttccaccc

SEQ ID NO: 259194 - DNA, 122 bp, Homo sapiens
tggtggcagtagaattgcccatctagtgcctactgatctgagtggacttgacttcttggccgtgtctctgtttggagttaaagaggaacgattttccttgtgcattattttgaaaatcacct

SEQ ID NO: 259195 - DNA, 122 bp, Homo sapiens
caccccacagaaccacatggtgcccatggcacgcgaatgcgactgggcagtgctatcactcggaaaagggcctacaggtgcgaaacggcggcaagtggcttgagatgattttaatacctcgt

SEQ ID NO: 259196 - DNA, 122 bp, Homo sapiens
gccctgctgcctctggtgtgggagactgagggggttcatctgtggtcctgccctggctctcgccccagccccaccccttccccagctctccatttcttgcttatgaaatatgcatggagaac

SEQ ID NO: 259197 - DNA, 122 bp, Homo sapiens
gagtcctggaatcctgacttgagtctaagtcctagggctcgtgaggaagggccgcacgtgcggtgacagggtccctctgataggttatatgcctctgcttttcaggaaggcccgaacaagac

SEQ ID NO: 259198 - DNA, 122 bp, Homo sapiens
gagtgcggttagtacacgcacagacgtttgaggtgtgcgtgcggttagtgcacgcacagacgtttgaggtgtgcgtgcggttagtacacgcacatacgtttgaggtgtgagtgcagttggta

SEQ ID NO: 259199 - DNA, 122 bp, Homo sapiens
aactgcactgcccagaaccgggtttcccaacctgtagaggccgcatccgcgtctcctgggcgggcagtgccggtaatccccaacaagccccagcctgcttggaattaacgggtctgactgtg

SEQ ID NO: 259200 - DNA, 122 bp, Homo sapiens
gttgtgggtccctttgaggcaatttccctggagaagtgcatggttattaaatttaatagtcggtgcagatgattcatcttttgaaggcgctcagaatgatggctgaggataaatgtagaatt

SEQ ID NO: 259201 - DNA, 122 bp, Homo sapiens
cccctcgacacatggcaagtaccagcggtcacaatgtgggcccagtgggagcgacgagaccgtgagtcggacactcacaagccggttaggagcgtcaaggggcaaagcggctctgggaacaa

SEQ ID NO: 259202 - DNA, 122 bp, Homo sapiens
acctccctctactgcagtcacatgatcatctgaatgaagtgttcagtcctcctctccttccggaagcttaggcagacagaagatgaatttaggtgtgttccacctcccttcctccagaaaga

SEQ ID NO: 259203 - DNA, 122 bp, Homo sapiens
ccctctgctcccctcctgcatccacatagcagcttcaggcaaggcctccataaggcccagcgtggatcagtgcctgccccttggccgaatcagtgctgtcacaggcagagaattgtcactgc

SEQ ID NO: 259204 - DNA, 122 bp, Homo sapiens
gccctggcccgtgtgttttgagcgcgttccaaggtgctcggcgtgaataattgatgccagcgccacttttgtcatgggaaggtcaccctgggtgcggtacagtctccgccaccacaacagca

SEQ ID NO: 259205 - DNA, 122 bp, Homo sapiens
gctcacaattctgtgggccagcagtttgggctgggatgagccaagtacttctggtcttggcggctgggcttactcatgcatttgtggttggctggcagtcaactagtgggctctgcttctgg

SEQ ID NO: 259206 - DNA, 122 bp, Homo sapiens
ccaacaccgtcctcaggctgagattctgactgggccacagggagctggtcacttttaggacgtgaccaagagaacttctttttaaaaaagtgcacctgaccccctgctgggtggcagcctcc

SEQ ID NO: 259207 - DNA, 122 bp, Homo sapiens
aatgagctgtgatatccttttgatggctataatttattccaaatcgtccctggactgaaacgatcaattagcagcccgaaacgcactgtgaagtaaattgtcacactctctattacaggatg

SEQ ID NO: 259208 - DNA, 122 bp, Homo sapiens
ttataaataacgtaaaagagtgtgtgaaactgtggaggcaggctgttgtagataggcggtcggaaaagctttgaagagatggcatgtgtgctgagtgcttaattagaatatggaagagagag

SEQ ID NO: 259209 - DNA, 122 bp, Homo sapiens
agctcattcttcgtgcagttattggctgggactctgtgtgccgctgtcggccaatgaagacgctggagatcgggcccctgcccgtcccctttctgcgccccgggatgaggcagagactgaac

SEQ ID NO: 259210 - DNA, 122 bp, Homo sapiens
agatgccataccccgagggaagatctatgagatctacctcacgctgcacaagccggaagacgtgaggtgtggccgcgggccctgttgccgggggtgggagggacctgcctgctgccttcggt

SEQ ID NO: 259211 - DNA, 122 bp, Homo sapiens
atggagctttaagagctccctcctgtgctaaggcaccacttggagtgggtgtcccacaaacgtgagcccacatctccttaagaacctccggtgtgtgtctttattgcctgtgccttctcatg

SEQ ID NO: 259212 - DNA, 122 bp, Homo sapiens
tgcaggaagccctgtggccagagggaaaactgcacaagtagcgggtgtggctgagaggaccgcgtttctgtaatgacccagatttaaaagacataaggtggataattctacatttgtgtgca

SEQ ID NO: 259213 - DNA, 122 bp, Homo sapiens
gcgtccaggagaatgtgcgcgagagaggggcagcctaagggaagcaagggccagaccctgcggggcctccactgtggggcctatgagttaagtctggtaggatcttttctaggtttcctggg

SEQ ID NO: 259214 - DNA, 122 bp, Homo sapiens
gccatctttctgcctcacctttccaaggtgtaattcctaaggtattacaggtgtgaaccacggtgcctggcctctactgttgcttttgagactactttatatatgctagtcttttggcagat

SEQ ID NO: 259215 - DNA, 122 bp, Homo sapiens
cctggcccaggtgacatgggtagcagcccctccagaggtagcggtagtgcgtgcccgcgacgcgcgccaggccccccaggagcccaaggcaccagagcgcggccagcccgcggtcccgggac

SEQ ID NO: 259216 - DNA, 122 bp, Homo sapiens
gggaatttaactatttccaagaaatcttttttccattattaactgaagaaaactgggtgccgtttgcagaatttttaatacgaggaaataaatagaagtcagcaggttccacatcatgactg

SEQ ID NO: 259217 - DNA, 122 bp, Homo sapiens
ggggttggcgtgcatgtccgtgtgtccctgtcaggcgtcaaggtggtctctggtgatgtccgggcctgcccggcagtgctggccttgtctagtctgtcctgttgcagctcccttctgtctgt

SEQ ID NO: 259218 - DNA, 122 bp, Homo sapiens
ttccagtcattctacacccgcttggtgctgccagtgcgggcagggccttggagcccaaagcggatccccacacttgtccctacggtcggaaggaaagtagaggagagaaagtcaggcgcggc

SEQ ID NO: 259219 - DNA, 122 bp, Homo sapiens
ggccgacgggccctgggccctggtgggagctccggcctccggtcaaggcctggccgggagcgccacgaattctcgcgtcgtctcgcgagagtccaagttaaagaacatggcgacgtctaatc

SEQ ID NO: 259220 - DNA, 122 bp, Homo sapiens
tggcgcagcacaggccctgagcgcgcgaccccaggccctgggcgccccgccgcatgctcgcggctggaagccccagtttgcgtggcccttcgggttattccgctcaagagccgccgcgtcgc

SEQ ID NO: 259221 - DNA, 122 bp, Homo sapiens
tctgctgtgagcaggtccagggacccccttcagagtggtccccactcatgcagggctgaccggccagttaggccggggtgcacggggccttcagagaaaactccagccgcctgcacttagca

SEQ ID NO: 259222 - DNA, 122 bp, Homo sapiens
ggtgggcgggaaggccggagctcacgttagctcagtgctagtgccacctagtggctgtcccggcgtctgccggtccccgggcactgactccttccaggtagggtggggcttcggagctctgc

SEQ ID NO: 259223 - DNA, 122 bp, Homo sapiens
ccgtggccacctggccatgtggccggccaaggccctgtgagatgtggcaggcaggcacctcgggggcctgggtctcctggaaatgtttctgtcactctgggcgcaggtggcgccagctgggt

SEQ ID NO: 259224 - DNA, 122 bp, Homo sapiens
ggtgcgcattctgggcctccgagggtcttgatgaagctcatgtagtgtcatgtgctctctcgggagagcgttgactattttcactcctaacgttggcatcctacgagccaggtaggcataac

SEQ ID NO: 259225 - DNA, 122 bp, Homo sapiens
cggccgccatctttgttcggtacaaagccctgttttgcttccggaaactcggttctgctccgcccctgttggccacgtgtttttgtttatggacgttatttttgccaggcatggtggctcct

SEQ ID NO: 259226 - DNA, 122 bp, Homo sapiens
gccaaggatcctctctccagtgcatgcaccattccttctccttcgcctctccctcctccacgaccagccaggtgaaacaattagggagaagggatattctgattacttacttacttcagtga

SEQ ID NO: 259227 - DNA, 122 bp, Homo sapiens
ggacggcgcggaggagctggaggatctggtgcacttctccgtgtctgagttgcctagtcgcggctacggcgtcatggaggagatccggcggcagggcaagctgtgcgacgtgaccctcaagg

SEQ ID NO: 259228 - DNA, 122 bp, Homo sapiens
cgtgctgaatgagagtggcttttggatgtcctataccttcaaggagctgtttgtcagcagcgaatgacatggcaagttccactcctagagtggatggtctgtgcccattgctcagtggtgca

SEQ ID NO: 259229 - DNA, 122 bp, Homo sapiens
tattgaatcagaatcagcattttaataagatcccggataattgcacactaaaatttgagacgcataggcctaggaaatttaacaaataccggagattctactaaaaaacatttatagttttg

SEQ ID NO: 259230 - DNA, 122 bp, Homo sapiens
ggccaacattgatttccaataataccagcccttagtaacattcctttcctttgtgcagctcgcagtctaagagaaagggtgtaagcactcaggtctaagatgatggagaatggcacaaagta

SEQ ID NO: 259231 - DNA, 122 bp, Homo sapiens
ctaactttatggacctcacgtgactttctcgagccagtgaggggtatctgtctgacttctcggcgatttttacgatctaacttcgagataaaacccctatccatttgacatctaaatgtcat

SEQ ID NO: 259232 - DNA, 122 bp, Homo sapiens
cccacccccccccccaccaccacctggttggaacgcctgggtcctgggacctccgtgctgcggcagagctgggtggggtgtgcaggacacctggccgtcctcaccttcacagtgcagtcctt

SEQ ID NO: 259233 - DNA, 122 bp, Homo sapiens
tggggagctgcaacacccgtgattgtaatgacctatgggagaagacgcacaccttcccaacggggctcttcccaagccacaagtagacttggcaaactttttgtcctaaagggtatattttc

SEQ ID NO: 259234 - DNA, 122 bp, Homo sapiens
gggccaagagcgcgtgcgcaagacgtccctggacctgcggcgggagatcatcgatgtgggcgggatccagaacctcatcgagctgcggaagaaacgcaagcagaagaagcgggacgctctgg

SEQ ID NO: 259235 - DNA, 122 bp, Homo sapiens
gcaaacttcctaaggtaatcaggagagctgctggtatcctgattttaagaaaaagaaactcgagtgagtccaaactccttagaaagttggttgctaaggacttggaaaagctcttcagcttc

SEQ ID NO: 259236 - DNA, 122 bp, Homo sapiens
ctcactctttgccctgttctgtctttcatggttagtggtgttttggaggtgtgtctaaaccgagccagggactgcgagttccaggacagtccttcaaaaaggtccatctgctggtttttgtg

SEQ ID NO: 259237 - DNA, 122 bp, Homo sapiens
ctctttgatcattgtaatttaggatcttcttaggtcaaataagaccatttctccaactatcgacaggaggtggcgccataagtcttgtacataaaccccgctggagtttccaaaggtgcatt

SEQ ID NO: 259238 - DNA, 122 bp, Homo sapiens
gccccacaaccagagcgtctgactcagcgggagtgaggggagccccaggtggtgccgatgcgggcgaggctgtaactttacagtaacgatcttctccattaaatgtgtctgtggctgcagtg

SEQ ID NO: 259239 - DNA, 122 bp, Homo sapiens
gtgtcctccacgttgccaccgtttactgtgcagtgagtgccggtcccaggtttagggtaacggggacccgcatcaagcccggagcatctgcggcagagctcagtccattcagaggctgagtt

SEQ ID NO: 259240 - DNA, 122 bp, Homo sapiens
acgctgagccaagactgggaaacgaactctgggaactcaccccaggctccccaagaacatcgcccctctggctggagcgcaattggtgattggctacttaacccgtccgtcctttcccgccc

SEQ ID NO: 259241 - DNA, 122 bp, Homo sapiens
gttttacggtggggtaatagcacatgccatacgcaaacctaatgacaattctttattgcacgaaatgaagacaacacggcgagctgcggctccctgctcctctcgcggcgcctctgcggagg

SEQ ID NO: 259242 - DNA, 122 bp, Homo sapiens
tcctcgggctctcggccggcggtgagtggcccggccgtccgcgtccccaggccccgcgcgcgctctgcaccccggcctccccgctcacggtctcgctccccgtagggcccgcgccggcaggt

SEQ ID NO: 259243 - DNA, 122 bp, Homo sapiens
ctgggcggcccaccagcctggctagcttcgacagtgactgctccctgcgggccctggcctcggggtcccggccagtcagcatcatcagcagcatcaatgatgagtttgacgcctacacctct

SEQ ID NO: 259244 - DNA, 122 bp, Homo sapiens
ggcgccgcggcgggagcaggctgggctcgggatgcgctcagccaatcagtgggggagcggcgcgcgcgggggtggcgcgcggaagggcagcccgcgcgctcccggccgcagggagtaaccgc

SEQ ID NO: 259245 - DNA, 122 bp, Homo sapiens
ctctcggtgggtgcacgggagacccacgtgtgtcccatccagaggctgcaccccggtgaccgccctgccgtctgaaaacacgtccaccgcgggcactgaaggcaactgaatgcgacttggtg

SEQ ID NO: 259246 - DNA, 122 bp, Homo sapiens
aaaaggtggatattccttctatgtttatgttatttatggttaaacatagaggaaattccacgttttcagtatcaaatgctgcttggaaacattcctggactgaaaccaccatcagggaagag

SEQ ID NO: 259247 - DNA, 122 bp, Homo sapiens
gcctccttccgaggcagggatcctgtccctgcccccaggagcttcctgttgactgtaggtcgaaccagccttgccgggaggggaaccgaagctgagttctgtttggcgactatcccagtcat

SEQ ID NO: 259248 - DNA, 122 bp, Homo sapiens
aatcgtttgaccggcctggcctggggtcctgctctctctggtcacgtgggtgcagaccaacgtgcacctgccccaggagcatcactgcctctgtgacctgggcacagcagagaggacaccta

SEQ ID NO: 259249 - DNA, 122 bp, Homo sapiens
aaattcatttgagcgtgagagtggggacaccagagtcactttgcagccccgtgacgtcaccgataacgggcatggcgtcactcaggagaccacgtgtgcgggccgagcaagaagccccgccc

SEQ ID NO: 259250 - DNA, 122 bp, Homo sapiens
cccacttctttctgggacaaaggcgtcatcccttagagacagtaggaaaatggtatctcccggaagttacctcacgacctccaagagcggcttccaaccttgccggaaatgacgaacgagtc

SEQ ID NO: 259251 - DNA, 122 bp, Homo sapiens
gatgcaaacttgagctaaacgggaaattaaagagggaccagggctgggccatgacagcagcggccacactcggatgggaggaggcgaatagttggttccttaccaagaacccggcagcaggc

SEQ ID NO: 259252 - DNA, 122 bp, Homo sapiens
atactgactcatgcccttaaacgagtgcaggaggaaggaagggaggagggagggtgcagacgctccacgcctccagcccccgccactccatgaccttcagaggcccctatcccaacgggagc

SEQ ID NO: 259253 - DNA, 122 bp, Homo sapiens
aaacccccaagagagcgagccaacagggttgtgtcctggtgagtgtgactccccaataaccgaaacctcccgcccgcagtcgcactaaggagcacaacttcaactccacacctccgaggcgg

SEQ ID NO: 259254 - DNA, 122 bp, Homo sapiens
atcaccttagcctaccaaagtgttgggattacaggcatgagccactgcaactggcctacacgttgtattctgaaaggaatattatggatgaaaatgcactgggacttaatcatagtattgat

SEQ ID NO: 259255 - DNA, 122 bp, Homo sapiens
tagtactagcacttagccctgatggatgtcttccttgatgaaggtggctattatgacattcgtataatgctattctatgaatcaggccaatattagctattttttgcccaaccccagggatc

SEQ ID NO: 259256 - DNA, 122 bp, Homo sapiens
ttataataagcaaaaagattgtgtgtatgtatgtttaatataacatgacaggcactaggacgtctgcctttttaaggcagttccgttaagggtttttgtttttaaacttttttttgccatcc

SEQ ID NO: 259257 - DNA, 122 bp, Homo sapiens
gaccccagtgcagatgaaccattttcactgaagaaagacattaggattggtttggggaggcgaagtaatgtttttccttgttgctgtctctgtcatatggtacataggcatatggaaggaag

SEQ ID NO: 259258 - DNA, 122 bp, Homo sapiens
cggtggggagtgaagcagacaccgggagccctgggctgggcggggtggtccgtggtcttacgaggaggactcaggtggcagagcctgcggggcagatgccaagttcttatcacaagtgactg

SEQ ID NO: 259259 - DNA, 122 bp, Homo sapiens
tgccgtcgagtatcttaaggactccaacctcctgttcttcggggggctgctggtggccatcgcggtggaacactggaacctgcataaacgcatcgccctccgtgtcctcctcatcgttgggg

SEQ ID NO: 259260 - DNA, 122 bp, Homo sapiens
ttcccaactagaagattagccccagcagagcagggatcttgtcctcagtccctagcagggcgccagacagactgaagatgttatacattcaaccaatatttattgagcacctactatgtgcc

SEQ ID NO: 259261 - DNA, 122 bp, Homo sapiens
gaaatgggagcccacctcccgggctctggctgggtgggcgcgggaggaagccctgtgttccgggagagggtgctagcatgcgtgggcgtggagggggaggaggtttgcagtcattccagccg

SEQ ID NO: 259262 - DNA, 122 bp, Homo sapiens
cactcatccttgccctgcatatcagacactcctgcaaatgctcagggcttaaaaatctgccggggccaccacattacacactcctatccccgtctacgttattccagttaaattttgtgagt

SEQ ID NO: 259263 - DNA, 122 bp, Homo sapiens
tctctacaaatacgactgtggagaatggcagtcacttggaggtatggctttgtggtcagccgggcttactcactagctgagtgactctttatatccaggccattcagtgctttcatttcaaa

SEQ ID NO: 259264 - DNA, 122 bp, Homo sapiens
agggcaggtgcgcggcacaagctgctcctaccttctcatcggtcacaccgtcattgtcatcgtcatcatcacaggcatcgccaatcccgtccttgtcaaagtcttcctgcccagaatttggc

SEQ ID NO: 259265 - DNA, 122 bp, Homo sapiens
aaaggaagttaaaccaaagcacagccaccctcttttctctgcggaacgttctggctcccacgacgtagtccatgttcacaatcggccgcagcccgtcaggcttggggatgaagcggagtctg

SEQ ID NO: 259266 - DNA, 122 bp, Homo sapiens
ctttccccaaccttctttcccttcttttactagaggtgcaggaccatgcctttcatgaatcgttattctctatgtcagctcttctctcccttggagacttgaaaaacatcatcatatgatac

SEQ ID NO: 259267 - DNA, 122 bp, Homo sapiens
aacctgccacggcagtactgtctaaccgtgccagggcggcactgtctaacccttccagggcggcactgtctaacccttccagggcggcactgtctaaccctgccagggcggcactgtctaac

SEQ ID NO: 259268 - DNA, 122 bp, Homo sapiens
cgcctctagctctgtctaattcgctgctaaagcgtcctatgcttgcagcgcgggccacggcgctgacggtatcttcccgctttccgaattttgctgtcttccagcctgaaccaatcccttct

SEQ ID NO: 259269 - DNA, 122 bp, Homo sapiens
ggcaggcggcggcgctgtcgggcgggcaggggtggcgggaggcggtggcgcagcgagcagcggcctccagcgctggtggctccctttataggagcgctggagacacgggccccgcccgccct

SEQ ID NO: 259270 - DNA, 122 bp, Homo sapiens
cgcgcgtttgcgttttcttaataaacccacagcaagacctagggcgggggtgaaccacagcgcatgcgccgtagggagcgacctcaacagctagggtgctgtttgggcggggcctgggcggg

SEQ ID NO: 259271 - DNA, 122 bp, Homo sapiens
tattttccacgcaggcggcagcctccgccaggagtttcacctgttcattttcttccgcgtcgtttcccatcagggtgggccccgtcacctgaaatgctggcggagctgtgtgcgtggggttc

SEQ ID NO: 259272 - DNA, 122 bp, Homo sapiens
caccccacgcgcacactcatgaaaccatccctacagtcacggcggcgagcactcaccccacgcgcacactcatgaaaccatccctacagtcacggcagcgagcactcaccccacgcgcacac

SEQ ID NO: 259273 - DNA, 122 bp, Homo sapiens
actctgaccttctaaatggtacgtgggaggacgtccgtccccttcggacccaagagtcaccgtaacactctagaaggggagaaaaggagcgagggcggcaggcgacagagaacctcgcgagt

SEQ ID NO: 259274 - DNA, 122 bp, Homo sapiens
ctaacccaacgcgcagcatgcagagcagtgtccccagcagcaccaaccaggtcatggcggcgaccaccagggacagtacagagcagctctgtgcaggttgcagttccaggactcaccctctt

SEQ ID NO: 259275 - DNA, 122 bp, Homo sapiens
gcattattgagtaggtaatgtgctcttctttagaaaaaaaaaaaaaccaacaggaggaagcgatttgaatgaaagaaagggcacttttcattatcccccagctagatggggacaatcactgg

SEQ ID NO: 259276 - DNA, 122 bp, Homo sapiens
agaataccaggcttctccccggggcctgggcagggttagacagtgaaataagcacaagcccgggcttgtcagcctggaacaaggaggcatctgcctagagttagcctaatatttgctgagta

SEQ ID NO: 259277 - DNA, 122 bp, Homo sapiens
aagttggagctgagatgatacctgtattagcatgactccaacacagtaagggtgcctcaccgccatccttcccaacatcctgcccccctactgccaatactttgatatgtgcccagggccct

SEQ ID NO: 259278 - DNA, 122 bp, Homo sapiens
gaactaaacgtttgtaaggcccaatcaggggtggccggggcggagtcaggtgtcacaaatcgcaacccctgtcactccatcgttcaccccaagatagccgggccaggaacctcctctcccga

SEQ ID NO: 259279 - DNA, 122 bp, Homo sapiens
agctcagtgtcctgttgggaaggccgactcagagacagctttcattcttttgtgttactccgtgctgagctggttggggctcacagcggcctctttggacaggcagcagccttgcctcatct

SEQ ID NO: 259280 - DNA, 122 bp, Homo sapiens
gtgctaagcagcagatgtgcagattcccgcagggcgtacctgagcccggagagggggcgtcgtagcgcacagcgcactcgtttccgcattcccaccccgcacggccagttgtcacagccatc

SEQ ID NO: 259281 - DNA, 122 bp, Homo sapiens
tggattctgtggcctctttgaagaggccctgtctggctctacgtccagctgctgtggtcccggagggagtggccaggggctgcggcctgatgtggcgcacgcagatgtctcacccggcccca

SEQ ID NO: 259282 - DNA, 122 bp, Homo sapiens
atgaaaataaaataagctttacaaacaaagtaatacaaatgtaaatagccccttctttgacggacagcccaatagaaggagtttctgtatcactcaccacaaaagaaaaattggcccagcca

SEQ ID NO: 259283 - DNA, 122 bp, Homo sapiens
tcactttataaagactttttgcttttgggtttcacaacaactttgtgaaagtttgattgacgtagttgtatagaggaagaaatgtctgggatcaagttactgcaaaaaatagaaaccagtgc

SEQ ID NO: 259284 - DNA, 122 bp, Homo sapiens
agacgcgcaccaggtgacggggcaggacccgcagacagacccctgggcagacagcgaggccgccgcgggggtgggggccaccggacagactgatggcccgacagactcaccggggtgggccg

SEQ ID NO: 259285 - DNA, 122 bp, Homo sapiens
aggggaccggggatcccaggtgaggggccgggaactcagctgagggggaacccagatgggcgcgcgggagcccacgtgagggggagcccgggtgaggggccggggtggctcctggcgtccgc

SEQ ID NO: 259286 - DNA, 122 bp, Homo sapiens
tcggggtgcccagggtgcgatgtgcgaggggctcctgagcgcgtgtgctccgcccgaccccgccctgtccccccgacacacaggtggacccagggtcagctcgtgcacctgggaaatggctc

SEQ ID NO: 259287 - DNA, 122 bp, Homo sapiens
gctcttgcacccaggtgactgactgcacgggcttcctctgagcagcctgaagttggctcccgtctcccgggcccaatgacaccccgggcgcggaggggctgagaggagggggcaggggcagg

SEQ ID NO: 259288 - DNA, 122 bp, Homo sapiens
tgaagcagaacatgccaccagcctcagcggccccagcggcccgggaaggcagcagcctcacggctcaggccctgggtgggcatggcctcctccagatgggatgtacagagggaaccgtcccg

SEQ ID NO: 259289 - DNA, 122 bp, Homo sapiens
aggtcgcggttctcctgggtgagctggtccagctggccctccagctcctcgatgcgccgccgctgggtttccagcagctgctgctggctctcgatgatgttgttcagctccagcaggtactc

SEQ ID NO: 259290 - DNA, 122 bp, Homo sapiens
ccaattccaaccccagatctgtccagaattctgttgtctcgggtatcatctccaccggcgcggtcgtgggagggggatttgggtgcagacaggaccagccccagtgtccgagcgagaatcag

SEQ ID NO: 259291 - DNA, 122 bp, Homo sapiens
tgggaggccctggggcgtttccgggacgtggagttagcagggttctgacttgaaaaacgacggcaaagcgtgttcttgactgcttctgagcacctcacacctttcagacccagggcgccttt

SEQ ID NO: 259292 - DNA, 122 bp, Homo sapiens
agcatccagcacaatccctgccattagggtcatggcttcataaaaacgtcacgaatgcaacgcagaagtgcatgcatgcatgaataaatgaatgatgcatgaaaagagcaatctccctgtcc

SEQ ID NO: 259293 - DNA, 122 bp, Homo sapiens
tcagcctcttattaaagacccactaaataagtcctttacttcttgatcaaaaggaatcatcgctgtgacttctaaactgtaagaaaaccaaacctttaaaagtacctgtcctcagggcttgg

SEQ ID NO: 259294 - DNA, 122 bp, Homo sapiens
tgacaaccactctttgagaagtccctgtccccacgtccggcagcaggtcctgtgctcgtgcggcagatcagatgggcaccacttcacggcccagcctgggttggcccttcctaaccgtcctg

SEQ ID NO: 259295 - DNA, 122 bp, Homo sapiens
ggtcatcgagacccaaaacattagagccggaaggtgttaggaagatataaacgtagagagcgagtaacaggaggcaattccacggccaaacaggtttatttacaggaaaagcctgcgaagag

SEQ ID NO: 259296 - DNA, 122 bp, Homo sapiens
cccccgccgggatccggtgccgaggcccaggaacgcgggccagatgcgtgggagaggaatcgcgcggtcccgtcgcagcgctgcggatcacctcccggctccttctcaggtcccccgacccg

SEQ ID NO: 259297 - DNA, 122 bp, Homo sapiens
gtttggaaacactctgtttgtaaagtctgcaagcggatattttgacctctttgaggccttcgttggaaatgggatttcttcatataatgctagacagaagaattctcagtaactgctttgcg

SEQ ID NO: 259298 - DNA, 122 bp, Homo sapiens
cctcactcacttcctgctaatccacgggaccggggagggtgactgagttacccctcaacacgcagaaaaagctagtggccgctcagctcgcaggcgcagtgggtgggtgcgcgtggggagca

SEQ ID NO: 259299 - DNA, 122 bp, Homo sapiens
tcattctcatgacatgcctgtgagtcacagcccactcctgtgtgagaggctgtgagcacacgctgagacttcatggtccagtgctcgtgtacatacatgcgcccgtgtgtgtgagagagaag

SEQ ID NO: 259300 - DNA, 122 bp, Homo sapiens
agaagttaaagccactgagttagtctaaatgggtgttgatggcagtgactgctgctgatacggaagggaagtgctgggaagggaagagtgtggtccctttaaatgatacagaagaggggaaa

SEQ ID NO: 259301 - DNA, 122 bp, Homo sapiens
ggatgtgccaacgcagtttatccacaccggtcagtgtcagtggacaccaagtccccagtccgtcggctcaagctcctgcgatgtaggacaacatagccctgctctcaacaagtctgtattct

SEQ ID NO: 259302 - DNA, 122 bp, Homo sapiens
ctatcctgaaggctaagtggaggtcaacttaaagaatgtggggtcaaggttgacattactcgagccccttgaggcctaaatattgccttagctcagtttgcagaagtcattggtctgatctc

SEQ ID NO: 259303 - DNA, 122 bp, Homo sapiens
ccctaactacttttttgttaaatagttctgttctattctttgcattatttgttttctcctcggtcatttatttaacttgttcatcttggactttctttttgaagttgttgttatttcctccc

SEQ ID NO: 259304 - DNA, 122 bp, Homo sapiens
gggggtggggcgggggccaggggcggcctctcgggctgggccggcagagcggccactttgcgcgcggcctctggagctccagctgcgccccgccaccactggccgctcgcactaccagcctg

SEQ ID NO: 259305 - DNA, 122 bp, Homo sapiens
cctgcggagactgcgcagcgcccggctggccggcagccagcgcacggcccgcggcaacggcgcacagccgcttggagaatcccactggctcccgcaccgcccctccgcgcccccacgctccg

SEQ ID NO: 259306 - DNA, 122 bp, Homo sapiens
atacacaaccggccctccgtgcgatcacccatctccctcaccaggaaagtagctccaaaccgccaatcagcggcgacgctggacgtagacgtcctaccccgtgatattaaagcaagatggcc

SEQ ID NO: 259307 - DNA, 122 bp, Homo sapiens
cagtgccccgtatgtgcagcctgcagcatcccagcggctggggcaggcccgggggcggctcgcacaacgcagctggggaccgggtcggggtccagcggcagccggggtccgggtccccccgg

SEQ ID NO: 259308 - DNA, 122 bp, Homo sapiens
ccagctgttcatctccctcacattctgctgctcggcagggctgcccaggagagggagcaccggctgtacacttgcctggcgtctttggtctgcccccagtgggcatttcggggcaggctggc

SEQ ID NO: 259309 - DNA, 122 bp, Homo sapiens
tcataggagccgtggagcctgtgggggcagatctggggtgagggttgaggcaagtacaagcgtctcaggcacccctgccctgggatctgcaggggcctgtgtctcagggtgtggaatcccca

SEQ ID NO: 259310 - DNA, 122 bp, Homo sapiens
ttggcaccagggtttcagatgagaggctgtggactgtggtcccttcctcatcctaagttacggaaagaacctgggaggcccctgggaagcaggtggagaaagcgctgagcacccagctcctc

SEQ ID NO: 259311 - DNA, 122 bp, Homo sapiens
ttacctagcaaatcctttactcgtgtagggaacaggggtaaaaactgcagccagatcttgcgtgactccaggcggtggcatctgaagtcaggcaccgtggcgctgcaccgcacgtggacggg

SEQ ID NO: 259312 - DNA, 122 bp, Homo sapiens
ccactctcccagcaaacccacgggggcctcggtgcggacagagacccggtgtggggaggccgctgcccctgcacgctgggccacgggggtttgggcggggaggagcttgtactgggtgggcg

SEQ ID NO: 259313 - DNA, 122 bp, Homo sapiens
ctcagcgtggcctagtccttccccagagtacatgctggggccgcgcagggctagtgcacacgctctctcttgcagaggatcagcacggccaccggtgacggcaaacattactgctacccgca

SEQ ID NO: 259314 - DNA, 122 bp, Homo sapiens
cgcctcgagcgctgggctcagccgcagctcacacttgaacgaagatcagcctcggcgaagcgcctaggcgccgaggcctgggtaaaaacaactgcggccaagccccgccccgccgccggccc

SEQ ID NO: 259315 - DNA, 122 bp, Homo sapiens
gcctctccctggactcctcccctccccctctccctcctctccctcgctcgccctcccggccgccctcactgataccccagcgccgaggcggtggtcagtctctgtccgtagagggcgtaggg

SEQ ID NO: 259316 - DNA, 122 bp, Homo sapiens
caagtccagatgtcactattccgtctaattttctatgcctttaaacccacagtagagtatcgtgaaaaattctccatagaaaagattaagttgtattcaccacagtttaaatcctaaatcag

SEQ ID NO: 259317 - DNA, 122 bp, Homo sapiens
ccattttgtagggctgaccccaaattcttccctgaagtaattaagtgagacaagtaattacgtcactgtaaggctctaaaatgtcactaaaatgacaacccagctacttcctgaagttttac

SEQ ID NO: 259318 - DNA, 122 bp, Homo sapiens
agtcgggtcactttctcctccttgaggggttcaggcccgacctctggcccgggtcggaggcgtgacccacagcctcagtgggattctcggttggaccatcagggaccggtgaaacgcgcagc

SEQ ID NO: 259319 - DNA, 122 bp, Homo sapiens
caactggaacagccttgctttgggagacaaagcactggaatgttgaggggttcccttgctcgctcaggacaaggcctggacacccctcacctgcgcattgccctgggcagtttctgcactag

SEQ ID NO: 259320 - DNA, 122 bp, Homo sapiens
gacgttcttctcttgggcaggaagaccttgccagcatccatgctatgtgtgtttcaggagcggagggcaggttcaattagctgcggcaagtcaggtctcggagaggtcgtgggaggcccctc

SEQ ID NO: 259321 - DNA, 122 bp, Homo sapiens
tggtggcatacacctgtggtcccatactcaggaggatcacttgaacccgataggccaaggcggcagtgagccatgattgcgccactgtactccagcctgggcgacagagaccttgtctcaaa

SEQ ID NO: 259322 - DNA, 122 bp, Homo sapiens
ctagatgaatctctgcatcactgcaaaggagttgactggggcttctccagcactcacacacgctctacaagtctgtgctggggtaggtagggggatggtgtctcccggtgttttgtcttatc

SEQ ID NO: 259323 - DNA, 122 bp, Homo sapiens
gcgcatgtactcggggtcgtcctctgagaagcggtcaaagtaaggctgcccctgcgggggcggcggcgaggcagcctcggggaccgtctcttcgctcattttcccggtgggtttgcaattcg

SEQ ID NO: 259324 - DNA, 122 bp, Homo sapiens
aattggtctccccccggcaccaggctagtgggtcagggatgggacccagcaagtgagccacggggattcaaggggttaatagccaatgctatgatgaaaatgttcgatgaatgaattttatt

SEQ ID NO: 259325 - DNA, 122 bp, Homo sapiens
agatgcagtcgtctgccaacttttcagagcgggcagccctcctgctctcttcctccgtgtcgcctgctggccctgcccgcaatgtgtgtcccagtggatgtgctgctgggggagggtgccgg

SEQ ID NO: 259326 - DNA, 122 bp, Homo sapiens
gcgcacacgtgcatgcactgtgggaccaagctcccatgttccggcgtgatgctggccctgcgtccgcaggtgtactacccggtacggcaccacttggtgcagcacatggtgagcgccatgca

SEQ ID NO: 259327 - DNA, 122 bp, Homo sapiens
atcgtgcgccagttcttgtacaacgagttcagcgaggtctgcgtccccaccaccgcccgccgcctttacctgcctgctgtcgtcatgaacggccacgtgcacgacctccagatcctcgactt

SEQ ID NO: 259328 - DNA, 122 bp, Homo sapiens
atccccattcttaagattcttatgacagtaaatggaaacacaaaggccattattgactagcgggagtaagatcgctgtcctttaaatcaccttcttcatatttgcattctctgtgtgctgtt

SEQ ID NO: 259329 - DNA, 122 bp, Homo sapiens
cccccccacccctccccatccaggccccataaatagcagcagagccggagctggagccggcgccagcggctggagcagcaagggagtcagggccagggccagagagccggagagaggagccc

SEQ ID NO: 259330 - DNA, 122 bp, Homo sapiens
agtcggcacaacagcagctgccccagccattctatgatgcaggcagaagtggctgtgccacggtgtggacactgggctctgctagtcagaacagggcaactcgggcctgacctccagcttac

SEQ ID NO: 259331 - DNA, 122 bp, Homo sapiens
ctgccttatgtggataggcaagaactttgtttggaattcagcaggcaatgcaagatgttgcgtaagggatcagtggatggatagcagctgtgtttttaaaaaattaatccaatgggaatgga

SEQ ID NO: 259332 - DNA, 122 bp, Homo sapiens
acagctggttccatggaagcatggagtttccaccaacataccagctaccacccacaaggccgcatcctgctatctacctagcatggtagagagacagggattgtgacataagcaaataccct

SEQ ID NO: 259333 - DNA, 122 bp, Homo sapiens
taggaggctgaggtgggaggatccattgagcccaggagcccagctccttagctcaagctgcggtgagctaagatcatgccactgcactccagcctgggtaacagagggaagccctgtctcta

SEQ ID NO: 259334 - DNA, 122 bp, Homo sapiens
ccagacctggagacgtattcaggggttgggccatgatacaattatctccaatcctggaagcgaaaacattgtcccatcctctatggtcttgtaccatttagttaatctaaaggcaaccctga

SEQ ID NO: 259335 - DNA, 122 bp, Homo sapiens
tcctgttcacgcgtcctcgccattggtggtgtctggggggctccccgctgctggctgatgcgaatgttcctgcacgtgtgtttgtgtgaacgccggctttcagctgagggtggggctgctga

SEQ ID NO: 259336 - DNA, 122 bp, Homo sapiens
ggagaggagccaaggctgctggctgacagcagttaacagttggctctatttgaggctagtcgggcatagaagcgtgggcatggtgggtaccaggctgatgtgtgctgtggtgggtgacagtg

SEQ ID NO: 259337 - DNA, 122 bp, Homo sapiens
cgctccccaatcccgcccagctgcgcccccggccggccaacgctgcgccccgccccctaccgggacctaggcgctgattggcccctgagagaccctttgcgcccaggcattggtccagtggc

SEQ ID NO: 259338 - DNA, 122 bp, Homo sapiens
gcttttcgaggaatgcaggggcaagcaagactcacacaggcactggcattcttctagatccgatgtcccttgccccaccccttactgtggctctgccttgggtaatcacaacaaatcttcat

SEQ ID NO: 259339 - DNA, 122 bp, Homo sapiens
gccgcatctgtgcatgctcgtgtggcctcccagagcccgggtggcagatgggtggcctggcgtgagcattcttcgtttcaggctgtgccgggcctccccttaataaagacctgtttcttccc

SEQ ID NO: 259340 - DNA, 122 bp, Homo sapiens
ttgagtcgttttgctgccagtggggatggatttatcatcagccacccacttccttaaatacggtaggatccacagcaaacatgtggagaaaaccgaagctctactccattgccctagctaac

SEQ ID NO: 259341 - DNA, 122 bp, Homo sapiens
aactcaccttcactgttggaagcaagctgaaactccagaaagaagttgtctgctctctatcgtcatgaaagcaggtacacacacctttctcatcggatgcgagtaaaactccagaaaaggag

SEQ ID NO: 259342 - DNA, 122 bp, Homo sapiens
cgaccggcacggggccatctactgctacgtgcccaaggtggcctgcaccaactggaagcgcgtgatgatcgtgctgagcggaagcctgctgcaccgcggtgcgccctaccgcgacccgctgc

SEQ ID NO: 259343 - DNA, 122 bp, Homo sapiens
ctgccccaaccccttcttgcacggagccccgcggcgccctggacaccccgccagatctgccgcagaagagggccccaggcttccccacccggcctggtttaacagtttgggtcagtgatgcc

SEQ ID NO: 259344 - DNA, 122 bp, Homo sapiens
cagccattatgcaacatgtgggaacacatgaaaatcactaaaaggaaaggaagcaatcagcgcccagcctcagccactttttgcatttggaggcatggcatgtgttgctggattggatcctc

SEQ ID NO: 259345 - DNA, 122 bp, Homo sapiens
cccctctctgggccttagagggcaagagaggtaaaggcgcgcactggaggctgagaagcacgtttgaatctccgctgggccaacgacttggggtgcaaggtcaggagtgtcccagaatctga

SEQ ID NO: 259346 - DNA, 122 bp, Homo sapiens
gacttgcggtcctccgaggtcgccagtggttgctgggatcccacctccccctttcctcggcgccctacagtcaaccctgtctcggtgggctgcggagtcccgggaaacccgtcagctgttta

SEQ ID NO: 259347 - DNA, 122 bp, Homo sapiens
ttttctgtcctctatacctaactcagttcctgtcaggtagtggacactcaatgtgtttgccgaatgaatcaatgaaataccaccgattatcccaaatagagtcagaaatgttgaaactgctt

SEQ ID NO: 259348 - DNA, 122 bp, Homo sapiens
ccaaaggaagctctaaagcccctacttgccaatagcttgtttcagattatactgtttgtccgtagaaaaaaaataaaactacatttctttaaagctagtgtttgatttctttaagaacagcg

SEQ ID NO: 259349 - DNA, 122 bp, Homo sapiens
tgtagacacaggggcagaggcgtgtttggagaaagggttcagaatttggagtgcgacagacgtaggttcgaacagagctctgctactctgtggctgtgagggctcccgcacacaccctctcg

SEQ ID NO: 259350 - DNA, 122 bp, Homo sapiens
agtggaatagccaggccctggagccacgggaacacactggaaatctaggagtggaatagccgggccccggagccacgggaacgctctggaaatctaggagtggaatatttgggccccggagc

SEQ ID NO: 259351 - DNA, 122 bp, Homo sapiens
catgagccttcttgccccagtaatggcccattacggcttcaggaaaagccatcatgtttccgcagcatttatctgtcagcaggagactattatgagagcacaaactcacattgtattagcgt

SEQ ID NO: 259352 - DNA, 122 bp, Homo sapiens
cagtcataacttgttttctcctaagtatttgagttcaaaactcctgtatctaaagaaatacggttggggtcattaataaagaaaatctttctatcttacatgagaatttgctgggtttctgg

SEQ ID NO: 259353 - DNA, 122 bp, Homo sapiens
tttccaatcttgcatagctttctcaaaggagacttaataataaacacaattttctttattcggtgtcatttccaatgagattgaaagcccccttgagaacagagctcccagcaagtgctcag

SEQ ID NO: 259354 - DNA, 122 bp, Homo sapiens
gcccccgcccggcgccgctgcgtcgcgcccccagcccgacccccggcgacactgccccggcgcgccccatccccgcagccccgcagaagagccagacctgcctttcagggcggagccctttt

SEQ ID NO: 259355 - DNA, 122 bp, Homo sapiens
gtatcatcccttctgtggcccatcacgcagcagagttgccctacaaatttcatttggcagcgccataacattcatttaaaaagtttatgaaaacattcatttgaaagttccatgcagcttta

SEQ ID NO: 259356 - DNA, 122 bp, Homo sapiens
taagtgttgctatttcttaattaaattgatttcctgtcattttgaatcatttatcacctgcgatgcatgattctattaattttgttatgttactgttttaaccaaagctgaccgtaaggata

SEQ ID NO: 259357 - DNA, 122 bp, Homo sapiens
atggagcccaaggttcaggagccagcaaaccagtcctgctctgtccatcaccctcggggacgggcgctaggggcgagcgctctttggaacaacatattgcgggttcccccaactggaccccc

SEQ ID NO: 259358 - DNA, 122 bp, Homo sapiens
ggccttgggatggtttgaggccttcgggagcccaggagagggcctggccccagggcagtccggcccagagggggctgcctgctctgaaggaggggcttcccaatgtagaggtcccagtggcc

SEQ ID NO: 259359 - DNA, 122 bp, Homo sapiens
ccagccctcgcgcatgcgcataaaagcccactcccgggggcggggcctgagctagctgggcggggcctgaaggagccgggagctcctgcagcttcatcgcgttactaagagacgcgagggtc

SEQ ID NO: 259360 - DNA, 122 bp, Homo sapiens
ctttctctgggaaataaatttaagtgaacggtcgagcatcgcgcctgccaaaaatgggggcgtctccatcagagctcgattcaaatgccaactaccccgggctctgttctgttaaaggtcac

SEQ ID NO: 259361 - DNA, 122 bp, Homo sapiens
acctctggcagctgccccctcctttataaagatatacctccggggggctccgccctgtctcgcctacctcgctagcgcccacgctccaggggccggtcgccccctccaccacagtcccagga

SEQ ID NO: 259362 - DNA, 122 bp, Homo sapiens
atcccagattcaagcgattctcctgcctcggcctcctgagtagctgggattacagggatgcgccatcacagaccccgggctaattttttttagtagagacagagtttcactatgttgcccag

SEQ ID NO: 259363 - DNA, 122 bp, Homo sapiens
acttatacccaatacagcacagaacacgaggtcaccaaaatgtgtggtttttcttcctcacgccagccaattttctgacaccagctgggtgtcctacaattcagttcaattctgatactcgt

SEQ ID NO: 259364 - DNA, 122 bp, Homo sapiens
tgggggtgatgaatcttctggctcacttcagcacacacatcaggggcagccttcaagtctcggggctgccctgcatcgttccagggggcttttccatcagtcttttattgcctcagtcccag

SEQ ID NO: 259365 - DNA, 122 bp, Homo sapiens
cagctgcaggattgcaccccagagcgccgggaccacgggcgggggacgggggcggactgccgctcactcacccacaggctgctgaagtagtccagcccgcggcagatgagcgtggcagcgtg

SEQ ID NO: 259366 - DNA, 122 bp, Homo sapiens
gctcaagtgatcctccctccttggcctcccaagtgctgggattacaggcatgagccactccgcctggccaagcaggtcttctaatatccattttatagacagacacactgaggcttagagtg

SEQ ID NO: 259367 - DNA, 122 bp, Homo sapiens
taagatttcacttctagaaatctgtcttatagaaatacacaaatcctaaacacacagctacgaagatgttcattgtagtattaataaaagaaaaacattagaatagcttatagagaaattgt

SEQ ID NO: 259368 - DNA, 122 bp, Homo sapiens
gcatagagcggcgggacatagtggcagggcggcagggtccgggagaccgctaggagcgcccggtggaggggccgcctttatctgctgggggattccaggagtggcccggaaagtcttgcttc

SEQ ID NO: 259369 - DNA, 122 bp, Homo sapiens
agccccagaaggctgtcatggggacactgtgtggctgtaatgcctgcaaggccctggaaacgtgggtcacttacaagctccgagaagccgcggaccacctgccgccgcttcaggttggtctc

SEQ ID NO: 259370 - DNA, 122 bp, Homo sapiens
ctggggggcaccctgggcagggtgggggggccttgggaggcgcttcttgccaaatgcagacgaggggtgagcctgccagcgtttgcgacgtccccgcacgacaggctcatactttctgagga

SEQ ID NO: 259371 - DNA, 122 bp, Homo sapiens
ttggggatgatcccaggcgcagctctcccctgccggcccaagcctttgacaggagtcctgcggcgaggcagagaccccctgaactgagctctccgacgccctagttgcccgttagagccccc

SEQ ID NO: 259372 - DNA, 122 bp, Homo sapiens
ctattttggagagtcgacctgcctggattacagataggatgttgggtgtaagtatgtgaacgaacagtctttgcaggcctctatcagtgatttgccactaagccctttcttcatcctaaaaa

SEQ ID NO: 259373 - DNA, 122 bp, Homo sapiens
ggagaaggagaggagatgaaaggaacataccaaccccacctcttgctttaatgcctttaacggctccccatactgcagggaacaatgtcctgctataaaagatggttgttagcctggcattc

SEQ ID NO: 259374 - DNA, 122 bp, Homo sapiens
taaaggcagagctgagaagatacacgtgctgcagagggcgtagccctggaataacatgcacgatctctcatccctccagatccatcttcggttgtgaatccggcccggaatgcagccacccc

SEQ ID NO: 259375 - DNA, 122 bp, Homo sapiens
caggtgccttgcctttctcaccaacttcatgtgaagaatgtacataatcactttttcttgcggcttagtctcagaagtttttctagcaaatcactatttttgtgttttctatttttttagtt

SEQ ID NO: 259376 - DNA, 122 bp, Homo sapiens
gggagtgcgcacgcatcctgcccgcggcgcgcgcgcaggtcggtgcgtctgtcgggggcgcgctcgggtacctgtaccccacgtagtcgccggttaccgatcggactaagttccaggtacct

SEQ ID NO: 259377 - DNA, 122 bp, Homo sapiens
gggcgtgggagcccacgggtggggggtttgctgcttctttcaggccccagcaccagacagcggggggagtgtgaggcctttgggcatccccacctggctccagggagtaggctggggtcaga

SEQ ID NO: 259378 - DNA, 122 bp, Homo sapiens
taaattagcatgggatttgaaatcaacctgtttgggttcaaatcatggttcacctcttaccggttttgcaaaccttgggtcagttacttaactccatcaaatccttcacttcatctgcaaaa

SEQ ID NO: 259379 - DNA, 122 bp, Homo sapiens
gagtggtcactgtctgcgaaggacaggtaaagcactgtgcagcagacttgctgcacagagcgggtgacaattcagctgaggcctgactgacaagaagcacacagccctgtgaagattagaga

SEQ ID NO: 259380 - DNA, 122 bp, Homo sapiens
actgaggccctgtgcatgctggtggcctcagggaccctcataacccccagactcagagcccgagagcccttcccaagccattggcttggctgcagagtagactgagagctggggccacgtat

SEQ ID NO: 259381 - DNA, 122 bp, Homo sapiens
cgccgcgcgcgcgctgctcctccttcttgcgggccgcgccctgccggcagtgacgtgccccgccctgcagccgcgggattcaaactcccggaagcggcatccacacctgatggtgtgactcg

SEQ ID NO: 259382 - DNA, 122 bp, Homo sapiens
ccggggcccaagacgcccactggagacagggtcgggtcccactaccgcgcaggcccggctcgcccccgacgtcaggcacggggcgggacccttgcagctgtccgtccagtcccgttccccgg

SEQ ID NO: 259383 - DNA, 122 bp, Homo sapiens
ggcgggcgctggggacgcgcgatagcggggaaggcgctgctgggacgccaggggactgatcgctgaaaggaaacgggcccgcgcgctgcagccacctgagccgggctcagtcttcctctccc

SEQ ID NO: 259384 - DNA, 122 bp, Homo sapiens
gtgacaaacgtgtactctctgaggccccaagggaagggcctgcactccacctctctgccccgtttgctccgtgtatgcccctacaagaatgctcgcgtcttgccctcaggtggcatttttca

SEQ ID NO: 259385 - DNA, 122 bp, Homo sapiens
tttattcttcatcgcttttacttatgtattgagttggactcactgcaactaattttaggccgtatttcattctagtaagggtttgttttgtttagaataccagttgtcatcgagaacaaagt

SEQ ID NO: 259386 - DNA, 122 bp, Homo sapiens
agcagaagtgtgtgtgtgtgtgtgtgtgtgtgtgtgtgtgtgtgtttgtgtgtgttaaagcgcttctgaatgttccgatgacatcttcttagaagaaatgtttggagagcaacctactccga

SEQ ID NO: 259387 - DNA, 122 bp, Homo sapiens
gctgctcccacctgggctggccagaggcctccactgccatccccctggtgccgcgaagcacgtctgtctcccgggtcctctgctggcctctcgcatcccaaagccatgctctgtctctgccg

SEQ ID NO: 259388 - DNA, 122 bp, Homo sapiens
aaaggacaaaaaccatctgatcctccaacagatacagaaaagtatttgacaaaattcacccgttcatgataaaaacgcacaacaaactaggactataagggagcttccctcagctgatgaaa

SEQ ID NO: 259389 - DNA, 122 bp, Homo sapiens
gggaggggcctccggccggcgggaccaccagctcgccgccggccttggctttcagggaagcgcttggctgtgtctagcggctccgacaactatctgggcccgcagctgctgctctgaaacag

SEQ ID NO: 259390 - DNA, 122 bp, Homo sapiens
ccccctcagacagtaaggttctgttggccagggtcctggggacagacacgagtgttggtgcgcgcgactgaaacgggagcagagcagttgaatgagcttcttacgctttgcatggtgcgcag

SEQ ID NO: 259391 - DNA, 122 bp, Homo sapiens
ggatttacccgaaaagatcaggcccctcttaacacgtaaccacagagcctcggccacgctcggaaacgttcaagccactcccagcctgggtgggtatggactgagggttccggtcccccctc

SEQ ID NO: 259392 - DNA, 122 bp, Homo sapiens
aagctgacgggactgccaggagacgagtccccggttgtcatggtaaccagtggcgggaggcgggtgaggagcggggtcccgtcgggccgggtgggcgccagctccctcccaggactggttca

SEQ ID NO: 259393 - DNA, 122 bp, Homo sapiens
ggagccacgtgctagttactggcagttggatttaaaggggacttacaaataaaatatcagcgcaggaagggcttctggcctttctggttccaagccactaattggacagatgaggaaagctg

SEQ ID NO: 259394 - DNA, 122 bp, Homo sapiens
tgctgccacctgccccagccaactcagggttcccaccctgcagatgaaaatcaccgagggcgacctgtggatccgcacgtacggccgcctcttccagaagctctgctcctccagcgccgaga

SEQ ID NO: 259395 - DNA, 122 bp, Homo sapiens
ggacaggccggcctcgctgctagggggcccgtgccttacccagacccgcgttctgtaaatcgcttgccaatggcagcctggtccatagagggaggaatgcccccacccccatcgagggttcc

SEQ ID NO: 259396 - DNA, 122 bp, Homo sapiens
cgaactcctgttatcaggtaatccgcccgcctgggcctcccaaaatcctgggattacaggcgtgagccaccacgcccggccagtgttacttaaaagtattacctcgcacctgtaactccagg

SEQ ID NO: 259397 - DNA, 122 bp, Homo sapiens
atcggctcagtgcttttccctgctaagtcaagcccctttagtaaaccagctacagaacatcgacgctgtctatgtggtgagggtgtcttggaaagatgagaggatttgacaattgtgagccg

SEQ ID NO: 259398 - DNA, 122 bp, Homo sapiens
aggcctgtgtcccccgcaagaagcaaatccccaaatccagtccttctccgaccaccatcacgactcccacgcctagaatgcaagctccccgagggcaggggtttccttggttcgcagatgtg

SEQ ID NO: 259399 - DNA, 122 bp, Homo sapiens
atgtacgtcaccatacaaaatcagcctctagaaggcaccgtgaaggaatggaacatgaaacgaagaaggaaagaaagagagaggaagaggccctgtgcctctgcttgatctgatatactagg

SEQ ID NO: 259400 - DNA, 122 bp, Homo sapiens
ccccgcctggtgcaattggtccgtttgtttgaatatgaatacacttgttttcggctccgccggtgggtcccggctcctctccccggcgcagggcccccgagcccgggctctggcgctcgcct

SEQ ID NO: 259401 - DNA, 122 bp, Homo sapiens
cctgagaatcacagagagatggtctcaaatgtaaagtgcctattacaactgcattaactacgagcaaacatggttcctttccctcataatcaatatagaaccaggggctcatgaaccctttc

SEQ ID NO: 259402 - DNA, 122 bp, Homo sapiens
ttagacttacttcgtccctggcagctcaaggctcccacagcagtgatctcatgaacagggcggcagcttcatggccttttttggttgttgtttaatagaaacaggatctcgctttgtcatcc

SEQ ID NO: 259403 - DNA, 122 bp, Homo sapiens
ccccacacaaattcaaaggcagagggaaggagagctgttcccatggtttatctgctaccgcgacccagtgcatcagaacaagctggtccaggccctaggatccggaggaggcaggagcagcc

SEQ ID NO: 259404 - DNA, 122 bp, Homo sapiens
gcggcgttggggggcggctgggtttacccttcgaggtgagcgcgtccttgttttcagggacgcccggacgggaggcgtttgttgctttcgcagccgagtggtggaaatgtattggctcttca

SEQ ID NO: 259405 - DNA, 122 bp, Homo sapiens
aaaattgcttggctttcatgtactttgataattaatatttgttctaggagttcatagtaccggcaaaacaaaatgaaatccctcatttaagatttgacttagtggccgggcgcagtggctca

SEQ ID NO: 259406 - DNA, 122 bp, Homo sapiens
cagtgcagcagcttgttgccttgatgctccccctccctggagaaaggtgggcatagggcccgtggagttgagttgcagagatttaaggatcgcacaggacttattgacctaaatgggactga

SEQ ID NO: 259407 - DNA, 122 bp, Homo sapiens
tcccggcgggtcctctgctgccgtcccgaggcggcccggcgggttctctggcgcggtctgcgtggaaactagaagcttgcactgcagctctttcacagcttaaggggttccctggtaaaacc

SEQ ID NO: 259408 - DNA, 122 bp, Homo sapiens
ccgcagccgcgcagccgcccgcggccgcagtgcccgggccctcagtgccgcagccggccccggggcagccctcgcccgtcctccagctgcagcagaagcagagccgcatcagccccatccag

SEQ ID NO: 259409 - DNA, 122 bp, Homo sapiens
aagaaggtcctagggccagcctaggcctccacggcccggccgttgatgacgcggatgtggcggatgacgtcctggatggcttcagatgttgtgccctggcccccgatgtccggagtgtgcat

SEQ ID NO: 259410 - DNA, 122 bp, Homo sapiens
gaagcatctggctgggcggccgggattggccaatctgcgggaccgtctggagcggaagggcggtggtagctggccctgcttctccctccccaggatctctgcactggccttacgaactgggg

SEQ ID NO: 259411 - DNA, 122 bp, Homo sapiens
gcttcacccgagcatgagcttgggtctctcggaggagcaggagacgcgggctcgaagccgcgggcctgaccctgatccgtggatgccgccgccgccttctcctcccctgggtggtgggggac

SEQ ID NO: 259412 - DNA, 122 bp, Homo sapiens
aaaggggcggctccccatgaccctgcagtcagggcctggcggccagggctccagcaggtgcgcccggcatgcggtgacagcctgcaccgtgggagtccacgtcagggcccccgagaggccgg

SEQ ID NO: 259413 - DNA, 122 bp, Homo sapiens
gcagccagctggaacccgaggaacccgagtccgccccgccaagttttcctccccgctcctcgctcttcccacggcgcacccggcccggacagccccattgtacagacccgcagagcgaggcc

SEQ ID NO: 259414 - DNA, 122 bp, Homo sapiens
ttggggggtgggatgcacatcatgaagacacctcggggatttgctgctgacacattaggacgctgatggtggagaaggatggcacatgtttaaggcctcaggtcacctctcccagcccctcc

SEQ ID NO: 259415 - DNA, 122 bp, Homo sapiens
tcgagcgaggatgcagcgctgagaggcttctaaggctcaggccctgcaaagcccaggagccggctgtaggtgtccttggcgaatgccagaccgcgcgcaccgtcccagcaagtcccgagcga

SEQ ID NO: 259416 - DNA, 122 bp, Homo sapiens
ctcagccgcgttctcatgggtgaacaaagaccgtgatggaacccacctgagcccctgagccggctggactggattatcctccctatgcgtggataatcagagccgggattattccccttaaa

SEQ ID NO: 259417 - DNA, 122 bp, Homo sapiens
attcaaattgtaactatgtagaactgaaccaatatagaatgaaaggaaacccaatgcgttcgtttgtgaggcattgccctcaggagatatatatagctagaatttgcactgcccttatttta

SEQ ID NO: 259418 - DNA, 122 bp, Homo sapiens
aggaagtctgggtccaggggatatcatttcttgttccatccatgcaggggttgcttacctcgggtaggaaaccctcaggcggtggcaggtgcacaggtaggggaggatggagagggcagtgg

SEQ ID NO: 259419 - DNA, 122 bp, Homo sapiens
tgcagtctgatcgtacacacagtcttgcataatccccgccagaattaaaagctgccccatcgtgccatgccgggccccctcggcttactccttcacagctacacctgtctcttcctcgccca

SEQ ID NO: 259420 - DNA, 122 bp, Homo sapiens
cctggctgctgacccctatccagaggtctcggacgtggccatgaaagtactcaacagcatcgcctacaaggtacgtgccgggcgctccccaccgcgctccagctgctggttctcggttacga

SEQ ID NO: 259421 - DNA, 122 bp, Homo sapiens
aaggctcagtgccccatgagactgtgtgactcacccatgtctgcaagccctgcatcctcacgtctgccccacagtagcctctcctcctccctcacaggcctcagtttcccctcccatgagta

SEQ ID NO: 259422 - DNA, 122 bp, Homo sapiens
caggcactctgggacctggggctttcttcctcaggaggcccaggggcgcgggtgaggtgtcggctgctttgcacccaggccacgctgcttccaggggccttgtggctggcagagtggaccta

SEQ ID NO: 259423 - DNA, 122 bp, Homo sapiens
ctgtgtctggggtgaacaagatgtgctttcctccctagcacggggattgcgtcctggacacggagcggtagctccagggcactgccctagagtgagactcctacctctgtgggcagagatgc

SEQ ID NO: 259424 - DNA, 122 bp, Homo sapiens
attcattgcaaagatatatttacattgtgctcaaactgtttcctaatatactgattacaccgaaagaagtgcagagtttcaaaacaaatgttacagcaaaactgactgtttttgggtccaaa

SEQ ID NO: 259425 - DNA, 122 bp, Homo sapiens
gaggatgcagcgaagacgtctccttgaagtgggatacggatgtgaaccggcccaagtgctcgccggtccgtcaagacgcgctgcccggctgctcccgtgtccaactcgggctgtgtccgccc

SEQ ID NO: 259426 - DNA, 122 bp, Homo sapiens
gaatccagcagggccagcagctgaggctgtgaggctgtgggcagtaccacactcaggagccggcgaagcgtggccccgggcaccatggccatcctcgccaggtacgatgccagtctcagctc

SEQ ID NO: 259427 - DNA, 122 bp, Homo sapiens
cctcaccccgacccacaccgcttccattcttgggtgcaaagggccttccttaacagtcggcggcagctctggggccggcgcatttttttctgtgggggacacccggcacaagaagggtggag

SEQ ID NO: 259428 - DNA, 122 bp, Homo sapiens
gcagtagagcccctcctcaaagcctggcagtctgcctctaacactctgaatgatgcttcccgaagtaacactcctgcaatccaatctcctgtaccgcggtgcatgagcaaagagagagagag

SEQ ID NO: 259429 - DNA, 122 bp, Homo sapiens
ctcggcgggccccgcattaggagcggcctcgggcaatggggggcttagcacccgggccagcggctgcggagggtgtactcggtcctccagcactgccggcccacccagcagtgccggcccac

SEQ ID NO: 259430 - DNA, 122 bp, Homo sapiens
aagtggtaactagagaaaccggtatacagtgagggaaagtgggcaaaggacacagctcgtcgtatcagtgtcctgaacagaaggtttccatactttgagcagtgcattctctccccacacta

SEQ ID NO: 259431 - DNA, 122 bp, Homo sapiens
acctcatgatccgcccgcctcgacctcccaaagtactgggattacaggcgtgagccaccacgcccagcctgctgaagtctcagtttctttaactatgaaatgagaagttaggtttgatccag

SEQ ID NO: 259432 - DNA, 122 bp, Homo sapiens
gcgacgggaggccttgaagccagtgacgacccactcagccgagctgccgctttcgcagcacgccaaggacactcatgaggaccatgatacttccactgagaatgcagatgagtccaaccatg

SEQ ID NO: 259433 - DNA, 122 bp, Homo sapiens
gccccacaaccacgcccccagcatgccacaattactcccacaacccgcccacagcccctgcgacctgggtcttagtaccagctccatctaaagccgcaccaccggcccctcccatgcccctc

SEQ ID NO: 259434 - DNA, 122 bp, Homo sapiens
ctagtgaatggtatctgtggttgatttcctgagtgagcccttcccatgagagtgtctcctcgagtgtccccacaggccgatctttcatttgtttctgctttacctctggcttcctggaacag

SEQ ID NO: 259435 - DNA, 122 bp, Homo sapiens
aagccctgaggggattagcgtcctcagggacatcaggcgctgacctaaccctagcagccccggcctcacacagcagcaggctgctgtggccacccatagccggcccatccaagggtaacggg

SEQ ID NO: 259436 - DNA, 122 bp, Homo sapiens
cttaaaatcagacccctaagtccaatctaagacccatcaaacagatagggtattgggtcccgtcaatctgcctactcacaaacttcctagatgaatcctctgttcattaaagtctgagtata

SEQ ID NO: 259437 - DNA, 122 bp, Homo sapiens
aagcggcggcctcccgcgccctctgccggctcaccgggaaggagcccggagccggtggtgcgccgtgggtccgtcctgcaccactcctgtgtgctgtgggtccatcctggacacttctgcgt

SEQ ID NO: 259438 - DNA, 122 bp, Homo sapiens
cagaacgtctggcgatttccaatttgggatgagcctggtatttctctacaggcgcccacacgcaggcctttccccagtgctctcagcaggaagggcctggggctcccaacagcaccaaggcc

SEQ ID NO: 259439 - DNA, 122 bp, Homo sapiens
agcagcggctccttcctgtggcttgcagctgaaccctgtgctgtgcccagtgaggcctcccgggatacgtgctaggaatattagccattcttcatatccactgctatgctgtggctttggtt

SEQ ID NO: 259440 - DNA, 122 bp, Homo sapiens
cccattaacactgcagcccgcccgctgcgttccctccacttgatactgtcaatcttttttcgtatttgccaatcggagacaataaactgttatcttcgccctggagtatttattcgcctttc

SEQ ID NO: 259441 - DNA, 122 bp, Homo sapiens
gccgagcccggggctagggaggcgacaagcggagccacgccagggccagggaggttcccccgcgtccccgctatccgccctaggttaggtccctacggaaggacgcggagcctctgagggcg

SEQ ID NO: 259442 - DNA, 122 bp, Homo sapiens
tgcttcctcctgcccaccccaagacctcccactacgtatgagctttggaaggcagggcctcgcctctctgcatgtcacggggcctttgtgggggaagtcagtggagtagaggacctgccatg

SEQ ID NO: 259443 - DNA, 122 bp, Homo sapiens
gttggagcagccccgacctgctgctccaggcggaatattgatgtggccctaactgcggaacgttctggaagcagcccgtaccctccaccgggaactgccgagagccagcacagcccacagtc

SEQ ID NO: 259444 - DNA, 122 bp, Homo sapiens
tgagggtgaatggagatgctcagaaacacctgcactaaaaatttgctgaaaaaggtaaaacgtgtcaagcagcactgcctctggaagccagaaaaattacattttttgataacagatcctaa

SEQ ID NO: 259445 - DNA, 122 bp, Homo sapiens
atgcagtgtgtgtgtgtgtgtgtgtgtgtgtgtgtgtgtgagagagagagagagagagaacgcacaagagagacagatagagacagacagccaggcgtggcggctcacgcctgtaatcctag

SEQ ID NO: 259446 - DNA, 122 bp, Homo sapiens
tgttagagttattattaaatcattccaccaagagtggcacgcagatagtggtagaagccccgggcgaggttactgccctttagaagttcccaggctaatgaggacgtgaagcatgaacacaa

SEQ ID NO: 259447 - DNA, 122 bp, Homo sapiens
cggtcgctttttatgaatgggggagcgggcggtgcgaggccttattactatgccgcgcaacgcgcgctgcgccccagcgcgccgcgcccattggctgatcggaccgctgacgtcaccgaacc

SEQ ID NO: 259448 - DNA, 122 bp, Homo sapiens
cggcttgtgggagtgctggttctgtcctccttgcgggtgcggagatggttgtcttggttacgggtcctaacggtcccctgccttgaaatcccttgttgagggcctgcaaccttgtgcttccg

SEQ ID NO: 259449 - DNA, 122 bp, Homo sapiens
tggatgttgtattagggatgctgaaccagtaagtataatgcaaatattccaaaataaatccgaaatctgaaacacttttgttcccaagcatttcagataagggatactcaaccagcagtacg

SEQ ID NO: 259450 - DNA, 122 bp, Homo sapiens
acgacaacgtggacatcaaggctgccgcgagctcggaattgttgtgtgcaacatcccgtccggagccctggaagagacagccgactccaccgtctgcgacatcctcaatctgtaccggagga

SEQ ID NO: 259451 - DNA, 122 bp, Homo sapiens
acccattaactctactcagcagtcagctctgccagaaagacttcttggctgtcgctcccacgaggctgggccaggtgtcccttttcagtgtttctggtacagcatctatctggtacttaaat

SEQ ID NO: 259452 - DNA, 122 bp, Homo sapiens
caccgcagcgcgagacgcgtacagactcgtgaccttcactgattggtccgtagacccgggcgccacggaaggaggtgggctttcagggagtggggcggggtttttctacctaggcgggaacc

SEQ ID NO: 259453 - DNA, 122 bp, Homo sapiens
cccgaggccatccccaggcctgccgctgcactctgagcaaggctataatgaagggagtggcgactccctggacagcagacagccaagagggtttgtttctccagcttcctgcaggagtggaa

SEQ ID NO: 259454 - DNA, 122 bp, Homo sapiens
taaaattggaaacttctgtctataaaaagatgccactaggagagcgaagaggaaagcctccgagcggaagaaattatctgcactgcgtagaaccatcagaggacgtggacacgctgtcctga

SEQ ID NO: 259455 - DNA, 122 bp, Homo sapiens
tcatttgcaaagccgccggcagaatcccagaccttatacactgagctatgacgacctctccggccaggctccacggtggcatccgttatgagctacctcctgggctttgagtgtgcaatgaa

SEQ ID NO: 259456 - DNA, 122 bp, Homo sapiens
cacggaggcccaggctgtgccggccactacaggtatgtcggggagaggaggagggagccccgaaaccaaggccacctgtgctgttttatcagctctccatcgctcagcacctgagaaggggt

SEQ ID NO: 259457 - DNA, 122 bp, Homo sapiens
cgtgagccctcggggagtggtccgaccgcgggcggccgccggtgaggtaggggcgggaggcggggggagacatggctcggcgcggctggcggcgggcacccctccgccgtggcgtcggcagc

SEQ ID NO: 259458 - DNA, 122 bp, Homo sapiens
tgcgctccagcctgggcgactaagcgagaccttgccacaaaaacataaaaaaagattagacgctgtgggaaggaagagggtaattctcagcttatgatcgctgcatgtgacagggtgagctg

SEQ ID NO: 259459 - DNA, 122 bp, Homo sapiens
gatcacttgaggtcaggaatttgagaccagcctgggcaacatggtgaaaccccgtctctacgaaaaatacaaaaattaggtgggtgtggaggcgtgtgcctgaaatcccagctacttgggag

SEQ ID NO: 259460 - DNA, 122 bp, Homo sapiens
gagggtcctcagtcttttgctctagaggaaagtgttgcagagcccccctctctactacaacggggtgagctgttcttgaccgctgcccggcttgcccgcttctggggctccccagggttccc

SEQ ID NO: 259461 - DNA, 122 bp, Homo sapiens
acatgaaattcatctttacatcagtagcaggataatggaagtttataggaataaaaggcccgttgtcatttggcagtttgtgaggatgagcacatcatattttaaggtttagggtctttaga

SEQ ID NO: 259462 - DNA, 122 bp, Homo sapiens
caccacctcccacttggctcccaggtgggtgcagtgaggctgctgaataccctttgggctcgtggtgtattcttgtgactcaaggaatcaggataggggctgctgggccgacctctgtcctc

SEQ ID NO: 259463 - DNA, 122 bp, Homo sapiens
ccctaccggagagaatccgagcgggcggagggggcgctgagtaggggatcgactgcctcccggaggctgtcccggatccccgagccacaacccgcccccgcagctcaggggtttttcagtgg

SEQ ID NO: 259464 - DNA, 122 bp, Homo sapiens
cttaggttaccccgcgtagctggcccgtccttccttctcctgtctcttctgtgcctaccgcggggggttcccttaccaaggtctccatcacccccaggcccacctccctcgggcccctctct

SEQ ID NO: 259465 - DNA, 122 bp, Homo sapiens
aagagagcccgggaccctgctgtaaaacagcaagcagcacgtgtcccaggcacactgttgcgggcccttagcctagctacgcatccgcaccccaggcttcaaaggcgcgctgggcgctctat

SEQ ID NO: 259466 - DNA, 122 bp, Homo sapiens
gggggaggcaggagcaggggctcccacgtgaatccagggtgtccctgagctaaggccaggcgggggtgacctccgcagcttccggggccctgggcgatcgggccgtctcgcctcaccctctc

SEQ ID NO: 259467 - DNA, 122 bp, Homo sapiens
aaacccaaacttcactgcagcagcaccacacacatgccaggctctgcacgtgtgacctcacgggtctttgcaaaaaaccctgtgcaggcagaactatcattcctgttgtgcagagggggaaa

SEQ ID NO: 259468 - DNA, 122 bp, Homo sapiens
agctccagagcgggcgggaggcggggtcggcggggctggatcttgacgccagtccaaggccgggtgactactggggtctgcccgcgccgcggacgcgccgagccctctcagtgtggcgctgc

SEQ ID NO: 259469 - DNA, 122 bp, Homo sapiens
tgtgcccacacacgcgaactacactttacagtttgccaagagttttccattgcgataccccgactgtgctcaaggtacactccagggtacaaggccaggctttccctatgatagctggagaa

SEQ ID NO: 259470 - DNA, 122 bp, Homo sapiens
cagcgacccggcctccccgccgccgaccccgccggaaacctcggtcctcacggtgcttcccggtctgctgctcccccgaccccaggcccacggcacggcgtcccccttcgcgcggcctacgc

SEQ ID NO: 259471 - DNA, 122 bp, Homo sapiens
gggaatcaaagggactcgtaaagtttgtctgatgatttgggactcggagcactgcggacacgttcatgggcattttatgcaggagggaaccgttaagcagggaagctgaaagagacagatca

SEQ ID NO: 259472 - DNA, 122 bp, Homo sapiens
catgtctcctccactctcagtccacttgttttgggtagaattgaacctatgttcagtgtacgagtaaacagcgatccaagcctggccagtcagagcatcccagccatggccacagtaattgg

SEQ ID NO: 259473 - DNA, 122 bp, Homo sapiens
ccggcaggcgactttcctcccacgtgcccgccccgatcacttcccccaggacacccctgccgcccttgccccagcaaccagagagagttctctgcatctgctgtattacctccgtaccatct

SEQ ID NO: 259474 - DNA, 122 bp, Homo sapiens
gaatgtgttgtcaaatgttttaatttttgctgatctgaaacatgagaaatggtattgcagcgtagttgtcatttgcttttattatgtgttaagttgaagagttttcatgtgataaatacaat

SEQ ID NO: 259475 - DNA, 122 bp, Homo sapiens
attgtatcttaaaaagcaaaacagaatgaccatcccaacaaaaccttcagtttgcttttgcggaactgcccttgttgaaggagaaaaatcacattgaagaagaggctgaccgaagaaatgta

SEQ ID NO: 259476 - DNA, 122 bp, Homo sapiens
cactgttataaacccactgagaaaagcatccttattcacatacaggtttgcacatgtgaacgattatttcctgaggatacattcctagaggtgacgttactggaacaagcactatgtttcac

SEQ ID NO: 259477 - DNA, 122 bp, Homo sapiens
gaggcccgcccgaggggagtgcacagccggcgcatcacgtgactctccctgccaacaggtcgcctgaggctcggcccgcggggtcacagacgccgggcggggcggggcgggagaggaatggc

SEQ ID NO: 259478 - DNA, 122 bp, Homo sapiens
atcctacacagagtgctgcaggctccctttgtcagaattggggcccctaggagctgagtgcggcaggtttcgcctgttcctggagctcgtagtcagggtcgctagtgcactgccactctgag

SEQ ID NO: 259479 - DNA, 122 bp, Homo sapiens
ggaagacttccgtgtccgacccgagatccggaacaatttctgcttcaacacaattgtccacggagggcaccagttccgtcccaccggcggaagcgagatctgcctagctactagacctgctg

SEQ ID NO: 259480 - DNA, 122 bp, Homo sapiens
aaaagccttctgtactgtgatggggctttgtggtgagaggaacctctgagaagcctcgtgcggcttgagtttagagtcacgccctgcccagcgacattctcccgcgcacgggagaacctgca

SEQ ID NO: 259481 - DNA, 122 bp, Homo sapiens
gagggaagtgcattatgagggctctgtcctaagtcagctcccatccaccaagggtggtaacgctaagcttttactctctgcttaaaccatccagcaagtcatcaaagttacaaaagcccctg

SEQ ID NO: 259482 - DNA, 122 bp, Homo sapiens
gggagtctgttagggggagcgcaaagggtctgcgccagacatagtgttgcctcctcatctcgccccctcgttgttttcattctagctgaatcccaagagttcaactttgagctccaaggatg

SEQ ID NO: 259483 - DNA, 122 bp, Homo sapiens
cagggtcgaggtccggccggggcggcggttcccccggtccctggcgcaacagcagtgcaccgggtctcttggccaggccctttccgctcgcatcctccacgaaccaacactcgatcaccgcg

SEQ ID NO: 259484 - DNA, 122 bp, Homo sapiens
ccatgccactctcaggttcaaagcccgtgctgggacagaacctagctttcccctgcggggcgtccctggggcctcttcctcccttagctcaatggtcgattcctctgcccacgccagctggc

SEQ ID NO: 259485 - DNA, 122 bp, Homo sapiens
cccagggacgcagcccggctgttctgcctccaccaccgtccccaccctctcgcggcccagcgtcgggaacattaacccttcccgggccgcagccgccagcgtcgccccattaggttattttt

SEQ ID NO: 259486 - DNA, 122 bp, Homo sapiens
tcctggttgtggagcctgggaagtccaatatcgaggaacctagtgagggccttgtgggtgcgttgatggggcagcaggagacccagtgagggaggggaagtccactccacgaagataccacg

SEQ ID NO: 259487 - DNA, 122 bp, Homo sapiens
gagccaccacgctcggccaggagcacatcttattcacgactgtgtccccagtgtctagtacggtggcttgcctatggaaagtggtcaaaaaatacttgcggagcgaataaatacacaaacaa

SEQ ID NO: 259488 - DNA, 122 bp, Homo sapiens
cctttgagcaggcgcagaggtggctgtaccgcgtggctccgcctccgcgcgacacttttccggggcttctcattggagagcaagcctgtcaagtgctttctgttgtttcggaggcggggcct

SEQ ID NO: 259489 - DNA, 122 bp, Homo sapiens
atcacctcattttacaacatgctttggccctgggatcaatatatcaagagggcccagcgccggttacgatccagacaagattctgaagtggggctgctgccagcagggcccggcctctcctg

SEQ ID NO: 259490 - DNA, 122 bp, Homo sapiens
gtgtcagcaaaacccaatgagaagagcacgggtgccgagcaccgggggagaggagagccacgatgcccgaggagagccacgatgcccgctccccccggtggtccacacctcctgacaggcac

SEQ ID NO: 259491 - DNA, 122 bp, Homo sapiens
ccatagggagggactcagatgtgatttctggtgtctgtttttgtgtttttttccaggtcgcgggacaagaaagatctctgtgttggacacagactagacgacaggagctacgtgttcttctg

SEQ ID NO: 259492 - DNA, 122 bp, Homo sapiens
ctgtagaccttctttcactccatattcttactttaggagctcagacccaaaaccataccccgaaggcctaaaagaacctttctctggtaaggcacggggcagggaaagccacactctgatgc

SEQ ID NO: 259493 - DNA, 122 bp, Homo sapiens
aagactgaggatacctggagggcaattccaggatatgagagcctcctggatttgtgcttccggtttggatgtccctggttgaagccccatctcctttctaggatgctgctggctttgattcc

SEQ ID NO: 259494 - DNA, 122 bp, Homo sapiens
ctgaggctgcaccccacatcctgaatgctcccgtggaaagtcctgaaggggccggcatcccgcttcatacctggcgttaggtctgcacgtctgtcgctgagcggggtgcctgggctgccctc

SEQ ID NO: 259495 - DNA, 122 bp, Homo sapiens
gggcgcggggcggggcttgccgtgacagctaccactcctattggtcaacgcgaacagcgacgtcctctgcgataggctgtaggtgaaaagggtaggcctccactgctctgggacgggcggga

SEQ ID NO: 259496 - DNA, 122 bp, Homo sapiens
cgcccagtctccggaaggggtcctcctcctcctccatcctttggggaccccagagcaaatcgcccccagaaccccaaaggggctaaggtggtacttacggtgcagatgggtgaaccaggaga

SEQ ID NO: 259497 - DNA, 122 bp, Homo sapiens
ggcggcttctttttggggagtatagtcatggctgcactgccgagtaccccccaacaaacccggcgcggggcacgccgggagagaacccggatgagggggctagtgtagtgcgcgaggcacga

SEQ ID NO: 259498 - DNA, 122 bp, Homo sapiens
caaggtcctgggatacaaaattaacacacaagattcaattgtacttctgtatactaacaacgaacacatgtaaactgaaatttaaaatacaacaccaggctgggcgtggtggctcatgcctg

SEQ ID NO: 259499 - DNA, 122 bp, Homo sapiens
ttctttctctcacccctcagaaaagaataaggagctgcccagtacacacctgcccaccaacgctgggatcctggcggccaccatcattggatctcttgctgccggggcccttctcatcagct

SEQ ID NO: 259500 - DNA, 122 bp, Homo sapiens
gacgtcagatgatccacccgccttggtctcccaaagttctgggagtacaggcatgaaccacggtgcctggccaaggtgatccttttgggggtctctcacgtttggaattaccttggttgggg

SEQ ID NO: 259501 - DNA, 122 bp, Homo sapiens
cttatctgtctccgatgccgtggcactcacagcaaaaggcgacattcacttagaactctccgtgggaaacacctctttgagccgcccccggttcaggcatcactgaacagaagtgtttcatg

SEQ ID NO: 259502 - DNA, 122 bp, Homo sapiens
ggtgaatatttgtatgcaagttcaagccctatttggctcttgaccccttttaagagagaacggggtgttgccattggtttcaggtctcatctgtggattaaatttgtgagctaataataacc

SEQ ID NO: 259503 - DNA, 122 bp, Homo sapiens
aacaaacaaacaagcaaaaaaacctgactctgacaaatgatgcattgttcccagtcctttcgtctgatacctttttttgttgttcttttaaatctctctctgattctgctgaaacaacttga

SEQ ID NO: 259504 - DNA, 122 bp, Homo sapiens
tgtttcaccaaagcacgcaagaaatcccaccgcagacctcggagtcccggccccactgcccgttctgcgtgcctcagtttacccatctgtaaaatgtgcgtgtggtgggccgaattctgggt

SEQ ID NO: 259505 - DNA, 122 bp, Homo sapiens
gcaacactagcgccagcactatgttgccgacgaaagaggcggcgaggaagataaccagcacggttgagcggatgatgccgtgggccaggctgatgggcattttggagaggggcatgcacgtg

SEQ ID NO: 259506 - DNA, 122 bp, Homo sapiens
aggccgccccgcgccgtccccgccggccgccccgctgatgccgctgccccgcgcggggcccgagcgccgctagcagcatgtctcggcgcaagcaggccaagccccagcacctcaagtcggac

SEQ ID NO: 259507 - DNA, 122 bp, Homo sapiens
taaaaaccgaagacgtcagcgtgaccaagaggaaactccagccatagcctcttgaaagagcgtaccttaaaccaacgcctcagacaggtggtaaaccgagagctgtgtgcagggagctgggg

SEQ ID NO: 259508 - DNA, 122 bp, Homo sapiens
gggaacgagagctctgcaggaaccatgggctctcctgaacaaatatgaatccagacagaccgaagcttggtgaaaagcgactccctcctgattctgacaatcacgctgtgcttacgtgagag

SEQ ID NO: 259509 - DNA, 122 bp, Homo sapiens
accacaaacccaccagaagaaaaaaaaaaacaaaaactcggaacatgagggaacaaacggcgggacatgccgcctattaagaactgtagcactcactgcgagggtccgcggcttcgttgttg

SEQ ID NO: 259510 - DNA, 122 bp, Homo sapiens
aagttttggggagacggcctgtccccacaccccgggcctgcgcctcggcttcctccgcgccgccctccgcctgcaccaccagtcccgggtgacccgcgcccgcctccggtcctcgtgtcccc

SEQ ID NO: 259511 - DNA, 122 bp, Homo sapiens
cggccacaacgccactggattggtggtagggcggggcgggccacagtctccagcctgaagcggaagtggaggaaagatggaggtgtggggacaggagctgggtgtgctggggactggccgcg

SEQ ID NO: 259512 - DNA, 122 bp, Homo sapiens
cggacccaccctccggcttgacctgcgacctccctgcgcccgccgctcagaaacgccccgcgcttcgctgccaaccctgcggctccctctgtgacccgggaccagccccgcgcccgctgccc

SEQ ID NO: 259513 - DNA, 122 bp, Homo sapiens
aaatgacttctctagggtgcagcaaggtgagccacctggcttatcctatccccatcagcacgcgtcccacacctctcagtcccattccggaaatggagctctctcaggactggatacaggca

SEQ ID NO: 259514 - DNA, 122 bp, Homo sapiens
ccaatgatcaaaggtgtcttccttcaaagcccctgagtgaaaacagcaatccatgcttaccgatgaaggccacaggtgatgtttcttatgtgagtgcatccatctgcttcaggtcatatttt

SEQ ID NO: 259515 - DNA, 122 bp, Homo sapiens
cgcgaattccacgtgggagtgggctcagcgggccccgcactcggagcggccagccggccccgggcactgaggagcttagcaccaaggccagcagctgctgtgctcgacttctcgctgggcct

SEQ ID NO: 259516 - DNA, 122 bp, Homo sapiens
aatttatcctgggcccactgggctgtggtcaggaggccagggcctatgcagagttagtcgcgtaaggtgccgcagcctggagatccaggaagatccttcccagaagcatttgggagccagat

SEQ ID NO: 259517 - DNA, 122 bp, Homo sapiens
atggatggtcgaccagttggaaagtaattgtttctaatgtacttcacctggtccactagccgtccgtatccgctgcagcctgtggggcctgcgggccggggagccgatcgcgcttcagctca

SEQ ID NO: 259518 - DNA, 122 bp, Homo sapiens
gggtgaccgcagacaggattgggtccctggctggggcagcccgggacagtgagccaggcccgtgaacggcccatgaaagggcaggccagggaatgtaaacacagggatcggggcagctgcag

SEQ ID NO: 259519 - DNA, 122 bp, Homo sapiens
ggcatttctggaggcatttcgcggcgttattatgggaagttgcgcggaccggggccttcgcgctacagccgaggagtctcagcgcctgccaggcgggagccgcacttccggcgaggtgtctt

SEQ ID NO: 259520 - DNA, 122 bp, Homo sapiens
cacctccagccgggttctggggtcctcctgggccacctgcttactgtgtgtccctggacacggcgtctcccctcgctgagttagtttcctcatttgtaaaacggggatatggcccgtctcct

SEQ ID NO: 259521 - DNA, 122 bp, Homo sapiens
gcagggtgggtggtgggcatgggggcttgggggctcgaggggttctggggccccttagggcggtctccaccccagccctttagctccacctggatgtagttaagctgccttgggggctcggg

SEQ ID NO: 259522 - DNA, 122 bp, Homo sapiens
gtgcgaaaacgctgcgctggcccaagattcagggcgactgacgccccccaccacctccaccgcccacacctggacaaacagagccagctgtgagcctggctcgccgctgaaaaccctgccgc

SEQ ID NO: 259523 - DNA, 122 bp, Homo sapiens
acggagaccggaggctgagactggcaaggctggacctgagtgtcgtcacctaaattcagacggggaactgcccctgcacatactgaacggctcactgagcaaaccccgagtcccgaccaccg

SEQ ID NO: 259524 - DNA, 122 bp, Homo sapiens
gcagtggtatgatctcggctcactgcagcctcaacctcccaggctcaagtgatcctctcacgttggcctactaagtatctggggccacaggtgtgctccaccaccactcctggctaatgttt

SEQ ID NO: 259525 - DNA, 122 bp, Homo sapiens
tatttgccgccccgtcaaccctgcagcccctacagccgcgaatccaggaaaccctctacccgcagcccagctactgagtttacaatcccctgggctttgggctccaaggtgcgggttcctgc

SEQ ID NO: 259526 - DNA, 122 bp, Homo sapiens
tccgttgtcaggcagcagtagcacgctgttgctctcggagcttggctgctcgttcgtgctcgcaaccactaaggtctacgcaaacctccacggtttccttccgccttcgcgtcacctttcta

SEQ ID NO: 259527 - DNA, 122 bp, Homo sapiens
tcctactgcaacactgggctgagagtcacttagctaagcgctgcctctcaagcttcaatgcgcataaaaattattttatattctcggcctcactgtaacaaaattttgcaggtttgaaaaga

SEQ ID NO: 259528 - DNA, 122 bp, Homo sapiens
acaaatacagacagttcctaacgaccaaattattttaccgtctcgcaggagcagcgttggcgagttttaataaccggaggttgcttccagatgtcaagcaaggcagatttaagaaagattcg

SEQ ID NO: 259529 - DNA, 122 bp, Homo sapiens
cccaggataacgcgggatttcagcagggccaaaagagtgattgagctctgactggcgacccgacccggcggaaaccacctcgacagcctccagaaaggggcgtggctgaaaatgtaggggcg

SEQ ID NO: 259530 - DNA, 122 bp, Homo sapiens
gggctcagagatgtgcagggaggaagggggagagggcacgccagcgaggcaggacttacccgctccccgtggctacacactgactgagaacgtggcccggatcctcaacaggaaactgctgg

SEQ ID NO: 259531 - DNA, 122 bp, Homo sapiens
accctgctggaccgcatcaagtgagggccggcatggaaaagcggccatgctgaggtgccccggaagcagcttccggagtgtgcgtcagagtttctggccatttgagctaagacttttcttct

SEQ ID NO: 259532 - DNA, 122 bp, Homo sapiens
gaccccggcggtgaatgttacagctcttaaagatggcgcatcacagttgtttgttcctcccggtgggttcgtggtctccctgacttaaagaacgaaggcacagaacctcgcggtgagtgtta

SEQ ID NO: 259533 - DNA, 122 bp, Homo sapiens
accacgccaaagaggaaccatgtgcctgcaaaggtcgcagagaagagcagaagcttgtagcgccactgcatgtcaatgaaggttgtccacaggtccttgaggtagaggaagcgcttgtcggc

SEQ ID NO: 259534 - DNA, 122 bp, Homo sapiens
aagtcggttcctgggctgctgtctcatagacatcagcttgcagggaagctgggggctctccgaattgccctgctccggggcccctcctgctgcgtgactcacaggcacattgcagagagaag

SEQ ID NO: 259535 - DNA, 122 bp, Homo sapiens
ttctacgtgccgtcctgcctctccttaactggaaggtggagaccaggccatcatacatcccgtcctgccctccttagctggaaggtggagaccaggccatcctacgtcccatcctgcctctc

SEQ ID NO: 259536 - DNA, 122 bp, Homo sapiens
cccgcccgccaggccccaacccggaaatgcagctggagcggaggcggagcccactaaggccgcggcggagcgacgatgggcgcggccaatgggcgcgggcgtcggctgcggcgcgacggaag

SEQ ID NO: 259537 - DNA, 122 bp, Homo sapiens
aatctccccgaacaaaggcctttcagttggaccagagtggcaggcgcgggcggttggtatcgccagatcttttctatgaaacgcgcacccggcggagtatggatctgattaggggagccagc

SEQ ID NO: 259538 - DNA, 122 bp, Homo sapiens
cccagccgtgaggacactgccatgaggtggtggctcacaaatggctgagacggtgccagccgggagagcaaccatgagggaaaaagcagccagcgggaggggcccgggtgggggtcagcggc

SEQ ID NO: 259539 - DNA, 122 bp, Homo sapiens
tacaaaggtaatttcctacacaggctgtttagcccaaacttatttcttcatttgcttcgccgtcatggaaaacttcatcctggctgtgatggcctatgacaggtacattgccatctgccacc

SEQ ID NO: 259540 - DNA, 122 bp, Homo sapiens
ccgaactgcaaaaaaaggaggcttttgcactctgcctttctctggtggggttcactgtagcgtacgcttgcttttatggccaagataacttctttgtttacctacctcaggtgacactaagc

SEQ ID NO: 259541 - DNA, 122 bp, Homo sapiens
ggtcccgcggcgactgggcagctccggctcagggtgcagttgtagggcccagagctagagcggacttccggtagaaaaacccgcctgccttctcgcgcacagacccctgggagttgtagttt

SEQ ID NO: 259542 - DNA, 122 bp, Homo sapiens
gctggagtcccagctgagccggcatgaccagatgctgagtgtgcacgacatccgcctagccgacatggacctgcgcttccaggtcctggagaccgccagctacaatggagtgctcatctgga

SEQ ID NO: 259543 - DNA, 122 bp, Homo sapiens
gatgttgaaaagacagctgtgtcttacgcacacataatctgcagggcacagctatgtaaccgtaaggacaattgtttacatttgtaaacggaaccctttaacgccgtggaaaagccactgtg

SEQ ID NO: 259544 - DNA, 122 bp, Homo sapiens
cagtagctcctgcaagtttctactcgcagcgaggcctcgtgtctcccggctgcctcaccgcgaatcctcactccgcgcgcctgggctgccctcccgccccgcccgaacggccggcgtacttc

SEQ ID NO: 259545 - DNA, 122 bp, Homo sapiens
tcagacaaaaaggcgggtggaggaggagtagccgagcccagagtcctgctccggcgccgccgagcaccgcccgcctcagccgaccagccccgtcggctactgggcctagcctagaggagagg

SEQ ID NO: 259546 - DNA, 122 bp, Homo sapiens
gcgcggcgctgcaggagccccggcggcagaggcgcctggtgcttgttatcgtgtgcgtggcgctgttactggacaacatgctgtacatggtcatcgtgcccatagtgcccgactacatcgcc

SEQ ID NO: 259547 - DNA, 122 bp, Homo sapiens
tcataaggatgtgctggaaggctgctttcactttttagaattaaacttttcccccagtctcgtgagtattgcaactctcttaatgcttttaggagcttcaaagcatccttaagaaagggaaa

SEQ ID NO: 259548 - DNA, 122 bp, Homo sapiens
aggctttctctaaattggcctggaccggtccacagcggtaatgtcacctcactgggaatccggcaagccaggcgtgtccacagctctgcaaacagcctcagccccactgccacggaccagcc

SEQ ID NO: 259549 - DNA, 122 bp, Homo sapiens
cagctggactgggtctgcccacctcttgggctgtgagctgtgttctgtccttcctcccatcggagggagaaggggtcctggggagagagaatttatccagaggcctgctgcagatggggaag

SEQ ID NO: 259550 - DNA, 122 bp, Homo sapiens
tggtggcccaggaggaggaccccgacctattcagactgggagctggggtcagagtgtctccgtctccggagggggaccttccagaccccgggcgggaggggcccacagcagggtgccccggc

SEQ ID NO: 259551 - DNA, 122 bp, Homo sapiens
ccacctgcccgtggcgcctgcgaccgcagtggcatgaggaggtcaccggacgtcagcccccggagactgtccgacatcagcccccagctccggcagctcaagtacttggtggtggacgaggc

SEQ ID NO: 259552 - DNA, 122 bp, Homo sapiens
gacacggcaccctgtccaggacaggcttctatgtggggggggcccaggagcagcactgaccgccccccggtgcctgtgagagccagaagggccttagacataatctgggccaagccgctcct

SEQ ID NO: 259553 - DNA, 122 bp, Homo sapiens
acgcctgtaatctcagctactggggaggctgaggcaggagaatcgcttgaaaccaggaggcggagattgtaccaagatagtttgttccagctaaacaacctggcgctagtgcaggaaaaggt

SEQ ID NO: 259554 - DNA, 122 bp, Homo sapiens
ccctttgcagccgaagactctccaaaggaaataatattaactgacttcatggcttgctgacgccaaaacgtgtccaaagtatttttacatctataaacccaaaagcgctaagccagcagatc

SEQ ID NO: 259555 - DNA, 122 bp, Homo sapiens
ccaaatccaggctgatgtggcaagaatggcagctgcccagggctgtgtgggagccagacacggcccctcgcttcccggaagaggccacgtgaagccgaagcaggatgcaggagggcgtccca

SEQ ID NO: 259556 - DNA, 122 bp, Homo sapiens
tgttgcatgcacgtgcacacatctccatatgccagggataagtaactgggctgcatgcttcgtttcccctgcttctccagttccgtttcatcctggtgctcgacagctgcccagatccagct

SEQ ID NO: 259557 - DNA, 122 bp, Homo sapiens
tctgacattagttcctggaatctgtattttcaaaacactcccaggtgattctgatgcacacgcagatgtaagaatcagtgtcatggaagacctttgtcaaaacatgtgaacttttatctcca

SEQ ID NO: 259558 - DNA, 122 bp, Homo sapiens
gtccgtatcctgccccgggcctggacagtcattgtacaagtaggttcctgtgaatggggccgcagagttaggctgcgggtgagaacacaaggaaggagccccatgctagggacaacagccag

SEQ ID NO: 259559 - DNA, 122 bp, Homo sapiens
tgctcgccagtaccacaatctgccgccggccgctccgacacaggtataaaggcctctctacgccgcgaacttgcttctagagcgcactccagcctgcgaactgataaaaccttcctcgagct

SEQ ID NO: 259560 - DNA, 122 bp, Homo sapiens
gcctggatcatgcggatctttgaatgccaaactgaaaagctggttttattctctggatgacggggaaccagtagcacgattctctctcccactgtatctttgagatgtgttcccctattctt

SEQ ID NO: 259561 - DNA, 122 bp, Homo sapiens
catgcctagggaatgacaggcatctccacaggcaggctgcatccaccttggctggggtgtcgtcattggctgcctattagaaaaacgacaggacaatgcataccaccgcctcccgactgtaa

SEQ ID NO: 259562 - DNA, 122 bp, Homo sapiens
ttagggctatcacctccaccctggcttccagcttcaagaggcgtaggtcctccaaagacacggtaagggggagagcaccccagtcccgcgtccgactccacctgccctgccctgcgtgtgtc

SEQ ID NO: 259563 - DNA, 122 bp, Homo sapiens
tccctgccgcctccagctgccccgcccccggcgcggcgtcagcgctcggcggccggggagcgacgctctaggctgtcagctcggtggtttccagctctccccgaccgcagggctggggcgac

SEQ ID NO: 259564 - DNA, 122 bp, Homo sapiens
gtttgatcatctcgtccgtggtgatcttgtcggtgatctcttttacccccggagggtaagcgatcttcccgtcggcactcacgacgccacagagggcagtggcaggcttgggctgcgcggtg

SEQ ID NO: 259565 - DNA, 122 bp, Homo sapiens
tagatcctacaagtcacacgaggacaggcgaaataggctatgttagacacaaacactcaccgatctgtgaaggagtaaggcccttcttggccagtttgtaaatctgctccttcacgtcgtca

SEQ ID NO: 259566 - DNA, 122 bp, Homo sapiens
gcaagatagcagaagcaggaagagagcctgcccgaagacacgtaccctggccggaagtcacgtacccctgaagatcgagaaagaggccatgtgggaataacgtagcagttacgtcagactag

SEQ ID NO: 259567 - DNA, 122 bp, Homo sapiens
ttacaaatttttttttaatctaaaccagtgatttaattctggcaatcttgttggacggcgcgactcactcgtgttctaccaaatgtggtggctgtttctgtgctgcctggtgaagccacatc

SEQ ID NO: 259568 - DNA, 122 bp, Homo sapiens
ctgttccagaacgtggctgattaagcccactgctttggcttctttgccatcgaggactcgcgcagagaatatgagctccttggccagggacattccaatggcgcgtggcaatcgctgtgtcc

SEQ ID NO: 259569 - DNA, 122 bp, Homo sapiens
gtcggccctggagcattctcaggactctgcctgcccctgggggcttccagagcaagactacggggtggtctttcccactcagaacttgtaagtcacacgacttgcccgagccagaggtgact

SEQ ID NO: 259570 - DNA, 122 bp, Homo sapiens
tggaggatgaagaaggagcatgtgcttcactgccagttctccgcgtggtacccgttcttccgaggcgttaccatcaagaggtgagatgggagggggttcgcccggtcgaccggcaaaaggga

SEQ ID NO: 259571 - DNA, 122 bp, Homo sapiens
tgggcccacagcaccccatttcggaaccaggagaagttagcagggctgccagcagcttcccggctcacgttgcaagtcaagttggcttctgtgccctcctgaagtgtgtgtgatggtgcaat

SEQ ID NO: 259572 - DNA, 122 bp, Homo sapiens
ggaagctggcaattccactatacatggctaaatgccagagtagtgcacagcatcctttagcggcatgaggaatgggctcataagcccacagtggaatgcaggggttctacacaaacgtagct

SEQ ID NO: 259573 - DNA, 122 bp, Homo sapiens
tggcctccttgcccctgcagcctacacctacttctacaagggcaccaaatactggaaattcgacaatgagcgcctgcggatggagcccggctaccccaagtccatcctgcgggacttcatgg

SEQ ID NO: 259574 - DNA, 122 bp, Homo sapiens
tcccaggatgcgcctacacgtcttatgccaactatcctgcagtctcagacctcaagcttgcggcttgtcaggtgtctgaatctccaggagtctcctgccacctttaaggggctttctttgct

SEQ ID NO: 259575 - DNA, 122 bp, Homo sapiens
gcgacttcagcgaggctctgtctgagagtctctgccccggaggccgaagaacggagtccacggcagggagccaaacaccagcgcagcactgtccccagaagtgcccgctgcctccccgagcg

SEQ ID NO: 259576 - DNA, 122 bp, Homo sapiens
acatagcactgcgctcccctccttctcctgtggttcccctcctgacagcgcagtgcagtgcggcagacacccctcatcctcggtgtcagggcagcattagcatgtaaatagctggcagacac

SEQ ID NO: 259577 - DNA, 122 bp, Homo sapiens
tactacgtctctgtcccaacaggggctgggcctcccctgcctaatagttgccaggagtttcgcagcccaagtgaataatgtcttatggctgaacgtggccaaggactcctgtgatttaggtc

SEQ ID NO: 259578 - DNA, 122 bp, Homo sapiens
ctgcgttagcgttcgtgtctgggtttgaggatgtagtggtgactaagcgtcaccgacggccgaaggactgtgggaagcatggagtctgcgttaattcaaagtgttaggaatttcattaaaaa

SEQ ID NO: 259579 - DNA, 122 bp, Homo sapiens
accggtggcgcattctctttgccattctccttatcttgaagggaagcccagtgcatccctcgtttccccttctggtgcctccttcctcacatgactgcgtgtcatttcttagagtcctgcaa

SEQ ID NO: 259580 - DNA, 122 bp, Homo sapiens
ggggaggggagcggtccaccccgggacacatgcaccccctccagggtcccctctgcagatcggcccagctgtccgggcgcagagcccccagccccggcacccagcttctccgggccccggag

SEQ ID NO: 259581 - DNA, 122 bp, Homo sapiens
atggcgtcataaagtatttgtcctttcctgacgtgcttatttcacttagcataatgtcctcgagcttcaccttgtagtatgtgttaggatttatttcttctttttttttttttttttgagac

SEQ ID NO: 259582 - DNA, 122 bp, Homo sapiens
taacaagctccctccccggcaggcaaacagatagtcaagttgtcccagtgggggcctggccggagggccggcactccgtgggaaagctgctaatgctcccagccttctgcatccccctaccc

SEQ ID NO: 259583 - DNA, 122 bp, Homo sapiens
tagaattggcagaagatgaaacaaaactacgtgaaaccaatgtgtacacaagaggcacgacgatatgggccatgctctgatcatttttttttcacggcctttgtaacgttggctgatagcta

SEQ ID NO: 259584 - DNA, 122 bp, Homo sapiens
acctccctaaagagcctccaactccaaaagaacaaaaggactggttcatcgaaatgccaacggaagcaaaaaaggatgagtggggtttagttgcccccatatctcctggccctctgactccc

SEQ ID NO: 259585 - DNA, 122 bp, Homo sapiens
gggaaagagggatttcttagtgctgcccagaattaattcagcaaacactgaacattactacgtgccacatataggatcatactgcatttcaggtcaccatcaaaggtaaattacaaggctgg

SEQ ID NO: 259586 - DNA, 122 bp, Homo sapiens
cggggcgcggggcaggcagcggggtaggctgcgcccaggagagtggggcggggctccgggcgcgggcggggccgggggcggggcgaagagcggctttccagggtgacttcgtgacgtcagga

SEQ ID NO: 259587 - DNA, 122 bp, Homo sapiens
ccccgcccccacgaaaagtgaggaccagatggcgccccaccctctgaatacctctcagcacggagtgtgaatcgccaccgacctggcgtgtgtcagtagctgcctgggagcggccaggatgg

SEQ ID NO: 259588 - DNA, 122 bp, Homo sapiens
gaccggggagccaggaatgaggcggcagccgggccgtttgggctcaagacacacacacagcgcagtgagccgctgtcaacagacagtttattctatatacaaacacaattttgtacactgca

SEQ ID NO: 259589 - DNA, 122 bp, Homo sapiens
agaggacccaggtgtcctggcagtgggcgccgcggggcacacgctgggccaaggtgcaggcggccagggtgggagactgttcgccccgccctgagtactcctatcttgtttctccacctgtt

SEQ ID NO: 259590 - DNA, 122 bp, Homo sapiens
ctcgatctcttgaccttgtgatccgcccacctcggcctcccaaagtgctgggattacaggcgtgagccaccacgcctggcccccagtgctgacaaggattctttaaagggcgcattctctct

SEQ ID NO: 259591 - DNA, 122 bp, Homo sapiens
ctagaaaggaagaaagagcagaccaaaaggccggggctgtcgtaagtgtctttttcgttccgtttgtcgtctaggcattttccatgagctgctgtttccctcggagctcacactccctgtgt

SEQ ID NO: 259592 - DNA, 122 bp, Homo sapiens
ctgagggcccagccggccccacaagtcctcaggcccactggggcccatctgagcacttagcgcccgcactatgggaacccactgggcaagcaccgccagggccggcctgagcgcaggagagg

SEQ ID NO: 259593 - DNA, 122 bp, Homo sapiens
tcttggtctccttatagttgaaaaattattctctcctggcactgttttatttatggctggcgactgagctgtttaagctttgcagtttctgtctcgttggttgaattagacttacgaacaaa

SEQ ID NO: 259594 - DNA, 122 bp, Homo sapiens
tactttataatcttgggcaagtcattcatttctgtcagtctcagttttctcctttgtaaacggggaggccgactgatcctcactctaactcatccactggttattccgatcacataacatca

SEQ ID NO: 259595 - DNA, 122 bp, Homo sapiens
tgtggctggggccacagagaatgccatcccaatgaaagccaggtggctctggtaccttgacgcgaggccaccttccctcctcccaggtgtctcttccggggaaggagggctggagggcagtg

SEQ ID NO: 259596 - DNA, 122 bp, Homo sapiens
ctgcctgggaatcgtgagtctcagagctgcagggaaggggttctttaagtcatttcatctcgggtctggaatgcttctccacactactagtcctcacagtattgtctgatttgtgtcaaagc

SEQ ID NO: 259597 - DNA, 122 bp, Homo sapiens
ggcggcggagcctctaggcctcacggccggacccgaacctcagcgttccggtggcggcggcggcctcacgatcctcccccgcgggcccgtcccatcaaatcggcaccgaccccgttgcggct

SEQ ID NO: 259598 - DNA, 122 bp, Homo sapiens
cccccagtcgcctcttgcagggaacagggccagatcagatggcggctggttcccctcccccgcctcatacaaaaatcaggaaaaggagttgcgggaggaatcgagaagccggccgcagagcc

SEQ ID NO: 259599 - DNA, 122 bp, Homo sapiens
gttctcaaaccctctttggaaatcgtgcaggccgcaggtcctactgtgctccttcggacccgcctagcccgcggagcccatccttctcctgaagttgcggatctggtttgccgacactttcc

SEQ ID NO: 259600 - DNA, 122 bp, Homo sapiens
cttcgtcacaggagaccgcgccggtggccggagctggtgcctgcggcgggtggggatgagcgccgggtggctgctgctggaagatgggtgcgaggtacgggggaaggggtcctgtggagcgg

SEQ ID NO: 259601 - DNA, 122 bp, Homo sapiens
ggcttccagctccagtaagcctttaatcctgtctaattcaagcacatcaaccctgggtatcggggaggagtggccagggtggtttgacccagaaggtacattgcatcttatcttgctgtgtt

SEQ ID NO: 259602 - DNA, 122 bp, Homo sapiens
ccagacgtaggtcactcttgcccctagacatggaagggttaaatccatccacccaaaccacgaaaactgcaatgagaggtggtggtggttctccaggaaaatccacgggctgttaccagaaa

SEQ ID NO: 259603 - DNA, 122 bp, Homo sapiens
tcccggtagattcaggctgggccaacctgagagtctgtctcagtaacaaagggaaccctgcgcccagctgaagtgcaggcaatgtttacccgaaagctgggggtgggtccgcatttccagga

SEQ ID NO: 259604 - DNA, 122 bp, Homo sapiens
atcttctgagaagtaggggcagaaggttccttgcaccatccaactggggaaggggcacagcggtgggccctgggaacctgctaaccaggatgtctgggttcttcccccagctctgcttctga

SEQ ID NO: 259605 - DNA, 122 bp, Homo sapiens
ccattcctctgctgagggatgtttcaattgttcccaccttttggctgttgtgaataacctcgctatgaatgttggcgtacgagttcctgtttgagtccctgctttcaatcctgtgggcatag

SEQ ID NO: 259606 - DNA, 122 bp, Homo sapiens
gagggtgacatgtgagcggcgcgcgccggtggcaggtggaaaggcgagcggcatggagcgcgtaataagagagttggagtcggaaagagcagccccagtcgccggggaagcgggaggtcagt

SEQ ID NO: 259607 - DNA, 122 bp, Homo sapiens
acaaccagtccatctaccacaaatccagagagccaggttgtgaccaccagccccatgtaccgtctgggccccatcaggagtgggtagtggagtgggtagcaaattgccaggtagcggtcata

SEQ ID NO: 259608 - DNA, 122 bp, Homo sapiens
ggaatataaaatgtacaaccttccccaaaacacttttttgctgctgggcacagtggctcacgcctgtaatccctgcactttgggaggccgaggcgggcagatcacgagttcaggagttcaag

SEQ ID NO: 259609 - DNA, 122 bp, Homo sapiens
ctttgttccagccattgtctctttttagaacagcctgcttaactccctcctggtctccagcgggtttcttatcttttacttatcctaaaagcacctcctacagtctaacatcctttatgact

SEQ ID NO: 259610 - DNA, 122 bp, Homo sapiens
gggggctgcccgcggggggttgggtcattgtcttttagaatttgggagcctttgaaaagccgtgggccctcccaccgctattgtgcgggggaagatgtagcagcttcttctccgaaccaacc

SEQ ID NO: 259611 - DNA, 122 bp, Homo sapiens
ctaaatctaacgatagattgccaccagctgagagcgtttctcggcgaagagccggagcgacgcgctgtcctgggtgcagagcgcgtgctcaacaaatatgggtgatgaagggtcacgtagcc

SEQ ID NO: 259612 - DNA, 122 bp, Homo sapiens
acttgcattttctttcaccccttggaaattataggtactcagtacacctggagcttttagcgctacaacgaacttttggtttttatactagtttcctttttcatccactaaatctgtccagg

SEQ ID NO: 259613 - DNA, 122 bp, Homo sapiens
aatcagggacgcagaaaaattctcttcaacagatttcaaaagagggtccaattcctttgtcgtgaagaactttgctactcaaggggcgtgatcatgggccagcagcatccgcatcatttctt

SEQ ID NO: 259614 - DNA, 122 bp, Homo sapiens
gccagtgcagagcaagcgctgacgccggggatccctcagcctctagcctgggattccctgcgcagccaacaacagaaaagaaaaccagctcccacacagaggctcccggctgcgcagacctt

SEQ ID NO: 259615 - DNA, 122 bp, Homo sapiens
aggctgggtacccgtggcagcggcacatggcagcaggtgggggcgactcagagtggggggcgcccccagaacaggggcggcgcaggccggtcactcgccctctcctcctcgggagccccccg

SEQ ID NO: 259616 - DNA, 122 bp, Homo sapiens
tgatctcagaagcacgttgtgggcttggaaaccgacggcagcctttagtcaattttggatcgctttgacttctccaacacggtttggcatctctgaaaccttgagaactgtgatgggcagtg

SEQ ID NO: 259617 - DNA, 122 bp, Homo sapiens
tccttggggggtttttcagaaaaagggccaaagagcagcatttcctcggggatttgaacacgatctcccccggggcaggggactgccctggaagattcccggcaccgcttcccatgcgccac

SEQ ID NO: 259618 - DNA, 122 bp, Homo sapiens
tgccgatcggtggggcggaaccatgcaggaaggcggaagtggcttcgctagggagcctcccggcgtggagatggcgggagctggtcgcggagcagcggtgtccagggtgcaggcgggtcctg

SEQ ID NO: 259619 - DNA, 122 bp, Homo sapiens
caggacaggctgtgtttgctgcaatttggatttttctctcttcccctccagcacccagtgcggctttggtgggtttcccggcctgggggcagactcgctgatctcctagccctccaaggtgc

SEQ ID NO: 259620 - DNA, 122 bp, Homo sapiens
ctcccctagacctactcatcacagaaccccacacccaggggcaggcagacattgaactgccgcagaccctcccaggtccacagcctgaagggaggaggcgagggacctgccttccttgcggg

SEQ ID NO: 259621 - DNA, 122 bp, Homo sapiens
gtcacgtgaccacgcctactacaccagccacgtgagcttctgagccggcttccgcgcaggcgcagtggatctctcttgcgccattccaaacatggcggctccactagggggtatgttttctg

SEQ ID NO: 259622 - DNA, 122 bp, Homo sapiens
tactcatattttgattcctcagctaaccaataaaaatgtatcatgccctactatgagtaacgctgtgagctgcacttccactgtctaagcaagcaacagagttaagaaatcccaacatatca

SEQ ID NO: 259623 - DNA, 122 bp, Homo sapiens
tagctgggattacaggcatgccccaccatgcctggctaattttgtacttttagtagagaccgggtttctccatgtcggtcaggctggtctcagactcctaacctcaggtgatctgctcgcct

SEQ ID NO: 259624 - DNA, 122 bp, Homo sapiens
tggggtcggcggaggctccgcactaacaagacgggtccagggtccaaagctggggtcggccgaggctctacactaacaagacgggtcccgggttcaaagctggggtcggccgaggctctgca

SEQ ID NO: 259625 - DNA, 122 bp, Homo sapiens
tcccgccccgcgctcgggccgcccctcgcctcctctccctccggcctctgcgcccgctgccgccgcgctccagccgccgggggcctcccctggacaccaagtttctccttgtgttgtgcgtt

SEQ ID NO: 259626 - DNA, 122 bp, Homo sapiens
tgtgctctcctgagcacgtgactttgccaccctgagcttcagtttttttcctgtctccagcggaaacaagaatttctgtcttcctcaagggccggtagggggagataagagcttgtgtgtgt

SEQ ID NO: 259627 - DNA, 122 bp, Homo sapiens
tttcttccgctcggcaccctcatgcccccaaaacaagaacagagtccgcaaccagatcaacgcgctcacctcctttgtggacgccagcatggtgtatggcagtgaggtctccctctcgctgc

SEQ ID NO: 259628 - DNA, 122 bp, Homo sapiens
cggcgcgagggagggagcgcggaacaaggcgctgactgtctcccagcctcccctcctccgcgccccctcggcagcagcgaaaacccggaaatctgatcctggccccaggagagccgggttcc

SEQ ID NO: 259629 - DNA, 122 bp, Homo sapiens
gggctctaggctgcaccccgggaggttcgggaaaggagagcagctcagggatcaaacccacgataaagaggcgggaagccaaagcactgggagactcgatctcagtgaccaaaaaatgttcg

SEQ ID NO: 259630 - DNA, 122 bp, Homo sapiens
cgtttatcgggggtttccgcttttgcttcgtctctcattttctcttgctgccgcgatgtacgaagttccttttgcctgccgcgatgattttgaggcctccccagccatgtgaaactgtaagt

SEQ ID NO: 259631 - DNA, 122 bp, Homo sapiens
cattggtttaaaaataaagagatggcgtcacttgaaaccaatcccagtgaatgaactcagcggagccccggggaaaggaggagacaggcgagggcagggcggtgggcgccgggcggggccgc

SEQ ID NO: 259632 - DNA, 122 bp, Homo sapiens
ggcaagcggcactgggcccggagctcctccccttcctcccccgccactgccggctgtccccggccggctctgtcccggctccccagcgacttccaatcccatatggggttctcttcactcgt

SEQ ID NO: 259633 - DNA, 122 bp, Homo sapiens
atctcgccagcctattccagatgcgggcgccggtcgttgttaggtatcgtcccggagggccgggcgttggggaaagcttaaatgagctggtgtttcagtggagccggggagctcttgcttca

SEQ ID NO: 259634 - DNA, 122 bp, Homo sapiens
cagtgctccggaggcactttcagagcatcgtgactagataaaagtaggtgaaaagggaatcgcagcctgccgagagctttagagagactcccctaaccatgatttaatctggggaagggaga

SEQ ID NO: 259635 - DNA, 122 bp, Homo sapiens
aacttcaggatcagggcccaatggagactgagcggacttaaccctaactgtgcacaggaccgcgctctccgacccctttgtggcctctcccagaggtacgggctgcgccccaagccagcagt

SEQ ID NO: 259636 - DNA, 122 bp, Homo sapiens
cgcttcccctctgggccgccttcccagggtcatgcctgagctgctttgatcccagtgtcgcgcatcttggtccgctacctcccaggcgatagctactgggctcctcgctggcctcactgggg

SEQ ID NO: 259637 - DNA, 122 bp, Homo sapiens
gggagaacctgaagctggagatcctgaagaacatcatcaatagctccgagggctctagctcgggctcggggcacaagcacagctcccgcaactggccgccccaccggtcggaagccactgac

SEQ ID NO: 259638 - DNA, 122 bp, Homo sapiens
agtgaaggactaaaggcaatgtaagagacgaagggtccctctcccatcgcatggaccagccgaacagcctcctcactaacctgctcccgatccccattctaatacccgcctgagctcccgct

SEQ ID NO: 259639 - DNA, 122 bp, Homo sapiens
gagcagcgcgggaggcagtggagacgtggaagcaggctccggctgctgggcctgcatgaccggtttccctgcagaagattctgcgcccttcagcctcaccgtcctcacctggcctgggtgct

SEQ ID NO: 259640 - DNA, 122 bp, Homo sapiens
agggaaaagggagagttgccacggcagaaatccacgtgtccgagggcatcacttgggggccgccggtaaccattgcggggatcatgtcccggctgacttgggccttcatggtttccttctct

SEQ ID NO: 259641 - DNA, 122 bp, Homo sapiens
tcgacggagtcatggtcatcaaaagttacaaaggcaaagccccttttctagccactgactcggtcagtcatgatttcagtcaccattaaaagggattacccaagcaaaatcatggaattatt

SEQ ID NO: 259642 - DNA, 122 bp, Homo sapiens
agtgagctctcggccctcactgcgcctgacgtgccacaggggcggaaggcttggctggggcggaacggccatctgcccagtcctcgtggagaaacagcttggtaaggaaacttataaggcag

SEQ ID NO: 259643 - DNA, 122 bp, Homo sapiens
actctggccacccaggccagaaatggttggaggatcccctccgctgcactaagcacagcccggacgtagctcccagaaggttactgcgcgggccgccgaggagaatggtgggggtcagtgct

SEQ ID NO: 259644 - DNA, 122 bp, Homo sapiens
actgaaacaggacaggaaggctgttgtttcccagtcagccctcactcacagaggctcaggcggatagagagcaagtctgaccacagatagccattatgtgaacctgagcatggatatggtta

SEQ ID NO: 259645 - DNA, 122 bp, Homo sapiens
aactaatgggagtctgacccatcgggaggtctagaagtatgaggtttaactttaggcagacggctccttcacaaaggctctctatagccataacactgaagaaagacatggcacattccctg

SEQ ID NO: 259646 - DNA, 122 bp, Homo sapiens
tcatctggcatcttccccagcgtttcccacacttgacccactagatgagaagttgggggtcggggctgggaccccaccttcatacctccagcgcctgccaactcaaagacatcggtagatgc

SEQ ID NO: 259647 - DNA, 122 bp, Homo sapiens
gtcgggccggttcacattgcagcctgtgtgcttcctggggcagcgtccaccaggtgtgtgcgggcaggtacaggatgcgagctcagtcctgcttcccctgaaatcctgtgacctggcagagg

SEQ ID NO: 259648 - DNA, 122 bp, Homo sapiens
atgcatacatttttctattttctgctgttaatccttttgttacacacataaggggtcaaccgtttagtgtgtattaaaaacatgccaaggcctatatggacacagatgctattcctgaaggt

SEQ ID NO: 259649 - DNA, 122 bp, Homo sapiens
gtgcgaggagaggtgctctgaggcctctttgttcaggggctcacgtgggggcagttgctccgccgcccacacaagtatgcaaagcctccctgaccctggcggtggaaaaagcctgccggcca

SEQ ID NO: 259650 - DNA, 122 bp, Homo sapiens
gttctgattattgtggtagccccagtgctcaacacatagccaggcttcataagcatgtttcgaaagcatgcatctcatgcttttctgaaattccgtttttctttgtacttattcttcagagg

SEQ ID NO: 259651 - DNA, 122 bp, Homo sapiens
cccggagacttggaggtgggatcaatcctgccagtcctggatcaggaggcctctgtcgggcgccgccccccttcctcctccatcagcaacaggcggcgccggccagcctcatagtcagcctc

SEQ ID NO: 259652 - DNA, 122 bp, Homo sapiens
catgcccagtttgctgcctactggaagccagtgctgtccatggatgcaaattcctggcagcgatggctgcacatgcatcgcctggtgctaatcctggagcatgacacgtgggtgcccttagg

SEQ ID NO: 259653 - DNA, 122 bp, Homo sapiens
actgcaacctccgcctcccgggttcaagagattcccctgcctcagctgggattacaggcgcgcgccacgacgcccggctgattttttgtattttagtagagacagggtttcaccgtgttggc

SEQ ID NO: 259654 - DNA, 122 bp, Homo sapiens
ggcggcaggctgggcccagggagctgcgcgcgcaaccactcgggctgtggctccggtgaccgctctccctggcaacggtttgttcctagcaaccagcctgaggtctggaggtggtgcggagg

SEQ ID NO: 259655 - DNA, 122 bp, Homo sapiens
cggccactgcggagcgttaggaacattccctaaaatggcggccggcgcgtcggaacagggcgggaggcggcggcgcgtgggggcgggacggggaggggcgcggccagccgggcttctgcttc

SEQ ID NO: 259656 - DNA, 122 bp, Homo sapiens
ccacacagcaagagggcctggaagacaggtgcccgcatccccagctctggtcatctctaacgagagagttaaaaagtacagaaaagagccctgggccgccctaggttcccagcgtggcggat

SEQ ID NO: 259657 - DNA, 122 bp, Homo sapiens
atcggtataacgctctcacaagccctcagctttccatacggaaaagtggtggcggaattccgcgagtatctcagctcccaatgcaggtgcttccaatcgagggccccacggagggagctgta

SEQ ID NO: 259658 - DNA, 122 bp, Homo sapiens
atcatgcgttcagtgggcgagggtgcccgagaatggatccgagagtgtcagcaccaattccgccaccaccgctggaactgtaccaccctggaccgggaccacaccgtctttggccgtgtcat

SEQ ID NO: 259659 - DNA, 122 bp, Homo sapiens
gattgccatggcctgcaggtgccggccctcagcagcctgtcccccacaggtgctgaaggtcgccatcctggctgagaagtacgcggtggactacacctggtatgtggataccatcttgaact

SEQ ID NO: 259660 - DNA, 122 bp, Homo sapiens
gcaatgaaccgcggggcggtgaaagccggcctggtgactgcccgggagaacttgctctaccgtcagctcaatgacatccgcatcagtgaccaggatgaccggcgcatgaagaaagagccgcc

SEQ ID NO: 259661 - DNA, 122 bp, Homo sapiens
agaaattaggatatatagagaaaacatccctcctccaaaagaggtttctgcaactaactacgaagtgagaacttctaaaatcacttacatcttttgcaatatcatctcagatattgtaagaa

SEQ ID NO: 259662 - DNA, 122 bp, Homo sapiens
gttttataaaccgaaatcgctgcagcccttgtcttggcatgagggtttcatggtagagcacgatgcctgctggagggccagcgggggtgggccatcccatccccaagggtcactggggttaa

SEQ ID NO: 259663 - DNA, 122 bp, Homo sapiens
cctcggccaagctcccgggaaagtacttaaaaaggccactagcaagcgcgcgatgaacggcgcaaacacctacgggacggctcgagatcgcaggctggcgagggccatcgcagctgccaccc

SEQ ID NO: 259664 - DNA, 122 bp, Homo sapiens
ggtccgtgggtagcgcggggttactggaatgggactccctgaggaagtcccctgagaagtcgccggcacgctccgccttccttcttgcttcccatttctcgttttcttctcagccttcatag

SEQ ID NO: 259665 - DNA, 122 bp, Homo sapiens
gccttaaggtgaaattttagaaactcatcctctttttcccaatgatttatatgacgggctcgtgtaacttatgttatggaaaaattccttgggtttcattttctctctttttttttttgaga

SEQ ID NO: 259666 - DNA, 122 bp, Homo sapiens
atttgcttacgtatccagcctggaaaatcttcatcacagggtccggttcctcgagccagccgggccccaagtcggagggttctccttgaacccagcgagtgggcccaggctccctgcagcca

SEQ ID NO: 259667 - DNA, 122 bp, Homo sapiens
aaggccgggggctgcgggctctgcagcccttccaggtgggggacttgctgttctcctgcccggcctatgcctacgtgctcacggtcaacgagcggggcaaccactgcgagtactgcttcacc

SEQ ID NO: 259668 - DNA, 122 bp, Homo sapiens
gaggccagagtgaccccgttaaaacgtgagacctttcatgtcgagcctcagctcaggactcgccgtggcccccctcacattttgtctttgcaagcacaagtaactaagacaaaacaaaaagg

SEQ ID NO: 259669 - DNA, 122 bp, Homo sapiens
taacaacactgtgggaacagggtttccagaaagctccgtggccagaatgtgccccagaatcgaggaacccggccctggggattgtcctgctcctatcccgtcccacagagggggatgaagtg

SEQ ID NO: 259670 - DNA, 122 bp, Homo sapiens
catggcttcggggctccagggggtgctgcagtgatccaatagcctgacacagggggaagacgaagaggggcattggagggactgagtcaccagcagcaaaggacagctctgcctctcctgtg

SEQ ID NO: 259671 - DNA, 122 bp, Homo sapiens
agattctggaaccaggacgaccttgcccctcgccttcatcaaaagctgccggaaacgccccggccccgacacagacctgaaccgcctgggggcccaagggaaactgaaaggccggtgggctc

SEQ ID NO: 259672 - DNA, 122 bp, Homo sapiens
ggcgtcgggaagtggagcaggtatgtgcctggaggtgggcgtccagcaccaaagtcgccccgtacgcgtgagggtctcgggacaacagaacaaacagcagaggggcagatgccggctgcaaa

SEQ ID NO: 259673 - DNA, 122 bp, Homo sapiens
gatgggatttctccacgttgctcaggttggtctcgaacgtccaatctcaggtgatctgcccgcctcagcctcccaaagtgctgggattataggcgtgagccaccatgcctggcctaattttg

SEQ ID NO: 259674 - DNA, 122 bp, Homo sapiens
agcggcggcggcggcggcggctgctgcgggcgctgaatgagagacggtgactgttcgggtcgacgagtgctactctaggcggcggcggccgtggcggtgaagcgtgaggccggcatcgtctt

SEQ ID NO: 259675 - DNA, 122 bp, Homo sapiens
cactggcacagacgggtgcacagttaatattcagttaacaccggctggctgaatgaagggcgagctatcttgagcctgacttttctgatccttcaatgagcatgctaacatcatccaacccc

SEQ ID NO: 259676 - DNA, 122 bp, Homo sapiens
cttgtctcgcccaggtgcctcctagccaatttatacccacctgagcaccacctggatgggcgtttccggcccctctggcccttgctccaggctccgcgcgagatccctgtgggcagcaatgc

SEQ ID NO: 259677 - DNA, 122 bp, Homo sapiens
acccggaaccgcactggtgccgccgctagccggctgcccacgtgcctgcaacagtggccacgtggggccctgaggaaacgcctttacaaaggtttgtcccctgcgctgcccagtagggagga

SEQ ID NO: 259678 - DNA, 122 bp, Homo sapiens
cccacccgctaaccctccccagcgtggagatacagcacaggggccaacatggcgtcagcacgctgggtctcgcctgcgacccccgtgactccgcactgctgcagcccgggcgaggctgcgcc

SEQ ID NO: 259679 - DNA, 122 bp, Homo sapiens
cccagactcggggggtctgtctccacaaggagaaggggatgtggaaaacatacatgaggccgcagagatgactgaagtatgaaagggaggaactaccccaaaatgccagagctactaggatt

SEQ ID NO: 259680 - DNA, 122 bp, Homo sapiens
ctgcaggaccaggccggtaagaaggaggtaggaaggtgagggagcgtactttgccgagggcgggtgaatggctgatgtggcactgaaattccccagcaggctgcctgtagctggctatggga

SEQ ID NO: 259681 - DNA, 122 bp, Homo sapiens
atctcacacgttccacaggcaggcgctgcggggcagagacagcaggtccagacaacgggccgcggggccagggcgcagagggtcggcggctgcccacgtgcccaggcctgaggggcagaggc

SEQ ID NO: 259682 - DNA, 122 bp, Homo sapiens
ccctctgtacaagtaaggaattttgcgctccttaggccacactacacttgtttactctgtcgctacatttacctgaataactttatttgcaggcgtaagcacaggtaacattaccactctgg

SEQ ID NO: 259683 - DNA, 122 bp, Homo sapiens
ggaatggcagtgccgagggtccaggcaaggtggagcgtgaggacaggggccctgggacatcggggatcccagtgagaagccagggggcagagggactgctggccaggatccaccatggagac

SEQ ID NO: 259684 - DNA, 122 bp, Homo sapiens
caatttccttcaggttaaaatactcagtagatagtgaactcgagtcggaagaggtgagtccggtctcaaaatggaggtaaaactgatgcccagtggccccaagcccaattccagctgtgacc

SEQ ID NO: 259685 - DNA, 122 bp, Homo sapiens
ctccgcctgcacccggcaggacccgcctcttagaacccgacacctccgcctgcgcaggcccgctccccggtcctgtctctcaggccccgcccccaggtcgcgtctccaaagtcccgtctctc

SEQ ID NO: 259686 - DNA, 122 bp, Homo sapiens
gtctgggaagcggagctgaagtgccctgggctttggtgaggcgtgacagtttatcatgaccgtgttcaggcaggaaaacgtggatgattactacgacaccggcgaggaacttggcaggtaaa

SEQ ID NO: 259687 - DNA, 122 bp, Homo sapiens
gtaagtctggatactgcaaatgaataagcatttggacaactggctttaaatcaatttcaacgaaaattgaacacaagtaaccctcacctttttttacaataaccaagttgagaacgctcaga

SEQ ID NO: 259688 - DNA, 122 bp, Homo sapiens
tgcagcgtctcaggggctgagctccttagaaagcttcgggggcccccgagggccgccttgcggggagggggcggctgccccgtccgggacccgctaattacagggattcggtttccccgctc

SEQ ID NO: 259689 - DNA, 122 bp, Homo sapiens
agcatgtttacacaggttctacgcctagaaccttaaactatgatgcacaatactttgttccgccccagttaccaggatgcgagtgtcttttaagcgatccggtcagtgactgcggaggtgca

SEQ ID NO: 259690 - DNA, 122 bp, Homo sapiens
cggagggaatgaagcattttgcatgatgggtgtgggggaggtcatgacacccaggggcggcgggcggcacttacgtcactcataagccccttaaacaccaccagctcggccttgagccgctc

SEQ ID NO: 259691 - DNA, 122 bp, Homo sapiens
tatgagaaacagcccagaacagaaggcccagcattcccgcactgcagctaagcatggctgcgcgccaaccagctgcaataacagccgcgtcccagcggggccccttccctggccccggagca

SEQ ID NO: 259692 - DNA, 122 bp, Homo sapiens
cgcggggcctcagccttccgagtttacttctggagctggcagggtaaggcccggggcggccggggctgcctcctgccccctcgcagctgctgccggctgggagcccaggagagcctcggctc

SEQ ID NO: 259693 - DNA, 122 bp, Homo sapiens
gggtcatgggcgcctaggcctgggagcccgcagctgaccctggggggaggcgtcggcctgcggggagagccgcaaaacccacgtcagtatgaggacaccatgcggatccctccccaggcaat

SEQ ID NO: 259694 - DNA, 122 bp, Homo sapiens
aaatgcaaattggatcatgtcacctccctcactgcagggcctgacattttaagggttttccgttgcccttattagaaaggcctacaccattaatatagccctaaatggctctgcaccatctg

SEQ ID NO: 259695 - DNA, 122 bp, Homo sapiens
ctcgcagttccattaggatgtaccaattgttaggccgtcagctgccgatcgcgcgcccggcgaggatgcagaggattggggggaggtggtgacttgcattttatttacaacaactttatttc

SEQ ID NO: 259696 - DNA, 122 bp, Homo sapiens
acgcaggggatctctgctctcttcgctcctttagtgcccgaggtggagatgggctagcctcggactctggcgggagcagcctcacgccattccctttctttagaatagttttattccagttc

SEQ ID NO: 259697 - DNA, 122 bp, Homo sapiens
gcaggtctctgtgggccgaccagaggggggcttcgaggtggtccctggtactggggtgaccgagtggacagcccagggtgcagctctgcccgggctcgtgaagcctcagatgtccccaatcc

SEQ ID NO: 259698 - DNA, 122 bp, Homo sapiens
ttggggcctcctgcagagtctcattccaggtcagtggacagaggaggccctgagaatagtcgtgcatactggctccctggatctgctccaagacagtgagcagcccctagaaccacaagaga

SEQ ID NO: 259699 - DNA, 122 bp, Homo sapiens
ggacagagcgccccggccgcctgatggccgaggcagggtgcgacccaggacccaggacggcgtcgggaaccataccatggcccggatccccaagaccctaaagttcgtcgtcgtcatcgtcg

SEQ ID NO: 259700 - DNA, 122 bp, Homo sapiens
tcttcattaataatggcaaaacgttggagacaacctagaggcccggagatccgggacaagcgaagggagttacagccctgtctctacgccggtgcgccctgtgtgttatagcggttatgtag

SEQ ID NO: 259701 - DNA, 122 bp, Homo sapiens
gttcacggtgctggacggatgtgttcccaacactaggtaacaacaccgctctccctcctccgggagaaagccgcagccgtcgattcccacccaacagggcctcagcgccttcccagggcagc

SEQ ID NO: 259702 - DNA, 122 bp, Homo sapiens
aagttctccaagtccccacccgacccagaagtccagccggcttcacctctcaatggcactcgctggggtactttgtggcacctagctcgggcactcctgcagcccagagggagctcgtcccc

SEQ ID NO: 259703 - DNA, 122 bp, Homo sapiens
ccaggcagcgggaaggccttgatctcttggttccttcttggagctgctaatgggctgcagcgggcgggtcggtctcggctgcttcaccgggttattttataaaagaggaagaaaaaaaaaaa

SEQ ID NO: 259704 - DNA, 122 bp, Homo sapiens
gaaattgcggcgatgtgtgcggtgggagagactgacagcggcctctgcggggtgggggtgcggggtgagcctgatgcattggagaactgagcaggctgctacgcctggctgtgggtgcgggt

SEQ ID NO: 259705 - DNA, 122 bp, Homo sapiens
acgcagtggcgctcgcggcagccacggctccttgaccgttcatctccttcacccgggtcccgtggaactttcagaggcaactgttcttggtggctcttgcgggtcagcacgagccgtgctgc

SEQ ID NO: 259706 - DNA, 122 bp, Homo sapiens
agtaactggtggggagtgaactggaaggatgagaccagttccttttcccagcctggaacccgccccgccctccaggagtgcttggaatgtgctctttgaagggcccgagtcttccaccaaat

SEQ ID NO: 259707 - DNA, 122 bp, Homo sapiens
cgagctctgcctcaggctgcaaatccggagcccggcggcctgacgggtttatgacctggccgcatatgcggctcctccccccgggaaggctgggctggagcccaaaggccgggattgaacag

SEQ ID NO: 259708 - DNA, 122 bp, Homo sapiens
tcagcttctagacaccatcacagccctgcttgctacgcacaggaggccaggagtggtgggcgagcgccacctcgtggacatgagggaaattgcttccctctgcgaattagactgtgtttcgg

SEQ ID NO: 259709 - DNA, 122 bp, Homo sapiens
cgaacccaaacatggaccttttgtgctgtgcaagtgttgtctttggtagaggattcaggccgagggagagctgctgtgacctcctgtttcagggagggtagccagaagggatttggcttaca

SEQ ID NO: 259710 - DNA, 122 bp, Homo sapiens
ttggatgcagggtacaaactacgttacccagaaatctgtgcccagctcattgttagccggcgtgcagccaatgacagcccagaaactgggcgtttcctgctgctctgggctgcaggggcgag

SEQ ID NO: 259711 - DNA, 122 bp, Homo sapiens
ggcaaaggtgccggagcagggttgcagggggacagcgaggcacagttaccgagcaattggcgggttcggaaacaggtccctttgctctggcgcctgcttggaaaaaataagccgcatgatga

SEQ ID NO: 259712 - DNA, 122 bp, Homo sapiens
atctgaggttagtttcatcgtttcgttgaaagttaaaaccctaagtcgacgttccccagccgcctaccccccagcagagagtccttccccggggagtcctgccctggggtgccgcctcgagg

SEQ ID NO: 259713 - DNA, 122 bp, Homo sapiens
tctcctggagctggtgcaggaactcacggaacctgctggggaggagctctcctaggaaggcgcccaagaagtcggggtcctccctggccacgcgcctccgggggcgctcgcgctctccaggc

SEQ ID NO: 259714 - DNA, 122 bp, Homo sapiens
agaaaggaaggagattcaccccttaacctgtctcagccctgggtcagaagagaagcctcccgcctggccaggcttcacctaccttagccaaattgtagccagacagacagtgccccctgacc

SEQ ID NO: 259715 - DNA, 122 bp, Homo sapiens
ctcgtccaatggggcacggatcaggagggctcctcctgggggcctgaggatggagggccacgacttctgtgtgctcaagagcagggtcttgcatggcagagcccaggcaagcactggtgacc

SEQ ID NO: 259716 - DNA, 122 bp, Homo sapiens
ggagaagtctccacatgattggtgtaagaagtggtgttcttggccaggcgcagtggctcacgcctgtaatcccagcactttgggaggccgaggcgggccgatcatgaggtcaggagattgag

SEQ ID NO: 259717 - DNA, 122 bp, Homo sapiens
gtctttcttgcacaccttttcattttcttgactggaaaatggctccctgacgtggggttacggttggcgttcttggagacctcacttgtttgttcacagataggtctggaagctgttgggcg

SEQ ID NO: 259718 - DNA, 122 bp, Homo sapiens
cagtacagagcaaaagaaagccagcaagtgactaggggaaggcacacaccctggcgagtacgaagaagggtgtgcagtgtgcaaatactgaacaggtctatgaaatggtgtgggtaagagat

SEQ ID NO: 259719 - DNA, 122 bp, Homo sapiens
aagccatgcgattcacccacttaaagtgtgcagcttgggggctttcggctcagaactgtgcgttcatcaccgcagttgattttagcccgttttccgtgactccacagagaaatccttcgcca

SEQ ID NO: 259720 - DNA, 122 bp, Homo sapiens
gcatgccaggagggttttgtcacatttgttactgggacccgttgcccttgtacatattgtcgtttaagatttcttcccactcgttcccagagctctaggtctagtgtgccttcttctgggaa

SEQ ID NO: 259721 - DNA, 122 bp, Homo sapiens
cttccagttcttcagcgcctcacttgggccttacgtgagaagcaagtgggtggaggaccccgcgtgggcaaaggcctggtctctggacctgcagatagtagatgaaaaacaccacctgggtt

SEQ ID NO: 259722 - DNA, 122 bp, Homo sapiens
taagtccgaggcggctggctcacctcactgagcccggctggacgtgggaccaccggtcgccgcggccagggaaccaccaaggagtcaaggcgagcctaccgccagcagcttctgcccgggcc

SEQ ID NO: 259723 - DNA, 122 bp, Homo sapiens
ctctgaccgccaaaacaccctgtctcatcacagctctcaccgcggcgctggcctcgggctcggacacagccatctccagtggtcgcccggcctctttggtcgtttccgcacttctcctccgg

SEQ ID NO: 259724 - DNA, 122 bp, Homo sapiens
tgcaaaaggaattcacagcacagctagtaataatagtagtagtagtaataataacaatggcgatgagaacacttagtaatgccgtgctctaaatcctttaggaacaaaggttataccactta

SEQ ID NO: 259725 - DNA, 122 bp, Homo sapiens
cgttagccacaccttgattgtcgagtgtgtgtctggccctttggggacagcgcttaaagtcggggtgggcgggggaggggatcaccgacattcagtcttgagtgacacaccagatgacccca

SEQ ID NO: 259726 - DNA, 122 bp, Homo sapiens
gtgtgagtgtttaatgagtgctgagcttttgtttgggatgataaaaaaaagttctggaaacggttaacgatgttggttgtacaaatgtgaatgtacctaatgctgctaaactgtacacttga

SEQ ID NO: 259727 - DNA, 122 bp, Homo sapiens
ctgggggacagagcacgaccctgtctccaaaaataaaataaaaataaaaataaatattggcgggggaaccctctggaatcaataaaggcttccttaaccagcctctgtcctgtgacctaagg

SEQ ID NO: 259728 - DNA, 122 bp, Homo sapiens
acacggaaaggaagctatttcataactatcagtcatgtgaaatttggcaggcccctagcccgttagtggccacagtcacatgattgattaccggttggggacccacagttagcttattgcag

SEQ ID NO: 259729 - DNA, 122 bp, Homo sapiens
gcgacaccaagcgtcaggtcaggcgtcagaatccagcgcgtttgctcctcgagaacagcgcgccacctgctcccaagtgtgtgaggggctgcagtgccgagctccacttcacaagactcact

SEQ ID NO: 259730 - DNA, 122 bp, Homo sapiens
gttctacaatatggaagaaacgtgattttggtggtagaagatgacagcctgggggatatgcggtgggactagttggaggcaaagctgcacatttggcaaaacttgtcttagaatcaccttgc

SEQ ID NO: 259731 - DNA, 122 bp, Homo sapiens
atcgcaggcaggttgtgcggccttagggggacagtgggatggatgagggcagtcagcccccgtaaagaatgtagagaggaagggacaggtccgtgggggagacccctggggaaggcatccct

SEQ ID NO: 259732 - DNA, 122 bp, Homo sapiens
aattttttgtacgatcagccttactgctaataaaagcacttccacagggctcctgactctcgtgtgttacataactcctccatccttccagagtaactcctgaggtgttgctcagccctgcc

SEQ ID NO: 259733 - DNA, 122 bp, Homo sapiens
gctctggcgtcggggtcgttgtgacaaccgctccagtagccgtttccgaggcagcaggtgcggccgctttagccctgagcgggctctgcggctgcctgcgagtctctgctgtgccgaccctt

SEQ ID NO: 259734 - DNA, 122 bp, Homo sapiens
gcctgggcgcccgtggcttcctctgggctgtccaagagcaacaggccgagaggccagctccgccgagccctggacaggatcctggcagggcccctgtgtccactgcgaagcctgcctcgcgg

SEQ ID NO: 259735 - DNA, 122 bp, Homo sapiens
ccctgggcagtgtttatgccaaaggcctgcttgcagcctggatctgctgtgccctgagcccgccctcctcccctccgcgccccaccccaccccagaagagcctctgctcttcctgcccttct

SEQ ID NO: 259736 - DNA, 122 bp, Homo sapiens
agcgagaaactcaggatacagatttaaaataaataaataaataactagccaacatcgtctcgactagagcaggaaccccccacccccagttgagggaggagcacttagcaaggggctgtagc

SEQ ID NO: 259737 - DNA, 122 bp, Homo sapiens
agcgtcgcgttctcgtctcctatttccacaattcggagccccaggtcttgcagggctttgcggactccatcgaccttaggataggagaagagggcacggagctgtgacacccccatcctcaa

SEQ ID NO: 259738 - DNA, 122 bp, Homo sapiens
acttgccattgaatgtcactgaccccttcagcgtgacactgaccgaggcacctgcggcaccggccaccacggcaaactccttgacattcctggctgaggtgccggggggtgtgagcacaaaa

SEQ ID NO: 259739 - DNA, 122 bp, Homo sapiens
tctaagttttattcttgtttcaaactgtgtatttagaccacacggtataagcctatcacacgcttttatgttatggcactgtcactgagggaagctaaagaaacagcccttatgaattctaa

SEQ ID NO: 259740 - DNA, 122 bp, Homo sapiens
cttccttggtccatgcctccagaggacaaagagccctctgacggggagggcatgggctgccgcttggcactgtagcttcctccagagaattccctctttaatgcgctgccattctgtgcgga

SEQ ID NO: 259741 - DNA, 122 bp, Homo sapiens
ctggagcgggtctgtgtgggtccgaagcgttttactcctgttgggcgggctccgggccagcgccacatctactcccgtctccttgggcagttcccctccctgccggcaccacgtcccctctg

SEQ ID NO: 259742 - DNA, 122 bp, Homo sapiens
cctccctcttccacttgtaacgacccctgtggttatgttgagcctgcctcgatagtctaccgtaatacccctcccctgtcccagcctcatgggtcctgggaattaggatgtggacatctctg

SEQ ID NO: 259743 - DNA, 122 bp, Homo sapiens
tctgtgcagtgggaataatgcaggttctgggcagggatgggaagagtgaatgcgctggtacggtaaggtgcctcgcaggcacgtgagggcctctctaatcgttagctattgtcaccgattgt

SEQ ID NO: 259744 - DNA, 122 bp, Homo sapiens
ctgacagcgccttgagtgaagcccctccaagcggcgcctggctaataaagcctcgaaagccgctattgaggcctgattggcacccgatggctcgctccatggtaatgagccgggcagatggg

SEQ ID NO: 259745 - DNA, 122 bp, Homo sapiens
acatatccaagcttggtcagaattagggtgtacctacacctacctgcactattaatactccgcacagcagggagaaaggaactacctaccaggtgtcatgggcatggaaggatgtgaggaac

SEQ ID NO: 259746 - DNA, 122 bp, Homo sapiens
gcccctctgcccggccgccccgtctgggaggtgaggagcgcctctgcccggccgccatcccgtctaggaattgaggagcatctctacctggccacccatcatctgggatgtgaggagcgcct

SEQ ID NO: 259747 - DNA, 122 bp, Homo sapiens
ggtttctgttttctctttttggtttttaggcgagtccggctgtgaagttaccgtcggtggcggccccggggccacctccgctgtcacctcctccaccggcgcccgctacattcaaccggccc

SEQ ID NO: 259748 - DNA, 122 bp, Homo sapiens
ggcccggtcctttctatgagtgctctgaaccgatctatttccatattgttatttaagaaccggggtctccctctgtcacccaggctggagtgcagtggcttgatcgtagctcactgtagtct

SEQ ID NO: 259749 - DNA, 122 bp, Homo sapiens
ctgggcggcggtgagaggcagggccgggagccgggccgctgggtttgggcctggcccgctcgccgcaatattgatggcccgtcagtgcagccctgattcctgtgctttcagttaaaaggttt

SEQ ID NO: 259750 - DNA, 122 bp, Homo sapiens
tgtctgcgcctgcgcgcgtcggggcgaccccccgcccctccgtccccatcggcagctcggcgctcagccctcacgcctgcgcccgcgcccgcccggacttcgggacattccctccagccgcg

SEQ ID NO: 259751 - DNA, 122 bp, Homo sapiens
aaagctaggacaaactcccgccaacacgcaggcgccgtaggttcactgcctactcctgcccgccatttcacgtgttctcagaggcaggtggaacttcttaatgcgcctgcgcaaaactcgcc

SEQ ID NO: 259752 - DNA, 122 bp, Homo sapiens
ttctttctacttttggaaagctttcctggtgcttattagatgttgaagaattttgtggcgcgaactggtgcagcctgaaaaatgtgcggtccctttgcaccatctagtggtaggatcttaaa

SEQ ID NO: 259753 - DNA, 122 bp, Homo sapiens
cattgagggtgagtgcctgcccgtgtgtccgtgtatacgacgtgttcccactccaccagccgtatttaaggcccatctgcataggaggtttcttgttgttggaacatcccgtgtcaaacatt

SEQ ID NO: 259754 - DNA, 122 bp, Homo sapiens
atgtgaattggtcattggtgtttgctcttgcctctcctccatcccctagaagtacacccccgtcttattaaggagcttttaaagtttttctgaatgtatagacatttctcgggttcctacct

SEQ ID NO: 259755 - DNA, 122 bp, Homo sapiens
tgccactgcgggttagcggagacattacctcacctcaccttccactctgaggtgggaggccgacagggtgtgggcctgggggtggggacgagagagggaggccggagagcccaccaaggggg

SEQ ID NO: 259756 - DNA, 122 bp, Homo sapiens
tcgtgcggacccggcagggcccgggcgccgccgccgcggcagggagcacacacgcgctcgcgcaagcagctaaatccatcaaagccccgcgcccggctccgcgccggggctccgcgcccctc

SEQ ID NO: 259757 - DNA, 122 bp, Homo sapiens
atcattcctagtgattttcattctgcaatttgaatcagtagtttaaatattagcacttaacgggtttttttgttaatcacaatatagagtcaatacagagttctattttattcttcaaagta

SEQ ID NO: 259758 - DNA, 122 bp, Homo sapiens
ggactgtgagccgctcctgggcgatcttcttgcacacaaggggctccagcaggggcacctcgtggatgcgcgggcacagcgcagtgcccagcaccttggcggggtccaggcggctgcgggga

SEQ ID NO: 259759 - DNA, 122 bp, Homo sapiens
tgtggcccccgctccatgtctcgcccctcttcccttaaggtgacctttaaaaagaccaagcggagggtgaagaaaatccgcaagaaggagaaggaggtagtagtgcgggcagatgacttgct

SEQ ID NO: 259760 - DNA, 122 bp, Homo sapiens
ctcccctcagcctggaggctgcagccgctcgagtcggcccgggtgggggcggggtgggggcggcgcggagggcacggagattacggcggcgccacccgggacatccagggccccgaggccct

SEQ ID NO: 259761 - DNA, 122 bp, Homo sapiens
ctgcacgaagggaacaggacgcctgttggttactggtgcggcccagggagcctggcaggccgtgcggattagaagtaattggcgtgtcggcgagggcttcacactgggcccacgcctcagag

SEQ ID NO: 259762 - DNA, 122 bp, Homo sapiens
accagcctcctcctgaatgtgcttcccaccgggggcaggaggcgcgtggacacaggaaggcggctcccatcacgaagtacaagacttaaaaaggatattttattgtcatcacaaaagaaaca

SEQ ID NO: 259763 - DNA, 122 bp, Homo sapiens
gcctgattccgttataaatgcttaattaaactgtctgttaatgcatgcagcttgaagcatcgggaggatgctcacaactaaatcccgtttacacaaagttccaaacacttaccactgcattt

SEQ ID NO: 259764 - DNA, 122 bp, Homo sapiens
gggaaccaccgctcaccgcagacgtggtggctgcagtcagtcttcccgagtgagggatttcgccgcccgctttcaggcccgtgtaagttttcctccttcgggagcctcagtcctagtggccg

SEQ ID NO: 259765 - DNA, 122 bp, Homo sapiens
aggctggggttgaggactaggggacggccaacgtggctgggtggagggcaggcgggtgggcgtggagaggttggcagagtgtcagggcctgggcgggtttagcctcacccagaagtcaagag

SEQ ID NO: 259766 - DNA, 122 bp, Homo sapiens
ggagccgccgcctggcagcgccgagcctggcctgggccgcttcacgccaagattcatgcccggctaacaagccccactttgttcctgtgggaaagtccagcctctcaggaaagagccctctc

SEQ ID NO: 259767 - DNA, 122 bp, Homo sapiens
ccccgagctccgcctacttcgtcccgggcttcccgcgccgggaactcgtgctgctagtcccgccctggccccgcccaccgcgctactggccccaccacccggaaactgccccggccctctcc

SEQ ID NO: 259768 - DNA, 122 bp, Homo sapiens
gccacacactgtccatttaaaactactcaatgaagccataaaagcaaaggggctacgaaacgcacgctcccaaacccaatatgctcctaggcccaaatcccacatctgtcctgagatgcaca

SEQ ID NO: 259769 - DNA, 122 bp, Homo sapiens
agatgtggctcacgtaggtggcacctgccaatagctttgtcaatcacagccccataggaacgtctggaattgcttgggagttggggagaactgtcaagaagagtgaagagagtgccaaagcg

SEQ ID NO: 259770 - DNA, 122 bp, Homo sapiens
gctgaaatctgcccatccctgacacagagccgctcggcgctcgggctgcggggaaggggtcgtcgtgttggtaatccccctctgagggcactgctcgtgtggccctggcaggtggacggtgg

SEQ ID NO: 259771 - DNA, 122 bp, Homo sapiens
aactccaataccaccctgaacactctggggtcagtgggaccctgtttgtacagacgtctgcgtcttccggctctttaggacataagcagtactgctatggaagaaaggaaacctaatttccc

SEQ ID NO: 259772 - DNA, 122 bp, Homo sapiens
gggggcccgacgtcgggaccggggcgcccaggccgggctgcagcccccgggcaccgcgcgcggacctggaccagccaaagttcttcaccttcgacagccccgcggagctaccctccaggacg

SEQ ID NO: 259773 - DNA, 122 bp, Homo sapiens
ggaactggatcacttcagcattaaggaggacttttccccaaaatgagtgttgccccagggcgtgggcaggcggggagctgaactaatctttcggtgactccaaggataccaagcaagccagt

SEQ ID NO: 259774 - DNA, 122 bp, Homo sapiens
tggggactgtgactgcgcccaggatccgcatttgggccccatcacgccggaaacctggcccgggatcctcaaccgcacccagatcagcctgagagatagagaggggctgagcatgcgtggga

SEQ ID NO: 259775 - DNA, 122 bp, Homo sapiens
aaaggaggaactggctttggagaaaaagcgggaattagaaaagcggttacaagatgtcagcggacagctcaattctactaaaaagccccccaagaaaggtgagtatatactttcatgccact

SEQ ID NO: 259776 - DNA, 122 bp, Homo sapiens
tttcgatgtgtccgaagaacttctggacacggtgcccatgacgggtacaaaatctggcaacgagatctttttgcgtgttgagaagagcctgaaaaagttctgtatcaactggtcgagattag

SEQ ID NO: 259777 - DNA, 122 bp, Homo sapiens
gcgcaagtgggaggcggcccatgaggcggagcagttgagagcctacctggatggcacgtgcgtggagtggctccgcagatacctggagaacgggaaggagacgctgcagcgcacgggtacca

SEQ ID NO: 259778 - DNA, 122 bp, Homo sapiens
tggtctaaactgccagtccaagaatttcacctctagcggtgcaatatgaatgcccccggccgtccctcttaatcatggcctcagttccgaaaaccaacaaaatagaactgtggtcctattcc

SEQ ID NO: 259779 - DNA, 122 bp, Homo sapiens
ctgcttttcaacaagtagaatgctcagcaatacccccggaaaataccccctgggaaatcccgtgagctggggctcctgcccgtgccatcctgtgttgccccactggggttcctgaaccgtaa

SEQ ID NO: 259780 - DNA, 122 bp, Homo sapiens
cgggcctccgagggggtgtgtcttctgcttctttaacctggcaggggcggttcaagtggccggggaaatcagcgatttggagggtcgagggctggtgctttgagagagacgcggagggcaga

SEQ ID NO: 259781 - DNA, 122 bp, Homo sapiens
tgttatcttgtcttttagtttctaatgttgcagttaggaagtctgatgcaacatgattcccgtccctttgtatgtgacccgttatttttctctgcaagtgtttaaggtggtttctttatccc

SEQ ID NO: 259782 - DNA, 122 bp, Homo sapiens
gggacctggggatggctctgctcacctaggcaggttccactaaggggcttcagggcctgccgtaaccccctgcaaggactttcctcagctctgaatggctgagacctttccattttaagaac

SEQ ID NO: 259783 - DNA, 122 bp, Homo sapiens
taccgccccccagcgcctcccccctcttgttcatgcctgggtttgattgtcaaacaggctcggccgcacttatgcacttgagtgtcaggatgcagaccccagcagacttgaacaaattcctc

SEQ ID NO: 259784 - DNA, 122 bp, Homo sapiens
gcataatatgatgaaaccccgtgtatacaccacccatcccaaaaactagagcgttactaacgacttgttctttttaggttgtttttctcttacctcacacccttcttttccctctgagataa

SEQ ID NO: 259785 - DNA, 122 bp, Homo sapiens
tgttcctcttctgtgaggtctttccacgcaccaggccagggtgtcatcaccagacccctccggtgctgaaggatctccccggaaaatagatattaattgcttttcaatcaatgtattccatg

SEQ ID NO: 259786 - DNA, 122 bp, Homo sapiens
tcagttgctgagcttgataggaaggccatctagagttagatcctgggcagaatccatatccggagggatttccagaagtggaatttcttttcttttcttttcttttcttttcttttcttttt

SEQ ID NO: 259787 - DNA, 122 bp, Homo sapiens
cctctaaattccccagaactattggtgtctccaaatatccctgaacaggatcagagggaccggttctctgctcttgcccaatccagacctgtgaccctggcaccggagccgcaggccccagt

SEQ ID NO: 259788 - DNA, 122 bp, Homo sapiens
accatgctggcacgaggcatggttatttgttgattgaatgaatgcacttttgctaggccgcgaggactgtggcaaaccccaacaaccaacagttcgtagggttagatcgcaaacttttctcc

SEQ ID NO: 259789 - DNA, 122 bp, Homo sapiens
ccggggtaggcagcatccacgtgctccacagctgccggtgctgggcaggctggagactcacgggagaggcaggaggagaatcagcgtgttgagtccctcgctgtgttagtgtgaaaaattct

SEQ ID NO: 259790 - DNA, 122 bp, Homo sapiens
cgcccaccccgcaggtcggccctgcagctgccttcccttcctccacctccctcccgcctccgaagccggcgcccccggccaagtggccgctctcaacctgttaccaagtcctagagagaatt

SEQ ID NO: 259791 - DNA, 122 bp, Homo sapiens
ccaaagagtttcctgtccatgactgctggattgagtcacatgagtaactgctcctggacccggggactgtccacgaaaactgacttgcctgcttcctccttccaggaactggtttcttgcgc

SEQ ID NO: 259792 - DNA, 122 bp, Homo sapiens
gcgtctctagagacgcctagacatgggactctggatggcaagagcaccttcatctttccccggcttcccgaactgctcactgaagggatggtgcctacttacacacccactatcgtgtgatt

SEQ ID NO: 259793 - DNA, 122 bp, Homo sapiens
ccgcacacacctgtgcaccggtgtgagccaggactgtcaggcgccagctccctcggtgaacgtgacaaggcccctccttccccacgggggtgacacgccagagccaggggcgcccggggtgg

SEQ ID NO: 259794 - DNA, 122 bp, Homo sapiens
cccgggccggccccctcggcccacgtcggccagagggttacgctgagctcggtcccatcacgacatcctaactaaagctgcctgccgacaacggcgcttccgtgtccgctggaagtgacgtc

SEQ ID NO: 259795 - DNA, 122 bp, Homo sapiens
tggagccatccctgggaagggaaggatggacagagggatgtaggaaggaggggagtagtgcgggctgcaggcttcacctgaagtgggaatgcttaggcttcccgggctccagtgaggagctg

SEQ ID NO: 259796 - DNA, 122 bp, Homo sapiens
cccttcccccgcccgggcccgccggcctaagacgcgcgggaagcgctgggctcggggctgcgccgcagactctctagtccacgttcccggcagccaagggcaccagtggaatttgcttcctc

SEQ ID NO: 259797 - DNA, 122 bp, Homo sapiens
tctgttctgtaaaaggtctgggatggggctcatttccttctggaaaggaagcacatccctcggggctctcagtctgggggatagaaagctaaagagacccaaagatggttccattttgaatg

SEQ ID NO: 259798 - DNA, 122 bp, Homo sapiens
tgggtccagccgccaaacccttctccccgttgtacccctcgccccgcgagcccctaccctcgtttcctgggcccgacccggctcgtcacctctcgacccctcccggacttccaggcctctcc

SEQ ID NO: 259799 - DNA, 122 bp, Homo sapiens
gtcctaaaacagaaggtgggtagggggtggcacggagtgtctgcacccaaaggctgagaccgcgggtgagtggagggagcgcaatcctgaagcctctgctgtccaccaccccctgctaaact

SEQ ID NO: 259800 - DNA, 122 bp, Homo sapiens
gcaaagataaatatctttgaggaatctgagacagattcctcaacccaggaaggtggccagcgcgtcctcctgagcctgggtgggaaagcttggcgcccggaacctttgtactcgcccttccc

SEQ ID NO: 259801 - DNA, 122 bp, Homo sapiens
tgtgacgtgcagtcttcctgtttccttcagctgtgtcttaaagtaaatcttgttgtggagcggagccctcagctgagggagcgctctgaaataatacaccattgcagccggggaaagcagag

SEQ ID NO: 259802 - DNA, 122 bp, Homo sapiens
cgccgcctccgtctcccacgcgctcgctcgctcgctcgctcccgccctccccgcctcgagcgatctcctgcctcagccttgcaggctccgcactgcagatgcctgctggcttccctgcgctc

SEQ ID NO: 259803 - DNA, 122 bp, Homo sapiens
tcttgactttcttctatttctgttctcatacggttgttaataagctgtcaaatgttaaagcgggtcaacacacagtctgatctgaaagagagcatgtggagaggaaagctcctcaaagacga

SEQ ID NO: 259804 - DNA, 122 bp, Homo sapiens
cacagcagcgtttttcacgacggccagagggtggacgaatgtgttacatgacccctgccccgaatgtgatatgtacgcacaatgggacgtcagtggtcccagaaatggaaggcacctcggac

SEQ ID NO: 259805 - DNA, 122 bp, Homo sapiens
gccagggaagaggagggagacagagaagtggttctgtatggctaggaccaccctactacacgctcagctgccaacagtggattgagtttgggggtagctccaagccttctcctgcctctgaa

SEQ ID NO: 259806 - DNA, 122 bp, Homo sapiens
ctagcttctcccagtctctctgcctcaccttctgggtgtggagaacttggtcagccactgcggaagcctgagctccctgcaaccaccagttcctctcttccctaaaacacgagcactgatct

SEQ ID NO: 259807 - DNA, 122 bp, Homo sapiens
tgtcgaagaacacggtggggttgaccatgcctaataatacaaggttttcctcggcagcagcgtctgtctggctccatcaccaaggctggagtgcagtggcacaatctcggctcactgcaacc

SEQ ID NO: 259808 - DNA, 122 bp, Homo sapiens
ggagactgcctcatggttttccagctcgtagagacgaacaggtcccggctcttggtcagccgaaccatgagccggcccacatagaagccactgatttggcccacaccgtcatttctccccat

SEQ ID NO: 259809 - DNA, 122 bp, Homo sapiens
ctcgacgttatatgattggttaaactctgtaagccccatgccgtgcctagagacgagaaacgctggggcgaactgacaggcccagatttaggagtcatgacgaagatcctgagacgcttatt

SEQ ID NO: 259810 - DNA, 122 bp, Homo sapiens
aattaccatttcccagtttgggatgaagagacgtaaagaagccctctaataaggaaattacgccgggcctcactgttaatagtacagtatttatcagcagctgccgcggttaagaggaagcc

SEQ ID NO: 259811 - DNA, 122 bp, Homo sapiens
agcagcttcagagacggcagcccccgggcaggcactgcagatctgtgcccggccacgaaccgggtatcagcgcccagcagcttcacagatggcagcccccgggcaggcactgcagacccgtg

SEQ ID NO: 259812 - DNA, 122 bp, Homo sapiens
aaccttctctctacctaccagctggattcaggccaacatcagggtgtgatagattaaaaacgaccacaacttctttgtagctcttcccatcaaggctggctttgtaacttgttttgaccaat

SEQ ID NO: 259813 - DNA, 122 bp, Homo sapiens
ttcttagttcattcagttctggcttcttagactgccttgctgtcactgccactactcaagcggccttaccccacccctttctgggaccagaaaggtatccctttggcacaagcctctgctgc

SEQ ID NO: 259814 - DNA, 122 bp, Homo sapiens
cggaagtgaagccttctgggactcaacgattgttaaggcccgcctttaccaggactgaagcggagaggaggcagttcaagctgggagccccagggtgggcattccagaggcggtgacacctg

SEQ ID NO: 259815 - DNA, 122 bp, Homo sapiens
tcggctccgacattaggggcaggcggggcaggcagcccaagcagcctgcggcttccgctgcggagcgctgcgccccggcccctgccccggcccctgccccggccccgccgccgccgccgccc

SEQ ID NO: 259816 - DNA, 122 bp, Homo sapiens
ggccttcaaaaaataaataaataaaccgcccctaccattgaagtaggagacgtgtaagggcggccactgggggactgacagaaaacagagaagttgtggaagctgtgtgttttctgtggagg

SEQ ID NO: 259817 - DNA, 122 bp, Homo sapiens
tagtgtctgaagaagaaagaagaggacaggaaagaaacttcagtctgagggttgaggacacgtcccggagcagaggaggaccaagctcccaagccccctgtcaccttgacacgcagacggtt

SEQ ID NO: 259818 - DNA, 122 bp, Homo sapiens
ccgtcgccatgggcctcatggtctgtggacagcggaagggcgccggggctgcgtttcccgcgcaggtgaagcaccgtcagggcacagcgcgcctgcgcgctgtggactgcccccagcggcta

SEQ ID NO: 259819 - DNA, 122 bp, Homo sapiens
tgggctcaagcgatcctcccgcctcggcctctcaaagtgctgggactacaggtttagtcacggtgcctgccctgaatgttctattttaaacaagaaaaccaaaccaaacccaacaacaaacc

SEQ ID NO: 259820 - DNA, 122 bp, Homo sapiens
ttctccgccaggaacgcaccacctgcgcttcgccggccaccggttttgcaacggagagcccgctggccacggcggcccgcactgcacacttcctagcaggcttcctgtgtagctggcagtgt

SEQ ID NO: 259821 - DNA, 122 bp, Homo sapiens
ggctctcgggggaagccacgggactcgggcgtgacagcctgcgagaaccgagaggtgagacgcgcgaccggggagcgcggcgaccggcagaggcgcccccgccgggcgagcgcaggggcagc

SEQ ID NO: 259822 - DNA, 122 bp, Homo sapiens
cagacgcctgcttacctcaccccagtccaagccctgtgattggtcaggccatcaaagcctcgccccctacacgacccggaattcgacgccaacactggtttctggggcaacttctgcgtagc

SEQ ID NO: 259823 - DNA, 122 bp, Homo sapiens
ttttctagagaactatgttcttccctgactttagggaaggtgaatgtgttcccgtcctcccgcagtcagaaaggagactctgcctccctcctcctcactgagtgcctcatcctaccgggtgt

SEQ ID NO: 259824 - DNA, 122 bp, Homo sapiens
gagtgcctcttttgtgccaggtataccaggcttggagatgtattgataaacaagatgactcggcagctgcccctaaccaccctataatccagtaggggtggaggagggtccaagttgtatct

SEQ ID NO: 259825 - DNA, 122 bp, Homo sapiens
aagggccaggccagctgtggctgcaaagtagcccagcaaatgatgaggcttgaacctcctcgccctgggctgccctgattgggtctgggggacctgaacctcctcgccctgggctgccctga

SEQ ID NO: 259826 - DNA, 122 bp, Homo sapiens
gggggaaaatggccaggtcagaaagcccctggcttcaagtttcttttgtgctgtaaactacggaaagagtgtgtcctcctttcttcctggttccttaactggcttctttttggctaactgaa

SEQ ID NO: 259827 - DNA, 122 bp, Homo sapiens
actcccactccgtagacacaatgatcagaggtcctgggtgtctggggaagctgggctgtgcgtgtatgcgtctaccatgtgggggtgcctgtgagtgtgctggggcgtctgcagtgaaggcc

SEQ ID NO: 259828 - DNA, 122 bp, Homo sapiens
gggctacaagacgctggccgcgggctccatcagcatggctgaggtgagtgctccgtctggcgtggcctgcgtcgggctggccacctgggtgccagagcattcgcccgtgggagatggagatg

SEQ ID NO: 259829 - DNA, 122 bp, Homo sapiens
gaggcccaccacagacctctcctgcggtttccactgacagtggtcctgtctcggtggggtcgatgcccatggggaattctgagcatggaatcggggtaaaagtcctattcaagtcgcgactg

SEQ ID NO: 259830 - DNA, 122 bp, Homo sapiens
acaaggtgaggggcagactcccacagcatggtgcctcttccgggagacggcacagggcagcggctgactgcaaggtctccagttgcccctcatggcatctccgcttgtgtgccctagtacaa

SEQ ID NO: 259831 - DNA, 122 bp, Homo sapiens
gccattagcccagcataagcagaggaactcttttcagtgagtgaacaaacagagaaaatacgctgaatggatggacaaatgtgtttcagctggccctttcatttaccaatataagggcgcag

SEQ ID NO: 259832 - DNA, 122 bp, Homo sapiens
ctgtggttgaaagaggctgtctgacatcactgtttaggacaagggaactggacccgtgaacgacagagccagcatttcaggaagttactttctgccacagagacctctacttccaaggcagg

SEQ ID NO: 259833 - DNA, 122 bp, Homo sapiens
tccagcacacgcaggtgagacccgggatcgtggggtgggacatgtgggatcccccagaaccgagtctgagggacccaggacaggagaaggcctatggtgatttgcattcttcctgccctggc

SEQ ID NO: 259834 - DNA, 122 bp, Homo sapiens
tctggcactccgtctatgaaagggacagggaaaagatcttatagaaactgaaccctgacacggggcttattttcctaaggaccaaaacataaaaggacagggtgggaccatggaaggattaa

SEQ ID NO: 259835 - DNA, 122 bp, Homo sapiens
gcccgttcccgggggtcacggccaagatccagcggaggatggaccaggtgttcacgctggcggtgcgcgagacggaggccctgatcccgcccgaggtgcctccccgccaatgcccagcacac

SEQ ID NO: 259836 - DNA, 122 bp, Homo sapiens
tcacagagctctcaagactctgaacaaaacagtggaccatcaccttccaaaggtgatgcgcgcgcgcgcacacacacacacacacacacacacacacacacagtttggcattttgttatagg

SEQ ID NO: 259837 - DNA, 122 bp, Homo sapiens
cttggtttacagtacagggatataggattacttatttctttactgtgtttaccaactgcccggggcacaacaaagagttattagtagggtaaaagatttgttaatagtatgaaacatgaagg

SEQ ID NO: 259838 - DNA, 122 bp, Homo sapiens
gtagctccagatcttgtgccagccccaggtaggacggggtgcgcaggacccacctggcagcggctgaagatgtctgcgtgggtgacacgcacgttgaaatgcttgagcacagccttggcctg

SEQ ID NO: 259839 - DNA, 122 bp, Homo sapiens
gggctctgggaaggaccttcctggcctcttcccgcttctgctggcagccggcaatcctcccgagcctcagcctgcagccgcgtcactccaatctctgcctccgatgtcacgtggcctcctcc

SEQ ID NO: 259840 - DNA, 122 bp, Homo sapiens
agtgatcctcccacttcagcccccggagtagctaggactccaggcatgtgctacaatgcccggctaatttttttggtattttttgtagagatgggctttcaccacttgcccagactggcctc

SEQ ID NO: 259841 - DNA, 122 bp, Homo sapiens
gcagcccccccgccacgtgtgccgcatccgcgccctgcatgcaacacccgccccctccagcgcagcatgcccctcgctggcgtgcagcaccccccatgtgtgcagcacccctgccccgaata

SEQ ID NO: 259842 - DNA, 122 bp, Homo sapiens
cgacacctatatagacagacacacacacacatacacacacacacacacacgtgaagttgtcgcctgcccacaactccaccgctttcctgtgccgcccaagggaaatgggtctctcttgagcc

SEQ ID NO: 259843 - DNA, 122 bp, Homo sapiens
tgagccaacatggcgtctcccactgcaccgcgagcgccgggctgccaggctcggcagggccgggtaatagaaaacacattggttaccaaaaagaaaaaaaggagggcggggggcgctaaagg

SEQ ID NO: 259844 - DNA, 122 bp, Homo sapiens
ctggcagcgagcacttttgcttggtaacagcgccaggttctttttaacaaccagctattgcggggagctaatggagtgaggtctcagggaaggcgttaatccaatcacaaggcatctgcccc

SEQ ID NO: 259845 - DNA, 122 bp, Homo sapiens
atttccccacctccatccccgcccccggtgagagctatcagttaccgctgtatattcccgcgtggagagccctttgacctcaccgtgtgggcgggagaacaaaaccactccctgtcaatcag

SEQ ID NO: 259846 - DNA, 122 bp, Homo sapiens
gccattctcccgtctcaaaactcctgagtacctgggactacaggtgcctgccaagacgctcggctgatttttgtatttttagcagagacggggtttcaccgtgttagccaggatggtctcaa

SEQ ID NO: 259847 - DNA, 122 bp, Homo sapiens
tcactccactctctgccccagatctcctggcttcatggggattttttgcctatgattagccgctctcacttcaagaatatcttccctaatagattgagggcagggatcttgtccattttatt

SEQ ID NO: 259848 - DNA, 122 bp, Homo sapiens
agggctgcagagatgggacaagttagggcagtgtctcctccctaaatccccgagcgctgccgtgagctcctggctgtgtctacacatcggttctgcatccggctgcccccgtttcatggctg

SEQ ID NO: 259849 - DNA, 122 bp, Homo sapiens
gaagcaaggggcagcgctagtccgggaccgggtgccatggagcagggggcagcactagtccgggaggctcaggccgtgcaggagcccacggcagggggtgggggagactcaggcatggcggg

SEQ ID NO: 259850 - DNA, 122 bp, Homo sapiens
gtgttttgtaagccgctttccagctagctgcgtgtgtgtgtgcgcgcgcgtgtgtacgcgcgcgcctatctgatgcatttgactgtcttttatccaactgcccagaagcaaatgtgttaact

SEQ ID NO: 259851 - DNA, 122 bp, Homo sapiens
ctcaggtgatccgcacgcctcagcctcccaaagtgctgggattacaggtgtgagccaccacgcccgcctaggagatgcagattgaatgcagattgattgagatgcatctttgtcctccccac

SEQ ID NO: 259852 - DNA, 122 bp, Homo sapiens
ctggcctggcacctgggtccctgggaggcgccacactggatatagccacgtggggcagcccggtctccataacccacactccagtcctcccacgggctggctggcaagcggccctggtgggt

SEQ ID NO: 259853 - DNA, 122 bp, Homo sapiens
cccactgcaggtacggaaagttcccctgttccacaggcaatgcaattacctcggccacttcgtaagggtgcacagaactacaaaataggtgggtgggggaaggggatcactcaaagatttac

SEQ ID NO: 259854 - DNA, 122 bp, Homo sapiens
ctcccaggtcctcggcatccacctaaacaagtggcgactggaccggaagctgggtgtctacgtgctggttctctacgccatcttcttgtgcttctccataatgatagagtttaacgtcttta

SEQ ID NO: 259855 - DNA, 122 bp, Homo sapiens
aaacagccccttcccctgcgatcgggcggggggacccgagcccacaccccctttgctccccgaagtggcctaataaaggaagtgccccgtagccctgctgcgaacttcaggcattaaatcag

SEQ ID NO: 259856 - DNA, 122 bp, Homo sapiens
cgactataaattttccctgataatctggggccagagtccactggtgcagcaggtgggatgcgggcggcggatggagtccctgagctggggaggactgtgcagctccctcggtgacgctgagc

SEQ ID NO: 259857 - DNA, 122 bp, Homo sapiens
ccggcgctgcgactatttccggagtcagacttgcctggggctcctttgggctccatacctcgggcggccgctatgcccagggcttggatcctaggaaatgccaggccgtccaccctctcggg

SEQ ID NO: 259858 - DNA, 122 bp, Homo sapiens
acgggaaagggagggcgagggctgggggcggggaccgcatgaaatggaggcgcccgatcgcgaagggggccctccccgcgcggccacggggaggagcctggggaggccagcgtgggtggcag

SEQ ID NO: 259859 - DNA, 122 bp, Homo sapiens
tcctctcctcggcagaggagccacgttttccctgctcgcctgcggatcgccctccctcctcgcgcccggctctccggctcagcccagcacacagggctgttgattattttcttttgctctcg

SEQ ID NO: 259860 - DNA, 122 bp, Homo sapiens
gacaatgaacgagataatatttctagcatagattaaatgctcattaaacccagctctgctcgcatgagatcaagtaccaagcacagtcctgtgagggactcagaggagtggggcagagcctc

SEQ ID NO: 259861 - DNA, 122 bp, Homo sapiens
ccagcctggggtcagtgcttacgctccacggcgggcctgggccttcccctgggtcctcgccggcgttctggggttctttggtttacgtagaagctgtaaacactttgatgtggccgaccttg

SEQ ID NO: 259862 - DNA, 122 bp, Homo sapiens
gacacaacacctcgggatgcttctgctcttaggccaaggggtgcgccctggaggtcctggcgtgccccctctttcccctgcctccacaacttcgttctaaggaaattttctcctggactctg

SEQ ID NO: 259863 - DNA, 122 bp, Homo sapiens
cacatttctgtttttccttttttttccctctttcccggagttaacaagaagcagatgtggcgcacgatggttggagaggtggggggaggaagggggaggccggaccgccagccagacagggg

SEQ ID NO: 259864 - DNA, 122 bp, Homo sapiens
gcctctgtgacctgagctgtcggggagaaaggagggtgctccgagattggcagggagagtcggagccatccatgggactctgcagtgagagagtcacagccctgggcagagactgctcccag

SEQ ID NO: 259865 - DNA, 122 bp, Homo sapiens
gcgcggggcgcggggcagggcgcggggcgtggggcggtctggagcccagcagttaccgcccgcacctacccagcccgccacacggtgcctcagtgttgctacggcttttgcatcgacctgct

SEQ ID NO: 259866 - DNA, 122 bp, Homo sapiens
gagaccgcgggctgggggtgggggtggcgtctggagtgcgccagttggagttctctaaggcgggtgcccttgaacttgtgccttcagagcacattagcgttggtttctctacccctgcccgg

SEQ ID NO: 259867 - DNA, 122 bp, Homo sapiens
ataccatcatctcctccagatttggacttctactcactttgcttttacattccctcttcccgatggtgtctttggtgagcagggtgcttttcacctgaaacagcctctgagctgaaaagaac

SEQ ID NO: 259868 - DNA, 122 bp, Homo sapiens
gttgtgatgcagcacgaaagccctcaccagaagccagggccatgcccttgaacttctcatcgtgtagaaccatgagctaaataaacctcttttctttataaattgcccagtgtcaggtattc

SEQ ID NO: 259869 - DNA, 122 bp, Homo sapiens
ctgcggctgctgcttgcccctcaggccaggaggtttctggaaggaccggtgctgtctccccgaacatcgtggtctccccgaacatcgcggcctctccgaacatcgccctctctccgagcaac

SEQ ID NO: 259870 - DNA, 122 bp, Homo sapiens
tcttgcagatccagatcaagccagctgcaactggggtaacagaatcctttcacggtgttacgaatggatgattttcagttagaggctattagttgaggattacagtgccaggcaaaatgatg

SEQ ID NO: 259871 - DNA, 122 bp, Homo sapiens
ttccggcgtagccttcagaaaccagaatccgcgaattggggcaacaatccagcaggtccccggcccctctccatccccttcggacgctgggcggggccctgggcgtcctggttacctggaca

SEQ ID NO: 259872 - DNA, 122 bp, Homo sapiens
aaatatgcaaaagcccacagggcaagacccaggctttcttacggttttccctggaaagagcgctccaggtgtcggaatccagtcccgtcccatcctctgcggagggtcgggctgtggccctc

SEQ ID NO: 259873 - DNA, 122 bp, Homo sapiens
ggccggggcgcgttggccagcttcctgcggagggcctccaggtctgcatcactctggtagcgcagtggcgaatgcacgatgggcgtgagcttggtggggctgagtggccgtggcaggctctc

SEQ ID NO: 259874 - DNA, 122 bp, Homo sapiens
ctgaccttcgacaggcgggcgtcggccaggtcacagccagtgacggtggcgggctcttgacgtgtagggtgtggtgtgctcataccgcctggagtggtggcgtgggcgcgagccgaattcca

SEQ ID NO: 259875 - DNA, 122 bp, Homo sapiens
agctttccactatttccgttccttctccataaggggccgccgtcgtcagtgagggtgaggcggagagacagagcgggaagggaaacaggatggggagagtcaagaggggaagggaagcggga

SEQ ID NO: 259876 - DNA, 122 bp, Homo sapiens
tcccctggattctcagatgggcacagccgccccctggcagggactcagacagcatcggggcgggcaggccattgagtctggcattttctacctgcctttctgcagcgagccccctctgtaaa

SEQ ID NO: 259877 - DNA, 122 bp, Homo sapiens
cgcatgctcaccagcctttctctcggacccggtagtggtccgtgaagtccgcggagtgggcgctgatggtggggctatcccttcccactgtccgcgaggtgcgccgtggtaacgcgcgggga

SEQ ID NO: 259878 - DNA, 122 bp, Homo sapiens
ggcttctgcggaggaggcggggagggagaaacgaggggaaggcgtaagagacttggccctcgccagccaccatcggattcttccggttctgcggaggataaagggaagacggttgtggtagt

SEQ ID NO: 259879 - DNA, 122 bp, Homo sapiens
gacgtgctctcgggacgggctggctaggaaagctacagctgcagatggagctgggaacctcgccctgccctgaaacccaagggaaaatcagactccgaggcaccggtcgccctaaaccacca

SEQ ID NO: 259880 - DNA, 122 bp, Homo sapiens
taagcgccatccctggcctgtgtgcagatgtttccttggaccagagatcccacaggggttcggcattagcaccttggcagtagagacagttgtggccaggagagggcagcagagagcctaag

SEQ ID NO: 259881 - DNA, 122 bp, Homo sapiens
ttccgcagcaggtacggcccccgccccacccccggccagtgcgagctggcccggagccgccgaccttcctcaaggtgcccgcaggcgtttcctgggcgatcctggtgcaaagcgaaggcgcg

SEQ ID NO: 259882 - DNA, 122 bp, Homo sapiens
tggggcggggcaaggtggagaccgcgtgtgtggttccggggggtcccgggtccccgctcccgggaccttccccgggtggcaccacatcctcgcgggacactgggcaccacccctctccgtgg

SEQ ID NO: 259883 - DNA, 122 bp, Homo sapiens
gcgcctgcgcatcgatggccagtcggcgcacggagggtctcctggccaagcttttagctgcggaaccgcgccctctttcggccaatatttgtaatatctgagccctagaccgcgctccaacc

SEQ ID NO: 259884 - DNA, 122 bp, Homo sapiens
cgtggggagggaggagggtgaggttaccaacctgatggttgagaaagggcctccgcccagcgcgcccttcctccacccccacccgagagacagctgaactccggccgggacgcgcgtgttgc

SEQ ID NO: 259885 - DNA, 122 bp, Homo sapiens
agccaggggacccgggggccctggtggctgcctccggaagtgagctagccgcctgccggccgacaggtttggaatctccagccagaggacagaaaacctgcatgggtcaggtgagcggggtc

SEQ ID NO: 259886 - DNA, 122 bp, Homo sapiens
cctctctgctgcagctggagcacttcagaagtcaagtcatcaaggccacctatggacgggcgaagccgttccgggacaagcccgtcaccgaccaacaggttagtctgccgtccctgccacgt

SEQ ID NO: 259887 - DNA, 122 bp, Homo sapiens
agtggagagcactggatgtcatggtggcaaacaaggcagccatttgctgtcctcctcccacgagtggaaggggtttccaaggaagccacagggcagctgaccacgtgcttgtgtgaggcatt

SEQ ID NO: 259888 - DNA, 122 bp, Homo sapiens
atgagatttttaagaatcacaaaaaaaacaaccaacctcataatgtcttaagaaagtttacgaattgcttttgggccatattcaaagatgtcctgggccacaagttggacaagtttgtcatg

SEQ ID NO: 259889 - DNA, 122 bp, Homo sapiens
cgccatgcctgagccccaaccccgccgtgggctcctgtgctgcagagcctccccgacgagcgccaccccctgctccacggcccccagtcccatcaacctcccaagggctgaagagtgcaggc

SEQ ID NO: 259890 - DNA, 122 bp, Homo sapiens
cctaacttgcacttcctcctctcaggccccatccccatgtggcctcttctttgggtctggcgctctccgggactgaaggctacccccgaccctgtaccccgcgctcccgctctcgcctcctc

SEQ ID NO: 259891 - DNA, 122 bp, Homo sapiens
cagaaactttgaaataacaaatgggataattgatgaggtaacaataaataactagtacaacgctgaaagaggagaaggtatataggacttttctccatcaaaggacagagattattgaattg

SEQ ID NO: 259892 - DNA, 122 bp, Homo sapiens
ccaccaagaaaaccggtagagcacagatgatgacgatagagctgttttgtccaatgtgagcgctactggccacccagggccatgtgaatttaaattacgatgaaacacaatgaaaaatttgg

SEQ ID NO: 259893 - DNA, 122 bp, Homo sapiens
ccctgggctgaatccgggactaggaaatgacattcatgtgaaagcggtgaggtttgaagacggtctgtaggtcagtcaggagtgccgtgtcattgtggtgtcccggatttgacggtcatgat

SEQ ID NO: 259894 - DNA, 122 bp, Homo sapiens
tcgaaggccagtaccgcatccaacaccgccatctgctggtgagcgggaaacatgacgcctcggggccaaatgggaagagcacgttcaggatattggattagagaaatatcaaactactttaa

SEQ ID NO: 259895 - DNA, 122 bp, Homo sapiens
cccggcccgcgggccgtccgtcccccacaggaaaccgccggggaggccgcggcagggacccgcccccaggccactaacagcaacaacagagaggctggagctctgcctgcgtgcgggccaag

SEQ ID NO: 259896 - DNA, 122 bp, Homo sapiens
ctctcagttggtcgtctctttccggaaaacttcggcgcctctcgagaaaaacgtcggacgcgctttgctctcttcagaagtctcttccgggacagctgtaccctctagtagtctctttttgg

SEQ ID NO: 259897 - DNA, 122 bp, Homo sapiens
cctttctagaatgtaagggcctgcaggttagggtgtttgcgtcctgcactataatatctgcggtaaccagaacagtgcctggcacagcgtaggcccggcttatgtgtttggtgaatgagtac

SEQ ID NO: 259898 - DNA, 122 bp, Homo sapiens
agcagaaggtcccggcagcagccaggctcctcggaagccggagggtgtgtgccagctctgcgttgccagcgggcagggggaggagctgtggggtcggcctcgcttctggacttacaggccga

SEQ ID NO: 259899 - DNA, 122 bp, Homo sapiens
gggtgagaggtgaggcgggtacgctgagggtcgggggggctctccagctccccatcctgccgtcagacagacactgctccgggcacgatcctgcggatgtgggtgtacgacttcctgatggt

SEQ ID NO: 259900 - DNA, 122 bp, Homo sapiens
ccatctgactgcgagataatttcaaggctgaagaacatcgttcgtgccagacacctcgcacgaggcgctgcgtgaaactggcctacttatccgaggcctcctgtatttcagggggagggggc

SEQ ID NO: 259901 - DNA, 122 bp, Homo sapiens
aaagtaaccttgggagttgaaagagctgggttacttattactttcctcaagataagggagcggggacctcgccatgcccttggaagaaccaggaaccaggatcccgccgaggcaaaggctga

SEQ ID NO: 259902 - DNA, 122 bp, Homo sapiens
caaactggttctttcggagccatcctgttgatcatgcagctccaccaaaccttagggggacgtgaaatcactgcctgttgtggtctccgaggacacatggtaatggtgatgctgtgccttgt

SEQ ID NO: 259903 - DNA, 122 bp, Homo sapiens
tgagagcatgaagcttgggaaatgactgtgggtctccaccaccatgactcaccgggcacacgctgaggatacggcactggtagaagggctgtggggtcaggaccaccagtgagataacagta

SEQ ID NO: 259904 - DNA, 122 bp, Homo sapiens
gcagagtggaactggcccctcagccatcagtggaggtggcctgagaggctctaccctaaacggggtctccccaaggcgatgcagaaactgggacatgctctgctgagcatggggcttactgg

SEQ ID NO: 259905 - DNA, 122 bp, Homo sapiens
gaagatggtcagctcttaatccaatatgacctgaaaacatagcaggagaatgccatgtgacgatggaagcagatattgggcttatacagctacaagccgaggaacaccaaagattgctaggg

SEQ ID NO: 259906 - DNA, 122 bp, Homo sapiens
gacagccagagctttggaccacatggtcagactttggactctggcactgcccccactccccgccccgcgtgaggcaggcaggctgctcggcttctctgagccttggtctcctaatctgagtc

SEQ ID NO: 259907 - DNA, 122 bp, Homo sapiens
cgcgatactgagtgagttctcactcactagctcccgcccgagctggttgtttaaaacagccgggcaatccccaccgcccctcactcattgttgcctctctcaccacgtgatgtctgcacacg

SEQ ID NO: 259908 - DNA, 122 bp, Homo sapiens
tacctcaataaataaataaatattgtgttcctctttaaactttccatttattcatatgttcgctttctagtcaatgggctatattctgttttttttctgttatttattttgaagctcaaagt

SEQ ID NO: 259909 - DNA, 122 bp, Homo sapiens
accgcttctctctaagcaggtcactgaccgaggaaaccaagcctcatttcaaaataatatcgttttccaatgaagtcaactgtccaactactgtttagcttcaccagaacagcaaacaaact

SEQ ID NO: 259910 - DNA, 122 bp, Homo sapiens
ggctcgtgcggcattctgggaactgtagtttcggcgacgctccaggccacgtggaggaagcgcccggtctggcgcatgcgctctccagcgcgctctccaggagctttggctcggtgggtact

SEQ ID NO: 259911 - DNA, 122 bp, Homo sapiens
ttctgctgaacacaaaccatttcacagaaaaccatcagacaggccactctatgactatgacggttcgagaccaagacaaggccactgcggaagaacgtctgagcacagacgactgtgtccaa

SEQ ID NO: 259912 - DNA, 122 bp, Homo sapiens
cttgtgagtcccacatgttggagtcgcagggcttttcagtacatgccctcaggcaggcggcgcagtcacagacactggtccccggcatttggaaacaggaaagatggtccgaggggccgagg

SEQ ID NO: 259913 - DNA, 122 bp, Homo sapiens
gcattccgagtcacacgggggaggcctgcattccgagtcacacgggggagccctgcattccgagtcacacgggggagccctgcattccgagtcacacgggggagccctgcattccgagtcac

SEQ ID NO: 259914 - DNA, 122 bp, Homo sapiens
aaaaaaaaaaaaaggataatttgaggttgatgaagattttgcctcagttactcctttatccgttttaatagtaaagactcgtgtagcatttactttgtacctctcaacactttacatatatt

SEQ ID NO: 259915 - DNA, 122 bp, Homo sapiens
ttctaccgtagctttcaacacatttagagcaaacacactttaagcaccttctgtgtgcgtcgcccagaggaaggaacaccaggatagtattattattattttatttttgagacagagtttcg

SEQ ID NO: 259916 - DNA, 122 bp, Homo sapiens
tccaagattagggtctgttccctgaatccgccctccattcgtttggcaaacatttatgagcgcctctaaagtgccaggcatggtactgggcactggtggtccggcagagaacaagagagtca

SEQ ID NO: 259917 - DNA, 122 bp, Homo sapiens
ggaggcctcgccccaacacagtgtgtcaagctggctggtgccacccactacccgctagaccggtgctgctatgggaaattcctgctgacgtcccacaggctggacccctggaagatgcagga

SEQ ID NO: 259918 - DNA, 122 bp, Homo sapiens
tgaatgcctgtttttttttttaagttgtcaatccaacactttttaacccttgagtataagcgcgggtataccagtttgcagggctactctgagaactcataagttgcataaggaagtactat

SEQ ID NO: 259919 - DNA, 122 bp, Homo sapiens
aaacaatagagcatgcatggtgtggctgtttcatgagtgggaaggaaagtgagtgtggggcgagctgtggagctgccctcgctgctgccgatagtcaaattcacagctggctgccctgggca

SEQ ID NO: 259920 - DNA, 122 bp, Homo sapiens
ctcacgcctgtaatcccagcactagatatctctcaaaactctcctatgctttcttgtggtcggtaccttcactctcgcctgcatccctgcaaacagcttctttacaagtgcttctcatctag

SEQ ID NO: 259921 - DNA, 122 bp, Homo sapiens
tccaattcattaaatccaaagcaggtctgaggaatctgccgttaattaaacacactcccacggcaatgctgatgaaagtggtcttcagctcatgctttgagaaatgctgctccacagttttc

SEQ ID NO: 259922 - DNA, 122 bp, Homo sapiens
agggaagagggaggggagaggatccaggctttccttcctcccggtgacctggtcctgagccgcagcttcccttgcattgttccctgagtttgctctcggggcccaccgagacctcacgtttc

SEQ ID NO: 259923 - DNA, 122 bp, Homo sapiens
ttgccagtgttacatgcgtgtgtgcgtgtgtaattctacacaattttgtcacattgcaggcggttgggttgtggcccctccacggccaagatgcagggcaagatgaagcacaccaggctgcc

SEQ ID NO: 259924 - DNA, 122 bp, Homo sapiens
taggattttctccaggtttaatgcactgtttgtcaggcctcacatccgtggggccattcgcgaataccagacccagctgatccagcgcgtgaaagatgacattgagtctcttcacgacaagt

SEQ ID NO: 259925 - DNA, 122 bp, Homo sapiens
ggctccttttgcatcttgctgcagtcccctcctgtgaagggcgcagctctgcagtctcctcgctcttccctcgggtgttctttctgagatccggtttcaatcctcgagcgtgtagccctcag

SEQ ID NO: 259926 - DNA, 122 bp, Homo sapiens
ccaaagagcctgggattgcagtgttgttagcctggcctcgccgcgtcaataaattttcggcgaaagttgggagcaggagtggaggcttggggcgggggttggtggggcgcgggggttggccg

SEQ ID NO: 259927 - DNA, 122 bp, Homo sapiens
cctcgtggaaacaatgatgcttcttatagcatcatactgggattacgctaccagtatccacgtacatctattcaaaaaaccagatggaagcagcctgataacggtgatggtctggcctaaaa

SEQ ID NO: 259928 - DNA, 122 bp, Homo sapiens
aatgcagcagaaggaaagccggtttcctgttttaaaatccgacactagttctggctctgccgctggctccttctgtgtcctgagtgagcctcaacatcttcatctggaaaatgggtcctgcc

SEQ ID NO: 259929 - DNA, 122 bp, Homo sapiens
tctccacctgtttgctaagacgttctgtgactgatgtaatccacaacccattttcccagccgttttctgttttgtgcttttattctctagctttataattgtctggggggaagggcgtgatg

SEQ ID NO: 259930 - DNA, 122 bp, Homo sapiens
tgtggctccgtgggctgccgagggctgctgtgggctctgcgctgtggctccgtgggctgccgaaggctgctgtgggctctgcgctgtggctgtgtgggctgccgagggctgctgtgggctct

SEQ ID NO: 259931 - DNA, 122 bp, Homo sapiens
atcgcccagaaggggtgtcaggggcagcccaggcccccgagctgcagcaaccacaaagtgcgacgacagggaagcgccgagccgccgcgcaaactgcgcgctctctccagactcgccgcccg

SEQ ID NO: 259932 - DNA, 122 bp, Homo sapiens
agtgccccctcgaccctgaaacttggagcagggtgggggttcagtatgaagcccccggaccgccccgcccctggccgcactgaccggatactgggggtcatggggggcatgctgcgcgcatg

SEQ ID NO: 259933 - DNA, 122 bp, Homo sapiens
ccaacgcacctgtcagcgccccgttctcggcccccatctgggtcccctgtgccttggcttcgtccatctcaatcttcagtgtcgttagttgggtctgaagccggctctgaggagtggagggg

SEQ ID NO: 259934 - DNA, 122 bp, Homo sapiens
accggcatctcgtccaaggccatgggcatcatgaactccttcgtcaatgacatcttcgagcgcatcgccagcgaggcctcccgcctggcacactacaacaagcgctccaccatcacgtcccg

SEQ ID NO: 259935 - DNA, 122 bp, Homo sapiens
tagagacatcagggtgcgcagagcatgatgaacaatgggtgtcctcccgggcccagtgagcgcaggcagggagggactgggatgggggaaacctacaccctaggccgcttgcccgaaagcct

SEQ ID NO: 259936 - DNA, 122 bp, Homo sapiens
aaagcgccagatacgtaattgtatgcaggatgccatcctgtctaccttaacacaacgtcacgcccacgaatggttctgaaacgcacaggaaaagttctgggaagggcgctgctgtggggtgg

SEQ ID NO: 259937 - DNA, 122 bp, Homo sapiens
tgatgccggctcatcttggcagtgcaggaggtggctggtgaaccactgtacatgctcttccgggccatccagtaccaggtggacaaaggccccgtggacgccgtgacaggcaaggccaaacg

SEQ ID NO: 259938 - DNA, 122 bp, Homo sapiens
ggccaggatggccagcaggagcagcggggcgcgcaggggcccggccatggtcggctaggacgcgggacgcggggagtggggcgcaggcgagaggctggagctagatagagaggacccgctgc

SEQ ID NO: 259939 - DNA, 122 bp, Homo sapiens
cagcaaggaagctgcagggccaggaatttgccttgggagacccccactgaggaatatttccgaagcagaaccccttcctattcagagccagagtcttaacactggacaaccacagggtgttg

SEQ ID NO: 259940 - DNA, 122 bp, Homo sapiens
agcggtgctcggaggcagggggcgtaggggccgggctgtccggcgctttagcttagcaggcgacgttgcgggccctgggcgccaggagagcttcccggagtcgaccttcctgctggctgctc

SEQ ID NO: 259941 - DNA, 122 bp, Homo sapiens
gtccccttagaatgtggctgaatccgcctccccacccgacgtctttatttaacacaatctcgcagcttattcaaataagccagctttgtcagccagttccaccaagatccgggggctccagc

SEQ ID NO: 259942 - DNA, 122 bp, Homo sapiens
ggggctaatgtcctggcgcatgacccagatgggctctttgggctcgtcgggggtgtaaggcgaacggatggtcctggttttcacctcctcgatggcctccttgatgtccttgatggccagcg

SEQ ID NO: 259943 - DNA, 122 bp, Homo sapiens
caaccctctgctgagctccagctgcactgacagggcgaagcactgcattcagccatgctgcggacctgctcagagccttgaaagcaccagagagtctagtctccatgtgctgggctcctgca

SEQ ID NO: 259944 - DNA, 122 bp, Homo sapiens
ggggcagctgcccccgtcggcccctaaatggtgcttggcagcttggcggagtgcacctgacgcagcagcaggacaagcgcagccaggagcgcggaggcgaagagcagcaggaggacgaccca

SEQ ID NO: 259945 - DNA, 122 bp, Homo sapiens
aacctttcagcacatttgttaacttgagtgacatctaaaaaaatcaccaccccattaatgcggactcatccagtccatgggctgtgcatcgctcctttaattgggatggcttggttccctcc

SEQ ID NO: 259946 - DNA, 122 bp, Homo sapiens
atctccacctctcccgctcgggaaaaagccacagagcctggcgatgtcctcaaggggtcccggtggctccagtgcacccagcacacctcagcgcctctggctggcaagccaggagaagaagg

SEQ ID NO: 259947 - DNA, 122 bp, Homo sapiens
gcagcagatggtttctaagagaagggggagagcccacgcagcccatgcctcctatagcctcgctctgtgccctagcatggggctttggtcttttggctgatgccaaaagaatatttcctaac

SEQ ID NO: 259948 - DNA, 122 bp, Homo sapiens
cgctgttaaccgtcaaaccgtcaaagcatttgtggaggaacctggggcaaagttccgcgccgggttctccagctgtgggttcatcagcttagcccaccactcccacgtaacaccagtttggg

SEQ ID NO: 259949 - DNA, 122 bp, Homo sapiens
aggtgaatgaatagggagaaaaggctaggagcggagctcgagagtccgaaaggtaaggggcgggccagtggatcatcgggactttatgaattattgatggagtgaaccagaggggagtcttt

SEQ ID NO: 259950 - DNA, 122 bp, Homo sapiens
acagcccacctcctccgcacacatatccctcagccacccaccccctgatccgcccagggccgcctccgccccgctttggcccatctgccatcccctggccacctgcgtacccagccgggtga

SEQ ID NO: 259951 - DNA, 122 bp, Homo sapiens
cccacaccaagagaaaatacagcctacaccaaatggagacacacatgaggcggatacactcgatgatgacggggagacaatgtggtggcgctgttacaatggggtggggagaggaggtagga

SEQ ID NO: 259952 - DNA, 122 bp, Homo sapiens
caaagtacatgcttaatgacctagtgaagtgagcttaagccgcctcccagacacctgtaacgaagaccatctcgggaaagctctgggttaggcaactcgatttcacgaaagcggacaccaac

SEQ ID NO: 259953 - DNA, 122 bp, Homo sapiens
ggtaggtgggacttgaaattcattttaatagaaggaattttcgtggatataatctacaaccgattttgctctgcgcaggtaagatccgttttcagaccaaaaccctgaaaacaagcgcagcc

SEQ ID NO: 259954 - DNA, 122 bp, Homo sapiens
ctgcttctaacctggagcacatctgaagtgacgctgccgggcccttcttgagaaccttgccgcactcccctggtttccatggcgatgtccgtttcccattctgaatgctcttcagagggatt

SEQ ID NO: 259955 - DNA, 122 bp, Homo sapiens
taagtgctgattctaaaacctgccaccgggtgttcacaggtagcgacggcatcgtctgtgcgtctgtgctcagtgaatctctggaaggtgtggggtgggccctgctatactccgcaaggccc

SEQ ID NO: 259956 - DNA, 122 bp, Homo sapiens
gggaatggtgcgtgtgggctcgcgtccctcctgtccctccacaccacctcttcccttcctcgctgctctctgaggctcctgccaacaccagaaggaggggctgctggagctggggcttcaca

SEQ ID NO: 259957 - DNA, 122 bp, Homo sapiens
aaactctggctaactcactcccctgtgagccatcctagggctctgtggcccgggaagagacgcgtcaactccgcgggtctgcgcgcagtccttagccgcaaagtgctgcaagtgacccccct

SEQ ID NO: 259958 - DNA, 122 bp, Homo sapiens
tgtgtgactccgccgccaggacgaccttccagaaagcagacttctccgctccagttctagcggagacggagagagtgaaccaagaaccatcatcctgcgccagccaggggcaagcggagcct

SEQ ID NO: 259959 - DNA, 122 bp, Homo sapiens
cacacaggaggagcccagatgggaaagggctggagcatgaacgtgacgaggccttgccttcggaggggtgaaggtcatcccagggtcccccggcccccctgcgcactcccagagggacggcc

SEQ ID NO: 259960 - DNA, 122 bp, Homo sapiens
agagggacggcggtgggagccatggagcaggtgttgtggagtcaggtgtccctggggtcacggtgactggccaggcgcggggagccaggaggcacacggtcctgggctctggcagggctgga

SEQ ID NO: 259961 - DNA, 122 bp, Homo sapiens
aaaacacagagatgcggaataaagtctcagctcgacttctttctaccagattcccagcctcggttattgggcacatacccagctaaattccccacggcgccccttgaggaaacttgctctcc

SEQ ID NO: 259962 - DNA, 122 bp, Homo sapiens
acccctgagggcctggtggtccgctgcattcagcgcctggctgagatgtgtcgctcactgcggggggcagcccgcctggtaggagagcctgtgctgggtgccaagatggagacagcggctac

SEQ ID NO: 259963 - DNA, 122 bp, Homo sapiens
actctgataccgcactacttgtctaaaggtgcagatagatactagttgtcatttgaaagtcgaaggagctattcaggttatcttaggcattcttgtggtcctggttgtagtcgtgttctgtc

SEQ ID NO: 259964 - DNA, 122 bp, Homo sapiens
tggaccctggggagggaggtgcgggttcagcgccgggggacgggcccctggggaggggtgcggggccgggggaccagaccctggggaggggcttaaggggctggaggacgggaccctgggaa

SEQ ID NO: 259965 - DNA, 122 bp, Homo sapiens
cctaacagtcccatgcgactcatctctaacagcagaccagaacctgcctgaggttaggagcgagatattatccatcttgatagtctccatggtgtctacttcccctaaatatttgcacaaag

SEQ ID NO: 259966 - DNA, 122 bp, Homo sapiens
tgcagaagcggcctcgacccgcggccacacggtggcgccagaccctaagcgtcgcggaaacgccgctccaggcaagtgatctcatcccacaggcccgcgccctcttctgccagggcgcggag

SEQ ID NO: 259967 - DNA, 122 bp, Homo sapiens
cctcccacatgatcatagtgctgctgctcttcggtgcttccttctacacctacatgctcccgagttcctaccacacagctgagcaggacatgatggtgtctgccttttacaccatcttcact

SEQ ID NO: 259968 - DNA, 122 bp, Homo sapiens
aatgccaggaaacaaactgcttcaaggaggaattttcctggtttcaggctataaataaatcgtccatctcattggtattcttctaggaagtacatgaatattcattttcaccaatttgtcca

SEQ ID NO: 259969 - DNA, 122 bp, Homo sapiens
ttggtgcgcttttccaccagcaccactcgggcccccagcagcgccagctccacagcgacccgcagcccgcaaggtccagcacccaccaccaggcactgtgaacacacagggcagtgagggca

SEQ ID NO: 259970 - DNA, 122 bp, Homo sapiens
cgagggccaggctggcagtggacggacggggccagctgggggtccctcccactgcacactcgggaggattggattgcggctgatcttgccgccggcatctgtggaaactcatcagtctccca

SEQ ID NO: 259971 - DNA, 122 bp, Homo sapiens
cttgtcttggtgaagagtgcctggccagcagccctgcctacctctctcttctggccctagcgccttgctccagcccatgtggttccagcaagctccacttcaaggggcccaccctccagggc

SEQ ID NO: 259972 - DNA, 122 bp, Homo sapiens
gaggagtgagacctggcctgccctctccctagaggctcatcagctccctggagacagacacgccctgggtaaagaacagatcccactcagccaggcagagtttcctggaggaggaggaggga

SEQ ID NO: 259973 - DNA, 122 bp, Homo sapiens
agagggaggagccggcccgcgggacaaggggcaaaggaggccaccaccaacccgcagagccgcagccgcctccacgcacccccggaatccacgcctcccgaaccggaagcgcggcgccgctc

SEQ ID NO: 259974 - DNA, 122 bp, Homo sapiens
atagagaagagggatcacatcgtggagatgcagctgaggcagcacaaggtggggactgtacgtggacggcctcccctcggcccacagccagtgatgctaccggcctcagcattgctatgagg

SEQ ID NO: 259975 - DNA, 122 bp, Homo sapiens
gcgacgggcctcacctaacgcgcacgaggggatcatcattgctcctgccctgggcgcccgcggccctacaccacctccgcacacaacgcggccggtgttaagtctccaaacgccccgagagc

SEQ ID NO: 259976 - DNA, 122 bp, Homo sapiens
ccattggcccgcggcgccccggtcccttcactcccgcccccggcccggcaacaaggagcccggctcccacccgcagccccgtatcactcaccctgcagggtcccaaatgcgaaagccgggtt

SEQ ID NO: 259977 - DNA, 122 bp, Homo sapiens
gtgattactgactggtttaaacacgaccccttgaacaatattgataaaacctccgagacccgcagcccctccttgcagcgtgtaggagctgccagcgtgcccagcagctggtgttcccgtcc

SEQ ID NO: 259978 - DNA, 122 bp, Homo sapiens
gaagccacaattgtgcctatgtcagtcatcgaagtcttgtacaggagtccgtcttcgcagcgcatcgttctcagaagtttcccgcgggaggaaagctccactttatgaattactcgaacagc

SEQ ID NO: 259979 - DNA, 122 bp, Homo sapiens
gcagcagcaacttcggactcagacctctctctttagaacatgagtgcttgtgtgtgcgtgcgtgtgtgtgtgtgtgtgtgtccgagtgcacttcacatttgggggtgcttgtgctctcagga

SEQ ID NO: 259980 - DNA, 122 bp, Homo sapiens
ccggggaggtcaggaattccccagccacaccagatccaaccggacgccccagaacggggacggtccccggagtccgcctcccaacctgggtgagaaaacacctccgtccctccgctgcctga

SEQ ID NO: 259981 - DNA, 122 bp, Homo sapiens
caactatgtgttgtttataagaaatcaactttaggaatgagtccgccggatcggtgactgcggagggctaggtgaccccggccgccgccatgatgggcagcgagtttgggaatcggacgtag

SEQ ID NO: 259982 - DNA, 122 bp, Homo sapiens
ccagtatggtattcgtttcatctcaccaaactggcgtggcctgcgctagcttcagagtctcgacaaactccaatacaagtaaggtacacattattttagcagtcttccttggggaggacgtg

SEQ ID NO: 259983 - DNA, 122 bp, Homo sapiens
gccaaagccacagcggggacgttcccagcctggctcgcttccggcactgacgcctccagccgcgacctctagacttcagcccttccattggtcgtccgtcacagtgccacagtgcgccatgc

SEQ ID NO: 259984 - DNA, 122 bp, Homo sapiens
gtgcccacacacttcttcaaggtgctgatcctggaggcagcaggtgggcaaattgagctccgcacctacgtgatgcccaacgcacctgtggatgaggccatcccactggagcgcttcctggt

SEQ ID NO: 259985 - DNA, 122 bp, Homo sapiens
ctcgcctggctcgggaagtggttgcgggagctcgggctgcaggcctggccgaggcgggggcgccgaccagccgtcccgcccccgcccccgcccgggtacgcccagaagtgagggcgcccgcc

SEQ ID NO: 259986 - DNA, 122 bp, Homo sapiens
accagataaagccttacagctgtatttaaatctacctagtttatctagatgcagtgattccgtttatattaataatggatgaaaaactagtactgcataattctagatgccagagcctttgg

SEQ ID NO: 259987 - DNA, 122 bp, Homo sapiens
ggcagcgagttgaactttaggagagctgtgttctctgcagattctaagtatgaggggcaccgcgctttgtcggctgaggggcggggcgtgagtttctcgagggtcggggagaaggaattgtc

SEQ ID NO: 259988 - DNA, 122 bp, Homo sapiens
aggtttatttacagcacattggtttcatttgacgttcctgtaccggactaccctggcaatcggctaaagttttgtcagcaagtttgctgctgggatttttcttatttggttcagtttactac

SEQ ID NO: 259989 - DNA, 122 bp, Homo sapiens
cccagtgctgaacgccttcaagtatcccttgctgatcggcgtcggtctgtccacggtcatcgggctcctgtcctgtctcatcgggtactgcagctcccactggtgttgtaagaaggaggttc

SEQ ID NO: 259990 - DNA, 122 bp, Homo sapiens
cacacagcgctgggccgggcaggggcctccagaggctggctgggcccagttggtgaaagccgtgtcctggtcccctgtggtccacgtgaagccgcgcagtgggcgctgcagctggcattgcc

SEQ ID NO: 259991 - DNA, 122 bp, Homo sapiens
cggacggggcctactggtgcaccgcacggtcccgggccttgctgaaaggtgatgtggaggcggcgcgccgagccagactgggaggatgagctggagctggccggagggatggggaggaagtg

SEQ ID NO: 259992 - DNA, 122 bp, Homo sapiens
ccttgggcagaaggagtctggcagggccctccagcactcatgggtctatacctctcttttcgcagctgaggcggtgggggagcccctggcagagtggaggtgccagcaccacacagtgagtt

SEQ ID NO: 259993 - DNA, 122 bp, Homo sapiens
ggattcccttctgcccggctgcccaggggctgggatgggtggaagggagtatttacagagcgtttacaggcaggtttcttatcccagggagaagggtcctacaccaggaacttcccaaatgt

SEQ ID NO: 259994 - DNA, 122 bp, Homo sapiens
cccgctgagtgtcccagactcagtgctggcctcaagcggggagggctggatggcaggggacgcatccaaccctctccagaaactgagcagaacaaaaccgccttgccagccactggcaagac

SEQ ID NO: 259995 - DNA, 122 bp, Homo sapiens
ctgacctttagagacgactgcatcctgattggctgcctatgccgccctctccccgggagtcgggagggttgtaaatacagaagaaatggaaaggcaggtaatcaaacaaggccgccgcagta

SEQ ID NO: 259996 - DNA, 122 bp, Homo sapiens
ggtaagttccaccccagcctcctgcatcagagcaaagcgatagacagaatgattgtgagtcgatcctggcgtgggcgttctgtggatgctgggcctccttctttcagtgccccctgaagtct

SEQ ID NO: 259997 - DNA, 122 bp, Homo sapiens
ggccaggacccagacttcagcaaatgtggctcacacagtgccgggacatgccgggacatgcggggtggctgttgtcatgggcgtctgccccttcacaccaggcactggggctcagacccacc

SEQ ID NO: 259998 - DNA, 122 bp, Homo sapiens
atctctgctcaccacaacctccccgtcccgggttcaagtgactctcctgcctcagcctcccgagtagcggggactataggcatgtgccacgacacccagctaactttttgtatttttagtag

SEQ ID NO: 259999 - DNA, 122 bp, Homo sapiens
atcgggtcactcccacccgaatactgcgcttttctgaccggcttaagaaacggcgcaccacgagactatatcccacacctggctcggcgggtcctacgcccacggagtctcgctgattgcta

SEQ ID NO: 260000 - DNA, 122 bp, Homo sapiens
gtcacatttagccctgacaacaggtacttcttttgccaacctctataaagggtgtgggggcgggggcgggatcagaccacataacttttaggttatatgctctcattaatattaaagacata

SEQ ID NO: 260001 - DNA, 122 bp, Homo sapiens
aagcaaggcgagtgcggtcagcgcaccgggctgggcggcctcccagccggccggggaattcgttcccagctccagccgcatctcaccgcctctatcgcgcctttggggcctcagagggaggc

SEQ ID NO: 260002 - DNA, 122 bp, Homo sapiens
ggactcccatgaccaaggagatgactacatcaggctgcagggctcaggaataggaactagcgagccgcgcggccccagggcgaggtgtccgattccctcccaggatgctcagccaacggcgc

SEQ ID NO: 260003 - DNA, 122 bp, Homo sapiens
ccagtaccacggcgcatgcgcaaggaggcctatggcctacaatccccagaaagccccgcgcgcagcagtggccattcgcaaggctaccctggtgaaggtggcctttgacttccgtgcatttg

SEQ ID NO: 260004 - DNA, 122 bp, Homo sapiens
gcatccatgatttgaatttcaggaggaaggggaaaagacatgagatgctggctggaaactcggcagctggcctagtaggaactcttcacccagggaatccttcagccaagatactaagaggg

SEQ ID NO: 260005 - DNA, 122 bp, Homo sapiens
gggctggctcaagggtcagcctctccagaaagagaggaagctgtgggccatgaagcttcccggcacccagcccctgccgtggaaccccctcctgcatcagtgaggtaaacacagtggtttgg

SEQ ID NO: 260006 - DNA, 122 bp, Homo sapiens
tactaacaaaaatgcattaacagggtagaagtatcaagtccataaaaaggcctagtccctcgcttctggaatcaaatgcattgttgactcacagggaaagatcacacaccagttcctacaag

SEQ ID NO: 260007 - DNA, 122 bp, Homo sapiens
cgggggctcagctgatcctgaattggcggggggtcggctggcggggctgggggtccctctcgatcgccggcttcgggtggggacgcgttgtccccgcgtctctaacctggacgaccccccgc

SEQ ID NO: 260008 - DNA, 122 bp, Homo sapiens
aggccaaagcacagtcgcagttcttcagggggcagcagcagcagcaacagcagcagggggcggtgggccatggttactacatggcagggggcaccagtcagaagtcccgaactgaggggagg

SEQ ID NO: 260009 - DNA, 122 bp, Homo sapiens
gttcctggcaggctcaggaccaaattccaggggccactcatgggcctagcagcccaaggccgcctccccctcgtctttcttccatctctctttcctctgcctggcgagatgccagccagcac

SEQ ID NO: 260010 - DNA, 122 bp, Homo sapiens
cactagcttactgcagcctcaaactcctggcctcaaagtgatcctccctcctcagcctcccgagtagctgagaatacaggcacgcacactgtcccaggccacacctgaagatctggaagcct

SEQ ID NO: 260011 - DNA, 122 bp, Homo sapiens
ctttactccccaagtccagctcttggctcaaaagggctctgcaggttggtacaaaggctgcggaaaggcgaagtcgcggtacaatcggtgttaactacatgtgcagccaccgtcttcttagt

SEQ ID NO: 260012 - DNA, 122 bp, Homo sapiens
atttagaaaaccgtgtttaaggccaggtggcagtggctcatctctgaaatcccagcatttcgggaagccaaggcaggtggatcacttgagcccaggagtttgagacccacctgggcaacatg

SEQ ID NO: 260013 - DNA, 122 bp, Homo sapiens
tgggcttggatgaagtggatctgcggagttgatagttgtatttacacgcgtccggagctgcgccccgaggtgggggcgggggctcccttcttttcccctccccttaggtcgagtttcacgcg

SEQ ID NO: 260014 - DNA, 122 bp, Homo sapiens
cctctcttctcctatcttttacgtttacaatctcagagatatgtgactgattatctacaccgggatcttattacttcttggccatgccttgttctgttgccaccaagtaccccaagtacaca

SEQ ID NO: 260015 - DNA, 122 bp, Homo sapiens
actgatttaagggagcttgtgctgcactctttgtgtttgatttgcaaaccagaatgcacacgcctccatatgcataattggatcctcacggtctctgcctccatgtgaccatgcagtagttt

SEQ ID NO: 260016 - DNA, 122 bp, Homo sapiens
ctcacaaaacaaaaaagaatcaatgcggatttcaggggtatgattaactggaaaataccgcggaagttatgtaacgtagcataaaatggaagtgttttgtaactgatttggctccttctgtg

SEQ ID NO: 260017 - DNA, 122 bp, Homo sapiens
tccgcgaagagctgggaaaagcgagcctcccacccccactctcaagtagtaaaatcaaagcggatggacccttatttctgaggagtgaaagcgagaagaacgatgcgtgtaaaatgctagtt

SEQ ID NO: 260018 - DNA, 122 bp, Homo sapiens
cgccggggcggggcctcgtgccgggggcggggcaggggaatccgggagtcgactgggctccgccctgggctccccgctctccccggcgctgctacgcagatgcctagactcggttcgtctct

SEQ ID NO: 260019 - DNA, 122 bp, Homo sapiens
caggtgtgtgcgggggtggcagcctgtgtggcaggccatccccatctgagctgctgtctccgttccaggcacctacgtgatgaccgtcacggccaacgatgctgacgacagcaccacggcca

SEQ ID NO: 260020 - DNA, 122 bp, Homo sapiens
tccaggctcccgggacaggcggctacatctgggaaggaagcagaaggcagggccggctcacggccccgcagggctcggcccctgcacacggcagcgctgccccagccacccgcccccgtcac

SEQ ID NO: 260021 - DNA, 122 bp, Homo sapiens
ctggcagctctcaagaaggagctccgaaacgccggctacgaagtgcgcaggaagagcggccgccacgaagcgcccagggggcaggccaaggccacgctcctccgggtcagcggcagcgacgc

SEQ ID NO: 260022 - DNA, 122 bp, Homo sapiens
gttaaagtcattctatgtagcccttcatcttttaaccagagcactgtagcctaagatacacgatgccaccatatgccacctcacttgaagccagatcaattgtctatttccattaccccatt

SEQ ID NO: 260023 - DNA, 122 bp, Homo sapiens
ctagatgcttcctgccctcgaacatcagacttgaatttcttgttttggagttttggaactcggactggctctccttgcttctcagcctgcagacagcctatcgtgggaccttgtaatcgtgt

SEQ ID NO: 260024 - DNA, 122 bp, Homo sapiens
cggtagtgggacgtgatttccatatcttcctttcggttgttcatttggaagccctggtgtcgcctcttctacagactctgtggaggtaagaacaagagttacccaagctcagcacagacaga

SEQ ID NO: 260025 - DNA, 122 bp, Homo sapiens
ggtccatgagctgggcagagctggagtggtaccgggcatcgttgcctagctgtggggccacgggaagttacatcatgcctctgggcctccggtccctagtgtatgaaattggagaatgccag

SEQ ID NO: 260026 - DNA, 122 bp, Homo sapiens
ggcgaagtgcgccgggcgggggcggcactgaccccgaggcggcgggagcggcgaaggcgccggcgtccccacccgcatcctgcacctgcctcgctcccaagccctcccggtccccggtccac

SEQ ID NO: 260027 - DNA, 122 bp, Homo sapiens
atcatagcttactgtaaccttgaactcctgggctgaagtgatactccggcctccgccttccgggactcagccaccacaaccagctaacttttaaatttttctgtaaagacagggtgggggag

SEQ ID NO: 260028 - DNA, 122 bp, Homo sapiens
agggtggcccagcccggcaggtggagtccagcctggaagaggcccctttccatctgcctccggccacctgtcctgagtactcactccttccagacagctggagagcggccccagagcctctg

SEQ ID NO: 260029 - DNA, 122 bp, Homo sapiens
ccttatcgtccgccttcattcctatgcactaaagcagcttaccaagcccgatgttctccacgtgactcgactctgcgttccatccacggaagaaagcgccaggctgcgtcctatttgcaagg

SEQ ID NO: 260030 - DNA, 122 bp, Homo sapiens
tcccagggtctgcggggaagccgggcctgggggccccctcccaccccaggctgagccccccgctacctgtgctgcttgtccagggcgtgcaggtctccgctcctgtgcgccaggcagcgctc

SEQ ID NO: 260031 - DNA, 122 bp, Homo sapiens
ctctgctgagcctcctacccatgacaacaccccaataaacagaacattcagagccaatgtcgtagagctttttattttgcatctggagtgtatttggacacgtgggctgggtggggtaacag

SEQ ID NO: 260032 - DNA, 122 bp, Homo sapiens
attcagtaaacagacttttcaccagcttccccctgcaccaggtagtctaggagctagagacggagcctgggtgaccgagccatggacactacattgcagggctgctgccagacagaaatgtg

SEQ ID NO: 260033 - DNA, 122 bp, Homo sapiens
ctggaactgttcgcaacaacaattacaggttgcaagataccatctatagatctgtgactccggaacagctaaaacctggaaacagaaaacttggttgagtctcagaatgggtatgtgaaaag

SEQ ID NO: 260034 - DNA, 122 bp, Homo sapiens
gccggtgagcttgggagaaccgtgggcgctgaggcggtgagtccccgagcggccagagggcgtggccgttccctggggcgcgggcgcgggtagcggggctcctttccgtggccggggccatg

SEQ ID NO: 260035 - DNA, 122 bp, Homo sapiens
ggaggctgtgtgcgtaattgattgccagacgggcatcgtgctccacaagtacaaggcacccggcgaggtgagtgcaaggccctgtccctgctgggcaagggtgcccgactgactcctgaaca

SEQ ID NO: 260036 - DNA, 122 bp, Homo sapiens
gcggaggtctgagaagagtgcggctgggggttccgggctggcccttgtgctcggcctgggcgccggtggtgctgttggcacgtgagtcttgttaggaataagcttcctcggctaaccttaca

SEQ ID NO: 260037 - DNA, 122 bp, Homo sapiens
ggggtcccgggctccccttcctttgttcttcccgctatttgcatgaggattatctaatgacgcagcaaggctcgccacaacgtgaccgtcgccatttttctgtttttattctatctctgcca

SEQ ID NO: 260038 - DNA, 122 bp, Homo sapiens
gtcccacaacgccaccagccgcagtgagccaaacacacgtcccctgtggggtatggagttcggcagacctccccagcacgatgcacagatgagcctccctcacagctctacctcaccccaca

SEQ ID NO: 260039 - DNA, 122 bp, Homo sapiens
caagccgagactcctgcacgcccggcccgaagctagcccgacaccctcagctgagtcctccgccgtcccagcattccctgcgtccctaccatcgagagcagcttccggcgtggctggtgtag

SEQ ID NO: 260040 - DNA, 122 bp, Homo sapiens
gggccaatttttgcttgtaagtctttccggagacccctggaatttaaatcattagcaccgcgcccttccccgaagagtcttcgaagggttgccgcttttcggtggcgcagttctcgcgagaa

SEQ ID NO: 260041 - DNA, 122 bp, Homo sapiens
gggctgaggtgctctggaagtctgcgtatgcatccctggggacgtccagcagctcctcctcgtactccgtctggtagtcagattcgtctggcaccgagggtagggctgcgtcagtcccctcc

SEQ ID NO: 260042 - DNA, 122 bp, Homo sapiens
aggctccctggaccctggctgggtgatgtggtcactgcctggggtactgctgtcaggtcccggccacccaccctgggcagcaccgtcccatttaggactgggctgagtcctgagacacgaca

SEQ ID NO: 260043 - DNA, 122 bp, Homo sapiens
cgaccagctgtgccagcaggagctgcgcgagctgcggcgagagctggagctgttgggccgcgagcgtgaccgggtgcaggtggagcgcgacgggctggcggaggacctggcggcgctcaagc

SEQ ID NO: 260044 - DNA, 122 bp, Homo sapiens
aggacgtcccacaatagagaatgaggcagcctcctgtcagctgtgaggcaaggaggagcccggctggcagagagaccgcagcataaccacgagaagacagatattcagaagcgcaagagctc

SEQ ID NO: 260045 - DNA, 122 bp, Homo sapiens
aagatactggactcgagtgagacgccgtgcgggcaaggcgggcgccgcgttcggctgtgacgtgtggcctcttgttttccgggagtcgttattcttcctgaaaatgccctcagtgcctgagg

SEQ ID NO: 260046 - DNA, 122 bp, Homo sapiens
ggctgcccgggccactctgtaaaggagcaggtgggtcgatcctgcttgagtaatcgctgacgagcttcgtgctgctgctttcctgcttgcacatgttatctttgcttctgccggtcctcagt

SEQ ID NO: 260047 - DNA, 122 bp, Homo sapiens
cttcagcaagtcttgcaattcctcaagatcggtgactacaacatcagccctataaaataacgtcgactgaggtgtaggcacaggggggaaagcctgtaatccggatttccccagcaagaagg

SEQ ID NO: 260048 - DNA, 122 bp, Homo sapiens
cggggcgcgctcagggctgcgggcagcgggggtgcagcggggagagccagggcctgggcgcggaggaggggctggtatgggaccctccgggtgggcgcggccccgcggggccttgcggccac

SEQ ID NO: 260049 - DNA, 122 bp, Homo sapiens
ggaaacccagtgtttgttactctgaaaatggaagctgccccgtgacagcatcttctctcccgttgagtaatccctgcatgaatagatggcagctgcagtgactgctggtcatatgtgatcta

SEQ ID NO: 260050 - DNA, 122 bp, Homo sapiens
tgagatcagttaatgagacggtaattgaaggccgccgtgcgccaacagaataatgcacgtcgattgggcagctccaagggacaacccactaccgcttgcccgcccaccacccacttcccgcg

SEQ ID NO: 260051 - DNA, 122 bp, Homo sapiens
gctttttttgtaggttttgtggatgctgagtgctatgtcctggcagccatggcctatggtcgttttgtggccatttgtcgacccctccactatagcaccttcatgtccaagcaggtctgctt

SEQ ID NO: 260052 - DNA, 122 bp, Homo sapiens
catgttggcaggtgccgggttgatgtcgtcagcagcagaacggctccgcccaggtggtgacgcagaatcccggcgccgcccgcccacccagcccatggctccaggcccacctggcgaactga

SEQ ID NO: 260053 - DNA, 122 bp, Homo sapiens
aaatggaagaaaaggccggaggagattcccagaggtggaaacctgagggctaagaacacacggagatgctcaaacccaccaggtaggaagccacgcagacccacccgccagcagggaaggag

SEQ ID NO: 260054 - DNA, 122 bp, Homo sapiens
tactccctgtcagaggtgtcctgatgtttcctgatggccagcgcctgactcaacacgctccggctcccaaagcatcccagtctgccaggactccctggttgtctggagtacagcagggaagc

SEQ ID NO: 260055 - DNA, 122 bp, Homo sapiens
gtggcgaggtttctcggtggtgctggcgggagcagtgcttttcccagcctctgtgagctccgctgctcttccttccaatccttcgggtcgttgctcgccagccttagtctcctcccaggcac

SEQ ID NO: 260056 - DNA, 122 bp, Homo sapiens
gcctgcgtctctctagctaccgtctctatggttcggggaatctccaggtcggggcttgaccggtccgacttttgcgcgtgcgcgagtcctggcgcgtgcccgccctcaagcaactgtccgac

SEQ ID NO: 260057 - DNA, 122 bp, Homo sapiens
acggcttaatctcttcctttggtctcctcatatgtaaaatgaggtggctgaggccgggcgcggtggctcacgcctgcaatcccagcacattgggaggccgaggcgggcaaatcacttgaggc

SEQ ID NO: 260058 - DNA, 122 bp, Homo sapiens
aatatgttagaaaagaatccagagtgtatctagtgcagggcaaggggccagggatggagtcgtcagctagaaggggcgcgtcgtcccggggtggggccgccctttttctcctggagccgcgg

SEQ ID NO: 260059 - DNA, 122 bp, Homo sapiens
ggggaagtaggacgaaagggttgatcaagcaattcccagaccaagacaccaggagggtcccgccctcggccccgcctccagctttgcatacatctcctgattggtcggcggcggcaggcccc

SEQ ID NO: 260060 - DNA, 122 bp, Homo sapiens
ctcctgatgtcaggtgatccacctggctcagcctcccaaagtgctaggattataggcatgcgtggccaacttcgttcttttgtatgtagatctttattaccatttgttgaaaagtctattct

SEQ ID NO: 260061 - DNA, 122 bp, Homo sapiens
ataaggcggtccggcggagcgggcctgacgcgttccggatgccggccatcccgttatcctcggctgcgcccatcccccgtctctggccgcagtccccgcggttacctctgcagcggcgtcgc

SEQ ID NO: 260062 - DNA, 122 bp, Homo sapiens
ggcgggcgctgccttccaggggtgaagtgttttcggaccccggaatctgtgggcggcctgcgggaggggctgaggcgcagttccctactcacccaggtccgaatccaccgcggtgctgtttc

SEQ ID NO: 260063 - DNA, 122 bp, Homo sapiens
tgcccagccctgggctcccactctgctggagaggctgtggggggtggcggatctctctgccgcagggactggggagaggccggcctgggggcagggcgaggccgttgcggggcagcctcgga

SEQ ID NO: 260064 - DNA, 122 bp, Homo sapiens
tgccttcaatgagcagtcttgacaggggaggcataatctaatcctacttctgctgccaagcgtcattgcacgactcccatttttagtcaaaaagcaatatccccgaccacagctttccaccg

SEQ ID NO: 260065 - DNA, 122 bp, Homo sapiens
tttcaccccgcccagactgccgctcaggaaagggttgtgctggggccggggggcgaggggcgggcggctggacgcttccaggctctgctcggctcaccaaaacattccaccaccccctcccc

SEQ ID NO: 260066 - DNA, 122 bp, Homo sapiens
ctcggtttgcaacttggcccgctggctggtgaggtcgttgacagaacgctgggtctcctccgccttgctccggtgctcattcatctggtcttccaaggtccggcacatcttctccaggttag

SEQ ID NO: 260067 - DNA, 122 bp, Homo sapiens
aaaaatgatggcatgggtgcccaagcatacagcagccacttaagggacaattattactaccgctagaaaggagaatgtctagtccatggtatctgtaggtagcacagttctggctgtcactt

SEQ ID NO: 260068 - DNA, 122 bp, Homo sapiens
gcctggacagaatgaggggtcaggaagtccctctctccacgggtctggccacccccactccggcgcctgcctgccgtgctgcaatcctcgtgctggccaccagagagcagtgcccacttcag

SEQ ID NO: 260069 - DNA, 122 bp, Homo sapiens
tgtctttaacggcagaccattgctcttatggacaataatcagataatggtcagttccttgcgtaacaatacgcagcttgatctggccacctcctgtctctcctgccaaatcttgccttgtgt

SEQ ID NO: 260070 - DNA, 122 bp, Homo sapiens
atgaattaacaacataaattaaaagaaccgagcaggtgtgaccatgagaccaccggcctccgtgagtctttgagaaaacaagccaaagtccccttccaaatgacagtgacagccccctagcc

SEQ ID NO: 260071 - DNA, 122 bp, Homo sapiens
aacaccctgtctcaaaccacccccctccacccaaaaaaccacaaaagatgcagaatggaacgatctaccaaaaaatgaaacggcaggtgtatcaaagaaagggtagtagcatgatgactggc

SEQ ID NO: 260072 - DNA, 122 bp, Homo sapiens
ccgtgctgccttgctgtacctggatgctcgcacagatgaccggcctcactacttcaccatcgagggcgtctttgaggccctgcagggcagcaacctcagtgtgcagcaccaggtgtatgccc

SEQ ID NO: 260073 - DNA, 122 bp, Homo sapiens
acgcgtggggtgcccacttcaaatgtgcagaaccaggagcagcctctgctctgcccacctcgaggccctgcttggcaaagcggctttctgagcctgctgtgagggaacccaccagccccgcg

SEQ ID NO: 260074 - DNA, 122 bp, Homo sapiens
cagttgctttttcagacactgggtcacaccagtgaaggagacagaccaggtgcctgtgctcgggaagcttacattccagaagggagaaacgatacacaaatagttgtgaatagcacatcatg

SEQ ID NO: 260075 - DNA, 122 bp, Homo sapiens
gacagaggacggaaagggtcaggggcaagacaagccaggccaacatcccacctaccaggccgacccatgccgatcttctccaggtcctcattcttgacgtactcaaagtgggacaggcgggt

SEQ ID NO: 260076 - DNA, 122 bp, Homo sapiens
cagcgccccagcgcccccgcgaggcccgggcagcgtccgcgctccctacagggggaagcccgccggtgtttgggaatcccagcggggtccccagcttgccgatctcccagccctgaccttac

SEQ ID NO: 260077 - DNA, 122 bp, Homo sapiens
actagggaccaaggcactagcctgtgtcagagataacatggccctgtggctccctactgccgccctgcgtggcgtgggtggtggcttctctcccactgtggcaggggaagtctgaacccacc

SEQ ID NO: 260078 - DNA, 122 bp, Homo sapiens
cactccctaaccagagcccactgagcccagactgccacctcgaaaatgggtgatgaccatcgtttccttgaccagacaggcctcgacatcagcctttctatagaatgccagaaatggcagag

SEQ ID NO: 260079 - DNA, 122 bp, Homo sapiens
tatttttttttttagctcttacattactctgagatcacgattagcagcaatcactccttgcgactggaaaaacactaaatgcagtgcttttccagcttgttaaaccactgatttctatttcc

SEQ ID NO: 260080 - DNA, 122 bp, Homo sapiens
acaaacagtaagtgcccaagcaagggttggggtcattggacagagagatagaggatgtgtcggtcagaaccagtgctattcttatgaccaccaagcccagcatagctaaatcagccacatgt

SEQ ID NO: 260081 - DNA, 122 bp, Homo sapiens
aacggctgtttataaccttggcaaagactgaggcctaatcaggctggagcacattttcaccgactggctgataacaggctgttagcagccttatcgctcgggagagataggccaaaataagc

SEQ ID NO: 260082 - DNA, 122 bp, Homo sapiens
gccagagctttcccgcgcggtcggatagttacactactgtccgggacttcctagccgtgccgcggaccatctcaagtgcttccgccacactcatcatggcggtggcagtaagtcacttccgc

SEQ ID NO: 260083 - DNA, 122 bp, Homo sapiens
tggccggcacactcaccatttcccagtctccggtgtctggggtcctccctaaggaccttccgggacctgcaggtcccagagcaacagaagctgccgcgggaccacttggacctcccagggat

SEQ ID NO: 260084 - DNA, 122 bp, Homo sapiens
accatgattccattgccaagcacaaagcaatgcaagagcccaacgtcggtcgccgcaccgcgatcctgacaaagcctgtatggagccagaacaaataagatgttaattgcagcctcgcagag

SEQ ID NO: 260085 - DNA, 122 bp, Homo sapiens
ccccgtgtgtgctctgggaatggcacatggcagcagagtctgaagagttggccgtgtggacgtggccacgtgtaactcaattgcggccctcagtctccacgtctgtgaaatggattggctgg

SEQ ID NO: 260086 - DNA, 122 bp, Homo sapiens
tgtccgaaattggtgggttcttggtctcacttacttcaagaatgaagccgcggaccttcgcggtgcttgctacagtttttaaaggaggggtgtccggagtttgttcctcctgatgtttggat

SEQ ID NO: 260087 - DNA, 122 bp, Homo sapiens
cataaaagccaagtttaatccttggcatgtctcgagaatacaaagtggaacccacagatccgaacctgtgcgatgacttccaagaccagaaggcctaagacctagaggcgcctaaaagagtc

SEQ ID NO: 260088 - DNA, 122 bp, Homo sapiens
ttagaattgtgtatgctgacagtatgcagaatctactgaccttaacatatctctgaaagacgggtcagggtaagagagtgcagaaacaaaaggcaggacttatctttttattgagtaagatt

SEQ ID NO: 260089 - DNA, 122 bp, Homo sapiens
aagcctgggcagaagagcacggagccggcgactggacgcgagcaaggggcgaatggagagcgtctcccctgcgccaatgctgttgttccgggtgctgaaaagccgggaacttcccggaaagc

SEQ ID NO: 260090 - DNA, 122 bp, Homo sapiens
actaggccaaactacttgcacgttccctcgagaagatctttggagtagacacaaaagccgcgctggcgcatgcgcacaaaaagcgccggcaattggggtcgcagctggagatgctgcggccg

SEQ ID NO: 260091 - DNA, 122 bp, Homo sapiens
ttcagctgagtggtgtagttgaattggttcctgtagccgctgtccctaaacccaggccgacgttaccgccttgtgtcctgactgctagctttcgacgggaccgtctttgagggactcatgta

SEQ ID NO: 260092 - DNA, 122 bp, Homo sapiens
cagaccctctggcccttcctcccggcatctctcccttgctgagccccacgtctcagatgccggggatcccagcaaatgtctcctgagaatgctcctggccgggctctccctgacacagtgcc

SEQ ID NO: 260093 - DNA, 122 bp, Homo sapiens
tgatttgtgtctccaaatcctcaaccacccactatcaagcctgactcatcaagtattgcacgagggaaatggattttctacaaaataagaaaacccaggctgagtagtggctcacacctgta

SEQ ID NO: 260094 - DNA, 122 bp, Homo sapiens
gtcctcctcggcgcccgtgtccagcacgctgctcaggttgtgctcggcctgagtctcctccggtacctcctgcagtgcctcagcctgcctcagggacaggcggtagttctccagctcgatcc

SEQ ID NO: 260095 - DNA, 122 bp, Homo sapiens
ggaacaggaaccaggtcctaggagcccgcagggacttctgagctgctggcagtctccccacgctggccgagctcacagccccagcgctggcccagagtgaaggtctgcacgatggaccccat

SEQ ID NO: 260096 - DNA, 122 bp, Homo sapiens
cgcagcctgcggtgaggtgggggcgtgcagctgaggcctgaggggcgcgcccctatgtcccgcgtcccacccctcgccccgctccgggacgcccagaccccgcgctcccgcgcctgtccggc

SEQ ID NO: 260097 - DNA, 122 bp, Homo sapiens
tggcaccctccattaaacaagaaggcaatcccaccactctaaacagccatgcacatccctcgcctccagccggccacaaggctaagcaccagtgccatggatgccaaggtgggccagagtga

SEQ ID NO: 260098 - DNA, 122 bp, Homo sapiens
cagcccgcccgtcttgcactcggagagcggtcctggcaggaaggccggccagtgtgcacccggttcgggcccctgcgcccgggctggcaagatggccacgcccccagcagagacggcgcctc

SEQ ID NO: 260099 - DNA, 122 bp, Homo sapiens
tattcgtcttcaatatcagtgctggtactagtctcattttgggctggataattcttcaggcgttgggggtcgcggggcattctggacactgtaggatgcttcacagcgtctctggctttact

SEQ ID NO: 260100 - DNA, 122 bp, Homo sapiens
cgaactgcaccagcagcagcagcagctcccggcccagcacctcattgccgtgggcccccgcgatgtagtggaactcgggctcacctttactcaaagacagagagaagcacaggttcacgttg

SEQ ID NO: 260101 - DNA, 122 bp, Homo sapiens
ccccccaccgtctgcccccatcacctctcgggcctccggtgacctctcgggctacagcagcgctgacgccctgggtccctgcgcttctgttccctcggcctggaatgctcttcccccgggta

SEQ ID NO: 260102 - DNA, 122 bp, Homo sapiens
tatgacataatcccaaccccaaaccatgagtctcatggccatgtctaagccacgccctgacgatagggttgggatgactacgccaggcttagtaatgcacagggacaggaggcatttcggaa

SEQ ID NO: 260103 - DNA, 122 bp, Homo sapiens
ttatgtctctcttaccctttgctttaagctaacaaattttaatattaaaaaatagcagagcgtgacccctatctttgctattccaaatttcaatattaaaaaataatacaggaagaccccat

SEQ ID NO: 260104 - DNA, 122 bp, Homo sapiens
taattcccagtttgactctgcacacagctccaaaagagtaaggagatgaggggtggactccgtaattgctaaggtccttaagacagatgctgatgacattcaggaagaagttacctgactaa

SEQ ID NO: 260105 - DNA, 122 bp, Homo sapiens
gactggccttctgtttgttactttcaaaaggcccacatgatacaattagagaattcccaccgcacaaaaaaagttcctaagtatgttaaatatgtcaagctttttaggcttgtcacaaatga

SEQ ID NO: 260106 - DNA, 122 bp, Homo sapiens
agaacactgccagccacgtaacgagcattcaacatgtttgctggtagtaagagctgtaagcgccagcccaccttctggttctgccaactcttggtgccacctcggcccctgcttttccccac

SEQ ID NO: 260107 - DNA, 122 bp, Homo sapiens
cccccctctatcctccacggccccatccaagccagggatgaaatttaacggcaagaagggcgcagttgacgcggcgtcaatgaactgagactaagtcaaaagccgggtaaagctaggtcttc

SEQ ID NO: 260108 - DNA, 122 bp, Homo sapiens
ttcttttttctagtccctcagggccgggagaccgagtggctctttggcatggatgagggccggaaacagctggcggccagtgctggcttcaggaggttgattacagtggcccttcaccgagg

SEQ ID NO: 260109 - DNA, 122 bp, Homo sapiens
tacctagccttgcagctgccacaggtcagaaccatgcacagacacacaggggcaccacgtcgtgtacacctagtaagatgtcacttacatggcgatccacacacacacagttatgtcatcca

SEQ ID NO: 260110 - DNA, 122 bp, Homo sapiens
tgaacccgggaggtagagcttgcagtgagccgagattgagccactgcactccagcttgggcgacagagtgagactccatgtcaacaaaaaaaagagaaaggaaggaaggaaagaaagaaaga

SEQ ID NO: 260111 - DNA, 122 bp, Homo sapiens
gaggcgacagaaaatcaaggagtttgcccaaggccacggagctccgaagagctggatctgcgcattcctggctctgaaccaggatcaagtgcccctgcaggcctgagacaacccacaatcgg

SEQ ID NO: 260112 - DNA, 122 bp, Homo sapiens
tcttaatactaggcccgaccccgagagaatctaatctaattgttaaaaaaaaaaaaaatccggggttcaggggtgtccagctttgtatgggtatttttttcacatgggccccaggagactct

SEQ ID NO: 260113 - DNA, 122 bp, Homo sapiens
cttacccactttttatttagcgcttctgttgggtgcgctggtgtttcctcgaggcttcagcgtgcgtatccctgtgactgctgatggggagcatcctctcccagacttctcacactcacccc

SEQ ID NO: 260114 - DNA, 122 bp, Homo sapiens
gacattgcccaaacttatggtgtgagtcctacaaatattaaaaccacaataaaaagatcacgaaaaaaacaactaatttgctttaggtaatccaaccctgcagtgtttatgtgttccattct

SEQ ID NO: 260115 - DNA, 122 bp, Homo sapiens
atggcggggtgcagggggtctctgtgctgctgctgcaggtggtgctgctgctgcggtgagcgtgagacccgcacccccgaggagctggtaagaagccggcggagtcggcctggggagggggc

SEQ ID NO: 260116 - DNA, 122 bp, Homo sapiens
tgcccggcgcactggctgcgggctctcccgggccgcgcagggcagcagggctgagtggggcggggaggcccctgcggcccggattcttggtttgtgtgcagccggaatggactcctccaagc

SEQ ID NO: 260117 - DNA, 122 bp, Homo sapiens
ctcggtccacgcttggcgtctacaccacctctggtctgctgatatgcaagcattcccccgcgttagtcagtccttgcaacttgtctagaagactgggaatctttttttatgaaatgacaaga

SEQ ID NO: 260118 - DNA, 122 bp, Homo sapiens
agtcctgccctgcgccgtacctccctattctgcagacgaacccatatggtctccctccgccgcccatttcagcaactgttgttccttcagggctaagtcctgttaaacttgtttcccctaca

SEQ ID NO: 260119 - DNA, 122 bp, Homo sapiens
gctgcccctgagtgtcatcaccttctgcacgatgcagatcatgcaggtgctgcggaacaacgagatgcagaagttcaaggagatccagacagagaggagggccacggtgctagtcctggttg

SEQ ID NO: 260120 - DNA, 122 bp, Homo sapiens
cctcggtgaaggaccacacggtgaccaggtcatcttcgccacccgtcaccacgtagcggccgtcagggctccagcacacacacagcaggcccccaaagtagctcttcatgagcccacgcagg

SEQ ID NO: 260121 - DNA, 122 bp, Homo sapiens
ccgcgaagcctgggcctgtcaggcggttccgtccgggtctcggccaccgtcgagttccgtcgagttccgtcccggccctgctcacagcagcgccctcggagcgcccagcacctgcggccggc

SEQ ID NO: 260122 - DNA, 122 bp, Homo sapiens
ggggtctcattgaaaagctctctgatgagcacctccttttgtgcaaagttaattttttctcgacaataaagatattccgtgtctttacccctgaactaagacacagggagtatttcagaggc

SEQ ID NO: 260123 - DNA, 122 bp, Homo sapiens
ccaacatggcgaaaccccagccctattaaaaatacaaaaaattacctgggcatggtggtacgcttgtagtcccggctacttgggaggctgaggcatgagaattgcttgaacccaggaggtga

SEQ ID NO: 260124 - DNA, 122 bp, Homo sapiens
gaagatactctcacaatgcaggctgactgacaagaacattccaaagtgagaggccaaactcgggggtggggggctcacaggaaggagacaagatgactgtcttcaaatatttgaaaatagag

SEQ ID NO: 260125 - DNA, 122 bp, Homo sapiens
tctaagtcaataaaacccaaatttgttgtacattagaatcaccaaaggagcagctgaagtcgattaaattagagtacttgggggtagaacccagctggcagtgtttttgtaaactccccagg

SEQ ID NO: 260126 - DNA, 122 bp, Homo sapiens
ggcttaagcaatcctcctgtctcagcctcccaaagtgctgggattacaggcatgagccaccgtgcccagccagtctgtgccttttaattggaatgcgtatttcatgtaattactgatacaat

SEQ ID NO: 260127 - DNA, 122 bp, Homo sapiens
gagtcggagagggtggccccttggcatgtgagtgtagagtaacacttcctgctgaaagcacggagcattctcatggagcctgtgagggcaggcattcgacagggtctgccaacctcctaagc

SEQ ID NO: 260128 - DNA, 122 bp, Homo sapiens
caggcaccctgggcagaggtggcttcatccgttgctgtccccttcttggctgggcctcgacgggggggcagatatcgggcacctcctcccaggagggagtttggtttttgtctgcaaaatgt

SEQ ID NO: 260129 - DNA, 122 bp, Homo sapiens
ctcgcagccgtgaggcgctgcgccacgggcccgggagggcttacccgtcctgtgctctctcgcaggtccagtgtcacagctacacgggatactgctggtgcgtcacgcccaacgggaggccc

SEQ ID NO: 260130 - DNA, 122 bp, Homo sapiens
aaggggtatgtctacgcctattgttttatttgctgactctcactcatagcggcttgtttccgtgtagtttggtgaccactgattgtgagttcatattttgttgaacttaatctgtgggaatc

SEQ ID NO: 260131 - DNA, 122 bp, Homo sapiens
aggaaggggccgtggtccagctggaccctagtcgagctgctcaggggcagcttgggctgtcgtccagggtgcacgaagccatagccaatgtcaagggctcctaatgtccaggcaggaaactg

SEQ ID NO: 260132 - DNA, 122 bp, Homo sapiens
gaaatacacaataagttactgtgaactctactcaccctaccatgctcctgaaggctgcaacgtattccttctatctcaccatacgtttgcacccattcacctgctcctgaaggttggaacat

SEQ ID NO: 260133 - DNA, 122 bp, Homo sapiens
taggaaagcttgtcttctgtaaatgatttttgggtatgaatttgttcagccatctctaagcgttacacatgcctgtacctgtccactggattgaagacagagagaagggagtgaggaaggac

SEQ ID NO: 260134 - DNA, 122 bp, Homo sapiens
gatccaaggagtttactaagaggctttggagcactaacgccatctagtggagtactgggccgaggcattgtgttggacatcgtcagagagggagctggcagtccaggaataaaaacctttcc

SEQ ID NO: 260135 - DNA, 122 bp, Homo sapiens
tctagaaccttctggtgcaggatgggcaagcctgggcggggccacagtcacgtcgtagcacgagcagggtcatggtcatgattggaaatgacagccgccagctccagggtgggccctttgat

SEQ ID NO: 260136 - DNA, 122 bp, Homo sapiens
tttcgcccctgtaggagccgacgggcggccaagggttaggatttgagcggtgtccccaggcgctgtggctcacgactgtaatcccagcgctttgggaggcccaggtgggaggatcgcttgag

SEQ ID NO: 260137 - DNA, 122 bp, Homo sapiens
ttacctttgtcagaacattccccaacataaagagatgatttaaagcctgattgacagccacgaatatggcaaatatcaataacaggggtttaactgttctttaggttttttttttttttact

SEQ ID NO: 260138 - DNA, 122 bp, Homo sapiens
ttatgtaatcctggtgttaaggggtgggcttaaaaagccaattcggtgagtagagggactcgtaccttatacagggtttggcgtctaaagctaacacctaaggcataaattaagcacattta

SEQ ID NO: 260139 - DNA, 122 bp, Homo sapiens
actcaaattccaaagattcagcaactggttaaagagttcttcaatggcaaggaactatcccgcggcataagcccatatgaagctgtagcatatggtgctgctgtccaggctggtgtgctctc

SEQ ID NO: 260140 - DNA, 122 bp, Homo sapiens
acgcgctgaaaatgcgggatccagtgaaggagacaggctccgcaccggccaatcagtgcgcgctgcctgacacctgccaacaagccaggcgccgattggtcgcgccggacatgattgcgccc

SEQ ID NO: 260141 - DNA, 122 bp, Homo sapiens
accccttgcacttcccaggtgaggcaatgcctcgccctgcttcggctcgcgcatggtgcgcgcacccactggccggtgcccactgtctggcactccctactgagatgcacccggtacctcag

SEQ ID NO: 260142 - DNA, 122 bp, Homo sapiens
gtggctctgctgccacctggagggcagagccagaacagctgagtctaaaagcaacccccacgctgggaggttcaggctgtgtgggagaagtcagttttttcaaaaagcttgcctgttttcat

SEQ ID NO: 260143 - DNA, 122 bp, Homo sapiens
agccctgcctccagcgacccccgggatggaacccctcgcccacccacaaaagagcagcctcgacctagacccactttccagggaatgagccctgcgcctgcgcgcaccccgccaccccctcc

SEQ ID NO: 260144 - DNA, 122 bp, Homo sapiens
tgggactggcctttataagaagaaaagagacctgagcaaggatgttaagccctttcaccacgtgatgccctgtgccacctcaggactgtgcagagtccctagcagcaagaaaaccctcacga

SEQ ID NO: 260145 - DNA, 122 bp, Homo sapiens
gcctctgctgatgccgtcgttatcctacccctcccccgtcccagctctacggcggccgcgcgctccaggccggtcgctccaccccccggctcccgggactgtggactccacgaccctgtcct

SEQ ID NO: 260146 - DNA, 122 bp, Homo sapiens
ttaatagtaaacagtgcttactctaggacgggagttgtttccagctttacgtgtaaatctcgcgatattgtggcctgggcactatttccattaaggaggaaactgcacaggataagtcattt

SEQ ID NO: 260147 - DNA, 122 bp, Homo sapiens
tgagacacaaagagttgtgttgacagctgaccctgacacaagcagacagcgagtgaggtgcgccctggccggggagggtgagggagactcgttaaaggaaatccattcccgccgtccctctt

SEQ ID NO: 260148 - DNA, 122 bp, Homo sapiens
tttatgaaaaaacgagccccccacacgccgtcccaaggctcggcgcctctagtgacctgacggtcaatgttcacctccctagtcattagctgtggacgtagaaatagcctttctcccttctt

SEQ ID NO: 260149 - DNA, 122 bp, Homo sapiens
gctgggggcggggagggctgctcagctcccccaggtgactggacccggaggttttcagatcgagcttgcacgggggccacctagataattaaaacaccaaccctaaaacagatctgggtggg

SEQ ID NO: 260150 - DNA, 122 bp, Homo sapiens
caggagtgacaccacagaggggccactgggtagtcagacagacgggggaggctcaggccacggaacagccagaggggtgaaaactcagctcatggggcagacaaacaggggagacttaggtc

SEQ ID NO: 260151 - DNA, 122 bp, Homo sapiens
cactcagacgcacgaggtcccgagctagtgacagctgcaggactgccaaatccgggccgtcgtcatcctcgatttaattggaattggaagttttccctccaggaaactctttcagtgaataa

SEQ ID NO: 260152 - DNA, 122 bp, Homo sapiens
tcccccatacacacgcacacagggccagaaataaattgccacacgagtgcgcgcgagtggcggcgcccagccgcagcctgccagcgccagcgagtgaatgagctgcagcatgaatgagggga

SEQ ID NO: 260153 - DNA, 122 bp, Homo sapiens
cacatccacacacacactggcatacgctcttgcacacacagtctctgtcacatacacaggcgccaagggcttcattttgcttggtttcattccccttaacctctttccccactctacctcca

SEQ ID NO: 260154 - DNA, 122 bp, Homo sapiens
gcacgttctcgctgcagagtgtctgctaaagcgcatttcacaccgtactgtgagctccgtcgctgaacactcggcagccgcggctgcacatggagggtggctgtgcgtttggttccctgcat

SEQ ID NO: 260155 - DNA, 122 bp, Homo sapiens
gcgcccacgtgcagccgccggaaccccggcccgctcccgcccagccccgccgcccccagccgaccacttcctcgccctgcagctccccggcaacccagggcccccagccgtggggcctcggc

SEQ ID NO: 260156 - DNA, 122 bp, Homo sapiens
atggctcctggctcctctctggcccaggcaggggcctgtccctggaccgctccgtcccaccggcccagcaagctcagcagctgcccacttgctcgccagccccttacaccccctcctgaggc

SEQ ID NO: 260157 - DNA, 122 bp, Homo sapiens
agggagtgagtgcgggtcctacagacagggaaatggagagggaagcggggaccagggaggcgtccctcctgcaggtgtctgggcccccacccatgcccgggcctcccaaggatctttagaga

SEQ ID NO: 260158 - DNA, 122 bp, Homo sapiens
gggatagtcacaggtttttaaagccttttgaaagtagatgcatctctatttaatttggttcgacttattcccagactttggagctcagaaagggaaggcaggctggccactaagtccctggt

SEQ ID NO: 260159 - DNA, 122 bp, Homo sapiens
cactggggcgaagcagagccttcaggactgtgaggttgggggcccaaccgaggcagtgggcgcaatacatggaaggcacagagaggggacagacaaggcataggcgagcccagctgtgtctg

SEQ ID NO: 260160 - DNA, 122 bp, Homo sapiens
tggtggggagatgttgacaagacacactttgcgagacgctgccgagtattttatagaaggcgcaactgaggtccagaggtcccaacacctggaggagttgccaatagagtcaagattcgaat

SEQ ID NO: 260161 - DNA, 122 bp, Homo sapiens
cgcgggtcccactgacccacgcggggtggggccaggggtggacgctcgcccgtacgcggtcgctactgatcatgcttgggccagggtccaatcgcaggcgccccacgcagggggagcgaggc

SEQ ID NO: 260162 - DNA, 122 bp, Homo sapiens
aggacttggtgaggacgaaggcggtgagccagctggccagcacgcagagccctgaggccacgccacgggcacgcaggggcaggacctcagacatgagcagccaggtgatgggaccccagccc

SEQ ID NO: 260163 - DNA, 122 bp, Homo sapiens
ggcctcgggctccggctgccctcctggcaagtgtgtgtgcaacagttgcggcctggagatcgtggacaaataccttctcaaggtaggatagggcctcgggtgcgaggcccaaggggagcggg

SEQ ID NO: 260164 - DNA, 122 bp, Homo sapiens
gccagtttcctgtaaatgttgcatgtgacattatacttcctcactgcaccttctttgactcgcctccctaaccggtcagaggcatgtgataagatcaatttgctgcttgcttcacatggggg

SEQ ID NO: 260165 - DNA, 122 bp, Homo sapiens
tgtataaaacttactttgcatgtatttttacatattattaattacaacattcagaaatagcggaagtaaacagattgaatttaggccattgggttgttttggggaccataacatttactttt

SEQ ID NO: 260166 - DNA, 122 bp, Homo sapiens
cgacccggctgccgctccccagcccgttttggagaagcctgggggccgcccgcctacctgcggtagttctcaaaactctctttgaggcgccgccgctccttctcgggcggctccccgctgct

SEQ ID NO: 260167 - DNA, 122 bp, Homo sapiens
ccgcagaggacacggggtctcggagcccgcacaggctgaggggcaggggtccggccgagccgggccgcctcacctgcacttctgtcggcccacaggattaatggcagcaccagcccgagtac

SEQ ID NO: 260168 - DNA, 122 bp, Homo sapiens
gggcaggggttccttctgtcactttaggtatgtaccaggcctctgctgtcagcctccttccgcgagacattccctcctgtcacagcccctccccagggttctcccacctccctacctcctct

SEQ ID NO: 260169 - DNA, 122 bp, Homo sapiens
atccgcgcatgtctctgtgaggcgagagtgggtgggcaagcggggctgcggcggccgcagcgggagggcggggtggtcccgagctcagagccttttcccgactcccacccggctcagccgtc

SEQ ID NO: 260170 - DNA, 122 bp, Homo sapiens
taggtaccccacgaggcacagcctgcatctgattcatctctgtgtatccagtacccagcacgtgtccacacagaggagcagctcagggaaccttcagtggatagatgggtaggtgagtggaa

SEQ ID NO: 260171 - DNA, 122 bp, Homo sapiens
ttgtaatgcaaaaggaggcggagcaacgcgcgccggcgcggggtgcattgtgaggaaatgcgtgcgcaggtgaaaccttcgtcggtctcctgggctccacgctgtgggcaaagccagttaat

SEQ ID NO: 260172 - DNA, 122 bp, Homo sapiens
gcccgagtgccggagtctttcttcaggacaatgcagagatctgcacaaaaggcaggcaggcgggtgaggacaagttaatctctgtgagcctggaggctcttgaaggccttgggggaacgggc

SEQ ID NO: 260173 - DNA, 122 bp, Homo sapiens
catctaatgcaatcaaatcgatctgatctacaccatctgtcgcctgccactatacacaaacgttaaaataggaaaacggaaaacactgacagccgagagggttggtctgcaaagagttcatt

SEQ ID NO: 260174 - DNA, 122 bp, Homo sapiens
gaatcgggccgggggttgggccaggctctgaggtgtgggggattcccccttgccccccgccgtatgagttatgtggggggatggcgtactgtgggcctcaggttggagtggggctagtgccc

SEQ ID NO: 260175 - DNA, 122 bp, Homo sapiens
gcagctgagtcagtgcagttcctcacctaccttctctgctcaccgctgtgtgctagcaatcggaggacccttggcacacggagcgacaggggcctcccccacagacacctcattttgggaaa

SEQ ID NO: 260176 - DNA, 122 bp, Homo sapiens
tccaacttggaaagactgtggagggtgtcaagagtgaatttcagttatatacaaacttggcgtggattaaagctgtggaaagttatgatgaacacccagctaggtgtccagcctgggaaagg

SEQ ID NO: 260177 - DNA, 122 bp, Homo sapiens
tcactatgttgcccaggctggacttgaactcctaggctccaagcaatcctcccacctcagcgtcctgagaagctgggatttttaagtgtgtaccaccatgcctggctccaacaagcatgtac

SEQ ID NO: 260178 - DNA, 122 bp, Homo sapiens
gtgacccatgggaatagcagtgaactgactggatagccgcggcggggccgggggttggggcggaatgcaggaggcctcgagggccggcccgggcggttgcagtcaccgcgcagcggtggaga

SEQ ID NO: 260179 - DNA, 122 bp, Homo sapiens
tccacgctgttttccccgcctgggctacacccacacaaaggagctgtaagttaagctgggcggtcagggctacgtaggtccctttactcacgttgtcaccagaacaggtgtcacggagtgta

SEQ ID NO: 260180 - DNA, 122 bp, Homo sapiens
tggccagacgacttctcggtatataaagcaggcgtttgctttctctccaagtgcagtcagcgcccaggctctagagccacagcgccaacaacagcgcaattgcctaacagcagtttctcagc

SEQ ID NO: 260181 - DNA, 122 bp, Homo sapiens
cggcccagaggccgggagcggtagccgggagaaccaggcgctcgcccggcaatgaggaagcgcccaggccgcggctcacttacctctggcccatcgcgaccggagcgccgccgccgccaccc

SEQ ID NO: 260182 - DNA, 122 bp, Homo sapiens
ttttctcactcttttcttggatgcctgaatggcaggctcccctcctgcagtctcagaggccgacctgcatgtaaaactccaagcggacatcagagtgggttcgtctgttcctgcttggactt

SEQ ID NO: 260183 - DNA, 122 bp, Homo sapiens
cttcccaagatccaccgtctcataagatacctgtgggccctccttcttcagggagtctggcgagggccctgctgggtttgatctcactgcacaaagccagcacataacaggtccttagtgtt

SEQ ID NO: 260184 - DNA, 122 bp, Homo sapiens
tgaccttgagtgagtttcccgagactcagttttttcatctatgaaatgcgggtgatgacgcgcggctgcgagttaggactgcccagtacacgaagaaccctggacaaatgtacttttattag

SEQ ID NO: 260185 - DNA, 122 bp, Homo sapiens
gctgccccgactcacatactcgtccagaaccggcctcagcctctccgcgcagaagtttcccggagccatggccgagtactcctacgtgaagtctaccaagctcgtgctcaagggaaccaaga

SEQ ID NO: 260186 - DNA, 122 bp, Homo sapiens
acacacacaggcaaaatggcacttttctttctgcaaagatcaaattggcctccttgttgccggctcaaagcagctgtttatttgttgttttcgtgttttcaactgttgtgatgaggtttgct

SEQ ID NO: 260187 - DNA, 122 bp, Homo sapiens
gaggaggccggggtggaggggtgggctctggcggcctctgtcgagccctccgctcctatgcgctctgcactcggcgcaccgcccgcacctgccgcggggacctcgccttccattcggcggta

SEQ ID NO: 260188 - DNA, 122 bp, Homo sapiens
ctcgaactcctgacctcgtgatccgtccacctctgcctcccaaactgctgggattacaggcgtgagccaccgcacctggcctagtatacattcttgtagtgactaatatctagtctgggcca

SEQ ID NO: 260189 - DNA, 122 bp, Homo sapiens
gcagggcgcggccggctccaggtcctcaccatccctttgatgccttcagggaagaggaagcggttgtacagcgtgctcacggtgtcgtccgggagcacctcacactccttctgcagcagcag

SEQ ID NO: 260190 - DNA, 122 bp, Homo sapiens
atccgcactgtaaccagcttcaccaggtgtgcacactgacgtttaagaagcgctaagcctcggctcaggcccccgcacagccgtctccccaccacttcctgaggttgacctaaggttatcct

SEQ ID NO: 260191 - DNA, 122 bp, Homo sapiens
ctcaacggacagtgaggagtccacaggagacagactctcagacagaatccagccgcccagcgcccagacgccctttacgcagatgcctctgcggggaagcagcttccgtgctgacatgagca

SEQ ID NO: 260192 - DNA, 122 bp, Homo sapiens
cgcggcgccgcggccattggcccgaggcacgtgtccaggagaccggcctgcgacgtcactcgagggggctctgttaaaaataagaacaaaaatccagagtgaaagtgtctcaggttgcgccg

SEQ ID NO: 260193 - DNA, 122 bp, Homo sapiens
tttggcccacgaggggcgctggaggtggccaggccagagaaattccttccatttctccgccggctgcgggaaccggttccaggagcgcgggagctcgtctgccaggagacccagccgggagg

SEQ ID NO: 260194 - DNA, 122 bp, Homo sapiens
gagctgctacggaggcgggactttccctttttcttgaaccccattgggttaagtccagtccgagacaagcgtctctcctcagcagtgggaggggtgatttggctcatccatacttaggaatt

SEQ ID NO: 260195 - DNA, 122 bp, Homo sapiens
acgccatctcccctgggcgcggccatgttggagaaaactgcactacatttcccatgagcccgcgggacaacgaacagcgctcccacagtcctcttcgcctcccagagcccgggagtgaccct

SEQ ID NO: 260196 - DNA, 122 bp, Homo sapiens
cacacgacaccaggctggatatgagtcactcgcagggagctcagcttggtgaggtcctctcgctgttgtggccttttctcctgcacgttggaccacacacattttcccgtgtcttttcccta

SEQ ID NO: 260197 - DNA, 122 bp, Homo sapiens
ttgagaaacgtggaaaagaaaaacacgaaccgagatacgaagggtgataccgagctcccgcgatgagaagcagcttgcaaggcttccagggcacagcacctgccgcagggacccaggctgca

SEQ ID NO: 260198 - DNA, 122 bp, Homo sapiens
tcccggggctcctccgctagtgagggcagccggggaggcccccctccccgcccaccgccccggcagagcctccaggagcagctgaacggggtcatgcccatcgccatgagcatcaaggcagg

SEQ ID NO: 260199 - DNA, 122 bp, Homo sapiens
tggatgcgccggcactcctggcagacgcgcacgtgggtgcagggggtgggggcggcgggtcgggctccgctggggggccccgggtcgtccaggaggcgctgcgggcccccgtgcgcgctgcc

SEQ ID NO: 260200 - DNA, 122 bp, Homo sapiens
gcgggccctagaggggcagacacctcagcaggcaggtgctcaggttgataaacaactgaacgtccggtgactggtacaaagtccagagttgaagagggagctttgcaggcctgtaagggtgg

SEQ ID NO: 260201 - DNA, 122 bp, Homo sapiens
tgcctcgtccccctccgccatcttgtaccgatttaaaattaactccccactgacgtcaaacgccgccgccgctttatcaacctcccgggagccggcggggtggccggcgggtcctagcgccg

SEQ ID NO: 260202 - DNA, 122 bp, Homo sapiens
caatcagcttcagcaatggagcgtgcaaaacaccagtgagcttctgtcttgctggagggtcggctttgggcggaactggctttgttgaccgggagaaacgagatgggggtgaagctggagat

SEQ ID NO: 260203 - DNA, 122 bp, Homo sapiens
ccgcatgtcagggctggtttgaggtttttgcagaacaaacggcgtccttgtggtgcgggccggcgccgcctattggcgacgaggggcactacatctccgggcaccccgaagtccccaccccc

SEQ ID NO: 260204 - DNA, 122 bp, Homo sapiens
caggaagaaagaaaattaattttcgcccgtctgtgtgtagggagcatttcagtggaaacccggtttgaaatgcatgttctgttgatttcggcagcctgcgccggctggggttttgagatgca

SEQ ID NO: 260205 - DNA, 122 bp, Homo sapiens
gcagctgcaactgtgcccgggaacgtggggctcctgcctgctcctggcccccataggctccgtgaagtgacagccccagcagcacctcctccacactgcagccggcatcatggtagtggcca

SEQ ID NO: 260206 - DNA, 122 bp, Homo sapiens
cagaagataaacccctccctgagccaggctgtggccagaggctaacccggcccctggcttcgtttggagggcagataactgaaaccacataaggctttggaatcctgagaaacaagaaatcc

SEQ ID NO: 260207 - DNA, 122 bp, Homo sapiens
tacatctgattcacttgcacgcattaccaagtgatccatatacacgagtgtgaacacatacgcatttctgtgtggtagtaagcacaactaagtgtgagcaccacattctcagacatagctct

SEQ ID NO: 260208 - DNA, 122 bp, Homo sapiens
ccacagtccaaaaatattaaatgaaaaattccagaaacaattcataggttttaaaatgtgcgctgttctgagtagatgatgaaatctcactccattctgcttgggatgtaaaaccttttgcc

SEQ ID NO: 260209 - DNA, 122 bp, Homo sapiens
gcatgcacagggtgcgagctggatggggtctcacattcatccacttcttgtcattcaggacgaggtagctgccttcttcgtggctgacctgggtgccatagtgaggaagcacttttgctttc

SEQ ID NO: 260210 - DNA, 122 bp, Homo sapiens
cgtaccgcagttggggaaagtgaggagtcattcgccagagtcaacagacgtgcatggcggcgctgtgctcaagcctgggcggtctggaaccctgatgcaccctgcaaagctccagggcctgg

SEQ ID NO: 260211 - DNA, 122 bp, Homo sapiens
aggctgacggggcaagggcgggtggcacgggtgtgcagtaaggctggtggcagcgagatccgaggcggctgagctggacaaaagacacattcacttaaacaaagtggcaggactcacagcac

SEQ ID NO: 260212 - DNA, 122 bp, Homo sapiens
ctcagcctgttggtttctcctcattgcctcaaaccctggggtaggtgggacggggggtctcgtgcccagatgaaaccatttggaaactcggcagcagagtttgtccaaatgacccttttcag

SEQ ID NO: 260213 - DNA, 122 bp, Homo sapiens
ctcggacggtgtgtcccccactgcactcctgaacttggaggacagggtcgccgcgagggacgcaggtgggtgcccttgatccagctcagcccgatggcagaagaggttgacaaaaaagaaag

SEQ ID NO: 260214 - DNA, 122 bp, Homo sapiens
cgaactgggatggcacttttcggagtgtgccggggtgccccaaggccaccttcactggagcggagtcggggtcacgcggacgcctctgcaggatgctcggacactgcgccacggcctcaccc

SEQ ID NO: 260215 - DNA, 122 bp, Homo sapiens
taaattagtcatttttacctttttcaggtgagaggggccagtgtatcctttctactccaccgaaaattctattctgtgacctgaggcttgatcctggagagtccaaatcatgtgagtgattg

SEQ ID NO: 260216 - DNA, 122 bp, Homo sapiens
cacccccattgcccagccacccaggtgagaggctgtcgggaaagctgctcaggcgaagcgcgaccagctcagaacgactctccaaccactgctctcaggcacgggagggaaggcctgggcgg

SEQ ID NO: 260217 - DNA, 122 bp, Homo sapiens
ggaagcacttggttttctccttcctgatatagtcacctgttggaagtgttaaaatttcctcgacaggccttaaatttactactacattagggtaccacattttaacttaccatgactttgct

SEQ ID NO: 260218 - DNA, 122 bp, Homo sapiens
ttagcaaggtctgtcctgggacatgcgtcctccgcagggcccatgtcactgccgctagcccgggaggcccctgccgactgcacctatcctgtgctgtctttaattttgatagattgtgctta

SEQ ID NO: 260219 - DNA, 122 bp, Homo sapiens
ctccaggattcggtggtgccacagacagttactgaacgccaattttgtgcctgctttaagcgaacaggacagttcctgaccctcagttctttccaggctcttcactactctgcctgccctgg

SEQ ID NO: 260220 - DNA, 122 bp, Homo sapiens
tccccgtgcccacattcctgggagcggcactcagtggcagcagtaagatccaggccacctcgcggtcggttcccaggatgcccctctgcctgctcctggggagatcacgggaaacgaagggc

SEQ ID NO: 260221 - DNA, 122 bp, Homo sapiens
gcgggttgcggggcctgggggccggacggctgtttcctgtcctggtgcatggtggtcggacgaaggaattgttggaaaattttctcggaggttcgtatataaatgtgtttttacccagtgtg

SEQ ID NO: 260222 - DNA, 122 bp, Homo sapiens
agatgccttctactgtttacacagagcccgacctccctggcggacagccaccgctagccccgtgccttctgctggttgggtccgcagggacaaaactgagcttttgttaatgaggtcggttg

SEQ ID NO: 260223 - DNA, 122 bp, Homo sapiens
actgtccaggagaggcccacagagttgggggtcacatctgtcactgtcagctctcctaggcgtggctccagcggggactcagtggctggaggggtctcttcttgttgtggggctgggacaga

SEQ ID NO: 260224 - DNA, 122 bp, Homo sapiens
gccccacacgacgacctcgtcgaaacctcctacttcctgaattcgataaccccagagattcgttttccgcaggcaatcttaccttcatgatgactctgggaccaaggtatcctctaaaacac

SEQ ID NO: 260225 - DNA, 122 bp, Homo sapiens
cagaaatgatgctagtgacacagagaagggaagagagactggtttgctgctagatgcagccgttgttctccaaggttcccaaacaaaggcaagaggtacagggacgtgggatttcctaatcc

SEQ ID NO: 260226 - DNA, 122 bp, Homo sapiens
ctgtacccccgctggtggaggtgatgcgaggaaagtctgtcattctggactgcacccctacgggaacccacgaccattatatgctggaatggttccttgtgagtgcttggggctggggggcc

SEQ ID NO: 260227 - DNA, 122 bp, Homo sapiens
aggtcggagaagacatggatcgcagtgagagagaggcccttggagtcagcaaacacaacgcgcttcttggcttggttgtgtgagcacttccagtcattctgtgatttggctttgtgttttat

SEQ ID NO: 260228 - DNA, 122 bp, Homo sapiens
gcttctccacttctcttacccgtggtttctgcctgcgctcactacgggttttttagttggcgccttaatgtttgtaacacttttagagcgcttgctctgatccgggcacgattccaggcgcg

SEQ ID NO: 260229 - DNA, 122 bp, Homo sapiens
caaggaaaatttatgggagaaaacagaaccttctgtttcttggcttagtttttttcagcacgttttataaaatgctgtcatttttaacactttgtggccaatttcagcaagcaagcatagaa

SEQ ID NO: 260230 - DNA, 122 bp, Homo sapiens
gggcctgaaggggcagcaggagggagggtgattcctgcctcctctcccttctcgctcagccggcctcattgaagttgcagcgctgggactttgatcatcagagggcattgatttaggggatg

SEQ ID NO: 260231 - DNA, 122 bp, Homo sapiens
gtggggtacgaccatgttgcattttcaggatgctttagtggaaatcaaaagcatgggatgcgaatgcaaaaccaaagggcttaggttctgcatctgacatatgtggctagctgtatgttcct

SEQ ID NO: 260232 - DNA, 122 bp, Homo sapiens
cggggccacttggggcgggctttgatttggggacagcagtcgctggcagcggagaggccccgcgggccccgagccgggccggggccggagcccgggcggttacctgggagcggagggcgggg

SEQ ID NO: 260233 - DNA, 122 bp, Homo sapiens
agagctcctgcacctgtctcaggtgcccgtggcattcatcagcaaactctgccattttagcgcattgagaccattagtgtctggaacgctttcccttctgtccacctggaagcatcatcgac

SEQ ID NO: 260234 - DNA, 122 bp, Homo sapiens
acctcaggtgatcctcccacctcggcctcccaaagtgctgggattataggcatgagccaccgcgcccggccaagtcaagtgctatttctttacggcactaaagaacaagcatttcaaacagt

SEQ ID NO: 260235 - DNA, 122 bp, Homo sapiens
cagcgactgctgctgcctccccctctcccagctctccagggcgacagtgtttccctgcttcggtcctgaaggggctcctggagaccatcttttgtgcaagtaaatgtcgtccctactaggtg

SEQ ID NO: 260236 - DNA, 122 bp, Homo sapiens
gtccagcaaaaaccaaaaatggaattaggacagacagatcacctgctggtctctaacaaacgtactgtgttggcatgatgccgacacaccaggtatgaatcccagctctgctcctcggttct

SEQ ID NO: 260237 - DNA, 122 bp, Homo sapiens
cctggggctcagcctgcgcggtggttggcagttgccccggaagtgggcgggaaggacctgcgcatgctctgtgaccctgggtgcagggattgtgtgaagattgagagctgggggcgccctct

SEQ ID NO: 260238 - DNA, 122 bp, Homo sapiens
cctgggatggggaggggtagggcctctcaccttgatggtgtccagggccaactcaacaaccgcgcactgctttggggtcaagctcttggcttcttctcgtaccatgtgatcctggatggatg

SEQ ID NO: 260239 - DNA, 122 bp, Homo sapiens
aagactacatattgtatgattttgttcatatgaaatttccagaataagcaaatccatagacggaaagtagattagtggtcgccaggtgatgccaggggtcagaatcagtagtgactgctaac

SEQ ID NO: 260240 - DNA, 122 bp, Homo sapiens
gtgatccaggcgcccaaaggtggccaaaaggtgagcggtccccagccctcggcgcagctgcggcccttctgcaggctgctgccagtccaggtcttctggccccaagaaagtgacttctaacc

SEQ ID NO: 260241 - DNA, 122 bp, Homo sapiens
atgaaccgcgtgccttcaggacagggcggagacggaggaggaaaggagtgtggtgatcctcggaacatcagcagacaggctgttgatgataggaacacattgcagcggggaaggaggatggc

SEQ ID NO: 260242 - DNA, 122 bp, Homo sapiens
ctaggcctcccggggatgccagactcctggggacgctgggacccgcggcgcggcgggacacgcaggactcccgcctctccgcccggaattcgttgagacggaatctcagcggatcccgcgtc

SEQ ID NO: 260243 - DNA, 122 bp, Homo sapiens
ctcaggtgatccaccctccttggcctctcaaagtgctgcgattacaggtatgagccaccgcgcctggccccaagtccttaactaccaagcctggccacctctaaaaggaaggatatcaggtc

SEQ ID NO: 260244 - DNA, 122 bp, Homo sapiens
atgccctcttccccagcgtggccccacaggacttctggaggtcccaggtcacgggctactcggggtccgtgacacgacacctcagtcaccgggccaacaacttcaaacgacaccccaagagg

SEQ ID NO: 260245 - DNA, 122 bp, Homo sapiens
cgacacccagttgatgcggtcggcagagcgagactggcggagggcaaaggcctgcaggcgcgactgaggcaggaggatgcggaacacggggacatcgtgtgtctactgggaaagaagtgtga

SEQ ID NO: 260246 - DNA, 122 bp, Homo sapiens
ctttgacattttagaatcattcaattcaatccaacagatgcatggagggctttgcctcatcgaaagcctgtccttggcaatatacagggtgcagaaatgaaggagatccctcccctcatgga

SEQ ID NO: 260247 - DNA, 122 bp, Homo sapiens
cgctatccttttctaaacactagaaacccacagccaactgaagaaataaacagttgggttcgcatgtttgtattcagtgtatcccctgtgttgtaggttctgtgcagcatacggtttcagtg

SEQ ID NO: 260248 - DNA, 122 bp, Homo sapiens
agaattgcttgaacccaggaggcggaggttgaagtgagccgagctcgcaccactgcactccggactgggcgacagagtgagactccatagacagatagatagatagatagatagatagatag

SEQ ID NO: 260249 - DNA, 122 bp, Homo sapiens
attcgggtaggaaagtgggcagccatgagcatcattcacaaacagggctagttttccattcggggagagggggatcctgcaggaagaactacccttctctcatcctctggttagaagtgact

SEQ ID NO: 260250 - DNA, 122 bp, Homo sapiens
tgggagacgtgagggagcacggggaggtgcccaactccatcttatgggaacgtgagggagcgcggggacgtgcacacctccttcttttgagaggcatgagggagttcggggaggtgcccaac

SEQ ID NO: 260251 - DNA, 122 bp, Homo sapiens
ttcccatctgctgttcagggtccactcataaacatcagcagacaggtaaagaataccacacggccaagaaaaacctctatcatgaaaaatgagaaaatcaaaaaacaaaaacaaaaacctcc

SEQ ID NO: 260252 - DNA, 122 bp, Homo sapiens
acacatgtattgattgctgtctctgtagatgaacagtaccttgctaaagacatgcagaagcgatcagggctataaatgccttagatcatacagtgtgatattcacagcacatacctaagtca

SEQ ID NO: 260253 - DNA, 122 bp, Homo sapiens
caagaaagttaaacaaaaaatacaagcaggtactcagtgaggacctgagggattctcccacgagtaaaatacatctattttcacacaaggttcttttggtcaacttctgggttttgctctta

SEQ ID NO: 260254 - DNA, 122 bp, Homo sapiens
ctctgcagggacttgtcgctgatcaaggtgattgacgtgggccggaggttcctggtgaaccgggtgcaggaccacatccagagccgcatcgtgtactacctgatgaacatccacgtgcagcc

SEQ ID NO: 260255 - DNA, 122 bp, Homo sapiens
gtaatttacaaggaaaagaaatttatttattatagctcttgaggctaggaagtccaaggccgagcggctcacatctggtgagggcctttgtgctgcatcatccgatgatggaaggtggaaag

SEQ ID NO: 260256 - DNA, 122 bp, Homo sapiens
agatggtcgagaaagttgataagggaaattcggagcaggcaacagtcttcagctttccagcggacggccaggatcctgccgctcactgtgagatccttcccaaccaccctttggtggggttc

SEQ ID NO: 260257 - DNA, 122 bp, Homo sapiens
gtgtgaatgctgtattggcacagggaataaatatcctggcgtctggagccttcacctctccgtcaagtccttcctgtgatactgccatggcacaggatctgagttgcagctctgcaccctaa

SEQ ID NO: 260258 - DNA, 122 bp, Homo sapiens
cccacgtctcagggtaaggctggttgggggctgctgtgagggtttggaggcaccctgagccgggaccagcccatttcaggtgggacttgtggcataggagaggtcttgggactggtgcccag

SEQ ID NO: 260259 - DNA, 122 bp, Homo sapiens
gcccaatggcacacagcttgtaagtaatggggactaagtcccaatcttgcccccttacttcggattctgtgctgggaatggaattaaaccaagagtattttgaagctataatggaaagcgct

SEQ ID NO: 260260 - DNA, 122 bp, Homo sapiens
atggatgggattttgtccttcagttgtcaggcaaggatggcgcaccgtggcccagcagtccgcgtggttttgtccagccagcgaggtatcccttgcactgtgtcctggcaggagaaccctct

SEQ ID NO: 260261 - DNA, 122 bp, Homo sapiens
gtttctgtttctgcttttgtgaacctacccacttggcattgctgccaggcacattgagaacgtctggctgcgggagcatgttaaatgtctgccccatgctttgtgcatcaactagagtcaca

SEQ ID NO: 260262 - DNA, 122 bp, Homo sapiens
gtaaggttttaccccagcagagtgaaacaaagtcagggttaggaacttgggctttcaagtcgacagggctgtgttgaaatcctggtctgtggggcagtgcagaggggcgggtgcattttaat

SEQ ID NO: 260263 - DNA, 122 bp, Homo sapiens
cgtgagccatgcatggcgcctggccttcgctttctttttctatgtcctctccttcactatcgtcttcataataaaagatgtctcgaaatgggaaaacttgcttgggtgctgcaggagtctgg

SEQ ID NO: 260264 - DNA, 122 bp, Homo sapiens
tgtcgctgggcagcgagaggcagaggcaggttccccgagggaagcatgggccccttctcccggccacggttgccccagcaggagttcatctttgcagccccagagccagggtgatgtgggca

SEQ ID NO: 260265 - DNA, 122 bp, Homo sapiens
ccggcgcctgcgtacctgcagccggtgctagggagccgtgggctgcaaggccgggtcttgcgcctccctccactcccacccaggaagaaggttccagacctcctcgccttggcccagagacg

SEQ ID NO: 260266 - DNA, 122 bp, Homo sapiens
cttaggtccctatgccggcgcggggttacagcagtggacagacaggccagtccctgtcctcgaggagcccatgatccgcggggagacaggcatttaacgacgactcacacgatcacttaaat

SEQ ID NO: 260267 - DNA, 122 bp, Homo sapiens
ttttcatgaatcccctaaaactgtgcaaagctgcgttctatgtgtatgcatgtgttgttccggtgagggagttctgaagtcaatgctatagttagattaccaaagacgtctgtgattccaga

SEQ ID NO: 260268 - DNA, 122 bp, Homo sapiens
accctcctggctgtgcctcatgctcccggggactcatctctaacacggccccgtcccacccgggacatcgtcctgcacttctgacgtggccatccagggcctggcccagcctctgcaaacca

SEQ ID NO: 260269 - DNA, 122 bp, Homo sapiens
ggggaggggcggcgggaggaagcggcgggagtcgggactgcggcggagccgctcccacagcgccctctaatgaaagcgccgccgccgctgcctggcccgcttgccccgcctggcccgctccc

SEQ ID NO: 260270 - DNA, 122 bp, Homo sapiens
aaggaaggaaggagtcctagccacttctttctcctgatgcagattccctaggaagttgaacgaagaaggaaggaaggaagaaaggagagaaaggaggaaggaaaatgaatctcattcatttt

SEQ ID NO: 260271 - DNA, 122 bp, Homo sapiens
ggtatagacataaaatgggataaatcaataaatcaagtaggcctgcactctgcatctcaacgcatgtgttaattacaaattgtggtgataataaacagaactgtcaaaactattactgatgg

SEQ ID NO: 260272 - DNA, 122 bp, Homo sapiens
ctcccaaagtgctgggattacaggcttaatcccagagccacaatacaaagccaccatgcccggcctctgaattttttttttttttaatttttcttatttattttgagacaggttcttgttct

SEQ ID NO: 260273 - DNA, 122 bp, Homo sapiens
aaccattctgtggcctgagctggccagacgtcatgccccgaaggagctaccaggtgtgggcgctgcaggacccctgcctggggccgcccgctcgggcccgtgttgtctcaggcagtagggac

SEQ ID NO: 260274 - DNA, 122 bp, Homo sapiens
agcattaaaaacacaagcccagaggcagccagccatgctctgctgctcctactcccttcccgggacctgtccctgatgtcataactgggtaactatgacagcttgtcatggggacagctagg

SEQ ID NO: 260275 - DNA, 122 bp, Homo sapiens
ccctcacccctctgcctcctggctcctgagagccagcactgtggctggagctcagtcccccgcagcacgggtggagaaggagtctgagggtctccccacccactgctgccaggctctggcca

SEQ ID NO: 260276 - DNA, 122 bp, Homo sapiens
aacaagttggacgtgaatgctgaggcagctgagatcgccctgcaggaggccacagagtcccggctacgaggcctagaccagcagctggatgatctacagaccaagtttgctcgcctcctggc

SEQ ID NO: 260277 - DNA, 122 bp, Homo sapiens
tccaaatacatgtaaagcatttgaatttatgtagtgtgtgctacaatccctcttcatttccgtaactctttccctttacagccccttcccttcccccaatcagtaacccttgacaacagaag

SEQ ID NO: 260278 - DNA, 122 bp, Homo sapiens
gcgggggtgggcgtgcgtggggatcccttgaaggcagcctcggaaaccccacggagcctgcgctgcctgggccctgtgtgagtccaggctgttgtttcacttctggttttaagatactttcc

SEQ ID NO: 260279 - DNA, 122 bp, Homo sapiens
aggctgggttcaccgggaagcatgggcctgcttgttggagcgggtagatgcacagcctggcgttattctggcctcagagcctggagctgccggacgtagacttacctcgcgtgcttcggcca

SEQ ID NO: 260280 - DNA, 122 bp, Homo sapiens
agacagatatggtgattacacccatgaggcagttatcacatcaccttacgtgaaagttaacgtcataggcttaatctggaacccatttgccctaattgaggactccacaggaaagaagagta

SEQ ID NO: 260281 - DNA, 122 bp, Homo sapiens
tcccagtgtcaccggactccagccttgccttgctaccatggaatgcccaggacagagctccgcaaggcagagtggcatggcccccaaagccgggttttaaaaccagttcctgcgtagagccc

SEQ ID NO: 260282 - DNA, 122 bp, Homo sapiens
cgggtgggagttctctggtgtggggcagtcgcccatctcacgtggggtccttgtacggctcgcacgccctctctggctcggtccacctggcgcggctcctgcagacccagcagggtccgtgc

SEQ ID NO: 260283 - DNA, 122 bp, Homo sapiens
gagttgccggtgaggcaggccccaggccctcatcagcgcttccataaagcactgaggttccggtcagtggtcagtgcgtggagctgcagacgctccccaaggccggcagtgaaccgccctgg

SEQ ID NO: 260284 - DNA, 122 bp, Homo sapiens
gctgcacttgctgggggagtgtttacggagtgcgcctgtgtgtgagtgcgagcccacgtgcgtgtgtgtgagcctgtgtgtgtgcacgcactcaagtgagcaggggcgggcgctaggagggc

SEQ ID NO: 260285 - DNA, 122 bp, Homo sapiens
agctaactggcaagagacgtgacggttaaggttgattcacgcttgtgcacagtttggttgcgcagtagaaagcaaaggaggggcagacgctcacattcgtggttacccgggaagggttaagt

SEQ ID NO: 260286 - DNA, 122 bp, Homo sapiens
aatgagtggctgatgtgagactggactcttctgggaagccgggaggagaactgaagccagcgggctgcgaaaccacaccttctgggcggaggccaccccggccccacgacctgcccaggcag

SEQ ID NO: 260287 - DNA, 122 bp, Homo sapiens
gggggactgggaccgacgtgacgtttgcagtgatggttggtacaggggtggcagcgatgacgggcgtctgggagacggtggggggcacgctctgaaagggggtcgctggggagacagaggac

SEQ ID NO: 260288 - DNA, 122 bp, Homo sapiens
aactaggataattattatgcaaagcatacccacccagaatgtttgcatagctatcacaagcgctttcataaatgatgctttaattagtcttaattagaatttgtttaagtcagcagggaatg

SEQ ID NO: 260289 - DNA, 122 bp, Homo sapiens
gaacctgcccttgttggaacaagccatccgggagcagagactgtacaagcaggagcggggcggcagccagtaggaaacagcagcctagcaacaccctcacctgcttcagagcccgaaccctc

SEQ ID NO: 260290 - DNA, 122 bp, Homo sapiens
atttcactgcttccgaatcagctccagccacccccggcgtgacgcagccgagcagctgcccggccatgcccacccgtccctgcccctgactctgccgtagctgatttgggggaggcaggggg

SEQ ID NO: 260291 - DNA, 122 bp, Homo sapiens
ccctgtggacacggccagagctcccgctccgggtgacgggcggcctgtaaaatcggcctgcgacagaccacaggctggacccctccctgcccggacaggatggcaccagacacccgcccacc

SEQ ID NO: 260292 - DNA, 122 bp, Homo sapiens
ctggggcctctcttcttggagtacaggtgaatatgcttcctggaaagattcactgacacccggaggcttagaggagggcagggcgggcccgggcaatctggggaagtctatggcattcagtc

SEQ ID NO: 260293 - DNA, 122 bp, Homo sapiens
ggcctgggtaacaaaatgcttgtgtcttgattcttggaagtgggggcggcgctgggggcccgaactcctggttccaggggaggaagaggcttgggacagacattatgcattatccagccctc

SEQ ID NO: 260294 - DNA, 122 bp, Homo sapiens
tggcattgtgtaggggagcgcggagctgcatttgtctgctccaggtgctagccaggcaggcgcagccgtggccggctagggctggaagtgtcagcggcggccgcgggcccggcagaaggccg

SEQ ID NO: 260295 - DNA, 122 bp, Homo sapiens
aaggatggaataaatgctttaatatatgcaaagcactggcagcaggcctggcctatcattcgtgctcaataaacattagcttttgttagagttattattaaatcattccaccaagagtggca

SEQ ID NO: 260296 - DNA, 122 bp, Homo sapiens
tttcacgtcatggccattctgacaaaacagcaggtttccttcgctcatgagtgcagtgagcggttcctggatgctgaccgtgtggagcactttgtacctcgtgggggtgtaaagaagcctgg

SEQ ID NO: 260297 - DNA, 122 bp, Homo sapiens
aagaactcaggttcggttttaatgccaaacatgatcggggcaagtttagaataatctgcacggttacaagtagcaacacaaacccgcagctttcggttatttccattcttctccatgatttg

SEQ ID NO: 260298 - DNA, 122 bp, Homo sapiens
gtgagtcttgctattagttaactagagcgaagttaggggacgcctttctggttctcctctcgttttaagaagtctccaggaagtaagccaagagctaggagagaccaggtttccccagcccc

SEQ ID NO: 260299 - DNA, 122 bp, Homo sapiens
tgagatgtaaaaggactcctgaaaactacatttcccatgatgcccgtctccccacgcaaccgcggccgcgacgtcgctcccatggcaacccagaaggcctcactcccagactccttgcggag

SEQ ID NO: 260300 - DNA, 122 bp, Homo sapiens
ggtgcatgggggctgcccagccacgtgcaagtttctgtggggggatccagaggaggcacccggctgagcaggagatgggaattgaaacctgcgcagaggcggctgtgcagggtgagagtgga

SEQ ID NO: 260301 - DNA, 122 bp, Homo sapiens
ctggctcctcccgcctgcctctgccaatccgggcactgggacagaggtcggtgttgaacgcgcgggccccagggggagggaggggaccaacgggctccggcgctgacaccgcggcactcatg

SEQ ID NO: 260302 - DNA, 122 bp, Homo sapiens
ggttggaaactccgagactgatgcaaccaagaacactaggctctctctccccccagctcgcggtcagagcactatctttccaggtagggcaggatgtcagcatttctcaccctgccctcagc

SEQ ID NO: 260303 - DNA, 122 bp, Homo sapiens
gcgccgcccggcgccccaacttttgcctgcgtccgccgggccggcggcggcgggggcgcgcggtgcggccgagggtcacttcctcgcatgtaaatggctttttgttgtgctgccggcgtggg

SEQ ID NO: 260304 - DNA, 122 bp, Homo sapiens
cgggggcgggcgccggtaggggccggacagggtagggcccggagggcggtggcggcggagcgggcggcatgggtcctggccgccggcttcgctgagacgcgctcgcgtgggctgccctcccg

SEQ ID NO: 260305 - DNA, 122 bp, Homo sapiens
ccgctcatgctgaccgaatgtcccgcgtgcaaaggcctggtccgccttggtgaaaaggagcgccacctggagcacgagtgcccggagagaagcctgagctgccggcattgccgggcaccctg

SEQ ID NO: 260306 - DNA, 122 bp, Homo sapiens
ctaggtcccccaggttccatgatccttttcccagaatacccctccccaatctgcatggctcggtccctcccttctctgaagtattgttcaaatgtcatcttctcactgatatcatttctcaa

SEQ ID NO: 260307 - DNA, 122 bp, Homo sapiens
gtagcggccctccagcgtgcagttccagcgctcaaagcggaactggaactggcactcgagcgcactcatgctcacggcctccaccagcgtctctgccacgcccgggtcccggcggcacatgc

SEQ ID NO: 260308 - DNA, 122 bp, Homo sapiens
cctaggactggttcctgggaaagcgccagcgtccagggagagatttccttctccaagggccggcagggtggcattccaagcgcgagcaaggtgggcagtgagcgatcctccctttaaaaaag

SEQ ID NO: 260309 - DNA, 122 bp, Homo sapiens
aaggtgaagcaatttacaaaaaaaaaaaaaattctacacttttcagaagcatatccattacggaaagggaattgtaactgcacatgaaattagggaacttaaaaatccacccaaaataaata

SEQ ID NO: 260310 - DNA, 122 bp, Homo sapiens
tagccacatatgattaacggctacggagctgggtggacgggacagtgatgtgtggctgagcggagagggctgcaaagggggtctcagataggggtctgaccctggaagtcttctcttggccc

SEQ ID NO: 260311 - DNA, 122 bp, Homo sapiens
tcctcttctccaaactgcaccttacccctgccccagtcaccgcggtgggggagagggggtcggaacttggatcaagcctcacccaccttagagactcaggtttcgagttttagcagatctgg

SEQ ID NO: 260312 - DNA, 122 bp, Homo sapiens
gcggaaggtgaaggacaggctgaaggcctatgtgcgtgacccatacgcactggacctcatcgacaagctgctggtgctggaccctgcccagcgcatcgacagcgatgacgccctcaaccacg

SEQ ID NO: 260313 - DNA, 122 bp, Homo sapiens
aggctgggggtgggtcctctccacagggcatgcagactttgagtccagcctcagataggccgatggggggaatggggaggggaagaagccacagggtcccctctagaacttggggaaagtta

SEQ ID NO: 260314 - DNA, 122 bp, Homo sapiens
gtcagaacttctgtaagtgagccgaggcacaggcagcatgaaaacagtcctggcgggcatcgacaggcccgggccgaagaacttctgctttacacccttccagttaacaacatatcccttat

SEQ ID NO: 260315 - DNA, 122 bp, Homo sapiens
tcccaacttctctccaaatgccttttgacatctggcaacatttcatgcctcttcccctttcggttttcatccttgttttctctcccttctcccacgacctcggtagtcttctgcaatccaga

SEQ ID NO: 260316 - DNA, 122 bp, Homo sapiens
gctgcgtcgacactctcggtgtcctgcgccccggacctgggctggcggaggctctcctgccgtccagtgcgtctcacgcgttctgttctggctttagaccgaaccgtacgttcccttttcag

SEQ ID NO: 260317 - DNA, 122 bp, Homo sapiens
ccggcgctcgcgcggttccttctgggaattgtggtctcagacgttccattcccagggtggcgccgctcggactccgcgtcccagcattccccgcacgagcccgggagcacttccgccctgtt

SEQ ID NO: 260318 - DNA, 122 bp, Homo sapiens
aatcacgtcaatttgaacacacacatctttgcttcattattcaaagagaaaccataattacgatcagaacctcagattttgctctaggagcataccaggttcatgccttccaacctctgtat

SEQ ID NO: 260319 - DNA, 122 bp, Homo sapiens
cactttaaataggccatgtctggagattctgaagtcccttatgtaagtaggatgtgagctcgggggaacttcttcagcttcactctggtgctgattccagcatctgcagctcttgaccccgt

SEQ ID NO: 260320 - DNA, 122 bp, Homo sapiens
tccttgtgtctccccactcaaaactcccatgccaggaacagagggtctgttgggctaactcgggcccagtggggtcagccagcctcaaccatatgagttgagagtacaggggagatctccca

SEQ ID NO: 260321 - DNA, 122 bp, Homo sapiens
cgtgattccaggatcgagaagaagcaacaggcccctgcctgggcctattattgtcatcagcgtccagccctgctggaagcagagggaggggtatcaataaataatgaacacatttaaaattc

SEQ ID NO: 260322 - DNA, 122 bp, Homo sapiens
gcggcgcagcgggaggggtccgcggaagccccgcccacctgcccctcccaccccgaagctcgcccggccccgccccctgccccgccccgtcacaaggccccgctgcgtcttccgagccgcag

SEQ ID NO: 260323 - DNA, 122 bp, Homo sapiens
tacatgaaaaaaaaaaaaaatccaaacgaacctcaaacctctgtccaaggtggagggtatcggggaggacaggacagtgagtcatcagagggacaggcagactccatgtggtttgctgtgac

SEQ ID NO: 260324 - DNA, 122 bp, Homo sapiens
tcccccgaagggcttctctccagggtaaaccattgtgtccagcacaggacagagtgggcacgcagacacgcaggcacgctgacaatgcgcatcccggctctcctcccttccaagaaaaggag

SEQ ID NO: 260325 - DNA, 122 bp, Homo sapiens
cactatacaccgaggacagtcagtgggcccggcaccaaagcaaggtggtgttggagacctcgatgttgacgacagggtcccagggagaagcgaggcaccggacacccgggcgagtagaaggc

SEQ ID NO: 260326 - DNA, 122 bp, Homo sapiens
aggccggggaaaaggtggccgcacgctggcttttctcaaggcagccggccctcttggcgtcgtgcttgatttcatgggtgtttaattcgtgctttgtgggcgctggctccccctccccaccc

SEQ ID NO: 260327 - DNA, 122 bp, Homo sapiens
gccagccatgagaacccctcaagtacagttgaactcgctgggaggttactgctgtactcccggggttttgctatggcctgactggggccaatgtgtggagggtgaaggaggatggggaggca

SEQ ID NO: 260328 - DNA, 122 bp, Homo sapiens
gggcctttgtgagcccacgtgtatgtggcagcaggtgagtgtgcatcttacgagtgtgtgcgtgcatacgctgtggtcagaagcactcttgtgtgaatatctgtggtgtgtgtctttgcttg

SEQ ID NO: 260329 - DNA, 122 bp, Homo sapiens
aagcagaatcagctggcgttttctgtttttttccagtgctaccggtaaaagaaccaccaccgcagcttctaccaggaggagatcggcttcagccacacacggggacgcctcctccccaccct

SEQ ID NO: 260330 - DNA, 122 bp, Homo sapiens
cccacggcccctccgaggtggagcacggagctcgccagcgtcttgggaagctgccgcaggcgcttcttccttctcggcaggaagatggcgcccggctctgcagtggccctgcctcccctcgc

SEQ ID NO: 260331 - DNA, 122 bp, Homo sapiens
agtggcttttgcaaggcgggggcctgtttgcagagagccgggcatttgcatgaagcgactcgaccccacagagcagcggcagcagcagcggaccccggcggcggcggcggcgcgcggtccca

SEQ ID NO: 260332 - DNA, 122 bp, Homo sapiens
gcagggccatgcctcctaccgctctgcctggggatgaggatgctctccgtgctgagtccacgggctcctgcagctttctcaaagtcctccaaggcttccaggttgttctcggggtctctgcc

SEQ ID NO: 260333 - DNA, 122 bp, Homo sapiens
cctcaggtcacgcaggacggagccagctgggtgggtcccaccaactcggcatgaatgagacgacggatgaaccgcagccccagcatcaggaggggcgcctgtgtcaacacccacgtgggctg

SEQ ID NO: 260334 - DNA, 122 bp, Homo sapiens
acactcagtgctaaccagggggagtctggctgtgaggtcgtcagcacatggcggtgctgccggctgcctcccacgcacgcaggctctgccagcctgccttgccaatctgccaggcaactggg

SEQ ID NO: 260335 - DNA, 122 bp, Homo sapiens
cctgcccaagcagagatccagatggatgcctcagtgtggctgcttctcctgggtcgggagcgtggaagattctagacacagcccagcagtcaggaggctccaggccaaagcagccccttggc

SEQ ID NO: 260336 - DNA, 122 bp, Homo sapiens
gccaggctgatgcaagtttgctgggtctgctgagatttgcatacagatggccagtcggggcgcagggccgccgccaccgcgacaacgccgcccgcgccccgggtagaccggccgcagcccct

SEQ ID NO: 260337 - DNA, 122 bp, Homo sapiens
ccggtctccctccagggaccccctcccttgtcccagggaaactgcaaggcagtgcctgtgcggagtgcgggggcggctggaggcactgaacggggcaatagggaaagaaccgagacctgaac

SEQ ID NO: 260338 - DNA, 122 bp, Homo sapiens
gagccggccccactgcctggcatgtgcacatttggctgaagggcatcgaggcgtagggagcgcaggagcacagggcgcagcgtgcctgctcagccagggtgggaaggggctccccactgatc

SEQ ID NO: 260339 - DNA, 122 bp, Homo sapiens
gaggtcctttacatgagggtggaggagctttctaggcagggagaacagtgaaagcttggacgctgggctggaatcaatgccacaggtatgaaagcaagtggagggattgctggactagagta

SEQ ID NO: 260340 - DNA, 122 bp, Homo sapiens
tgtcgggctggacccggggaggcactagtgcacagatgggggagcagccgaagaggggagcgcccaagtcctcagccctgtctcctgaacagccccagccacgtgcccgaaaagccctagcc

SEQ ID NO: 260341 - DNA, 122 bp, Homo sapiens
tgcacttttatccatcacctataaaatactgccacaattaattatatcccaggaagtgttcgacagtggagagataatttgatttttaaaaaacatgctatgagaaaactaatgtactcaat

SEQ ID NO: 260342 - DNA, 122 bp, Homo sapiens
cgctcgctgccgtacgccggtaacttactagtctggtcccggctcgcctaggctcttacgcgctatagggacagcaatctgcagactagagggagagagcgaaaagacctgctgaacacagg

SEQ ID NO: 260343 - DNA, 122 bp, Homo sapiens
gggtatgggacctggttccgtgctgcacacaggggagactggactggccaaccggacagacgggagcttacactcttgtgggagctcacgggcgggccagtctgagagaatgcgggttttga

SEQ ID NO: 260344 - DNA, 122 bp, Homo sapiens
cgcgtgctgccgccgcagctctgtgatgtagttgcagcagtccaggaagaccttcttgcacgcctcgcccagggagatgaaacgggtccggcgctggcacgagaacctcatggggttctccc

SEQ ID NO: 260345 - DNA, 122 bp, Homo sapiens
tttctgatgattcctcatgagtttcagaggggaccgtgtgaggtttgagaagacaggatgcgaggttgggtcagaaatggaatggactgggaaggactcattagtctggaaagagattgctc

SEQ ID NO: 260346 - DNA, 122 bp, Homo sapiens
tcagaaggggagaaggggtagggctggcgtagagatggggcgggcgggttagggggtcggcgcgggggaggtgaacttgccctgctcaattgaaagaaaataatttcaaagttcttgtctcg

SEQ ID NO: 260347 - DNA, 122 bp, Homo sapiens
aggccccaggaactagtaactagggacgcttctggtctctaggcgaggagagggggagagcgcaatctttgcgcctgcgcacactcctgctcttacccgccggaaccctgggccacgcccgg

SEQ ID NO: 260348 - DNA, 122 bp, Homo sapiens
cctccggccccgcctcttagggcgggacgtgcaaggcgattggcgaatgcaggcgagaggcggtcgctattggtccgcggcgctgtcggctcggcgggcggtgcccggacgcaggtgccggc

SEQ ID NO: 260349 - DNA, 122 bp, Homo sapiens
gttcgagagcgcttaggctcccctccgttataactggggttaactgaaaacccagaaccccgaaatagaaggccaaggaggagggagcggaagagagggaaaggaggaggagagagaaggtg

SEQ ID NO: 260350 - DNA, 122 bp, Homo sapiens
ccctggggagggattccgggccagcccgagtgcacgcgcgcgggggcgggacggggagggcgctggacccgcggtcccctcctgagccctgcagcccggccttctcgccacactccgccccc

SEQ ID NO: 260351 - DNA, 122 bp, Homo sapiens
ggagctgcagttcagcagtgagtaggacgacagcaactctgccctcctgaacttgtgtttcgctgggtcaagtaggctctgcactggctaaacaggtcaacacacagtctatcagagagggg

SEQ ID NO: 260352 - DNA, 122 bp, Homo sapiens
tactgaaggtgaatccagaggctgcacaggagagtctcagggacctcccaggctggaccacgcctcccccagactccaccagctgcacctgacactggacacctgcaaacagaaggacaccg

SEQ ID NO: 260353 - DNA, 122 bp, Homo sapiens
aggggacccaggcatggtcagagcaggggctggtcatccaggggacaggacctcatggggcggagccgagacagtgggtctgggggcgggaactggctgtcgagggaaatggcctagtcctg

SEQ ID NO: 260354 - DNA, 122 bp, Homo sapiens
tgttgaaggaaggaataaaaggaaaggaagaaagggacaagaaggaagggaaggaaggaacgtctacagagcaggaatttactaagcactgaggatgtgaagataaaaaatatggcaaatta

SEQ ID NO: 260355 - DNA, 122 bp, Homo sapiens
gagtgttccccataatatttgcagttcataagttagaaattagcaatcagccccttttcacgtaggacacaataatagacactctggcacagtccctgcaatttggttatgcgaagaaaaca

SEQ ID NO: 260356 - DNA, 122 bp, Homo sapiens
cctccacccacacagcccagggactgcctcccaaggtctcaggggtccacctcacttactcgctttccaagtggccctgggggtccattctccccggtgggaccaggggatccctagggaga

SEQ ID NO: 260357 - DNA, 122 bp, Homo sapiens
tgggcacaagaggttccccgccaacttccaaggagggcggccaggctgcagccagagggacggaggcatgagctgagtgagaactcccagctcaggggaaggcagccctcgtggcagaggcc

SEQ ID NO: 260358 - DNA, 122 bp, Homo sapiens
ggggacacaagctggccacgcccagggctggggtcagtgagggggatgtgaggaccccagcgttcgcccaccctgtccaacagcctgaaagaaaagggtccctgcccctagcccccgcgccc

SEQ ID NO: 260359 - DNA, 122 bp, Homo sapiens
ggcgagcagtgccccctggagttgtgcccggtcccggcctccctttctcccctctctccgcgcttctgctcctggacccggcctggggaagccgagcggttctaggtcatctctccacctcc

SEQ ID NO: 260360 - DNA, 122 bp, Homo sapiens
ttgggtgagggaattgaaatggacggctggcaaaagctggggaccacacaggctggtagacggtgggacggagaagcacagacgcgccattctctgaaagtccgagcaggctgaggaagaac

SEQ ID NO: 260361 - DNA, 122 bp, Homo sapiens
gcctctgggttcccagaaagtggtggggtgttcacgccgtatctccgttgggtacctaggcgggacttagacaaacttcagcctcagctacgagagtggaacttggggaatcggaggttgag

SEQ ID NO: 260362 - DNA, 122 bp, Homo sapiens
cgactgctttgtggccgtcatgcacggggacactgagggcaccgtgcccggcaacgccctcgtcgtggacccggacaagcccttccgcaaactcaaccctttcggaaacaccttcctcaaca

SEQ ID NO: 260363 - DNA, 122 bp, Homo sapiens
agacagagcatggggctcatgatggcggtgtagtgcagggggaagcagatggccacatagcggtcataggccatggccacaaggaggaagctctccaggtctccaaataacaggaagaagta

SEQ ID NO: 260364 - DNA, 122 bp, Homo sapiens
ttttactttggtgtgctaatataaaggatattgttcaggaacttaagcatcttgcaggctcgttagggatggcaggatgtgggagcaggtatataatcagcatttacagtttaaggtgaaga

SEQ ID NO: 260365 - DNA, 122 bp, Homo sapiens
tgcgcctgcatgaggatatagttcttggcgagcagcagcgtggcgatcttggagagcttgcgcaccgacgggctgtgcgcgtaggggatgacggctcgcagcccgtccagcgcgtcgtttag

SEQ ID NO: 260366 - DNA, 122 bp, Homo sapiens
agaatgtgccaggtactgaaggtctggtatagttttagtacatattatcaaacagttttccgaatatctgtaccagtttatacttccaccagtaaagtgtgggaatcacagtttctccacat

SEQ ID NO: 260367 - DNA, 122 bp, Homo sapiens
tgggctcactgggtgtcctggccccaacagctggggtttgaggctgcctggtcccaagggcgtttttataccttctgggatgcttgacaaagatcgctcaatggctcgctgtccccctcccc

SEQ ID NO: 260368 - DNA, 122 bp, Homo sapiens
caggacagcaaccggcagcccacggacttcactggcacgaagcagagagcacgctgtgggcgaggaaggagctggtgagacccgcagacaggaagagctccctggagtcccggccgggccag

SEQ ID NO: 260369 - DNA, 122 bp, Homo sapiens
accaccaggttgaggccacatttgcataataaaagattagggtgggagggccagtttcttcgaaggctgtgtaaatgacatacctggccaaaccaatcccctgggacctacgtaaatcaaac

SEQ ID NO: 260370 - DNA, 122 bp, Homo sapiens
tttaaatggggcggggcaaggtggagaccgcgtgtgtggttccggggggtcccgggtccccgctcccgggaccttccccgggtggcaccacatcctcgcgggacactgggcaccacccctct

SEQ ID NO: 260371 - DNA, 122 bp, Homo sapiens
gctgcagattcacagttacaatagaatggccccttctcacaagaagccaccgtattcacacgttgtgcttttctcagttcaagcggcctcttccttttgagtaaccagggtaaccacgctgt

SEQ ID NO: 260372 - DNA, 122 bp, Homo sapiens
ccgtcccacgacatggctggcctttcggctctgcagcctcacaggccccgcatcccagcccggccaggggccaccccctttgcgcctgctgcaaagtgggaattcttgtcccaataattcca

SEQ ID NO: 260373 - DNA, 122 bp, Homo sapiens
ccagctgatccatggaggggtacatgtacctggggatgacacagagaagccattagtgagcgcccggacagaaacgggtaatccaaacagggacacgcttgaagggtggggaccatgcagca

SEQ ID NO: 260374 - DNA, 122 bp, Homo sapiens
cggaggaaaggaatggagaagaagcctgtttgcctcagagctcctcatcctggacgccctcgccagagggttcatgttatggtttcctgcataagcgatctgagccctgcctcctcaagcgt

SEQ ID NO: 260375 - DNA, 122 bp, Homo sapiens
ttcccgcaccgcctcgtacagggtgttgcgagagactgctgctcatggcttctcacgccgcgctaaccggaaaagagcgggtctggtaatatttttatctttttttgcttcgggctggaaat

SEQ ID NO: 260376 - DNA, 122 bp, Homo sapiens
atgctgtccctgaatcctaggggaggatccttcctttcccctcccagcttcttgtagccacgggtgttctgtgactgtggcagcatcattccagtctctgtctccattgtcccatggccgtc

SEQ ID NO: 260377 - DNA, 122 bp, Homo sapiens
gccacctgctacatctgacccctgcaacttgcaggctcctccagcttggccacctgtgcacgtctcctccggggagtgaagggggtctctcaagctgtactgggccaggcactgatgctcag

SEQ ID NO: 260378 - DNA, 122 bp, Homo sapiens
cccggtcctggcgggccggctcctacctgccgctgccccatggctctcccaacgcctgtacgtgccatgccccggggccacgagcccacatggctataatcttccctgcccgtcaatcccag

SEQ ID NO: 260379 - DNA, 122 bp, Homo sapiens
tccccccagccaggtcccttccctccctaagatagaccctggtgtaggatttggccctcccgatcttccctcttacttaccgggactgggaggggcatggttccagtgggaagtggaggatt

SEQ ID NO: 260380 - DNA, 122 bp, Homo sapiens
gaagcccaggccaggtcacagcacacggaccctataaccagcaattaggaaagtagccagcgtttctatctatggtagcactgaaaaatcttttcccctgagtttaagtcaggctggaagac

SEQ ID NO: 260381 - DNA, 122 bp, Homo sapiens
tctcctatttctctgtcttctaccaagaatccagtgggaactgaggagccaggcatttcccgacttcttcctcactttcatttaagactcgctagtattgttgttatttcatttaagactct

SEQ ID NO: 260382 - DNA, 122 bp, Homo sapiens
ctgtcttaatcagctgttaaagaaatgtgccaaaaatgtaaatcagtgcactcctcttctcgctttttttctttttgtgatggaatctctctgtgtcgctcaggctggagttcagtggcgca

SEQ ID NO: 260383 - DNA, 122 bp, Homo sapiens
ccaggaacaggatcgatgacccttgtaggacactgggggcgctgttacctcctcaccgagcgcaggtcgctgccctgtggtctaacagagcatgtattcagacccgcaccctcatctttggc

SEQ ID NO: 260384 - DNA, 122 bp, Homo sapiens
gattcttttgtttctatgtagggtgccatagacttctgcttcacaatagggcacagtaggcgctggcaagtaatgctcctactacaatagctagaagcaggtaaattacaaaaatcacattt

SEQ ID NO: 260385 - DNA, 122 bp, Homo sapiens
gcacctcaagggactagaactgagtgcttcatttgtcttttttcctccttgcaaaagtcccgtttgccaccatggggatgtaccaagtgagaccgagtagggggaacgagtggtgattgacg

SEQ ID NO: 260386 - DNA, 122 bp, Homo sapiens
gacgcggcggcggccaatgggagcgaacgccggagcccgctccccggggaccgcggcgaccgaggcagcaaagttacaaacagcccccagcccgcccgcccgccgcccgcccggcagattaa

SEQ ID NO: 260387 - DNA, 122 bp, Homo sapiens
aaccaagaacttgctcaattcccttgtaaattgtgctagatacccacatctctaagtgcacgccaattgcttaaaagcatcagcgttaatccccctttgaaaagaagatcagaaaaaaaatc

SEQ ID NO: 260388 - DNA, 122 bp, Homo sapiens
ttctgtggttttaggatatcgtgtggggacacttctgaggctgaactgtagacgcagctgcgggcgcctcttaagggccaaaagactcttttgtgcttctgcatggattgagattttggcaa

SEQ ID NO: 260389 - DNA, 122 bp, Homo sapiens
ttgggttgaaatacgataatgtttccttttgtatttaaaaaacacaaacaggatctcatccggagatatcatgaccttagacattcctgagacgtctgaaagggaagtgaacatatgtcagc

SEQ ID NO: 260390 - DNA, 122 bp, Homo sapiens
acccttcccacaacaacatctccgttttacacactaggaaactgaggcatagaaaagttccgtaagctggctatgatggcaccgagcacaaagcccagatttaaatccaggctccgaaaagt

SEQ ID NO: 260391 - DNA, 122 bp, Homo sapiens
ggcaggcaggcgggcgtcctcggtggcagttctggggccccggggcagtggttggtgacacggaataggggaaagacgcagttaggggcgaccaggactgtcggtggccagttagaacaggg

SEQ ID NO: 260392 - DNA, 122 bp, Homo sapiens
atcggggccgggttgcctgaactcatgtcccgaccggtctgactggccctacacaggccacgtctgactggaacccgcccttcctggtgctcccctgggccccaagggccccactgccgtgg

SEQ ID NO: 260393 - DNA, 122 bp, Homo sapiens
gagggtcagatctgtgattgggcgcgactacgagggggcggagcccaggggcgtgtattccgtcacttgcggtgattcggctacagaacgcgccgggcgctggtggcaggtggtacaggcac

SEQ ID NO: 260394 - DNA, 122 bp, Homo sapiens
ttgtatctttccaggagcccctcagattgtaccttgctttctcaccaatagacaccttcccgacacttttttaatgttgtagctgagcactttaacaagttgagcattccatgtttcattct

SEQ ID NO: 260395 - DNA, 122 bp, Homo sapiens
cgcccaccttgggctgcccccgggcctggctaagaagtccagctggctgaaggaggtggtcgcccgggaccccggcccggcttgcttaccctggccaaatccttggatgcccctgctgtcaa

SEQ ID NO: 260396 - DNA, 122 bp, Homo sapiens
tggttgggacattatcatcttacatctagatggtctcaataatctcctgaatgggcccctcgctcctttcttccctgaccaataatccaacacaacagcagggaatttatttgcccagagca

SEQ ID NO: 260397 - DNA, 122 bp, Homo sapiens
acggataatgggggcggggtgataccggccgtcggagtgaggtaccggacctgcgccgcacgtccaccgctcacctgcgcgtgggccaccaccaggctcttattgccctctccgtggtaccc

SEQ ID NO: 260398 - DNA, 122 bp, Homo sapiens
gagggtctcacagctccaccacggccaggagacttcagtccagggggcctccatccccagcgaccttcacctgacccccaggggaccccagccaacaagacccggcctgcagctccggaacg

SEQ ID NO: 260399 - DNA, 122 bp, Homo sapiens
cgatccccccaacgcagactcccgagtagctgggaccacaggggctctgagtctcagcgtcggccgtgtgtcctcgagtacacatcagggtctcagcctcggccacgtgtgtctgtgagtac

SEQ ID NO: 260400 - DNA, 122 bp, Homo sapiens
gacctaggagagacctaggaagcatcagagcttcagatagggcagcaaactaaaagttatcgacatcaattacaacagaaagaggtagaaatgagccttcctaaaacaagaaagcaagcact

SEQ ID NO: 260401 - DNA, 122 bp, Homo sapiens
ttagggtagaagtactgatgtgccatgtgtggcagcaagtgaggttggtggctggtgcaccggctcctggcacaccctcgcagaggtgactggttgctctttgagccagcttggccttgccc

SEQ ID NO: 260402 - DNA, 122 bp, Homo sapiens
ctcgcgcgctgctcggagccggagggagcgctgggagcgagcaagcgagcgtttggagcccgggccagcagagggggcgcccggtcgctgcctgtaccgctcccgctggtcatctccgccgc

SEQ ID NO: 260403 - DNA, 122 bp, Homo sapiens
cagagagtaaatttgcccttcctccaccttcttgttctattagatgatgcctgaccacatcggtgtgggtgatttgatctttactcagtttactgatttacatgctaatgtcttctgcagac

SEQ ID NO: 260404 - DNA, 122 bp, Homo sapiens
acacccgctaccttttggcttggagacgctgccccgaaggcggaacctccaggacagctacgtagcgtcccgagcactcagactgaagccagggcagccatgttcattattggaaccgtgag

SEQ ID NO: 260405 - DNA, 122 bp, Homo sapiens
cgctgagccgagaggcgcggaggcggcgagggcgcgggggctctgaggaccgctcggcgccgcctcctgccacaccatgggcagcgcagaggacgcagtcaaagagaaactgctgtggaacg

SEQ ID NO: 260406 - DNA, 122 bp, Homo sapiens
gtcctggcgggtggggagctggagagaggtaggggctggccccagggaagggcggacgggcgctggacagcctcggggtccccctcccgaggagcgccccagaccccctggggccggcgtgg

SEQ ID NO: 260407 - DNA, 122 bp, Homo sapiens
aacctcaagggcttgtgctgactccaagcctgcagagtgggctcctcctctaggctcccccgtgctgtgctccctcgccccaccctgcccgggacccagttcaagtaattcaggataggttg

SEQ ID NO: 260408 - DNA, 122 bp, Homo sapiens
gaaaaatttataccggactagacagtggtagtggttgcacaatattgttaaagtactacacgtcactgctataaacacttttaaatgggtgaaatggtaaattttatgttatgcatatttta

SEQ ID NO: 260409 - DNA, 122 bp, Homo sapiens
tctgcggccggctgcggaggtggggacgcggccgcgcggacgagtgacaggttggtccggcgcagcaaagggagcgggtgcggcggtagggcctctccgggggcagcgcgagggcctccccc

SEQ ID NO: 260410 - DNA, 122 bp, Homo sapiens
ccgagagccttgctcccgcccccacgcccctctgttcggcggtctccagcctgagcctgccggggccctgccctgtggacgcctggcctgtgttcctggctgtctcttgcctggccctgccc

SEQ ID NO: 260411 - DNA, 122 bp, Homo sapiens
tggccaggctggtctcgaactcctgacctcaagtgatccacccgccttggcctcccaaagcgctgagattagaggcgtgagcgaccacgcccagacgaatacccattttctagggtgtcata

SEQ ID NO: 260412 - DNA, 122 bp, Homo sapiens
actgcgaagaaaaatgccggactaaaagctgtggaaaagttctaatttggaaaaccagcccgcaagtgatgcagaggcttttgaactgcaaaagagctctgggcgtacaggacagtgagtca

SEQ ID NO: 260413 - DNA, 122 bp, Homo sapiens
gcattagtcatttccttagtactagaaaacatctctgagggggccaggcatggtggcttacgcctgtaatcccagtactttgggaggctgaggtgggcagatcactttaggtcaggagttca

SEQ ID NO: 260414 - DNA, 122 bp, Homo sapiens
ccttttgccataagcgaaacagagaagaaagtcagcgtgtcccgaggattaaggagaggtcggaagatccgaagaacctgctgctgacagatttgcttattaaaaagcctgctccagtggac

SEQ ID NO: 260415 - DNA, 122 bp, Homo sapiens
cctcatacacacagctcatttgctctccctcccaacccccaccttcatacttcttccacacgcataccaaagaaaataagaatctcaaggttggaaaatcccactttacttcaagtgaagtc

SEQ ID NO: 260416 - DNA, 122 bp, Homo sapiens
cgggagagctgcggggtcttcctgaggaggtggccctcgcaggaacagctgggttccccgcgaaaagaaaaagacagtgaaaaagaaaactgctttaacggcgatttttctttagcatttaa

SEQ ID NO: 260417 - DNA, 122 bp, Homo sapiens
caggtttcatcttggggctctctttctggactcaccagtgacatgtcccttttggaccttcgggctcactgactagagccctgctatcctctgggaaaagcagcatgtgcaatagacaaagc

SEQ ID NO: 260418 - DNA, 122 bp, Homo sapiens
aacgccactggctagtaccttgcctggcccccagtgctcaatccctggtagttgggaggacgaaaaggaaatccctctctggtcggtcctcaccgcagccctgtgtcaggccgtcacacggc

SEQ ID NO: 260419 - DNA, 122 bp, Homo sapiens
ttacttgttagacactgttcggtcctagatctctcagagaactgcgagtttatggcgcagcgaggggaggaggcactgatctctgagagcctccctttattcggaaatgaggagatgtgaaa

SEQ ID NO: 260420 - DNA, 122 bp, Homo sapiens
ccctgcgcttctcctccagctgcatgtgcagctgtaccagctcagatgccaggaggctggcgggatccttgccatgctggctcggactctgctccctcttctgcctccacgtcgtcagaggg

SEQ ID NO: 260421 - DNA, 122 bp, Homo sapiens
caggttcagcatgtagcccagtgtccagccaatgtccacaccgcccgcctgcgggacacacggctgctcagggctgcggggcagctaccccaggaccacgacctgcccacgcccacgccccg

SEQ ID NO: 260422 - DNA, 122 bp, Homo sapiens
cgggggcggagaggggcgcttctggaggggcggggtctacgcgaggggcggcccccctgacgccctcctccccttccccccacccccagccttcttcgccttctcctcggctgtggagccct

SEQ ID NO: 260423 - DNA, 122 bp, Homo sapiens
ggctaaccacaagacttcccgtctgcctctcccactgggaggcaggctcatcctccagggcggcctgggagggagtaattttaattttaattgaggtaaagttcacatcacgtaaaatgaac

SEQ ID NO: 260424 - DNA, 122 bp, Homo sapiens
caggtctcggcgagcgggcggttgtcaggagtaacggggactgtgggcccgggtggacgccgcggcctggcctccgctggacgctcctggcgggctgcggctcctcctcgtccaggccgcct

SEQ ID NO: 260425 - DNA, 122 bp, Homo sapiens
tcgccctccaccactgctgttttgcggccgtggcagactcgccactgacttccattcttccgcatccggcagggtgtcccctgtgctcctgatctagcaaggcacccactgccattccggat

SEQ ID NO: 260426 - DNA, 122 bp, Homo sapiens
ggagtcgtggctcccgctcttgagtcctgccctgggagggacagtatctgtttagatttgcgtctaaatttaaaccctgatcgtcggcctccctccccgctccccaccctcccctcccctcc

SEQ ID NO: 260427 - DNA, 122 bp, Homo sapiens
gcatggaggagaggctcacgtcggcctccaccttcggcgcagacacatccagcgaggcctcgatggacctgcctggggccgacaccccgaaggagggcatcttgaacttgggcattttgaac

SEQ ID NO: 260428 - DNA, 122 bp, Homo sapiens
gcagccctgaagtggtgggacagggagagaagagcagggcctcggggtgcatgccaagcgcgtttctaaggggtgtgagcagctgggaaatacttagcaaaactctactgggggatcaggag

SEQ ID NO: 260429 - DNA, 122 bp, Homo sapiens
gcccgggcaacgggttgttgccaggacaacgggcggggctgacgcacagacgcggagtcccggcggggcaggctcgctccggggcccaccggtgcctgggaaccccccaatagcccgactgg

SEQ ID NO: 260430 - DNA, 122 bp, Homo sapiens
ggccaggtagaagagaacagaggccccgtccttcctccagagagctttgtggttctccaccggcccaaccaggaccagatcctcaccaacctaagcaagaggaagtgcccctctcaacctgt

SEQ ID NO: 260431 - DNA, 122 bp, Homo sapiens
gaaatgctcagcctcgggaaacctgtgcgcggaaatgctcagcctcgggaaacctgtgtgcgcgaaagctcagcctcgggaaacctgtgcgcggaaatgctcagcctcggggctctggctgc

SEQ ID NO: 260432 - DNA, 122 bp, Homo sapiens
agttaccactctcctgcaacaactgtctctaacacagggacccaggcttagatgcaggcccggaaacctggtgcctgagcactgacccagcctacaggctcaatttcatcaggacaccagat

SEQ ID NO: 260433 - DNA, 122 bp, Homo sapiens
gcgaggacaccatggggttactgtccatctcctcctgcgcggcgtggacatggtcacaggcggcccgcacctcgccgtgggccccccgacctccctccccgtgttcagggtgtggagctcag

SEQ ID NO: 260434 - DNA, 122 bp, Homo sapiens
cgaggaaacagcgttgggttgctttctagtacctgtttccccacttagagaacctcaaaacgtgttcaaagaaccagacacaaaaggccatatagggccgggcgtggtggctcacgcctgta

SEQ ID NO: 260435 - DNA, 122 bp, Homo sapiens
aggcagagggtcccttgggtgaaggaagggggtgagaaagcaagaggggactgtcgaatgcgcctgaggataagttacaatgagagggagatactgtcactccacagaagggggaatgctgc

SEQ ID NO: 260436 - DNA, 122 bp, Homo sapiens
ttgcactggaggcaatgaagacacggcggagtcccagcttgcagggagcttaggttctgacggcgtcggaggacaacacgctctggacgagcgcggcgcccaagggtcagcggcagcagcga

SEQ ID NO: 260437 - DNA, 122 bp, Homo sapiens
gccccccgcaagccctacaacctctgctttaagaacccttggaggcactgctgcgcttcccgcgaggagaatgtgggggtggagatggtgcggtttctgctgctgcggcccgggacacgctt

SEQ ID NO: 260438 - DNA, 122 bp, Homo sapiens
ggggcctggccactgggtgccacccagcctgtgtgccctccctggggctgaggaggcaggcggctgctagttgtggcccttcctggaaggagaggcctgcagggctcgaccctgtgggtttc

SEQ ID NO: 260439 - DNA, 122 bp, Homo sapiens
ctgggctcaggatggagtgaggctgaggtcatcatgggggctcctcacaaatgcccggtacggggccgccccgggaggatgatgtggctggctcacagcagctccacctccctttctctcct

SEQ ID NO: 260440 - DNA, 122 bp, Homo sapiens
catcttgacccccgggcgtacatcgtacaaccttcacacccccttcacctctcaaggaaacggtgtttgaggtgggtctgcttaccacagtccttgtcaacttgcagcaacacagggcaact

SEQ ID NO: 260441 - DNA, 122 bp, Homo sapiens
ttgaacttagaccctttctgcaaatgtcaggctgtatgataattgagccagaatgttactcgagctttctgacacattttttgagacctcccatccagtattctcatacagaaatatggctc

SEQ ID NO: 260442 - DNA, 122 bp, Homo sapiens
gtgctccgaagcgtgtggaatggtgatgacagccaggacctcggggtcgtcgaggagctgcgacacggagaagtcagggggcagcttggtgacaccgctgcaccaggggcatcgcacatcct

SEQ ID NO: 260443 - DNA, 122 bp, Homo sapiens
tgtcatcgatgtcactaataaatgcagtaatatatccaggaatgctatgtatatcagatacgggagtgtctgtcatcttcttttaagaggtactgactttttggaaatacaaaacaatagtc

SEQ ID NO: 260444 - DNA, 122 bp, Homo sapiens
tgcgccttcccctcatcctggccgcgcagctcgtccagccggctctgccgtgcctgcaggcgctccagcagctgccggtagttcctcccggtcagcggcgtgaggttccccttcaccctctg

SEQ ID NO: 260445 - DNA, 122 bp, Homo sapiens
atcctgagacaggatgtggaggttttgctgatcatgggctgagaattccaaggggcacagcgggaagacttctggatttgggaatggggtatggggagacaaaataggggtgtgcagagcct

SEQ ID NO: 260446 - DNA, 122 bp, Homo sapiens
gctggtgcctccagcttgcgtttgtggggcgggtcctcaatgatcctgttgaggtctccgcggtccttcaggtccatgggcttctcccagacagacaggtgcatcgttgggttgaagaagaa

SEQ ID NO: 260447 - DNA, 122 bp, Homo sapiens
catccctgggtcctgagacatcctctcctctcggccaagggacgagaggggtcaacttggcgattcgcagctgttctgccagaggatggggttgcctgcgagacagccaggaaggcttcact

SEQ ID NO: 260448 - DNA, 122 bp, Homo sapiens
cttccagcgtccctcatgtagtctctacctgattcaggaatctctaacccagtatcggaacgttaagcggcttctccgctttcctgccgtgagaaactcgaggtgacaacctccgtttccgg

SEQ ID NO: 260449 - DNA, 122 bp, Homo sapiens
ctcccctccagaggtgccctcgcgtgggcttgctctgtgcgcctcggggacttcctcaaacggactcgggaaagacaagacagttggctcttaaataacttcctaagaggagccctcaccct

SEQ ID NO: 260450 - DNA, 122 bp, Homo sapiens
ccgtgcgagccaagactgcctcccggccctgcccgttaccaaccccaagttcaagagaaacgacaaccattatgttacttgcctggtgaggcaggatttggccgagtctcgtttctggtgcc

SEQ ID NO: 260451 - DNA, 122 bp, Homo sapiens
cttggatgactcagcatgaatctattcttcaaggatatggcttatttaaaaacatccctccggtccaccccagtttttgtctattcttctgtgataggtttaaaactacaccgtttttctaa

SEQ ID NO: 260452 - DNA, 122 bp, Homo sapiens
agaaattgctttttggcaaacaagtttgttctttgttgtaagacagaagtactcaagacccgacagagcacaaaagctacctttcatttgttaatgtcccctcctctactccaacgcacaaa

SEQ ID NO: 260453 - DNA, 122 bp, Homo sapiens
ctccctgcccaccagcgcatggacctggaccgcaggcgcgaggaggcccgcaaccccaagcggaagccgcgcctcatggaggaggacgagctcccctcgtggatcatcaaggacgacgcgga

SEQ ID NO: 260454 - DNA, 122 bp, Homo sapiens
aacattaccaacacagaatagctattcaacttatgtcacgggattcttctggtattacaacgtgaatctctgcttgtgaagtcgttgttattcttcagatagaggaataaagactcattttt

SEQ ID NO: 260455 - DNA, 122 bp, Homo sapiens
gagaccgtgtctcaaaaaaacaaaacaaaacaaaacaaaaagtctgggagcggtggctcacgcctgtaatcccagcactttcggaggccaaggcaggaggatcacctgaggtcaggagttcg

SEQ ID NO: 260456 - DNA, 122 bp, Homo sapiens
ccgcctcccgggttcaagtgagtctcctgcctcagcctcccgagtagctgggactacaggcgcctgccaccaggcccggctaattatttttgtatttttagcacagacggggtttcaccgtg

SEQ ID NO: 260457 - DNA, 122 bp, Homo sapiens
ggggaagcttccaggccttcgcgagcccagcgcagcctcccgggccgggcgaggggtttgcggctgattctccgcgcgtctcagcctgacccaccggctccccgccgctccgggaagcgcgc

SEQ ID NO: 260458 - DNA, 122 bp, Homo sapiens
tccccaccctccctaatttccactccccccaccccacttcgcctgccgcggtcgggtccgcggcctgcgctgtagcggtcgccgccgttccctggaagtagcaacttccctaccccacccca

SEQ ID NO: 260459 - DNA, 122 bp, Homo sapiens
ctgtggagaaggtcatcgaccgatgtcaccgagtcattcctgaagcggttatacttggtgcgtggaagcatgcccctccgtgggctcgctgcatccgcccgggcgctgctggtgccggcccc

SEQ ID NO: 260460 - DNA, 122 bp, Homo sapiens
ctgcctccccacatagttaggcctttagctggctaaagagctaagatacttttttatgaccgacttggttaaggaagtcagtctattggaaacagcctgatgaacctcttcccacaaatact

SEQ ID NO: 260461 - DNA, 122 bp, Homo sapiens
ggggtcagggagttccctttcttagtcaaagtaaggggtgacagatggcacctggaaaatcgggtcactcccaccctaatactgcacttttccgacgggcttaaaaaggcgcaccaggagat

SEQ ID NO: 260462 - DNA, 122 bp, Homo sapiens
aagcttcctggaggacatggctatgtctcatttgttcaccccagttcttggctcataaagcgtattttaaaaattttggttattatttgaataaaaactttgttggtcctcatttctcctgg

SEQ ID NO: 260463 - DNA, 122 bp, Homo sapiens
atctctgcgcacgcgcagaacgcttcgaccaatgaaaacacaggaagccgtccgcgcaaccgcgttgcgtcacttctgccgcccctgtttcaagggataagaaaccctgcgacaaaacctcc

SEQ ID NO: 260464 - DNA, 122 bp, Homo sapiens
cagccttctgtccccctcattgtttttgtttttctctcacgtctagaaccatactagctacgtagtaggcactcaaatgtttagttagtggatggtgctggcatgtggcagctggtcaataa

SEQ ID NO: 260465 - DNA, 122 bp, Homo sapiens
gagcggacagcgggggccctggccactgggtggctggagcgaggcttgggggctggagagcggggcgatccgggacttgggggcgcagggcagcggggactgggggctgcagacaccgggca

SEQ ID NO: 260466 - DNA, 122 bp, Homo sapiens
tgggatcagcgtggccgtggagagcggggacagcactgggggaactgggatcagcgtggccgtggagagcggggggagcactgggggaactgggatcagcgtggccgtggagagcgggggga

SEQ ID NO: 260467 - DNA, 122 bp, Homo sapiens
ggatcgtcttaaactcattttgcaggtgagagcaactgggacttattaacccagtcacatcggacacagagacgtggcgagggcgacacagagcaggagactcaatcaaggagcccgtattg

SEQ ID NO: 260468 - DNA, 122 bp, Homo sapiens
gttccgcagccccgggaggacccgccatagagcagaggctccaggaggccagagcgactccgccaggctccgcgcactttctgtgcgtccgttccaccgtccggatccccgccacaacagag

SEQ ID NO: 260469 - DNA, 122 bp, Homo sapiens
gtggctacaacaaaattaactatgcttgcacaaaactttagccaatacctcaaagggaaacgtaaaaggggaaagacgcactcttaccccacccactccaaggcagcagtcagcacacccaa

SEQ ID NO: 260470 - DNA, 122 bp, Homo sapiens
tccttctcctaggtgatccatttctaggcaacgtggggctggtgctgaagctgccaggctcgctccttgcttcctgcatcccgccaggcgaaacgctccaaaagcatcctgcagcctgcggc

SEQ ID NO: 260471 - DNA, 122 bp, Homo sapiens
cagctctttggagctgcccattcctccggctgcgagaaaggacgcgcgccctgcgtcgggcgaagaaaagaagcaaaacttgtcgggagggtttcgtcatcaacctccttcccgcaaaccta

SEQ ID NO: 260472 - DNA, 122 bp, Homo sapiens
gttttcgaaagtctacgcccacgaacacgtgattattgtgtcaccgaagcgcctaccgaacggagaccttgattcttgcttagattacacagaacgcgcctggtttatgtatccccttttac

SEQ ID NO: 260473 - DNA, 122 bp, Homo sapiens
cgccctgcccatttaagtaggcgggccgtaccaccgcaactttcttgacagggggtatcccggcggactcggacaacttcaagtgagcccagaggcaatttcttttcctttctaactgtggc

SEQ ID NO: 260474 - DNA, 122 bp, Homo sapiens
gcctggtggaatgcagacgagtaaccgtggaggggtagaagtgtgacatggtggtcaggacgtaggctctggaggcaggcagtcctcacttcaaagctcggctttgccacttactcaatgta

SEQ ID NO: 260475 - DNA, 122 bp, Homo sapiens
caggcttgcaccgtgtctcttttggtcttcaccagaatcttctggaattagaacagataccgtattcccagggcagttgggcggtgtgctgggcagcgtccaggctgctggcagggcctggc

SEQ ID NO: 260476 - DNA, 122 bp, Homo sapiens
tcccgcaggctcgctgtgtgcgccaggctctcccgctcctgctccagggcctccacccgccggcccagctccgcgatctgccgcactttgtgccgcaccagctccagccggtccttgtcctc

SEQ ID NO: 260477 - DNA, 122 bp, Homo sapiens
aaaggctaggcagtttgttactttctcagcccaagctaagttttaccgtctcagcaagaacgactcagtctctcaaatcatagctaattctcctctgagggccttgctgaagttctgcgttt

SEQ ID NO: 260478 - DNA, 122 bp, Homo sapiens
ggggcgggacaccctgcgattacatttcctcagaaggcagctttcaaggcaaagctcccacgtgcagaaacgggccctggaggtgggagtcccaggagccgtggagaagctccaatgagaac

SEQ ID NO: 260479 - DNA, 122 bp, Homo sapiens
ccggctgtgggggagggacttggagagagttaatggagtggctgaatcagtgacatttggcgccctggacagtgtccataaatccccaaaatgagcaggttgagggcaagcgctgtgtgaca

SEQ ID NO: 260480 - DNA, 122 bp, Homo sapiens
gtttcccccgcttcatgattgcagaaacccagccccactaggggttacgagcttattcagcgtcccacaactgggaggtattagaagccgggtctgtgggacctaaaaacccatgcttgtcc

SEQ ID NO: 260481 - DNA, 122 bp, Homo sapiens
gacctgagtgtactcctctgtgtgcacgtgccgggccctgcgacacacgcctgtgcttctcgcggggtcagtcatggctttggcctccctggcactgctgtggtttgctgagattttagtga

SEQ ID NO: 260482 - DNA, 122 bp, Homo sapiens
gtcagtgtgctcttcccttcaacgtcctctcgctgtccagccgcttgtcttcttcgtcaacgtgttcctctcaccgtccagcagcttctgtgtctctgccttgctagagtctcgggttttta

SEQ ID NO: 260483 - DNA, 122 bp, Homo sapiens
ctcacaactgtgactcctcaggtcggattggacaccaccggaaacggaaattcaccgtcgcgccgactctccggagggaaacaaaaaggcagaaaaaagagaccggcgcctggacgactttc

SEQ ID NO: 260484 - DNA, 122 bp, Homo sapiens
caaggcagctgtctgtagctgaggccacccagaaggaaccaagagctgagaactgtccgccgacatcacctccagtagcacgggcagcaggtcctctgtgaatggggatgtgggtggtgcat

SEQ ID NO: 260485 - DNA, 122 bp, Homo sapiens
tctcagctggagaatggggcagggtccaagccagccagggatgtccccacagcgagtgtccggagggcccactccccacgactgcacagttcattctgcgggtccttcctccagcagcgccc

SEQ ID NO: 260486 - DNA, 122 bp, Homo sapiens
cttaacctatgtttatgcaaggtaacaccaactatagtctttaaagagggaatgagtcaccgtatctggcagctatgcaaaagttttgcattgttaatcatgagcataatgtaatgtggcag

SEQ ID NO: 260487 - DNA, 122 bp, Homo sapiens
gcggaggaaagggggaaaaaaatcccttccgtgagggagggcgcgcggaggccgggctggcgcggggcgcgcgggccgcgccaactccgggctgcgcgccccggccgcagcgacgccccgag

SEQ ID NO: 260488 - DNA, 122 bp, Homo sapiens
cctgcgctgccggcctggtgctggcgcaggggcgttcggtgccaccctctccattgtgggcgcaccctctcttctttcaccaggatttttggggtctgggggagcagcctctgtgtgctgag

SEQ ID NO: 260489 - DNA, 122 bp, Homo sapiens
tccccaatacatttccagccccaagaacagtgaccgactctgggcttccattcaaacatccgaaaaacatttacagtgcacctcgtgtgtaccaggtgctgttctaggagctgggaatacag

SEQ ID NO: 260490 - DNA, 122 bp, Homo sapiens
cgtctcataaataaataaatttagtgaaccatgaatttactgctatcaccttcttcacttcgtacagccctggaggaaggggttatcattcccatcttccagatgagaaaactgaggaatca

SEQ ID NO: 260491 - DNA, 122 bp, Homo sapiens
gagtcggcaaagttgctctggggggctcgggacggactcggtgcggcgcggattccgtggcgtcctttcccccgtcctgcccctcgcagcccggccccctcccagggatttaaacctcccgc

SEQ ID NO: 260492 - DNA, 122 bp, Homo sapiens
ctcatttagaagggaagtcatcgtgcaaagcggctggccgtgtgaataatagctcagaaacggggaaatgtacaggctccatctaacactgggtctcgtaactcctcacacaccccaactgc

SEQ ID NO: 260493 - DNA, 122 bp, Homo sapiens
aactcgagccagtttcctggtggcaagtcctcactccttgggtgactctgagaaagcacccgtttccttatctgtaaatagtagtttgagtacccccacccccgtctcctacctattatttg

SEQ ID NO: 260494 - DNA, 122 bp, Homo sapiens
gtttccgtgcttgcctggacggctcttgcgccctgggatctgtaaaccccaagggtggtgcgccctggggtcgccatgcccctcagattctttacagggcacctcccatccggcacctggag

SEQ ID NO: 260495 - DNA, 122 bp, Homo sapiens
ccagagctgaggtctagctcacagcatctgtgcgtcggggaagctggctgcggtcacggccggtgcagcggcccaaggagtccacaaagcagtaaccttggcccacaccacagctccggtgc

SEQ ID NO: 260496 - DNA, 122 bp, Homo sapiens
acggggtggctgccgggcggagggtctcctcacttctcagacggggcggccgggcagagacgctcctcacctcccggatggggtcgcggccaggcagaggcgctcctcacatcccagacagg

SEQ ID NO: 260497 - DNA, 122 bp, Homo sapiens
tcatgctgtcaggacccagcagggctgtgggcaggagacctgggaaactggcccaagccacgcccccctcaccctgccctggccaccttctgctcctgagcccacaggcacaggcagcttcg

SEQ ID NO: 260498 - DNA, 122 bp, Homo sapiens
cgttggccgtcggaaccatggaaggcctccggggagacaggccgggccctgacccttcttcggccagcctagccctggtgcttcaggagttaccctgggggccaccagttccccgcaccaag

SEQ ID NO: 260499 - DNA, 122 bp, Homo sapiens
attaagcacactcttgtgggtagcagactttaggggtctatcccataatgattcactgcccgtgaatcatagagtcttaggacacttaagcccaattcctaggctttctctcccacagtctc

SEQ ID NO: 260500 - DNA, 122 bp, Homo sapiens
ctcctcctggctggtgtaaagttcctgccgaattggaggcaagtgggggacggacggacgcgcgggcgcgggacagacccacgtccagccagtggaggcccaagagccggcgggcgcgtctg

SEQ ID NO: 260501 - DNA, 122 bp, Homo sapiens
cttggccatttcctgtgggggctcctgggacatccgttcccacaccaccggagctgaacccgagcaggtcagaacgaaggtgctggagacattgaggacaagctctggccccgggggtgtga

SEQ ID NO: 260502 - DNA, 122 bp, Homo sapiens
aaagcattcgggccacggcaacctctgcttcgaggaacctacactagagaaaccccagctcgcacctcccgagttgtgaaggacgagctgtgcagaccacttggaacagaacctaaaactgg

SEQ ID NO: 260503 - DNA, 122 bp, Homo sapiens
cccctacaccgcccactcccgggcatccccattggctgcgtgcttctccggctctcaattcgctgtacgtcatccgtgcatggctgcccattggccctctgcaatacttgtcttcatctcac

SEQ ID NO: 260504 - DNA, 122 bp, Homo sapiens
ggctcggtggcgtcggagtcggggctcgagaaggtgggggagggggtgagagcagccatgcgctcgctcatgcatgtgttgagaagagggtagctgttgcagccagagatggctgaactgag

SEQ ID NO: 260505 - DNA, 122 bp, Homo sapiens
tccatggtgagggtgacacctacacatgaggatccccaaggctggtacacacaaactaaacgtccaactcattcagcctggtcctatgctggtacctcccccaccacacctttttactgaga

SEQ ID NO: 260506 - DNA, 122 bp, Homo sapiens
ctgagacatcagtgctgaaggcacaggaaggtgtccagcctccttgttccctcccagacccgggggcaacaggggtggagggggaggcaaaggcaacagagatcgaaaagggcctgtcagct

SEQ ID NO: 260507 - DNA, 122 bp, Homo sapiens
aagcgtctccgtttcatggtctcggtccgaggcggagaacggagctgcccgtgcggggtgcgcgccaaggcgggggacaggacgggcccggcgtctgccgagacctaggctgcccgcattcc

SEQ ID NO: 260508 - DNA, 122 bp, Homo sapiens
atcgccctccgccgggcccggctggagctggctggagaccctttcagccccgggaggaagcggagcccagaccgagccagagcggagcagcgggagggagggcggggaggccgccgggcagg

SEQ ID NO: 260509 - DNA, 122 bp, Homo sapiens
ggctgggaaatcgcacgtctctccgcggtgacctgtgcacagcccctgggcctccgcctccgtgctggcagcctccgcctcagcgcacaaagccccgtcaccccgactctcggggcgccgcc

SEQ ID NO: 260510 - DNA, 122 bp, Homo sapiens
gcatatgtcaacagactggtcaaggtgacaccatgtaatttcaagatgtggatgcatgcacgattattggctccaagaataatcactatgagctacaaaaactagctgaaagccgggcacgg

SEQ ID NO: 260511 - DNA, 122 bp, Homo sapiens
gagtgccagggcccatgtggagagtgctcaggtgccttcacagatgtccctagaaggatgcgctctcggcgcccacggtacaggaagacaggctcagtgccgtggagtaactttcccaagac

SEQ ID NO: 260512 - DNA, 122 bp, Homo sapiens
cacacggggaccccctgccatggcacacacacacggggactctgccatggcgcacacacacggggaccctctgccatggcgcacactcatggggaccctctgccacggcgcacacatgggga

SEQ ID NO: 260513 - DNA, 122 bp, Homo sapiens
ggagcgggggcatcttctgagctgttggatgccaggggtggtcccgggccagcttcctcccgaggccaactctgtggcaccccgcagggccgccggatggcccccaggctcttggagcagtt

SEQ ID NO: 260514 - DNA, 122 bp, Homo sapiens
ctgtgagcctctggtctccatggacacagaagatgtggtcaggtttgaggttggactccacgagtgtggcaacagcatgcaggtaagagaggctgggggccctggctttggtgggaggatgt

SEQ ID NO: 260515 - DNA, 122 bp, Homo sapiens
tccagtggcgcaatcggttagcgcgcggtacttatatggcagtatgtgtgcgagtgatgccgaggttgtgagttcgagcctcacctggagcattgttttccaacccaaaatagcattacttg

SEQ ID NO: 260516 - DNA, 122 bp, Homo sapiens
catgtgaccttgagcaagtcactcgcctctctgagcctcaggtgccctctgtaacattaacgctgctgatgcccacctctgggtgactgtgcaggctgcgtgagccaagacctgggcccagg

SEQ ID NO: 260517 - DNA, 122 bp, Homo sapiens
tgccacatgcccacctcgccgagccacagcctcagctactgcatgggggtcttggtctgacgtggctcatgggaaactgaggcacagggtgacttgtcagggtcacacggtgcttacgtgcc

SEQ ID NO: 260518 - DNA, 122 bp, Homo sapiens
ggagctgggaggcctctgtgcccatcgaggagtcagagtggaggctgcagactgtggagccgggagccggcaggtgaggctgggggcgccccgggccgggccgggcggggatcctgtgtggg

SEQ ID NO: 260519 - DNA, 122 bp, Homo sapiens
gcagcccccgatcctgcagccacagccacggcatcgcctggtcggatgcagcatctgctccggacgcctctcgctgtcggtgccaggcctgccaggccaagccccgattctcaggggcggca

SEQ ID NO: 260520 - DNA, 122 bp, Homo sapiens
gtgaggacagactaacgcctcaacagggcttgtggaagtgcgtggctctatattcccttccgcgccgaccccgggaagctgggcacgtagtgggagtcggtgtatgcggattcgaagccgga

SEQ ID NO: 260521 - DNA, 122 bp, Homo sapiens
ttccaagtttgcctccacttgtattcaacacttaggaaagtacttggcatccccctttcccgcccccactgccggtttaaaaaaaaaaaaaaaaaagaatacactcctgacttctgcttcca

SEQ ID NO: 260522 - DNA, 122 bp, Homo sapiens
tccccgtaagaaatcactgcaagagttccggtctggcagagagcgcggagagacgcagagcgcgggccgctcctccagggcgctccaggccctccggccccgggtcggcgggtgagctaggg

SEQ ID NO: 260523 - DNA, 122 bp, Homo sapiens
cgccgactcggcgcaggaacaaggcgggggttcggggccggctgcagactctcaccgcagcggccaggaacgccagccgttcacgcgttcggtcctccttggctgactcaccgccctggccg

SEQ ID NO: 260524 - DNA, 122 bp, Homo sapiens
gaggtgggtggggggaggccggggccggggctgctggcgggggggggtccgtccagggcccgcggggcccctcgagcaccttcgccctcaggcccgtcgccggatggggacgacaaggcgcg

SEQ ID NO: 260525 - DNA, 122 bp, Homo sapiens
gcggggaccctgcccaggtcgctgtttcgcgctctgtaggggattggaccaggaaagtagcgcctctgcattttctgcccagctcctcttggcgcatttcctggggaaacggattaagccaa

SEQ ID NO: 260526 - DNA, 122 bp, Homo sapiens
cgcggcaccgaacttgctcacaactgtgactcctcaggtcggattggacaccaccggaaacggaaattcaccgtcgcgccgactctccggagggaaacaaaaaggcagaaaaaagagaccgg

SEQ ID NO: 260527 - DNA, 122 bp, Homo sapiens
ctcgatctcctgacctcgtgaaccgcctgcctcggcctcccaaagtgctgggattacaggcgtaagccaccgcgcccagcctgtttgctggtttttgagacaaagtcttgctctgtcgcccc

SEQ ID NO: 260528 - DNA, 122 bp, Homo sapiens
tgccctgctgcctgcccaggtggtgcggtacgaggcgggctacgtggtatgcgctgtgatcgcgggcctctacctgctgctggtgcccactgccgggctttgcttctgctgctgccgctgcc

SEQ ID NO: 260529 - DNA, 122 bp, Homo sapiens
gagcaatggggcattgaagtctcaagaaatcatgccataaaaacttatattgggcccattcggctttccactgattggtggaaatgtagcagacaacggcagagggattctggggagaccta

SEQ ID NO: 260530 - DNA, 122 bp, Homo sapiens
gtttccgctcgcagggcccctggtaggcagagggtctgtgggtgtggggctgcctgctggcgggcagatgcagaggcctggggcctgattccaggcctggggttccagaggcaagctttgct

SEQ ID NO: 260531 - DNA, 122 bp, Homo sapiens
gcctagggccagatatacctggggccctgtgcctgctctgcgaactaggagctcactctccgagcggtgtagagggtgagactaagcagtgacagtaaaagctttcgacagtgcttgaccct

SEQ ID NO: 260532 - DNA, 122 bp, Homo sapiens
agaaaggagcctcccaatagatatgctctgtgaaatgatcagtgctctctcattccatgccgatgaccaacacttattaaaaaacagttgatcaagtaattccagtgaaagaagaggatctc

SEQ ID NO: 260533 - DNA, 122 bp, Homo sapiens
cctgtcctggaaaatcatcccagtgattcccctcttggttttccacatgactaaactccacggggcttgaatgatcagacctcaggctgccaggcttcctgtccccagttcctccggctccc

SEQ ID NO: 260534 - DNA, 122 bp, Homo sapiens
aggatgacggtggccgtgatggtgaccccagccatgagcccgtgggtgatggtatctggacggtaggggtaccggatggagtcatccccgcagtaaaatcctcgcttgtacggggcgttcac

SEQ ID NO: 260535 - DNA, 122 bp, Homo sapiens
aaaaacagtcactaacttctcacatactttgtcacagttggtgcaagagacaatgcactgcgaccgatgaggcttgcagggtccctaatctgtgaagtcttcacttctcaggaaggaggcca

SEQ ID NO: 260536 - DNA, 122 bp, Homo sapiens
aacaggggacaccaccagtataaccgcaccggctggaggaggaaaaaacacacacacacacgggacagtctgcccgtgagcctcagcagataatggctcctggctgcgtcagcctcccccac

SEQ ID NO: 260537 - DNA, 122 bp, Homo sapiens
atcccttctcctcgcatcctgatccccctaccctttctcctcagtactaggggagccctacgccctaacctaacaggcacagaggcccacagtcctgcctaggtagctgatcagagatggtc

SEQ ID NO: 260538 - DNA, 122 bp, Homo sapiens
cagaggtcgcaggctgcgagagcaggttcctggtttggcaagcactcgccccctcaggcccgttcattctcgcgagagaaagcgcgaggcctgccgggagtgagcgcggccgtacttaggtt

SEQ ID NO: 260539 - DNA, 122 bp, Homo sapiens
tgaaaatagagggaatcagaggccacccagaggcagagaccaggaagtgggagtcaacatcgcctcctgcctgtccccgctgtgcccgcatgcagccctctgcctgtctttcaaggtcccag

SEQ ID NO: 260540 - DNA, 122 bp, Homo sapiens
tcaaagcacagatgctgcaggtaggcggccgcattggccttcacggggtccacggggtgccgcagcatggccagcacctcaggcagctcagggtcccgccagcgcggctccttgcgggcgct

SEQ ID NO: 260541 - DNA, 122 bp, Homo sapiens
attcaggctccgctcgcgcgcccgcggccgctccctgctgggggccggaggagcgggcaccgagagacccccagccctgctcgcggccctcgccccggctcaccattgaggcccacggaggc

SEQ ID NO: 260542 - DNA, 122 bp, Homo sapiens
taaatttctacacttttccgtgttcagtctctacaccaacattgggtgagggggcagaaacggaagtccaggcagtggtgagattttaattagtattttgataacatttaagttatattttg

SEQ ID NO: 260543 - DNA, 122 bp, Homo sapiens
cagccagggggctgggagaagcagggtgggtcagagcacaaagagacttgttcatcatttcgaggcgcctgtgctttctactagagatagtcactgaagcagaatgagaggatcctacgcag

SEQ ID NO: 260544 - DNA, 122 bp, Homo sapiens
tgacttctccaggtctcacgggcatgggcactcccttggtggcaagagcccccttgacaccggggtggtgggaaccatgaagacaggatgggggctggcctctggctctcatggggtccaag

SEQ ID NO: 260545 - DNA, 122 bp, Homo sapiens
cccccgccctccccgcctccagcgcgagtgacaacccggtctctggctctggagctgcggcgcggaacaagccccgcagggccttccctggccgccaacacaccactcccggagctgattcc

SEQ ID NO: 260546 - DNA, 122 bp, Homo sapiens
aaccaaagcaggcccctgcccctcactcacctgtcacgcccacggcggacaccgggcccacgcgctgcccctcgtggaggccgtacaggtgcatcttgtacttgtgcccgggctctaggcct

SEQ ID NO: 260547 - DNA, 122 bp, Homo sapiens
cagacacagcaaagcccagaatggcatcggagatgagctgctgcttgagaaacagattcccggcatagccaacaagctgccagacaccgttccaatgccaggcccgaagccagccacaccga

SEQ ID NO: 260548 - DNA, 122 bp, Homo sapiens
aggttcaggggaagaggatgatattactgccaatatcgcaggggttgtacatacctcccgcgatgcggggagtaagagccagcccctcttcccctcctggctcttaggacccccatcgcagg

SEQ ID NO: 260549 - DNA, 122 bp, Homo sapiens
aactttcattttgatcttttccatagtctaagggttgactccttcttgccccgggacacccgagtccccatagctctagctgatggttaagaatttgaccgaggctatatacaagaaaacaa

SEQ ID NO: 260550 - DNA, 122 bp, Homo sapiens
ctccggcgccgggaaggtcacccttgcttgttctttgcacttcctgaccttggtggacatcgcgccggctgcggtccgagtgtgggggtgccggctgccggcctcctccgccttcgcggcag

SEQ ID NO: 260551 - DNA, 122 bp, Homo sapiens
ttatttaaaaagtaattttaaaattttgcttttggagactactgtgttccataattacaccggggcaaacacagctgtgctaagtttaagaactgtatattctgttggtggaaaaggactga

SEQ ID NO: 260552 - DNA, 122 bp, Homo sapiens
aacttaaaaagaaatacaagaatggaccttttctgcagtcctgagggagtggacaggttgcgtgcgtgctctgacggtgggatccagaccccctcctctcctgcgttgaaggtgccaccggg

SEQ ID NO: 260553 - DNA, 122 bp, Homo sapiens
ccactgctatattgggagttacgtcatactctaccccctggatatttggatcaatatcaccgggtgggtgtacacctactgcaatattgaaagtaataccatgctgtctccctccctggaca

SEQ ID NO: 260554 - DNA, 122 bp, Homo sapiens
tggtgtcttgtttttatttctctactccaaatatttcatgtgagaaggaaagaggagagacggtaaattagggcactgtggattcccccatgacaaggtttttattaagtgtacagtaatga

SEQ ID NO: 260555 - DNA, 122 bp, Homo sapiens
tgaatacttcgcctggattggacaaattctcggatgggcggaactatgggcggggcttagcggccccgaggccgtagagaatcctgggcggagcgcggtcgctctcaggcgtcctctgggga

SEQ ID NO: 260556 - DNA, 122 bp, Homo sapiens
cctccaaattgacctcttggttcccccacccatcatgcttttgagttttctgtaaaaattcgtcaatctcccactaactttccttacattcatccttcggtcttctaagaccaaatcccaca

SEQ ID NO: 260557 - DNA, 122 bp, Homo sapiens
tggccaaggaggtggagggattccaccccccttgagtgaaagcaagggagacacttggaacgctgcagatggcaccaccctgagactctacctgcaggcctagaatcagcactcatgaaatg

SEQ ID NO: 260558 - DNA, 122 bp, Homo sapiens
tgaccctgtgggatcattgccctgcctttgggcttggctgtgtgaagtttttcctgcctgcgatggtttctctccctacactccctgaataaatgactcatgttgggtcttcaggccaactg

SEQ ID NO: 260559 - DNA, 122 bp, Homo sapiens
cggccccagatacggaaatgtgaggcaggtaactgccaccaggtggcgccaatctgcagccggcacctggaccaaccagtattcattaggcatttcagtaacctagcaagaaagcagcatgc

SEQ ID NO: 260560 - DNA, 122 bp, Homo sapiens
cctttgaaagagcagtggccagccccgcttgtaaaagtcctgaggttccggaaagcggaccgcggtttacaggacacctgtaaagaggaacagaggtgaatccgagggggagaccatgtgac

SEQ ID NO: 260561 - DNA, 122 bp, Homo sapiens
cagaatgcaggccaacagacccgcagcaaaactgcaccttttccaaaggagcaacccagacgggtagacaaaagcacctcctaaaaatatctgggtgccaaggcctttccttcctcacctcg

SEQ ID NO: 260562 - DNA, 122 bp, Homo sapiens
cacacggggacacgtgccttctggaaaggcatctgcatgccctcgagagtcccagcctcacggtcgcgcctcgccctccgtgcacctgcaggccacttccacacccagccgcccctcccagc

SEQ ID NO: 260563 - DNA, 122 bp, Homo sapiens
agtgcagattcagggggaaatgtcacttcctgtcaccacggaagccgcactactacttgtcgcaaaccaccagtcactacagtaacacccaagcccactcttattctttggggtgccattta

SEQ ID NO: 260564 - DNA, 122 bp, Homo sapiens
cacagatgcgaacgagaggcccaggtaccctcatctgaacaggctgatgctcaggaggggcggctggtgtgggcacgctcacatggggtttgaatccttctgcatttgggagctctctgggg

SEQ ID NO: 260565 - DNA, 122 bp, Homo sapiens
aagacgacggcttccgggtgggcggcttgaggtggcttccggccgccaggcgagactccgcgggaaaactccctgctagagagactaggagatttggggctgcggccgtttcctccggagca

SEQ ID NO: 260566 - DNA, 122 bp, Homo sapiens
gagcctccaatcagtgctgtccactgggactttctgtgatgacagaatgttctagatcttcgctgtccagtacggtgacccccagacgccagtgacgactgagcgcctgacatgcgggcagg

SEQ ID NO: 260567 - DNA, 122 bp, Homo sapiens
cttttcataagcttttccccttctatatgccatctctgatgggagcctctttagatctttcgtccatttactaattgggttgttcgatttcttattgttgagttgtaagtggtttttaatgg

SEQ ID NO: 260568 - DNA, 122 bp, Homo sapiens
ttggagacaacaacatagggctgcgagggagggaagtggtgagcccctcgcacctccactcggatcccgtacaggtatttgatgtggagcagcattagacgcaagatcctgtggggtcatgg

SEQ ID NO: 260569 - DNA, 122 bp, Homo sapiens
acaacgtgatcaattgcaggctatttgttctatccctgcccagtgcccaggttttacctgcgtcgcctcacttaagcctcagagtggtcctgtgaaaatcaaccttgtttttttaggaggaa

SEQ ID NO: 260570 - DNA, 122 bp, Homo sapiens
gccgcaaagcccatgaggccaacacctgatacagctctttaaacacagcccgaatgccggcggtaacacagcaccgcggaggtgggctaagaagcacgtggttatcgaacgttgtcattcat

SEQ ID NO: 260571 - DNA, 122 bp, Homo sapiens
tgcggcttaggaaaaaccttttccttgttcattgaggaatgagactgtgttaggctgtcacgagcctcctttgccacaacaaaaactctgttccatcagtgctttcatatgctgccgtaatt

SEQ ID NO: 260572 - DNA, 122 bp, Homo sapiens
cacccgacagccggccagggacagtcacccccaagatcaatatcgcagtttgaattgttccggcaaatctcccctcgggctcgacggatgtgcgccccagatgtgctgacacatgtccgatg

SEQ ID NO: 260573 - DNA, 122 bp, Homo sapiens
aggcaagatcctgagtgtgaacaccagcatgtgtaggaggcttatataccctggtcagagcgtgtgatgagtcatctgtataccctcctttgctatagttatttgtattacgtttgatgtta

SEQ ID NO: 260574 - DNA, 122 bp, Homo sapiens
gctgccgacagattagtaagctgcgtgagtcagatccaaactcgccagcagcccagtgcacgccagctcccgggcggctcagcaggcaaagtgtgggtgccaggaggctgggtctaactcca

SEQ ID NO: 260575 - DNA, 122 bp, Homo sapiens
ctggccaacatggtgaaaccccgtctctacaaaaatacaaaaattagctgggcatggtggcgcctgcctgtaagctactcaggaggctgaaggacgagaatcacttgaacctgggaggcaga

SEQ ID NO: 260576 - DNA, 122 bp, Homo sapiens
ctatgcttccttccctagagtgctgatgtcttccaagtatgcggatggggtgactggtcgcgtggagttcaatgaggatggggaccggaagttcgccaactacagcatcatgaacctgcaga

SEQ ID NO: 260577 - DNA, 122 bp, Homo sapiens
ccagccagattgacataaaagctaacattaaaggacatttgcctcagttcccattatatccggctttcaaggagaaattagaagacatactaaaaggtaagaaaaaccacattctccagaga

SEQ ID NO: 260578 - DNA, 122 bp, Homo sapiens
gctcagatgccctgggaaaggcctagtgcttccttctcctcttgtatcccctcacttctccgtgtgctgacttccatttacctttcagagaaaccatctgactgggctaagtatcacagatt

SEQ ID NO: 260579 - DNA, 122 bp, Homo sapiens
tcgagaagcccaaagaacccctgccgcctccccttccccaagccaggccccagagtggggcgtttccataccccgcctcaaggcctggtacagtccgggaagaaccagcaggctcacgctgg

SEQ ID NO: 260580 - DNA, 122 bp, Homo sapiens
cgcctcctcttctgcttggctctctttattattttttttctttcctctctctccctcgcgcgctctctacctctgtgcaaagtgcaaggcagaggtgcagcccgactggaggagagggaggg

SEQ ID NO: 260581 - DNA, 122 bp, Homo sapiens
atggcaaacagattatgcttgtcccaggaagggcagctccaaagagaaaaccttgaagtccgggaaataatgatgagggagttaaattaaagtgcataaaaccctcccgagagataacgtca

SEQ ID NO: 260582 - DNA, 122 bp, Homo sapiens
ttccaaatccctttcatgtctttccacttctctgggtcccggggtgcatttgttactcatcgggcccagggacattgcagagtggcctagagcactctcaccccaagcggccttttccaaat

SEQ ID NO: 260583 - DNA, 122 bp, Homo sapiens
ctaccaaatgcatgtcacttttgcagcattgtaaagtcaagaaattataagttgaaccatcgaaaggtggggaccatctgtatactttgtcctgacataccaaattcttgctgcttattctt

SEQ ID NO: 260584 - DNA, 122 bp, Homo sapiens
gtaggtctaggaatgagggctgaccctgctggcctcaccacacccctcctcctcagctggcgttgcagacggggcgtgaacccccacccatctggcgagtccagaaggcccttctgcagaaa

SEQ ID NO: 260585 - DNA, 122 bp, Homo sapiens
ataaaataaaatagtagaaggtttaattaggaatatttcactctccatacctgaagaattcgtgatagccaggagtctacaatcaaaataacataaataataagataaaaataaaattaatt

SEQ ID NO: 260586 - DNA, 122 bp, Homo sapiens
agagaaagcacaccaccgtggcacacgatgtgccactgctctcaaggaatggcctcacatcgtggcccagctgggaagccccagcaaggacacaagcctttatctcatctgaacctggggaa

SEQ ID NO: 260587 - DNA, 122 bp, Homo sapiens
ggccaccgcgccgcagagctgtggggcaatctgcggcggtgacgggccactactgggagccggctgggaaagcctgtattgccattggtagctaccccgagaacgcggcaaatcctaaatga

SEQ ID NO: 260588 - DNA, 122 bp, Homo sapiens
ggatggaacactgaagcggacaggccaggcggggagcgaggcctggcgtcgggtgggcggcggctgcactcttacctggccaggtgtgggtttatgggatagggatgggactggggccaggc

SEQ ID NO: 260589 - DNA, 122 bp, Homo sapiens
taccctccaggattttcgagtttctcttcttaaaaagaacttcgtgctgcgggttcggcgcgggagacccaggcaggactcatcctgggagtgctgtgctgtgctctccctccgctgcgaaa

SEQ ID NO: 260590 - DNA, 122 bp, Homo sapiens
ccatcatccatgtggtcacaaatgacaagattccttctctgttaaagctgaataaaagtccgtgtgtgtgtgtgtgtgtgtgtttatccattcattgacaaatgaatggataggttgagtat

SEQ ID NO: 260591 - DNA, 122 bp, Homo sapiens
cagttcactgccttctgaccagcctttgccggggccctgactgtggagtttggtggatgacgtgccaaggagcacaggtctccattgccggggccctggtcattctgtggggttaaggagaa

SEQ ID NO: 260592 - DNA, 122 bp, Homo sapiens
gcatggagatgcacgtctctaagacgcctcaccactgcctaagaagcaatcaaggtgacgcgcccaccggaaacggaagtagtcgactcgaggtgtgggactacctttcccagaaccctccg

SEQ ID NO: 260593 - DNA, 122 bp, Homo sapiens
actcacggttccagtacaccgggtagcactctccttgggtcacatccacctcgtagaggccgccccgcacgcacacaggctcgatgttcacaagctccaccatctccggctcgtgccccgtc

SEQ ID NO: 260594 - DNA, 122 bp, Homo sapiens
aagccgtgctgcagagcccccagggggctgatgcgggcggcgggctcatactccagcatgcgcagcaccaggtcctggaagcggaggtagtcggcggggctgtggcccggctcccccgcccg

SEQ ID NO: 260595 - DNA, 122 bp, Homo sapiens
gggaacctgcctccgcgcgttagcgcgcacgcgcgcctcatgtgtcgtccccatcagcgccggcttccgtctataggccagatgcactgtcactctggcgaagtcgcagacccgattggccg

SEQ ID NO: 260596 - DNA, 122 bp, Homo sapiens
caggcatgctgagagtgtcggcgcacaggtgggcacggccacgcactgacccagtgttcacgaagggtttgcactggacaaggctcagacgctcatagagtctagaatttcctctgctgtac

SEQ ID NO: 260597 - DNA, 122 bp, Homo sapiens
ccgcataacacggggttctttgggtaggcagctagaagccgagcggccgggtcgcagcatcgtctcctttactgcattgtactccacagtcgtaatgggaggttcccgcttcccacatcctt

SEQ ID NO: 260598 - DNA, 122 bp, Homo sapiens
gcgatcacaccgagatggcaccgagcctccttcaaaggcttcggcttgttgaaagtggggcggcggagtgggggagccaaaacttagggcacaccctttttgtgattgaaatgtggctgccc

SEQ ID NO: 260599 - DNA, 122 bp, Homo sapiens
gggcataaccccagtcggtgggccagtgcagttatcctagcaagagcgggcagaggatgccgggggctggcagacaaccagggtgtttgctccaaaccctcttacagctacaaacggagcat

SEQ ID NO: 260600 - DNA, 122 bp, Homo sapiens
attcagcataaaagccaaactggctgtggccatactagcctgtgtgctgtgtggtctgcacgccttacctctctcatctcaactcctactgtgctgctatcactcacccctctctggccacg

SEQ ID NO: 260601 - DNA, 122 bp, Homo sapiens
aacattcttgaaccaaagtatttgaacacgtctgcaagaatgtctattggataggccgggcgcggtagctcaagcctgtaatcccagcaagttgggaggccgacgcgggcggatcatgaggt

SEQ ID NO: 260602 - DNA, 122 bp, Homo sapiens
gacccagaggagccggcgtgcctctctgccctccagccttcttcaccatgtccaagatgccggccaagaagaagagctgcttccagatcaccagtgtcaccacggcccaggtggccactagc

SEQ ID NO: 260603 - DNA, 122 bp, Homo sapiens
acgagagcaacagttgggtacgaaggtccctcggctcctgtccccgttcccacccacactcgagacctcattagtcacaacaagcaaacaactgttaaagcagtcagactcaaagccaactg

SEQ ID NO: 260604 - DNA, 122 bp, Homo sapiens
catctgctcccactttttaatgaactgccacttgtcgcactcaataaaatcagcactttgcgagaatttcagcaacgatggacagacgggagaaggcaagaggcagcggagcaggcgatgag

SEQ ID NO: 260605 - DNA, 122 bp, Homo sapiens
cccctccccttcccctgtcatccctcccccagacggcaacccggcgggcacaaggtcggacgacctgctacgtaactcgcgcgtgtgactgcctagtaacagtgtctcgagtcggaagcgct

SEQ ID NO: 260606 - DNA, 122 bp, Homo sapiens
aggctggggacatgggcgcccacccagcgtcgggccgcgtttaagccacctgcccacccccggggctctcgctgaccttcaaagttgagattggccccatgccgcaagagaacgtcggccgc

SEQ ID NO: 260607 - DNA, 122 bp, Homo sapiens
atggctgcccctaaagctcagaggactagggcagcttagtgagtcttagagcttcagtgacgcaggagctcatatctcttgaaagtgtgataaacacattcagcagagctgtggcttgtttg

SEQ ID NO: 260608 - DNA, 122 bp, Homo sapiens
tccccctccccccgcccgccccgacctccgtgggctcctgcgctgccggagcctccccgacgagcgccgccccctgctccaaggcgcccagtcccatcgaccacccaggggctgaggagtgc

SEQ ID NO: 260609 - DNA, 122 bp, Homo sapiens
acttgctgtctctctccaattcctggtttccctaaacatgcaatctggttctcctgttcacggccaggcttcaacttcctcatggggcaatccgtggatgcttttcactcccctatctcccc

SEQ ID NO: 260610 - DNA, 122 bp, Homo sapiens
ctcaggtgatccgcccacctcggcctcccaaagtgctgggattacaggggtgagccaccgcgccctgccgaggagcttaagcgatcagttagtcaaagggagaaaagagggtatcagtagat

SEQ ID NO: 260611 - DNA, 122 bp, Homo sapiens
catggaaggaccgttcaagggagggattgggctgtcgagtggctggtgtggatatctgcacgtcatgatttatccaggactgagggaggacagcaaaggccccgcggctactggaaacccca

SEQ ID NO: 260612 - DNA, 122 bp, Homo sapiens
ctgctccagccgccagccagtctctcagagccagccgggcccctctggccacacaggcctcgacccctgcacgaacccgctggaggtgatgcctcacctggaggtctcacccgcagactcct

SEQ ID NO: 260613 - DNA, 122 bp, Homo sapiens
aaagctctctggttgaatccttgactgaagcagaaacctattctctgtgtgctgtttattcgggagaagagttcaaatgtggcctcaggttggctcaggagttgtggcttttcccaggtttg

SEQ ID NO: 260614 - DNA, 122 bp, Homo sapiens
tacttcaggctcagcagccccaggagctggagcctgaggagctgctggggtcctgcccagcgctgaccggcctggcagcgggtcccagtgcgaccggtgaggggagggtgcttgggctcctg

SEQ ID NO: 260615 - DNA, 122 bp, Homo sapiens
caaggtggctggaggaaaaatgaagaagcggaaaggccgttaatcacttttatgaaggctcgagttctgctgttctgtaaaagagaattggagaatgaaacctgctccaacagagatcatga

SEQ ID NO: 260616 - DNA, 122 bp, Homo sapiens
gcttcgggtccggctccacgcctgccccatgtccccacggtccgcggccctcgggaggcccggccctgggggctgagctctgccctgggaccgaaggccactctcccagccaaggccggagg

SEQ ID NO: 260617 - DNA, 122 bp, Homo sapiens
gaggtcactcttaccagtccccactctgatgagaaaactgcccagctccaggcaccatggcgccccagtgatgtagccgaacacccgcgcctctaacgtcgccaacggcccacctctatggt

SEQ ID NO: 260618 - DNA, 122 bp, Homo sapiens
cagcagtggttcagggccgtgcttaggagcaccaaacctgagcctgggcgctgcatgctccgagggccaatcccagcacacactgttcccccactgtctgaggcccagcacctgttgtctag

SEQ ID NO: 260619 - DNA, 122 bp, Homo sapiens
tctgtctcctggcgggggccggagtcccgcccctcgtccaacttgaaatctgttgggtcacgggccagtcactccgacctaggcaagcctgtggtggagctggaagagtttgtgagggcggt

SEQ ID NO: 260620 - DNA, 122 bp, Homo sapiens
aaatattaatcttaaccttttgactatagcagagtttgcagccccaggcctaaacgattccgcacgccctcgcactcccctcctcccagcatgggggtcctgcagcctccacacccccctcc

SEQ ID NO: 260621 - DNA, 122 bp, Homo sapiens
accaggatgacctccttgaggagctgggagggcgtgtggttgaccacgctgtgcacggagcgcaggatgaccgacagcgcctcattgacgaagatgaagaccacggagacctggggcaggtc

SEQ ID NO: 260622 - DNA, 122 bp, Homo sapiens
cccgggctctgcttccggcaggaattggcagtggccgtcccggcggatggggcggtgtcccggcagcgcgtgggacggtggagccgaggcgcgtgccggactcctgagacaggtcagtgtgg

SEQ ID NO: 260623 - DNA, 122 bp, Homo sapiens
agcactcatcttacctcctgaggattttcatttgtgtttctggaatacataaagccttttcggggctcactcacagattcatttgttttcctaccagccagccggctcacccggctctttga

SEQ ID NO: 260624 - DNA, 122 bp, Homo sapiens
atttctgagttgcaattccttgcatccactgtgagacaaacccccgccatatctccagcacgcaagaactggaacgcctgaaccgcagctgccagggtttcctccaggcccgtttacccgag

SEQ ID NO: 260625 - DNA, 122 bp, Homo sapiens
caattggagaaataaatcctgcccgcagcagcagcagctacaattacggctctgtttttgcgagcgcatgagggacagtgtccctgccgctcttaaatgacaggcgtctattaaagatagct

SEQ ID NO: 260626 - DNA, 122 bp, Homo sapiens
gtcatggcaacctggcccccccgccaggcctgccaggaaagccggcggacacgtaagccacgcccactctgggcccaacgcagtctctccgcggaggctctgaacccagccagggagaggca

SEQ ID NO: 260627 - DNA, 122 bp, Homo sapiens
agatttgctggcctgctggggagctgtgcctgtccatagcccccctctttcccagggtagcggttcttcttttttttttgagacagagtctcgctctgtcgtccaggctggagtgcagtggt

SEQ ID NO: 260628 - DNA, 122 bp, Homo sapiens
gttaattttaacccgcagatcgcagtttcagcggactaacattcctcgcagaccaagcctcgtctctgccttcttaggattcagcttggggtggtccattgacttctccagggagctcctag

SEQ ID NO: 260629 - DNA, 122 bp, Homo sapiens
ctactcggagaggaagttaatcccatcgaactccagccaggaaaacgtgggcttgggaaccgcggccgctcgtttccaggatctcccgcgggccttcgcggctgaagaaccaggcggcgagg

SEQ ID NO: 260630 - DNA, 122 bp, Homo sapiens
gcagagtctgggggaacaggggctgggcctcggggtctctatccctgcttttctcgcctccgcttcccacctcccttgccctcttaggtacaggctggttgatgggtcgaggtgttcctcgt

SEQ ID NO: 260631 - DNA, 122 bp, Homo sapiens
atttgtcagtcatgtaaacttgtatcacctgtgtgaacctatcacctgtgtgaacctgtgcgactgaccttagttactcagtctccagctcctcagaggtcagacaggtacagtgtggctca

SEQ ID NO: 260632 - DNA, 122 bp, Homo sapiens
aatccgcgtgcgcgtaagcagtattgttgattagtgccccccccttccccccgcccgccccgaaaagcgacccctagtggtgcaccggtgcggaccagaaaattgcacgctttcttgaaaga

SEQ ID NO: 260633 - DNA, 122 bp, Homo sapiens
tgtgtgcaggaaaccgcccccgactccgcgcgatcgccctgtgcgcgcaggagtgacaggcgccccagctcgcgctctccagcccgccagggcccggctttggcagacccgaggctcctcac

SEQ ID NO: 260634 - DNA, 122 bp, Homo sapiens
catatttgttttaaaattataaatccctgagcactttttcttcttcctcctcatcactgtcggtgacattgacttgctggatgctagaaggagttgatgtcggggctgtgaagacattctcc

SEQ ID NO: 260635 - DNA, 122 bp, Homo sapiens
gggcactggaggggaggggcgtgctctgctgacaccgcccccgcctgcagaatgcaagtgcggccccatcgacctcctgttcgtgctggacagctcagagagcattggcctgcagaacttcg

SEQ ID NO: 260636 - DNA, 122 bp, Homo sapiens
aggcgggcgcggaggttctatctgtttcttcctccttcgtgagcagcatggacgtgctagcggaggagtttgggaacctgactccggagcagctggcggcgccgatcccgactgtagaggtc

SEQ ID NO: 260637 - DNA, 122 bp, Homo sapiens
ggtgggggagagggagtggggtggattggagggctgtcctactgttacagggctctgccccgggcccacctcacagtgaaggcagaggcccccaggcagcccttggtgggccagaactcaac

SEQ ID NO: 260638 - DNA, 122 bp, Homo sapiens
tcacctgcctcttggggctttgagtactaaaggaaagcctgcggggaaactcactgtatacggtgatcttgacaggcaggctgcggccctggctgatggggttctccaccatgcagctgtac

SEQ ID NO: 260639 - DNA, 122 bp, Homo sapiens
gctgatttaaaagtgaaagaaagtaaccaattggttcgcagacaaccttttcccaaaaggcgggcgattcaaacccctagccccacctgctccgtttcccgcccagctggagctctggagcc

SEQ ID NO: 260640 - DNA, 122 bp, Homo sapiens
ggtgtgactgcagcgacttatttcgatggctgtgtagtatgccattgcaagagcacactccgatatacttaagcggcgtgctggcaacagtacggttcttttcaatctgggcaattacagag

SEQ ID NO: 260641 - DNA, 122 bp, Homo sapiens
gcggcggcaccacctccacttgcgcctgtggctccacttgcttggttctggtccactggacgctcaccctgagaaaacacgctggacatgagcattaccagcctgtacactgttgtaaagat

SEQ ID NO: 260642 - DNA, 122 bp, Homo sapiens
ctggggagtgtgtcagtgggtgggggtcgtctcgggggcctgctccagcttgctgtccttcggttctaggatgccctgaaggttgaccagggcccctcacgggacatcccaaagccatgggt

SEQ ID NO: 260643 - DNA, 122 bp, Homo sapiens
ctctgcttacgtgcaggggctgcctacactgtgtaccctgggtgcggctgttgaatgccacgcagtggcctgacacccggcctgtggtcatgattaccgtgctgcagccgccactgcctcac

SEQ ID NO: 260644 - DNA, 122 bp, Homo sapiens
atcgcagactttggcatgagccggaacctctatgctggggactattaccgtgtgcagggccgggcagtgctgcccatccgctggatggcctgggagtgcatcctcatggtgagcagcccgag

SEQ ID NO: 260645 - DNA, 122 bp, Homo sapiens
atggagacagggagattggaaattccaagaggtgatattggtgagaagagaaaggcaggccgagaaaaaaacagagtaaagagaaatttaggaagacacagaaaagggatatgagggaagat

SEQ ID NO: 260646 - DNA, 122 bp, Homo sapiens
ctttccccagagccttccctggactctgaggtgacttccaagctgaagagctatgaattccggggaagccctttccaggtgacccggggggactacgcgcccatcctccagaaggtggtgga

SEQ ID NO: 260647 - DNA, 122 bp, Homo sapiens
gagcaagacttccgtctcgaaaacaaaacaacaacaaaaaaaaacaatggattcaccatccgatgggctccctcactgccaggtcactcttcatggaagtatttgtattccagtcctttctg

SEQ ID NO: 260648 - DNA, 122 bp, Homo sapiens
ggatgggaaggagacttgtgtgggggcctcgggctggcgggtcgcgggttccttatcctccgccttggcgcctctccgcccaccgcccaccgcccctccctggcattggttggcgccagggg

SEQ ID NO: 260649 - DNA, 122 bp, Homo sapiens
ccttccacaaacacccagcatagcaacctagctagtagttttcgtcttttaaaaaatgtccgtcccgtttctgttccattattcacagtgaaaggagtcaaaacaggagaatagggaagtcg

SEQ ID NO: 260650 - DNA, 122 bp, Homo sapiens
tgggggaaagaactttacaggaattaaggtttctacacttcactagaattaagtcagcaccggtagactgtgataatttatgtatctataaagtgtgggtttggacagcagattttatcagg

SEQ ID NO: 260651 - DNA, 122 bp, Homo sapiens
aaaaaggggtccattttggagatatttttcctggctgttggcctccgccacacatggggccgctggagggggcgagggcagacttgactggtgggtttgggaggagtgctgccaaagccagg

SEQ ID NO: 260652 - DNA, 122 bp, Homo sapiens
ggccctcggaggggtttctctgccaggaggcggcccaggcctcagtccgtgtttctgatgcgggataaggagggggcatttccttgtgggagaagccccatgccccacgccccgtgggctgg

SEQ ID NO: 260653 - DNA, 122 bp, Homo sapiens
cttgttgcagcatgcctggttggctcctacctaattgccatgtgtctggttgtttcatgtcgggttggtttatgtctggtaggtttgtacctgattgcctcatgccagcttggctcatgctt

SEQ ID NO: 260654 - DNA, 122 bp, Homo sapiens
ctgagccaagatcaagaattccaccttccagtgagtcagctgattctgcagagggaaacgcggttccaaccccacgtcatacataacttttgagttgcataagtcatctgtgtacaagagct

SEQ ID NO: 260655 - DNA, 122 bp, Homo sapiens
cagcgggcggctggaccgccgcggtggggcggggacaatggggtacaaggacaacgacggcgaggaggaggagcgggagggcggcgccgcgggcccgcgggggtctagactgccccccatca

SEQ ID NO: 260656 - DNA, 122 bp, Homo sapiens
agcgacggccgttcggccaatagctacgaaggttggctggccgcctcaccaatcacagagcggcattggaagatggggccggggcgtggcggagagaacccaaactccgccccacctgactc

SEQ ID NO: 260657 - DNA, 122 bp, Homo sapiens
ccgaactggatcctattaaataattcaatggtagcggtgtaattttggttggaaccagcacggattcccaagtcgtgactgcaaaaagtgagtaatgcgcgctggctgcgtcatggctctag

SEQ ID NO: 260658 - DNA, 122 bp, Homo sapiens
tctggcccttcccaaaaacagaacaacaataacagcggcagcctcgggagccaggccggtcgggggcctggacaatatcccgtgaaaacagccagaaagaggggtttgcttttgtcaagcca

SEQ ID NO: 260659 - DNA, 122 bp, Homo sapiens
agaacctgaagctctcagaggggagcaggtgtcaccgcaggcaagtccagccgaagtctgcgttccgcagcccacagaacgacaacttacccagagccgcctagagctggtttgcagcacgc

SEQ ID NO: 260660 - DNA, 122 bp, Homo sapiens
tagcaaattctaagttggggataggtgaggcttcttgggtagacaccctgtctgtgttcccggccaagacttgatgattctgatagatgtactggaaatgctggagaaagactcaggcaaga

SEQ ID NO: 260661 - DNA, 122 bp, Homo sapiens
tgatcctgggaggtgaaggctgcagtgagctgtgatcacaccactgcactccagcctgggcgatagtgagacccaatatatatatttttaaaatgtgtaatgaaaacctgtatcttttgtgt

SEQ ID NO: 260662 - DNA, 122 bp, Homo sapiens
tcagcaactaacttgcagctcttctgtagaaagatcctgtgtgtcagattgcagcagctccgcattatcctcactagcaacttcttcaaatccaaccccctttgcaagagcgatacagcttg

SEQ ID NO: 260663 - DNA, 122 bp, Homo sapiens
gacacctcggcctccactgacgcggcgttctcttcccgcagcgcctaggactgagggcaccgtggccccaagtgaaattccttaaggcttcctttgtaactaatgggcatcttgttaagagt

SEQ ID NO: 260664 - DNA, 122 bp, Homo sapiens
gggagtcggccagaattcttgatgcgcttagaatgtttcttcttccggccctctggtcttcgcaattatcgtccctctcctaggtcccccgcccattctataggctctcatgagtctcttcc

SEQ ID NO: 260665 - DNA, 122 bp, Homo sapiens
tataagtgttccagttcttaaagacggtgtgtccgaagttttctccttctgatgttcagacgcgttcagagttttttccttctagtgggttcgtggtcttgctagcttcaggagtgaagctg

SEQ ID NO: 260666 - DNA, 122 bp, Homo sapiens
tttttcttctgttccctggagcccgacttggggagggcggacggcaggaaacgcgggaggcgaaggcgaggctgctcagcggcggctcgggatgcctccagcaacggggactagccctgcgc

SEQ ID NO: 260667 - DNA, 122 bp, Homo sapiens
gccgccatcctatggctgaaggggactgagggccgagctgcgccaaggagaactcggggccgcggattttggagccagctgcggggaggccagagtcccgccacagccacttcccaccagtt

SEQ ID NO: 260668 - DNA, 122 bp, Homo sapiens
cccacaggtaatcaggatgccaccaagggccagccctgcctgatggtgaactgacatcaacgcctgagcctggctctttccgtggtgttgggtgtgactgcagcgacttatttcgatggctg

SEQ ID NO: 260669 - DNA, 122 bp, Homo sapiens
attttaggaggctaaggaaggatcagggagatgtgggttggtttttgcttggtttcaaggcgcacaggggatagcccagaagcctacaggaaaggtgagccgaacacatcacagagagagaa

SEQ ID NO: 260670 - DNA, 122 bp, Homo sapiens
ctggggttcccctttctggaagaccattccgaagcagggcagcatttctagaatgccttacgttttctctggaacagtctccactgagattgttcttctcttccttgggctggaaaaaatag

SEQ ID NO: 260671 - DNA, 122 bp, Homo sapiens
ggcgccccgcggccgcactcacctgcctggcgtggcccgctgcccctggcgtctccacggcgctgcctttgctccgcccgcctcccaggcggccctggcctcggctgggtcccggcggtgcg

SEQ ID NO: 260672 - DNA, 122 bp, Homo sapiens
gctcagacttaatgctgtgttcacccccaggctttccagggctgactgggcctccagggtcgcagggagagctggggcggattggactgcctggtggcaaaggagatgatggctggccggga

SEQ ID NO: 260673 - DNA, 122 bp, Homo sapiens
cttgcacgttgcactacccagcgtccaccttccagtggtgaactggagcaggacgaaaggcgtgctggcaacgctgatgagaaggtcagcacatgccatggagaccacaaagtagttggtgg

SEQ ID NO: 260674 - DNA, 122 bp, Homo sapiens
ccaaagggaagacggtgagccggaggagtcagtcagaggggcgagcaggagcgattccgtcgccaaacaggtaagttattctctggccggggcggggggtttggaggcggggaccgtccagc

SEQ ID NO: 260675 - DNA, 122 bp, Homo sapiens
gatcttggtggtcttcatgacttcatccaggctggtctgcatcttgtcagtggtgtctgtcgcgggtactgccacctgcttgggcacacgggtagtctgaatgagcaccgtggtagaggtgg

SEQ ID NO: 260676 - DNA, 122 bp, Homo sapiens
agtcttgggaaacctccctcattttctcttgctgcttctgctttcttttcctcctcatgtcgcataaacctgtcaagaagctcagccttttgaaaaacaaaagccagacagagaggttgtct

SEQ ID NO: 260677 - DNA, 122 bp, Homo sapiens
cacttcggtaaggcgggagcccgagcaaggtcaaggagggaagtgcgcggtgccacggaccgacacagttcgctctagcatctgacgctcggactccgcgccctcagccggatcccagagcc

SEQ ID NO: 260678 - DNA, 122 bp, Homo sapiens
ccttaggccaggtcagctgcgagggtcacagagcgttccgggggccaaggcgccgggccccggggccatgctcttatcaccagccacccgtcctcccgccagagggtccctgccccgagtga

SEQ ID NO: 260679 - DNA, 122 bp, Homo sapiens
gggatccccttccacgcctcctccccgtgccgcgcctcagtccgcactgctcattggccgcgtgccctgccaatccgatgcacgtcggctagggcaaagaccgcgaaaaagcgcgtacacct

SEQ ID NO: 260680 - DNA, 122 bp, Homo sapiens
tccttaaggccttcattctttaaacaaacaggttgaaatggtatgttgtaaaagagaagacgggagagaggtatttagatgataagtgtacttcacaaaaatgccaaagtttgaaaaatagg

SEQ ID NO: 260681 - DNA, 122 bp, Homo sapiens
agtatacctgcaacctcagcagtccctttttatccatacagattctctgcctattgtggccgtttgctctaatttaaatttcccatggctttcggttgcagacttggttttctgcaagagtg

SEQ ID NO: 260682 - DNA, 122 bp, Homo sapiens
agggtgttctggtcaatgacctggaaaagggagtgaggtttattatcgaaagagacaggccggtggagaagactgccgctgccaaaagccacccatcctggttccaactcctcgttccggca

SEQ ID NO: 260683 - DNA, 122 bp, Homo sapiens
ctcgagggcgaggtttggaccgccccctcccaccgttaccatggtcaccgacacacttagcgaacgtgttcagtgctgctgttggctgaacaaggacggtcttgtattatggtgttgttggg

SEQ ID NO: 260684 - DNA, 122 bp, Homo sapiens
acgaggggaaacattcacactgtgttctctctacagggtcaggtcatttttcttcatgttcgggcgggaaaaggaattcctttctccttttctaaggcaagctgctggtgttgtattcaatc

SEQ ID NO: 260685 - DNA, 122 bp, Homo sapiens
gggggctctggaccgaggggcggcgcggggcggcgcggggcggcgcgcgcggtcctggagcgctagtacttgcttctcgactccccggccgccgcctccggccgccccggggattccgccac

SEQ ID NO: 260686 - DNA, 122 bp, Homo sapiens
tggaagtgctgcaccacaaggagagattgtgttttcttcccctgctcttaaagaaacatccgcgaggtccgcaccggcccatttctagatcaggacgaattccttccctggagtgcgctccc

SEQ ID NO: 260687 - DNA, 122 bp, Homo sapiens
tcgttcttcaggacatttcctgttttccgattagctacgcctgcctctcactcagttctgcggaggtcaccactgcagtaattaaccccaatgccagcctccaaacaaggtttccgggagaa

SEQ ID NO: 260688 - DNA, 122 bp, Homo sapiens
gtgccctcgagccattttattgagggtgaagtccgtgagactgggagggcatcccctcagcgtagaagagcaccccgtgggcagtggctctgcttccccagaggctgcagggtgcagggtcg

SEQ ID NO: 260689 - DNA, 122 bp, Homo sapiens
tgaaaggatcactcactggctatttggatagctttgatttttcttaagcagaagttgaaacgtagcatccaagtttcaggatcagccttggtaatgtttcccaccccatggccagtggcata

SEQ ID NO: 260690 - DNA, 122 bp, Homo sapiens
gagcagacagaggtggggatgaatcagtacacgcccacctcgggcccacaggggaggatgcgcggagctgtgggtgtggggaggagacccctctgcgtcatgctgacggtgtcggcagagtc

SEQ ID NO: 260691 - DNA, 122 bp, Homo sapiens
gcctttctcgggatctatctttctgtgtctctttcccttgctgattttctgtccatttcccgcaccaccactaccaccaaaccctcctcccgccttcccccacccctagtctctgtcttctc

SEQ ID NO: 260692 - DNA, 122 bp, Homo sapiens
tgcctcgggccgaaggtcggccgcctcagcttctctccatggacacggcgggcgcattgacgccacaagcttcggcgcacggcgccctcagtcctagccccgccccccgccgccaccattgg

SEQ ID NO: 260693 - DNA, 122 bp, Homo sapiens
tatttttgtggaactccaaactcagtgtaacacacaaagctccttactgcagcttgtaagcgtctgtgtgtggtcatggctgcgtccctagcagcttcctagtggtgggttactaagtagtt

SEQ ID NO: 260694 - DNA, 122 bp, Homo sapiens
aaacaggtggctactgttattgtatatcacaatccacccttaaaaaattagagcgcaaggcgctacaaacctggttgagatggaaagtaatgtagtatgtaattgaaggaaaccagttttga

SEQ ID NO: 260695 - DNA, 122 bp, Homo sapiens
tgaggacccggggaccagttcagggtgactgggacggagcaggaagtgaccccagcttcccgggcccctctagcctggagtcagagcatcagctctatgggatttaaccctttgcctcccgc

SEQ ID NO: 260696 - DNA, 122 bp, Homo sapiens
catttgatcctcctaacaaccctatgaggatggtgctaggattgccccccattttatagacgaggaaactgagacacagaggatttaagtagcttgctcaatgccatctggttagtaaatgg

SEQ ID NO: 260697 - DNA, 122 bp, Homo sapiens
ctccagctacaggaaatatgcgactcgtctgggacagatcaaacatgaccttagtactaacgcaaacaagactaccacgtgtggtttatctctgagggaaaatgtgaagagaagttacttac

SEQ ID NO: 260698 - DNA, 122 bp, Homo sapiens
ggaatcgaggttggggaggttatctagggagatcccggagggaatctggtgaggcctgaacggagggagatctggggctgaataaagggcttctgccctctaaagtcgcaaagacgtagggt

SEQ ID NO: 260699 - DNA, 122 bp, Homo sapiens
ggggtaccccggcgttgaagtggttcaccagcaggtgcttcttcagctccagctcctccacgatgatctccacctcccgctctgagaagttcatcttccttttcttggctgggacggccatg

SEQ ID NO: 260700 - DNA, 122 bp, Homo sapiens
ttattttctgtcttctttatagatcatttcggtggggcctgtaacatatattaagccatgcgcttcttttacagctttttaacatgatcttcacacatactttcctgactgaatggtgcccc

SEQ ID NO: 260701 - DNA, 122 bp, Homo sapiens
gaagatgagagaaaattgtcataattcgaagatgatatcaccgtctacctagaaagaaaccgccggctgggcgcggtggctcaggcctctaatcccagcactttgggaggaagaggcaggtg

SEQ ID NO: 260702 - DNA, 122 bp, Homo sapiens
ggagccccgcccaaggctggcagcagcagggtagaggccactggtccggggcagcttccgcggggaaacaccgccgcgctgtgagcattgggggaactgcagccgccgccccatctgccggc

SEQ ID NO: 260703 - DNA, 122 bp, Homo sapiens
cgccttcccaaacacccgactcagacggtgcctgggcccagaccgctggggcccatgagacggggttgcgttttacctcatgggctcagcggtcatgttttcgcttgaacgccttgtcggct

SEQ ID NO: 260704 - DNA, 122 bp, Homo sapiens
tttctagtatgttagagtaggaagataaattagatactttttttctatttgtccaaatgtcgaatgtgaaatagtagtaaaaattataagtagttaagctaaattaaacaattattaatgaa

SEQ ID NO: 260705 - DNA, 122 bp, Homo sapiens
attttgataatgcactatttttgtggtttgaaaagaacaatcctaccttaaagtgctacccgaccagcaatggaatttggatttttttttttcgtttttgctcaccattcatttattcaaca

SEQ ID NO: 260706 - DNA, 122 bp, Homo sapiens
cgggccagggcagccctccttcctgggctaaacattttcagaagcccgcctccgggattgcgggggacccccctggcttctgccttcaagtagctcacacttcacacctactcatgacatct

SEQ ID NO: 260707 - DNA, 122 bp, Homo sapiens
ccgcccggcacaaaccgggagccgccccggccccagcgccttcttccccgcccaggcagacgcgacccgccgaggcaaagccttaggaaaaagccccgccctctggcaggctaccctccgga

SEQ ID NO: 260708 - DNA, 122 bp, Homo sapiens
tccattgccccatcacccttgttattaaaatgacaattttgtttggggcaacaataatcccggtcccaagggataaatcatccttattctaggcaaatcattgctagcctattctagtgttc

SEQ ID NO: 260709 - DNA, 122 bp, Homo sapiens
actctcctccttttatgattttcagccggactgccttccctgttgttagtttgtaactttcgctccggcccccgcagcctcgcgcctgccttccctccactgtcctcagccaaggtgtagta

SEQ ID NO: 260710 - DNA, 122 bp, Homo sapiens
agcaatgcccacctgcgcactgggaggacagggtggagcttcaggaagtttgcgctggttcgcagtggggaggagcctggcctcttcagttcctgggtggtgacctggaattcaatctgtga

SEQ ID NO: 260711 - DNA, 122 bp, Homo sapiens
catcactgttgcttctacaagcgccggggacggaacctggtgacaatgaccacggctccccgtggtctgcaatcaggggaccgggccacctagtttggcctctactacaacatctcgggcgc

SEQ ID NO: 260712 - DNA, 122 bp, Homo sapiens
gcatggctatacaattttataaagcattgattttgtttataaaccccacaaacggccgggcgcggtggctcacgcctgtaatcccagcactttgggaggccaaggagggcagatcacaaggt

SEQ ID NO: 260713 - DNA, 122 bp, Homo sapiens
ccgccgaggcaaaggctgatcccgggcacttctgcgggtgctgcgttacacggggcgagacgctgcccgcagtgcttcctgggccattaggtcagaaaagttaatttcctgatggccacata

SEQ ID NO: 260714 - DNA, 122 bp, Homo sapiens
ccagtgcagtcgcccaggaagaccctaagcagcgctgaggggcgcagggccctccctccgcgaccctggagtcccttagcagctctggaattaaccaagattctgaagaggctctggggaga

SEQ ID NO: 260715 - DNA, 122 bp, Homo sapiens
atggaaaggcactgatctgaaagcagcgtaactagagcgttgccagggtgtagggtagatcggatggatggagagaaggtggagggaggataggggagactgccgcagtcacaaacaggaga

SEQ ID NO: 260716 - DNA, 122 bp, Homo sapiens
agcaatcctcgcaaagtttgtgcggcggagcccactccctacctgagctggggaagctcccgcccgcgccgtgtggctgccggggccgcggggagcagctcgcagcccgggacgcaccgggg

SEQ ID NO: 260717 - DNA, 122 bp, Homo sapiens
tcttttcttcccgaggtctgttctaggccagactgggagctcccggggaatacctggtgacgagggttctcaggacttcatccagccggccagtcagcgatgcccgggtcttgggctcaagc

SEQ ID NO: 260718 - DNA, 122 bp, Homo sapiens
ccagctgccagaaatcctgctaccgccccaggacctccatcctctgctgtccctgtcagacgacttgctctggatctctaggctttcggtccagcagctgtcgctcccagggctatggatct

SEQ ID NO: 260719 - DNA, 122 bp, Homo sapiens
gaaagaggttgagttaaaatagatttggaagaaataaattaataattggtaatttaagcccgaggcatggatgagatcaatcagggagaaaatacagaagacataataaggagaggcaagga

SEQ ID NO: 260720 - DNA, 122 bp, Homo sapiens
ccagaggcaaacagaaaggggcggcaaacactgggcggctcagatttatccttcggcctccgcagggcccggccggacgagatttactgggcctcgaacacggcgacagttcaaacctttga

SEQ ID NO: 260721 - DNA, 122 bp, Homo sapiens
gtgaaggtaaagttccattggctatagtatttacacacaacaggaatgtttgacttaatgcgagttaaggcctctggtctactcttggagggggagagcagcccctcttctgaggctgaagg

SEQ ID NO: 260722 - DNA, 122 bp, Homo sapiens
ggggtggccaccgggtgcaggttcagggccaggggccgggcctcctggggattggcagggcgcccgccgcggtcccatgtgcctggggccggtccccgggcggtggccttcggccctgcgct

SEQ ID NO: 260723 - DNA, 122 bp, Homo sapiens
ttttgcaactccgcacgaggaggctgccacggtcctcgcccctgctccctggccgttcggcggccaacggagcgtggaggcctcctgtgtttacatcctgtcagtgctgggaaatgcgagtg

SEQ ID NO: 260724 - DNA, 122 bp, Homo sapiens
aggccacgtggctggaaatggggagatcagggtttcaccccaagcctgagagcccagggccgcgctgctgactactctgtgtgcatctggcagctgaaccttcctgttcccatcaccgtgag

SEQ ID NO: 260725 - DNA, 122 bp, Homo sapiens
tcccaaacccaaggcaacaggtcatgaggggtctggggacctaaggcaggtcctaggagccggcgcagagcagaggtccggccgctgcggttcctggtttcccgcaagctcttccccgggcc

SEQ ID NO: 260726 - DNA, 122 bp, Homo sapiens
aaaatcaaatatgaagtatgttcagcaaaggcataattttctaaaaacacacacagaaatcgcttgagtgaggaaaagtccacatggcagagacaggtatggtccagttcctcttttatata

SEQ ID NO: 260727 - DNA, 122 bp, Homo sapiens
agctgggaggggcaccctctgtctcagggtcttcctcctccttcctccacccgcccccagcgccgcaggatctggaggcgggagccccgccctcacagtgtccccctggaggggacatcccg

SEQ ID NO: 260728 - DNA, 122 bp, Homo sapiens
atgacagttaccactactgagatgaagacaggaagacggtgccaatgatgatgacgtcagcgtcctggaagtggaatgaccagctaaaaagggcaaggaccctttctaaagcaaaaattagg

SEQ ID NO: 260729 - DNA, 122 bp, Homo sapiens
tgttccgggagagcaaacgtcttcccctactccgtcccctagaacacaatcagcagccgccgccactcagctatcgcttccacccaaaatggccgccggcgaaccaggaaatagggaagcct

SEQ ID NO: 260730 - DNA, 122 bp, Homo sapiens
ggctcacaggaacaggtgcagcggctcagatcaaacacaccatggagactgcagagggtccgcacatctgtctgacctggagtaggaggggagaggcaagtctcagtctctctcctgggaga

SEQ ID NO: 260731 - DNA, 122 bp, Homo sapiens
ggcttcctgcctgggcactgctctctatccagaaagacttcttaaacctttcttggcttccgagagtcctccttcgtcttgggggcagaacgggagggcagttataccctcgctgtttctac

SEQ ID NO: 260732 - DNA, 122 bp, Homo sapiens
tgagatgcccaacctgcgtggaaagcctccacccaccttgcagcataagtgcggaggaaacggtgacaaaatcattgccccgctccctaatggggctattactttaaagttatggggccaag

SEQ ID NO: 260733 - DNA, 122 bp, Homo sapiens
gtcccggcccgccgccgccgcgctaaccccgcctccccttccccctcttgtccccccgtgcgcagggcttcctcagccgccgcctcaagggctccatcaagcgcaccaagagccagcccaag

SEQ ID NO: 260734 - DNA, 122 bp, Homo sapiens
ccgccgagcggcgtctttgtgtgcgggggtgtgggaggcgagcgcgagtccgcgcagcgccgccgagtgcccgctccctcccagggcgggtgggggcctctccgcgccgcccgccgccgccg

SEQ ID NO: 260735 - DNA, 122 bp, Homo sapiens
ctgagcatgtggagcaccagcctgtgacattcctctgcccaggggcagcagggcacggagcgtgtgtggccagctgccgccacaggcccccagctcccacgcgggcaggctcgcgaccgcac

SEQ ID NO: 260736 - DNA, 122 bp, Homo sapiens
ttcgcagggtccgttttctaaacattgggtgtcctcgaacctgggggcgcgggctgtgtccgcccccagcagggatgaccatgcctgggtcagtggctgcataaataaataaacgaatgggg

SEQ ID NO: 260737 - DNA, 122 bp, Homo sapiens
ccgcgttcccctgtgcccgccctcgcagcctcgcgcatgcgcgtagctccctgggcgcttcgaagatccagcggcttgctgtgagtccgggaggcaaaattgtacccatttcaaagatgtga

SEQ ID NO: 260738 - DNA, 122 bp, Homo sapiens
taagcagtcccagtgacctgccctgacgccagctggataagagcccctcctacagggtcacgcccagcttctccctcttgtccacctcccaggttgtacctctatccctgaagtactccggc

SEQ ID NO: 260739 - DNA, 122 bp, Homo sapiens
tagaaaatgatcatcaatggctactacaatcaagagaggaaaggttgatggacacctttacgtggatggatcaggctacaagacctgggttcactaatcaatcttaagattacaaaaagaga

SEQ ID NO: 260740 - DNA, 122 bp, Homo sapiens
acccgtggtgctttctgctctcccccttccggccctaggacccggacgccggctctctctcgcctgggttcggcggataacaaaaaggaaactcaagtgcaaagtaactcaaacagttgctt

SEQ ID NO: 260741 - DNA, 122 bp, Homo sapiens
catgcctgtagtcccggccactaagtggctgaaccatgagaattgcttgaactctggaggcggaggttgcagtgagccaagatcactccactgcactccagcctgggcaacaaagcgagacc

SEQ ID NO: 260742 - DNA, 122 bp, Homo sapiens
ttctggtattcgatgccgtggcacagctgcaggttggcagggatgggcttgcaattgctgcgcttgtaggagaagtcgggctggccaaagaggaagagcccgcgcgccgagcccaggcagca

SEQ ID NO: 260743 - DNA, 122 bp, Homo sapiens
tcatgccttttcctctcaacagttgcttctttgagtcagggtgcagctctggtcacctggcggcctcttcagctcagccctccacaaagtgtgagcctgaaggaccaccctgaattgccctt

SEQ ID NO: 260744 - DNA, 122 bp, Homo sapiens
gcattgggaggattcgcctgggcttattgacccagtgtaaccgaagtggattcacctccacgtaccaacatttaacagttgtgtgaccaaagctggttacttaacgtctttgagtcacagtt

SEQ ID NO: 260745 - DNA, 122 bp, Homo sapiens
tgaaaacgtattaggccttaagaattttgcgaacatctaatttaaccctagtaactgtggcgtgggttctttcagaatttacacgcacgtgggagaccgcgaagcgcaggcagcgttaaaac

SEQ ID NO: 260746 - DNA, 122 bp, Homo sapiens
ccgacggagcgtacactcgagttgatggccgacggagcgtacactcaagatgatgaccgacggagcgtacactcgagttgatgaccgatggagtgtacactctggaaaactactcagagttc

SEQ ID NO: 260747 - DNA, 122 bp, Homo sapiens
cgggaagacggaccggcaggtgcactccccaaggcctcgacagcagccagagaaaggcagcgacagggaaagacgagtcaggctcgcgaccaccagagagagaggccctcacgcccagccga

SEQ ID NO: 260748 - DNA, 122 bp, Homo sapiens
atgaaagtaatgaagagagaagctcaaaggcagccgaagccgtcaggtgagtacctgcatcgcctttgtcacccttcgctccgtctcgtccatctcttccaggcagaccattgtgaccgggg

SEQ ID NO: 260749 - DNA, 122 bp, Homo sapiens
attccaggcaaggaggctgcgcgagcgacgtgcagaggagaccacagatgtgccgggaggcgccaagcaggcctgctttcaggtgaagtgttcctgccccaaaccccggtgtttccaggagg

SEQ ID NO: 260750 - DNA, 122 bp, Homo sapiens
gaagaggtcggggttctcctgagaggacacctattaagatacccttattgtgttttccagcggaaaggtcagccccccgctgcaagttcttagattcctggaggatctgcagagtcaacatt

SEQ ID NO: 260751 - DNA, 122 bp, Homo sapiens
ttgagaggttgcggcgcaatggaaggtcttaaaccgagagtatccgggattatttttccccgccgtgcggtgcgtgtcccggaagtgacgcatggccaaggccgggcggccgccttgccccc

SEQ ID NO: 260752 - DNA, 122 bp, Homo sapiens
gccctggggcactgatggcagatgcgtttggcttggtcttgtaggaggccctggccctgccgacatggccaccgcagtcccaacggcgcgctaggttggcgagatgaagaggagtcgcagtg

SEQ ID NO: 260753 - DNA, 122 bp, Homo sapiens
attccaatttcctcaccctaaggctgtgaatggggctcatgttactcaatgtgagtggggcggcgtggcacaggaggtactcagcctggactttctgtgagcgctcaatacaaaacagcctg

SEQ ID NO: 260754 - DNA, 122 bp, Homo sapiens
acttaaaacctgcacacttaagccgcattggggaaccaaaagccagggttctcaggaccacgaaaggcaaaaccagctctaagagagcacgcaaagtcgctgtggcggagtctgtaggaaat

SEQ ID NO: 260755 - DNA, 122 bp, Homo sapiens
cgcatctaaaatagtgcctgacacatattaggtgctttgcaaatattgaatgaaagaatacgccccatcagtatctcaccgcgcctgcgctagatgccctaggtggggccagccttgacgcg

SEQ ID NO: 260756 - DNA, 122 bp, Homo sapiens
ggcatggcaggagaaacagggatgcctgaccaaaggccagagccaaacggaccaggcaggcgacttctgattggctgcctatgacatcaccaggctgggctgctattggcccttatgtgtga

SEQ ID NO: 260757 - DNA, 122 bp, Homo sapiens
tcagtgcagcgtgaagtactcagctaaccctccagaccccggaggctgggcctcccaccccgctgcccctgacccatcctgcacatctgcccccacctggctccgctcgctccccttgctcc

SEQ ID NO: 260758 - DNA, 122 bp, Homo sapiens
catctagagctgagtctcatttgtttttgagccggaggcttggtctccaagccctcccagcgtccacccgtctctctcctgccgggagttttctctcctaagagccggcagatgctggaggg

SEQ ID NO: 260759 - DNA, 122 bp, Homo sapiens
ccgccgctccgtgcagcctgagaggaaacaaagtgctgcgagcaggagacggcggcggcgcgaaccctgctgggcctccagtcaccctcgtcttgcattttcccgcgtgcgtgtgtgagtgg

SEQ ID NO: 260760 - DNA, 122 bp, Homo sapiens
tccgaaagggaaaggaggtgcgcaggcgccacacacggcctttacggcaggagtcgtgagcgtcgccagcagaggtcgtaattcatcgcctttaaccttccctgctcttccgcctcgccggc

SEQ ID NO: 260761 - DNA, 122 bp, Homo sapiens
gatgctatgaacattctgccattcttgtttatcacgttatttatccgtcctcctccccatcggcaatcctccccataactgtggggtcagggttaggaagcttaaggtgactcaggtggcga

SEQ ID NO: 260762 - DNA, 122 bp, Homo sapiens
ctggccctgtgtgagggctcagtgagtgggagctctaagtactaaatgttgtcccatctccgtggtgctttggacttccagcacagcattcacagacacacgtcccttctcagttcatcctc

SEQ ID NO: 260763 - DNA, 122 bp, Homo sapiens
agaaagtggttgggatcaactgtcttccccagcgcccccggtgccaggctccgtgctaagcgcttcacgtggaccagcactcatgctcacgccagccctgctcagtgaatgccaggcgcgtc

SEQ ID NO: 260764 - DNA, 122 bp, Homo sapiens
ctgtgcgcctgctgctacccggggagctggccaaacacgcggtgtcggagggcaccaaggcggtcaccaagtacaccagctccaagtaaactagttacctgggtaaaagcgctaacgaccca

SEQ ID NO: 260765 - DNA, 122 bp, Homo sapiens
gagttcccctggttgagaatcgcaggctgccgctggcttcccccacttccctgggcacatcggaggagggggccacagctggtccctggtctgtgttccctggcacctctgagcagcctgga

SEQ ID NO: 260766 - DNA, 122 bp, Homo sapiens
tgcacaccgttgcgaatcgcggccactgcaggccatgggagctgtgtggacttcctcatccggaagggggccgaggtggatctggtggacgtaaaaggacagacggccctgtatgtggctgt

SEQ ID NO: 260767 - DNA, 122 bp, Homo sapiens
ccaagaataaaagacttatttttggcttacttcctaccaccaccatttttattaaagaaacgaagatgtttccattagctaaaataatggctcttttaaaatacatgcttttagaataatta

SEQ ID NO: 260768 - DNA, 122 bp, Homo sapiens
aacaaagtgattttagaataaaatgcaggaaaaacttttttaaagatgttagtcttgtagcgtgaataaatttgccatcaccttttgtgtggtggcctggcaggtcatatacttttttttgg

SEQ ID NO: 260769 - DNA, 122 bp, Homo sapiens
cccccacaccctgccacacacgtaatctctgccatctctgctgtcacctccttccctgtgcggctgtgctcctcactccatgcagactcaggcaaccggcacatgatcaacctctgcctgga

SEQ ID NO: 260770 - DNA, 122 bp, Homo sapiens
gacaggaagtggcccagccggagattcagccctgggatctctgtggccagcaactgtgggcgggggggtatgtggacatctgcttccattttccccaaacctaagattctgttccctggtct

SEQ ID NO: 260771 - DNA, 122 bp, Homo sapiens
agcaggtgggtgcctgccgctccaggtgcctgcgctttcacacttttcttttccagaaatcgagcggaggacgctgtgtgtgcataaatttcagcaacgctgaatacaggcactcaactgag

SEQ ID NO: 260772 - DNA, 122 bp, Homo sapiens
tggtggcggctgcttggccttcctctagacggcgcccgccgcggacatgcccccagctcgcggcgcgctccgcccccgccaccctcaggcctccatccgcgctgggctccgccaggtcttca

SEQ ID NO: 260773 - DNA, 122 bp, Homo sapiens
gagactgagacagacgcgaggccgtgcattggcggaggtttattgtccgtgctgcaggggcgggcgcgaagagcgcgccggtggggcgagcgcggggctcagtaggcgtcgggctgggcggg

SEQ ID NO: 260774 - DNA, 122 bp, Homo sapiens
gttggagaactcagagggcctggacactctgagcggacagccggggggtggggggcgggacgggggtggcctggcccccccgccaggcagctgtagccccagcctcagccccagctccaaca

SEQ ID NO: 260775 - DNA, 122 bp, Homo sapiens
aaatcctaacactgaccctctttgataacccaggctctaaccaccacaggcacccataatcgctggctcccatagacatcccaaaccgccaacccccacggtccttccctatctctgacaca

SEQ ID NO: 260776 - DNA, 122 bp, Homo sapiens
acagtcctgacttctagcagtccttggactgcccggaaagagacttttaggcataccctgcgatatgtttcttggaatcactggggttaaactattatctcaatgtaattatttatctttca

SEQ ID NO: 260777 - DNA, 122 bp, Homo sapiens
cttcctcaggattgtcctgagccacatcccatcgtccttactccgtcctaactcacatcacggtcctgtgcatttgaagaatcctcaatgtctcatttgggggacacttattatgcccatac

SEQ ID NO: 260778 - DNA, 122 bp, Homo sapiens
tgggcagaatagccaatgtgccagtctctcggggcctgggggactggctggccagaaggtcgggacctctggtccccatccactcagcctctgccccgcactgccaagggtactcagctctc

SEQ ID NO: 260779 - DNA, 122 bp, Homo sapiens
gagacctccagggccacgcagggtgtctggcaaaggctatgtgggaaccacgtgcacagccgagggcctttttctgcacaagcccatggccgagcttcctgtttatagccgtggggactgcg

SEQ ID NO: 260780 - DNA, 122 bp, Homo sapiens
tcaacagggttaaaatccttagaccacagaggatttggtggacaagtcagagacgcgttccgcagagctgaagcctttcttcaagaagcctacaagaaaggaactatggagaaccaagggac

SEQ ID NO: 260781 - DNA, 122 bp, Homo sapiens
gaagagtcctagggagatgcctcgggtcttcctcctcccgctgggcagaggcctcatgggcgagcccggggcctcgcgggccggggtgtgtgctggccgcaccgcgctgcagctcctatgca

SEQ ID NO: 260782 - DNA, 122 bp, Homo sapiens
cacacgcagggtgcgcccacccctcacgcactgtgatgattttcacacacagggcgcgcccgcccctcacgcaccgtgatgattttcacacacagggcgcgcctgcccctcacacgcaccgt

SEQ ID NO: 260783 - DNA, 122 bp, Homo sapiens
ctggggaaaaaaatttaaatggcctgagtccggaagctcgccagggcagaagcgcagggtcgctccgccgggctcgccgggccggggaccccccagccacccgccaccacggcggggagggc

SEQ ID NO: 260784 - DNA, 122 bp, Homo sapiens
tttcatgttttccctcagtgcagtctctacaagtattttttgaaacctgtatcactttaacgttttgggttctctcctttggctctaaaagatgttctctactgaaacttaaaatattttat

SEQ ID NO: 260785 - DNA, 122 bp, Homo sapiens
gccatcgactgcagttactgtccacctttccatgtactcatacttcacctctcacaactccgctgaaaagcctgatggggacatcctgtacattcttcagcatgtagctcagtgtcttagaa

SEQ ID NO: 260786 - DNA, 122 bp, Homo sapiens
acagggaccaggagcgaaccatgatgccaggtaggaggggctgactgggccctgcgagcgcgtgcctttcctgctgggcagaggccctccacatggggccacgcgggccgggcacaggaggg

SEQ ID NO: 260787 - DNA, 122 bp, Homo sapiens
taaaaaaaaaaatctctcttgggagcatataaacaaaaaacatagaagcaataaagcgatcgctggtatttcttttctcatgcagccaaattcgccagctggtgaccaaaggctcagatgct

SEQ ID NO: 260788 - DNA, 122 bp, Homo sapiens
aaaataaatgaaacttgggcgcaggatttaggtgccaaaatatggagttcttcaccgtcccgcgctatccctgaatacttgggcagaaaaggtccactttaccttccgtacgtgcaggattc

SEQ ID NO: 260789 - DNA, 122 bp, Homo sapiens
ccacaccgttgtgccactggacgatgctacacaggagtacaaggtggggaagcagacacacgatgtcagtgtgggtaaaaagggagaagcggcagaggatgagatactccctaggtagagat

SEQ ID NO: 260790 - DNA, 122 bp, Homo sapiens
aaagcaacagcagaagcagcagcagcaatctgcctccaaatgcctcccaggcaccgagatcggagactgtgatgggtcccggaccggcttccgttcctcggggcccctggggtcggcgggac

SEQ ID NO: 260791 - DNA, 122 bp, Homo sapiens
aatgccaccatcaggtagagacaagattgtatcctatacacagcaaatcatcacagaatacggcaatctgtagcttcatatctgcttgatatgtggtaacttcaaggcttgggtaaattctc

SEQ ID NO: 260792 - DNA, 122 bp, Homo sapiens
tcagaacgcacagtctcccagcccaggtccggaggctcaggcagcccaacgccggcaccgcggagctgcagcgcgctcagcaccgccccgcccaccccgacgccgcccctctgcacccgctc

SEQ ID NO: 260793 - DNA, 122 bp, Homo sapiens
aatacccttcttgcttccttcctcctcttctcaggcaagagaaacagtctgtagagactgcgagtgcgaatggagatcacagctccttgttaactcactcaggcaatgtagttcccagctgg

SEQ ID NO: 260794 - DNA, 122 bp, Homo sapiens
gcagaaggattgcttgagcccagaagtttgaggctgctgtgagctatgatcaagccactacgatctagctagggcaacagagcaagacctttttgctaataaatggataaataaagtgttga

SEQ ID NO: 260795 - DNA, 122 bp, Homo sapiens
cctctggcaatgcctgctgaatgctttgaggattgtctcatttaaccctcaacccgcttacgtagattattatattcagtatatggatgagagaactgatatcttggggagcttaggtaact

SEQ ID NO: 260796 - DNA, 122 bp, Homo sapiens
ggcggctcccctcggcggagcaggtgacgaaccacttcggaggacacggaattgacactgcggccctagagatacgggacaaggggccagaacgcggggagtctaggctcagatcggagtcg

SEQ ID NO: 260797 - DNA, 122 bp, Homo sapiens
cacccagacaccacacacatggtgtgacacacaccagcacttagcaagcaggcagtatcccgtggcacacacagccacccaaacaccgtccacacacaggcacaaatattacactcaaagtt

SEQ ID NO: 260798 - DNA, 122 bp, Homo sapiens
ctcaaagtgatacttcctctcagggtcctcaatgaagcctggggatggaacacctgtggtcggtcctacccacagccacaagcagcttcctcttgccattgcccataaactgtcccttctct

SEQ ID NO: 260799 - DNA, 122 bp, Homo sapiens
tgcctttctccatcctgagattctgactccattttgagtgttggttctggaatcagtttgcgttcaagtttgtacttgagggatagaggtgaaaaggtgggctctccccacaaaaaaagatg

SEQ ID NO: 260800 - DNA, 122 bp, Homo sapiens
aggatactgtaggaattagtcatggccaagttcaagccatagcttgccccgcagctctgtcggggcctctctcgtgacagtgtggagcactagggcagctttgtggacaccgtgactctttg

SEQ ID NO: 260801 - DNA, 122 bp, Homo sapiens
cggcggcctcaccgttcaccacggttggcggccctggtcactcccacggtctttaccagccgggtgccagtggctgggaccaggttctgaccactgtgcccactcactgtggaatcgcgtga

SEQ ID NO: 260802 - DNA, 122 bp, Homo sapiens
cggctcgtttgtgtgcttacctttcctggagctcccgccatcgggagcctcactaagccccgcaaaggctgggaacagcgccatgaccacaggccgtacctccgttcttctctatagggatg

SEQ ID NO: 260803 - DNA, 122 bp, Homo sapiens
ggggaccatctccagggccgggcccggcccggcgccgcgtttcctctcgccgccccgccgcgcgtcgctcgcaggacttcagcctgacagctgctccggcctcccgcccacatacccgctct

SEQ ID NO: 260804 - DNA, 122 bp, Homo sapiens
cataatctaagcgcaacccaaccttacttattttaaggtaataacttgcttttttgtgagcggcaagctggagggaccattttaatgagtctttagtcatgcatatatgatgcataagtagg

SEQ ID NO: 260805 - DNA, 122 bp, Homo sapiens
ttttactcaaagctaggtcccctttcttatggtcacttcctgtaagtgtgtgaggtctcccggggctgcctctctattcagcccctgggtgatcaaaaggccaaggaggcagcttgccagtg

SEQ ID NO: 260806 - DNA, 122 bp, Homo sapiens
ggggatttgaactgagtggctggcgcaagacctccgtttgcttccagtagctgctgggagcgagggaagaggatatcggtaactttgggggcgccaatgtggcttctgtgtctgccccttga

SEQ ID NO: 260807 - DNA, 122 bp, Homo sapiens
aaaatcctaaaagctccttcaagctcaaatactctgacttccataaaggccatggaaaatcggggggattgaagtgttcgtgtacacagtcagcacatctgaggactagcaagtaaagggct

SEQ ID NO: 260808 - DNA, 122 bp, Homo sapiens
cggtcttgaggtcagaccacttcttcttgacctcaggcagctctctgcggcaggtggccacggcgttgacccttctcaggatgccgtgccaggccgcactcttggcggccaggggtaccccg

SEQ ID NO: 260809 - DNA, 122 bp, Homo sapiens
ggcgcatacgagacttggcgactcgctgcctcagggttgcgtgcctccggccctagcctgcgcaggcggcctgagcttggggctctgctacgccacccacgcccaccttggcggagggcggg

SEQ ID NO: 260810 - DNA, 122 bp, Homo sapiens
gggaacggcgcaccgggccccgtcggactgttggaccaaaagtcctcagtgtcgggggctcgcagcgccgccgcggcgaacccagctagggggcaccgcctgcgccgggcacagggaggccg

SEQ ID NO: 260811 - DNA, 122 bp, Homo sapiens
acaaacagagttggtggagctagcttcgagttcttaatttccatgcttgcaaacaaagagcggatacttccagccatagtagtctacaagactgttctgaggattaaatatgatagagtgaa

SEQ ID NO: 260812 - DNA, 122 bp, Homo sapiens
gagcagtagagaagcgtggggcttgagatgtgggcctccttcttactcagagcggccttgcggtgcgtgtgagatccggggcgaaggaatgaaaatcctgcgaggccttaaatcagaacata

SEQ ID NO: 260813 - DNA, 122 bp, Homo sapiens
gcaaggtaggtgtggttaccacgacaggggatgatgtgagcattgccgtgctgctcacatcgtcaccaagtgggggtctcaggcagaagcaagctgggttgggttagcagtgcattcagttg

SEQ ID NO: 260814 - DNA, 122 bp, Homo sapiens
gaagggtctgaaaactgggtgcaggtgagatgtcaggtctagttctcggatgagtcctcccggggaggaaggtccacattttgtgcagatggccccaaagaacagacccaggatcagatgta

SEQ ID NO: 260815 - DNA, 122 bp, Homo sapiens
cttaggtgcgcagtaagtatcagccgccagtaagagggctgctccctgggcccaacatgccggttctcctgggcccccgccccgacttcatcaccaattgcccctgactgtggtccaagcct

SEQ ID NO: 260816 - DNA, 122 bp, Homo sapiens
atccaatcagagagcgtccccagtacacatgttgagcaatggccaatcagaactgggatccggccctcagcccgcctcccaggaactccgagccaatggcggcctggcaccggcgggccaat

SEQ ID NO: 260817 - DNA, 122 bp, Homo sapiens
tttttttaggaatcttgaaaccaccagtggaacatttttgctgttgtgggtaatgcacaacgtagcagcgtaggaaggccgggccgcgagagggaaccgagggtgttggaagcaccgaagac

SEQ ID NO: 260818 - DNA, 122 bp, Homo sapiens
cgtgggtctggggtccccagtacctgggtgccagagccgccgggacgggaagtttcgtctcgcggggaagcggagggccggcgcttttatggtggccaggcgggagtttccgggaagggcgc

SEQ ID NO: 260819 - DNA, 122 bp, Homo sapiens
atttgttaaaaattttgtttaaaatatttctctccttaaaataacttcgtttttctaacccggtagggttcatattttctaattagctattcttgggatgatcctcgagttaacatttctaa

SEQ ID NO: 260820 - DNA, 122 bp, Homo sapiens
tagatcctcaagaagagaagagtgtatgtaagtacttctcaaccagtttacctctctgaccgctcttacggtgtttgggggcaaaaaactaaggatctagactctctaaaccgctcgctggg

SEQ ID NO: 260821 - DNA, 122 bp, Homo sapiens
tccctcccgaaagaatatataaagaaccccaaccccagcttgtctacccaggccaacaggcgtctgcccttgttaattaccggagcgacagactagggagctccgcccgggatttgcccatc

SEQ ID NO: 260822 - DNA, 122 bp, Homo sapiens
ctggcaatgattttccaccttgtctgacattctatttacacatatccaaggaaaccctatcgtaactgacctgaaagccccaactttgctagaaaatgtgtcttccaagggggttttgttac

SEQ ID NO: 260823 - DNA, 122 bp, Homo sapiens
gggcggtgcagggtgccctggccgggcgggggcggcaccttgaagtaggagaagatggtacggatgtcaccctcgaagcccatgtcgatcatgcggtcagcctcgtccagggccaggtagcg

SEQ ID NO: 260824 - DNA, 122 bp, Homo sapiens
cccccacctatgtagggcagctctctggggtgactcctggggttgctctggttcagtgttcgtccttcagcagcctccccttccctttctttgttatttcaaaaacacctcatttttggagt

SEQ ID NO: 260825 - DNA, 122 bp, Homo sapiens
tctgccaggtgcattctgtctggtgactacaggtttccttccagacctgcgctggaataacgttggcctcctggggggccgggccctcatgaactgtctccccagcaacagaaccctgtgga

SEQ ID NO: 260826 - DNA, 122 bp, Homo sapiens
tataaccaatgccctactgttgggcagagagaatgggatatatataaacctagcagatgacgtgaatgagctaaaggagaaaagtgaaacaacaactaaacaaaataaacaaaacccaacac

SEQ ID NO: 260827 - DNA, 122 bp, Homo sapiens
catcggtggattcgaggtacgttaccgtttctctcttgccggtcttgcaggtgtgagccgcgccctgtgttggctaaacattaagctacttgttggctactggccacgatccgagatgatag

SEQ ID NO: 260828 - DNA, 122 bp, Homo sapiens
cttaccactggaagccagatgcagattcagcaagtgtttcttgcctcttacaaggcaccgcgtgtaacgtcctgaccagctgttggtcatttgtggcagaggggtgtggctgcttttcgcct

SEQ ID NO: 260829 - DNA, 122 bp, Homo sapiens
ccgcgggcaaaaaacagatttggcgtttccgctttctcgcttgtgttgggatccaggaaccggcgacgcgccggccaagtctcctttcctgggtctctctcgcgcgctctctcactgatgca

SEQ ID NO: 260830 - DNA, 122 bp, Homo sapiens
cctgagctggggacccccaagtgctcagatgaacctgtgtggcctcatgcccatcttccccgctcccctcgaccaggtggctgacatggaggagctgaccatctgggaacagcacacggcca

SEQ ID NO: 260831 - DNA, 122 bp, Homo sapiens
atagggatgctgaatgggtcaggcagtggggcacaggttcagtgtgatctggaatgcctgcgaggcccccttgctcatccacctgcctttaatggatgggtggtctgagtttctggagatgg

SEQ ID NO: 260832 - DNA, 122 bp, Homo sapiens
gaattttctagcaacgcaggtttcgatctttgctatttcagtgttattcccgctgagcctcgcgtgccaagaataccactggcgctgttcagagacactcatgatgactcaatggagaatca

SEQ ID NO: 260833 - DNA, 122 bp, Homo sapiens
acacttgaacctgggaggtggaagttgcagtgagattgtgccactgcactccagcctgggcggcagagccagactgtctcaaaaacaaccaaccaaccaaaagaacaaaaaacaaaaaacac

SEQ ID NO: 260834 - DNA, 122 bp, Homo sapiens
tgtgactcacgtggcccgtcagacattctcataatattaataatgaaagggcagctccctcggagaccgcaggcccacacttggctctggcaagagcttggaatgccaagttttcctaggga

SEQ ID NO: 260835 - DNA, 122 bp, Homo sapiens
aatcctccacggaataaaaagtatgcagaagcaaggcgatttatgactgcataaaccctccgtgctcctggagagttcttagacctctccactccttggcacaactgacctctccactcttc

SEQ ID NO: 260836 - DNA, 122 bp, Homo sapiens
gttgccctgggagacagcgttctctccccaactgttggggaccagaccgaaagccaatgacgaagcttggaatgtccaccagggaggtgggtggggccaaagagccaaacaggtgtctgaag

SEQ ID NO: 260837 - DNA, 122 bp, Homo sapiens
atgacaaccctgctgtctgccatgtctgaggagcagctgtcccgctacgaagtgtgtcgccggtcagctttcccaagagcacgcattgcgggtctgatgcggtctatcactggcagttcggt

SEQ ID NO: 260838 - DNA, 122 bp, Homo sapiens
gagggacaggcgaacttcaccctgtgagctcatcctctcaccaccattagatgtgtggtgcgtcatgtcctgcaaacctgtgctgtgcctcaccagagggctgcagctgaggggctggacac

SEQ ID NO: 260839 - DNA, 122 bp, Homo sapiens
aggaggatcgcgagcgcccactgctgcccggcccgctcgggtgccgcccagagtccggcccgctaggtgcctggtgctccgctctgcgctcagctgctccgcacagccccgcctggcacgca

SEQ ID NO: 260840 - DNA, 122 bp, Homo sapiens
tggcaggtccctgggcggcgactccggccgggctcatagcgtcgcgcccgccccgctcatcggccctacccagcgtccctcccagaccgacgaccgcctgggaagcctcgagctcccagccc

SEQ ID NO: 260841 - DNA, 122 bp, Homo sapiens
gtgcggtagcctagaggagcggcagacttctctttccccatcccccgccccatcacttgacgttgctgccggacctcggtacaaacccaagacaaaacggggccctttggaaaaagtgagat

SEQ ID NO: 260842 - DNA, 122 bp, Homo sapiens
tctaaggaaaaataggacagaatagcaaccaaaaggggtctgatggtactcactgcttggcgataggcaattgtctcgtcgcttggcaataggcgatggtctcaccgctcggcgatagtctc

SEQ ID NO: 260843 - DNA, 122 bp, Homo sapiens
tacaggcgtgagccaccacgccctgaccaatgcttttgttttccctgggattttctgagtcgaaaataagagaagaaggcagttcctcttgggtggcaaagctttgagaattggaggccagg

SEQ ID NO: 260844 - DNA, 122 bp, Homo sapiens
ccagggtcccaaggctacggagcagcgggggtttggccaacgccaaaaaggggcagctcccgtgccaggcgcgttcagcgcgctcggggaatcctcaggggctgattcagaggttgtgactc

SEQ ID NO: 260845 - DNA, 122 bp, Homo sapiens
tatataagtatctatcttacagatctccacgatcttacagggccaaaactgatagtcatccgagttctctccaaagaatccatttctggaaacataatcacttaaaatatttgttaaattac

SEQ ID NO: 260846 - DNA, 122 bp, Homo sapiens
ccggggctcaacactcccaaatccacccggatccccatccccaaccccttaaaggatgtccgcattgcttggcagagaccccactcttggggataatcccttaattcgtaaggaaacaccct

SEQ ID NO: 260847 - DNA, 122 bp, Homo sapiens
gggcccagtcagaggtgtgcccgaacaacaaggccagccctttggacggtttctgcaggccgcctcccggggccgaacgcgcaggacccgctcctgcacgcggcgtggctcaaggcggtggc

SEQ ID NO: 260848 - DNA, 122 bp, Homo sapiens
aagcctggaacataatgtacatagtagggaatcaataaatgggtcatttgttaaatgatacggacttggagagaacaactgaattgtacttggattccttcagaagagcaagaacttggtgc

SEQ ID NO: 260849 - DNA, 122 bp, Homo sapiens
gaacccagctcgacacaggaggggtggcctcgagccccgcacccgcaatggaaaaggacacgggcctcacaggctcctggggtcttcactgagacagctgaggaagaaaacggtctggagcc

SEQ ID NO: 260850 - DNA, 122 bp, Homo sapiens
agagcagcaggttcaaggatcaacaaagaagtgggtgggcagggagagaagaggaggagacgggtgagccaggtgacaggggctgattcacacagccttgagccattgtagggacatggctt

SEQ ID NO: 260851 - DNA, 122 bp, Homo sapiens
tttttgatatccaagctgcctccatgaataattctactggcttttcagttagaatcttctcgactagacactcccaactctggagctgactttgtaccagtatctgggcaaccctggcatgc

SEQ ID NO: 260852 - DNA, 122 bp, Homo sapiens
caaagttaagtttttggcaaccccgtcaaagccgggtgtgcccaggacagtcaactcaggcgctggactctcattctggttggattttatgacagccgtattcgccataagaattctagagc

SEQ ID NO: 260853 - DNA, 122 bp, Homo sapiens
tatctactttatgctcgaggtggctccacctccaccatgagccagagccaatgatgctcacggccccaaccatgattaaaaagagattgccctgcaaggtaaatcagttaaaaccaacctct

SEQ ID NO: 260854 - DNA, 122 bp, Homo sapiens
ctgggagaaggccaggtgccctgctccatggggcagggtccgagtgctcagaggctggtacgtccctcgcaagtcaaagatcttcagctggtggtctaggccagaggtggccatgtacctgg

SEQ ID NO: 260855 - DNA, 122 bp, Homo sapiens
tttagtcgataagcttgggggactctttcttgcagtgtagtcagagttccaacagctgagcgatttcttgaatctgcaccatacctttcccccatggggatcaggcaaaaagttttagccag

SEQ ID NO: 260856 - DNA, 122 bp, Homo sapiens
aggatcgtttctgtggtacctctatctggacaaaatatactgcttattatccgtgagaaacgtgaaggctttggcagaatattttcatattctggacgtgcacggcaagaacaccttgaatg

SEQ ID NO: 260857 - DNA, 122 bp, Homo sapiens
tccttagggagagaacttgatactcagttgtctaaactgggattccttagtcagaacagccgtaagacaggatggtgatgaggccaggggagttcacatgaggactgcaggaattccagcaa

SEQ ID NO: 260858 - DNA, 122 bp, Homo sapiens
tggttaggatttcagcatacgaattttggaggaacacaaacattcagttgatagcattcacgcattcattatatcctttaaagaaaaaaatagactgtctgcctccactcataatctgtcaa

SEQ ID NO: 260859 - DNA, 122 bp, Homo sapiens
tcaccccctgctttaatactcaccgtgacaaacaccatcataggcggtgacacttaaggacgcataagtcaaccctgcactgggagcttatgctctcaaatgcagagtgatcgttccgatgc

SEQ ID NO: 260860 - DNA, 122 bp, Homo sapiens
tcagcttcaggtacttccccaggactaattcctgattctggagaacctactgaatacagccgatctccatctcactattgctacatggtggctgctcccatgaaaacaacagctggcagtgg

SEQ ID NO: 260861 - DNA, 122 bp, Homo sapiens
ggactcaggcgcctctttgtcagccagagcccttgctctggtccccaaaccagcatcaagcgactaatttaaaacttaatgcttccaccatgtccacccaggctgccccttcttcggcttat

SEQ ID NO: 260862 - DNA, 122 bp, Homo sapiens
atgtacaatttctgttctcaggagatctctttagagccagcaagggatttggagaaaggacggcagagagaggatttcatgcagtgcagctttcagcatcactctttatttttgtcactctg

SEQ ID NO: 260863 - DNA, 122 bp, Homo sapiens
aggaagcccacccatgcacggctgccggagcctggtgccagcgccctgctctgctaaccacgtctaggtgactctttgcatggggaactgcctttctatgactgagttcagacacccgcagg

SEQ ID NO: 260864 - DNA, 122 bp, Homo sapiens
taacgtgtgggaacaaagggtccatatgtgtaccagacaacaacaatcatctggagttgtcgtgcaccgacccatagaacatggaaacagtatgcctcctactcacttacattaactgccta

SEQ ID NO: 260865 - DNA, 122 bp, Homo sapiens
cctccagcggacgccctcttcatcgtaggggttgggcggggcgcgtcggggactgaaagtcgtttcggggcgggcgcccgtctccccgcggccgggtccgcatccaggcgccgccgctacgg

SEQ ID NO: 260866 - DNA, 122 bp, Homo sapiens
cctgctttggcctcccaaagtcctgggattacagggattagaggcatgtgccaccatgcccggttaattttttttgtatttttagtagagatggggtttctccgtgttggtcaggctggtct

SEQ ID NO: 260867 - DNA, 122 bp, Homo sapiens
caccatcccctgcaaggcagagggaagaacaccaagcaggtggcccagtgccagccaggtcgagctctgcagtgagcggcagccgctgccttatgtctctactcatcagagctggtggcatg

SEQ ID NO: 260868 - DNA, 122 bp, Homo sapiens
caccctccgcaggccttttgaattaatcctactgcgccggggaccccaggacagttctgtcgcgtactcccgggaccctttaaggggcggggctgggatcctgccccacccttgactccccc

SEQ ID NO: 260869 - DNA, 122 bp, Homo sapiens
ggattcggtggccagtccgcggggtgtagatgttcctgacggccccaaagggtgcctgaacgccgccggtcacctccttcaggaagacttcgaagctggacaccttcttctcatggatgacg

SEQ ID NO: 260870 - DNA, 122 bp, Homo sapiens
cggggaggcgacagcagccccagcgagtaatgaggagcagtggcagtgacggggcagagtcggggctgggagattagagagcccctcccagggcctttccctcccgcctggcctggctcctg

SEQ ID NO: 260871 - DNA, 122 bp, Homo sapiens
atcatgcttagcccagagccgagcaggcagcttggctaggatgtgcagaacaaatgcatgcgtgactgggctggtacaatattcagtgcaaacaagtgtggttctatgctgtgggtgactgg

SEQ ID NO: 260872 - DNA, 122 bp, Homo sapiens
gaacggaatcaggttctaagagtgttgctctctgtttccctctcacttgaattgctcatccgaaaatcctcaagatctgggagccgggtggaccaggagattctgaaattataggcaaaatc

SEQ ID NO: 260873 - DNA, 122 bp, Homo sapiens
gagagagagagagaaggaataatatgtgatatttacaaatatagagaaagaacccatctgcgaactgaagggtatggtgaaagggaagcagagaagcacattttccccccgtttttccagtt

SEQ ID NO: 260874 - DNA, 122 bp, Homo sapiens
cccaaaatgccaattcaagatctgtatgtgtctttcttttcctgattacccttcccccaacgcagtcaagacagctgtcctgggtcccagtcactttagtcctgaacagcagctcctccgtc

SEQ ID NO: 260875 - DNA, 122 bp, Homo sapiens
ttgtttttcacgctccaaggcgcaatggtaggtacggcagtgcgggcacagagcgggtgccgaccgcagggtcacaagggtagagcgggaccctgggggcttggcgaggggcgagggtcggg

SEQ ID NO: 260876 - DNA, 122 bp, Homo sapiens
ccagtggaagaggaaggggcatagcgggttccgcgaacatgagttgtaagcggcagagcccgggactccacagccagggttttctgactcggagacgcggagctctgtctcccatgtcaaag

SEQ ID NO: 260877 - DNA, 122 bp, Homo sapiens
aaagtgttgggattacaggctgagccacctttcctggtctgggcaaagaatttgaacagacgtttctccagagaaaatatacactggccaataagcacatgaaaaaatgctcaacagccatg

SEQ ID NO: 260878 - DNA, 122 bp, Homo sapiens
catattgctggagtggaaagacccatgcactcaggtcctgctttctataatctgtgacctcgggccagtcactccatttctcctgaactagatcactgatgatctgttgaaagaaaaaatat

SEQ ID NO: 260879 - DNA, 122 bp, Homo sapiens
agttggagaggaaggtgattataatcagtgaattagcaacctctgccgagccctaagctccgacccagcggcataatgcgttgtgccggcgctccggggaaaggaaagaactctaaaggcac

SEQ ID NO: 260880 - DNA, 122 bp, Homo sapiens
ctccggggaaacacacttcagataggaagccggccatgctcctttaaatatggaaactgccgtctccgcgctgcgggctgggcgtgtcctttctgggaggggccttgggccatgcacctgag

SEQ ID NO: 260881 - DNA, 122 bp, Homo sapiens
tcattcacctaatggctttattcctatcattttgcagataggaaaactgaattgcaaaagcggttcctggagaacagaatgtgagtttttaagtgacaagggagagggagggggagggagag

SEQ ID NO: 260882 - DNA, 122 bp, Homo sapiens
gtggcgtcttctcgaagcccaggggcagtggcgtgatccccctttgacagtctgggatgacgtggtccggaaagaccagccccgtgtgttccatccgttggtgtgaggcacagaacagcccc

SEQ ID NO: 260883 - DNA, 122 bp, Homo sapiens
ctgctggtcagacatggatgatccagtggaggcctccaaggccctaggggatggcagaaccgctcgatagcagatgcttggggccctggaggactgcatggatcaaagccccctccaaccaa

SEQ ID NO: 260884 - DNA, 122 bp, Homo sapiens
tccaggcgaatctcacctgcagccccagcttgcacagtgatggggtcagcgaggagcaagcgggggatctttttccagagttggtgagggcaccgggctgcagggtaagttcacggagagga

SEQ ID NO: 260885 - DNA, 122 bp, Homo sapiens
taacttgaacttcagggagcattggggcttggtttagtccagccacgtctgagccagagacgaagaggtccctttcttacctattgcaggttccttgttaaatgactaaggaatggtactaa

SEQ ID NO: 260886 - DNA, 122 bp, Homo sapiens
cactcaaccctgtcctgaggacacaactgatgcaaatgcacttcataaaagcccaaagcacggcacacacttcagttaactcacctggaaccacaaggatgcgctgagccatagtccccggc

SEQ ID NO: 260887 - DNA, 122 bp, Homo sapiens
caatctgagcacatgcccagcacgtcacagataccaaggaaggtttttagggctttctttcggaagttagaagcaccttattaggacaagtattttaggaagagtatgttaggacatctcag

SEQ ID NO: 260888 - DNA, 122 bp, Homo sapiens
tggggagcaggcgttgtcaccgcgtggaggcgcacgaaagggagagggtcttacataagccgggggcatctttgaggtttcttggtgacccaagagatgagtctttggattcctttcccacc

SEQ ID NO: 260889 - DNA, 122 bp, Homo sapiens
cttcttacgacgctgcccttgcgtgggttcactcgcgttgctcctcaggagaaatgagagcgtgtgttttcctccggtgacctggaaagggaccttctgtggctggccgggcactctggctt

SEQ ID NO: 260890 - DNA, 122 bp, Homo sapiens
ctgaaacgggaggaagaagcctggaactgtcggttccgtggagagcggacatgctatctgcgcccagatccgaaggctttttggggagcctagagtcctggcccggtaccaggcagatctgg

SEQ ID NO: 260891 - DNA, 122 bp, Homo sapiens
cttcactcctgagccagtgagaccacgaacccaccaaaaggaagaaactccgaacacatccgaacatcagaacgaacaaactccgggcacaccggctttaagaactgtaacactcacctcga

SEQ ID NO: 260892 - DNA, 122 bp, Homo sapiens
gacctcaagtgatccacccgcctcggcctcccaaagtgctgggattacaggcatgagtcacggtgcccagcctactacatttaagctgatcagttgttgacattttgctacatttgctcgat

SEQ ID NO: 260893 - DNA, 122 bp, Homo sapiens
ggaaagccagaaagtgatgctctctgctttgggagtctgtcctgagcccttccctggtctcggcctgctctgcccttgtctggtgaccagtggcacatgtgccaaggtctgggcctctatca

SEQ ID NO: 260894 - DNA, 122 bp, Homo sapiens
atcaaccagaagctactcagtcctcaaatcggatccagtacatgcagaactgagtccaaacgagacggacagcaaacccggcagtggctcccagacattcctgggggaaaggaatcctaacc

SEQ ID NO: 260895 - DNA, 122 bp, Homo sapiens
gggtagttgtcacctatctcataactcagccctgcccaggtcaggaccagactgctttggcggctcttattctgctcacatcttgggggttgcctagctcccaagctgggggctggagttta

SEQ ID NO: 260896 - DNA, 122 bp, Homo sapiens
tccccgccctcggattggcctggcccgcggcggggctgccccggaaccgccacccagcagcgcacccttccgcgcccggcccgcgctcctcctgcagtcgcctccctggctttctctttctc

SEQ ID NO: 260897 - DNA, 122 bp, Homo sapiens
caacgtgcaggagatcctggggctggccccgcccgcagagccccacagcccctcgcccaccgcctccccgctgcctctgtcgcccacccgggccccgcccaccccgccgccctccacggaca

SEQ ID NO: 260898 - DNA, 122 bp, Homo sapiens
ttttaagtaaagatttcattctgccaacccgcaggaagcttttaacaagatgcagctgagcgtgtcgatatcttatatctttttactgctgcatgggggtgttcagcaacttgaaactcttc

SEQ ID NO: 260899 - DNA, 122 bp, Homo sapiens
gtcgacagacgcggcgctgcagacagggacgccatcgggcccggcctcggagctctccaacgcctcgctcagcccctccagcacgcccaccaccctgacagacttgactagccccaccctgc

SEQ ID NO: 260900 - DNA, 122 bp, Homo sapiens
agtccagggcccggacatcttcaacaaagcctgggcctgggaggctgaggctctggggaccgtggccggtccaggaccatcagttctgagcgactttctccctcccccacttccacccccac

SEQ ID NO: 260901 - DNA, 122 bp, Homo sapiens
atctgagacccttttcacatgttcctagttctctcatgaagtccaaacatttctcccacccgggaaggcctatatacttccttggaagtccgggtatgttatttcttcccttgacatcctcg

SEQ ID NO: 260902 - DNA, 122 bp, Homo sapiens
tgcagctgaggccttcctctcagtaggaagcaccccagatttaggcacactgccgtaggtcggctttgtgctgtgctctgaactaatatgattctagttccgggagagggagacgccagtcc

SEQ ID NO: 260903 - DNA, 122 bp, Homo sapiens
tgaatgaatgtgcagagctcctttcacacctgcagaacatggccagccctccagcgcgtgcgccttctgtgctgagctcctctcagacctggataggtctctgtctcctaggggaatgccaa

SEQ ID NO: 260904 - DNA, 122 bp, Homo sapiens
cggccactacgaccagctgcggtccggggcccggggtgggagttggactgcgtggctgcgcgtccccatggcgaccgggcgggtgcgcgcgtcaggggctggggcctgaggcggaagtcccg

SEQ ID NO: 260905 - DNA, 122 bp, Homo sapiens
tacatccccacatttccccacttttttggaagtctcgtgactcctggcctgctggtttcccgaggaccgcttctgctggagcgatggccacttggggagggtcggtgctctccactggcctg

SEQ ID NO: 260906 - DNA, 122 bp, Homo sapiens
actccaggcacgtcacatcgtccagcccgggcgagctgctggccaggccccctgcttccgcgggcatctctgtccaggtcagacaagggtgcggcattggtctcaagcaggtcgggtgcagc

SEQ ID NO: 260907 - DNA, 122 bp, Homo sapiens
gctttccaacggctgggctgagccaggagacagttttaggcctggctgtgctgtgggccccgggaaagaggccctttcctccccaagcctgtgtgtacgacggaagagtgggtagactgcag

SEQ ID NO: 260908 - DNA, 122 bp, Homo sapiens
gtcctcggcctgacctcagagcgcgagccctgcaggccggggggggcgacgcggtggtagcggagcccgggagcctggcagagccgcctccagcccccgagcatcacccgtcaagccggtgg

SEQ ID NO: 260909 - DNA, 122 bp, Homo sapiens
acacagccaacactctaacaaaagactgtaaccagtggtatggagttataagccaggaaccgcgggtgaaaaccagtgtgtatcacaacatcacacttccctctccggatgcactgtgtctt

SEQ ID NO: 260910 - DNA, 122 bp, Homo sapiens
acaaattgtaaaaaggaattttggctgcattcggcatagcaaacggacaatctgagtgagcgacagcctcaggaaagtggtgtgtcggggctgtccacagggcgagtgcagctgggaaaggg

SEQ ID NO: 260911 - DNA, 122 bp, Homo sapiens
ccccatgactaacgcctggccgcactgatttctaattccccacacggagccgatctccctcggctgctgccgattcttagaacaagctctgactcccccacgctgcaccctgcctggctggc

SEQ ID NO: 260912 - DNA, 122 bp, Homo sapiens
cagctcaccgccactgggaaatgttccaaaacagccatttgagaattggttcattgtgcccggtgtcgctcagcccagagaccttcagtttcaccatctccagaaggaaaaataatgtctgg

SEQ ID NO: 260913 - DNA, 122 bp, Homo sapiens
gccagttacatttcttcctgctccagtttttgtttgttttttttgtttgtttccccaaaacgactgccttattgatctccaacttgcgtagtcagtctctgtagtaatatgtcattattttc

SEQ ID NO: 260914 - DNA, 122 bp, Homo sapiens
ccccacggtcgtttgcagggggcggagcatgcggtctggcagagcagctggtgggaggggcgctcaggtgctgggctgagccctggccatccccacaggccccctgcgtggaggctccagca

SEQ ID NO: 260915 - DNA, 122 bp, Homo sapiens
cactgtggggttgggagaggagtcgctgctccccctaccccgtgaccagggacgggggggcgggggaaacaagttcccctgccaacaccacagaccaccccgattcccctctcccgctcctc

SEQ ID NO: 260916 - DNA, 122 bp, Homo sapiens
aaaatgtgcattcttggaggcaaagtttgcatttctcttttcactactttatccctgaaacgtatctttaaaaagagtctgcactagccaccatacgttatttaaaaacctgtgaagtgagg

SEQ ID NO: 260917 - DNA, 122 bp, Homo sapiens
atggtccatgccctttatcacagaaggaaacctatactaagaaaggtgaagtgatttgctcgagggcacacagcaagtaagagaagcggtatggattaaaacctagagctgtacactgggtg

SEQ ID NO: 260918 - DNA, 122 bp, Homo sapiens
agggggcgcggcccagccaggaaggcagccaggatcttccctcagagcctagcgagggggcgcggcccagccaggagagctggagaggcagcgaggatgttccctcagagcctggcgagggg

SEQ ID NO: 260919 - DNA, 122 bp, Homo sapiens
gggaccctcggccgccaggccggggcgggtgatggggactctccgctcttcgttgcgccccgcgggtggctgctctgcacctggtggacgccttccctgaagttcttgttcccttgaataca

SEQ ID NO: 260920 - DNA, 122 bp, Homo sapiens
acttcatataatatcaccatcattatcttggtctgctttaggataggatttgaggaagtacggtcaatcagaggagacatttggctcttgtggccttgggctgtgaattttgtaaaacaaat

SEQ ID NO: 260921 - DNA, 122 bp, Homo sapiens
gcgccggggatcgcgggccgagaggagagcccagccgccggctccctcggctcaatcgcccgcccttcctgggactgacctgctgccttggccggaaactgactggctcccccggctacggc

SEQ ID NO: 260922 - DNA, 122 bp, Homo sapiens
ttttagtgtgttattttttctaagaggtgcctcaagatggataatggaagatttggagtacgattgggttgacaatccaaggagattcggtgacatccagattaccctgaaataaaaaaaaa

SEQ ID NO: 260923 - DNA, 122 bp, Homo sapiens
ggagggtgcgttggtggaaggagaaaggggcgtccgagagggttcgggcggaaaaggaggcgtacctgcaagcaggacttgcgaagagcgtgcattcccagtgggcgaacgggaattcgaac

SEQ ID NO: 260924 - DNA, 122 bp, Homo sapiens
gctgaacacagcgtgaggaccccccctccatggacatggtgtttgagtctctgggcttgccgaacaccaagtcctctgagttccgcagcgcagcaccggaagcggccgagcgcgctcagccc

SEQ ID NO: 260925 - DNA, 122 bp, Homo sapiens
gggtacacctcccagacggggtggtggccgggcagagggctcctcacttcccagtaggcgcggccgggcagaggcgcccctcacctcccgacggggcggctggccggacgggggctgacccc

SEQ ID NO: 260926 - DNA, 122 bp, Homo sapiens
gctcccaccagctctgtggagtgcacagccctagctacacgtctcacactgatggcgtcacggcagtggctggtccagatgggctgccgctgccatcaatcacatctctgaagaggtatatc

SEQ ID NO: 260927 - DNA, 122 bp, Homo sapiens
acggtggtgtggagagactgcgtgtcagcgctggccctgaccggtgcacagcccttactgcgcaccggcggcttatcttcagagtcgtcggcattattcacactggctggaaaccagaattg

SEQ ID NO: 260928 - DNA, 122 bp, Homo sapiens
gccataattctggaagttctcctccgcctcaacccaggatgaagttgagcgggtctgctgcgcttccgggaagtggtcatgtgatacccaggcgcctgcgctctctttctagggactttcct

SEQ ID NO: 260929 - DNA, 122 bp, Homo sapiens
aagaaattctagtttcctcctgggtgggtgccggacagtgcctggggttggctcagggagcgggatgcagaaacgggttcagagaaaaagatgagtttagaaccggacctctggacggaacc

SEQ ID NO: 260930 - DNA, 122 bp, Homo sapiens
atctccccttgctaccacgccaggaggtacacagaggagactgccccgactggcaactcccgcgccggggttccctggccatcctcccgcgttccctccagccgcgcgctgttgccagggcc

SEQ ID NO: 260931 - DNA, 122 bp, Homo sapiens
cgtcgccctagaatcccccgagtcgcctctagcaccacctacgccgcgcgaacgcgcctgcgtgacagaaccttgcgcgctcccgccgctccacctaagggcggggctccacgtgacgtaag

SEQ ID NO: 260932 - DNA, 122 bp, Homo sapiens
tcccttcaggccccgcgggctgcgcgccacggcccccgacttctttctccctcccaggcgcgctacccacaaccacctgcgccaaagcgcgcgaaaatctgcagctgcgggacgtgttgtca

SEQ ID NO: 260933 - DNA, 122 bp, Homo sapiens
ccaaggtcatttcctccctcgctcagcgccccggtgcgcgcccagctgggattggccccgcgccctgtctgttcccagggctcttcggccttgaccgtgcgcccttccctgcgcgccgccta

SEQ ID NO: 260934 - DNA, 122 bp, Homo sapiens
gatcacacagagagtcccacaggtcatggtaaagaattcagattttttttttttttttggcggtggggggaggcaatagaatgccactgaatgattttgatcaagagaaaaacacagtctgg

SEQ ID NO: 260935 - DNA, 122 bp, Homo sapiens
cgagtcaatgacaacacgactccaattccaggtatggggtttagtggacaaccagcttgacggagtcaggaccgcgctgacctgcccgacacggtgctcgggcatctggaaggaggaagccg

SEQ ID NO: 260936 - DNA, 122 bp, Homo sapiens
catgtcctggctcgtgggcgagttggtggcaaaatctgaactggatactcacggagggcccgcgcgggtgctgtgccgtccgctgctctcttcctcctcaccgagaactgcccctcgccggc

SEQ ID NO: 260937 - DNA, 122 bp, Homo sapiens
ctgccgcgccgcccctttggcatcgtttgaatgagggtctgcgtgggaggaaccccgcgccgggagacgcgcgctcaggccccgagtcgccggggtttcgaggttccacaagccccgccccg

SEQ ID NO: 260938 - DNA, 122 bp, Homo sapiens
cagtctgaagcgattctccctcctgccttagccacctgagtagctgggattggaggctcacgcccccatgcccggctaatttttgtgtttttagttttgtgtttttagacaaggtttcacca

SEQ ID NO: 260939 - DNA, 122 bp, Homo sapiens
ggtcagccggggagacagacgccacaaagctcagcaggggctcagtttctggcctctcttcgccaccactcagtcctttcagctcctgggtgacctgagcctcagtcgccagccaccctgct

SEQ ID NO: 260940 - DNA, 122 bp, Homo sapiens
ctcaccggggcatggtcggagggtggctgctgcgctccggggcagttcttctcctgcttccggggggcggggaaggagcagacacagcagacacacagagaaagagaggcagggattattgc

SEQ ID NO: 260941 - DNA, 122 bp, Homo sapiens
gcgtggagcttggccccctttaaatccgaccagaggaaggggcggcggtcgcgggcgcagcgggcccctcgttgaagtgggtgtcaaacgaaaagcatgacagtgacactcttgtcggtctt

SEQ ID NO: 260942 - DNA, 122 bp, Homo sapiens
ttagaaaaagcctctgtcagtgacaagttaatcagtttaagatagttcaaaagtgtccttcgagtgcttagtttcttcaagtgctttaaagtgctttagaaacaagttacagttggtggaaa

SEQ ID NO: 260943 - DNA, 122 bp, Homo sapiens
atttgtagccagttccaaacaaatttaaatattgagttgagacctgtatggaattgtgttcgcaggagataaggcttgcctttgagcctactcttgattcatgcagagtgccaataagataa

SEQ ID NO: 260944 - DNA, 122 bp, Homo sapiens
ggagctgggggatcctggagaaagatgataagatggttgattcacagaacccaggctggacgggacttgtggcgagcagtccagcacagcctcacagtgcagagcatgagctttggagcctg

SEQ ID NO: 260945 - DNA, 122 bp, Homo sapiens
gacctcatccagcatgatggggcctgatcctgtggacacagcagatggcagggctgggggcgtgacgactgcacccaggagtcccacagcgcgactcagccctttgttctccgccccggccg

SEQ ID NO: 260946 - DNA, 122 bp, Homo sapiens
tgctcgctctcacccgtttctgcctgctttatttttcttcttgccgcttcggtaaatcgtcgtaaactttttgaaaaatgttggaatgcagtgcatcctacactgaggtcttgcgttttgct

SEQ ID NO: 260947 - DNA, 122 bp, Homo sapiens
ccatattccaaggatttgtgtcagcaggttgtaattagttaattaaatgcccggctggcgcgatggccccatggggctgctcccgaaacaagggcaggaacgtcctggaatctgcatgcagg

SEQ ID NO: 260948 - DNA, 122 bp, Homo sapiens
acagattatgccttgaactaaatcacttgtatgcctcaccttaaacgttcctaggctgcccggggtgacttcttgtgcctgcatttagtctctggctcaggctacacgtggacacacccttg

SEQ ID NO: 260949 - DNA, 122 bp, Homo sapiens
cacgtcccaaagtggtttcacagggcgggatggggcaaccctgagtgctgtcaagggcttcgtgctccgcgacgcccccaggacctcaggaggccgccggcccgaggctacctcatggtggg

SEQ ID NO: 260950 - DNA, 122 bp, Homo sapiens
gaatctctgcgcagagatccttagaataaatgttatttctaggcgcggacttcttgcggccgcgtgtgggcacgacaggcttctttgggaaagacaactaaagtttgaaatacaatcctaca

SEQ ID NO: 260951 - DNA, 122 bp, Homo sapiens
acgcagtgcgccggaacggattatttttagggtggtgggagaccagctgctgcctcctatcgagtttctaaattgcacagactgctctgggccggggcagacaccgcggctgagaagcagga

SEQ ID NO: 260952 - DNA, 122 bp, Homo sapiens
cttgagagtctggcataagatgaggtcagaaaagaaggtgggaacgggtcacagttgatgcgagtgtaaatgctgtagactgctgtgcccaccaagagccctttacaggctggtacagggca

SEQ ID NO: 260953 - DNA, 122 bp, Homo sapiens
tggggtaggggccttggcagtcactgggactcctaacaccgggccagcaggagactaaggcgcagtagcggggcccagagcatacaagggattgggctttggcttctctgctgcagccctga

SEQ ID NO: 260954 - DNA, 122 bp, Homo sapiens
ccttgaagagcctgatccagaaacagtgccgtgttttctgaaactgaatgcaacgaagtgcggcttcatccactgagtcactgcccatcccctcaaggatccccaaggaggcgacgctgagt

SEQ ID NO: 260955 - DNA, 122 bp, Homo sapiens
ctcatatactacgatggggcaggggcgcgacggtctggcggctccggggcattgtctaagcgggacggggcggggcttcttcgggccacgcccattccgccctgctaagcctcgcccattac

SEQ ID NO: 260956 - DNA, 122 bp, Homo sapiens
agggcagggcgcagtggaggccccaatccacctgactcccaggctcctggtcttactgttcgccagctgtaatggaggcgctgggggaggccatggtccctcttcggagctgtctgctcacc

SEQ ID NO: 260957 - DNA, 122 bp, Homo sapiens
gtcctttcctccgatctgaaatggaggtgcagtttgttgtgaggattaaatgagatgatgcgttcagagaagccacacgtgtgaagagcccagtgcatctggcagctggtaccaccaggact

SEQ ID NO: 260958 - DNA, 122 bp, Homo sapiens
ctgaaggaccagattgagcaggaggcccagtgaggacagttactggtgaggcaggggccccgagtgcgaatcctaccgctgcgccctccttagtgacccaaggccgggaggtgagcccagcc

SEQ ID NO: 260959 - DNA, 122 bp, Homo sapiens
gaagggtcctgactccggggagagagaggtctattgttgtcctctgtccacatgcctgaccgctttgagaaaaaattaatgactttggagactgatatttctgcagaccccaagaaagggac

SEQ ID NO: 260960 - DNA, 122 bp, Homo sapiens
gggggcaggcggggggcgagaagggggagcgtgagctgagccggttgatggcgaggcctgcgctgtgctctcatgccttccccgctggtggccctggggagtcacgagcctctgatctcctt

SEQ ID NO: 260961 - DNA, 122 bp, Homo sapiens
gctctgctgcctttcccggagaagcagcctttccaacccttcccagaggaacttaatctccgtttgcctgaaaaacctgtaattggcctccctttgggtagttgcccagcacggtactgtct

SEQ ID NO: 260962 - DNA, 122 bp, Homo sapiens
tctctcctgtcaggacaggttccgtggggttggagggactcagcctgtttctgtgccatccgcctttaacggcccagaaacgttagtgactgagagtaaaataaggtcgacttcacagtttc

SEQ ID NO: 260963 - DNA, 122 bp, Homo sapiens
aacctgccagtgtaaccgaatctcctgggctgcttgtgaaaatgcaggttcctggatccacggccagagatcccgatggctgggaagatgcattttggcaagcaccttgcaagattcccatg

SEQ ID NO: 260964 - DNA, 122 bp, Homo sapiens
caaatcggaagggacgagcctgccctttgaaagggttttttttcttgctcctgcggagggcgccccagccatggccctcaggagctccctagaccccgcagggactgccctccatcccggcc

SEQ ID NO: 260965 - DNA, 122 bp, Homo sapiens
caccacgtcgggctcacagaaggctcaggtttcctccagtatagttcaggggatggtgaacgcttcccaacaagcctgcaacaggcgcatttctttctgcttttggtgcgtgtgtgtaggga

SEQ ID NO: 260966 - DNA, 122 bp, Homo sapiens
tccagcccggagtgtgctctgggctttatccacactaataaaatgatttacccttctctccgcgctctcctcacagaggaaaatcgttcgagccccggctatttgtgtgtgatcagtaaata

SEQ ID NO: 260967 - DNA, 122 bp, Homo sapiens
gaggtgtgctgtggagggctgtgaggaggatttcccatgggttctttggagagaagggagcgatagaaatgaaccagggttccaaagaagtcttcataatcgttctttctgccacccttcac

SEQ ID NO: 260968 - DNA, 122 bp, Homo sapiens
tgggagtcagaaaggaaaggaaaagggcattccaggcagggacacagcaggtgcaaagatcgggaagtagaaatgagctgtcttttgagtaaaagctattggatgtttcggacacagtgagg

SEQ ID NO: 260969 - DNA, 122 bp, Homo sapiens
gacgcggtgatgtgggggaacagaattctcacgcctcttcggaagccgggaatctacccccgagccctcatcccccaactgagccggttatcagagaagcccacaaggccactaggggacta

SEQ ID NO: 260970 - DNA, 122 bp, Homo sapiens
tgagtgcaagttagaagtgcacagtaagtgtcatttccttttcaccctaaacagttctcacgaggatcagaaaagataatgtatgcaaaaatgttttaaaagctgtaacatgctatacaaat

SEQ ID NO: 260971 - DNA, 122 bp, Homo sapiens
ctttttacaacagaatttgaaaatcataatgtcttcatctcaaaaagataaatcccccaacgtggaaactgaagactcgtagtcagatggagaagcccacatgttttagagctagtagttga

SEQ ID NO: 260972 - DNA, 122 bp, Homo sapiens
tactaaccagatggagcctggaaactccagctgggaacaggaggggctgggaggggctcacgtgagaaacactagatgttgacagagacttgccctgggcctggggtgaggatggatgaggg

SEQ ID NO: 260973 - DNA, 122 bp, Homo sapiens
cgcgggtggccgggggcacgccgtcgccatcttgcggctgggcctcgtgggcgcgttccgcgtgggttctggcgtcgtcaccttccaccccaagccccgtcagtggtcacctctgtaagcca

SEQ ID NO: 260974 - DNA, 122 bp, Homo sapiens
ggcgggggccatggctggggtcgcgtgcttgggaaaagctgccgacgcagatgaatggtgcgacagcggcctgggctccctgggtccggacgcagcggcccccggaggacctgggttgggcg

SEQ ID NO: 260975 - DNA, 122 bp, Homo sapiens
cattcacagtgagtccggaacacacgcacacaatggccgaggtacactctagaacattcacggtgagtccggaacacacgcacacaatggccgaggtgcacactagagcattcacggtgagt

SEQ ID NO: 260976 - DNA, 122 bp, Homo sapiens
tgcaccccgttcccacacatgccctgtgcccgcaccccgttcccacgcgcaccctgggcccgcaccccattcccacgcgtgccccatgcccgcacccacgatggtgagcatggctggggcag

SEQ ID NO: 260977 - DNA, 122 bp, Homo sapiens
ggaggaaacagagggagtcaggggtgccctgggaggctggagggatcacaggcctagtcccggaaccttggctatgagtttcagcctgatcctcaggccctgggcacccatgggagggtttt

SEQ ID NO: 260978 - DNA, 122 bp, Homo sapiens
ccgggcccctcactcaccggtctgcctccccgcgctcgggatccgaggaccggagcgaagcgtcagtgacgccgccaacgggcccggatcaggccactgccatctttcttgcgggcgggggc

SEQ ID NO: 260979 - DNA, 122 bp, Homo sapiens
tgggaagggatggtttatgggtctcagaaaaaggaggtccgggtgccttcagagtagcctcggctgcaaattctaggcatttcagggtcaccgtcctggcagtggttgcctgtgctttatgt

SEQ ID NO: 260980 - DNA, 122 bp, Homo sapiens
cctaatttcatgggggcatgaatacagaagacagagaaacttggttccggtgaggaaatacggcctgttgatgttctgaactatggacttagctagagcctagatttttttcagtttgaggg

SEQ ID NO: 260981 - DNA, 122 bp, Homo sapiens
taaatgtcaaggtgaagagaattgagataaatcagctgaacctctgcacgcagcctgagacgacccccactgcctccctcgctcctctcccgtcactgctctgggcctagcctccttcactc

SEQ ID NO: 260982 - DNA, 122 bp, Homo sapiens
aagcccacgctgccaattcctagccgtgtcatcttcgggaccaaaaacaaccacctctcacgcgcttactcagtgccagcacccgcgctccgcctttttgggcggcagcttagcatttttag

SEQ ID NO: 260983 - DNA, 122 bp, Homo sapiens
gcccgacagtcgccaccccacacccgaggggtcggtgagcagcacggccccttcctctaacgtgtctgtctggttccggctccagagtaacgccagcctcagaatgaggtgggaagtgcctc

SEQ ID NO: 260984 - DNA, 122 bp, Homo sapiens
aacagattcagacagaagtgtatcctggggtgtctgtggtgaagtcatgggatgcctggccgctggccccaccttccaccccaaccactgccgcccttgaactctctggagtgcttgtgcca

SEQ ID NO: 260985 - DNA, 122 bp, Homo sapiens
gctaaagggtcagagactcacttaagctatgtcaaggaatggggcttgttttacgggaggcggaatcccacaggaacacaggcccgctggctcccgagaccgggctgtctggagtcctccat

SEQ ID NO: 260986 - DNA, 122 bp, Homo sapiens
gggaaagcgagaaggacaggacggagtcgtcgggttttgttactctttaactctccgccacggctttctaatgggaacgaagtggttatcaccagggctgggacgctggcgcctcaggcccc

SEQ ID NO: 260987 - DNA, 122 bp, Homo sapiens
aaatactgcagtactttcagaaggcaaatgaaaccaaatggctcctgaatccactcaatacgcaaagtaaaatgtacgttgaaccttgtcaggataaactccaattgcaaggaactccagag

SEQ ID NO: 260988 - DNA, 122 bp, Homo sapiens
atcagagtagcaggtactagggtgatttgcaggggactaaaaagagattttctcagccagcgttctgtgatgtaccaaggcagcccagtgggagtcccagagaggggactaatttgagctta

SEQ ID NO: 260989 - DNA, 122 bp, Homo sapiens
gggtgactatgcccggagacccagaaaagcctcccccagggacacacagctggtacagggcggcactgactgagggccaaggtcttctggctgccaatccaggtgatcttggggagctcatg

SEQ ID NO: 260990 - DNA, 122 bp, Homo sapiens
caatgctggagccggtgtcagccctggagccgatgccagcgccggagtcggtgccagtgccgggacccaaggatcagaagcgcagcctggagtcctcgccagctcccgaacgcctgtgctct

SEQ ID NO: 260991 - DNA, 122 bp, Homo sapiens
cagcccgcgccgcctcctcctgggagccccaaagacactctctgctcctctcatcccacacgctttaccggtaccttcaacagcacccaccgcgttcaccctgtgaacacttccttagtgat

SEQ ID NO: 260992 - DNA, 122 bp, Homo sapiens
acggggcttgaaacaggaatacaattgcagatccacccactacacgcaaagggcccgggacgcgcctccacagccccgccccaaccggaagtgacgcaccgcgccgactatttcttccgccg

SEQ ID NO: 260993 - DNA, 122 bp, Homo sapiens
cacttgccaaagccaaagttgcaccaagaaaaaggtcttggtcactgtttgttggtctgccgctggtatgatctgctacagctttctgaatcccggcgaaaccattacatctgagaagtatg

SEQ ID NO: 260994 - DNA, 122 bp, Homo sapiens
gggcctcctcctgctcctactcccgagaggctccggcaatgagaataggccccgcccccccgcgcagccaagtctacggaccaagtccgagcctgcagacaagctccgcccccacgagggcc

SEQ ID NO: 260995 - DNA, 122 bp, Homo sapiens
gggctggcaagatggccacgcccccagcagagacggcgcctctaggacaccatcggggaccgaggtacccgagcggtccgcccgccttccctgcagtgagacgatcccctggggggttcctt

SEQ ID NO: 260996 - DNA, 122 bp, Homo sapiens
tgatgaccccgaagaccgcatgtcctacttaaccgccatgggcgcggactatctgagttgcgacagccgcctcatcagtgactttgaagacacggacggtgaaggaggcgcctacactgaca

SEQ ID NO: 260997 - DNA, 122 bp, Homo sapiens
gtcggcgcactccatgcgcaagcagaacgtggtacccaccgtgctggccttgggcagcgacgtggacatggacgtgctcaccacgctcagcctgggtgaccgcgccgccgtgttccacgaga

SEQ ID NO: 260998 - DNA, 122 bp, Homo sapiens
cccagatgcactctggaagttctgcctgagctctggcttgcaccttctgcacatctagaccgcctttgactttcttactcattcacttccttttatagagtgggtagttcctgcttttaatt

SEQ ID NO: 260999 - DNA, 122 bp, Homo sapiens
acaaaagaattggtgctaatagaagcttacaattccaaagtatgcaatttaaccaatcatcgcaaggactaaaaatgcaacaccaaagacatttcaaccaagtaatctgcagttctggcatc

SEQ ID NO: 261000 - DNA, 122 bp, Homo sapiens
ctgcagcagagtctatatgggaaatcaaatgacaatccaaagtttgcttggtgagcatgacgtcagagccaaagggagttggatggtctgagtggcatatgtcacagccccaggggcaggac

SEQ ID NO: 261001 - DNA, 122 bp, Homo sapiens
caggtgctgccttgcttttgtcagcattttcctcctcagcctccactttgtacatctcctcggagccttcctcgctgtcgttctcctctgactcggtcagcagctcctcgtccttatattca

SEQ ID NO: 261002 - DNA, 122 bp, Homo sapiens
tccattcatccgtcccactgcgggcgcagcaccatatccattcatccgtcccactgcgggcgcagcaccatatctgttcattcatctcactgcggaggcagcaccatatccattcactaatt

SEQ ID NO: 261003 - DNA, 122 bp, Homo sapiens
aaagagataaatgtaaataagctcacatttacagaatgagcggtttgcagtaaaaagctgcggcagcccagagtctgctactttaggctgggctaacctttccctgtaaaaaaaaaaaaaaa

SEQ ID NO: 261004 - DNA, 122 bp, Homo sapiens
agaatcagcagcatctcgctggaggctctggagtcactcccaactctgtgctgggaggaacgtggcaactccctttataaagaggagcaaaacaatggcacctttgagccctgggtgggcct

SEQ ID NO: 261005 - DNA, 122 bp, Homo sapiens
acgcccgagcccctgtgacagcacaatgccactccacgcccctgcagggccccctgcccccggcaccctacaccgacaccggcgtgtcacccatattgtgacatcatcgtaatttctaatcc

SEQ ID NO: 261006 - DNA, 122 bp, Homo sapiens
tgctctcaatctaccacgaccatttcacgtggaaccccttagaggtgtaagcccttaaaacggccaggaactctgtcttcggggagctctgttcttgagacgcgagtctgccgaaactccca

SEQ ID NO: 261007 - DNA, 122 bp, Homo sapiens
caagcaccgagacggaataaacatcacccagtttccttttccctccctcttgagaaggaacggtgatgtcttgagagtcagaaagaaaacagtgaccaaatatacatgatttactgaaaaat

SEQ ID NO: 261008 - DNA, 122 bp, Homo sapiens
tgttctcaggaacaattcttaaagtcaagactaatgaatctgaatttttattagtaaccacggaactaacccttcccttcactgttcacagtttttgtaacagtagaacaattatccaaggg

SEQ ID NO: 261009 - DNA, 122 bp, Homo sapiens
accctgtcctcccacggagcaggcgggttagagattctcccagacctgcagtccgtttttcggccttcaggctgttttaggcttgaaggctgggtttaagggggaaggggagtggggccttg

SEQ ID NO: 261010 - DNA, 122 bp, Homo sapiens
gtgggccatttagggacagaataccccagtacacgtgtacttaggagtatttcagttctccgtggctagtaaagccaagggatcaggtagggtgaatgagtccttcccaaggtcacctagca

SEQ ID NO: 261011 - DNA, 122 bp, Homo sapiens
gccacttaaagctcctcatgccgtgagatcagaaaaccagagaagtcaccacattgatagcgacaattgattctgatcaccaggatcagaatcctggtggtagggctgctttcacatcatgg

SEQ ID NO: 261012 - DNA, 122 bp, Homo sapiens
tagattgcccgccacttccgttaaggcatctattttactgatgaaaagaggccttctgagcgttaccacagctcaagcttggcgtcccagccggatctaggtttgatttgcaattagggaaa

SEQ ID NO: 261013 - DNA, 122 bp, Homo sapiens
ctgggaggtgttcagggtatctatttctcatgtttctttccttaagaccaggctcctcctcgacttattaagctcctaacttgtgttcatcctgcctgggggtcaggggatgtcaatggaga

SEQ ID NO: 261014 - DNA, 122 bp, Homo sapiens
ctattcactcgtgtgaattaataacaaggaaagcacacatggtggggggagcccgagcttcgtccccacacagtgtgcccctgctgtgtgacctcaggccagtcccttggcttctctgggcc

SEQ ID NO: 261015 - DNA, 122 bp, Homo sapiens
gggtcaggttctcagagcgggtctccggcggcggcgacgggggccgggccgcgcgtgacccgccgcagtcacgccgttcttaatcactagtagctggtgctccaggctggcggcgctcacct

SEQ ID NO: 261016 - DNA, 122 bp, Homo sapiens
ccgcaagcgccccctgcaggcggcgcgccacaccgctggccctccggcaccgccccctcccggccccgctccgcccgccgccccccggtactgcccaccttcagcccaccccgcagcccccg

SEQ ID NO: 261017 - DNA, 122 bp, Homo sapiens
ccagactccctccccttgacccagacctgcggctttcccaggagagcagcccagaggctccgaggggagaatcaatcacagaatcatagcctctggactcacaggaggtcaggcggtgcagc

SEQ ID NO: 261018 - DNA, 122 bp, Homo sapiens
tctttgaaatctggtgtatatttcagacagagcatctcaatttggatcagccacatttcacgtgttgtgtgagtttcaaacaatctctctaagattgtttgttttgagacgaagtcttgctc

SEQ ID NO: 261019 - DNA, 122 bp, Homo sapiens
aatacaaaaattaggcctggcgtggtggctcacacctgtaatcccagcactttgggaggccgagaggggcggatcacttgaacttgatgtcaggagttcgagaccagcctgaccaacatggt

SEQ ID NO: 261020 - DNA, 122 bp, Homo sapiens
tggcctgggcttgtcctacctttccagccatatcgccaacgtggagcgggtgcccttcgacgccgccaccctgcacacctccactgccatggccgcccagcacggcatggatgacgatggca

SEQ ID NO: 261021 - DNA, 122 bp, Homo sapiens
gatttcccccttaagaaacaaagcgtgaaggaggaagagaggctacaggaatctgccatccgggagaccctgtctctaacgggccatacggggtccccctgtgtctcctgcagccctgcaca

SEQ ID NO: 261022 - DNA, 122 bp, Homo sapiens
cctgctctgggcttccttctctgcgctgctcacagcggagacgtggtcatgaggccgggtcgccttggagccagggcctctcagtccctgtggtggtctctggtcagatttggcccaggagg

SEQ ID NO: 261023 - DNA, 122 bp, Homo sapiens
gggcggaggaacagaagcgcacggaccgcagcaggcagcggacccccagcatcccgcgtccgcccaggccctccgcgggagcagcccagaccccacggttcgaaccccgcctgcagcggccc

SEQ ID NO: 261024 - DNA, 122 bp, Homo sapiens
ctaatatacaaatatgatagaagtttgaaaatggaaccttatcccagtgctatattggcacgtaacatggctagtgatcatttcaaaaggagtcatgttatgttttgagtttgtttgtgata

SEQ ID NO: 261025 - DNA, 122 bp, Homo sapiens
acgttcacaccggctccgtaaacctcacggcacggagactaggtctcccagaatccatggcgtgacaaacgcagtaatttggcaacaaaagtagaccggaattagttcctagatctggagca

SEQ ID NO: 261026 - DNA, 122 bp, Homo sapiens
atttggaatacttctgtgcatttgtctgtccaccgtaattttagaaaagcatatccataacgtttacagttgtagtacagttgtggttagttatttgtagtgggattgaaagtaattttttt

SEQ ID NO: 261027 - DNA, 122 bp, Homo sapiens
aatttaccattccggggtaagagaatcctaatagccatgacaccattgatcagcttgatccgcatcttttctgagggcctattacaggaaatccacttattttgttactatttattggttac

SEQ ID NO: 261028 - DNA, 122 bp, Homo sapiens
cttattctgtaaaatagcgctcaccatagtcatacttcatagagctgtgagggttagtttcgagaatgtatgtagagcctttgctgcagcacgtagaaatgttcattagttttttcttttcc

SEQ ID NO: 261029 - DNA, 122 bp, Homo sapiens
acctcgtgatctgcccgccttggcctcccaaagtgctgggattacaggcgtgagccaccgcgcccagccaagagttaattatttttaattaagagaggtaatagtgagtatttgagacaatg

SEQ ID NO: 261030 - DNA, 122 bp, Homo sapiens
tgggtgtgaggggcggggacctgagtgagtagaactccggagaaaccctgggggagtaagcggtttttggcggctgcggcccccgggccctgccccgagtgcagaaatggggaaccgcgccg

SEQ ID NO: 261031 - DNA, 122 bp, Homo sapiens
cggggcggaacgggctgccctttggcgctcgtggggttctcgctgccccctcagctcctgcgtcctggctgccctcgtaaggggtcttgtcccttggctggtgaggattctgcccctccccg

SEQ ID NO: 261032 - DNA, 122 bp, Homo sapiens
gtgtgctgtcttcctgccttgggcttgatttgtgatcagaagtggtgggggagttaatcacggcactctgtacgcctatccgactggggttagtaagttccagtggcagggagcaggctgcc

SEQ ID NO: 261033 - DNA, 122 bp, Homo sapiens
gccggaacctcggcccacgtgacgcgggcgcgcgcctatggaactgacggtggagttcagcgaagaaggtgccgcagagaattcgcaaacaccaaccgtaaccagagcagctgggggcgcgg

SEQ ID NO: 261034 - DNA, 122 bp, Homo sapiens
aggggcaggtattgtgccggttactatagcatcaccttggaaagtctcacttggtgagagcggcaggcgagctggggtggggcaggagggggacgcggctggctggaggggctggagctagg

SEQ ID NO: 261035 - DNA, 122 bp, Homo sapiens
cctgtcaccctcccccactcctagcccctcggagccaacggagccttgcgcgtttctggccggtcctcccaagagagaatggtgcaaaagccaataagcctggaacacacgcaggtcccgcc

SEQ ID NO: 261036 - DNA, 122 bp, Homo sapiens
taactgttgtactctgttgagggaactcctttcagaaacagcaaaccagagaaactgcctcgctagcaaattcatgggctcagaaaataaacgtcaagaaggctcagattaaaatacctttt

SEQ ID NO: 261037 - DNA, 122 bp, Homo sapiens
aaaaggggcagggtaaagagtgtgagtcatctccaatgataggcaaggtcacgtgggtcacgtgtccactggacagggggcccttccctgcctggcagccgaggcagagagggagaggagac

SEQ ID NO: 261038 - DNA, 122 bp, Homo sapiens
gccacccctggggacatgggcatgtagccatcatccgtgtggagggtggagctgtctgggcggtggtgccccccccgacgctccaaggggtgcatttccagaccctcctctgggtaggagcg

SEQ ID NO: 261039 - DNA, 122 bp, Homo sapiens
tcccaccggcgggggccgcccggggctccggacggagctggaattccgcggcggcggtggcgaggcgaggctggagagtcaggaggaagaaacgattcctgcagctcccccagccccgcgcc

SEQ ID NO: 261040 - DNA, 122 bp, Homo sapiens
ctaagcagggggccgggagcgtgggaaatcctctgggagtttgtggccacagccagccttcgcccaggggcacggcctcggttcaccgcctgtgtgaaaacagcagcaccaactccggctga

SEQ ID NO: 261041 - DNA, 122 bp, Homo sapiens
ccactatgataatgccgagctcaccctcaatgtggccttgggcaaggtcttcacagggggcgccctgtattttgggggcctcttccaggtgagtgtgtgacccatgcggcagggcctggggc

SEQ ID NO: 261042 - DNA, 122 bp, Homo sapiens
agcataaccaagtcattttcctcatcagtgaacagcaccaaacagttggaggatggaagccgacagtgtttttaaaacaaaaagcagagtgagtagccatacgtgaggctatgtaaacagga

SEQ ID NO: 261043 - DNA, 122 bp, Homo sapiens
tacaagtgcacgccagggtttcttatttttggtgtgtttttgagaccaaagaaccatatccgctaagcctgaggaggcacccgccccctcagctctgaaacgaggcctcaaaacggcaaccg

SEQ ID NO: 261044 - DNA, 122 bp, Homo sapiens
cctgctggaagggctgctggaagccatcttcgcacggttcttcccttggctttagagccccgaagcgctctttgacttgagctgctttgcattctctctgtcctgccatcgagaaagttctg

SEQ ID NO: 261045 - DNA, 122 bp, Homo sapiens
gttctcggtggggatggcaatgacccaccagcacactgagggtgctgctggatctgctgtcgctattcaagtcacttcctgtaacatttggcaggcagtgctcaggcagcagggaatgatgg

SEQ ID NO: 261046 - DNA, 122 bp, Homo sapiens
gggacagggggccgggggcgcacctggatgtcctcgatcatatggggcctgaacagctcgcggctcagcagggcgtcccagagctggtccacctgcagctcttccaccagccgcagccggca

SEQ ID NO: 261047 - DNA, 122 bp, Homo sapiens
ggacactccttccctccgccggccacgtttgcagggagcccctgagaggcagcggcagcccggatgctgaatcccattcgccccggtcatttccggagcgtcttccagcccgttccccgcca

SEQ ID NO: 261048 - DNA, 122 bp, Homo sapiens
gcagtgctgtaagcattcagtgaactcattcatgtaaggtgcttaaaagagtgtctagcccggccgggcgcggtggctcatgcctgtaatcctagcactttgggagtctgaggcgggcaaat

SEQ ID NO: 261049 - DNA, 122 bp, Homo sapiens
ccttcgggctgcgttctggggtcctggagggactcatgcgtttacttaaacagccatagccgttgaacggaacacgatgccacaccacagtgggtcctcaacagatatttatggaataaata

SEQ ID NO: 261050 - DNA, 122 bp, Homo sapiens
cggggcaggggcggagccagaacaagcaggaggcggggactctgctcccgcagccaatggcggggcggggtgggggcgatcagggggtggggccgggtgtttacactctcgcgtgcgcccgt

SEQ ID NO: 261051 - DNA, 122 bp, Homo sapiens
tagcacaatgtttgctcacaaacacagaactaattataagaaatgtgaaagaacctgaaacgcagggggaatactcttactggagacagcctccatagtggtagaaaacatagtagatctgg

SEQ ID NO: 261052 - DNA, 122 bp, Homo sapiens
acaaagaccttcgcattccagacacagatccagaggtgcagtggcctggggggctgcaggcgggtggggccagggcctggacccccccttgttgaccacccatgcccccacacccaccatct

SEQ ID NO: 261053 - DNA, 122 bp, Homo sapiens
cggttcccggatagtccagaagaaggtgttcaagggcctggacctccttgagaaggctgccgaaatgttatcgcagcttgacttgttcagctaaaatgaagatttggaagtgattgcttcca

SEQ ID NO: 261054 - DNA, 122 bp, Homo sapiens
gaatcttccaaagcccagcaggaggccccagctcagcctccagaggagtggaaccttctgcgagccaggaggaggccccgactgagcctccaggtcctcctgtggaacctgaacgttccccc

SEQ ID NO: 261055 - DNA, 122 bp, Homo sapiens
gttaattccactttgtgatgactaagtagttccgctgtttttgaattgaaaaccagaaagcgagtggagttggtgccctggaccaccgctcccaccaacggccccacagctgctgtctttgg

SEQ ID NO: 261056 - DNA, 122 bp, Homo sapiens
gagctgagctgcgggcttggggtggggagccctgactcacgcctggcctctgactcgtgccgctgagtggtctggaacccctgtcgggtgcctccctctggccaccccacaccttaggcgtg

SEQ ID NO: 261057 - DNA, 122 bp, Homo sapiens
ggaagactgtcttcctgagtccaggactggcgccggagttttgggtccacggataaaacgcgtctccttcgtgtctaccaggaaaggaaaggaactgaaattcagagaagggagagattgaa

SEQ ID NO: 261058 - DNA, 122 bp, Homo sapiens
taacggattggcttggccttacccacgaggctttgcggtggctgttggcttggcggtggtcgcttggcttggcgtggcagtgatcgcttggcttggcatttctggcttggcggtcctccttt

SEQ ID NO: 261059 - DNA, 122 bp, Homo sapiens
gtcccagctttcagaacctctcagttaagccaaagatggatttgatattaccagaatccacgtccagctatttagggcctctggtactcaaccctgacttaagccccccaaaagagtcagtg

SEQ ID NO: 261060 - DNA, 122 bp, Homo sapiens
ggttatttcagtttatatcaatgaaaactaaatagctttaaaaattcagttcctcagtcacgctagccacattttgagtgctccatagtcacatgtggctagcggctgctatattggacagt

SEQ ID NO: 261061 - DNA, 122 bp, Homo sapiens
gcaaacatttactgaaccgtagcactggggcccagcctccagctccactattctgtaccccgggaaggcctggggacccattccacaaacacctctgcatgtcagccttaccagcttgctac

SEQ ID NO: 261062 - DNA, 122 bp, Homo sapiens
ggtacccaccactgggtcctttcactctcaggaggacagaataaaccttgtttattttcccgtggctcctcagagggatcctccttctgtcttaaatcatcttagcaattgcctttttcaac

SEQ ID NO: 261063 - DNA, 122 bp, Homo sapiens
tttacctcaccctccccacgtgtggcagcgccacaaatctggggacacctgtggagccctcgaagctagggaagaagggctgtgttctcaaactgtgttcctcagcccctggagctaacaca

SEQ ID NO: 261064 - DNA, 122 bp, Homo sapiens
tggggttactgtcagtggcagcaaccccaggctagcagggtttaggctctcagaagtgtacgctttggctctttttgtccttgtgatagcctccccagtataccctccccagtgcattgcac

SEQ ID NO: 261065 - DNA, 122 bp, Homo sapiens
gggcctgatagtagattgaatggtggtccccaaaagacatattcacccagaatcccatagcgtgagcttactcggaataaagttctttgcagatgtaatcagggtaataatctcaacatgag

SEQ ID NO: 261066 - DNA, 122 bp, Homo sapiens
tcggggacagctttgtccctttccgcagtgagaacggggcccgcccggagcccggggaaccgaaggtttaggagcccaaggtcacccacgaatcccagccgttccctggggcgacttcctgg

SEQ ID NO: 261067 - DNA, 122 bp, Homo sapiens
cagctctccggcctctgtccgttggtaatcgctgtgtcagctatagatgtgaggcgtgttcgtcagctcttcgttttcagaaggcaagaaaacgtggcaagatttctatgccgatcaaaagg

SEQ ID NO: 261068 - DNA, 122 bp, Homo sapiens
acagtaaaactactaatgaatttgtatcttgtgctttagtcctgcaggttttcatcacttcggctgccctgaaggttattaggtataggaggaataggtctctggaaaatgggggcatctca

SEQ ID NO: 261069 - DNA, 122 bp, Homo sapiens
aggttacggtatttaaaataattttgaaacaaccaccaccccaaaccacccaatcagaaacgtattatctgaaaatacccaataataatgtaataattttacaataatgctaaatatgtatg

SEQ ID NO: 261070 - DNA, 122 bp, Homo sapiens
gggaaaagagatactgggtagagggtgctgggaaggtgcccactcatccatgcccctctgcgcgtctcgcccactcgcttaggcttggactttgcaacaaggtttccaacaccgctgcagtg

SEQ ID NO: 261071 - DNA, 122 bp, Homo sapiens
tggaggactctgtgggaggagggtcccggcgtcgagggccccgtgggaggagggtcctggcgtggagggctccgtgggaggagggttctggctgaggtcatccagcagctgcactgtgtggc

SEQ ID NO: 261072 - DNA, 122 bp, Homo sapiens
tcagaactcaccgcttccggaaattgggctccgggagactttgacagtctccacagtacacgtggtcggcctctgacacgctccctgatggcgctcggtgatgacgttaaactgagcggtga

SEQ ID NO: 261073 - DNA, 122 bp, Homo sapiens
ggctgccgcggatgcccaggtgcgaggccaggtcgtagcgctgcatgttggacataagcacgcggttctcgtactgcagctgcatgaccttgccgctgagctcgttgatctgcaggcgcgcc

SEQ ID NO: 261074 - DNA, 122 bp, Homo sapiens
tggacaatcaggagcttgtctctccctggctgccgaattatcatttttagagaggcaatgcgataattactgaaccatcacccgaaagccccgtcttgccccggcgcacgcctatctacccg

SEQ ID NO: 261075 - DNA, 122 bp, Homo sapiens
agcagaaggcccaggctgaggtggtggctccggagccccatggccctggcactgcaagagcgggggcaggtctctggatgtgaggcctcctggccagacctagggcaaaattaggcccagct

SEQ ID NO: 261076 - DNA, 122 bp, Homo sapiens
ttagttttgagcctgaattttaaaaagccaagtgttgcccccagcccacacacacacacacggacatgtacagtacaaaccccagataattacaacagccaaagagagaaggaagtgaattt

SEQ ID NO: 261077 - DNA, 122 bp, Homo sapiens
tatctggagcccggtttggggttatagatgatgatgttgagccagcacccacggggcggccgcaatgtagaatcctggcgctactgggaaccgtgtggaaaggggctcttctttctgttcaa

SEQ ID NO: 261078 - DNA, 122 bp, Homo sapiens
agacgtggtggatgaggttgattaggcactgtgtggggcgtgagctgcctcggagtccctcgtgagcaggaagaatacttgtatttgaatgccaggcctgtctaggtaggtgatggtctcaa

SEQ ID NO: 261079 - DNA, 122 bp, Homo sapiens
gaccgggaaaagctgcgatcacagtccgcgcacttgaatggcttcactcccgtatgtttgcggtaatgcctcgtcagttcatctgaacgagcgaacttccaggtgcagccttcccaggtaca

SEQ ID NO: 261080 - DNA, 122 bp, Homo sapiens
ggaggttgcagtgagccgagatcgtggcagtaccgtccagcctcggcaacggagggagaccgtggaaagcgggagacggagatgagggagagggggagaccgtggaaagcgggagacggaga

SEQ ID NO: 261081 - DNA, 122 bp, Homo sapiens
gccttgggcagagtcctctcagagtctacaggtgctgcctccagaaccctcttcctggagcgcatccctatgtatctagaaattctgctgggaaatatgatggtcagacccttggccacctg

SEQ ID NO: 261082 - DNA, 122 bp, Homo sapiens
tgcttattggctgctacgtgaacgagacaaacgcaagcaacaaccaatgggagtggcccacggcgcgtctttcccggggaagccgacgcggacgcgggaacccggaaatgcgagggaaggac

SEQ ID NO: 261083 - DNA, 122 bp, Homo sapiens
gaaccggtttctgctggggttacctttggacggggttcctgggattcagagcagggtcagcgtcaggctcagaaactgctgaggaattaggcaaacaaaagagaccactcagcgagtggcta

SEQ ID NO: 261084 - DNA, 122 bp, Homo sapiens
aggaggctggggagcagcctccccaagctagagccctgcagagcgagtttcccttgacctcgctgcgcctctggcgcgctctgcagcgcggacccgcggcccctcgggaaagcgcagtcgga

SEQ ID NO: 261085 - DNA, 122 bp, Homo sapiens
ggcaggaggaggctctcaggagcggttggggtaaccagaatagatctcttcctctccgatcgtcttcccccgagcaccttcctcctttcacttagtcagtgtaataaatataattggaagca

SEQ ID NO: 261086 - DNA, 122 bp, Homo sapiens
aattctacctattcttgggcaggcagggactctgcccagagtactcctctaaatgtcaggcgctacccaacaccttaataccacatccccacaatcccataacgcaaataccagcttcccta

SEQ ID NO: 261087 - DNA, 122 bp, Homo sapiens
gggagaaagttctagataatgctgatttttctcttgtttcaggagtaactgtgtaactgccgagagcatgaggattctggggctgcaggggatcccaaggcctttagaactagcccctcacc

SEQ ID NO: 261088 - DNA, 122 bp, Homo sapiens
ggagccccggggcggagaccggagaccggggactgggtttgactttcagaaacttaaccacgcggcgccgctccccctccgcgcccgggccacccggggtgtgtggggcgtccctccaaaag

SEQ ID NO: 261089 - DNA, 122 bp, Homo sapiens
aaccccgaacaacaccctcctaatgagaggtgacagcgtgccggcagtcctcacagccctcgctcgctctgggcgcctcctctgcctggactcccgctttggcggcacttgaggagcccttc

SEQ ID NO: 261090 - DNA, 122 bp, Homo sapiens
ccaggggacagggccggccaatacaaggccactgggtgccaaggcagcgcccaggccaggcgccaggcgggaagggctctgacatgtcagcccgcataccccacagccccacagagggaccc

SEQ ID NO: 261091 - DNA, 122 bp, Homo sapiens
tatttaccataataattaatttgccgccattcaacagaatatcttagcaaggccccttaacgactggaagcgctgctaattccctgcgtatgcgcctctccctctgcagcccgggacaggcg

SEQ ID NO: 261092 - DNA, 122 bp, Homo sapiens
aggcacacgtgtgtagatatgtctttgtccatgtttctctacttcagtgtttgcatgccacgcggatgctgagttctgtgttcagagcctcctataaacacgtacacagtaccctccagtgg

SEQ ID NO: 261093 - DNA, 122 bp, Homo sapiens
aacatggcctttccaggagccccgcccacttcctgcacatgcccgcctaagttcctgcctcggggaggtaacagcataactgtccgactcgtcgctcccaaagagatggctggaacaattag

SEQ ID NO: 261094 - DNA, 122 bp, Homo sapiens
ccaggtgtaccctctgcctctagaccctccagcccgccctgttgtctcctgccaagcagccgactatgagaacttctcttgcacttggagtcccagccagatcagcggtttacccacccgct

SEQ ID NO: 261095 - DNA, 122 bp, Homo sapiens
aggtggaggtaaagagggatcccggaccccagagaggcttacaaccttccataagcaaggcggggggcggaattcagagaggtaaagtgacccgcccccaaatcgcaataccaggaggacag

SEQ ID NO: 261096 - DNA, 122 bp, Homo sapiens
aggttgctggataatcgcagttcagatgcaactccttcattagaggtgccttgtagccagcgacagtgactggggaaggaagcaaggtgcatgataaaacactggggtgttaggggaagggg

SEQ ID NO: 261097 - DNA, 122 bp, Homo sapiens
ccttgcaagccctccgcagtcagcgctgcccaggaaaggactcagggaacaaactcctgacgtcctgggcttgggatcatctcagcccaggccctgcaggtacagatggggagactaaagca

SEQ ID NO: 261098 - DNA, 122 bp, Homo sapiens
ctgtgactggcacatttctgccattgggtttcagttcatgctgcaggatccgcccgaaggcgttgtgttccacgcagaaggtgtggtccagtacaggcgtgatgtcgttctctctgttgaaa

SEQ ID NO: 261099 - DNA, 122 bp, Homo sapiens
ctaacaccagtttaaatggaggtctcatacaaattggtgctgtggggtgaccattcttttcggcttagacctggactatgtggtaagggtacacatatagctggaatgttaagaggtcaagc

SEQ ID NO: 261100 - DNA, 122 bp, Homo sapiens
ccctggggctgttggcgtaggctttggggcacgcctccagctccctgggctgggtctccccgcccacctggaggaagatctccgtggagcatcctagccagagatcgctgaggctgtaccag

SEQ ID NO: 261101 - DNA, 122 bp, Homo sapiens
tttgggcagcccggtgggggtcccgggggcgggcggcgggacggcggccgggctgggcagcgccccttgcatagttggcccgatgaccatgctggccgccgtgctggccgggccgctggccg

SEQ ID NO: 261102 - DNA, 122 bp, Homo sapiens
agcgcgtaactatgcccaccactacccaaactggaaacacaggcaaactctctttttctacgacatagagtctaatgtgtccaggctggacaacaatgtcaggagggtttttggcatcacag

SEQ ID NO: 261103 - DNA, 122 bp, Homo sapiens
gctgctctctagggcctgggagggtggtgctgggctgacaggacacagagcccacagggccggcgcacagaagctctacctgccaccgcaccctcttcctggtttggggtgaggctgatggc

SEQ ID NO: 261104 - DNA, 122 bp, Homo sapiens
tcagccaggatgtgatctcaacaacacaaagtagcctcctacccagggatgctcaagtgacgaatttcttaggtataacatggccagggggccagtagcctcagattgccttcttttgactt

SEQ ID NO: 261105 - DNA, 122 bp, Homo sapiens
cgcctgtaatcccagcacactgggaggccgagttgggccaatcacctgaggtcaggagttcgagaccagcctcctgagtagctgggttgcagtgagctgagatcatgccactggactccagc

SEQ ID NO: 261106 - DNA, 122 bp, Homo sapiens
tgggccagccccacagcctcgactgactgttgcataactgggacccaaggacagaggccccgggtcggcagcaccaacatggcaaagccaggaactcacatccctgagctgcacaaagcacc

SEQ ID NO: 261107 - DNA, 122 bp, Homo sapiens
cgtgtgaggctgggaggaagagttctgcattctccgggacccgacggtgctttgcacacacggtcatcagggatgttggtgctgtgtgtgtatacttgtgtatctaagcaccttagtgtacg

SEQ ID NO: 261108 - DNA, 122 bp, Homo sapiens
gaggccccattggctgaggcaacgttctaaattccacgagggcacgcccacctccgcgcgcggtacgcgctgttgtagtttccacttcaccgaaaaaaatctgcctggcgactgagcatgcc

SEQ ID NO: 261109 - DNA, 122 bp, Homo sapiens
gtgaacccagcaggagaggacctctgcccgaggaggtccagaggagcaaactgtgcgctccggtgcccgggcgccgggctcgcggaaacgcgagcgtgtcgctctggctcgggaggcgccgg

SEQ ID NO: 261110 - DNA, 122 bp, Homo sapiens
ctgctgggcatttgcagaaccgcagcatcccagatcactcgttaaaaaatttccacgttgcgctttttgaaaagcataaaaggtgcatgttcaaagctgtatcctgaccccattccctctac

SEQ ID NO: 261111 - DNA, 122 bp, Homo sapiens
gcgtaaggcaggtcgttattccagcctctaagcgctttacagcgccagatggctcgcgcacgcgctgcgtcttagtataggtccttgttaatagttagaagtgctgttctcattgatatagg

SEQ ID NO: 261112 - DNA, 122 bp, Homo sapiens
acatgcaccctccgccggcgacagctcctcagtccgggaagaggcgtgcgcggcgccgcccggcttcagggcaaggtcctgaccttgcccaactgcagcatcttccgcttttgttgtctgag

SEQ ID NO: 261113 - DNA, 122 bp, Homo sapiens
acattccctctgtcacagtttcccaaccagcgagttgcaacagtatggcccatcgtaaggcggtcctggtcctctgtgagtcactttgcactaagcaacgctgtttaaaattctgagtcctc

SEQ ID NO: 261114 - DNA, 122 bp, Homo sapiens
tcccctgcacatgcctcacccacactgtgcccagtttctaagtaagagcagggtcatcagcgcccaggacagctgtgggactccctggtcctgagcctgaatcctggctctgccctctccta

SEQ ID NO: 261115 - DNA, 122 bp, Homo sapiens
atctcatcttaccatatctccacctatatatatacaccaccttgcctgtactatatggttcgtatcacatgctgcaagcacacagaagtcactcaatgcaaatgtgatgaataaagtgaatg

SEQ ID NO: 261116 - DNA, 122 bp, Homo sapiens
catcagggccacgcaaagccctgtcagtcgcgagcagagcttttgtgtgcgtgccggctgcgctcccgttgccatggcgatggggccataagtcatgtctgctggtgctgcacagagccgct

SEQ ID NO: 261117 - DNA, 122 bp, Homo sapiens
cagataccttctttaccaaaaaagcaaatccctaactgctccgtgctgcgcctaccccaccgaagagctctctgtggtccgggatcacaaatcagagattgaaccaggaccaagggggaatt

SEQ ID NO: 261118 - DNA, 122 bp, Homo sapiens
ggggtggcttcttcactgaggagagtcgcgcctcagaggaactgaggtcctgcctgtgttcgacctggtggggggcactaagagcccctgatagtacccctgaccccatccttattgggtgc

SEQ ID NO: 261119 - DNA, 122 bp, Homo sapiens
ataattattatacttgttgatgccacactttcaggttttaacctttccaaagcgcagccccgccccagcgcagcccaagtccctgcacgcagaggcgccgatcacgggtgggaggtggatcc

SEQ ID NO: 261120 - DNA, 122 bp, Homo sapiens
gctgccgcctcgggttgcctctggggctagggagcccgggtctcggggttccgagcccagcgctcccgtccccgcctccccgcgcgcgcagccctggccagggcgccctccgctctggacct

SEQ ID NO: 261121 - DNA, 122 bp, Homo sapiens
gctccgggagccctgggggcgaggcggccgtggcgtcctccacgtctgtgtctccccgcacgtcagccgccccacgctgtctctggaagcttccggagtacccaggccttctgcactccacg

SEQ ID NO: 261122 - DNA, 122 bp, Homo sapiens
tgttagtagacacttagcgattgcagctgctatgttccagatattgttttacgtatttagcgtatttactcctcagacgtctgggaggcaggtactctcaccccattttacagctggagttc

SEQ ID NO: 261123 - DNA, 122 bp, Homo sapiens
gagagatttgcatagtagagagaaacagggaaatgctgggaagttttgtctggggcatcccgcctttgtttgacctggtaggaggataaatctcagggacaggtctcaaggctgcctccaac

SEQ ID NO: 261124 - DNA, 122 bp, Homo sapiens
ccccacccactgcagctggcgtcttttaggcgcatggttcttttcctctccggcgaggggcggtctcggggcggacccgaactacaattcccagcatcctgcgcggcgcggggaaggaagcc

SEQ ID NO: 261125 - DNA, 122 bp, Homo sapiens
ggaggggtgcaggatgcacaggtgccaaggccacacccttctgcggcaggttgtccttcccgtctttcctctcccctgatcattctgccagcatgcacgtatcctcagaggtaggccatctt

SEQ ID NO: 261126 - DNA, 122 bp, Homo sapiens
ggatgatctcgatttcgttatgtagtttgggtggtctttttcctcttcttttctcaagtacgcggcgttaatgaaactcgacccgtccgctgatgtccaggtggacgcgagcctccaaggag

SEQ ID NO: 261127 - DNA, 122 bp, Homo sapiens
cctccgagcagccgctcctaaaaattaaataaatcaataagagaatcaattaataggcagcgctgcgaccgccaggagcgcggagcgcgcgaggctcagcggcttcctcgccaagcccctgc

SEQ ID NO: 261128 - DNA, 122 bp, Homo sapiens
cagggcagctgagtcagagcctcttccccttctccagcacgcactgcggctcgctgccttcggccagctccataaagtcctaggcatggaccctctgccttccaagatgcccaagaaaccaa

SEQ ID NO: 261129 - DNA, 122 bp, Homo sapiens
gcggagggcttgaggatatgctaaggagtggggttttccaggacctactgctggggactgcgctattttcttgtttgaacataaagtgtggaacatggggcaggagaagagaaccttgcagg

SEQ ID NO: 261130 - DNA, 122 bp, Homo sapiens
ctgaaggagttggttggtaaaagtgccgcctgggaagcccagcgagccctcgaagggcagcgtccccagggcccgctggaagcttgaactgcgaacaaggccgacctcccttctgccccaga

SEQ ID NO: 261131 - DNA, 122 bp, Homo sapiens
cccgcgtggctcacggtgtgtctcctttccctgcatttctacgaaagcccgggtggctcacggtgtgtctcctttccctgcatttctacgaaagcccgcgtggctcacggtgtgtctccttt

SEQ ID NO: 261132 - DNA, 122 bp, Homo sapiens
ccgggatcaagagatcctcctgcctcagcctcttgagtagctacgatcataggcgcgtgccgccatgctcggcttgttaatgtttattatatttcatgactacagtgtcaaaattagcctgt

SEQ ID NO: 261133 - DNA, 122 bp, Homo sapiens
taccatttagagaaaacacctatgcagaattgcaagttgtgatgggcccttgaaaatcaacgtgtgtgccgaatccaggtggatgctgtgacctcacaaaagctgtgaaggtgtgctatcgc

SEQ ID NO: 261134 - DNA, 122 bp, Homo sapiens
gctgaagagacagagccgtcctgcacagtccaggcaccaccctgccctgccactgcctggcgggcatcttgagctccagacccttagcctctccgggccccccagttttttccgggtaagag

SEQ ID NO: 261135 - DNA, 122 bp, Homo sapiens
ttggtgccttgtctggggagcacactaactcttctggaaacgtgtcagtgaaacagagatcgttttgtggaatagcaacccatggttatggcgagtgacccgacgtgatctggggggcaggc

SEQ ID NO: 261136 - DNA, 122 bp, Homo sapiens
tctactaaaaatacaaaaattcgccgtgcatggtggtgcatgcctgtagtcgcaggtatgcggcaggctgaggcacaagaatcacttgaacccaggaggcagaggttgcagtgagccgatat

SEQ ID NO: 261137 - DNA, 122 bp, Homo sapiens
tggttgcctggtatccgctcccaggcagccggatgtaaacaggcggttcgctctgcctggcggtgggctccgtggattctgatctgctcactgctctgtcgtctcctggggcttttaaagaa

SEQ ID NO: 261138 - DNA, 122 bp, Homo sapiens
agagaaaagagggcgtgcgtggtggccggaggggcaaggtgcccagagtgagcaagggagcgcgaaatggggagtgaagggcctgagatttgggaggggtgggtgagcaggaagtggggggc

SEQ ID NO: 261139 - DNA, 122 bp, Homo sapiens
ctgggacaggagggagccagatggcccctcggtggcgactaggtcaggggaggcccagggcgggagcctgccgccggctggagggaaccagggccacccccaggccccacccgcagccccca

SEQ ID NO: 261140 - DNA, 122 bp, Homo sapiens
gaaggtggatacagtcgcctgtgctcggattctattggcccacagagtcggtattcttcgcgggcgaatcccagaatgcaccgctctgagagggctccaggtccggggcggggtgggggggg

SEQ ID NO: 261141 - DNA, 122 bp, Homo sapiens
gggtgggttagattagagacatttagaaagaagaagaatctatacatttaccttaagagacgccatctgccacttagaagtaggtattctttttgtactgttttgtgtaagcagaaccagtg

SEQ ID NO: 261142 - DNA, 122 bp, Homo sapiens
agaggccatggtttccttctttttccacaggtcctgacatgggctaagcagcaccagcagcgtcttgaaacggccttgtcagaactggtggctaatgctgagctcctggaagaacttctggc

SEQ ID NO: 261143 - DNA, 122 bp, Homo sapiens
ctggccgcctgtcaaggatctgaggcttggcagggctgatggcgccgggacagcgtgggacggcccaggctctctgcagccctggttctccgggcagagtggaatagagacactcgcagctc

SEQ ID NO: 261144 - DNA, 122 bp, Homo sapiens
acccggactgagagaggcaggaaacacccagctcacgccagccgggggcggaggcggggccggagcgataacttccgctgtccgcaccccacttccgccccgcagagggcaacgtcttaagc

SEQ ID NO: 261145 - DNA, 122 bp, Homo sapiens
cctgcggcattgagcatgctcaggcctttcccgcccacttccggtggagcagccaaccaccgcgctggtcaattgtatgcctaaaactcgaaaaccaaggcgcccagggttgtgtgagggtt

SEQ ID NO: 261146 - DNA, 122 bp, Homo sapiens
gtcatgttgacctgggtgaacagagatccctttaagaagaacttctccatgttccagaggcgcgttcttactgcaggtgagtggcagtatgggaattagtccacaggccccttctcgaatgc

SEQ ID NO: 261147 - DNA, 122 bp, Homo sapiens
ggaactctaaggatcatttagaaaatctgaaagagagggactagtgacttcccctctctgcgacttgttaagatattagggcagggcatttctctcatgtatctctatcatgaggactgtgg

SEQ ID NO: 261148 - DNA, 122 bp, Homo sapiens
cagggctggaccttgaggtgaagaggctgtctggatacctgctcctgactgctagctcttcgcccacctcacctgccacctgtcctttggcgttgggttcttgaggccgtggtttccctctg

SEQ ID NO: 261149 - DNA, 122 bp, Homo sapiens
gagaacaccccgcccagaaacctgtctatgtagagcaccagggggaggctcgccctggcccgggtgagcaccggccggttggggatcgggtgcaaggggccgtgcttcggacacactgaagc

SEQ ID NO: 261150 - DNA, 122 bp, Homo sapiens
ctcgcgccgccacgcctgactggttttggtggagacggggtttcgctgtgttggccaggccggtctccagcccctaaccgcaagtgatccgccggcctcggcctccagaggtgccgggattg

SEQ ID NO: 261151 - DNA, 122 bp, Homo sapiens
aggtgctggtaaagggtaacaacgtaggaggcccaatcccctcgcgcttctcagggtccccggctttccgcccctgtgccagacgacggcgtcctaacggccaccctctcccaggaacctcc

SEQ ID NO: 261152 - DNA, 122 bp, Homo sapiens
gattgcaatgcgcagccggtcgcgaaccctaaaacgcttcgagccattcccgcaggctggcgttgcgttctgggagatgtgggacgcagctcccctggcctccggtctcccccgtcctgccc

SEQ ID NO: 261153 - DNA, 122 bp, Homo sapiens
gtgtggaaaacaaaggcagagagtaggtaacaccagacgggacactcacggttgagctggcgcctccggatcctgtccctccatggcctgtttctgatccagtgtaatcgcgaaggtaacac

SEQ ID NO: 261154 - DNA, 122 bp, Homo sapiens
ccgccccgcccctgccaattgccagtcacaactctcctctcatccgactccggaaaggagcggttgctgtgaggatccttcagtgatcaatgcgaccatagtttgcgctccagtctggcgga

SEQ ID NO: 261155 - DNA, 122 bp, Homo sapiens
ctccttgggatcttgcctctttgtaggaagggtgcgttctctgttgtgcaagccacatggcgatccagtagcagaaccagaaatagaacctgagggatctgactcaggcctgtatacttttt

SEQ ID NO: 261156 - DNA, 122 bp, Homo sapiens
tgcccgggcttcctcgcagacgggggtccctgggtgcaggacgtggcctatgacctctggcgagaggagaacggctgtgagtgcaccaaggccgtgaactttgccatgcatgaacttcagct

SEQ ID NO: 261157 - DNA, 122 bp, Homo sapiens
ccctgtgcctctgctctccctccccagttccgtgtgccctggggtcagtgatagaagacacggcccctgggccccaagtctgctgagctgacacctcgggctgccgctcacctgcagagaga

SEQ ID NO: 261158 - DNA, 122 bp, Homo sapiens
gctctgaccgctaaggtgtctgcgcgcctccaggccccgccccctatgctaataagcgcccgcctcctttgggagcaagtcgccgcaaactgcgagcccccgccccctacgctaatgacgcc

SEQ ID NO: 261159 - DNA, 122 bp, Homo sapiens
atggtggggccacgacaacgtggctcgcctggctgcggttggtggtggcggcaacggagacggcagcgtggctggagtgataggagaaggaaaatagttttgggatagatggagggggttaa

SEQ ID NO: 261160 - DNA, 122 bp, Homo sapiens
tgtgtcactgtgggctggctaatcctccacatcttcccacgactgatgggtttcctgggacgcgggaccttcaacgctgaaactaggaaagttctagacataccgggagggttggttaacct

SEQ ID NO: 261161 - DNA, 122 bp, Homo sapiens
tgcaaacggggccaaggaccgggcctgccccgaggtatgcctgaggcttgggtgagcaggcgccgggctcgcagggcgcgctcctaacccgtccccagcggctcgacgctgtggatcccgcc

SEQ ID NO: 261162 - DNA, 122 bp, Homo sapiens
cactcccagcctattcattcatttttatatccatcacttaaccatctccattttataaatcgagaaaactaaagaccagatcagttacactagccttaagtcagaaatagaaagtgatctga

SEQ ID NO: 261163 - DNA, 122 bp, Homo sapiens
agaggtgtggagaaaggggctgagggcttacacggacaggcacaggctccaccgagcagccgcgctaaggagctgtggggtggggagccgtgggcccgggtgtgggggctgcagaagacgga

SEQ ID NO: 261164 - DNA, 122 bp, Homo sapiens
ctcaattatcacccaggtctccgggagtattccaggtatagtgccaagagtccagctttccgaaccggggtccctgggttctgaaggcctttttggggaaagtactgatgtttttgtcaagg

SEQ ID NO: 261165 - DNA, 122 bp, Homo sapiens
aaggacctccatgaggcctgggagacagagagacagagacagagagagagggggagacagcgtgcgctggaagacagctgctgagcacccacaggcctgcctggcaccctgccttctccctg

SEQ ID NO: 261166 - DNA, 122 bp, Homo sapiens
tgaaccttttcacaaccgcttcactgtcttccgggggtctctgtgctccaggcatttctacgtgggccctcgttgcctctgccagcccgtgaccctctccgacatcctattttaaaatccta

SEQ ID NO: 261167 - DNA, 122 bp, Homo sapiens
tcgtagtctggaagggaagatcagctgagctccgggggtagaagcagccaccaagagacccggatgccccacctcccgcactcctacctgcaggaaacaagggaagagcgcttgcgcggagg

SEQ ID NO: 261168 - DNA, 122 bp, Homo sapiens
tcctcagattcccagggtcctacggccacagcactgccatctccgtgctcctcagattcccggggtcccgtggccacagcactgccatccccgtgctcctcagattcccggggtcccgcagc

SEQ ID NO: 261169 - DNA, 122 bp, Homo sapiens
tgggtcagatggaaacacaaacaccttatgaggaataagaaggctgggaaagagtggcggcggggggttgtcattttattacaatggtggtcagggaagacatcactgaaaaatgactttta

SEQ ID NO: 261170 - DNA, 122 bp, Homo sapiens
gctcttgataggccttggggccctggtctaaaactcagattatagttcatccagtgacaacgtgacctaagggtgctatctaagcaaatcatatagttggatgtgcacagcagcattcatta

SEQ ID NO: 261171 - DNA, 122 bp, Homo sapiens
gcggcgcagccgaggaggaaaaagggcccggggccgagagctaaggctacgggaaccgggcgtgggaggagggcggagccaactccccacaaggaagtcttgtgcaactctcaggcgcctgc

SEQ ID NO: 261172 - DNA, 122 bp, Homo sapiens
tgaagtcctttcctgtgtgtgtgagcgccaagctggagcccaaggatgacatggaggaggcgcttggggggtctccccaagtctccatgctgctcgtcaacatcagagagatcctttgtagc

SEQ ID NO: 261173 - DNA, 122 bp, Homo sapiens
gagtgtagctaggggcccaaggtactgatctgacccaagggaagggtctggcagaagagacggaagggatcaggtagggctttggacctctaggcttgatggccacctgctgctgggcctcc

SEQ ID NO: 261174 - DNA, 122 bp, Homo sapiens
ggcccagtaaatgcctgcggtaagcggccccgcccccggacaggctctgccaaaggaagccgcccgcagacctggccccgagcctgccgtccacgccgggccccagcttcctaatcctggat

SEQ ID NO: 261175 - DNA, 122 bp, Homo sapiens
cctatgggtgaccgagcccccaccagccgccccgggaagccaggcgtccctccctccagccgcagctccctccggcccggctccactcacccccggtaggcttggcccgcggcccggtgcct

SEQ ID NO: 261176 - DNA, 122 bp, Homo sapiens
cgcggcctggacccgcccccacccaaccggcgcaccacctcccaggcaccacggagcctgcgcaagctgcggggccgtaaaggaaccggcccccaatctccggggcttcagtcccgcccctc

SEQ ID NO: 261177 - DNA, 122 bp, Homo sapiens
ggggacagggaggaggagacctgagtggggtccacaccggtggggcagcgtgtatttccgcgtgaagcaccgggagatgtagccatgctcgtcctgctgctcctcgtacttgcctttgtagg

SEQ ID NO: 261178 - DNA, 122 bp, Homo sapiens
ttctcagtttttggcacagaatccctcagcgaaacccttcagggggcctagcgtgtgtgtcgggcagctgagcttccgcctgtcctgagcaaagcccgcctgaccaggcgtttcccggggtg

SEQ ID NO: 261179 - DNA, 122 bp, Homo sapiens
tggggaggggtcctcctgagagaactagtctggagctcagcgaaatcacttgagtccagacgtttaaaaaaagaaaataatacatttgaagatgggagatgaagggccggaggtgaaggtaa

SEQ ID NO: 261180 - DNA, 122 bp, Homo sapiens
ccctgccccgcgggaaggcagctatggcccggcgagaaattgagcgcagcgctggtgggccggcactgctgggggacccactacaccctccgccgccgccagcccaggtgctaagcccctca

SEQ ID NO: 261181 - DNA, 122 bp, Homo sapiens
agctaggtgatggttcctgtgtggatgggcagtttttcaaaatagaaaaccaagtctcaccgagttgcaggagccacttttctttttttttttttttaatctatttttatttttttgagaca

SEQ ID NO: 261182 - DNA, 122 bp, Homo sapiens
ggcgcggcccgccgaacccgcggccgcagtcatagctttcgctcggcgttgccaggaagccgagagtagccactcagccattgtgtgggtcacatgactccggcgcccagggaggcgggtcc

SEQ ID NO: 261183 - DNA, 122 bp, Homo sapiens
ccgcgttctccccattttggggtgtagcttggattcctgagcccagttttagtgcgtggccgaccgggaggccggcgaggcgctctaggccgagcggcttcgtctctatgaccacaaggggc

SEQ ID NO: 261184 - DNA, 122 bp, Homo sapiens
tctagtggttgaacgcgtcttttaagttcggaaggccgagagcaaagtttggcctttactcgtagctacgtagtccgttcagacgtggaagtaattagaggacctgagcgagcagccagatg

SEQ ID NO: 261185 - DNA, 122 bp, Homo sapiens
attgtataaatataacatgagttatttaatctctcccctatcaatagccattttatgttgcgtcaggctttttttttttttttttttttttttgacagagtctcactctgtcagccagactg

SEQ ID NO: 261186 - DNA, 122 bp, Homo sapiens
agggaaccgggtagaatgacattgacgtgtcttaagtttttaagttagtttttaggtctgcggacagtctaccttagaggcacttgagtgcttgtttgaaaatgcttgttttggcttggcgc

SEQ ID NO: 261187 - DNA, 122 bp, Homo sapiens
ctagagacgcccctaagtcacctgcttcattagacggtttccaggttttctcccaggtgacgctgttagcgcctcagctggcggtgacagccggcccagcgtggcgccaccacacaccgcag

SEQ ID NO: 261188 - DNA, 122 bp, Homo sapiens
aggatggtttatgttccactgacgaaagtgcctccttccccagcagctgcttttgttaaacggagggagtaggcaagctaacaagaaagagatgtgtttctaagctccagtgggacagacaa

SEQ ID NO: 261189 - DNA, 122 bp, Homo sapiens
acgtgttattatctcaggcaaatcaaattgtttcctcccccaagtttccctgctgttactcgagggaatcacagcagacactgaccaccacggccccggccctgggatctctcctggagcgt

SEQ ID NO: 261190 - DNA, 122 bp, Homo sapiens
tagagggaagcctgatcagctgcagcaggcctacagcacgggtgcagcggcgaggggctgcgctgggcttccttggggctggcatgcaggagggtgtgagtggggttgggggaggcaggaga

SEQ ID NO: 261191 - DNA, 122 bp, Homo sapiens
ggacgtcggcggtgaggtacgtgcagcggcggccggtgggcgagactatttgagagtgtgcgggccgggatgttctcggcctgtggggaaatcacgccaactccccgcgtgggccgggggct

SEQ ID NO: 261192 - DNA, 122 bp, Homo sapiens
gtgtaaaacagcgtgaaggtcatgagtgccatccagctgcacagctcagccacgaagagccggcgcagggtgcggggcatgcggcagcacagctggtgcagccggggaagcagggcgcccag

SEQ ID NO: 261193 - DNA, 122 bp, Homo sapiens
gctgggtgccgaggtagcgaggtcaggggtcaagagtggaacaccctcactggcccgggccggcgcgggagggctgtgtgatggcctcggagcgcccggagccggaggtgaggggcgggcgg

SEQ ID NO: 261194 - DNA, 122 bp, Homo sapiens
attccatactccccattctttgattattttaccttgaagtggatactcgacagttagccacgggagaacttgaaattttctgattcattctcctcattaatcaaattgaccaagtaattttt

SEQ ID NO: 261195 - DNA, 122 bp, Homo sapiens
tgcctgtagctgtggctctcaagaggctgcaggtgaatctgaggtaggggctggccatggcggtgtgggggtcagtttgtgtgtgtctgtgcatgggagtgttataagcatgtctccctgag

SEQ ID NO: 261196 - DNA, 122 bp, Homo sapiens
tcccggcgcgcccaagctcctccccggggcggggcggggcggggcatccacagtgctccccgcgcctgggcccccaggacctcttgcagacgggagtccctcagacagtgcagagacgggag

SEQ ID NO: 261197 - DNA, 122 bp, Homo sapiens
cagtgggccagtcagcagacgaaagcaggctggtggataatcttatgtcttgctctgtttcggagggacatgcagagtcttctccaaacccacctgaggtaacttcttggctgaccctgtct

SEQ ID NO: 261198 - DNA, 122 bp, Homo sapiens
gctgaagcacagccccctcccccctcgccctttgccagacagccccacgccagagggtcccggcacgcccaccctgcacacacaacacccaccagactggcacagggacaggtgcggggact

SEQ ID NO: 261199 - DNA, 122 bp, Homo sapiens
atgcaactagattagaaaaaacagaacatgcaaagcttactcactgccggctgaaacagtcggaaggacagttcacaaagccatttcccatccattatatcatttcatctgcccaaaaaccc

SEQ ID NO: 261200 - DNA, 122 bp, Homo sapiens
ggcattggctcggccaatcacaagggcgttccgaaagcaagcgctcgacacttgtaaacgcgaagagctgtagtgaaactggacacatctttgtattttgtgttgctggtagtaaatttgag

SEQ ID NO: 261201 - DNA, 122 bp, Homo sapiens
caggccctcctgtaccctattcgtccagggtccacctgtgagggccttccttgggccgaacgcccctctttgtgcaacgccaggggtcaacgggtcagaactggagcactgctcttcgctag

SEQ ID NO: 261202 - DNA, 122 bp, Homo sapiens
gcctggctgtctgcccttcttgggctcttggggagaacgtggtccgggaactggcagtcacggggaggcagcacaagaggttttcgccctcatgtgctggtgcaactatcgcgaccatcacc

SEQ ID NO: 261203 - DNA, 122 bp, Homo sapiens
cccctgggttcaagcgattctcatgcctcagcctctcacgcagctggtattataggcatgcgccaccacgcccagctaatttttgtatttttagtagagacgggatttcaccatgttggcca

SEQ ID NO: 261204 - DNA, 122 bp, Homo sapiens
ccccgacgcggcaaaccagcccttttatgggaactgagctatgtgtcaatgaaggaatcacgaggctggcaagtggaggcgggggagtactatggattaccagaggagggttgagaaaccgc

SEQ ID NO: 261205 - DNA, 122 bp, Homo sapiens
gcccgttgggcccaaaaacccttttctggctttagctagtagagccactcaaaatttaaacggagtcagcttgatgtggcatatatgataagctggataatatttcctgcaccaccgcaccc

SEQ ID NO: 261206 - DNA, 122 bp, Homo sapiens
acagtctgattaatagagcgcgccgcggcacatttcccccttcatttaggggcatcattacgctctcagtttgctaggttgccccttaggtcctaatcatgcagcgccttcttcatttttcc

SEQ ID NO: 261207 - DNA, 122 bp, Homo sapiens
atcattgatacagctgggctcagcgaggctgtggggctgctcatgtgtcggtcctgtgggcggcgtctgccccggcaattctgccggagctgtggtttggtgttatgtgagccctgccggga

SEQ ID NO: 261208 - DNA, 122 bp, Homo sapiens
tccgacgaggctctctggccgcccgggtctccggtccacctgcgcgaactgcggggagggcgcacccccgcccgcgcagggcccctgccagctgcacgtacttgcctctgaccgcccccacc

SEQ ID NO: 261209 - DNA, 122 bp, Homo sapiens
attagtcgtcagatctctccccgtctccctcccaacttatacgacctgatttccttaggacggaaccgcaggcacctgcgccgggcgtcttactcccgctgcttgttctgtcccctccctcg

SEQ ID NO: 261210 - DNA, 122 bp, Homo sapiens
cctggcacccggctgggcgcctcaagaccgttgtctcttcgatcgcttctttggacttggcggtgggtatcatctccttacagataggcgcagagaggccaagtgacttgcccaaggtcttt

SEQ ID NO: 261211 - DNA, 122 bp, Homo sapiens
cccaactagaaaccccaaaaggcaagagaactacgatacccacaattcaggctcctcacccgaaaccagaagagggcgtatggctagagtttcaccctaagaagaaaggggaagcaggtgga

SEQ ID NO: 261212 - DNA, 122 bp, Homo sapiens
accttccagcaagcttgaagtcatctgacgctaaaggactacttacctcaagagctccatcgtcacagaaggaggcggccaagttcgcggggggaggggaggagacagagagtcgaccagta

SEQ ID NO: 261213 - DNA, 122 bp, Homo sapiens
aacaaaccaaaacaaatgagagaggtaggaaaactagaggaagagcattccaggcagaggcgagagccagtgcaaaggctctgaagtgctgcctgtcaggagacaaggccagggcagctgga

SEQ ID NO: 261214 - DNA, 122 bp, Homo sapiens
acctggcctgcctcatctcatggttccagtgtctgtcagcagtgagttttgcagctggggcggggacagggggaaggcggacaggaggcgggtgcaggtggaaaggacatctgcctgggaac

SEQ ID NO: 261215 - DNA, 122 bp, Homo sapiens
gtaagaatgcagcagccgccaggcccaggcgcgggcgcgtcccgtccgggtgactcagcccgtgccaggaagcgggagttggctcagctctccagagctcccggacagcagccggatcccgg

SEQ ID NO: 261216 - DNA, 122 bp, Homo sapiens
agataacacaccaccgataacagagatatacaaactggaaggtattcaaaattcgccccacgcctctcgcccttagaaatcgcgagctgagaaacctaaggagttcatggcaaggggcttcc

SEQ ID NO: 261217 - DNA, 122 bp, Homo sapiens
aagttgtttcctctggctgcgcgggagaaccgagcaatggggccgcgagggctggaggtccgagtaaaacggggaaccgaacgctttctcttgagcttctggcagccctaccgaccctcgcc

SEQ ID NO: 261218 - DNA, 122 bp, Homo sapiens
cctcagtctcctcctctgtaaaatggggacaatagcgggacccaggtggcagggttgctgcgaggaacatgagcttatgagatcatgtgtgcgacacctcaagcacttaggaagcactcaca

SEQ ID NO: 261219 - DNA, 122 bp, Homo sapiens
agggtcccgcctcagacggggcggacccggggcggggcaagggccaagaaggtttaaaggcgccgcagcgcagaaggagggaggactgcttgagacagagggacagtagaccagagcaaggg

SEQ ID NO: 261220 - DNA, 122 bp, Homo sapiens
gacacacacgtgccaacagggagacggggctgaggtggggtgagcgggactgcttccgggcgccctgctgggagctggtctcggtgggcagaactccttacgcctgaccttctccctccctg

SEQ ID NO: 261221 - DNA, 122 bp, Homo sapiens
gtactgttagtggaagggaagcatggccagaaactcagcctccttctggcatctccagagcgcctgataggaagaggggcaaaacctgatgaggtggacttggagacaactctcagttctag

SEQ ID NO: 261222 - DNA, 122 bp, Homo sapiens
gggaactgaggccaccgggaacctgctgccagcgccctcccatgtttgtcttcttggcagcgccatcagggcagtggccaagaacaccacccccggggcagccctgcctgcgggggagtggg

SEQ ID NO: 261223 - DNA, 122 bp, Homo sapiens
gaagagggcagtctgtaaactcgcgcaggatcaagctctcgagctcccgtcttgggttagcgcgcagggcggaagcggggagaaggcggatccgggaggcggggatacgttacgtcgacgcg

SEQ ID NO: 261224 - DNA, 122 bp, Homo sapiens
cgaacttagcctctgatccttaactttccctatctgtaaatgagggcgactagatgggtgcggactgtcatccgtgttgagacttccggcccccgcagaatcaaccttaccggcgggagcac

SEQ ID NO: 261225 - DNA, 122 bp, Homo sapiens
tgaaggggtccgctggcgggggaccctcggacttacccgagctggcactgcggacccctgcgaggttcatagaagcacggaagggggccaagtgcaatgaggatccaagggatgaataagcg

SEQ ID NO: 261226 - DNA, 122 bp, Homo sapiens
tgtggagagtgagaagacaagcccctcagtgggacatctcacagcgctccttaagagcagcgtgtgaaggggacacggacgctgcatccttcctcacccagacaacccacagatcccaagtc

SEQ ID NO: 261227 - DNA, 122 bp, Homo sapiens
aagcaattgcatctttggtctccctgactccactctcatcttgacagtcttctcctgcagcggccagagaattcctatgaagagctaagtcacagcacagccctcctctgctcaaaggcctc

SEQ ID NO: 261228 - DNA, 122 bp, Homo sapiens
ctcctcttcctcaatcagttggtgagagagggattccctccacttggttaggcagatggacgaatacagcacacccagtgctgggctggtcagatgaacagcatgtagaatcaagcccaggg

SEQ ID NO: 261229 - DNA, 122 bp, Homo sapiens
gggcagccctgacagggaaggcgggtctggaagagcagctgggcacgtgccccgccggagcgggccaggagaagaggaccagagcatcaggcccacacttgtccctgcgtccacggccacca

SEQ ID NO: 261230 - DNA, 122 bp, Homo sapiens
cggcgtgttcctgtctgtctccctggcaagagtgccggcttgcgggggcaggacatgtcccgttgatcccccgctccccagtgcctagatcagcccgacgtgcagcaggcttcccagcactg

SEQ ID NO: 261231 - DNA, 122 bp, Homo sapiens
ctaggaaactgggcgaaatgtaacttaagagttccaaagtgccatattacaaggcctattcggctcagaatcaggccaattcttgtactatataaataactccaaggtgggacatttaaaca

SEQ ID NO: 261232 - DNA, 122 bp, Homo sapiens
tcctccctccactacttcccaacaagccaaactgattgctttaacttgtgcactctctgtcgccaaaggaatgcacattaaaatttatattgactcctaatatgctttccacatcctccaca

SEQ ID NO: 261233 - DNA, 122 bp, Homo sapiens
gacaagttttactcctccttgcaaaccctggcgaaacatccacagagagtggaggctccgcggtgctgtcccctgtgctccgcgacagggatggagctactcaatcaaatccaaatcccgcc

SEQ ID NO: 261234 - DNA, 122 bp, Homo sapiens
ggcagacaccagcagcttcagtcagtctcgtgtcacacagctgcgcgaggtagctccacacgcacctacgcgtctggaggatgctatccctggctactttggggaccactcaatactggcag

SEQ ID NO: 261235 - DNA, 122 bp, Homo sapiens
ctttctatgccttaaacttatcatttatgttacctaacaggaaaatgaaatgttctccctcgctctctctctctctctctctctctctctctccttccccctccttccctccctctctctct

SEQ ID NO: 261236 - DNA, 122 bp, Homo sapiens
atagttaacaaacgcccatctgctcacccatgcccacccagcgccgccgccgctggctctcggggcacctggcaggaggcgggtgtgtgaatagcatatatttttacatgtactatatctag

SEQ ID NO: 261237 - DNA, 122 bp, Homo sapiens
cctcttacccctccttccctccgcctcgagcgtgtgaggaggagccgcgggtctgagaaacgccatagcagcgctcccagcactgactaatcaacaaggtgcgagcaacgcctgcgcagctc

SEQ ID NO: 261238 - DNA, 122 bp, Homo sapiens
aagggaaggggaagcgagaatgagcggctttccgacggcagagcctgcaaggacggcgagcggctagaaccaaaacaccccctcccccttgctcgcgcgccgtcacccttgcgcagccgcac

SEQ ID NO: 261239 - DNA, 122 bp, Homo sapiens
agcggtgaccgaggccgagctcatcctcgcggtaggcacggtggctgcaaagaaagaaagcgcaagcccaggggactcggagggccctcaagatccctccctacggtcagcctgaggtcgcg

SEQ ID NO: 261240 - DNA, 122 bp, Homo sapiens
ctcgaagtagaggttttactctactcatcactgcgatttgcacattgctccgtggacactcggaggcctgcgttctgttccctataaatggaagcgtgctctgagcctgtctgcctccctcg

SEQ ID NO: 261241 - DNA, 122 bp, Homo sapiens
gagtgagtggggctcaccccatagcgccggaagagcccgtcgagctcctcgctggcgcgtcggtacttgtcctccagcagggggctctgttccagcgagtcctccccgtcgggctcggggct

SEQ ID NO: 261242 - DNA, 122 bp, Homo sapiens
ctctctttgaccttttgccaaaactctgaacgctcgctgccctccctcccatttcctcaccgcgtttcaggagctgtaagttcttggtgttcaaaccccctacggttacgtaaacagaactc

SEQ ID NO: 261243 - DNA, 122 bp, Homo sapiens
attgggctctaattttttgagctatcactgagaacactggagattaaggaaagaaggtgacgtggatcgcaagagcaggagactacacttttcatcgttcaagctagggatagatgaaggga

SEQ ID NO: 261244 - DNA, 122 bp, Homo sapiens
gaagcggctgtccctgaatggctgcacagcaagtggccgctcctctgcctgtgtggactgcgtcacccacatgggctttgagagggtccccggggttgttggcctgggttgcatggcaccgt

SEQ ID NO: 261245 - DNA, 122 bp, Homo sapiens
aaggttcgcatcttccaggactgtgaggcagggctgctggtggagctggtgctgaagctgcgacccactgtgttcagccctggggattatatctgcaagaagggagatattgggaaggagat

SEQ ID NO: 261246 - DNA, 122 bp, Homo sapiens
gagatgggccagcttgggaaaagtgggtcagatacagccttaccgaggagaaccctggcccgaggatgaggagcaagcccaggggaacactgcgggaaaggcccaaggcgaaggaagattct

SEQ ID NO: 261247 - DNA, 122 bp, Homo sapiens
cccgccacccttaatgtagcagatcaagaagaggtgtctcagcaattgcggggaggtggacgtgagagtgggccagttccagtccactttggttatgaactgggacaatcaggggcgctggg

SEQ ID NO: 261248 - DNA, 122 bp, Homo sapiens
cactgccctggtgcatacaaaataccccaggggtaggagggccctgccatgttcccagtgcgtggccatgggagggcacctgtttctgcgagcctcggtttacccttttgtgcagtgtggat

SEQ ID NO: 261249 - DNA, 122 bp, Homo sapiens
tttttaggcctgcccccacagtgcctcattctatttttatgttagacactgtttctctttcgtattgccagatgccctttctactgtggctcaccaaatcctccagcaacagctgttctacc

SEQ ID NO: 261250 - DNA, 122 bp, Homo sapiens
gggagcagcagagccggatctgggtcagctggggctccaggccacctcccgacaccaaggcgaggcggctgagcctgccagctccctgtccaaggacagagacacccctgcagggccggctc

SEQ ID NO: 261251 - DNA, 122 bp, Homo sapiens
agctttcaaatttttttgacctcataaagaagtacattcattctccacggtgcatatgtacgtatatataggccaaagacaaaattacaacaaatgtagttgagtgatcttattggctttta

SEQ ID NO: 261252 - DNA, 122 bp, Homo sapiens
gctggcttcctgaatgagcgggtaggcgtgcagaaacttgatgccctgttctaatcgaaccgggtcgatgagctgaggcgccatcttcccagtgtacatcaagtgtaagagatagctgaaga

SEQ ID NO: 261253 - DNA, 122 bp, Homo sapiens
agcctggatccagatcctctgcacattttttcacccataaattcattactacattgtcaacggccccatctccaggagcactatcatgcaacacctcttgaggtgggctgggggcagcccta

SEQ ID NO: 261254 - DNA, 122 bp, Homo sapiens
gtcaccgcgctccaagcctgagaagccatggggacgacaggatgaaccgctggctgggcgcggcgtccccaccgggctacacaagagctccatgcggtgacgacgcgcggggaccaggagcc

SEQ ID NO: 261255 - DNA, 122 bp, Homo sapiens
acgagtgggtgtgagctacgagtgggtgggggctcagcaggcccagtactccgagcagcccggcgggtgccaccgcccccaggcagtgcggggcttagcacccgggccagcagctgcagagg

SEQ ID NO: 261256 - DNA, 122 bp, Homo sapiens
cctgcctgtatccagggttgaggtgggcgtgagagacacacgcaggcagggctgcagttccgggcaggccttgggggctcaagatgcggctccccagggcgagtgctggggtcccggggcag

SEQ ID NO: 261257 - DNA, 122 bp, Homo sapiens
gggcaggacgcgtgtgcacacgtgggtgacggtgcgtctggggcaggatgcgtgtgcacacgtgggtgtcggtgcgtctggggcagggcgcatgtgcacacgtgggtgacggtgcgtctggg

SEQ ID NO: 261258 - DNA, 122 bp, Homo sapiens
ttggtttagtggcaaaatagcagacctgctggtgactccaatttgtagtgtgcttttgggcgaatcacctcattccccggacctcatctggaaaatgtggaaattataccggatgactggta

SEQ ID NO: 261259 - DNA, 122 bp, Homo sapiens
gccgggggctgcccccggacatgctggcagagcaggtggagctgtggtggtcccagcagccgcggcgctcggcgctctgcttcgtcgtggccgtgggcctcgtggcaggctgtggcgcgggc

SEQ ID NO: 261260 - DNA, 122 bp, Homo sapiens
ggctagagctgagagagctggtagaggcataatgagagaggggattggggtggcaggtggcggccaacccgggtgagcaaatctgaccttgatactgtgagcagtgggaaaccactgacctt

SEQ ID NO: 261261 - DNA, 122 bp, Homo sapiens
gcacgtcagtaggcgggctgcagaggaagggcgctgttctggttggtcctggccttaccccgccggagggcgccagctgccccggcgacgacacgggggaccggacggagcctcgggccgcc

SEQ ID NO: 261262 - DNA, 122 bp, Homo sapiens
ccaccccccgcagtacctaggccttatacatgtgtacacatgcttacacatgtgtacatacgttcacacacaggcattcagcccatctggctttagcttcctttctccatctgtctctcttc

SEQ ID NO: 261263 - DNA, 122 bp, Homo sapiens
ccaggctagagcaaagcgcgtgggcctgagctgagtgaagccggctgttaggtaaggcagcgctagttggtagtgggtcttgaagcctgagactagaggagttttaatatgatttgggagac

SEQ ID NO: 261264 - DNA, 122 bp, Homo sapiens
tgaaaagtgagaagagcgaactttgcctcctcggccccttctctgtgcctgtggcttatgcgtgtgcccctctcctctttgtcactgcttcccttgccctggatgtggttggtgcactgggg

SEQ ID NO: 261265 - DNA, 122 bp, Homo sapiens
ttttaattctgttctctagcacttgttacagtgattcatatcctggatacgcatgtgaatcgcctgtggactgtttaaaaatgtagactctgactagacagacctaatcagaatctctgtgt

SEQ ID NO: 261266 - DNA, 122 bp, Homo sapiens
atatctcacacattcctaaaacagcctaccagttaggtactctttgttatcaccattttacggaaacagaaacagtggcacagagaggtcaagttgcttgtctaaggcctcagagctggtga

SEQ ID NO: 261267 - DNA, 122 bp, Homo sapiens
aggccggggagggggctaggggcctccgagggctccggagcggcgactggcgagccatggcgctggggctgcagcgcgcaaggtactgaagttcgggggcaggagttctgggaattgggggg

SEQ ID NO: 261268 - DNA, 122 bp, Homo sapiens
caccgtgctcagagcctctttcgtgactgaagcttgttcctcctcataccctctgctctccgcgctgcgctgtgtgaggcaccaggatgggggcctcaagttcagtgggggagatgacagag

SEQ ID NO: 261269 - DNA, 122 bp, Homo sapiens
agccctgaagaacctgaacatccgaaaagttgcttctccccatatacgggtttcccatcccgggatactgtaatttcaatcaccatttggatgaaaaaatatccgggtatataaacggcccc

SEQ ID NO: 261270 - DNA, 122 bp, Homo sapiens
cccagccccacgttactttgattgacagctgaacaaatgttttcccggttcgaacgctcgcgctaaggaacgtcagccaaggcgaagctccgccttgggcgggccatctccgccccgcctcc

SEQ ID NO: 261271 - DNA, 122 bp, Homo sapiens
aggaaaagccctttgtccaagatgactgctactatcacggttatatggagcccccagccccgagtctctgggagttctcagcacccctttggaaaactatggagggatgcacagatacagat

SEQ ID NO: 261272 - DNA, 122 bp, Homo sapiens
tatagaagtgctctccatggagcaagtcaataagactgtggtgagagagttcgtcgtcctcggcttctcatccctggccaggctgcagcagctgctctttgttatcttcctgctcctctacc

SEQ ID NO: 261273 - DNA, 122 bp, Homo sapiens
acagtgccctgccaagttttctatttttgacagtgcccagtacaggtggtggcacacattcgaacttcaaaactgagagattacggggctgggcacgatggctcatgcctgtaatcccagca

SEQ ID NO: 261274 - DNA, 122 bp, Homo sapiens
ctgcctcggtgggggccaatgcagagcccctcaggatggggtgccccgtcaggggctggacggtcgtggggcgggtgcagggctcaggcctgccccctgagctacaggagccctgggtgagc

SEQ ID NO: 261275 - DNA, 122 bp, Homo sapiens
tcactgtgagggtccgcagtttcattcttgatgtcagtgaaaccaagaacccaccaattccggacacagcaccaggtccagattggcaagaaaggaccctgggcttgctcaaccgagaggga

SEQ ID NO: 261276 - DNA, 122 bp, Homo sapiens
ccggccggcacaggaagtttggggcgctgggcagggaccgcggggtgacatttggactcccggctgcccgaaagggcgacgaccccaccttcccctccctcggtgccgaggtgcaagaggcg

SEQ ID NO: 261277 - DNA, 122 bp, Homo sapiens
tttcctgcctctgcggctgcctttttgttccttcctcctccgggagggcagggggccagccgcccaatccaggaaactcgcatcctgatttggtaaacaatgtcccaccctgacttgtccat

SEQ ID NO: 261278 - DNA, 122 bp, Homo sapiens
ttagaaaaattcctccctctttcttgtgcctctgggcccttgcattgtgattctatcttacgtaaataaagggggctttgctctcctaattgtgcccactgttctgtgcagcgcggaccggc

SEQ ID NO: 261279 - DNA, 122 bp, Homo sapiens
ctgggctctgacacagaatctttttttttttgagacagggtctcactctgtcacccaggccggagtgcactggcacaatcagggctgactgcagcctcgacttcccaagctcaagcaattct

SEQ ID NO: 261280 - DNA, 122 bp, Homo sapiens
taccagaactttctgcgtctgtttttcaccctacccaatgcagtgcttacctaaaaaatgcgttgaatagagcttcttgcttttacctcgttgcactcctgagagcaagatgggtcaccagc

SEQ ID NO: 261281 - DNA, 122 bp, Homo sapiens
gatacaaaccctggaagaaaaaacaatgctttcttccagtgcaactgtcctgtgattcatcgcagaaagtaatttgctaacaccctggcttcccgtcagacaaatctagtcttttcttgtgc

SEQ ID NO: 261282 - DNA, 122 bp, Homo sapiens
caaagcgtgctggacaccaaggctctgtgtctaggtccctgttgtacttcagatttgctacgtgacttcaggcaactcactttccttttctgggcctataaatcaaagcagggtaatggcat

SEQ ID NO: 261283 - DNA, 122 bp, Homo sapiens
caccacaggcgcagagggatgatgagcacagaacactgccttcgggggcttgggtgaccacgaagacgtgtgtcaggctggagaccctaccctgcttagaagctgaatgtcagtctatgact

SEQ ID NO: 261284 - DNA, 122 bp, Homo sapiens
ggaaggggctttgcagaaaaacagctctcctcgcaggaggaatccaacctcagagagccccgtccggcccagaccctgccccagcccaggcaacacaaacactgtcctcaggcccagccact

SEQ ID NO: 261285 - DNA, 122 bp, Homo sapiens
gacccggaggggtgatggtggctcttttgccataaccgagagcagaagcggtagcggtagcgagagcaggaaaaaaatagggcgagggagggggcgccggagaacccgagggtcgctcaggc

SEQ ID NO: 261286 - DNA, 122 bp, Homo sapiens
ccaaacttccccccatcgcctctcattgggaattcctggcatccgtcagccgggctgcggcgcatataggtggactgggcggccccctcccggcgcgcacacccccgcccactcccgcggtg

SEQ ID NO: 261287 - DNA, 122 bp, Homo sapiens
cccgacgccttggcgcgcccctggtgctcaaccttccccacgtgagcgcgcccgccatcacgatactcgctgacggggtctcctcacctgagtcgggctccgcccccctcctcctcgctgaa

SEQ ID NO: 261288 - DNA, 122 bp, Homo sapiens
aagcccgatgacagtacatctgttgacaacatggtttactgaatatgttgagcccattttcgagacctattgctcagacaaaaagatccctctcaaaatgttactgctcattgacagtgcac

SEQ ID NO: 261289 - DNA, 122 bp, Homo sapiens
ttagatttgtcaactgacacacatatacataactgcatatcatcctgtaggtatatgcgtcgctgtgtctgtatgtatgtacaaggactacgtttatattcgcagagacaagctgtgtgggt

SEQ ID NO: 261290 - DNA, 122 bp, Homo sapiens
atctcagttatctgacctttaatcccatgccacgaccaaagacccataccttcgacaaggcgctgtgtccaagtcccacctctcggtagctcccagcccttcccctcccctctccaagaaga

SEQ ID NO: 261291 - DNA, 122 bp, Homo sapiens
gagaaggtgggatgaaaacccagacttcctggtgcccacttctccatgctgctgctactacggctgctgcttgagcaaccaagcattccagggatattttgtccttgtgcttcacacttcat

SEQ ID NO: 261292 - DNA, 122 bp, Homo sapiens
tcagctggtttcatgcctcctgttcctctgccctgcgccctggcccagtcattctcggctcgaagtgttcttctattcagtgaaatacccaggaggccttccacccaagcgaaggcgagtat

SEQ ID NO: 261293 - DNA, 122 bp, Homo sapiens
aggagaaacagaggggagggggagcgaggagctggcggcagagggaacagcagattgcgccgagccaatggcaacggcaggacgaggtggcaccaaattcccttcggccaatgacgagccgg

SEQ ID NO: 261294 - DNA, 122 bp, Homo sapiens
gagaccagcctgggcaacgtggcgaaaccctgtctctactaataatatgaaaaaatcagccggttgtgttggcatgcgcctgtaatcccagctactcgggaggctgaggcaggagaatcgct

SEQ ID NO: 261295 - DNA, 122 bp, Homo sapiens
tcgtggctcagcctcccaatagctgaggtcagatccctcagacgttcacagctgggacgccgttcttccaccttgggctccagaaagagcaccaaggagaacatttcaggacagactgtaag

SEQ ID NO: 261296 - DNA, 122 bp, Homo sapiens
agaacccatccccgccaccaccaccgcgcctagcctgcccctcagggcgcaccccgcccgcgtcctcaccttgaagcaccccggcgcctggcactggccagagcagcagcagtagtagcagc

SEQ ID NO: 261297 - DNA, 122 bp, Homo sapiens
cgactccaacactggcttcagcttcaatcccagaaaagtggatcaaaacgacaggttccacgaacaaacactgcgccggcgcctctactttggagaaaaggaaaagggcgtgaggtttcggt

SEQ ID NO: 261298 - DNA, 122 bp, Homo sapiens
ccaggtttcccatcctaggcggaggcgggcaggggcgactgctgtgggtccagcctcccgcgccgcgcgtctcttgggagggcagccggccggtgctcctcgtttccgcctgcacctcccct

SEQ ID NO: 261299 - DNA, 122 bp, Homo sapiens
tctttcaggtagacaaagttgttgtgctgtgagtaaacccagtatgagctttcgtgttgtcgaaagcaggttttaaccacaactacggcgtctccgtgtatgaaggtttacctgctgtacta

SEQ ID NO: 261300 - DNA, 122 bp, Homo sapiens
cactgcactccagcctgggtgacagagtgacactccatctcaaaaaaaaaaattttgaaacggccgcaccctcgccggccctgcgtcgtccccgaaaaccagacgccctggggcgcggggcc

SEQ ID NO: 261301 - DNA, 122 bp, Homo sapiens
ggccaagggtgagttggcccccggggagctggtccctgttcctggctttagtcccaggggcgcggtctgtgtgtagggcctagtccacccctcagggctgggaggggaaggccctctcctga

SEQ ID NO: 261302 - DNA, 122 bp, Homo sapiens
gcctcccaggttcaaataattctccagcctcagcctcccgagtagctgggactgcagatgcgcaccagcacgcctggctaatttttgtatttattatagagatggggtttcaccatgttggc

SEQ ID NO: 261303 - DNA, 122 bp, Homo sapiens
ttgacctttaaggctgagggcgggacctgtggcattggagcgagtctcatggggtgggggcggggctccttttaccagctaggaatttaggggatgctggaggaacttactaaagagtagcc

SEQ ID NO: 261304 - DNA, 122 bp, Homo sapiens
gctggggacgacggggctcgctagatcagcaggggacctctttgggggacctgcatagtccgggatgggagtaggtagatgggcatcgtgcgaagggactgccagtgagaagagggcagctg

SEQ ID NO: 261305 - DNA, 122 bp, Homo sapiens
agggtgggggctcacactcggacgatcagccagccgcccgggcgccccgacggccagggacggagacggggcggagacccccactgaccccggccgctgcttcttgcctcccgtccccagac

SEQ ID NO: 261306 - DNA, 122 bp, Homo sapiens
atcttatcacttgcctcttttcaggattatggagttgtcttctgacttaccgatttacctcggtgatttttttttttggtaaatttttaagaaatatattatgataagttaagaacctgaaa

SEQ ID NO: 261307 - DNA, 122 bp, Homo sapiens
acgcgattgaggataggacagatggaaggcctgcagggaccttagcagccggctgggccccgcagggcgcatacccagccctcgctagagggcagcagagcaccatgcccctgcgacccggg

SEQ ID NO: 261308 - DNA, 122 bp, Homo sapiens
ctggagcagcaaatggcacgtaactggccccgtagatcccggcagtaggaattctctgaacgtttggagccaccgtgtatactggagttattgggcggccctgaggagaagagacaaaaagg

SEQ ID NO: 261309 - DNA, 122 bp, Homo sapiens
ggagcctttcaacattttcacaacatctcaaaactgaccccttttctagcttaaatggcacggatctggaaaggcaaactatacacagaatctaaagcagtagtcaggtgttcaatgaagta

SEQ ID NO: 261310 - DNA, 122 bp, Homo sapiens
gatccccttcagccgggtgcgtacgggtggggcctgcacgcctgtgggtgaagtgggtaccgggtccaagcccaggtggccgcacataccccaggagataagctgtttaaccctggagaagt

SEQ ID NO: 261311 - DNA, 122 bp, Homo sapiens
gggcgggggtgggggtggaggtcgccagcacagtcaggcctggtggacatgtgcgggttccgagggcatgttacgctccgggccagaaatgcatctgtcacgggactcaccgggcaccctgc

SEQ ID NO: 261312 - DNA, 122 bp, Homo sapiens
gcagctgcggctgccgcccggagccctagccccccggtgccgcggggaccccgccttccccggagcctggacagcgtcctcctcagagggtccgccatcccctctgccttagccgcgaggct

SEQ ID NO: 261313 - DNA, 122 bp, Homo sapiens
actttaaaaatgcaatccagccaatctggaacccacagcccaactacctcctttactgggcgctcaccctctggggcactgttcttctgccctgattgctccagaggcaggtaccagacaac

SEQ ID NO: 261314 - DNA, 122 bp, Homo sapiens
agttgtttactgaataaacttggttattggcacatctaatctgaggaaaatctgacacaccggacggacctagacagcttctagcatttgagggtaatcttcatttattgtaaatataaggt

SEQ ID NO: 261315 - DNA, 122 bp, Homo sapiens
gtggccccagcgccccgcaggagagctcagactccagggctggggtggcgcagagcggggcgtgtggagcgcatgcctgcgaggggcctacgaggcggctgcgaggcataaggttctgtgag

SEQ ID NO: 261316 - DNA, 122 bp, Homo sapiens
gaaccggattcgccagattccctagtctcagtggagctttaaccctcccaggcacaggaccgctggagaggtcgccacgggccggtttcccagccggccgcgagggggcgacagagtgcaat

SEQ ID NO: 261317 - DNA, 122 bp, Homo sapiens
aaccgattggaagtggctgtggcgggcctcgggccttcccgcagtcggctccgagatccgcggcccgagttctccttggcgcagctcggccctcagtctccttcagccataagatggcggct

SEQ ID NO: 261318 - DNA, 122 bp, Homo sapiens
tgcagcagcgagcccgcctgggtggccactgtggtcagctccacctgggggcagagggcacggggcgggggacagtcagaggacgtgggtccgggcaggtggctctctgatgggggatgcag

SEQ ID NO: 261319 - DNA, 122 bp, Homo sapiens
agtgagacatccatcctgaccccacctcatcagccagggagctccctgaagacaggccatcgagagaggcacacaacaggctgtggtctaaaataaacttttaattgcacatttgtgtcttg

SEQ ID NO: 261320 - DNA, 122 bp, Homo sapiens
gcacaaaatacttgcagaaatcattcatttttctacaaaaatgacaaaaagtcctttgtgcgccaagtcttcacttatctaacccatgatccccagtcctgccaatgtcaccctgccccctt

SEQ ID NO: 261321 - DNA, 122 bp, Homo sapiens
gtcctcgctctctccccctgcagcgctgtctacctggtgcggcaccgcgacacgcggcagcgctttgccatgaaaaagatcaacaagcagaacttgatcctccgcaaccagatccagcaggc

SEQ ID NO: 261322 - DNA, 122 bp, Homo sapiens
agaaaaaaggtcctcccagggaaagccccacccagggaaagctccacccagataaaagcccgcccagggaaagccccgcccagaaaaaaagatccgccaagagaagtctccgcccagataaa

SEQ ID NO: 261323 - DNA, 122 bp, Homo sapiens
ggttaatcttacaaattgtattcttatcaactttcatgaatccaattgaatagtagaattcgctatgaaaacagatgagttgctttagaaaagtggcaatgaaatgtatactcttgtataac

SEQ ID NO: 261324 - DNA, 122 bp, Homo sapiens
ctccgcctcccgatcggccctggaccgcccccccgcgccgcctcccggggcccagccgcccgtccccgatctccggctccccccgcagaccccgagcgtttcggaggctccgcccggcctcg

SEQ ID NO: 261325 - DNA, 122 bp, Homo sapiens
caggctggacaggctgagaagggaacatttccacaactaagctagatcccaccccagaggcgacctagaactcatcccaggggtgtgttcattacaatgcccatggggcctaacatgttctc

SEQ ID NO: 261326 - DNA, 122 bp, Homo sapiens
acctaataaaacatgcaaaacatcttgattttagggaagcaatagtctaggtataagaaacgatcagagtttggatctaggttttatgaaaatgtgtatgactgatggtaaacattttaacc

SEQ ID NO: 261327 - DNA, 122 bp, Homo sapiens
caaccaggaccttccaggaactggctctgggccaagagcagtagaaatcactgggtggtccgcacagctcgcgggcatctaacctgcttcaaggctcagggctaaaagggagccagggccct

SEQ ID NO: 261328 - DNA, 122 bp, Homo sapiens
gcacagggaacagaaggtgcaactgtccgccctgcatggaggaggatgggctgtgaatgccgcccatgcatggagaaaaggaggtgtgaatatgcaccctgcacagaggacgggggtataaa

SEQ ID NO: 261329 - DNA, 122 bp, Homo sapiens
tactaactttgataggtctctggggatagaaatgagaacagactgaaacctgttggcccccgccctcttggtgtctgtgctcacattcctgatcctgtacctcaactaactgtacaacatag

SEQ ID NO: 261330 - DNA, 122 bp, Homo sapiens
agaaacgtgctcaagcgcttctgggtgcagaggcatggggccgccgtcgtggcgggcgttcgtctggtgcatctggctggggcacttaccccctgcccctgctgccctgtccccgcaggtcg

SEQ ID NO: 261331 - DNA, 122 bp, Homo sapiens
tgggggccctggatcggactgctggagttggggggccccgatagggctcctgggcctgggcgtcgagatagctcttggccccggcctgcgggggcagataaggctgccggagggagcctagt

SEQ ID NO: 261332 - DNA, 122 bp, Homo sapiens
gtcagtgccaacagctggtcctgatgccgtcccgggcttccgcaagacgctacccctgggcggaaacggagtaaaggctgcaagtggcctctctgtactattccttcaaactgcatgtgaat

SEQ ID NO: 261333 - DNA, 122 bp, Homo sapiens
tgtgccgggactcggggtctctcaccacgagcagacctcggcgctgctatccggactcctcgagccccttacaggccacatggccaggggcgaccctcccgtcacaactgtgactctgtgag

SEQ ID NO: 261334 - DNA, 122 bp, Homo sapiens
attccatcctggaatcacagcttgctatgtagtatagtgattgaaagctggttcaaatcccgcttctgccatttgctacttatgcgacctgggtgatttacttaatctctcagtgcctcagt

SEQ ID NO: 261335 - DNA, 122 bp, Homo sapiens
caagtcagccctcactggcgccctcttcaaatggctgcagcacttgcattgtgtactgcacgtgggcgatttagcaattctggttatcattacttttttaatatagtgaatgtgttagattt

SEQ ID NO: 261336 - DNA, 122 bp, Homo sapiens
cattcccatcacggccagtcagtctctccactccctcctcccgcctggctcgaggacggacgcttctcatcagacacaccaggcagcctacagtctacacagcagcgagcgctctgctgcct

SEQ ID NO: 261337 - DNA, 122 bp, Homo sapiens
tcagctactcagccaaaaaacaaaacaaaaccttgactgcctatggaggaagactgtgttcgggggagctggcatagctagtgcagagttcagattttctgctgataatcttttacaccttg

SEQ ID NO: 261338 - DNA, 122 bp, Homo sapiens
cccggagtgagggtcatggctgttagtgggtactctccataggtggtctctaggactggccggcgctggggggatgctggatcataaacacggacctagaggaaggctgaagcatcacaaaa

SEQ ID NO: 261339 - DNA, 122 bp, Homo sapiens
actgtcctcacgtcacaggagaggacatcaggctcagggaaagccacctgcccagggccccgcgaaggagctggacggatcccaatgacaatgccatgaccaggcacctggggagggaggac

SEQ ID NO: 261340 - DNA, 122 bp, Homo sapiens
ggcctcgctgtcaagggccactggctggcctggtgccctgcaggggacatggcgcttccccgtcccaagggcaacttggagaggacaccatctgtgtctcagagtgaggggccaggttccta

SEQ ID NO: 261341 - DNA, 122 bp, Homo sapiens
aatggatggccgtggtggcacccgcctgaggacaggaacgccagcccggtcaggcctcggcggggcctacacgcttcgctggatcactggctcccgcctcccgccccgtgcccggccgtggc

SEQ ID NO: 261342 - DNA, 122 bp, Homo sapiens
acaatctcttatacgcagtttcttttatatagaatctctctcacacacacacacaaatcacgctcagcgtctctctcacactctctaacggtctcttacgcacacacaatatccctcataca

SEQ ID NO: 261343 - DNA, 122 bp, Homo sapiens
ccgccccgtccacgtcctccacagtacacaatggccccagaggaaggcccgctcgcagcacgtcagaaaggaattggactcggagagaaatgaggggcctggactctcccgggaacgaaagt

SEQ ID NO: 261344 - DNA, 122 bp, Homo sapiens
ccggcctcgccctctcccatgcaggctggacgtggggttggctccctaatgatgccttcccgggccgccagctctcaggcggcccgagtgccctgcagtaacccaagacgaccactttcccc

SEQ ID NO: 261345 - DNA, 122 bp, Homo sapiens
gtaagtcacctctttcagaggtctcagagccacctgttctgcaaaggcacacatttctcccgcctttaggccatacctaggtaggcatgcaggtggtagaaaggtcagactagagtctttaa

SEQ ID NO: 261346 - DNA, 122 bp, Homo sapiens
gagggatggccactcaagcaagctgggggtcctctgaggtgccctcaggctgggctgccgcgcgtgctctttgaagtgtgtagctgacatgcatctcagctgccctttaacctgtgtaaaat

SEQ ID NO: 261347 - DNA, 122 bp, Homo sapiens
atcagggaaggggccaccctgcccctgcagccgcaccatcgtgggcccgcctcgagtccccgtcttatctgtggaacagggctcccacctgcaccaacaccccatcgatgagacccctcggg

SEQ ID NO: 261348 - DNA, 122 bp, Homo sapiens
atctctcccgcgccttgaacttgcaaatttatgaatcaggggcaaaaaaaacccggataccgagcctggcctcccaccagctagagaacccaccaagttccaggaggggcggggccgagggc

SEQ ID NO: 261349 - DNA, 122 bp, Homo sapiens
agggaactccctcccagcgttggaacgctgcaaaccagctgcttggacgcaggcagcccccgcctagagaatcaagaaaaggtgtccaggcttcgggctgccagactcagacccagactccg

SEQ ID NO: 261350 - DNA, 122 bp, Homo sapiens
tgccgcgcgggaggcggaagcggctggttcccgcgtggtttggcgggtgcagcggcagtccggctgcccttcccacgtagaccgtctgctgggggcgccggcaccatttggagtacgtgagg

SEQ ID NO: 261351 - DNA, 122 bp, Homo sapiens
ggtcattcactatacatttcagccacaaaatcctcagattctgactgagccccaactaaacggctacctcggcagagactgagggtccctttgggatttctggttagtttataatcaattaa

SEQ ID NO: 261352 - DNA, 122 bp, Homo sapiens
tttattcacaatcattcgtgtttctgccatgacgggctctgacaacctcgttacatggggcgcacagctccagagcaatatcccagacacaggtcccctctgtcacagcccagctaactgtg

SEQ ID NO: 261353 - DNA, 122 bp, Homo sapiens
tggagagactgctgtggggtagcgggaacacacacactgtgaccagtgcggtgcttggcacgtagagcgtgcccacccacactcgggagatacgcgcgcatgacagctccccgtccttgtcc

SEQ ID NO: 261354 - DNA, 122 bp, Homo sapiens
aggcgggagcggagaggttgggcagagccgagcagccggtgcctggcgcagcgctgcagccgagcccacgtgcccgccgcggtccgcagcctgtgctcggcggcccccggggctccccgact

SEQ ID NO: 261355 - DNA, 122 bp, Homo sapiens
aataaggaagtgaatggtgaataagccataaaactgccaccacccagaggtagccaggatcgaagcaaggggtcacggtcatcagaggaagcacagaatatcaatagctcaagacattgcag

SEQ ID NO: 261356 - DNA, 122 bp, Homo sapiens
tgctcaagtgtggagagattatgctcccatcgagtaatgttctttggaggacgtgatttccgcattgactgtttgagaaggaggctggaaattcatcgaattttacatttcaatgggccatt

SEQ ID NO: 261357 - DNA, 122 bp, Homo sapiens
gagtgtaattggggacttttccaggctgcgcggtgcctcgcgctccggggtacggagggtcggaaactgcggagtcagcgcttctgtcgagctcccagcgcagcccctgaggaccagctggg

SEQ ID NO: 261358 - DNA, 122 bp, Homo sapiens
gtaggatccacgccacctttcagtagagaagctgtaggatccacaccgcttttcagtacacgagaaactgtaggatccacgccacctttcagtacacgagaaactgcaggacaaatgaccgt

SEQ ID NO: 261359 - DNA, 122 bp, Homo sapiens
gggcctttggattagcaagccctctgtcacctccttactagagtagggtgtgcctcactgcgtctccgttctttctgggcagtctttgctactgtaaacatccttgactggaagctgtaagg

SEQ ID NO: 261360 - DNA, 122 bp, Homo sapiens
gtgcttagttcacatcttcatagtgcgcctttgtgttttcctgggtatctaaccattgcacgtgtgcccgggacttcagcgataagtgtttcggtgttcctgcgtgcggatttgtgctctcc

SEQ ID NO: 261361 - DNA, 122 bp, Homo sapiens
gagcgcagacggccacgagcaggcggcaggcccgctgtagggacgcgcctggcatcgcggcgctgccgctcaggagcggctcccgaagcctcatcttcccgccgccgctttaagaagggtgt

SEQ ID NO: 261362 - DNA, 122 bp, Homo sapiens
tggcaaacgcagcatcccagggctttatttcctgagagcgtttaccagcagcaagcaacacgccaaagccttattttgcttccggcaaacttgcctagtggctcatctactcccatgttctg

SEQ ID NO: 261363 - DNA, 122 bp, Homo sapiens
gctcttggcttcggcggcgccgctgtagcttggaggcggtacttcctccagcatttgccgcgagttattggcaagttcccctgcagtttgggctgtctctgtggctggttctgcggcgtgcg

SEQ ID NO: 261364 - DNA, 122 bp, Homo sapiens
ctgggcgcgcaggtgccaccgcgccgtgtggtacagccccagggctccccccagggccagcgccgcagctcccagcagccgcgggctccccttacgagctgcagccacggggctcgggccgc

SEQ ID NO: 261365 - DNA, 122 bp, Homo sapiens
tgccgggcccctcatgcaggcagggctggggctggcggtacagcgtgctcggctcctagacggcttgggagcaggcttcccccagaggctgccagtgccccgggcagccttccacactcaag

SEQ ID NO: 261366 - DNA, 122 bp, Homo sapiens
aggcaacagggtcatcgccactttagagaaaaggaaactgaggctcagagaagaggcagtcgcacagccagtaggtggcgaagctggagctcgagtatcgtctcctaaattcaaggccagtg

SEQ ID NO: 261367 - DNA, 122 bp, Homo sapiens
ttgcgccagtggatggaccacggcggctggtacgaccgcaagatcattggtgagtgtggccggcctggctcacagggcaagggctacgcgtgctgtgcaggggcacaggaggcacagcactg

SEQ ID NO: 261368 - DNA, 122 bp, Homo sapiens
tccggaggtggggaggccggaaagcaggaaactcgggatcccccgggccttcttctctctcgaccccccatctagagcgtccagttctcttgcaggactcaaggaaccagccccactcacga

SEQ ID NO: 261369 - DNA, 122 bp, Homo sapiens
ctccatttaccttctcaccccggttggagagcggcccatccatatcggctttgaggtggacggggggtgcggtgtaaggcagccggcagtgcacctgcccgcactgtacctgacctgtggac

SEQ ID NO: 261370 - DNA, 122 bp, Homo sapiens
cgcccggctctcccaatctttatataataatcacatactatggctgggcatggtggctcacgcctgtcatcccagcactttgggaggctgaggtgggtggatcacgaggtcaggagttcgag

SEQ ID NO: 261371 - DNA, 122 bp, Homo sapiens
cctcagccggggaggggcgcgcgctaagcccggggatcagcgcggattaggccgcagccccgagtcctggagcagccgctcgcccgggacttcccgtcctccaagcctgcgtcggctgtgcc

SEQ ID NO: 261372 - DNA, 122 bp, Homo sapiens
actcgctctgagaaaccgaggaacgagccagacgactggaggcaggttccaggcggggggcgtggcctcgggcgactgccggatgtcctcttccagaaccgggccgtgccccggaagcagtt

SEQ ID NO: 261373 - DNA, 122 bp, Homo sapiens
ctgtgcctcagttacatgttgggaccgtcagccagaaacttctatcgaggaaacttggagcgcattgaagttatagatcccagcaaaggttctcgtggccagggatgttgtctctgtaacac

SEQ ID NO: 261374 - DNA, 122 bp, Homo sapiens
agatcaaaacttattttgatctcttctgtggcttcttccagaatccttcctaggttatgtcgtccatgcctatgagttcagttcagttactatgcttcaaattctagcctccacctgatgtc

SEQ ID NO: 261375 - DNA, 122 bp, Homo sapiens
atgcttagggaaaggaatactgcctgcttccgctagaatcttcctgaacaagcgaggagacgctgtctctggggctgacaaaaaggggcaaggatatgatggaaacgattgtcttgtcccct

SEQ ID NO: 261376 - DNA, 122 bp, Homo sapiens
ggaaagcgaggttcctggagctgaaagaatttgcccaaggtcacacacaaccggcagaaccgggacttgccaggtctgaacccaaggctccggcactttcgctgagcctatctgtacaggaa

SEQ ID NO: 261377 - DNA, 122 bp, Homo sapiens
tgcccgtgcacgctatcgaacaggagcggggttgggatggcgcctgcccctggaagatggcgttcaaggggggcaccctctgcccgtgcctgctatcgaacaggagcagggtcgggatggtg

SEQ ID NO: 261378 - DNA, 122 bp, Homo sapiens
gtttgatgccctgtggtttttctctcacagagaccacagtccagtcatcatggcacacatcgtcttcaacgtattgctcaaaggcctttctcagagagtgaggtctgcgattctataactgc

SEQ ID NO: 261379 - DNA, 122 bp, Homo sapiens
acctcaggtaatccgcccgcctcggcctcccaaagtgccgggattacaggcgtgagccaccgcgcccggctgcaaagcccatttttctataggtaacctgtgctgcgcggggtggcactagt

SEQ ID NO: 261380 - DNA, 122 bp, Homo sapiens
ctttacttggtagtgaatttttaagcccaaactatgagcatggtgcccgtcgcagcaagccgttttcagagctgagcgacagtgacctggaggagaagtcgagcagcctttctccgtacgtg

SEQ ID NO: 261381 - DNA, 122 bp, Homo sapiens
gaagagaatcgcgccacaggctgggacgggaaacgtgggaaagttggagtgggaagtttgcgacagggaacatagaaaagagcagaaagagggcaagatccccgcacagaggacgcaaacag

SEQ ID NO: 261382 - DNA, 122 bp, Homo sapiens
taggccttcctggtcagcaagggcactccatgcctggactatctcaacatctgtcctgaccgtaaacacccagcgccacagcacggatgggcaggaacatcggccaggggcgctccccggcc

SEQ ID NO: 261383 - DNA, 122 bp, Homo sapiens
taggcgtgcgggcctccgacggcagagttaaaagtgggggacagcgggggatggagaggacgagaactcaaagaggtcaagccggagaagcccctcgcatatacagatactgcgccatctgt

SEQ ID NO: 261384 - DNA, 122 bp, Homo sapiens
gagcaccctgaacctccctgaacgccccgcacctcacctagcaccctggacctccccgagcgccctgcatctccccgagcactctgcacctcaccgagcaccctgcacctcaccgagcatcc

SEQ ID NO: 261385 - DNA, 122 bp, Homo sapiens
gggaaagttactcagcagggctgctctgtggcatagtatttgagaatccagaccctgaagcgagattgtctggattgaaattacctagctctgccacctgctggctgggactatgggcaaag

SEQ ID NO: 261386 - DNA, 122 bp, Homo sapiens
cgcccggagccgccgaagcgcctcggtgcgttgcaccgccggaggctgggcagctcgcagcgctgctcggcgctggaccccacccggcaggcgcaggccacccacacccggctctgtgcggc

SEQ ID NO: 261387 - DNA, 122 bp, Homo sapiens
cggcggcgctgtgctgctcaggatcccgcaatgcatgggcagccccaaaccatgagggcccggcaggaaacccgggggcagaggagggtgcgtgcggcgggagcgcatgtgaagcccacctt

SEQ ID NO: 261388 - DNA, 122 bp, Homo sapiens
gtcacaggccgaggttctgtggagggtggaatgcgctcgggggagctaggcctccgcacccgccttcgccgcgtctctagcgtcgacctgatagccgcacccaccctccgctgcactgtctg

SEQ ID NO: 261389 - DNA, 122 bp, Homo sapiens
ggcgccctaacctggaaaaccattgaaaacggctcaggcttgcaagacttcctgcctccccgggattcccagaatcttcaagtggacggaaaggcgattcctaaacaagttatagaaacttc

SEQ ID NO: 261390 - DNA, 122 bp, Homo sapiens
gggagacttcatcagaggagtgttaaaaccccgactaactggtttcttttggggaccttccgggtattctgttactgaaatatttcttaaaagtgccttatttggggatgaaaatataaaaa

SEQ ID NO: 261391 - DNA, 122 bp, Homo sapiens
gcccccaagagaattctcacactcctgagatgagcagaaggattcgggggtcaccaacaccgggctggctccccagatgctgtgggtgcacacctggcctaaggccctggaatgcgatctta

SEQ ID NO: 261392 - DNA, 122 bp, Homo sapiens
ccccctccgcgttcagggtagccaaggccacagagggagttgtgggtgccggtttcccggcggcggaggggccgctggctgacgcaggcgctgctgtcttccgcctccctcccttcgcagac

SEQ ID NO: 261393 - DNA, 122 bp, Homo sapiens
ctcacccgtctctgtcctgaccctccctactgggcacgcagggtctctgtagcacttggccgaggcctagatacccagggtttcccactggaaagtctcacctggggctcatgcttctcacc

SEQ ID NO: 261394 - DNA, 122 bp, Homo sapiens
catcgctggactttcctgctccacaggctaatcactgagctgctcccacgctggatggggcggagctagggggcaccccttgtcctgagagtcgtgggcatcagacttgccctttggcctga

SEQ ID NO: 261395 - DNA, 122 bp, Homo sapiens
gggaatctctgaacccagccctcagtgccagggagtgaaaccacagcaaatgtcagggagcgggacctgcggaggggccggctggctccccgcggacagaggcgagccgggagcgctcgcgc

SEQ ID NO: 261396 - DNA, 122 bp, Homo sapiens
cactccccgcaccccgtaaaaagattggcgtagaagtcgtggaggacctctctccaagggcgcagaggagtccaacacccaacaaccttgctatggccagctaagtggttcgcaccctgagg

SEQ ID NO: 261397 - DNA, 122 bp, Homo sapiens
gatgggtctggctgtgcggtcgttgcctccacctgagaagggtctggcttcgatccgattcgagttggtggcagaattcaacaatgactcagggttgcgagccccaggcccacttgtttgtt

SEQ ID NO: 261398 - DNA, 122 bp, Homo sapiens
catgctctgaggagataatacaattatgggtgagatttatatagcacctttgagctcttccgagttagtctaaatccaagattctgctattatctgaatcccagacaggaactgctctgcta

SEQ ID NO: 261399 - DNA, 122 bp, Homo sapiens
cggcgccggcgccggcctcgggctccatgtccccgttgaacagagcctggcccggctccgcgccgccaccaccgccaccgctcagcgccgccatcttataaccgagagccggggcccgagcg

SEQ ID NO: 261400 - DNA, 122 bp, Homo sapiens
tcattatccaccaagctgctagagccaggagtgatggtagcatcctttctcttctttcctcggttcagttaagcaataagaactactttgagaaaataatctaaatatttctatttctcccc

SEQ ID NO: 261401 - DNA, 122 bp, Homo sapiens
agtgacgtcgtaaattggaatgaggcatccagtttagcaacagcagagatgacgactctgcgattctgagagtccctggcgagcccgggctagcgaaaagtgggggcagaacgaactacatc

SEQ ID NO: 261402 - DNA, 122 bp, Homo sapiens
taaaaggattgttataacaaaggggtcttaaaatcctcctgggttatctgaacagctttccgtttcattttgttttcacctctatccccttgaaattagaagagatttttttctctgaatga

SEQ ID NO: 261403 - DNA, 122 bp, Homo sapiens
cattgctggagaatgcctgtggctaaatgagaccatcaaaccaagagcagagcggcaaaccgcatgcacaaatatgaagtaatatctttctactctgagggaagctgacactcaatttcaga

SEQ ID NO: 261404 - DNA, 122 bp, Homo sapiens
agccctgacattgctgcgctcggggggctccaggcagcccgtatcggggcctttatttctcgtcggcggcgccctgcaccgcgcctcgcaaagtaagtcccgtctccctcacctctgctccg

SEQ ID NO: 261405 - DNA, 122 bp, Homo sapiens
ggtgaaggggcatgcgggcaccccacgtcgcctttgtctgtccttgaaagaatgccaggccgtgtgctcagggaaggccgagcagatgagggagaatttcagttacacaggcctccctcagc

SEQ ID NO: 261406 - DNA, 122 bp, Homo sapiens
ccccacccccatgcccgggccagaccttgacgagtgccgcgtgaggaacctgtgtcagcacgcctgccgcaacactgagggcagctaccagtgcctgtgccccgccggctaccgtctgctcc

SEQ ID NO: 261407 - DNA, 122 bp, Homo sapiens
taggtgtggtctagagaccaattacaacctccgcgtggtccccgagctctcagggagctgcgcacaggcgttcctagcccaggcggggcgctggcaaccctgcccgccctctgcctgtgtcg

SEQ ID NO: 261408 - DNA, 122 bp, Homo sapiens
aatcttcatggatcttcatgcagccatacaaaccctggttccaacagaatggtgaattttcgacagcctttggtatcttggagtatgaccccagtctgttataaactgcttaagtttgtata

SEQ ID NO: 261409 - DNA, 122 bp, Homo sapiens
gagtccctggcgtcctcgggtccagatctcctctccatggccaggaagccactcgattgccggcgcccgcagctgccgctcgtactcaactggcagccgcagcctctgcctggaggtgaaat

SEQ ID NO: 261410 - DNA, 122 bp, Homo sapiens
tgacccgacctctggtaaattaatgcgcaaaatggcggttgcacgtctgtttccccaccccggcgcacaatcctgaggaaggacgtcacgtcaccagggcaacgacgctcttgcgtaaaggc

SEQ ID NO: 261411 - DNA, 122 bp, Homo sapiens
tctgcctgatcttaaatgttatataatagaaatattatatatttctaagggcctcagaatcgtgcaggcgcaattgtgccctgggtcgccaagatgttgttcccatagtataagccgtcgag

SEQ ID NO: 261412 - DNA, 122 bp, Homo sapiens
cctttcttgaaggcactcaaacttaagtgctgagctcctacccactttgtaaaagtgccacgtactgtgccaaatcatcagtagtgaggtcgacactcttatgcacaatttgttctttcatt

SEQ ID NO: 261413 - DNA, 122 bp, Homo sapiens
caagattttgcttccccagacctttatgtttgcaatggccatagaagtagttcaggttcacgtactgatatatacagacaggcccaagccatacttcaataaacgtaccatagatgtgaaat

SEQ ID NO: 261414 - DNA, 122 bp, Homo sapiens
atgggcagcccaagtcgcgacaccgcatcacccacgcatacacaaaacgcccatcgagagcgatgaataacaaaaaaggaaatgcaaagaaaaacatcatgactcccagactgcacgaacaa

SEQ ID NO: 261415 - DNA, 122 bp, Homo sapiens
cgcaggaaccgcgtcttcttcaccagcttccggtacttgtggtggttcatcttccgccggcggatcttcagcacgtttttgcactgaatttgaggcgcatccgcgacgccttcatccccctg

SEQ ID NO: 261416 - DNA, 122 bp, Homo sapiens
gcgttcttgggggaaggagtttccctctggataggggtgattcatcaccgcccgagcgggcggcctctgggaagttccaaccccaaaaggcgcgaccggacctcataccgtgaccacctagc

SEQ ID NO: 261417 - DNA, 122 bp, Homo sapiens
gcgccactcctctctctgtaccttttgggcaccaggacccttgccacgggctgcgtgggccgccgagaagtcgatgaccccttccaggtctgcggtcccgggccggctctgacggtagaagc

SEQ ID NO: 261418 - DNA, 122 bp, Homo sapiens
cttccagctgccacatgccaacccagccggctccggctcagctctgtggtgccaaggtcacgggtgtgatgcccaactccagacccacagtgcctgcagcagccacccaaaccctggccgac

SEQ ID NO: 261419 - DNA, 122 bp, Homo sapiens
ccttgcctcgtccttgtccaccctgtctcttctgccagcctgtaggctccaggaggacaccgcctctcccgcactgccacacacctcagacacactgagtatacacccgggaggcgggggcc

SEQ ID NO: 261420 - DNA, 122 bp, Homo sapiens
aagactttcggcctggatgtcagcgaggagatcattcagtgagaacagttcgggtccaagcggggaaggagctctgggatgtgcactgcctgagcgaaccgggaagcggggaggactgaaaa

SEQ ID NO: 261421 - DNA, 122 bp, Homo sapiens
ctcaagaaaaagcatgtttacaattcctagagttgcaaactgaactagccacttttttcacggaagaccatttttaatcaagagagtgactgacaaactttacacttggtctttggcaggca

SEQ ID NO: 261422 - DNA, 122 bp, Homo sapiens
cccagaccggacgacaggccacctcgtcggcgtccgcccgagtccccgcctcgccgccaacgccacaaccaccgcgcacggccccctgactccgtccagtattgatcgggagagccggagcg

SEQ ID NO: 261423 - DNA, 122 bp, Homo sapiens
ctaatggattctgaagcgaaggatcctagctgccgcggctaagggcgcagggggaggccgcgcgtcctcgccacaccggaaggagagggcatccggctcacacatcccaccctatgtcttag

SEQ ID NO: 261424 - DNA, 122 bp, Homo sapiens
ttcaactgtgccccgacaccggaaaggagcactattttccccctccgctccgcccacttccgcccagcagaaggcaccggaagtagagctgcccctagttgcggaagtgcctcgcctggctt

SEQ ID NO: 261425 - DNA, 122 bp, Homo sapiens
cccaagatggcggagccgtgattgaaaacccagattcaagatggcgacttcctgcttccccgatagcgtcgcgcgtggccaccgaggccacgcctacttccggctaccccggctactcctgc

SEQ ID NO: 261426 - DNA, 122 bp, Homo sapiens
tctagataatttaacaggacaaaggtacagaacaatctggcccttacaagccggcggagacgggtacgaattaccatgacaacagcgcgcgcctcgacattgtcggctcgcgcgttgtttgg

SEQ ID NO: 261427 - DNA, 122 bp, Homo sapiens
aaaatttgcattttcttcaaggaaattcatggaaaggacattgacaagtatacagacttccgataacctgggagatcacaccagtagaccagataaaaacttccaggactcttatttaaaag

SEQ ID NO: 261428 - DNA, 122 bp, Homo sapiens
agtatagtgttttctgggtagggcaaggcaccaatagggattaactgatctatgattaaacgccaggtgtaggaaaccacagatagaatctcaggaggagaaatgggattgggagtttagaa

SEQ ID NO: 261429 - DNA, 122 bp, Homo sapiens
ggctccggccctcagggccacattagtgggcgccccaggcccagctgcttcaagaacctgcgcggagacgtcgggcgctcggggactgtgcgcgggggcagcgctccaacccccggcctcag

SEQ ID NO: 261430 - DNA, 122 bp, Homo sapiens
tagcgaatcgcctaaggtccttgttccccgccagtcgagcagcctgagcttacctgcaagcgctccaagacaggttgttctttcatctttgatttgcaggccctgctcccaaagccctgtct

SEQ ID NO: 261431 - DNA, 122 bp, Homo sapiens
acaggcggcggggctccgctggaggtgtaagagaacctggactggcttcttcgttacatccggtctgcttttgaatgtatttgaattcttttggaaaccatttcccgcccctcggagactct

SEQ ID NO: 261432 - DNA, 122 bp, Homo sapiens
ccggaagattgctacctctgccttcagtcttagctgcgagagtttaaaaagccaggtgagcgagtgtcttgttttcctccgcttggagcggagctgcaccctcgcccgccccccagtcccgc

SEQ ID NO: 261433 - DNA, 122 bp, Homo sapiens
ggaagggccttactaagacagctgtacctgtgaatgaatcgcttggctgcagatcccggccgggcactatgctgagcaactgcagctcaggtcctgcagagtccccgagagtactttgcacg

SEQ ID NO: 261434 - DNA, 122 bp, Homo sapiens
gaaggcaagggctgggaaagaagtgaggggctgagtgggagccaggagactgggggtacacgaaaggcaaagtgagcatcagaggaccggtgaaaaggaaaagaagaaagagctaagaagtg

SEQ ID NO: 261435 - DNA, 122 bp, Homo sapiens
tgtgccttcacatagatagtctggcttcagagttccaccttcagcaatatgactcacagccgtcacaactttgcaatggtctgcaagccctaccctttgcagaccaacttataaaaagaaat

SEQ ID NO: 261436 - DNA, 122 bp, Homo sapiens
gtcaggagggagaatcccctgagcccaggagttcaagactgcagtgagccatctcagagacggggtctcggtctgtcgccgaggctggagtgccgtggtgcgatctcttctcactgcaacct

SEQ ID NO: 261437 - DNA, 122 bp, Homo sapiens
tttctttcaaagtgtaaaacatttacaaggaaatgtacaaatgtattaggaacatttccccggtcggtcattagcgcgcgctctccccgcgcccagggtgcccccgtgcccagggtgccccc

SEQ ID NO: 261438 - DNA, 122 bp, Homo sapiens
ttgtctcccgctcaaacgcttcttgcccctttcggttttgtgctgaaatcaaagttgattcggttgcaccaaaggcctccgtcattttggcttctgcctgacgcgcactgtgggaagaacgg

SEQ ID NO: 261439 - DNA, 122 bp, Homo sapiens
gtcatggggaggctcaggggcctccgggagcagagcatagcttggctcgatgcacctgcccggcttggcctcaggtggcttccgcagggaggagaagccatgagatgcggcccattgatcca

SEQ ID NO: 261440 - DNA, 122 bp, Homo sapiens
ttccgggccccagtttcattggatgagcggtcgggggaccgggccaggtgactaagtttccgcggcgccttctccccggccactgcttgagccgctgagagggtggcgacgtcggggccatg

SEQ ID NO: 261441 - DNA, 122 bp, Homo sapiens
cttctcctgcaattacggaaagagctgggggctctcagggtctcctgggctccgacatcccgggtagagggggccgcgccgttttcggtgagcaagctgaagctcagtagaggtccttggag

SEQ ID NO: 261442 - DNA, 122 bp, Homo sapiens
acgtgcctgggacggtgacggccgagtgggaaccctctcctgacgaggcccaggatgtcccgctgcactacgcggtgttcacacgctcctcagcgcacggtccctggcacgaggcagccgac

SEQ ID NO: 261443 - DNA, 122 bp, Homo sapiens
cgatggtggccgagagggcacccctgatagaagactgccaatcaatagtggctagaggggcggagccaaggctctggagaggccagagggcggcagggttccctcctattccctctggaggc

SEQ ID NO: 261444 - DNA, 122 bp, Homo sapiens
tgagcgggggttcaaggccatgaaccgaatcaggaccgatgagaggaccaagctctccaacgaggtgctcaacatgctcatgatgacagctgtgaacggcgtggccgtcacggagtacgacc

SEQ ID NO: 261445 - DNA, 122 bp, Homo sapiens
tctctgcccacatacctgcataattctcattgccctgggcaacctctcccagtagctgggcgatggctgagctcacggctttggtgctgttgcccaggtcctgggtacacttctccatctaa

SEQ ID NO: 261446 - DNA, 122 bp, Homo sapiens
taccatcacttacactaattggtttatttccaattttacagctttactctcaactgtagtcgtgtctaattttgattagcaatagaagaacacaacaaactcctactctcgaaaactgggta

SEQ ID NO: 261447 - DNA, 122 bp, Homo sapiens
acgaccgcagcgccaacgccagagacggagttggccgggactgcacgcctctcgtcgctccgcgtcccctggcaccttctcttgagtggcaggcaagcaagcaagcaagcgggcggggtcag

SEQ ID NO: 261448 - DNA, 122 bp, Homo sapiens
ggacgatagggaaggggcagtcggagtaggcgcaatcctgcagggtggcggggtccgggccgcgcacgagggagggcggggcgcagcgctgcaggggtcaggggtcaggggtcccggccccg

SEQ ID NO: 261449 - DNA, 122 bp, Homo sapiens
cctgagctctggaaggatcgagctccgctacgggcccagggctgagaaaacgcgcgaccccgggggtccgtccacctcttcagggaacccacacattccacagatctctgtgaaacagaaaa

SEQ ID NO: 261450 - DNA, 122 bp, Homo sapiens
gcgcagccaactgcatcgggtgggggcaggagccggtgccttggagtgacgcgggcggagcgcggcgctggttattggaagctggtggggctgcttgagtgcccgctgagcctccgccgcgg

SEQ ID NO: 261451 - DNA, 122 bp, Homo sapiens
atgttgtggtttttcttttttaaatcaatgcttaaacacgtatttgctttctatggctgccgtaacaaatgaccacaaaatcaatggcttagaataacacaatttattatcttccagtttgt

SEQ ID NO: 261452 - DNA, 122 bp, Homo sapiens
gaccgttccgcttcacctcccacccacaggttcaagcctcctcagtatctgagaaaggcgcgaagcctctacgcagttgcgacccgaggcgagcaacaactagcgcatgcgcacgtgagccc

SEQ ID NO: 261453 - DNA, 122 bp, Homo sapiens
atcagcgtctcctccttgaagccgagctcagccatttcatccagctgttcctggtgtgctcggatgaccacctgcctgggaacaccagagagaacactgtgatcttcctggcctcccagcct

SEQ ID NO: 261454 - DNA, 122 bp, Homo sapiens
ctaaccttccctcctcctcccccttgagtaaatgcaatgacacattctcccaaatgccagcgagctggcctgggagcaagtgatggtgtttttcctgctgccctttgtctgggctgaccgcc

SEQ ID NO: 261455 - DNA, 122 bp, Homo sapiens
ccccatgaacaacggccacatggttggcgtttgaaataacctgtgtgttcctagaaattccggtgagtaaaagtggaccgggctatggcacttttttctgttcttatcttagaactccttta

SEQ ID NO: 261456 - DNA, 122 bp, Homo sapiens
tatgataagaagcagctgcatttcttgaccccaaagtactagagtgaattaataatttaacgtggtgcaaccactgattcaagtgcttttaatgtctcatttaatcctaaagcctgtgctgg

SEQ ID NO: 261457 - DNA, 122 bp, Homo sapiens
tacttaaccagttaggagacaaagggcttcttctgcctggtgcgtgcgagcggaccccagcgagcaagggagctagtgccagagagagctgcggaggctccggcaggagtggggacgtcccc

SEQ ID NO: 261458 - DNA, 122 bp, Homo sapiens
ccatacaggccaacttgcgaaacacccgggtgccaattacccagggcactccacacagcccgttcaaggtgcttcttgtttttgtccccagatttgtgcttgagaagctctgagttcccgtc

SEQ ID NO: 261459 - DNA, 122 bp, Homo sapiens
gcatcctggaggatattcctccagccctacaaggtgctgccatgcagctattgtcataaccgagtcttcagtggccattcaatcattctttcaggccacttgcttcagggtgatgggaaaca

SEQ ID NO: 261460 - DNA, 122 bp, Homo sapiens
gatgctcctgctaagaaaaacgggagaatgttatttgggtagtggaggcagaggcagcaccgggtcccttggcatggaacccagtgtcctaaccggaccatgccttgggtgggatccagctg

SEQ ID NO: 261461 - DNA, 122 bp, Homo sapiens
cacagtgtcctcggtggcgcatgaagctgtctcgccacatgaacttcttggcgcagactccgcactcgtagggcttgagacctgtgtgcgtcttcatgtgctcagtcagatggtgcttcatc

SEQ ID NO: 261462 - DNA, 122 bp, Homo sapiens
agacggcaactcacatagtaatatggaatttgaatagaaaataaattgtgctgaatctcacgtatgatgtcctaaaagtgtccaaaatgatgtcattaaaaaggcagggagggggactgcaa

SEQ ID NO: 261463 - DNA, 122 bp, Homo sapiens
ctggtgcccggatcagtgaggacaactcagtaaccaacgctccatccacaagcagtggtgcggagccagtcttcagcagcgcccccggtgttagtgggaagcaatagcagtagtaactgatg

SEQ ID NO: 261464 - DNA, 122 bp, Homo sapiens
aattggatggggtgtggtgaccagcctaggtaggggtttactttgaaaaatatgaaatagcgtttttcttcaaagacaggagaaaaataagtcgagttggacatgaggaaagattttaaggt

SEQ ID NO: 261465 - DNA, 122 bp, Homo sapiens
gcaaccacctccctccaggaacattctgcccaagggatagtttcccctgcagctgattctcggagatcctgaccaagccaaggggttcaagacagcttctgcaacttcacaaagactgagac

SEQ ID NO: 261466 - DNA, 122 bp, Homo sapiens
ccggcccagggcgaggagtggcttccaggaagcgggcggaggagcgttccagccgagtcccgccgtcgccgcggccccgcgcgctccgagcggcccgggcctggccccacacggcgtctctt

SEQ ID NO: 261467 - DNA, 122 bp, Homo sapiens
cagctcttccccagttttaaatgccaccagagcctcagccttcatgtttatcgcagaccacggctctttcatcataggagggcatttttctttattgcactgtggttgacacgtttgcgtgc

SEQ ID NO: 261468 - DNA, 122 bp, Homo sapiens
aggactgtctggcttcattacgactcattccatcaggccggcagccggcctctcctcagtcgggaaggatggagctgggcagcagtacttggtgtttttccacttgagaagaggctgtgccg

SEQ ID NO: 261469 - DNA, 122 bp, Homo sapiens
gcggtgaccgacaggcggggtgcacgctgggcacacgtgcctggtcggtgttacttgaagcgtggggactagaagtcagaccctgaggagcatgatctctggaagctggagagaccttaaga

SEQ ID NO: 261470 - DNA, 122 bp, Homo sapiens
cccatcgctctgacttgcttgtcagcctgcgaggttccgaagggaacttcaaagtttccccgggcagacgcaggtctggtagacgtcttggaggccagggaggtgccagtagctggaggagc

SEQ ID NO: 261471 - DNA, 122 bp, Homo sapiens
gcttgggacactgcagcactgtgggggaatgccagcctctctctgttccagtctttctggcggtggggttctgtcctcttcaaagggagccgggggccgggcgcggtggctgacgcctgtaa

SEQ ID NO: 261472 - DNA, 122 bp, Homo sapiens
tacaacttatttttttaatttaaaatatggaatgcctaacgaatatgcgtgtcatccttgcgcaggggccatgctaattaccgtatcattccaattttagtatatgtgctgctgaagggagc

SEQ ID NO: 261473 - DNA, 122 bp, Homo sapiens
atggaggaaaggggctgcccagaggaggggccagggcaggtgaccatctggagttctggtcgaggtgatggtctcctcacaccatggtggcctctaactggtgacggcagagggcccagcgc

SEQ ID NO: 261474 - DNA, 122 bp, Homo sapiens
ctttcaaatgattatcttcagtttactattaggaggctaaaacgattttctagaccactgcgaccaaacctggctactatttaaaccccacaggcactctgctgcatggaaaatcccaagct

SEQ ID NO: 261475 - DNA, 122 bp, Homo sapiens
tcgtgattatatgtcccaaataacccgtagaaataataactgtcatgaaaggagaagccacgtgctctatttgtccacaggctgaggaccaccttgctgcggttgaccgctgctggccggga

SEQ ID NO: 261476 - DNA, 122 bp, Homo sapiens
gggtgaggacctgcctgttcctccaggtgaggagtgcctgtgccgggaagcaggaggggccgggcaccagcgccgccgtccaccctgggaccgtccactctgagacaggcagctgtgaccag

SEQ ID NO: 261477 - DNA, 122 bp, Homo sapiens
ccccgggttccgagttttccctggccgcttgatgggattcgaacctgcaaactcagcgctcgcccagcgcagcggccccgcctctcctcccctcccgccgcccggaggtcatgtgagcgcag

SEQ ID NO: 261478 - DNA, 122 bp, Homo sapiens
cgcgcccaggccccgccccctccgcgaggcgccaatcagagctaagcacaatgcagggggcggggtccctctgcagctccgcaacctgcaggagaagggattggttcatctgcattccaatc

SEQ ID NO: 261479 - DNA, 122 bp, Homo sapiens
ggagccccagcccggagagtccgcgtgtgccaggaaagcctgaggggcccaggcctctggcgaggtgtcccgcccggatggagaggaagctgcccgaagcccagcggctctggggtggggag

SEQ ID NO: 261480 - DNA, 122 bp, Homo sapiens
tcgccgggtcctgcgcagcaatgcgtctgcttgctggtggaattcgccagccgccagcctcgctggcccaggtgcttgacagcatcaaaggtcaaagtgtgttcttcatgctaacatctatg

SEQ ID NO: 261481 - DNA, 122 bp, Homo sapiens
cgggtccgagtaggaggacagaagcgccgcccggcctcgcccaagcgcacacgaaggggccgcttcccgccccccgcaccccagaccaggcggctcacggaacaccgcctcccagctctggc

SEQ ID NO: 261482 - DNA, 122 bp, Homo sapiens
ccatttaggtaaggtgaaggaggaagtcagggttatgattctgtctctgtgtaacaacttcggggcaagctccctgaatgcagaggcaaagctgagcaagccagggaaagggcctgagttat

SEQ ID NO: 261483 - DNA, 122 bp, Homo sapiens
ccagggtcaggcacgaggttggcacctcagagtctgcccacccaaaattcctgggacattcgggaagtcctttgttttaccattcctgcacctgccagcccgagtgagggtcctcctcggcc

SEQ ID NO: 261484 - DNA, 122 bp, Homo sapiens
tcagtggtgagcgggagacaggcccaaagagctgaggaagtgtaaactccagtgataaggcgataacttgaggaaattaaaaccccgtagtgtgggaaagaacaattagccaagacagaggg

SEQ ID NO: 261485 - DNA, 122 bp, Homo sapiens
caatgccgccgccgccatgcttgagcgccagcgggcgccgccgccgcccctcgctctccgcgtcccacactgagcaggcgcctcagcgcgcagcagctaccgcagccaccggcaggggcggg

SEQ ID NO: 261486 - DNA, 122 bp, Homo sapiens
aacatggtgaaaccctgtctctactaaaaatccaaaaaattacccaggcatgctggtgctcgcctgtaatcccagcttctcaggaggctgaggcaggagaatcacttgaacctgggaggcag

SEQ ID NO: 261487 - DNA, 122 bp, Homo sapiens
cgtggggggcacagggcctctgacagatgtgagaacaggagggcctcagaggtgcctacacgccgggaccaggtaaggacgagcctgaagtaggctgtggctgagggcagaggccaccaaca

SEQ ID NO: 261488 - DNA, 122 bp, Homo sapiens
ggtttctaacccaggttcgcaaggcccatgtggacacgtctgcagccacacatgctttcacggggcacatgggaacgtacacgcgaagggtaatgcgtgcacacctgtgcagccaggtgtgc

SEQ ID NO: 261489 - DNA, 122 bp, Homo sapiens
aggagtcgctcaaaatcagggggcgaactacgcgggcgtgaactcgcaggatttatttttcgggtgcacagtaagtattcagtgaccttcagcggtgccctgacgggtgggtaatcagagct

SEQ ID NO: 261490 - DNA, 122 bp, Homo sapiens
gaggggcgtggcgtgtccggcagggggcgccgtgattggcacgccagctcccgctgtccgcgaggctgccctaaagtctagctcatgagaaccccaggcaagtgcggacctacaaagtttgt

SEQ ID NO: 261491 - DNA, 122 bp, Homo sapiens
aatgatagttcccagaggctgggagcaggggagaggggaagatggggaaaggagaaacatcggttaaaggtacaaagttgcagtgagacaggaggcataagttctggaaatctactgcctag

SEQ ID NO: 261492 - DNA, 122 bp, Homo sapiens
cagggccacccccaccgttcctgtggaattctcctgtgtggctgggcaaagtcatggccacgttgattaaaccgagtccttcttctgcagctgacataatctcacatcttttcagaaccgac

SEQ ID NO: 261493 - DNA, 122 bp, Homo sapiens
gtggggcttgggcccagattggaggagatcagagaggtaagtcctttctgtaccttctcgcgaatgcctgggcgagatgcaagtccaggcccttctctggggtctcttcccaaaggctggtc

SEQ ID NO: 261494 - DNA, 122 bp, Homo sapiens
gcgcctcctctccagtcaccagcctcatgtattattgatccaacacccatgtgctgggcacgtacatgggagccaggcactgttttaggcactggacacagagatgaatataacagacaagg

SEQ ID NO: 261495 - DNA, 122 bp, Homo sapiens
gccgacacaatcacaggagggtttggataagacgcctgcatcccggaggagctcgttttccgggggctggagctgggcaggcaagaacaccccgtgtcacaggacaggccccgggtacctcc

SEQ ID NO: 261496 - DNA, 122 bp, Homo sapiens
aactgtaaagtgctttatagacctgaagaattaacaaactttttaagacttctaagcaaccgatcccagatctagcattgattcttcctagtcctctatatctgggctgctgtggtcagcct

SEQ ID NO: 261497 - DNA, 122 bp, Homo sapiens
gttcaacatgaaaggaggcttcctccctgcctgctaattacctgctcttcccgatctcatcgtttctgcctttgcaaagtgctactgagaagggggaagaaacgtccgccacccatccccct

SEQ ID NO: 261498 - DNA, 122 bp, Homo sapiens
agagacggagggagagcgagacagagcgagcaacgcaatctgaccgagcaggtcgtacgccgccgcctcctcctcctctctgctcttcgctacccaggttggtactggtgactttttttttt

SEQ ID NO: 261499 - DNA, 122 bp, Homo sapiens
tgaacggcgctctcgtgaaaccgacccacatcattgtggagaccatgatgtgagctctctcgggtcgacggggccggcggctttcctgctgtttactaacattagattctcataggaccagg

SEQ ID NO: 261500 - DNA, 122 bp, Homo sapiens
cccatcacaaattcatgacacggtaggaggcagggaacaggggaggaggtgtctgtgtttcgggggtcatttttagcacttttcagtcatttatcagactccaggtattgtgttttctcctt

SEQ ID NO: 261501 - DNA, 122 bp, Homo sapiens
cccgaggcacgtcagcagttctcaagggccccagcaagccccgcaagcgtgaagcggaggcgcgggggcgcggggccgcgggcggggaggggcgggcagcgggggcctctgccaggcgtcca

SEQ ID NO: 261502 - DNA, 122 bp, Homo sapiens
tcaggaaaactacagagcaatcactgctccaaaaggagcagaaacaaagaagcagagtttcggtttacaactggcgacagtactgagaaagttcccaggactaaggagcacaactctccagg

SEQ ID NO: 261503 - DNA, 122 bp, Homo sapiens
gcggttgaaggcgatcttgagtggggccccagcaattcggttgagccttctccctccactcgcttccgccggccgggcccctcccgcccagcccctcgggcctcccaacccggccccggcgc

SEQ ID NO: 261504 - DNA, 122 bp, Homo sapiens
tctgcagacattaattaatgttcgctccggccctggaagccatttcaccaatggaaattccgatgagaaaggaagaaacgaggggttcaaggccgcgccgttgtgagtccgctgcggaacta

SEQ ID NO: 261505 - DNA, 122 bp, Homo sapiens
tggagagagaaatggccctcctgccagctctcccaggcctgactcagcagatgccagccccgaccgcgggcttcagatccaggatcccagcgaccacaaccgtccttgggtttcctttccca

SEQ ID NO: 261506 - DNA, 122 bp, Homo sapiens
acgtagccggcctctgcggaactgggcgttgcggccccgcctccatccacacccaggccacgcccccaggggagctccgcccctcgcccggctcagctctcccggtatctggggctttgagc

SEQ ID NO: 261507 - DNA, 122 bp, Homo sapiens
acaaggctttctgtctcccagggcttgtgcgacttggtttcagactctgccacccactgccgcagacagcggccgtcttcccaggaagaagacatttcctggcggggtaccgggactgacgg

SEQ ID NO: 261508 - DNA, 122 bp, Homo sapiens
ctttccgcacaaatgcaggcccacctttaattctgcaaaccactttaggccccgcgggcccgcagccctggtccaagacagctgtctgcttcacaggtcgcgcacccagagccgggcggttc

SEQ ID NO: 261509 - DNA, 122 bp, Homo sapiens
caggggccgtggccagtgtcccgtgggtgtgacccagctccaggtcatggttcatggcctcgaagaactgctggatgcagaccttggcaaaggctttggcgtgctccgtgcacgtctcgtcg

SEQ ID NO: 261510 - DNA, 122 bp, Homo sapiens
gcgcctgtaatcccagctactcaggaggctgaggcaggagaatcgcttgaacccgggaggcggaggttgcagtgagaccggatcgctctccactgggcgacagatttgaatctacgctgtgc

SEQ ID NO: 261511 - DNA, 122 bp, Homo sapiens
caccagggagaccggggcactcgccaatacacacaatcccactccaccggggagaccaggcgctcgtcaatacactcaatcccactccaccggggagaccaggcactcaccaatacacgcaa

SEQ ID NO: 261512 - DNA, 122 bp, Homo sapiens
aaactttccaaacccccaccccggggtcccgggtttcgcctcctcagtcccaggcaacgtcgtctcagacaggatacgagactgctagggaacctgggctgcccctgattcgaactcctctc

SEQ ID NO: 261513 - DNA, 122 bp, Homo sapiens
ggcgagggcggagggcggagggcgcattgcctcatcctgtacattttactggaaatcggacgcatccggaggaggggctgggaggcggcccgggcaccgccaatggccgggccgggcgccgg

SEQ ID NO: 261514 - DNA, 122 bp, Homo sapiens
acattagggtcaggctttcgtccctttaggaggggctggcaggtcatcttcctgcccactcgtggagctggcctggctgccctggcccagcatggtaccctctctgcccccagagccggaca

SEQ ID NO: 261515 - DNA, 122 bp, Homo sapiens
cgccaggccacgccctatcacgtcctgccaattgccacgcaccaggccacgcccccgtcacgcagcgccaacggccacgtgccaggccacgtgccaggccacgcccagcacccatggccaca

SEQ ID NO: 261516 - DNA, 122 bp, Homo sapiens
gggggcatggcaggagcaaatgagagatcttcgggatctccaactctggaccaaggagaccgtagccttttcccctcagcgtcatgggcgccgtggaaattaccatcaactcagccgtttga

SEQ ID NO: 261517 - DNA, 122 bp, Homo sapiens
atcccaaatcccaatctcaattaatcaatcacaagggaaatcagtgtctacactttcaagcgcatcatttccttattttatctttctaattgttacactatcattcaagataggatcatgtc

SEQ ID NO: 261518 - DNA, 122 bp, Homo sapiens
agataaagcagggcggggcaggtggagcgggcgccgagcgcctagcccgcagcccctgcgcgcctacctggaatggctaaattggtgagggggatgctgtgcatgctctccggcagagttgc

SEQ ID NO: 261519 - DNA, 122 bp, Homo sapiens
cctgagccgaggggcatggaacaggatttctggccgtagcacgaccctgaaggggccagccggaagaaacagtactgcgcgaacaatctttaccgcattgtcttcccctcccccaccctagc

SEQ ID NO: 261520 - DNA, 122 bp, Homo sapiens
tgaatcaatcgctgaaccaactgtcaaggaccagcagcctcaggggcgggcctggtagctcggtgagcgaggaggtggtgggagggccttgtgcgggtagggaggtgacagtaagaaatggc

SEQ ID NO: 261521 - DNA, 122 bp, Homo sapiens
ctgacgagggggtacagctgcacgcgcggggtttctctccgaaccggagtgcagcgtagtcgaggtccaggattccccatccattattcacgatgtttactagagcggggcaagggagagga

SEQ ID NO: 261522 - DNA, 122 bp, Homo sapiens
gaagttgattgagttacaggatgttcacaacaatataaagtaggttcgacagtataaagtcggttacattcattttcaaatgagaaaactgaggccaagaggctgaaatcatatccaaggtc

SEQ ID NO: 261523 - DNA, 122 bp, Homo sapiens
gaagcattctctacaatttacaattgacaaacctgaacacagcaaaacaacaaagacaaacgagtcacctctttcacttgaaaacctcagtcctccacagagacgcacacagacagacagat

SEQ ID NO: 261524 - DNA, 122 bp, Homo sapiens
gctgagaggaccggctgggtggcctcagcttcaccactgacatgctctcagaacaggttccggggctgtccctgtccctctgtcatcacagataagctggagttgactgattcagagagcac

SEQ ID NO: 261525 - DNA, 122 bp, Homo sapiens
ctgcctcccgggttcatgccattctcctgcctcagcctcccgagtagctgggactacaggcgccaccacgccccactgatttttttgtattttaagtagagttggggtttcaatgtgttaac

SEQ ID NO: 261526 - DNA, 122 bp, Homo sapiens
tctcaggtaagtccatcttcagcatgtgagcttgttaacacagcagtttcttgtgaagagcggtcactctgggaagaaattgccagactgtggagctgctcaaggccagacagcatgattta

SEQ ID NO: 261527 - DNA, 122 bp, Homo sapiens
accacgtccccacacggagagggtgggcgccacgtgcagccgctgctgccagggaggatccggttccaccgtgcgcctgagctcctggggtgtcacacagcgctccacgtggttctggccag

SEQ ID NO: 261528 - DNA, 122 bp, Homo sapiens
cgctcggaacggggagggttttcggggggttcggcgtcgcaccttggggccccccgcagccgtgtagggggcctcccatctgctaagcgtttttccgttgagccgctccaaaaacactaagc

SEQ ID NO: 261529 - DNA, 122 bp, Homo sapiens
tacacggtgaaaagatttagtccaaatgattcctaagaacgcggggggactccctccccacggaagccgcgcccctgccctgtgcaaactaacgtctcttctttcctcaacggaaggaacat

SEQ ID NO: 261530 - DNA, 122 bp, Homo sapiens
ggggggcgtccggctccggctcggtgatgctccccgcggggatgattaacccttcggtgccgatccgcaacatccggatgaaattcgcagtgttgattggactcatacaggtcggagaggtc

SEQ ID NO: 261531 - DNA, 122 bp, Homo sapiens
cagtcgcggctaataacggactctttaatttgtctcaaagtgtggcgtttctgtataactcgcttggtcacaacactggcttctgatagcagcctgtaatccttggcttgtgggctgcatcg

SEQ ID NO: 261532 - DNA, 122 bp, Homo sapiens
cgagggcaggagagtgccgtgcttttcagtctgatctgagctgagagtggcggcctgaggcgtccccaacaccggtccactgtgggtgctctggggcacgctgcctcgggagaggtgccccc

SEQ ID NO: 261533 - DNA, 122 bp, Homo sapiens
tgagggaaaatgtacaaggcagtgacagactggatgttggcagtgaagtacagagtgaagcggagggcaattcccaggttcctgaaggtttcatgaggaaagagtggtgccattaatcaagg

SEQ ID NO: 261534 - DNA, 122 bp, Homo sapiens
agtgcgcctcgcgaatgcgcatgcgccagtagcggggctccaggcgcgagccctgagctgcgtctcgcctcacagtgaacgccactgttgcctggcgacgggtccctgcgtcatggcggaga

SEQ ID NO: 261535 - DNA, 122 bp, Homo sapiens
gggatgttgcagcacccggcgaagctgtgtggctccgaagcggattttctggaaaccctacgtccccaagttcgctttcatgtaacaggtgcatgcagatggagaggaagacgcaagcgaag

SEQ ID NO: 261536 - DNA, 122 bp, Homo sapiens
ggaagccgggccctgaagtgtgtgcacatggtcgataaactgtaataaactttacgggttcggtaacgaggctgcgtgtataattcaattttttaattctggaaaagaaaatagctaacaag

SEQ ID NO: 261537 - DNA, 122 bp, Homo sapiens
ctctcctctcttttctctgtctcttcagtgtactcttctgctttgtaggagtgagatgaccgggaggaagaggaggaggatctggacgtgcctctcgctctccggtgcttcttctgcttctt

SEQ ID NO: 261538 - DNA, 122 bp, Homo sapiens
tgacaggcatcaaagtccagccctctggccttgagtggagacaactctaggcctagtgtacgccctgggatcctcctgggatcaggctgaagctgccttctgcagactttgcctgaaatctc

SEQ ID NO: 261539 - DNA, 122 bp, Homo sapiens
ccgccactgtcaaataggccctagtgtctgtcattccctgctttgtgtccatgtgtgctccgtatttagctcccatttataagtgagaacatgtggtatttggttttctgctcctgtgttag

SEQ ID NO: 261540 - DNA, 122 bp, Homo sapiens
cgcccggccgagcttagcaatgcgctgggaaactcagctggcccggcgggggttgtgcaacgaccctgcatgcagtccataagggtcctgcaatggggccctagcagcccatcggggaactc

SEQ ID NO: 261541 - DNA, 122 bp, Homo sapiens
cgttcataacggacagaaccctcctgagcgagcagtgtccccacctaactgaaaccgacacggccaggtggccggctccagggtctctcaagaatgatccatggcaaggggtgggagcagca

SEQ ID NO: 261542 - DNA, 122 bp, Homo sapiens
ttgacgcgcgtaccggggcccccgcccgcggctcccgccgccgcccgcccggcccgcggccgccgcatcaaagcagatgtttgcagctggtttgagttggatccccatcaacaggccctttt

SEQ ID NO: 261543 - DNA, 122 bp, Homo sapiens
tcctgcaattatacatcttttctttaaaaaaacaaaaacaaaaacaaaaactgagcttagcgcctgagagatgcggggtagacagcttcacacagggcagctgctaccgcatctctttttac

SEQ ID NO: 261544 - DNA, 122 bp, Homo sapiens
tcaccccaccctccaaaaacaggttagaacccagaacgagcaaagagccacctaccattccgtgcctgagaactacgatcctgatccggcagtgtttgccccagaaatcctccctacttgtt

SEQ ID NO: 261545 - DNA, 122 bp, Homo sapiens
tgcctgtgggtatgggaagggctggtcctactgtgtggcgctgctgggatgtgacgccaccgtgtccccttctgtgtcccatctcttgcccacttagcatgtctcttgccctgtaggaccgg

SEQ ID NO: 261546 - DNA, 122 bp, Homo sapiens
acaatcctcaggaaatgtcgcccccccccccccccgaccccccgccagcccccgaccgcccggaactaagccacagccacctcctgccctggttgctgcaatagtctaatctctcctggagt

SEQ ID NO: 261547 - DNA, 122 bp, Homo sapiens
ccgctcccgaccccgctccgccagcagcggcccggagctgccctttgtgcagagctggggcggcccgtaccgtcgtgcccttcggagagacccaagggtgttctccaggtgggaggggtggt

SEQ ID NO: 261548 - DNA, 122 bp, Homo sapiens
ggcctgtgcggaggcagtggttcctgtcgggataagctttttttgttctcccaagttgggcgaatcataaacagagcatctaggctgatgtgaaatcatttgtgctgtttttccaaatcaag

SEQ ID NO: 261549 - DNA, 122 bp, Homo sapiens
caaaacaaaggcagcatccggggctgggtggatgcaaacaaccatgaaagactgggttctcgctctccccggctctgctgctgctgctgctgccgccgccgccgctgctcctcctcctgccg

SEQ ID NO: 261550 - DNA, 122 bp, Homo sapiens
tattccaatggagttttttgggggttttttcttcttcttaaagacaaaaaaataatctaccgctgacactcaacaagaaccgtcgtagaatggacaagtcttcggatcgcgctgtgcagatc

SEQ ID NO: 261551 - DNA, 122 bp, Homo sapiens
tagacccttccccttgcctgagcccagggctgcaatgactgcactgagatgagatggaaccgtaaaggcagtgactcctgctgacaatgaaatggagctcaggagatgaagggactggcctg

SEQ ID NO: 261552 - DNA, 122 bp, Homo sapiens
cacacgcatgaagaggaaagacaagtaggatgcaggcttggaggtggaggctcggcgggacggggagaaaaaaggacaagacccttccctagaagcgcttggtggacacagtgggtgcaaac

SEQ ID NO: 261553 - DNA, 122 bp, Homo sapiens
gggctggtataaaggacttgtttcctgctgaaaaagcagaaagagattaccagccacagacgggtcatgagcgcggtattactgctggccctcctggggttcatcctcccactgccaggtga

SEQ ID NO: 261554 - DNA, 122 bp, Homo sapiens
caagtctgaaaatagcatagtgtgtctgccaaggtctgcgggtgcccaaatttcccccaccgcttcacggtggccttggctttacacactgttgctaccaagtcacagaaggaaaaagattc

SEQ ID NO: 261555 - DNA, 122 bp, Homo sapiens
tgccggcgggaaggccggcctccccgcgcctgctctgggcctccctccctgcctccctcccgctggcgccaccgccacgttagttattccgggtttggggccaagtccctcttggccgcagc

SEQ ID NO: 261556 - DNA, 122 bp, Homo sapiens
cagctccaggaactgaaacgtgaaggggacctcggtgcccggagctgctgcccaggtaaccgcgctgcgcccggcgagcagatggggggtagtcgccccagtcctggactccgcgagggggc

SEQ ID NO: 261557 - DNA, 122 bp, Homo sapiens
ctaggcgggagtggggatgggcctttggcaccattccgggcctggcagaggctcccagcccgagggtgagcctaaggatccctccccgccgtgcctcaggcgccccgcccactcctgctaaa

SEQ ID NO: 261558 - DNA, 122 bp, Homo sapiens
cctggcggagatgagaacaggagagaaacccacaggcagctgcactgcccacagctgcagcgaagccaatctctaggtctgcaatcacccttaggggccagaaacccagccccgcaccagcg

SEQ ID NO: 261559 - DNA, 122 bp, Homo sapiens
ctccctcagcctgcaccgtggtctatctactggagaccccagctgtcccctcaaaaccttcgctcccctgagacagttcctgggagccttctcctgatgtcgtcccctacccctttctcaaa

SEQ ID NO: 261560 - DNA, 122 bp, Homo sapiens
aaatatgagctgtaaatatcacatttacatgtgtgtcatgtactataaaaaacggtatcacgtaatacaattttgtagtgcaggtgcaaatgccacacctggatctccagcattctcaagga

SEQ ID NO: 261561 - DNA, 122 bp, Homo sapiens
ggccctgtggcagccgagccatggtttctaaactgagccagctgcagacggagctcctggcggccctgctcgagtcagggctgagcaaagaggcactgatccaggcactgggtgagccgggg

SEQ ID NO: 261562 - DNA, 122 bp, Homo sapiens
ggcctagagaccagatagtgtccgtgtctgggaaaccggtaagatctctgtggtcttcctcgttcagaatttcgcttcctttctctcttcactccggccacagctgggtactggcctaggga

SEQ ID NO: 261563 - DNA, 122 bp, Homo sapiens
gcgatttcggaagctcagacaagcatgtgggactgagtcagtctcaatgggtggtggcggcgatgtcttctctccgcagaactgtctcagcaaacagcagctcctctcggccatccgccagc

SEQ ID NO: 261564 - DNA, 122 bp, Homo sapiens
tccattctcatcctcattatgatgagtgtggtactattagcatctccattgtatgacaatcggactgtggctaaaagaggtgaagcattttacccagcatctcacaagtggtgaagctggga

SEQ ID NO: 261565 - DNA, 122 bp, Homo sapiens
tgacaacgggactcccactgaagccctcacaggagcctcattcaccctaaataagaatgacgatgttgccaaagataggtcacaactaagatatcaacctcaaagcctaccccaaaggaggg

SEQ ID NO: 261566 - DNA, 122 bp, Homo sapiens
gtttaatcatgagctggtaggtcatgcagctgccaataatctagggggtgctgacacttccggcatgatggatatatctaaatctaggcgttcgccgccttgggaaatccccagcttccctc

SEQ ID NO: 261567 - DNA, 122 bp, Homo sapiens
tataaatctgcatgggggcagctgaagatgcagtgctgtgtggtagaaagcagctggaaccgggagccaaggaacatgagttgtagccccagttctacattaactcctgtgtgaactctgag

SEQ ID NO: 261568 - DNA, 122 bp, Homo sapiens
ttgttgtgaggggctgtgctgtgcattgtagggtgtttagcagcttccctggccttcacccgctaagtgccagtagcacccccgcattcttgctccccacagttgttaatcactaaaaatgt

SEQ ID NO: 261569 - DNA, 122 bp, Homo sapiens
ctatcaaatctctgacactttctagacaggaaccgaacccacaaattcatctcccagacacgtgtggatcagggcccagggggcttacagaagcagcgcggtgcccctgcgcaccatctgcc

SEQ ID NO: 261570 - DNA, 122 bp, Homo sapiens
tgttgatacgagattcctctgagatgctctttagtccaggcaggtttatggctcacacagcgttcctagggtctcattcttctgcacaggcaggcagctcccgagccagccagtctggaccc

SEQ ID NO: 261571 - DNA, 122 bp, Homo sapiens
gagttaggctaaaccgggcctcgggattggggcagctcccagactcttcgggcttgggggcggagtctggcgaggggtggagcttactgacggccgggcggggcccccagatagctgaggct

SEQ ID NO: 261572 - DNA, 122 bp, Homo sapiens
cgggggcggggttggggcggacgccctgtggtgcgcgctgagcgttttgcctgcgccaagcgagcccctcacaggagctaccctcgacgcctgaggactgagcgtcagcgttggggcgggct

SEQ ID NO: 261573 - DNA, 122 bp, Homo sapiens
cacaaaccatttttcaaataatcacctcaaaattatacattcatttctgaaaaggcttcacggtttactaaactactttggggctgttgcctagaattttgttaggaaaatgtaagttggct

SEQ ID NO: 261574 - DNA, 122 bp, Homo sapiens
ccccgacctcgggaacaagggtccgcattgaaccaggtgcgaatgttctctctcattctgcgccgttcccgcctcccctcccccagccgcggcccccgcctccccccgcactgcaccctcgg

SEQ ID NO: 261575 - DNA, 122 bp, Homo sapiens
atttggagtgaaacggaaaggggcatggggtcgccaaggtggtgaaacgccgcattaaggcgcttcaagatagctggagttttgcttgggaaactcagagggatctcgcccggccggcacaa

SEQ ID NO: 261576 - DNA, 122 bp, Homo sapiens
tgactgcgtcgcgcaccaacaacaaaatggagctgacagctgctgcgtcgagactcgtctcgaaaacactgatgacgcagcgagcgcgtctccgccgcggggcgggtcatgcacggggcgag

SEQ ID NO: 261577 - DNA, 122 bp, Homo sapiens
cagtagcgcgttgcacacgagctgcagcctgtccggggtgatgtccacgggcacgtcgaacggggaacccagcagctgcccgccctcatcctggaactgcactagcaaccgctgcacatcgc

SEQ ID NO: 261578 - DNA, 122 bp, Homo sapiens
gacacctatcctcagttgaggactgacctccattgttgctgcaaagcagaggtcgcaacccgcagggtggttggttggggtggccaatgtgtcccttttttggtccatccacatagggttgc

SEQ ID NO: 261579 - DNA, 122 bp, Homo sapiens
tttaatttaattaaagaatttatcccccaaataggaaagaaagcagcggagcggctaaagcgtcatttgatttttctgtcgatgacttgagttgcctttgaagggggtgaatacattgcagg

SEQ ID NO: 261580 - DNA, 122 bp, Homo sapiens
agagttctgtttgctaagcttcctactcctgtttcagagacaccactgaatacagagcagcgagcactgaaggcttccctctttccttaaacctgtcgggttgtgggctctctcttttcccc

SEQ ID NO: 261581 - DNA, 122 bp, Homo sapiens
ccaaagaccacctccctccctccctcccgacctctgacccctgaccttccatcacccaagcgcctacccaagctggttctccgagcctcttgagtctgtttgcaccaggcctgcgctcctct

SEQ ID NO: 261582 - DNA, 122 bp, Homo sapiens
gtacaggggcataaaaacaggcatggggtaggagtcacaagctggatgtgaccctccccccgccgacccggcacatacatatgtttgtcctataccgtcttttttactgtttttaaaatttg

SEQ ID NO: 261583 - DNA, 122 bp, Homo sapiens
gttcatctcactagggagtgccagacagtgggcgcacgacagcgggtgcagcgcaccatgcgcgagccgaaggagggtgaggcattgcctcactcgggaagtgcaaggggtcagggagttcc

SEQ ID NO: 261584 - DNA, 122 bp, Homo sapiens
acagacaggaacattcttccctagatgaaggtgcatctctcctgcagggtgccagccagtcgccatgagagctcagtccactcctttgagtctctcctgggagcctccagaccagtgccctg

SEQ ID NO: 261585 - DNA, 122 bp, Homo sapiens
gtaagttttgtctttagtggtggtaacgtgctcattcatcgtagttcgttgctcatgccacgtggtcattgtctcatgcttatgggcacctctctttagtgacacccacctattggggggag

SEQ ID NO: 261586 - DNA, 122 bp, Homo sapiens
tctttccctccccaaatgcagtcatttagcatcttcctctttcagagtcctgtatcccagcgatggggatcaagattcagacttaaggacaccctacctggaccttggcaaggagattttta

SEQ ID NO: 261587 - DNA, 122 bp, Homo sapiens
tcaatacttcggtaggttttgttctggacatgaacacgtagctatgtatatctacctcaccgatttttaaaaatggggccacactaggccaggtgcagtggctcatgcctgtaatcccagca

SEQ ID NO: 261588 - DNA, 122 bp, Homo sapiens
aagccggagttggcgagtttctcgcacttgaccttgtaggcgtctctctcgcgggccagccgggacacctcctgcttaagctgctccacctgctgaatgagctgcgtcttctcattctccag

SEQ ID NO: 261589 - DNA, 122 bp, Homo sapiens
gccgggtccttcctctaacccaagtgcaggcagagcccccggagccatggccagcccttccggcagctccaaagccacaggcaagccccgaggctgggatggccggcccaggagggaggagg

SEQ ID NO: 261590 - DNA, 122 bp, Homo sapiens
gcagtcaggtacatacacccctttgcaagaaggcattctcaaaaccttccactagaggcacgtgtgagcacctttgctagaaagctttggtcggctagccttccagagcagaaaaaactggg

SEQ ID NO: 261591 - DNA, 122 bp, Homo sapiens
tggaggtcccccccacccatgcccacacctctctccctctctctccacagagggagataacgctgtgctgcagtgcctcaaggggacctcagatggccccactcagcagctgacctggtctc

SEQ ID NO: 261592 - DNA, 122 bp, Homo sapiens
gtgctcccttggggttccaggaacccagcgccttccctcacctcatcctttttcctgccccgcctgtgctcagctgcggctcagtgggcctgaactccggagcccacagaatctggcgctgg

SEQ ID NO: 261593 - DNA, 122 bp, Homo sapiens
cgccaggggcggagtccgggccatggacggagagatgtgccagcaagggactcagcgagacggcgacacaaatgtgccgacaaacatatacagagacagacagagataacccaggcaaaggc

SEQ ID NO: 261594 - DNA, 122 bp, Homo sapiens
gtggtggtgaaccgggggacacgtgccctttcccgaggggccgccagtccccgttggtgccgagcccaaacgtaggcccccggctgacagagcttcccgcttgttacgaggagcagacgatc

SEQ ID NO: 261595 - DNA, 122 bp, Homo sapiens
ccatgagggcaggaatttttgtcgtcttgttcacagttgtattctcaacgcctaaaacagcgcttgcaatagtatgtgctggattaaaaattagctgactgaatgaatatatgaatggatgc

SEQ ID NO: 261596 - DNA, 122 bp, Homo sapiens
gtggcctctctttcgtggctcactttctaaactttccagaaggcgcaaagtttctcccagcgccgccctgcactggaggctgcgaagaacgcagaagcggctttgctgctaggaaggtgcat

SEQ ID NO: 261597 - DNA, 122 bp, Homo sapiens
ggagaacgaaaccctggggtcgtctgaagaggagggccaggagtccccagggccagacagcgaagccccagagctgctgcggagctgaacaccgaggtccccaagccctccgcaaaggacgt

SEQ ID NO: 261598 - DNA, 122 bp, Homo sapiens
gcccgcctctttgcacttccgattggcgagaggatgcccccctttttcttgtccctacttcgaccgcggattggttccgaattagttggtacggccccctggcctgtagcgacaggtgattg

SEQ ID NO: 261599 - DNA, 122 bp, Homo sapiens
gctcgtcgcctgcgtgccctagtggagtggagcacccgagtgcctgggcctggtgtcacccgcgtggctgtcatacctgctgctgtgacaggcaggaccaggaattcccgcttgtaccaggc

SEQ ID NO: 261600 - DNA, 122 bp, Homo sapiens
ggttatggaacctctgagtcccgccaactctatggtcgagcgtttcagggatcggccaatcgtaatccagatctcgtaggaaagccccgcctctatccgcatggaggcgggaattgccacga

SEQ ID NO: 261601 - DNA, 122 bp, Homo sapiens
cccttccccccaccccccaatatgaagtcgcaaatgaaagcccagtgtggttggagtgtgcgtttgagggaagggaagggtgcagggcagggcatggacctggctccctctccgtagcccca

SEQ ID NO: 261602 - DNA, 122 bp, Homo sapiens
gctttgatgttcctttcaatgttaacaaaatctctggccttgttccctgctcagatacaacggcggctggagattggatgcccacataaataacctcctcacacagtgacatacgggatcga

SEQ ID NO: 261603 - DNA, 122 bp, Homo sapiens
tgtgcagctccccggctctaaagcactcacttgtctaacccgattctcaccctacaagaccgcaaccggccatcacttctgccctccgccaggacaccgaggccagctgtgtcactgccccg

SEQ ID NO: 261604 - DNA, 122 bp, Homo sapiens
gattaaggaaatgaagaaatgtttcattcttagagcctttcaagtgatatgagacttgtccgatgaaggtgaggctcgaaattcagggacaaaaagttgaatgatgaggagtctgaccagtt

SEQ ID NO: 261605 - DNA, 122 bp, Homo sapiens
cgggcctcccgcctgctccctgccagcgcagcgccgcgggccagcgccattctggggctacgagccagccagcgtgcaggctggaggcagccctgcccccggctccacctgccccctccatg

SEQ ID NO: 261606 - DNA, 122 bp, Homo sapiens
taatggctttgaaatcaggggaaggagaggccctgctcatttcaaggtgttattctccaacgagtgactaacagggaaggtatgtgactcttggggcatccctgcaggtacagtgaatgagc

SEQ ID NO: 261607 - DNA, 122 bp, Homo sapiens
aaaatctccgaaacaaaacctgaattcactgcctaaggtcagggcctttcttttgtgtgtcgctttaagcatcggcgcgtgggctgggggcagaccgcgcgtacccgccctctttctggggc

SEQ ID NO: 261608 - DNA, 122 bp, Homo sapiens
gcctgcgtgcgcgggttccctgccaccctggcctggatgcctggaccttcgattctgacacgaaatctgaatcctggactccaaaaggcaggtctctctggcctgttcgggtacgggttccg

SEQ ID NO: 261609 - DNA, 122 bp, Homo sapiens
cagcaataaaaacatggccctttctccccgctctcgggcggttaattttaacccgcagatcgcagtttcagcggactaacattcctcgcagaccaagcctcgtctctgccttcttaggattc

SEQ ID NO: 261610 - DNA, 122 bp, Homo sapiens
gagctgggggattttcctgggaatgatttgagggctcttgaaagcccatgtgttccaaagcgtctttaactctgggatagcattggaagccgctgtcatgacaggacatggcactggatggc

SEQ ID NO: 261611 - DNA, 122 bp, Homo sapiens
gatgtagttataaatgataacggcttctttgtggttaaactaacaacccagccacctgggcgtgaagtgctctaaggagccaaacaggactacagttaaaacaaatctgttagcagtgccct

SEQ ID NO: 261612 - DNA, 122 bp, Homo sapiens
cattcggagaagagcacaatgaaaactccactactcttccaactcctgactgacgggagccgttcatgtattccttcttggctatttctagtttacaagcactcagcttaactggcaacact

SEQ ID NO: 261613 - DNA, 122 bp, Homo sapiens
agcctctcctttcctgctccctcgctttccttcttctcgcggcagtctaggaaactcgcgcgcagggtctattacgaaaacaagtgattcgtcttaaaagcattttaccccctcctaggttt

SEQ ID NO: 261614 - DNA, 122 bp, Homo sapiens
tttgtgagaacattggaatcacaaagtggcccatggcggagaatgcagccagaacaaaggcgccctctccccgccgggcccggggaatactaactagttgacaggaattttaatataaaact

SEQ ID NO: 261615 - DNA, 122 bp, Homo sapiens
atccgcccgggctgtgggtccgcgactccttggcgtccccgggccgcagctgcggtacgacgctgacacccctctgtgaattgggcgaagcgtggagatcccttgtccctcgcgctatctcc

SEQ ID NO: 261616 - DNA, 122 bp, Homo sapiens
cttccttgcagccaggtgaatcctgaggttcctggactattaggttggtgcaaaagtcatcgcgattttttgccactacattgcaattacttttgcaccaaccaaatacttcctgtcccagc

SEQ ID NO: 261617 - DNA, 122 bp, Homo sapiens
gttgaaaatccagtcacccagccaaggattccatttcctaccatctcttgcattgttgtgcgactaggtcatcacctatgggatgtgagccaatgtcctgacgttaaaaggggtggaagatg

SEQ ID NO: 261618 - DNA, 122 bp, Homo sapiens
gggcatcgtgtggcggcccgggccgctcaaggctggcgcgctgagcgcccacctgcccctcgtggtgttcctggtcttctcggtgcgcagcccctcgtgggtgctcaacttcctgctgcaga

SEQ ID NO: 261619 - DNA, 122 bp, Homo sapiens
tctccatgtgtgaattccattaaaggcttgctcactgctattttgggccatgcattaatacgtgggctttgatttgatgggagaaggccagacacggcaggatgatgaaaaagaaatttaaa

SEQ ID NO: 261620 - DNA, 122 bp, Homo sapiens
gtttggaggacatcgaccacacacaccaatcagcccagcagtggacgattgtaccaccatcgtcttctatctgaaattgttacagcgcttctctggtcacccccatcggcctcaaagccaaa

SEQ ID NO: 261621 - DNA, 122 bp, Homo sapiens
agctaacttcttggcaaatttcaagtctgcaatattattaactgtagtcacattgttgtacgtagttctccagaccttatttaccttacataacagacctcgctcataccctttgaccaaca

SEQ ID NO: 261622 - DNA, 122 bp, Homo sapiens
ctttgcccatagtaggcactcaataaatattcattgatatttttccctgcattttacaatcgagtcataaaagcccatatttggcttctgtttttctggccagagggccattcactgcatta

SEQ ID NO: 261623 - DNA, 122 bp, Homo sapiens
gctccctaccctgcagtaacggtcatctgtgccgcccctggtgcggacggggcctggtggcgagcccaagtggttgcctcctacgaggagaccaacgaagtggagattcgatacgtggacta

SEQ ID NO: 261624 - DNA, 122 bp, Homo sapiens
cgtgcccggccctaacaatattattatataacaagattactttccaaaaatttaacaaatcgttttgtatattgagattttttgcttttagagagcagacaaaatggctatgaggcagtgta

SEQ ID NO: 261625 - DNA, 122 bp, Homo sapiens
tattacatcaacaaggatgtagccgaaatgctgccattgatacttctgcacttagcaacacgttccaggtcaccatggtggtctgaggcctccaggctatcattccttacagcagcccatta

SEQ ID NO: 261626 - DNA, 122 bp, Homo sapiens
caactgcttgccaatttaaatttctggagagaaaaatgcacccactacaaaacggacgagcggagggttagacctttgccaggtagcgctcaaaatccgctaagactactcccaccgaaact

SEQ ID NO: 261627 - DNA, 122 bp, Homo sapiens
tcccggctgcgtctccaggcccgactccggcctcccaacaacctctttggactcagctcccgcccaactcccggtggccctggttggcccacaacttcctgaagccaagctccccaggccca

SEQ ID NO: 261628 - DNA, 122 bp, Homo sapiens
gaaggtgagaacaggaagggatgggggaagggtgttgggcagaggtagccacgcgtgcaacgccccggagtagcaacactttccgctcagccggctgccttggcccgctgggtatttggtct

SEQ ID NO: 261629 - DNA, 122 bp, Homo sapiens
ggcgggtgggcactcacgtggagttggcgtactgcaggaagccgaactcgtctcgctggccgtccgggcacagcgattgcatgacaggcaggatgccggcagacgtcaggggcgccgctgtg

SEQ ID NO: 261630 - DNA, 122 bp, Homo sapiens
catgcacacacccacacatgctcatagtcagacagcactgcatccctcacttccatgttacgacactttaatcaagttcacaagctcctccacaaccttggccagtcttccagagcctcatg

SEQ ID NO: 261631 - DNA, 122 bp, Homo sapiens
ggagtgaatcacagacttgcacaagccttgaaactgtgggtaactttacagttctcagatcggcttctcgcaacaggcagtcagttctcactgggccccttggactcccatttcaaaaatgg

SEQ ID NO: 261632 - DNA, 122 bp, Homo sapiens
tcggagagaatggggtgagcagccaccattcccaccagctggcccggccactctgaattgcgccttccgagcacacataaaagcacaaagacagagacgcagagagagagagagagccacgg

SEQ ID NO: 261633 - DNA, 122 bp, Homo sapiens
cagcacgccggcccttcatcttttatagggctcaggtgggctcctggaacatgctggagtcggcggctcaccccggatggttcatctgcacctcctgcaattgtaatgagcctgttggggtg

SEQ ID NO: 261634 - DNA, 122 bp, Homo sapiens
caagcgcaactaaaatccagggcttgtcgcaggcacaggctcctccttcggtgggtgggacggcggcgcgcactttctctacgccccactgctaggatgtgcggccaccactcctcctccgc

SEQ ID NO: 261635 - DNA, 122 bp, Homo sapiens
ttaattctggacacaaacagttcccaccatgaagagagagtaggtgaccggaaaggagtgcgtcttaagcgcgttcgctgaatttgcaccacccaatccagccccgccgcccggcgccgctc

SEQ ID NO: 261636 - DNA, 122 bp, Homo sapiens
cggggaggcgggtcccgcgctgaccctccagggtccggccggcggctcggggcgcccgaacgctccacccgcccctggaactcctgtaggtgcaggtcgccaactgtccccgcggcgctcgg

SEQ ID NO: 261637 - DNA, 122 bp, Homo sapiens
gtttcaggtatttctttatagcagtgcgagaagggactaatgcaaatgtttacaacagtgcgcaaatatttataacagtgcttgggctgtcacctcagacacacttggtggagccttgcagg

SEQ ID NO: 261638 - DNA, 122 bp, Homo sapiens
ccctcctgtgaagtgtggcggtcagccaggtgtaagtggcaccccttcgagctgggaggccggagaaatggggaaacagggcgtttggacaggagcccaacttttctgtcggcctgggtgga

SEQ ID NO: 261639 - DNA, 122 bp, Homo sapiens
caatgatagccccagacttgtcctgaaagcagaacactggcaggtcaggaaacttccctccgaacagtcaaccgttgcttacactggggctgagtcacccgacaggaagttcctacaaacct

SEQ ID NO: 261640 - DNA, 122 bp, Homo sapiens
gcggggaagtcacctaatgagggtcacacagccttgctacagcggaggcagctgggattccggcctcgcacgcccgagctttagccactgtgcggcgctgtcggggcagcagcccaggcatc

SEQ ID NO: 261641 - DNA, 122 bp, Homo sapiens
tctggtttttgaagccaccgccttgcaggagaagcctttcctgcactccaggccgtgagtcgcgctcacttcatgttccccacagcccccaaatgccaaaggctcctctaggtccctggcgc

SEQ ID NO: 261642 - DNA, 122 bp, Homo sapiens
gctccggtgtgggagggtggctcccctgggagccaggcggccgaggagctcgtgattcgacgcccgccgcggcgtctccgccccgcgcggcccaggccgcggcctccctgccctccctgccg

SEQ ID NO: 261643 - DNA, 122 bp, Homo sapiens
ttgatatttttaccccctttcagttttgttaatggtcccaagaacccagttcccaggcaccggtttttcttctataggaaagccttacagaatgatttttattgccctgtgtggacaagtac

SEQ ID NO: 261644 - DNA, 122 bp, Homo sapiens
cctcttccgccccaggtcactctactcgcccacgctgcctgccacacccatccggttgtgcgggacactccccgcgtttcttcagcgattcttatcgggctccctccttgttcaataaaggt

SEQ ID NO: 261645 - DNA, 122 bp, Homo sapiens
tgcatggctaattctgaaatttttctgtagagatgggagtcttgctatgttgaccagtctcgttttaagctcctggcttcaagtgatcctcctatctcggcctgggattacaggtgtgaact

SEQ ID NO: 261646 - DNA, 122 bp, Homo sapiens
acggtccgcggtccctccccggctccgccgtcgcagcggggctcggccctgcccctccgccgttacctgctgccgggggcggcttcccccacacaccaccccgtgctccggggacggcggcg

SEQ ID NO: 261647 - DNA, 122 bp, Homo sapiens
tgggactctggactgggagcgagggctgagactaaagtcgccacatcaggctgcttgttccgttcactcagcaaatatttatagctaatctaaccagtttcagatatcgttcaagaggtggg

SEQ ID NO: 261648 - DNA, 122 bp, Homo sapiens
gtcgcggcggcgcctccaggtccagctccctgcccttcactacctcccaaatcgtttaagcggttatggctacaggatagtggggtttctcggctgaccagaggttactccgcctcctcctc

SEQ ID NO: 261649 - DNA, 122 bp, Homo sapiens
gcatggtttgagactgggcgggagattcaggcaggctccgagggcacagcgagtggaatccgctcagctcagtgaacctgaagttgttcattgcggagccggtgccgggtggaagaattcaa

SEQ ID NO: 261650 - DNA, 122 bp, Homo sapiens
ctgatggtcccaggggcagctgaagacctgatggatcacattaccctccaggcttgtctccggccttgaggccagcccagccctgcagccttcgaggcccccatactggcctctcccatact

SEQ ID NO: 261651 - DNA, 122 bp, Homo sapiens
tagagctttgtacattcccaagagaggttcccattttcagtgaaacaaggtggggagccccgaggcccgcaaaggctcatgaccagcagtagacgtgcagtgaattggtgtgggctggctag

SEQ ID NO: 261652 - DNA, 122 bp, Homo sapiens
ataacagggtgcagaggtgtctgggtactggtattttttcccccaaggagggtcggaggtcgctggactttgggaaactgtgcaggagtgggtaggggacaatgcccgctcccaacacagcc

SEQ ID NO: 261653 - DNA, 122 bp, Homo sapiens
cggggaaccggcaggaccgcaactcgggccgtcgtgccccggaacccgcgctgggagcctcggcatccccagcccgggaccttcggaggaccctggcccctgcccaccctcgttgccgatcc

SEQ ID NO: 261654 - DNA, 122 bp, Homo sapiens
cagaccagccacgaacaactaaataccacagtgtcatcctgcagaataaagaatccctgacggataaagtcatcctggacgtgggctgtgggactgggatcatcagtctcttctgtgcacac

SEQ ID NO: 261655 - DNA, 122 bp, Homo sapiens
cttaaagtgagcgggaatttgagggcagtttgacgtcatggtgaatttcacctctcagtccggcctggttttgaaccctcgccccactccacccctggtttcacgatttggcggaaagggtc

SEQ ID NO: 261656 - DNA, 122 bp, Homo sapiens
gcaccatgtctctcgggggccccttctggggaggaagcaagagtggggggctctaatatccgtcaaacaccgacttcgcatgaggctcccgcagcccctgctctcgctgcgtagtggcgtct

SEQ ID NO: 261657 - DNA, 122 bp, Homo sapiens
ccttcctgactttagacggcacatctaaaagcccccacgacaacatctgacacaacgtaacgagattgtagcgctgtctaagaaacaaccctgcaaagcagccacaaactaggctctcatcc

SEQ ID NO: 261658 - DNA, 122 bp, Homo sapiens
aatgcacacacaatcacctaattaactgaactcttaccacagaagcactgtttttaaggacgtttcaccacctcacagggaggccaatatcgacaacactcagtacagtcttctttttagtt

SEQ ID NO: 261659 - DNA, 122 bp, Homo sapiens
ctgacgaccatcaccgttcagctggagtagagagggctctgctcgcttcagatccggacgcgcaggtcctctgcaggccccgcccacccggcgtcacctgcaggtcccgcccacccggcgtc

SEQ ID NO: 261660 - DNA, 122 bp, Homo sapiens
tctggtggatgtaagtcagtgccaccccacccacatcccccttccccacctgccttgccacgtctgtggatctttagagtagtttcatgcatatgaaatactttgaagtaccaaaaaaaaaa

SEQ ID NO: 261661 - DNA, 122 bp, Homo sapiens
tcagccgtggacctgtggggagccccgactaccatcgcccctcgcagtccccacccggagcggcccagtggcgccccctgtgtcctctgcacgcgtcaggacactcaccgcgtagtgcagct

SEQ ID NO: 261662 - DNA, 122 bp, Homo sapiens
tggtcccggcgctccccgcgcaaacggaccccggccgcagcgccctccgccccaccctggcggccccagcagcccctgcacccccgaactcgcgcgccggctccccggctcacgcagctggc

SEQ ID NO: 261663 - DNA, 122 bp, Homo sapiens
tcagcatggattattttccagaagaaagagagaaaaagaatgggaaaggactgtggctgacgtgagagagccagaatctatgttttcagtggaattacaatatgaattgcaaggaatgcaaa

SEQ ID NO: 261664 - DNA, 122 bp, Homo sapiens
ccctgatcgtcgcgacggtgctcctgattggctgcgctgtgtgacgtaacgggagggccccggcggccgccgggagccggggcccagcgcgtgcgcagacggagcgcgctgagcggaggggg

SEQ ID NO: 261665 - DNA, 122 bp, Homo sapiens
tggaggagggccccactcaggctggaaattagcccttattggagaaggtgtgtttgcagccgactgggtggtgtcacaggctggaactggtttacaagaagccatctgctgggggtccagtg

SEQ ID NO: 261666 - DNA, 122 bp, Homo sapiens
tggagcaagctctggacagggctctggtatgggttctggcgaagcctcggagagcagcggcggagccggcggcggagccggtggtggtggcggcggcggccaaggcggcggaggctctggag

SEQ ID NO: 261667 - DNA, 122 bp, Homo sapiens
aatactttgaggttattagaatggttagacttttctaggagaacataagcaggtttctgacgaagactatggatgtggcagattgtttattccagggacattactcttacaatagtgctcta

SEQ ID NO: 261668 - DNA, 122 bp, Homo sapiens
gggctgggcacagccctgggctcacccacacgctggggtgggcacgcatgcgtgatctcccgtgctggctcccaggagggctgtgcacgcgggggcacctataactctacaagcccatgtgt

SEQ ID NO: 261669 - DNA, 122 bp, Homo sapiens
tgccatacccgctaatgctcctcgaggtgcaggagcaggttgctgagccagtggctgccccgtgccctccttcccagcactatcatgtgtcacgtttcccggactctgcccctacatctcag

SEQ ID NO: 261670 - DNA, 122 bp, Homo sapiens
cccgccccccccccgcactccccacctttcctcccctttggctgaggctttttcccccgtcgctggctctgcccgaagtttctagagttttctgaccttcaaggcgagaactgctgtgtcat

SEQ ID NO: 261671 - DNA, 122 bp, Homo sapiens
aaggtagtactggattatttggggttctctatctgggtgagggcttcctcattccttcctcgggggtctcaccttgcctcctcacagagcccgggcccattcccctctgctgatctcagtcg

SEQ ID NO: 261672 - DNA, 122 bp, Homo sapiens
ccgctctagctctcaccctgcgcggcctaacgggcaccgcggcccagccaggggaggcggcgccggggctgtgaggggaaatgcagaagcttgtggaagccccatcccctccgctgcttagc

SEQ ID NO: 261673 - DNA, 122 bp, Homo sapiens
gggcgcctggtacaagtcggggtaaccctgaggcttgtgcatccagagaagctaggtccccggtggagactagcttgggataaggttggggagacgccctccgttcttctagatgcctgggg

SEQ ID NO: 261674 - DNA, 122 bp, Homo sapiens
ctaaaactcaaggcaggtggtgaactccagggaatgaatctcatagatcttagccagtcacggtcattcagttcccccttgctattgtttgttctaacatttggcaggggggccaatttctg

SEQ ID NO: 261675 - DNA, 122 bp, Homo sapiens
gattggcccaggtccccttcggagctttctattggtcctgggtaccgagcatgggcgctgcgtcagtgcgcgctggcgcaaggttggtggaagtcgcgttgtgcaggttcgtgcccggctgg

SEQ ID NO: 261676 - DNA, 122 bp, Homo sapiens
tcgaggctccctggtggaaggctggtgccactgcgcgagtgagtaatcgcagccaggcaccggggaaaggggaacgcagagggcctcccagtggctgaagaggtaaatcccaagccctgcgc

SEQ ID NO: 261677 - DNA, 122 bp, Homo sapiens
agtcatgaattttgccatcctgcctcttttgcgcattggagggtgcagtaaactgtatatcgccattcattctaggcgattactaagctccacattaaaatgttactttctcatttttcttt

SEQ ID NO: 261678 - DNA, 122 bp, Homo sapiens
actgcaaacctgatggtctcacccttcagctcaagcccctcagtggctcttactgttcttcgggtaaagttcttacccaggctctgggtaaagctcttacccaaggccaggtccccttgctg

SEQ ID NO: 261679 - DNA, 122 bp, Homo sapiens
gaggggaagagggggtggaggaggcaggccagttccgagtggcaggtgcccggcccacgccgcctcaggttaagtagggcgcacggagccaggcactgccactgagaggcgccagacctcac

SEQ ID NO: 261680 - DNA, 122 bp, Homo sapiens
cctcccccgccccagcgccggccccgcccgccgggtgcccgacagtaaccccgaggcgtgcggcagccccagctgtcttcaacgtagccatctggaagacaaaaaccagaaaatgtgcgcct

SEQ ID NO: 261681 - DNA, 122 bp, Homo sapiens
cagaccacccctgggaagggctcatcgtgcagtgtctgtgctctggccccccactccccacggatgccctcgtgggccagctatccccaggcacagcgagacagcgacgtcaaagaacacca

SEQ ID NO: 261682 - DNA, 122 bp, Homo sapiens
aacgccggctgtatcacccgggcgccggcgccgcctctcatccccgtagctctcggggcgcgccgggagtagccgagccgctgggtgctgggcggggtctccgggcgcggcgcggggggaag

SEQ ID NO: 261683 - DNA, 122 bp, Homo sapiens
gggagaaactgtcccaaaagcaggagaggaatgggtgggatgagggtggaaattcggattcggattcaagagcagattctgaattgttcatatgtgaaaagagacactgtggctgggaggag

SEQ ID NO: 261684 - DNA, 122 bp, Homo sapiens
gacccgggcgccctgctagggtgaaggcccctgccctcggcccgggatcatgaaaggcctcggtgacagccgcccccgccacctctccgacagcctagacccaccccacgagcccctgtttg

SEQ ID NO: 261685 - DNA, 122 bp, Homo sapiens
ttttccgttagacatcggggaggtgacccatcaatagaaaggagcccttcaggttccaggcgaataaccagcctgccatggaggctgccaatgagtcttcagagggaatctcattcgtttta

SEQ ID NO: 261686 - DNA, 122 bp, Homo sapiens
ggtggtgcaggaggaagtggggagtcacccaggaaccccgtgggacatggctcattgagacgcaggagggggagcctgggacagggcaggggttagaggtggagagattcatcccaacttac

SEQ ID NO: 261687 - DNA, 122 bp, Homo sapiens
cctcggcgggagtgattattttctcaggtgtttgcaacagtgttctaactattaacgctacgatgcctgaacctaccaagtctgctcctgccccaaagaagggctccaagaaggcggtgact

SEQ ID NO: 261688 - DNA, 122 bp, Homo sapiens
tgacaaggcccaacggtcaaaaccgcctcagtaatgcgctcgtccaaagcacgcacttaacgctcaatcctggtgtcgcgtcccgttgccaggcaacgaaagcaagcgctgcaaagacgaag

SEQ ID NO: 261689 - DNA, 122 bp, Homo sapiens
tggaaggcgcgtgggactgaagccttgaagaccccgcaggcgcctctcctggacagacctcgtgcaggcgcctctcctggaccgacctcgtgcaggcgccgcgctggaccgacctcgtgcag

SEQ ID NO: 261690 - DNA, 122 bp, Homo sapiens
cgcccgagcccgcaatgtcgggccccaacggagacctggggatgccggtggaggcgggagcggaaggcgaggaggacggcttcggggaagcaggtgacccgagggggctgctggagcaacct

SEQ ID NO: 261691 - DNA, 122 bp, Homo sapiens
gagaggagtaggccgagctccggcggccactccgcagtgcgctctcgcgagccggggccgcgaggcctccaacgcggttccgcacccctaatgccccagggcggtgagcaccccgcggttcc

SEQ ID NO: 261692 - DNA, 122 bp, Homo sapiens
tttgaattccgcctgatccaaccttaatgcccccatttattaaggacaatatttaaaactcggcaagccaggagaggcaaccgaccctcagtgcttgaagctttctttcgcctgggcgtccg

SEQ ID NO: 261693 - DNA, 122 bp, Homo sapiens
gcccaggagacaagatgggttgcatgggtcacagtagcaggaggagccgagcggtggggccgggactcagggacgacggcagggcccgaactccatctgtcctgtgttcacgtacacagtgc

SEQ ID NO: 261694 - DNA, 122 bp, Homo sapiens
aatgccgggatgcccggatgagctctgaaaatactttctgcttggcacaaaagaagctgtcgaggaagttttcgtgttttgatttctttcccgctccctgactatattttagatgaaccctt

SEQ ID NO: 261695 - DNA, 122 bp, Homo sapiens
agagagagtgtcttcattctttccgccatcttgattctttctcactgaccaagactcagccggtaggtctgcagaacggtgttactgggaatttagttgtgagagaatgtgtggaggagcca

SEQ ID NO: 261696 - DNA, 122 bp, Homo sapiens
gcctcagagaccctgacgcttctcagtttcctgcgctcagacctttcagagctgagggtccgaaaacctggtgggagctccggggaccgtggaagcaaccccctagatggcagagactcacc

SEQ ID NO: 261697 - DNA, 122 bp, Homo sapiens
tggggacggcgggcttggcatttgtcgagatgcaccgtcagggcaaaggaggacgaaaagcgcatctactgcctgcctagcaacttcgtggccagtggatgggttagaaaattactgttttc

SEQ ID NO: 261698 - DNA, 122 bp, Homo sapiens
tgtacttttctgctagtatctgtgccctggaaaacatcggagccacttaagcctcataaacgcgatgctggtaaacatgtataaggggcacacagcttgccacctttgctgggttgagtgaa

SEQ ID NO: 261699 - DNA, 122 bp, Homo sapiens
gagaccgtctgggtttgtgtaagtcaactccaagacgttcacacagtgacaaaatcgcctcgtcatgcatttctcagagtgtgtccctgtcgctaagcgatgtgtgactgtttatatctgtg

SEQ ID NO: 261700 - DNA, 122 bp, Homo sapiens
aattcagtctctttttgagaattctgcccgctgcctcgtgtattctgaaggctttcttctcggctgtgtgagttctaagagtcactccattgaccatttccgaggtttccttcctgcccctc

SEQ ID NO: 261701 - DNA, 122 bp, Homo sapiens
catattctattgcacaagagcatagccttcttactatcttggggacagataaacctggcccgctgcggggagccttgattttaatattatccaacagttagatcttttctccaaacagaagg

SEQ ID NO: 261702 - DNA, 122 bp, Homo sapiens
ggcatctacctgaccaacaggtacatgagcatcagcctggtcacggccatcgccgtggaccgctatgtggccgtgcggcacccgctgcgtgcccgcgggctgcggtcccccaggcaggctgc

SEQ ID NO: 261703 - DNA, 122 bp, Homo sapiens
tgccctcctttctagtgggagcagtggagggattagattaactcaaatgaaatctgggaccgccatgccatctgcatgttcagtaggaaacggtacacgttaaatggtgagtgggtagatat

SEQ ID NO: 261704 - DNA, 122 bp, Homo sapiens
ttaagaagagtgtgcctacaaggcggttgtcacggcaacgagagggcgggattgttcgagcgctgcggccccctcacgtgatcgattcggaggcggggcgtccgcccagtgggcggggccgg

SEQ ID NO: 261705 - DNA, 122 bp, Homo sapiens
caccgcctccggcaagctcgtccattgtgtgtggggccccggccggggcgcagggcgagacgccgacagctgggggaagggccggagagggtggccccgcgctggctgcggggcggaggccg

SEQ ID NO: 261706 - DNA, 122 bp, Homo sapiens
atgaagcttccattcaggctgctcgcaatgcccaggcccaacctcgaattaatataactgcgcaccagcttttgggggtcggcggctgggctgctttagatgcacaactcatcatgccggat

SEQ ID NO: 261707 - DNA, 122 bp, Homo sapiens
agggaggagaaggcagtctcggaggaaccagctgaccatctcaggtgccgcttggggcagcgtccattctttgtgtcctattttgtatttttaaacccggacaatcttcggccgaaaacccc

SEQ ID NO: 261708 - DNA, 122 bp, Homo sapiens
cactagccccaagcccaggcctgcctgcagctgtggcccccatcctctcagaggctgagccgggccaccgtcctcagcaccttgtctgtgaagccagaagccagaagccctgtggcagctga

SEQ ID NO: 261709 - DNA, 122 bp, Homo sapiens
tgttccttctgatgtttggatgtgttctgaatttcttccttctggtggggttcatggtctcgatggctcaggagtgaagctgcggaccttcgcggtgagtgttacagctcttaaggcggcgc

SEQ ID NO: 261710 - DNA, 122 bp, Homo sapiens
tggcttagctgaaggaaatgctccagaaattggactgtgtaaaccatcagtacaataatacgctgtgtatgtatgtgtatataaaatgagaattatggcataattggagcatttgcattaat

SEQ ID NO: 261711 - DNA, 122 bp, Homo sapiens
ggctcaggaatttggggtgcaaggcccgctgcggggaggcgcggggggcggggctgcggccgggcctggagcctctcgcgctctcccccctccccggctcctgggtggggagggggcttccg

SEQ ID NO: 261712 - DNA, 122 bp, Homo sapiens
caattcttgacccattttacagattaggaaacatgagtttccagagtttattggcactcacgtggctgttacatcgttttgatgttcaaacgacctactttattcaaagtcaggtagtacag

SEQ ID NO: 261713 - DNA, 122 bp, Homo sapiens
tgccggctcggggagagggtgcaagagcaaccctctttgtgaaacggggccgcgactccacgagtcctgtctctacggaccctactccctgtgattccggaagcacctccctaccccttccc

SEQ ID NO: 261714 - DNA, 122 bp, Homo sapiens
cgtcctttaaaggaaaggtgatgggcggagccacgtttttctactgttgggattcagttccgccgacagaaaatgcggagaacgcggaggaagtccctgaggggaaattgctgctcacctgg

SEQ ID NO: 261715 - DNA, 122 bp, Homo sapiens
tgagaccagcctggccaacatggtgaaaccttgtctccactaataatacaaaaaattacccgggcatggtggtgcatgcctgtaatcccggctacttgggaggctgagggaggagaatcgct

SEQ ID NO: 261716 - DNA, 122 bp, Homo sapiens
ggcatgctggtggaaattgggggaggaatgggtcaaattaatctccattcagcccccactcggtctttccaatgcctgctcagcaataagtgactcactgatggcttctgtgatgccacagc

SEQ ID NO: 261717 - DNA, 122 bp, Homo sapiens
tccctgcaccccttcccttctgggagatccattctgcttcagggcctgggtccttgggggcggaagggggtgagacagggagttctggaggggctgcctgttagcgtccccttctcatggct

SEQ ID NO: 261718 - DNA, 122 bp, Homo sapiens
ttttatcctatatatatagcagcactgtacatagggtgcatgcgttcctcctcttactttcgggaaggccctactctgtctaaggagtagctgtcctttcaccattttactttcttaataaa

SEQ ID NO: 261719 - DNA, 122 bp, Homo sapiens
gtttctgtaacgctctcagttggatacaatgctaaccagcatccccactgtgcacagatacgtaaatgctagaagctgcagaaaaaattcattttattggaaactatttggcttcacttggc

SEQ ID NO: 261720 - DNA, 122 bp, Homo sapiens
atttgttccgtgtctggccagccctggagggttgacccctggtctcagtgctttccaattcgaactttttccaatcttaggtatctactttagagtcttctccaatgtccaaaaggctaggg

SEQ ID NO: 261721 - DNA, 122 bp, Homo sapiens
tgcctggataagtgatgtaatgacatttgtcgagttaagatctgccatttggatacccctcgctgcctttccatcactactgctcccgcatgtttctctctctctccctccctctctctctc

SEQ ID NO: 261722 - DNA, 122 bp, Homo sapiens
tgcgcaaaccgcgtttgtccaagggctgtgtgaaggcccccgcgcggagcagctggaacacgggctgatgaaattacggggaattcaaagcagccggcgtcgcccgctgtctggcttcatta

SEQ ID NO: 261723 - DNA, 122 bp, Homo sapiens
aaagcaggcatggcacccattcgattttccctgacagcatctgagatccttttggggagacgctgaggagtgtttgctgccatgtactcttacagctctatgctgacactcccatttgatgt

SEQ ID NO: 261724 - DNA, 122 bp, Homo sapiens
ccagctttttctgtgaagccccagagtaagtagggctggaagaatgtgcacgtgcatgcacgcgtgcacgcgcgcacacacagacacacacacacaaacaaaagactgtcacaccctgctct

SEQ ID NO: 261725 - DNA, 122 bp, Homo sapiens
ttgtccccacatctcccagaagtgaaggctgcttcatgtgcaatgtgtcgcgagagtaaacgcgcaggtgcccacgcttttcaaacatgggtcactgtggatggatgtttcgtgaagtatcc

SEQ ID NO: 261726 - DNA, 122 bp, Homo sapiens
ctctcgcccacgcaggaatggcgtgctcctggcggtgggggctgtgggacacctggtgcgcgtttctcccagcgcctccgtgtttctccctggccgcaggcacagcctggggtccctgttga

SEQ ID NO: 261727 - DNA, 122 bp, Homo sapiens
aacctttttagaaaaacaggcccagtgaccattcagcctctcattcgtagtcatcgttcgcggtcgtaactgctacttaccgagaggtgcttcgctgcgggcgtcgggctgggtgcgtcctt

SEQ ID NO: 261728 - DNA, 122 bp, Homo sapiens
ccaagactgtgagacctggccccaaaggttgtttttttctcttcttttcttttttcctcccgttagctactttggagtaggagtgggggttatatctggtttccctgttttcattctcaaca

SEQ ID NO: 261729 - DNA, 122 bp, Homo sapiens
gtagaaaggaaatgattctacagatacttagccatgggatggaaaaatatgtttctttcacgtagagtttgtgaataaagcttccactgtgctgagcaaaaaatgcaaaaggaagccttgtt

SEQ ID NO: 261730 - DNA, 122 bp, Homo sapiens
tgactttttttttttttggatacaaggtctggctgtgtcacctaggctggagtatagcggcgcgatccctgctcactgcagcctcaacctcctgggctcaagcgatcctccccgcctcagtt

SEQ ID NO: 261731 - DNA, 122 bp, Homo sapiens
tcctcggcttgtaggccctgcttggttgctccagctttttcagctgttccagagctcacccggagctattttcatccgtgggatcacgtggagggctgggactttccaggcttccttagtga

SEQ ID NO: 261732 - DNA, 122 bp, Homo sapiens
accccaggcgtcagagcaccaagccgcagagaacggaggcagcaggtgcccgggacacaccggggagaccgcaggagcagcccgtgtcttctgtggctcagtcccgcgagaaactggaggcc

SEQ ID NO: 261733 - DNA, 122 bp, Homo sapiens
tgtccatttcagtttctctcccttcaaggcaatgtcattttagatgttaggtgatgtagtcgtgttggatgctctggatttcagccagctaggtaggacctcagacaaatcacataagtggt

SEQ ID NO: 261734 - DNA, 122 bp, Homo sapiens
ttagcacgtgaggattgggcggccttcacatcagtcacgctgcctgctgcacccggcagccgcctacctgcctgcacagatgacattccgggaaacagctaagactggaaatcaattccccc

SEQ ID NO: 261735 - DNA, 122 bp, Homo sapiens
gactttcccctctttttatcctttaaggtcttgatttcccagttaaagatgttcttcacccgaatgcagtctttcctgttggtaaaataagacaaccatcaacattgcctgtttgtctgctt

SEQ ID NO: 261736 - DNA, 122 bp, Homo sapiens
acgtgtgcccctgaacttaaataaagggcgcctccgggggtcatctccgtcatcattagacggcacacctgccggaatcgaccgtgcccaaatcccagtgaatgaaacacatgataaactca

SEQ ID NO: 261737 - DNA, 122 bp, Homo sapiens
catcattcatcgagaggttgatttgcaaagcttttctctggacacatggagaagatgacacgctggccagccacagggaagcatgtcccgtgtctgccactcatataagctcttcaatatat

SEQ ID NO: 261738 - DNA, 122 bp, Homo sapiens
caggaaacgaagggcctgggacagctgcttctcttggtcctagaaaccaaactttcgtagcgagagaccctaagacagctcgagatttcaagtgtccacacttctagtttagacatttggca

SEQ ID NO: 261739 - DNA, 122 bp, Homo sapiens
taaacagcatgattgtaggcaattatggtttgggggtatgcctcctgtgctactgtgtgtcgggctgcttgctaacgctgtgcccacatgatcctttgcttgctaacgctgtgcccacatga

SEQ ID NO: 261740 - DNA, 122 bp, Homo sapiens
gaatgtggtggggcagtgggagataatgccctcatctaccaaaacaagatctgccaccttcgcagaccactaaacctcattcctccacccacctccccacccccatgaaggccaactgacca

SEQ ID NO: 261741 - DNA, 122 bp, Homo sapiens
ctggggtctgtctgggagccggggctcttccgcctggtgggctggggtctgtctgggggccggggcgcttccgcctggtgggctggggtctctctgggggccggggcgcttctgcctggtgg

SEQ ID NO: 261742 - DNA, 122 bp, Homo sapiens
aggtgatctgcccaccttggcctcccaaagtgctgggattacaggcatgagccacagcgccgagcctcaggtagttctttagagcagtgtgagaacggactaatatgaaaattggtaccaga

SEQ ID NO: 261743 - DNA, 122 bp, Homo sapiens
ccaaaaaaagaaaaagtgcctaatttcaaactaaaggaaagtccttgtggagcaggggagcgttgacaacaatacattcctgtgtgatgcaggctacatcttcctgctcctcgctttcccta

SEQ ID NO: 261744 - DNA, 122 bp, Homo sapiens
ccgagcccggctccgctacttccgccccgaagcagcagggcgctagcgcggaggcgagagcgggagaaagcgccgctagaattctcctcataaagatggcgacgccctggccgccgcgttcg

SEQ ID NO: 261745 - DNA, 122 bp, Homo sapiens
tgactagcttgtttcctgggacaggaatcagttcattcctgaaagggtatgtaaagagcccgtttgcctggcctaggaaaagccagaggttcagagagaggaagtgacttgctcaagatata

SEQ ID NO: 261746 - DNA, 122 bp, Homo sapiens
gaacgggccccgtggcacgctgggagttgtagtacgggctgcgtcgcggcggagaaccagcgagcccgtgatgctgaagcagaaggttctgctcattgaaggagaaaccgaggccgagcgag

SEQ ID NO: 261747 - DNA, 122 bp, Homo sapiens
cagagcgagctcctgcaggttaaccagtttctgaaacatgttttggtcaatgccccttagcgcattgtggtccaaaaacaactgctccaggagcaccatcttatccagcagcgcacctggaa

SEQ ID NO: 261748 - DNA, 122 bp, Homo sapiens
ccgcacccgctacggccgcttgaccccatctttgagcccggccccaagctctgggaccgtcgtgcccctcatcaaggaagagccaaggaccccaaggagaaggtcaggagcggcggtgtgga

SEQ ID NO: 261749 - DNA, 122 bp, Homo sapiens
taaaaacagaacttctagtgaaggagaaagacctgtgaaacacaaagcagtttatccatgcgttatcctgtttatatacagggtggtgacttgagctggtgactgaaaatgacccactttcc

SEQ ID NO: 261750 - DNA, 122 bp, Homo sapiens
ccgggcgggctggggaggcggaaagacttgtggcggcggctgtcaaagccaaaaggttttcgcttttccctgggatcgctgggaagtgtagtcttcccatggcaggcaatccggcttccggg

SEQ ID NO: 261751 - DNA, 122 bp, Homo sapiens
ataaattgcatgcggcatggccccagccatgaaggaacttaaccgctagtgccgaggacacgttaaacgaacaggatgggccgggcacggtggctcacgcctgtaatcccagcacactggga

SEQ ID NO: 261752 - DNA, 122 bp, Homo sapiens
tctacatcccaggtagggccgggaccgcaccgcccacgagggagctggagacagggccagcgccacacggagcccggcggcccctgtgagggagtcccacacccccagcagacggcgggctc

SEQ ID NO: 261753 - DNA, 122 bp, Homo sapiens
agtattaaaatgttaaaaataaactttaaaactgtgcttccggagggtgttctcccctcacgaggtttttgttctgatgcacaccaactccggaaggacttagtccaggctggactaaggca

SEQ ID NO: 261754 - DNA, 122 bp, Homo sapiens
gcccccgactcttcctcctgcacctactcctgtctctgtccagtgctccccactggcgcccggtgagctgaagacaagaaccaaagcaggcttgaaccccctcccgtgccttcccactgctc

SEQ ID NO: 261755 - DNA, 122 bp, Homo sapiens
agctaacttttctattttttgtgcataaggtttcaccatattacccatgctggttgagctcgaactcctgagctcaagtgatcctcctgccttgccctctttaagtgctgggtttattggtg

SEQ ID NO: 261756 - DNA, 122 bp, Homo sapiens
ttccgatggaggccaggcagtcaatattggaagatccatccagtgggtcaaagcagaccacgtatttcccctaaatcagagaggaaagcaccaactgatcagcacatcttcccattagcaca

SEQ ID NO: 261757 - DNA, 122 bp, Homo sapiens
gatggtgatgaagttctgagcacagtgcactgcacccagtgccgagagtccagtcagcgtcgatgctcctatctctatcctgggtatactaatgagagcaatggtagctgctctaatgaaca

SEQ ID NO: 261758 - DNA, 122 bp, Homo sapiens
cgcgtcggttaaacgccccctattagcattcacagtacatctagttgtgagtgcgacccccgggggacgcattcgtgtccagggcgtacgaaaaatagggcgagcgtgcgcaagcatggtgc

SEQ ID NO: 261759 - DNA, 122 bp, Homo sapiens
ctgggacgggggcgtttcccagcgctggttttctgctggcgtcccgaggtgtggtctctccgaggtccagcacagcaactaactttttgtttatctagccgaccccagctgcgaactgggga

SEQ ID NO: 261760 - DNA, 122 bp, Homo sapiens
ccttaccgaggcccttggggatcaggctttgctgtgacaaacagtggcttgcttaaataccgaccaaatggccctcctgatggggttaaaacaggcgatccatgccagtcttccctggagca

SEQ ID NO: 261761 - DNA, 122 bp, Homo sapiens
ccaccatggctgaggcccccgcctagggtaattcccttggactttcaaagctcctgggaccgtgtgatgggcctcagcaccacgaacccccctaaaggctgagtgtccccaggtgtgacttc

SEQ ID NO: 261762 - DNA, 122 bp, Homo sapiens
aaaccagagcagtgaatgcgcacagcccaaagggaggagccgcgctagaaagtgttcaagcgtccgcagaagtcggctcccagttcttaatagtttgccacccaccgtggctacgccacacc

SEQ ID NO: 261763 - DNA, 122 bp, Homo sapiens
gtgagctctccctgcagcctttaagggttaagccctttggagctgggtttgtgtccctggcgacagaaggcattttgactagggcagaaggtttcttgtcgacctcatgggaggccagacgt

SEQ ID NO: 261764 - DNA, 122 bp, Homo sapiens
gggagttttctgcccaataaatcatttctggtcagttcctctcacgtgttccttcctggtcggatgtctgggcatatttgcataaacgagttagtgctcactccatcagagtcaacctccac

SEQ ID NO: 261765 - DNA, 122 bp, Homo sapiens
tcaccagctcataccacatcagtcataatccaaaacaaaaatcaagaactcctgagtcctcgggcgactgcttcatgcaaacacagaaatggtataactgtgaccactgttttttgactctt

SEQ ID NO: 261766 - DNA, 122 bp, Homo sapiens
agcacatcctccaggggttctgaacctgaatgcagcaactggttgagaacctgagttctgcgctgtcttctgttgcagtgggagtgagtagggttttggtggtatatggtataactgcctta

SEQ ID NO: 261767 - DNA, 122 bp, Homo sapiens
ccccactctggttgaggggctgcctggatctgtttcctcaaagcagaggctgacgggggccgcaatccccaaacaatgaggctgagaaaggaagtgggtaagacagccacgttggcactccc

SEQ ID NO: 261768 - DNA, 122 bp, Homo sapiens
ccacactctggggataataccttgaggccggtagttgggctgagaggtccgcaccgcgcccggttctgcgatcttccctgggagagaggttccccgcgcagtcccctcaggccgggatcccg

SEQ ID NO: 261769 - DNA, 122 bp, Homo sapiens
cctggcacacaagggcaccataaatggtcgcttttatcacttcagcatcttgcactcagtcgagcgagcgctgcagaaactggaggttcttctggagctccgaaatattaacaaattccgtc

SEQ ID NO: 261770 - DNA, 122 bp, Homo sapiens
tcccattgtattgatcctgtgatggattgtgacctttcttcccttgagtactgtgccatgcgctgactgcatcaggccagctggtaaaatgagactcattgtgagaacggaaggcatagtca

SEQ ID NO: 261771 - DNA, 122 bp, Homo sapiens
ccacttcgatagatttctgaactgagacatgtgactctctaggcctatttctgcatgggtcggagagtgggcgggactgctttactgagttatagtgaatgtagttttaacctaagcgcctc

SEQ ID NO: 261772 - DNA, 122 bp, Homo sapiens
attgacagagatgagatgcgagcttgtttcgttgcttgttaggatgattatatccaaggtcgattatccttaagtgcactgtgtctagtttctacttttaatggaaggcttttcaaattaca

SEQ ID NO: 261773 - DNA, 122 bp, Homo sapiens
actcgaggaccttgatgaagccgagtggctccttgagcgggttgaggttgatctggaagccggacatcctctgaggaaaggagggagagagagtcaggacgacggggcggaggaggggaccg

SEQ ID NO: 261774 - DNA, 122 bp, Homo sapiens
gttaagaagccacagtggtgtgccccagaaaccagtagcgtgagccacagctgcctaatccgtgcacaataacctcgctgcccattcgtccacattttccttaggttttcagagaagtataa

SEQ ID NO: 261775 - DNA, 122 bp, Homo sapiens
gagaggaaggcacacttgtgttactgcaaatagttcagattggctggcaaaaagggtctacgaaacagaaacataagtgatgaagcagtggtgcggcaagttagtaattattaggtgtcagg

SEQ ID NO: 261776 - DNA, 122 bp, Homo sapiens
ggcagtgccgcaagagaggcctcgcgcgtggcgccgccccgcccctcccacgccgcagtgcgcggccccgctgtcagcctcaccttcgctgtcagcctcacctgcgcagagcgctcccgcgt

SEQ ID NO: 261777 - DNA, 122 bp, Homo sapiens
gccgcttgggtacctcggatgtgagggcgatctggctgcgacatctgtcaccccattgatcgccagggttgattcggctgatctggctggctaggcgggtgtccccttcctccctcaccgct

SEQ ID NO: 261778 - DNA, 122 bp, Homo sapiens
cttaataggtaatccatttgtgagatactgagtttacatcccagttccaaagcacttaaccgcctatgctgacaggatcagaaacattgtatggttactttgctcttaattgtacaaagatc

SEQ ID NO: 261779 - DNA, 122 bp, Homo sapiens
cagacagggacacagacgcagcagcacccaccacacatgaacgttcgggggtcactgcctcgtcttcatgtcttgggagttgctgtttctgtctttaaatccgagcgtcagaaggatctgag

SEQ ID NO: 261780 - DNA, 122 bp, Homo sapiens
tgttggtctcgcagtggtggcccgtgtagcctgggcggcagaggcaggtgaaggtggcgacgccgtccttgcaggagccgtagtggcaggggtcggggtcgcactcatcgatgtccacctcg

SEQ ID NO: 261781 - DNA, 122 bp, Homo sapiens
tctttctttctccctgttggttgctaatagtcatctgtaattagaaagaggccccttgtccgcctcagtctggagtgaaggtttaagaaataaacatatttgaatcatgtgatgacaattaa

SEQ ID NO: 261782 - DNA, 122 bp, Homo sapiens
ttgaacaggcggctgctgtcctaagtttcacaaattgcaaaacgatgcagaaaagatggccgggtctccaggaacggctgtgctgggggatgtcctgaagcagccacggcggaagcgctggc

SEQ ID NO: 261783 - DNA, 122 bp, Homo sapiens
ggaaggggagaagcatcccaggcacctcgcccggccttatcgcacccttccaggaagacccgatccacccacctcgcggtctcggaggcagcgctgcagccccagcaattggaccgggtcta

SEQ ID NO: 261784 - DNA, 122 bp, Homo sapiens
ctaggaagcactccacaaatgccagctgctattgtggctgtgggtatgagtcagacagcccgtggattctcagctcagggctgttattggttgttgagtgagcctgcagattcactcccagc

SEQ ID NO: 261785 - DNA, 122 bp, Homo sapiens
gaggtccaaaatctgcatgatgggccagaaggctggagacctagggaagcgttgtgctgccgcttaagtagcaagccagtctggaggcagaattcctccttctcaggggcggttggtgttgt

SEQ ID NO: 261786 - DNA, 122 bp, Homo sapiens
ctgcctccgcacggagttgtccctctctgttttcgattgacacaaacacttctccaaaagcggggaaacctaagcaacaacagcaatcaacaccaagatcttcctcctaccctcccctcttt

SEQ ID NO: 261787 - DNA, 122 bp, Homo sapiens
ccacggggttcgtgcacaacaaaaatgagacgtcgtcatacacactgaaacacacacacacgcccgcaggaaaacacgccgaggcatccataacttagagcaccccgcaccccccagcgaaa

SEQ ID NO: 261788 - DNA, 122 bp, Homo sapiens
agtgtgagtgactaagtgttcctctcctgcctcagctgggaagattaacatggggccaaacgccttggagacaggaaaacaaacgaacccagttactatgtttttaactcagttctgtctgg

SEQ ID NO: 261789 - DNA, 122 bp, Homo sapiens
gacagcgggcggccggcgctggcgaggagtaacttggggctccagcccttcagagcgctccgcgggctgtgcctccttcggaaatgaaaacccccatccaaacggggggacggagcgcggaa

SEQ ID NO: 261790 - DNA, 122 bp, Homo sapiens
gcccgggctatttctttgcgaagagcgttttcatttgaggcgaaattaaaatccccccttcgcgcccgcctcccgccctcctgctgagagaaacccaaacaaccctcatggcgccgaaatcc

SEQ ID NO: 261791 - DNA, 122 bp, Homo sapiens
cacagcccagtttcctcacacaattcaggtctatgcattgttctaatcaggaaagagtcccgtagaggcagaaactagttctgaacacgtcaccatcgtgagctgtggaatacagtagctga

SEQ ID NO: 261792 - DNA, 122 bp, Homo sapiens
ttaaaatgtcatgcccatatttactagctgtttataggtaacagaatctcctctgtgtgtcgtcagtgagtaattgccataacaatgttgtatttacatgacccatattttaccccacaaag

SEQ ID NO: 261793 - DNA, 122 bp, Homo sapiens
acattaattttcgatgggctgtatatgggtgagagagaaacacacagacaaggtaaaagacggaaggctttcaaccatttgcctttggccttctgtgtattttcattgggtttgtgtgctga

SEQ ID NO: 261794 - DNA, 122 bp, Homo sapiens
tgcgctgctgccagtcaacctccaggccaaagtagtgcacagtgccataggccagaagcccgtagacggctagttccagcagcagcgacagggtggccagcagggccttgggccaggctgtg

SEQ ID NO: 261795 - DNA, 122 bp, Homo sapiens
ggagaaaagaataatccctaataaaggaagttattataatgaactacaagatcagactaacgcacacccaccaggcagaggcctggagagatgcctcaggggacccaaactcgtgggtacgg

SEQ ID NO: 261796 - DNA, 122 bp, Homo sapiens
aggactcccctcgggaaattcccctttttccctcagtgccaggcctgtgtggcctaataacgacggccctggtcttcttcccactcccctacccttaggtaggcccttagactccggccttt

SEQ ID NO: 261797 - DNA, 122 bp, Homo sapiens
ggcgcctgcgccgaatcttccgggggggggggggggggggtggctggccacaggcgcctgcgcagtgtgccgctttgcgttgctttaagagggaaaagccaaatacagaaagttggagtttg

SEQ ID NO: 261798 - DNA, 122 bp, Homo sapiens
ccagggtaccctttgccataatctagagtggcagggccgagagcaatttatgtgtgtgtccgtgctagtgactgagcccatcctggactcaacagcccatctgtcaagtcggaagaaaatgg

SEQ ID NO: 261799 - DNA, 122 bp, Homo sapiens
gcatttgcgcacgtgtcgaatgagtctgtgtgtgtccacgaatgcatcgtgcacgtggtgcgaatgcgggcacactggtgtgtgtgtgtgtgtgtgtgtgtttgcatgtctgtgtctagcgc

SEQ ID NO: 261800 - DNA, 122 bp, Homo sapiens
ttccacatgaccacctgcaaataatgagaataaagatatgaacaaaatagatgtggttcccgcccttctgaaggttaacacctatctagttagggagacagacattaacaatcacacatata

SEQ ID NO: 261801 - DNA, 122 bp, Homo sapiens
gaccttctatttggaaaccagaacaaacaaggaaacaaagaaacaaataattctgctttccgataggtgctggttttacttccgctggctgagctgttgttcctgaggtcagaccccagcca

SEQ ID NO: 261802 - DNA, 122 bp, Homo sapiens
gcacctacccaagagttcatgggatattcaaagcaattttccgaactgtatcctccaactcgaggcagttactgtgaaaccactagatggcacagtcatgctagatgtaatcaagacttcag

SEQ ID NO: 261803 - DNA, 122 bp, Homo sapiens
gagacggggtttcaccatgttggccagcttggtcttgaactcctgaccttgtgatccttccgcttcagcctcacaaagtgctgggattacaggcgtgagtcaccgcacccggccttctcttt

SEQ ID NO: 261804 - DNA, 122 bp, Homo sapiens
aggggaccggcgacgagaggtcgcggcgcggggtcggaggtcagaggctgaggtcaccaccgtacccgtcaggccgtggctagagaggggtcggggctcgccgggactcaccgacagctcgc

SEQ ID NO: 261805 - DNA, 122 bp, Homo sapiens
ccaagacggaggtggccccaagccactggcacagagggcaggcaaaggaaaatcggcacgcgttctgagtaaacggggcgctctttcgtgagtccattcaaggttcatgtggctgttctcaa

SEQ ID NO: 261806 - DNA, 122 bp, Homo sapiens
gtttttggacacttaaattgcctccacccttttggctattgtgaatagtgccgctgtcaacgtgagtgtaaaaacatttcttcttgtacaccctgttttaaattcttttgggttatataccc

SEQ ID NO: 261807 - DNA, 122 bp, Homo sapiens
tcttccatgatgcgagacaagaacccaagtgccgagagggcaggggcttggacgctgctgcggggctcgcatagaacctgctcctgccccagaggagtgactggccggttctagcattcatt

SEQ ID NO: 261808 - DNA, 122 bp, Homo sapiens
tcatttcctgaatatcctatggcaaccaccccctcaccctacatgcagctgccagggatccgtggatgcctcaatatagacatgactcagaagagaaaacttttgagtcccatttatataca

SEQ ID NO: 261809 - DNA, 122 bp, Homo sapiens
gccctacagggtcctatggtgaagctgcggtcgcgaagcggccggcaggagcgaacctcacgactctgcagggggggaaaacatccaacccagtaagagtcagaaatctgggtccctgtcct

SEQ ID NO: 261810 - DNA, 122 bp, Homo sapiens
ccagcagtaggtgagcgagctgtcccagaccacatggcccaacatcctgtgcaccgtgcgcggctgccgcaagatcctgcccaacagccccgcgctcaacatgcacctggtcaagagccacc

SEQ ID NO: 261811 - DNA, 122 bp, Homo sapiens
ctccctgtttcccctcctactcctttatctcctccctccgtgtcttagttctgcagtacgcgggttgaagcacattcctgctttgcaaggctttctgctaaggatgtattgtggcttttgtt

SEQ ID NO: 261812 - DNA, 122 bp, Homo sapiens
tctctactaaaaatacaaaattagctgggcgtggtggccatgcctgtaatccccgctactcgggaggctaaggcaggagaatcgcttgaacctgggaggcagaggttgtggtaagccaagat

SEQ ID NO: 261813 - DNA, 122 bp, Homo sapiens
tcacgggatatgagaaaaagaaccaaaagaaaaagaaggaattacgagcctggaagaaagcgagcatgttggtaagagaaggtacaactgtaataatgctacttcttataaagccagtggca

SEQ ID NO: 261814 - DNA, 122 bp, Homo sapiens
agcagagatgctgggtcagtgcagcatccacctgcagccactacagagggagaccacagacggaggcaggcacttttcaaagacctgtggtcacagatgccagttaattttactcagaggcc

SEQ ID NO: 261815 - DNA, 122 bp, Homo sapiens
gcagcagcaaagagcatgcgtgaaaggctgggcgcacctgccaccgtcacagcagagaagcggccaacggcagacgaaggcagttgggtgggcactgctgggctgcttaccagcccagcaag

SEQ ID NO: 261816 - DNA, 122 bp, Homo sapiens
gaacatttccccagcactgacatcaagcaactcaggcatcttcacaagcgtgcagttccccgccttgcactgggtcactctgagctaagaaacattcctctaggttcatgttctcagggctt

SEQ ID NO: 261817 - DNA, 122 bp, Homo sapiens
cccccaccagttagctctggggtatcagaacccaaggcaatacgaaactccaggtccacacgaataagtatctccaccgtttcctcactaacaatacagttgttatttacaatggagtgatc

SEQ ID NO: 261818 - DNA, 122 bp, Homo sapiens
acatctcacgtataccattacagtaaatgattaaaggcttaactctcacttttggcttgtcgctttaaccagccactccaatacctggcagctcagctccctcccctagctcagctgcgctc

SEQ ID NO: 261819 - DNA, 122 bp, Homo sapiens
ggaggccagctgagtttcaagatataaaagcaacttcgggtgctccttttccagccgggacgtattaaagggaccggagcggggcagttcccgacgccgcagcgctcgctttcccttccctc

SEQ ID NO: 261820 - DNA, 122 bp, Homo sapiens
tggggttcaggacggtgccagcatgcccagcaatcccggagttccccgtgctcaggaactcgcaccgctggctccacgctctctactccagtgggacaagaaagctctgctcaccaggcaac

SEQ ID NO: 261821 - DNA, 122 bp, Homo sapiens
tggggaggtgcccgctgggtctgaggttttcaggtgaggagcctgggcctggaaatggaacggccaggcagtggtggatggaggcctggcccaggccttggtcctcagtgctggtggggagc

SEQ ID NO: 261822 - DNA, 122 bp, Homo sapiens
ggagaaaacagcaaaggagcagccagtgaggcagaggaaaactggaaaaatatagtgtctcggaagccaagaggaaagactgtttcaaggaggagagactaatccactgtgtcaaactttgc

SEQ ID NO: 261823 - DNA, 122 bp, Homo sapiens
atcacactaaatgctaggaaggcagaagccctagcgtgccctgcaaatgtgggcgattaccgagcacatcggggggtatcctgcactctcaggctaaaggctcagagactttcaccagaagg

SEQ ID NO: 261824 - DNA, 122 bp, Homo sapiens
cgacctggcccaatcacctctcggaacgtcactcgggtaggtccagaggcggggtcaacccggcccggccccgcccccccgccggatccaaggctcctcgtccgcatcctttttcctccctc

SEQ ID NO: 261825 - DNA, 122 bp, Homo sapiens
agggtcgggggagagcagggcaccgagctggggacgtgtcagggacgaagcgagggtgggcgagcgcggaccgctgggaccccggggctcagtgccgctcaccgggggtgaccgcgcgccca

SEQ ID NO: 261826 - DNA, 122 bp, Homo sapiens
agccggggaccccccgcggccagacgagttcccacctcgcccaaacacgtgctgctctcgcgtcatcacatacaccacaaagtcctggaggggaaacgaggatgcactaaggacatcacttc

SEQ ID NO: 261827 - DNA, 122 bp, Homo sapiens
aaggcctttatttttcctcgcgggaaaagggattgcaattactataggttttacaggtatcgcgagatttcgtcaaatctcattacggatcccggctgaaagccattttgtttttcagctca

SEQ ID NO: 261828 - DNA, 122 bp, Homo sapiens
ttgtcttctcgggttgtcttctgtcggcgccgcatggcattccgctgccaggtagaggctcggcgttcattcagctcctcctcatcctcagagctgctagagctgctggaactgctggattc

SEQ ID NO: 261829 - DNA, 122 bp, Homo sapiens
gaggagggggacctgggcaggtgtctctggtgaattgaagacatttccttctctgtcttacggtggccgatcctcagggcttctttgtcggggatgactttctaggagggcagtatcctttt

SEQ ID NO: 261830 - DNA, 122 bp, Homo sapiens
atcttccacgctgtctgtggaggaaaacaagaaagagtcttaggaccagccactgctcaccgatgcttacacagagcaacaaaggaaaacggaagaacatgtctgctaatgtctgtgactgt

SEQ ID NO: 261831 - DNA, 122 bp, Homo sapiens
ttcttaaacatccagcctgatcattatatgatcaaccaaattaacatagttgagcgaacacgcacacattcacagtcacccctgtagagggcgcacattatctgtactcctatagtaccaag

SEQ ID NO: 261832 - DNA, 122 bp, Homo sapiens
cgccacgaaacaggaaagcggagacagcgccaactgtaaccactaagagaaagcgcaaaccgcacaagaccagttcaaaaccagcgccctcagggagccgcttcagagctccgcaacaggga

SEQ ID NO: 261833 - DNA, 122 bp, Homo sapiens
gcagcacccgcccggctgggaaggggaagggtctgggtgtggaagcgagggtcccgtggccgttttacagtcctgtgagatggcgagctgtgttcttgaaggggaaagtggacgtggggaag

SEQ ID NO: 261834 - DNA, 122 bp, Homo sapiens
ggctggaattctggatgcaaatcaccacgattgcaaactcacacgcccatcgcagctcatcgcacctggttcttgccccaagagcggaaacgccgcacgaaactaattccactgtttctcac

SEQ ID NO: 261835 - DNA, 122 bp, Homo sapiens
caactaatggacttggtgggatggttgtcctcaaagcagccagcattttgatcaggctggcgtctggtcctgtatttttctgggatattcagaatctcttgacatgtatcttcacttaattg

SEQ ID NO: 261836 - DNA, 122 bp, Homo sapiens
ccgcgccgggccggggagatcacgtcccgtgcgtcgggaggcgggggcctcgggctgtgacgtcacgtggccgcgcccctgccgcccagatatctccggcgccgcccgccattttgactcca

SEQ ID NO: 261837 - DNA, 122 bp, Homo sapiens
gcagggacccacgcacagtgctgctgctgagtacagagctgggcgggacgcagggacccacggacagtcccgctgctgatacagagctggccttgggtgtgcctcgtttggcttctgcaggc

SEQ ID NO: 261838 - DNA, 122 bp, Homo sapiens
tcttaaaatcactggcttttatgacaatgtcttccaagagctcattagaatctataagatcgcaggaatttcgccaagaagggctgcatagaaaccacagagacaactcggccagggctgct

SEQ ID NO: 261839 - DNA, 122 bp, Homo sapiens
ctcggctaggctctgggccgggcggggttgggggcgggggcggcggctaccagagccaagcggcggcgccgccggggaacatggcggaccctctttccctacagaggggctaagaccggcat

SEQ ID NO: 261840 - DNA, 122 bp, Homo sapiens
gcgcctggggggcggggccgacgcccgcggccggccaatcagcggctgcctctcggtgctcgcagccaatccgcgtcttccgcttcgggtggacccgacggaaacattccagagggatccct

SEQ ID NO: 261841 - DNA, 122 bp, Homo sapiens
gcacagatctagagaaatggaggcagcgggttggataatgagagtccggagagagaagcacgaagctagggtgcaggtgtgtgggagggtcctgcccagccccagccattccccaccaggag

SEQ ID NO: 261842 - DNA, 122 bp, Homo sapiens
tttacttaaatcttagcatagaattatactttgggatgtcgctcctctacaaggagcactcgaaattttgccgtgggccgcctgcggagctggagagctgaggaggcgggtcctggggcagc

SEQ ID NO: 261843 - DNA, 122 bp, Homo sapiens
ggcggcatgtgattcctgtgggactcttggagtctcccagactccttcggtggtccacgacgctcttgcccctgtttagttctaagagaatcggggacagcgactggaccccccaaggttgt

SEQ ID NO: 261844 - DNA, 122 bp, Homo sapiens
gcatggcgggccggtgattgtagtcaatctggccgtattctcaggcagggtcgcccggggcggactacatctcccgggatgctgcgcggccgccccgcggaagattgtgaatatgtatcaga

SEQ ID NO: 261845 - DNA, 122 bp, Homo sapiens
tggcacttcagaggctggactagagaaggcgcgttcagccgacggtgcgggatacactgccgaggaagtccgcggcgaggggcgtggttggggggtgtgtattacacggtatcccccccttg

SEQ ID NO: 261846 - DNA, 122 bp, Homo sapiens
ggttgcgcagcgcgcgcagcggcgcgaaagtccctggtgccagtgcttccagctggttggcgctcaggtccagcagctgcagcgcgcccaggccccagaaggctcgcacatgcaccgagtgc

SEQ ID NO: 261847 - DNA, 122 bp, Homo sapiens
aaagttatggaggtaagaaaccctttgcattggaggaaacctaataattcagtatagcatcgtatttgtgttttggaaagtctacgaaacagctgaatgctagtggagcagtgtcaaactgg

SEQ ID NO: 261848 - DNA, 122 bp, Homo sapiens
gtggggggttccttgaggctcggaagccgtcgtcggagggggcggggttcaggtgcagggcggggctcagaactccgggagaggcggaagccgacgccggagggggcggggctcgagtgagg

SEQ ID NO: 261849 - DNA, 122 bp, Homo sapiens
gaaaaaaaaaaaaaaaaaaaccctttcagaacagtttgtgctcctgttcagcccaggagacgtcgttcctgcttttacgcggcgccatgtccttcttggcgtacacttggcaaaacagaatg

SEQ ID NO: 261850 - DNA, 122 bp, Homo sapiens
gaaacacagagggagctgctgccggagtagaaagtctgcttttagctgtgagaagtctgacgtgtctgttagacccccggagaagttgaggttatgtgaagttcctggcatttgagatgcaa

SEQ ID NO: 261851 - DNA, 122 bp, Homo sapiens
gagggagagaacaattactcccaaaacccttaagtctctcaaaaaattgtcacagaaggacgtcagaagtacaatcacctgccacagggccctgcctttgagggtagggaacactgtcacac

SEQ ID NO: 261852 - DNA, 122 bp, Homo sapiens
tgtccccttctcgctcaggggcctgagccagtttccagactccccggttggaagtgctgacgtggctctgggcagctgtctggggccgggaagcggggcagatgtcacgcagcccaggggag

SEQ ID NO: 261853 - DNA, 122 bp, Homo sapiens
ccttgaaattccaaaggagtcagtggcgactgagatagctctgaccacatcatggaaggtcgcctccgcattggtgatatgcttacagtattctctgggccaggcgaaattccagtaatatt

SEQ ID NO: 261854 - DNA, 122 bp, Homo sapiens
gaggtttagaatcgagcttgtacacctgggagagggtctttttcctttccctgagagccacggtgtatgtcctgatgtcccatgtcctgatgctgccagtgaggcctccctgccttcctgac

SEQ ID NO: 261855 - DNA, 122 bp, Homo sapiens
cggtcctgctctcgcgccccggccccggtccctcctcacccgtagaggccctgcggtcggcgctcctagccaggcgcgtcggactctcccccaccagtgtgcacagcaccggatccggatcc

SEQ ID NO: 261856 - DNA, 122 bp, Homo sapiens
tgcaccctgagtgtgtggtcacccctgggccaggcctccttttccctgaaatccctccttcgtctccctggagacatcctcgatgtccctgttgtctgtcacgctgtgcaccgattcccttc

SEQ ID NO: 261857 - DNA, 122 bp, Homo sapiens
atgtgggagcgaatgacagagggtttcttagaaccaaatgtggccgtggtttctgtcaggcgggctttaagtgagtaggagaggtgagagaggcctggctcaacaaaagggctggggattgg

SEQ ID NO: 261858 - DNA, 122 bp, Homo sapiens
ggaggcggaggcgtgagctgcgggcggctgcgggcggcgcttgagggccagctggagttccgggtgggcgtgggcttggcgggccctgcactgggagcagccggccggccctgccgcccggg

SEQ ID NO: 261859 - DNA, 122 bp, Homo sapiens
ggatgttagtgggtggagcccacaacaaagaattattctcccagaatggcagcagggccacgggtgagaaaccctgctgtagtctaatgattctgtagcagaattcacaagtggcagccaca

SEQ ID NO: 261860 - DNA, 122 bp, Homo sapiens
ttctgagagtaacaagcacatagattataatctaagaaaaccctttgtagctatgcatgtcgggagagcatctaacactaatggtgatgtttcccatgcagagactcagattacagtgactc

SEQ ID NO: 261861 - DNA, 122 bp, Homo sapiens
tgccaagagccgaggccctcgggcctttgggcgagccctccctccccggctgagcaattgcgggtatggacggagaaccttcgtctccaaagagtcaccccactggcagagcaaaagtccag

SEQ ID NO: 261862 - DNA, 122 bp, Homo sapiens
tgtttctcagtgctgaatccttttattttttggcattctttggcatacttaaacccaccacgagcagataggacagatgctgtaagcaattccaggttggcatttggtgtgagctacaggga

SEQ ID NO: 261863 - DNA, 122 bp, Homo sapiens
aggtcacgttctttccctgcggctcccttccccatctggttctggggaagacactctgcacgcagcccccaggagaccacaggccctggactcccaaatcccagcagcaatgcaaagccacc

SEQ ID NO: 261864 - DNA, 122 bp, Homo sapiens
tgaggtgcaacctgccaggacgaactgttgcatcacagggtgagtcatgttgaggaacagcggcagtagcaggaccacatcctttctgggatccagctgccgcttcctcaagcctgggtcag

SEQ ID NO: 261865 - DNA, 122 bp, Homo sapiens
agaccgcttgctggaatgatgtatagattggttattcctgtaggcaggttgccctagcaacgggaaaatcttacccatttcagcaaattttatcaataaagcagtctaaccagagactaatg

SEQ ID NO: 261866 - DNA, 122 bp, Homo sapiens
agatcagctgggtgaaactggggtcctggcatggtgccttcctctctcggcacagaaaggcggagcagccccccaaggccacacagcagggtgtggcagagacacgatggagatccaggtct

SEQ ID NO: 261867 - DNA, 122 bp, Homo sapiens
tctttatctagaaaaatgtatgtatgtaaaacatatttatgtgatgcaatgtaaatatgtcgtgacaaagtggtatgtcaaactttatgttgctttgcttagttaaataaaccttcattaaa

SEQ ID NO: 261868 - DNA, 122 bp, Homo sapiens
gtccctacccccacccccagttttctgagttttgctgctgccgctggggaaggactgattcgttttgcgtcaaaggactgcatttactcagtcctgctgggagaggcgcgtaaacacccagg

SEQ ID NO: 261869 - DNA, 122 bp, Homo sapiens
gtctgctttgctcctcagggcagtcccatgaagggttacccagctgcccagctgaaagcacggaggctccctgtgcagggagcacccgttgtttttggctgtgcctccactaccgtctccat

SEQ ID NO: 261870 - DNA, 122 bp, Homo sapiens
gggcagatttcttaggcctgtcctctttggaagaacggagaacatttactaattaccattcgctaattaccattcaggcaatttccataattgtctcaagaaaagatttgatcagccaaact

SEQ ID NO: 261871 - DNA, 122 bp, Homo sapiens
ccaggagcaagtcagcacaggctctgcccacaggaggcatgcacaatctggtaggagaaacgcacaagtacagatagcttgctctctgagtgtgtctcattgattcattcagcctgtgtgtc

SEQ ID NO: 261872 - DNA, 122 bp, Homo sapiens
ggtcaaaatgacccatacatccttccgatcccgagatgtcattcatcaaaaagtagcgcccgctcgtcattaaggtacgaatgacgctgttcgaataatcatttattgtaacaggtttataa

SEQ ID NO: 261873 - DNA, 122 bp, Homo sapiens
aggttcatgagtatgcatcggcctttgccagctatagtgagcctgtctgctgccatcactcgctgacagctgagaagcctgtcctggctaccttgagagggtagacttttgttctcaggccc

SEQ ID NO: 261874 - DNA, 122 bp, Homo sapiens
cctactagcggcaggtggagcctcgagacgggtgctgtcgtggtgatggaggcgcacgctcgcttcccacgcagtttggcctttttgacgtccctggctgttgtgggcaaccgatttggttg

SEQ ID NO: 261875 - DNA, 122 bp, Homo sapiens
tcagccaggcaggactctgggcctttgacacaaagtttcaggaggctgtggtcaagctgccggccgatgatgtggtctcatgggaaggctcagctggggcgtcagcttcccggttcccttgc

SEQ ID NO: 261876 - DNA, 122 bp, Homo sapiens
tgtccgagcctggctgggatacctgagagcgaggcacacatgggctggcggaggggcagccgtcatgctgtagttctgtttccaccaaaacgtttttccacatgagggcgaaagcctcagca

SEQ ID NO: 261877 - DNA, 122 bp, Homo sapiens
cctccccaggacgaacgcaggcctggcactgggctgacggagtggccgctgcccgggtcacgccatagaggccagcacttgcagcggcttggcctggccccagagcagtttctatgtgcgtg

SEQ ID NO: 261878 - DNA, 122 bp, Homo sapiens
aagggttttagactacactctcagggaaatgttccaaaccatccaaggtgacctcttgcgcgcgcgcgcgcacacacacacacacacacacacacacacacacacggtagaagctaacattt

SEQ ID NO: 261879 - DNA, 122 bp, Homo sapiens
ctgtcttcactttgccatctaattgggtcagccctctctgagggctcacacccactcttccggcacagcggagccttatctgcccttggcccagagaatgcttccagttccttcactccagc

SEQ ID NO: 261880 - DNA, 122 bp, Homo sapiens
caaggggagggagggtgagtgggggcgtttgggactggcatgatcgcagatgcgtgcatacgctggcagacatggtgtcaatgtgtcagtgcctatataccttatccactctttgtcatgta

SEQ ID NO: 261881 - DNA, 122 bp, Homo sapiens
agcagacccctagacaaaagcactgatttttaaggcagcaaaatgttactgaactatccacgtactcctaaccccaccctacctccaccctcagacaccatattcctacatgcagggagttt

SEQ ID NO: 261882 - DNA, 122 bp, Homo sapiens
aacggagcagatggtgctggagttctgactctgtagtgcttgctgcctctgaatctccttcgaaatccgtcttttaattcctagtaagtacagttctctatcaaatttgccagctgccaacg

SEQ ID NO: 261883 - DNA, 122 bp, Homo sapiens
ggatcgcttgagcctgggaggtagaagctgcagtgagcagaggccgcgccactccactcccgcctggccacagcattagacccaatctcaaaaatgaagaaaacagttccgagcgtattacg

SEQ ID NO: 261884 - DNA, 122 bp, Homo sapiens
aactggcctctgtgctaaacctccaagagccacaaatgcctcatggagtgccaaatgttacgagggtaactaaaagcaaaactgccgagttcagatccctcagttcaatttttctatgccgt

SEQ ID NO: 261885 - DNA, 122 bp, Homo sapiens
caatattacaatctgcttttaagggtaatcaccaactttggcatattagacacccatattcgaaaaagtcagtgatgtatacattgaggctcagtctgttttcaatgttttattagtcattt

SEQ ID NO: 261886 - DNA, 122 bp, Homo sapiens
ggctcaggcatgactggttgcaggtcccgagccctaccctgcggagaggctgctaaggtccggcgagaaatcgagtacagcagctgctggcccaggtgctaagcccgtcactgcccgggact

SEQ ID NO: 261887 - DNA, 122 bp, Homo sapiens
ggctgatattcagtaggccaggagagatgggagctgtgggcattttggttcagccccaggcggttctgaaacccaggaccaggaaaagatagattgggactcctgaagacacatcaccctgt

SEQ ID NO: 261888 - DNA, 122 bp, Homo sapiens
acgtcggttccagacacacacacccctcaatttcaagccaacgctccaaaaaatgaatgacgtgtgggcaaaagttatctgccactctgggctgtctgttgacctgtcccacttccatcagg

SEQ ID NO: 261889 - DNA, 122 bp, Homo sapiens
aaggcaccagacatgagagcccgtctgggatgcgcggcaccactgggaccctgctttcaccgcggcccaccccgccaaacgcccccgcccacggagccagcgcggggcgcgccaccacctcc

SEQ ID NO: 261890 - DNA, 122 bp, Homo sapiens
tgactagactttaccttgagctggagagcaaccttgataaccgacttccaaatgtatctgcgttaaccacacatacatgatcatgaaacattcataagaattctacctttttctttgcaaac

SEQ ID NO: 261891 - DNA, 122 bp, Homo sapiens
tccagtcaatccctttgttatgtctagactataagcaatccccaaattcagttgtaccttcgatacagataatagttcaactgcagaaagttcaggcatccgacaggtgtcaatcgtgactc

SEQ ID NO: 261892 - DNA, 122 bp, Homo sapiens
aacatgagttgtaagcggcagagcccgggactccacagccagggttttctgactcggagacgcggagctctgtctcccatgtcaaagagaaccagtcagaaacgcacgggtgggctgggagg

SEQ ID NO: 261893 - DNA, 122 bp, Homo sapiens
gcgccgcgatcctcctccccgggcagggtgctccctcgagggggaccggggaactgagggcgtccccttctctccggggcgggggtggggggcggagcccagcgcgccgctccccagccccc

SEQ ID NO: 261894 - DNA, 122 bp, Homo sapiens
tggctcccgcaccgcccctccgcgcccccacgctccgctcgccccgtggcggcatgagagcgagcctgtgattggacagggcctggcggtgaaaggttaatcccggccccccagccactcag

SEQ ID NO: 261895 - DNA, 122 bp, Homo sapiens
tggaggccccgccgcgcttcccggactctaattggtcttcaagtagctcatctcctcccacgtgatcacgcagcatctcgaagcttgcccttccgattggccctcttggaggccctcttgga

SEQ ID NO: 261896 - DNA, 122 bp, Homo sapiens
gaacgtgtgcagcggtaagcacaggaatattccaaccgcagggtgaagatggacaccaaacggccgtgcatcagttcacattgcatttttctgtcaaacagcaaacttacctcggatttggg

SEQ ID NO: 261897 - DNA, 122 bp, Homo sapiens
aacagttctataggatgtgatttaaaagcaaagttagtatcagaaagattcactgcagggcgtgaagcactttgggactcgaagcacccaaaatcttgaaggcaactgtgctggcatcgtga

SEQ ID NO: 261898 - DNA, 122 bp, Homo sapiens
tagaattacacaggccattggtccacagatttacaggggcacccctgcgcagccataggacgtcttaaccaaacatcaaggtaccaaggaataaacaccagggttcagaacaccaggtgcag

SEQ ID NO: 261899 - DNA, 122 bp, Homo sapiens
tcccgaaatgcatttcagcgtcgcaagagatcgtcaatccagcctcatcccggcatgcatcggtctttggtcagccttgttgccagagcgggaatttgaggctgacgccagcttgcgtcgaa

SEQ ID NO: 261900 - DNA, 122 bp, Homo sapiens
cactatattttacacgtatctcttggtatgcatcttttatagacgctcttttctaagtggcgtgtgcatagcgtcctgccctgccccctcgggggcctgtggtggctccccctctgcttctc

SEQ ID NO: 261901 - DNA, 122 bp, Homo sapiens
actaggatgaagttcccctcatacatttccagtgtaactcataacttggcattctggtttcgaccagactcagacaagcttcagaacacttactgctgagaatgggtccttggactaaggaa

SEQ ID NO: 261902 - DNA, 122 bp, Homo sapiens
ccagtccctgcggttctcggcctcccccgatcagccatcgcaacatccgggcagcggcggcgtcttgcccggtccagccccagtcagcccaaactccgccccaggctcggcctcctccttcc

SEQ ID NO: 261903 - DNA, 122 bp, Homo sapiens
cagcgtgaaaacagactaatacatgcagtaattgagaaagctcactggggtgagggcactcgagcagggggagcaaggagagagatccgtgggctggagagaagccaaggaagaggatttgg

SEQ ID NO: 261904 - DNA, 122 bp, Homo sapiens
tcccactgcgccaatcaaatcccagaaacagtgagtgctagaggcccggctgctaagcaacggcagagggcgggaagtttgaacgttctggacccgccccgaaggcaaataggccaatcagc

SEQ ID NO: 261905 - DNA, 122 bp, Homo sapiens
tttatttgttttgagatggagtctcactgtcactcaggccagagggcagtggcaggacctcggctcactcaaacctttgcctctcaggttcaagcaagtcttctgcctcaacctcctgagta

SEQ ID NO: 261906 - DNA, 122 bp, Homo sapiens
agaggaaataatacatgggttcatggagactctgctgggtaatgatgacaaacaggatcacgctgttcccagagagggcaatggcataaaaacaacagaaaggaatggagatccagacatgg

SEQ ID NO: 261907 - DNA, 122 bp, Homo sapiens
gcattctccaccgtgaagcactggcccgaggacgcgccctgggggtaacaagtctccaggcgccacacgggcttggcagagtttcctagaaaaagagccttgccccggtcgtctttgcctcg

SEQ ID NO: 261908 - DNA, 122 bp, Homo sapiens
ccccaagttactgcgtgttgcagtgagatgtggctctgcaaggcaggacaggcttgtggacggaggcgggggcgtttggcccggaaagccggtgttgacagacaccaggtgcgacacgagga

SEQ ID NO: 261909 - DNA, 122 bp, Homo sapiens
tgggcggagtcagatcggctttaatagagggagcctgaggaggctcccggggtgcgggcgcggcccagccccctcctacttggctgcggctggcggtggggcctgggccgacgctggtgcgg

SEQ ID NO: 261910 - DNA, 122 bp, Homo sapiens
gtgaatgcgtgggtgtgtgaggagtgcttatcagtgcattgtgcgtgtggagtgtctgtgcgtgtctgttcatgggttgcatatgtgttgagtgtgcatgtgtgttgagtgtgcatgagttg

SEQ ID NO: 261911 - DNA, 122 bp, Homo sapiens
agccagtggagaaaagtcagcccggtccccaggagtgcttgaggctctgtcactcttggacgtcaaaaagggtcatttgatgactggacgcttacctcaccggtgtgaggtaagcttcaaac

SEQ ID NO: 261912 - DNA, 122 bp, Homo sapiens
tccaggcccagctccattttctttgtgttatggccaagaacacgtgtcccgtgctgcaggcggcacgctgcgcacccttaataaattacacggacttctctgctctctcgaatctggccgca

SEQ ID NO: 261913 - DNA, 122 bp, Homo sapiens
agtgcgggagcgggtgggtgcccagggcagccaggggcgcacgggttgggaggcgccaggcggcccgccctccttgcacgggccggcccagcttccccgcccctggcgtccgctccctcccg

SEQ ID NO: 261914 - DNA, 122 bp, Homo sapiens
gagaggcttcacaacgagagctcctcctccctcctcccagccacgatccaccaaggggaacggattaagacagagatgtctggagacagaaaggtttttctgggtggagatttcagcagcat

SEQ ID NO: 261915 - DNA, 122 bp, Homo sapiens
ccaagccagcgagggagggatcaactgagtagatagcccacgaagagagggggctgaggacgggtggacagtcttctgaatggtcccaggggctacttggtcctgggctttattcctctggc

SEQ ID NO: 261916 - DNA, 122 bp, Homo sapiens
tccgctcgccggatcccaccgcactgaagggactgcgcgtgcgcgagtcaggtgacgacccgcccctacaggccccagaacccccgagattccccgcgcttgcctcccgccctcttcttcca

SEQ ID NO: 261917 - DNA, 122 bp, Homo sapiens
aggactcctgaaaactacatttcccatgatgcccgtctccccacgcaaccgcggccgcgacgtcgctcccatggcaacccagaaggcctcactcccagactccttgcggagctcgccgcctg

SEQ ID NO: 261918 - DNA, 122 bp, Homo sapiens
cgcaggttttactccagcaataaaataaatattcaaagtcgtccactagctcttgctaggcgtttggattttttaagggaatgaggaaggcttgggaatcgagggagtgggggtgttgtgca

SEQ ID NO: 261919 - DNA, 122 bp, Homo sapiens
ctgtgccctgtactcatctggatgcttttctgagcatttcaaaagctggagtattttaaccgaatgtcagcatgcacataccttccagagtcagcactgggagccacagagcagatggtgag

SEQ ID NO: 261920 - DNA, 122 bp, Homo sapiens
atccgcctcagagtgggtcccagtgtatccctcggaagttctttctttcctgaacattctcgcctctgtcggggagttagaaaagctgttcattctgcgtccagataaaagagctcgcctcc

SEQ ID NO: 261921 - DNA, 122 bp, Homo sapiens
agctccataccccttgttacagactgaggggccagcgagagaagcagacatacccaatgccgtgaggttaggtagcagaggtggccctagatcccagccaaggtgttttccactttcctaca

SEQ ID NO: 261922 - DNA, 122 bp, Homo sapiens
gggctccacgcacctggagcagagccagacacgcacaggaaactctccctgaagtgctcacgaggtgaggtgcgtgagggcaccgcagagagcaggacggcctgactcacgggacttctgtg

SEQ ID NO: 261923 - DNA, 122 bp, Homo sapiens
ccagtcacagctcacatagctctgggcactggtaccccgactgcctttccttgttagctgcgatacacaaatacatgagccagatcctttcctgaggccaggaagcctggaatctaataaca

SEQ ID NO: 261924 - DNA, 122 bp, Homo sapiens
acaccatccctgagggaggcggggcacctctctttgaccccagggagcaaggccaggcaccggaggcagcgcccgagggctaaggcagccgactgataggagcagacgtcatggagggcaca

SEQ ID NO: 261925 - DNA, 122 bp, Homo sapiens
ggaggtagggtcccgtgctgctaggaaggcatctgagcccccaccagcagaagggctctgcgccccaccctgcagagatccaagctggccagggagtgtctgtccccaccccacgctcgccc

SEQ ID NO: 261926 - DNA, 122 bp, Homo sapiens
gtccctccctccctgccatgcccagtctagccaaggtctagttcagggatcagggcaccacgtgggggaaggactgtgttccttgtgctgaattaggatttatggctttggggccggatggg

SEQ ID NO: 261927 - DNA, 122 bp, Homo sapiens
actgacaatagacagattaacaggagaaaaaacatatcgatttattaacttgcaagctagcgagacccaaacaaagtatgaaactcaaagaagggccaaatggctgaagcttaaatgggacc

SEQ ID NO: 261928 - DNA, 122 bp, Homo sapiens
gtttaaggaagattagctgagagatatccctcttccttccactcctggaacctaaataaacgggtaaaaagaaaacaactgggccaggcgcggtggctcatgcctgtaatcccagcactttg

SEQ ID NO: 261929 - DNA, 122 bp, Homo sapiens
ccgactctccagggccgtttaactccttgaagatatcaaacggatttcatctctgctccccgggtcccctccgcttcccctctgcccctccgctcggggtcacccctgcctctgccgggagc

SEQ ID NO: 261930 - DNA, 122 bp, Homo sapiens
ttggaagcggtgatttttctctgtaaaaaggaaaatatttccttttctgttgacatgaatcgatggccagggccaatgagcccaggcaaggctgtgggattgcagcaagacacctggtggct

SEQ ID NO: 261931 - DNA, 122 bp, Homo sapiens
aacgttgtttcttctcccctaccccttttctgtgggtctgttttagggacagactgcttccgggtcgaagggcttgcttccggagagcgggaaggctaaaacgcggtagctaaactgcagcc

SEQ ID NO: 261932 - DNA, 122 bp, Homo sapiens
cagcagcaggaggaacagccacaggtagaggtggcagctgttggtgaacttgctctgctccgggtcgtggtaccagcccccggtgagcgcggcccacacgccctgccggagcagctgcagca

SEQ ID NO: 261933 - DNA, 122 bp, Homo sapiens
gccactacagtaacatcagcacctagagcagtgctcaactgactgaaggctcctgtgagtcgccctctccccctggccccccaacccgcggggaaaggctggcgggacgccacacagcacct

SEQ ID NO: 261934 - DNA, 122 bp, Homo sapiens
gacgccttccccacgggacaggccctgggaactgcggggcaaggtgtgggcacggcgggtcgccttccaaccctccagggtctccggtcctgccccctctccaagacccagagattctctcc

SEQ ID NO: 261935 - DNA, 122 bp, Homo sapiens
aaagatgactgtgtgcctggggagagagagcagatcagattaatttgtgccatcacagcacggctttattatccgtccttcgagagttttgcaatcaagatgcttttagcagaaacacagtg

SEQ ID NO: 261936 - DNA, 122 bp, Homo sapiens
ccacagccactgcaagccccagaccggggctgtggataacgccagcccacggcagccacacgccccagaccaacacgagaagaacgcaggccgacaacatcttcatctatggtaggtgaccc

SEQ ID NO: 261937 - DNA, 122 bp, Homo sapiens
ggcccctctgcaggcgcagccaggccttcttgtggaggcccagaggggcaccctcagccgcggggcctgcccatgccagctgtcgcacctcgcagtgcccagggttgtgggggtctaggagc

SEQ ID NO: 261938 - DNA, 122 bp, Homo sapiens
tttcacagttagccaggagaggagggggtcatggtggcccgcagggatggtgggcagctgcgagagaggggacgcttcaggttagagcgaagctgtttgcaccaccactgccccagactgcc

SEQ ID NO: 261939 - DNA, 122 bp, Homo sapiens
aaggttgggtgcctcgcgccgggggccgttgggagggagtgcgcccctgccccccctccccggtccccacagctgcaccgccgctgccggggccccaccttcccgtcgacccccgcgggaag

SEQ ID NO: 261940 - DNA, 122 bp, Homo sapiens
tcagaattatatcttgggtcatttatgtgccgtctgttcttgattctctatgctctaaatcggtgtttttcaaactgtggttgcagtcctttggtggattatggccagcattttttaaatag

SEQ ID NO: 261941 - DNA, 122 bp, Homo sapiens
ctgtccatccctggccttttccctgtgctgtctgggacagtgggtggagctgccgctgagcggtgggacctagaaaacacatactgacctataggaggcactgcccagagctcctaactggg

SEQ ID NO: 261942 - DNA, 122 bp, Homo sapiens
gggtccagactgggcactcacagtggaccaagcagggccaccactgacggacccctgagccgtgggcggaatgacaggccgttcccagagcttctaaggccgtggagctctcaccggaaaca

SEQ ID NO: 261943 - DNA, 122 bp, Homo sapiens
gctaactaaggtggtgattatagtgtccatcaattagtttgcgtttcagcacaatattcacggccccttcccactccctcgtaacaaagggctgtttaactcaacacatacacaaacacaag

SEQ ID NO: 261944 - DNA, 122 bp, Homo sapiens
tccccattggctgcggccgctgtggccccgcctccttgagtggtgcggagctttgtgatgcggagcttcgtgatgcacgccccgatgcctgcggggctataaaaacgctcgcaagcgccaag

SEQ ID NO: 261945 - DNA, 122 bp, Homo sapiens
tctcccttcctgggccccagaacacctccggtgccaaacttgtgggtgggaacaggaactcgcgtgccagccaggtgtgcatgactagctctgggcaagtctgttctagtaattcaaggtac

SEQ ID NO: 261946 - DNA, 122 bp, Homo sapiens
gggtgctggcctgcctgacatggaggctgtggcaggtgccgaagccctcaatggccagtccgacttcccctacctgggcgctttccccatcaacccaggcctcttcattatgaccccggcag

SEQ ID NO: 261947 - DNA, 122 bp, Homo sapiens
gaaacaagcccggaggccggccaggcaggggtaataccccaaacccaccactgaggaaaccgcgacttaaaacctaggtcgtcacgtttccaccgcatattaaatcaatacgggttgagcat

SEQ ID NO: 261948 - DNA, 122 bp, Homo sapiens
tggggccggcacccgggcactggctggcttgggtacagagcaccctccgccctcccccgtcgttgtcactcaccctcggactacaaaaaaggggtcttcgagagacatgtcagtcccttccc

SEQ ID NO: 261949 - DNA, 122 bp, Homo sapiens
gataaattgttaccatttatgtaaaacaggtgggagaagggagagggagggatgtgtgagcgctacttgcagtactcacaggcagtgactttcgtggagcgccctctagtggtatatatata

SEQ ID NO: 261950 - DNA, 122 bp, Homo sapiens
cgctttctgcagctcgtgtcacattccaaggacactcagctccgcacatgcacagagggccgcgtctgtcccgggggcgtgttacctaaaaccaggcgctgacctccaggtcaggaactctt

SEQ ID NO: 261951 - DNA, 122 bp, Homo sapiens
caatgagctgttaaaaaaaaaaactcgtttaaataaacaaatggcaatgctaggttccatcgctttcttcatcagagccctcccgcaggctagcagggccaaacacattccttcctctctga

SEQ ID NO: 261952 - DNA, 122 bp, Homo sapiens
cgtgcagcgtgtccaggctgctgacctcgtgcgtgatgtgcacgcgccgagtctcctccccgaactgcaggaacagcacccctgcgaaggagacgccgccctcgctgtcactgctgccgtct

SEQ ID NO: 261953 - DNA, 122 bp, Homo sapiens
gcgaggaaacccgaagaacattcattttctctttcccagggaacctgggtctgggcaggtcggcaccctaggaaagggggcggagtggggcaatggaaaggaatttcttgggaatttcacga

SEQ ID NO: 261954 - DNA, 122 bp, Homo sapiens
cccaagccccgtcagtggtcacctctgtaagccagggcacttccctacgcgagcccagggcgcccgcacccgggaggcgaggtccggtcccgcctctcgccgctgcccaacccgcgcccact

SEQ ID NO: 261955 - DNA, 122 bp, Homo sapiens
caggctctggggaggcgcttttttgcctgcaagtgaaggcaagtgctctgaggactcacgcggagctggagcccgcgggggcttcaggtcaggaaccgctcctcttccagcgtgtagggtac

SEQ ID NO: 261956 - DNA, 122 bp, Homo sapiens
agcaaaaatcccccagagagtaaatgactcaaggattacccatgcttactgtgtgcacagcgtcttggaaatcggtctcatgccttaaagtacagcttcttttgcctaaggataggcttcaa

SEQ ID NO: 261957 - DNA, 122 bp, Homo sapiens
tctgcgggttttgctacaggacaaatgtttccttccctgctacctcaaatccctgactagcgcagagatgggttttgtgaattccctggtctgtccctcctatggggacaaatgccagccct

SEQ ID NO: 261958 - DNA, 122 bp, Homo sapiens
gctgatgcagaactccccataggtaaggtgagctcagccggatcacatgccatgaccacacgtgagcatggaagacaaacccagagaggtctggaggcagggcccctcccggagaggcaaag

SEQ ID NO: 261959 - DNA, 122 bp, Homo sapiens
cgtgagcgcccggccctcttccaccaccagaggatccataccggcgagaagaccgtccggcgatccagggccagcctgcacccccaggccaggtctgttgccggggcatcatcagaaggtgc

SEQ ID NO: 261960 - DNA, 122 bp, Homo sapiens
caaatactttcagtttgtgtttggttgagtcagtggacgtggcgcccgtggctgtgggggcggctgtgcttgtcgttttgactgagtacgtttgtttattcagcgcctcctgtttgccaggc

SEQ ID NO: 261961 - DNA, 122 bp, Homo sapiens
gacgggaccagccaaaaggccacatcccacccagaaataaaaatcactatgccaagctcacgctcactctctcccctgctctcctcctggacacacccacccagcattcatcttttctcttt

SEQ ID NO: 261962 - DNA, 122 bp, Homo sapiens
cggggggcaccggagacccggaggtggtggcaagtcagtccgggactggcccagggcacccgcgcgcgtcggtgagagggacccgggactccaggtgacctccggatccgccctctaagtca

SEQ ID NO: 261963 - DNA, 122 bp, Homo sapiens
atgaggcgtggggctgggatcttgcacctagatgtcatcccggggtggggacaagatggccgaatagaagcagcagcaatccggggctcccatcaaaaagaaccataattagtgtgtggatc

SEQ ID NO: 261964 - DNA, 122 bp, Homo sapiens
tctacctggacctgcccctaatattggctagcatctcctcacatggaattctggaagcctcgcccccttctttcctcacccccagctctgctcctcactgtgcagggccttggatgtgcctg

SEQ ID NO: 261965 - DNA, 122 bp, Homo sapiens
cgacctgcccacctccctctagtagatcttgttcctcctctaccccgacttgcccacctacgcctggttatgcattaaagtttacaactggtcttccttggtatatccagctactcttgata

SEQ ID NO: 261966 - DNA, 122 bp, Homo sapiens
ttgggagcaacgcctcctctccaagacccacaggtacaggctttcctaagatgagagtgacgttaaatccagcatgtaagagccctttcatcccaaaataattaacacatttctcatgcttt

SEQ ID NO: 261967 - DNA, 122 bp, Homo sapiens
gccggcgcggtgattgggcgctggacccggcccgtgccatgattgggctcaggttccagccggagcggtaactgggcgcaggtcccagccgccgcactaaacccggcccgtgcggtgattgg

SEQ ID NO: 261968 - DNA, 122 bp, Homo sapiens
ctggccaggcggggctgggcggggcaaggccagcggtcggcggggaggcgggcgcgagggcggggagcggcgcggaagccgggccacataaaggagcgggcggcgcgacaggggcggctctt

SEQ ID NO: 261969 - DNA, 122 bp, Homo sapiens
tccccaaaactgagatttcaagaaaattcaccctttccgctttctttggcgtccttcaaccgtgaaggaaatgaaggttgagaacctggaacccgcttccaatgaccaagccctttctctgt

SEQ ID NO: 261970 - DNA, 122 bp, Homo sapiens
gaggaatttgaaaaatccactactgcaacttgatctgtatgtgatggatggggagaggcgcggagagagttgggcgccaatcctattaagggtttagagaggggagtcttttccccggacgg

SEQ ID NO: 261971 - DNA, 122 bp, Homo sapiens
cctgcctggcatggaaagtccttctcgtggtcccccaggtcagatagcgttgcctggctacggggcagtcagcgaggctccggcagggcgagtaaacaggcacacatgtttaaaattcaata

SEQ ID NO: 261972 - DNA, 122 bp, Homo sapiens
tgctggggtctggacgctgggagctggggatggggtgccgcgggggtcttcagagcgttgcgtggtggtcgctcgaaaatcctgacatgttgcagtcttggacttttggtcaaatcgccttt

SEQ ID NO: 261973 - DNA, 122 bp, Homo sapiens
ctttgcacagctcctggacacagctctggaagtgggagctacagtagttcagaattatcacgcagagaatgagaacattttgcaaattcactgcaaacgtaagttttcctttaatcctgagc

SEQ ID NO: 261974 - DNA, 122 bp, Homo sapiens
atgaagtaagacagctttctgaactgtaaggcttccgaaattctttccaaggaacctctgcgacgcacttttgtggcagcacatacatcctaacctcttaaactagctttagctcttggcta

SEQ ID NO: 261975 - DNA, 122 bp, Homo sapiens
gacctttaaaacaaatcgtaactttttcaaaaaaggaatactttgaggtggatagaaacacggaaagaaggcttacattgggacagaggagatataattttctaattcatatttttctaact

SEQ ID NO: 261976 - DNA, 122 bp, Homo sapiens
gtcagatgatttatggaaaatattctaggataatctgccaccagcattttattggtgtcacggaagatgctaatggtcacataagtggaagcagaagcagaaaaatgtaggtgctatacacc

SEQ ID NO: 261977 - DNA, 122 bp, Homo sapiens
cctcgccttggggtataggagtcctgtaccgacccctggcttgcccagaggacaggttctcgcccgggccagaagcaaactgcggcgaaatcgagacaacagaactcaggtggcggagggtc

SEQ ID NO: 261978 - DNA, 122 bp, Homo sapiens
gtgctgagtgagaaatgcaggtcctgaaaggctacatagtgtctgactccattcatgtgacgtgcttagagaagtcgtggttgccgggcattgagcagggcgggctgggggaacttcggtgc

SEQ ID NO: 261979 - DNA, 122 bp, Homo sapiens
atccccaactcacccaaagctttcctacccacatgcccgctatcagctaacaccaaagcccgtccccgccctgcgccccgctgccacccgactcctcacgctccccaaagcctatcccagac

SEQ ID NO: 261980 - DNA, 122 bp, Homo sapiens
agcttcaccccgactacccggcgtgcgcgtcctcctgccggcctgcaggcccggggcctccgcctgcttccccacagctgctccttgcggccccgcttgcgttcacgctgtcgcccgggccg

SEQ ID NO: 261981 - DNA, 122 bp, Homo sapiens
tgtaattggtattttgagtaagatcagaagcgccgtccctaccccagcaagacctgaggacgttgcgcaagtgactggctgtgcctcacggtgggtttgcgctgttgtgctcagcctgaaag

SEQ ID NO: 261982 - DNA, 122 bp, Homo sapiens
gccgccctggaatcacggcagctccggatggatcctggatgccagaatgcagcctcagcacggggctgcaggacaggagtgagcgaggggctgcagagccggcggccgcggtgggcaccatg

SEQ ID NO: 261983 - DNA, 122 bp, Homo sapiens
gcgccagaggcaccgtggaagtggacgtgcacggcacgctgttcatcgtgtggtacgtggcgtccggcttgaaaggatggctcttgccctgggacacggcgatgtccacggccgccagcgcc

SEQ ID NO: 261984 - DNA, 122 bp, Homo sapiens
tactgagacccgcagggagaaagcgcgccccctcctgcgcccggctcgcccctctgcagccgctgcctgaggtctccgcctccaggtcccgcgcgcagcttcactccactcggtgaagcggt

SEQ ID NO: 261985 - DNA, 122 bp, Homo sapiens
gtttctcctctgaaacatctgggatttataacagggcttaggaaagtgacagcgtctgagcgttcactgtggcctgtccattgctagccctaacataggaccgctgtgtgccagggctgtcc

SEQ ID NO: 261986 - DNA, 122 bp, Homo sapiens
ccagggtctttaattcacagctgtatcttcaaattactaagcctattcaaatcttaacaccgtgccagttgccacagaatggggagtcaaacctattcttaaaaaaaaaaaaaaaaaaatct

SEQ ID NO: 261987 - DNA, 122 bp, Homo sapiens
gatgtgagctgagctgcacccagacaaaagcggctcggggctcctgaaagcagcaggcaccgccggtcctgccaaggggctacttcctgcgcggagtaggagagtaggagaccccaggccag

SEQ ID NO: 261988 - DNA, 122 bp, Homo sapiens
cctggaagaaggtgaaggtgtgttgtaaaagtgtaataataagaggaacttcgaaggagacgaggtcacagaggtataaagtaagagcatccctggtttgcaagaagatcaaatgcttgggc

SEQ ID NO: 261989 - DNA, 122 bp, Homo sapiens
ctttcctcctctctttctacttgccaagcacagagaggatggtgatcagggggcctccctcgtgattcatggaaattacatgggcatcaacaccgtaagtttgcttcctccaacatcacagg

SEQ ID NO: 261990 - DNA, 122 bp, Homo sapiens
agataagctctttccctgtcattgcctactgctgacttcactgggaggcagggtgcccagcgagcgcagggtgggggcgcgccctgggatgggtggggaggctgagaactggcggagagcag

SEQ ID NO: 261991 - DNA, 122 bp, Homo sapiens
gcagccaacaccacctcctgggcttcacaggttcactcacccaagaggccagcacaaccacgaccgagtgggtactcagtggcccagacaccccccgaacactggcactgccacaaggccct

SEQ ID NO: 261992 - DNA, 122 bp, Homo sapiens
tgcagacacgggggatacagtgcctgctgcccctctccaatggaacccacaaggtcatgccggccaaagcctgcgccggggaccggcctgaggcccgacggccctgtctccgagtgccctgc

SEQ ID NO: 261993 - DNA, 122 bp, Homo sapiens
catgtgctggctgcatcggggcagtgtttggagtcctccccaaatgtaaactggcactgccggttggcatcgtacgaggtgccagggagatcgcctgggagctgtatgggattctgaggctt

SEQ ID NO: 261994 - DNA, 122 bp, Homo sapiens
cccaccagccctgctcacctgtggctgccttgccctgagctctagtgcctgtcccctgctcgtcctgcctcccaccggccctgctgacctgcggcggctctgccctggtcccctgacctcca

SEQ ID NO: 261995 - DNA, 122 bp, Homo sapiens
gaggccaaggtgggcggatcacttgagaccaggagtttgagaccagcctggccaatctggcgaaactccatcaaaaaaagccagaggaagaaaaccacactttaaagccagaccaaggaagg

SEQ ID NO: 261996 - DNA, 122 bp, Homo sapiens
gtgcctgtggttgaaatcccacctccaccacttaatacctgcttgatcttagttaagttacgtaatctctctgtgcttcatcctccttatctgtaaaagggactaggggatagagaaggctg

SEQ ID NO: 261997 - DNA, 122 bp, Homo sapiens
gaagtgctgggcatctagctaggttggatggggcacagagcaataggccgtccaggcccccggcgactgtgacgggacaacgggcattggcttagatggagcagagtgagggaggggcctcc

SEQ ID NO: 261998 - DNA, 122 bp, Homo sapiens
tggtgacactggggaggggccctttggccaccgcttccatcagagtctaggcaacttgaccggcatttcacccttccgctttacctccccaagagagcctgagatctgcccttggttagaaa

SEQ ID NO: 261999 - DNA, 122 bp, Homo sapiens
gttcaccactctccactaactgcagtggctaccgtttattacagacagtgaataggagctcggagacctacagcaaacctgtccaagatcacacaactagtaagaggcagagctgggatttg

SEQ ID NO: 262000 - DNA, 122 bp, Homo sapiens
cggtctagaatcccagtcttccaggccagtgctctcggtcctaccggctcagggcccctgcgaagaatctttttcaagaaattcccgaccgcaggaattccttctgcgctaggaatctccat

SEQ ID NO: 262001 - DNA, 122 bp, Homo sapiens
tcaggtccgacgctgggcatgtggggactcagtgagcggaccctgggaaagacggcagctcgggaaggacaagtgggggccgtcgcggtggagtggtgcccggggccggcccggggcgcgcg

SEQ ID NO: 262002 - DNA, 122 bp, Homo sapiens
aaggattttgccaatggagagatttgccaatgtaaagctcatacatggtacacagaaacacgaaataatgggaccacggcgatttatctgaaaggatttgctctgtaagccatgggaagggc

SEQ ID NO: 262003 - DNA, 122 bp, Homo sapiens
ttacactgctggtgctagggcacggaggtggaatttcctgtctccattctgcccacattgcgagactgaccatctgttcattggctggaaggctggaaagagggggtttcctccctgggcaa

SEQ ID NO: 262004 - DNA, 122 bp, Homo sapiens
ttgagaacgcctcatttgtcccctggaaccatctatgcttcagtaattcccataagctggcggtcgcctctgggtctaaactcccaaggcctccattgggcactgagcacattcggttattt

SEQ ID NO: 262005 - DNA, 122 bp, Homo sapiens
gcctgaaccgcggcctcagcttcctgctctgcggctccatccccgaggcagagtcaggttcgggaagttggagttcctctgcacccagatgtggaatgcccagggactgctgaacagcaggc

SEQ ID NO: 262006 - DNA, 122 bp, Homo sapiens
ctggactcccagacctcggcaccaaccgtatctcctgttactcgccccagggtggttgcccggggaaaaactccaagggtttcactggctggcctggaaaccctttcatctttgctccatca

SEQ ID NO: 262007 - DNA, 122 bp, Homo sapiens
agttatccagttatccacaacggtcactgaacagtaactcttttccccaaggtcttgaaacgctcctctagagcacttcctgcaggctctgtgtgaaaagcagtgatgaccacaatggcgcc

SEQ ID NO: 262008 - DNA, 122 bp, Homo sapiens
aagatattactgacaataacgtgaacactctgtgtgaccaccgtggatcgtcatatccagcgggggagaggggggtgatatgactccccgcatcgcggggggctcatccccttgccatggga

SEQ ID NO: 262009 - DNA, 122 bp, Homo sapiens
ggaggaactggggaaggtatgtgaggaataccgcccagcatctatctaggaggtaaaccacggtaggaatgggctaacggtgtgtatcaacttatacgagattctccttaagaatcatacag

SEQ ID NO: 262010 - DNA, 122 bp, Homo sapiens
gaaagggctaggggaggaggatggggaggaagatgaggggagcacagaaaagaacccccccgcccccgccttggtggctccctaagcagataggagatacataatttactacggaaatgcaa

SEQ ID NO: 262011 - DNA, 122 bp, Homo sapiens
cgcggcagctgcgggacgtccgccaagacaccagcccaccgacccaggagcccggcctcgcggcctggaactgccacccccagctgaccccgtttccctggaccccactcaccgcgcggcgc

SEQ ID NO: 262012 - DNA, 122 bp, Homo sapiens
aagaggagaacactaagtatttggatgcatgaggattgttgggaatagcttcccaaggctcggaactcttaaggaaagcttccatttgtttatgtaagttccagtgatgggggagaagacac

SEQ ID NO: 262013 - DNA, 122 bp, Homo sapiens
ctggctcttactcatcttcaaaatctctctgcagagtagtgcctttagataaggaaactgcggcacagcaagattctggaactcatgaagaccattcccttctgtgtgactccattagatgg

SEQ ID NO: 262014 - DNA, 122 bp, Homo sapiens
gccacactacatttgacccatcagaaaattctgccagagaggtcaaggccatgagtaaagcggccatccaacttcagtggtctgagcggaaatgatctgtaataaacaccatgtagagtggc

SEQ ID NO: 262015 - DNA, 122 bp, Homo sapiens
gaaggaaataaaaaacaattggggaagtggtgccaagtcactcaggctttgaactgaggacgagtagtgcggtcgcgcctggggcgcgtccggaaatcatcctcagcctgtggcggccactg

SEQ ID NO: 262016 - DNA, 122 bp, Homo sapiens
agggcgcatccccacggggagattggatggaaatggcctgccagtgtgtgtgtgagtgtgcgcctgtggcagcagcagagtaaacagccgctgccctgtcctctctgcggccgtggccaggt

SEQ ID NO: 262017 - DNA, 122 bp, Homo sapiens
atgtattgaaaatatgaataccatttaaaaaacgaacaattcaagtgtaatctttgactacggatgacataagcagtatagtgaagtttcttattttgcatcagaacaagtgtgctgttgtt

SEQ ID NO: 262018 - DNA, 122 bp, Homo sapiens
gctgcaggtctctaaggcaacgtgcaagatggggctgtgggtacaggaccacgggggtgccgagggtctctgatgcctgaagtcatgtgtgcctgaccatgtcttcctgggggcagggtccc

SEQ ID NO: 262019 - DNA, 122 bp, Homo sapiens
tgacgatgaggacagtgtggggggtagggtccctttctttggggcctttgccccagggatcggggcctctcacttgggccactcactcgaaagaggtcacgaagcaggtctgcgaaggagcc

SEQ ID NO: 262020 - DNA, 122 bp, Homo sapiens
tgatctcatgatccgcccgcctcggcctcccaaagtgctggggttacaggcgtgagccaccgcacctggcgttaaaaactttttattgaaatgtaatgtatacgggccaggcgcagtggttc

SEQ ID NO: 262021 - DNA, 122 bp, Homo sapiens
ctagggataggccacatccagacacagctcggggatgtcacaggctcacttccagacccccgcaacaaagccagacacacgcatttttgggtttcccgttgcatatggaggttacatttaca

SEQ ID NO: 262022 - DNA, 122 bp, Homo sapiens
ccccggaggaggccccgggcacaggagccagctcggctcacggtggggtctgcttggaggcggctgggtgctctttttctatgcagacgggaaactttttgaaaagtgactacaattcattt

SEQ ID NO: 262023 - DNA, 122 bp, Homo sapiens
gcccgcctcgcggggcggccagcgggcggaaggtgttcattcggggggcgctgaggccgccggccccgggcgagagcgtggtccgcgccagctgtgcgagcccgcggggctgaggtctcttc

SEQ ID NO: 262024 - DNA, 122 bp, Homo sapiens
aaggtaggaattttcccatctgggaggcaggtggtgaaccagaaggtttataggtgaagacgatgcttgaactgtgttcacaggtgctttttgccagatagtctaacagattaaggtgctct

SEQ ID NO: 262025 - DNA, 122 bp, Homo sapiens
ttccccccctcaatctgtccttgttttgtcccatctccatagccttctctctccctaggccggctggtgtctcactcaaccccaatccgctggcaccggggccaggaaccccaggcccgtcg

SEQ ID NO: 262026 - DNA, 122 bp, Homo sapiens
cacaggagaggcgccgggatcccgcccgctgcggagagtgcgctagttcactcacccttacggtctccgaagcagacgcgaagccctccaacgtgagcctcaccagcccccgtccccaaaac

SEQ ID NO: 262027 - DNA, 122 bp, Homo sapiens
tgggccggggtggcctgggtgccaggaggaggggagcataccccacaccctccctgccaccgttgccgttccagaacctcggtcagtgtttccctgtctgggggcagggcccagagcgagca

SEQ ID NO: 262028 - DNA, 122 bp, Homo sapiens
tggcgggcgggaacaccaaggtgcacgcgctcccggaggcagctccacgggatgggagtccgggctgccttgggcacccccgggtcagcacccccgccacacacaggaaggaacgcgcagca

SEQ ID NO: 262029 - DNA, 122 bp, Homo sapiens
catacggggcccttctgagaagggccccacactaggtttaacattctgctgtgaccaactcgaaattctttctaattttattttgagcttgtgatttgtaagtgaagtctgatggggccttt

SEQ ID NO: 262030 - DNA, 122 bp, Homo sapiens
gagaggctgtgagctgagccaccgggacaggggaggctgcagctggaggtccggagggtccggaggtcgaggcaggtcaaggatctcccagggcagggcgaggctggggctcaggagtgggg

SEQ ID NO: 262031 - DNA, 122 bp, Homo sapiens
aaatcacacatacacaccccattgggcaggcaggcattcatgcacatcaatcactaaatacgtgtattggggaagaaattttttaaatagcaatgtaaagggtgttgggcatattcacaaat

SEQ ID NO: 262032 - DNA, 122 bp, Homo sapiens
cccccccagggatgggatctgctggcaggtgcgccagctctatggagacacaggggtcctcggccgcttcctgcttcaaggtgaggcaggggctgcagggcatgtgggtgggggatgacgca

SEQ ID NO: 262033 - DNA, 122 bp, Homo sapiens
gccgtccccgggtccccccacgtccccagtccacgcttctcccctaggggcgagaggagacgtggctccacgcggccactagggggcgtcaaagtccatgcccttaaaaagccaggaaaacg

SEQ ID NO: 262034 - DNA, 122 bp, Homo sapiens
ctgaggcttcggcggtgccggctgcgcgggcatgagtgggacatgaagcctaggggacaccggggtcggaggcgccgcctgggttggggtctggcactgtgccaggtcgcagtactcccagc

SEQ ID NO: 262035 - DNA, 122 bp, Homo sapiens
tccccggactgcatagcagggcttccctcaaagaaccagaatcaaagggcaggaagggggcgcaaagatcagagtccatccctcttgagaggagcaaacggaggcttgcaaaggtgaagtcc

SEQ ID NO: 262036 - DNA, 122 bp, Homo sapiens
cgaggagtggggcaccagttgctgcccacaactgcaggacggcaggaggcccgaggctggcgtgtgcctgaacagggagccctgtgcagcacccacctgggccctgggcctcctcgtatggg

SEQ ID NO: 262037 - DNA, 122 bp, Homo sapiens
cgtaatctccttcactccgctcccacccatccattcattcatgagcagacacttgccagccgctgtaaaagcacctgtgggccagtcctgctgctaaatagagacacctgcttcctacagta

SEQ ID NO: 262038 - DNA, 122 bp, Homo sapiens
acaagatcattgattgattacagagcactttggaaaatccaaaaggctatacaatgcttacgttttaaaaccaataattttgcctcctaaatgatgcacttggataagccgtcactctgaca

SEQ ID NO: 262039 - DNA, 122 bp, Homo sapiens
gagaccgccatggcggcgggcggctgcctccctgctggctccctgcaggctccctgcagtcgccgggagagaaagaaacccggccaaggctcagccacagggttgagccttttagagcaggg

SEQ ID NO: 262040 - DNA, 122 bp, Homo sapiens
gcctcatccgttccacttcagacagtgggaactctgaccgtagcaggtggagggtcggcccggggctcaggacaggtgtgtgcttcaggcgaacataccctccgaagaaaactccctcgcct

SEQ ID NO: 262041 - DNA, 122 bp, Homo sapiens
cctattaaatatgcaataaaacagataattcttaatcacccattggtagattaatttaatcgataaaattccactgaggctagtcctgtgtgaaagccctacagagtgttgaaagcatcaac

SEQ ID NO: 262042 - DNA, 122 bp, Homo sapiens
gggagagtggtaaggctgtagtggtcataagaagccgtgggaaaggtcttcagcggtaatcggggcccatggaagggtcacagaggtgatgagcctgccgagagggtctacaggattgatgg

SEQ ID NO: 262043 - DNA, 122 bp, Homo sapiens
gtgagttaactgtgtaaacagcccctggggctggtgactggcacactggatggtgcagctcgagaagcggatggattccactggtgctgccatgtgctcctctacagccacatctcttccct

SEQ ID NO: 262044 - DNA, 122 bp, Homo sapiens
acaagctccagcagggcccaatctgcgcactgcgattcacgatgcggccaggcctttgcgcgcgctgtgccaccaccaggagtcctcattagaggcaactgcggtggcccttgtccgaggag

SEQ ID NO: 262045 - DNA, 122 bp, Homo sapiens
tcagctgttctcagtcccacctgaacattgaatcatttggagagtttaaaagcaactcaccgacaacaaaaccaaaacacacaaagaaagaaacaaccacattctccaggccccatcccaag

SEQ ID NO: 262046 - DNA, 122 bp, Homo sapiens
agcagccctggagatgatctcgcacctcctgctggcgtcaccaagcccgcggagaggaagcggctgtcactcggaagatgagaaattggagtctgagggaggctggcttctctagccctata

SEQ ID NO: 262047 - DNA, 122 bp, Homo sapiens
ccatccgctccaaagctggctgtacctcgatggttaagggcagccaggcgtgctgcttctcgtccaaatacacgaacttctcccaggcccacaggcggtccgggtggtcggtgactgcctcc

SEQ ID NO: 262048 - DNA, 122 bp, Homo sapiens
cgccatcagctgtactgcctcacgctccttccccgcgttgtccatgtcgcccgccgcggccgccacagccccctcagccggctcgctgtgcgcccaggcgccttaaccctccctctggcggc

SEQ ID NO: 262049 - DNA, 122 bp, Homo sapiens
tgcctccacgcattcgagtgtcaggtcctgttctgggagccagctacacaggagcgagcacggccgagctcacggttattagggggaagatggaagatagggaagtgagcaactcaaatgtc

SEQ ID NO: 262050 - DNA, 122 bp, Homo sapiens
ctgctgaggcggcggcggctcggcgctgtttgctccgcgccgcgcggcttgcgctctccccggaacgcccacactctcaatcgctacattgttgacattcggcgctgacgtcacccgctccc

SEQ ID NO: 262051 - DNA, 122 bp, Homo sapiens
atccgcctgccttggcctcccaaagtgctgggattacaagtgtgagccaccgtgcccggccggctgatgactttttgttttgaatttgttggagggccttggaggtgagctcacagcgctgg

SEQ ID NO: 262052 - DNA, 122 bp, Homo sapiens
ctctgctgcatcccggcagctcttcagatgcttgcacaccttgtttacagctcccggtaacgacacaggtaacaccggaagtgacgtcagagcaggaggccgagagacaacttaaatggcga

SEQ ID NO: 262053 - DNA, 122 bp, Homo sapiens
ctggagacgtgcacacgcctgggaacaggtgctggggcggcacccaagcacgggagccagcgttggggaagcggcacaccccagggagctagcgctggcaaagcacacccaccaagagtgag

SEQ ID NO: 262054 - DNA, 122 bp, Homo sapiens
ctttctttccttttttttttttttgagaccaagtctcactctgtcacccaggttggagtgcgtgatctcggctcacagcagcctcctgggttcaagcgattttcatgcctcagcttcctgag

SEQ ID NO: 262055 - DNA, 122 bp, Homo sapiens
aaaattacctgtgggatatgtgggtgcaaagagagctagtctgaagataaaaataagaaacgtgtgggattgctaccccattcccagtgagtgtcagtagagaagaggagatgacccgtggc

SEQ ID NO: 262056 - DNA, 122 bp, Homo sapiens
gtcgcttccacccacgagagtccgtagcctggcagtgcgcctgcactggggatgctcactcggggtccccgggctggaggccgaagggaagcagtgaaggaaagagcgaacaccctccccgg

SEQ ID NO: 262057 - DNA, 122 bp, Homo sapiens
aagaaacaagtaaaagacgcggttcctgagcgggggaggggcctttgggcgaaggaggcgcgtcgttttctcgaagccagagaaatttgtcctgtccgccccacccactcccctaagatggc

SEQ ID NO: 262058 - DNA, 122 bp, Homo sapiens
tgcaagtcaaaaagaaactcaatgctcaatgcgaacgcagaaagaactcaacaactgaaccgccagtggaatccagtatctgggcaagttcactttattccttcgcaggaagagggtcagcg

SEQ ID NO: 262059 - DNA, 122 bp, Homo sapiens
acagcggagaaggctctcgagccccagaaggcaatatcacggtggcctaggtggatgtcacggggtgagaatcaaccctcagttgccacgaggaatctgaggagatccaggattacggtttt

SEQ ID NO: 262060 - DNA, 122 bp, Homo sapiens
gaaatgctgtcaattcccctttcctggaggaggaaactgaggcacagaggagactggacacggacagacccctccagagcggggagaacgcatcccccaacgtttctgggataggctgggcc

SEQ ID NO: 262061 - DNA, 122 bp, Homo sapiens
acaccccatcaggcaccaaggtgaattccaactgccagttagtatttaactttccacatacgattagattaaacatgtgggttcataaaagcataggattgcagactgcagttgcaagggct

SEQ ID NO: 262062 - DNA, 122 bp, Homo sapiens
tgtaagagaagcagtgactcccgtgcaggggtcgtggaggcagccttacctcttgatcttcgcacgctctagttttacgtcaacacaattctctttgcagccacagtcgataaactttctct

SEQ ID NO: 262063 - DNA, 122 bp, Homo sapiens
gcgcgcccggcagggaaaccggaagtgtggtgagctccggtcccgacaccggaaatgtggcgcccgcgcttccgcctgcgctcgccggctcgcggggagcggggggctctgggtgccagtcc

SEQ ID NO: 262064 - DNA, 122 bp, Homo sapiens
agtgcaatggaccctccagacagtcccaggccatggcaaggtgtaaccagtagtgatggccgcagatgacagaggcaagtaaagacagaggtcttcccggaaaagaccaaggtagtgagtaa

SEQ ID NO: 262065 - DNA, 122 bp, Homo sapiens
ccaggctatgtcaggcccgagtctcccggtctggggcccccccagcacgcacacaccagccggctggactcaccatacttcacagctggggaggggctgcagcttgctctcccgggaggcct

SEQ ID NO: 262066 - DNA, 122 bp, Homo sapiens
caagcctgctcctccaggtgccggcttcctcctgctgggccctgctggttctgaggcctgcggctgcagcctgccacgttctcaagtttttcacccaagatgctgaacaggggcgtgaaggg

SEQ ID NO: 262067 - DNA, 122 bp, Homo sapiens
cgcccgccggctccgcgcccgctccttgcgcacacgccaggcagcgccgccgcagccccacggcgcgcaggccacgcccgtgccacgcccactctcacgcccctcctggcggccccgccccg

SEQ ID NO: 262068 - DNA, 122 bp, Homo sapiens
ctttgctcagccagacgcctcccttttttgcatgccccacatttgaccctcagaccacttcgagcacctccactgccccgttcccgctgtcctggacggatgaagaaacctggctggtgtct

SEQ ID NO: 262069 - DNA, 122 bp, Homo sapiens
ccttcgcaggtgggggcctgtggtttcaatagccgcatcctgtccttcgtgtaccccatccggttggtacgtgtcaacgaggacaccatggagctgatccgggggcccgacggcgtctgcat

SEQ ID NO: 262070 - DNA, 122 bp, Homo sapiens
atgaaaggaaataaagtcaattgataattgcctcatttttattgcccttatttcattttccgttgttcatagtaacaggctttgtttctgacatagaaaataacacaatctctttataaact

SEQ ID NO: 262071 - DNA, 122 bp, Homo sapiens
acaacgccagcttgtgtgtttttcccagtcaccatgacaacgcctgcttgtgtgtttttccgggatttctaatcacttcgtttcctgcacagccccagcacctctgtctggcggagctttct

SEQ ID NO: 262072 - DNA, 122 bp, Homo sapiens
aactacgtggaggagctggtggagatttgcaagctgcgccaggacatcctgctcatgaagcggtacttcatcacttgcagggaggccatggaggctcgtctgttgctgcagctccaggatca

SEQ ID NO: 262073 - DNA, 122 bp, Homo sapiens
gtcttcgggttctcctcatgcttgttgagccggcggcgcatggcgcgtgtcttcttaggccgcaggtccaggggcttgtagttcctgcccttgtagaatttcctgaggttttctttctgagt

SEQ ID NO: 262074 - DNA, 122 bp, Homo sapiens
tattggaggtattgctgttcatttctgactcagtcctggcccggtaggctgcatcctcagcgattttgccgaggtttaacaatgacttggccaccagttcatcgtaattgtcatattcgtca

SEQ ID NO: 262075 - DNA, 122 bp, Homo sapiens
gaggccaaggcgggaggatcgtttgagcccaggagttggagaccagcctgggcaacatagcgagacctacaaaaattagccgggcttgttggtgcacacctgtagtcccagcttctcgggaa

SEQ ID NO: 262076 - DNA, 122 bp, Homo sapiens
ttattcaaataagaaatcaaaagagaaattggaaagttcattgagctgaaaatgaaaacacgatatatcagaatcagggagttgcagctaatgtatgcttggaggcaaatttaagcactaag

SEQ ID NO: 262077 - DNA, 122 bp, Homo sapiens
ccagccccgcttcccccagctgggccctgcgcccactgccccctcccccaccacgccgcgcgccccctctccgagccctgctaacccggggccctggctcttacctcggcgcgcgggcccgg

SEQ ID NO: 262078 - DNA, 122 bp, Homo sapiens
gccgccgccccgggtctctccaggtgctaagcccgtgagcatctgtgccgcggtcgggagcgccttcttcctcccgcgcgtccgactgtcctcaccgaggcgggggcgccgctgggttgcgc

SEQ ID NO: 262079 - DNA, 122 bp, Homo sapiens
tcgtgaccgtgggcggctgcctcatagtggtagcggcagggcaagacgatggtgccaccacggtggcttaccacctgcccaggcgctgtctgtaccactaccgagcccgactcaccctctga

SEQ ID NO: 262080 - DNA, 122 bp, Homo sapiens
agcagagcctccccgaagcccacaggcctgtggacccccagggcttggcctcctcgaggccggtctccatccctggcaagggctgggctggctctgcctaggggtcacagccacccgggttt

SEQ ID NO: 262081 - DNA, 122 bp, Homo sapiens
tacaagcggcgccttcaccgggaaagataggtacttggcagccggtggcccctcttaccccgcccgtatctcccagtgaccccctcctcaccaaaacggcaccctgggagccgcggagcgcc

SEQ ID NO: 262082 - DNA, 122 bp, Homo sapiens
agcttatgtgagcttctgtttttggccaggaaaagcctctctttgtcccccctcctcagacgcatctgtggcttgccatagccctgcatcctggattacaatcctttgtgcttactcctgaa

SEQ ID NO: 262083 - DNA, 122 bp, Homo sapiens
gcaggacatggagctaccacgcccgagtcctccctgagcaggggatggaactaccacgcccgagtcctccctgagcaggacatggagctaccacgccagagtcctccctgagcaggggatgg

SEQ ID NO: 262084 - DNA, 122 bp, Homo sapiens
tccgcaggcggtacttctgcagccgcagcctccggactgactgggacaaaatggccgagccgcaaagaaggtcaagacagccggcccacctgacccggaagtactgcccctcgcgttcacca

SEQ ID NO: 262085 - DNA, 122 bp, Homo sapiens
ctcaccgcggatgtgcgcgtaggcagccaggctgttgctgagcaactccatgtcccttcgcggggcatccatgctgctctggggggcagctcccctaccagcctgcgaggtcagcaaagtca

SEQ ID NO: 262086 - DNA, 122 bp, Homo sapiens
cagtgggaggggtgggtggaagaaggctggtctctgtctgaccaagcccccccagaataacgcaggctgcccccctaggtggaaacaatgacacaatcagctcccaataccaagggcctgac

SEQ ID NO: 262087 - DNA, 122 bp, Homo sapiens
cacgcctgtagtcccaacactttaggagcccaaagcaggcagatcacaaggtcaggaaatcgagaccgtcctggctaacacgatgaaacacaaaaaaattagacgagctcacacctgtagtc

SEQ ID NO: 262088 - DNA, 122 bp, Homo sapiens
agtggcgagaatggtttaggagatcacggcgtttgccccatacagctgccccgaaagcgccgcgtgtctcggtggctgggtccgcggcccggcctcccccacccgccaggtggctccacctg

SEQ ID NO: 262089 - DNA, 122 bp, Homo sapiens
agatcaggcaccctgtcctcattctcccctatggaagaccttgtgtagcccttcatcaggcgtgtgttgtggctttgtcacactgttttgtaatgatcgctttgcatgtcttttccagctga

SEQ ID NO: 262090 - DNA, 122 bp, Homo sapiens
tctgagaagctgcagagccctggaacacaggagacccaagtgcagatgcatttggggtggcggacagggggcatgcagagggggaggtgttctgtcatgtctgaggttggacctcaggagcc

SEQ ID NO: 262091 - DNA, 122 bp, Homo sapiens
aagaaagttaaggttgactattgatatgtatttgcatagtactttacaaatgagtggaggcgaaaagggaagatacaaacactttggtgctgtactaactgggtactaaggtcactgaaatt

SEQ ID NO: 262092 - DNA, 122 bp, Homo sapiens
atataccaataaaagcgaccatcaacgcctcactttctgagttcatgtcctccagggtcccgtgaaattcaaaccaggaagcacccggaatcactcccagacgaccacgtggaattcgatga

SEQ ID NO: 262093 - DNA, 122 bp, Homo sapiens
gcccgccgtctgcgttcagcatctcagcttttaagcctccctgagccggggctgcgttctcgttgtctccttcggccgccgcttcctggcgccagagggaccccgcggcccgcacgggcctg

SEQ ID NO: 262094 - DNA, 122 bp, Homo sapiens
aaattgccccttgctctcagctgtgccttaaaaagctgcaggtggtgactcagttgtcaccgtcactgtcaccgctgccggtgcttctggggacgcgtgaggtcaccggggtggctcgtcct

SEQ ID NO: 262095 - DNA, 122 bp, Homo sapiens
attttctggacagcaaaataataattagcatggctggtgagcagagggaaacgtctcactcgattgcacccagacatttctggataacatcattcttcagagtgtgacagtcgaggctgtct

SEQ ID NO: 262096 - DNA, 122 bp, Homo sapiens
gtgctcttggatcactcccttcttgcttctagcaaagcccactctcgggaaggggtcttacgttgtagccgcatcggatttcaagggcagaaccttcaaggtcgttggggccagtgcccgtg

SEQ ID NO: 262097 - DNA, 122 bp, Homo sapiens
gggcggggcggggacctcggggcgggctcaggctcaggcttgggctgggagcctctgcagcgcccgcgcctcggtaggtgcgcgcgtccgtccgtccgtccgttggtcccaccgcacagagg

SEQ ID NO: 262098 - DNA, 122 bp, Homo sapiens
gtgcctgtaatcccagctacctgggaggctgaggctggagaatcgctggaactcgggaggcggaggctgcagtgagccgagattgcgccacttcactccagcctaggtgttagagggagact

SEQ ID NO: 262099 - DNA, 122 bp, Homo sapiens
ccacctcctcccaagtcacatcccagccctgggaatacttcacaggctccggggaaatcccggccaagtggcagagtgggtggtggggtgcttatcactcatgatcaggagtgggtgggggc

SEQ ID NO: 262100 - DNA, 122 bp, Homo sapiens
cctgactccgcgaggagagctggaaaagccctatggaagctttagagaagtgagcatctgcgcatctgctcattagtattgtgttctttgtgagctcacgtttggttttagactgtgcctcc

SEQ ID NO: 262101 - DNA, 122 bp, Homo sapiens
atccgtcttgctttcacgggatttggggactgtgaaatctcttctcttctaatgcattcccgttgtctagaggctggggagcaccatttgattttaaaggacagccacagtcctgccagctc

SEQ ID NO: 262102 - DNA, 122 bp, Homo sapiens
cctggagcgcctgttcacaaccaggagtttcgacagtgagtttaagctggcatgcaaggtcgacggacataaagacattcaaatgccagatggcatcaggtatgctgctgcctgctggaatg

SEQ ID NO: 262103 - DNA, 122 bp, Homo sapiens
acaattacctgtgataagagccatgtgtgagagttccacctgagtggagactaaatggcacgctgctggagtactgagcagagaggaatcacatgactgtgagctcagatcatttctgggta

SEQ ID NO: 262104 - DNA, 122 bp, Homo sapiens
ccctccccggggccagggcgagcagggtgcggggctcctggaggctagcaggattaaggtcgtttttaggatgagtgagctctgcaggttccctgctttcaacccggaaggaacctgggccc

SEQ ID NO: 262105 - DNA, 122 bp, Homo sapiens
gccacccacagataactcagacagccagattctgggggtcgttcaggttgaaagactggtcgaaattacgcgggcatgagtcagcgcatccctacgcgccctccgccccttgagggtgggtc

SEQ ID NO: 262106 - DNA, 122 bp, Homo sapiens
catctattttatatctagaataagccagggggcagatactttccacactgtcatcaccatcgccactactctggaggattagccaatgctccaggaaagaggtatccgcttggagaggagga

SEQ ID NO: 262107 - DNA, 122 bp, Homo sapiens
ctgccccgtccactttcccatctcctcggtataaatcatgtttataagttatggaagaaccgggacattttacagaaaaaaaacaaaaaacaacaaaaaatatacgtgggaaaaaaaacgat

SEQ ID NO: 262108 - DNA, 122 bp, Homo sapiens
gaaaggacaaggaaggtgagaagagccccgccctccgcaaataccaagaccaagggacgccgagcgccgcctctcattgatgctgaggcctccaatatgagaagaacccattggaagaaggg

SEQ ID NO: 262109 - DNA, 122 bp, Homo sapiens
gagcacgcgcgcgtgcgcaggacttcctgagcggcccccgggctcctccctggcctggagcgtgagggaaaactgggtctggttattacagcgcaacggagctggagtccatgccgcacaac

SEQ ID NO: 262110 - DNA, 122 bp, Homo sapiens
cacacgggtcagagaacgttgcatgggcgccccccgcgctgcagagtcaggcccccgacccggcggaactccttgtgttccttttcgcagcagcttcagtgtcctccggcctgagcgagtgg

SEQ ID NO: 262111 - DNA, 122 bp, Homo sapiens
ggcggccaggccgagtagcagcaggcccgcgtagaggacgggcgcgcagtaggggctgggcgaggagcgcgggcagccggccgaggggcaggcaggtcccagcggcgacgcgggcatctctc

SEQ ID NO: 262112 - DNA, 122 bp, Homo sapiens
tgtgctggttgactccgttgcctcctccaccccagaaggggccttgggaaccagaatcaacgtgtactccaggtccagggtcccagccagcttgcgtgtggtggtacacgcacacagggtcc

SEQ ID NO: 262113 - DNA, 122 bp, Homo sapiens
cctgtattacactaaaaaaaaaaaaaaaaaaaaaaagctcagtcccagagcctcaagactcgactagggtaggtgagaaaggaaatcccagagataaacagttaaatagatttagaagtcag

SEQ ID NO: 262114 - DNA, 122 bp, Homo sapiens
cctctgcactgacactgttcgggactgctgagttggcatggccattgaccagggcttctgcggaaatactatcatcaccaccatctttcaaacagctgtaatatccaggtggctgctttttc

SEQ ID NO: 262115 - DNA, 122 bp, Homo sapiens
ccaccactcccggcaaattttttgtattttagtagagacgaggtttcaccattttggacacgatggtctctatctaggacaggacctcaggtgatgcgcccacctcggcttcccaaagtgct

SEQ ID NO: 262116 - DNA, 122 bp, Homo sapiens
ctgggctatttctggccaggccgcagcactgtggtcggtgcgggcgtggcaggggcggggcggccttatcgctcggctctcccgcctacgcctcccgctgcagagtaagccgggctgccgtc

SEQ ID NO: 262117 - DNA, 122 bp, Homo sapiens
ctgaattgcaccatcagtattagaacagtgagtaaatcccagcttgctgcctgcaaagcacgtaccttcttcccactgccacatttgtagtgcccttggctaagagactgcatctggaagta

SEQ ID NO: 262118 - DNA, 122 bp, Homo sapiens
ctggcctggatgcctgggaggcaacagaggtcgagtttcttcttcttttaggaagtgcctcggacagggatgatggactaaaaatgtgtctggttgggaaagtaaatagatgcaaagcaaat

SEQ ID NO: 262119 - DNA, 122 bp, Homo sapiens
gcacaggcgcacccctcgataggaggctcactcccttcgcagcctgggcctctgaggggccggggtgttcactgcactcgtccctgggcctccggtctggctgcaacataggagagtaaggt

SEQ ID NO: 262120 - DNA, 122 bp, Homo sapiens
attcaaaaaacatttttaaggatccctcactactagggatgcataaaagttgctaaccctcggcctttacccagcgttagaagacaaaacagagggtaaaagtcccagaaacgcgttcgaac

SEQ ID NO: 262121 - DNA, 122 bp, Homo sapiens
ggatggcaggtgcagcctgctccagccggcagggcgtgcgagccgggagcgggtcctctccggttgccatttcaggcctgctcgcttctgctagcttgcagcccggccagcctgcagaggaa

SEQ ID NO: 262122 - DNA, 122 bp, Homo sapiens
tccccgcccttccgttcctgctgccgccgccctctccacccaggctcctgtcacccaccacgggagttcacacgctccagtccatcggcctcccccggcccgaccgccctggctcaggcaaa

SEQ ID NO: 262123 - DNA, 122 bp, Homo sapiens
ttctatgactcacctcagggaagagggatcctaatttctttggctagccttgggggaaaacgagagtgagagataggagggcagatcagagaaaaactttgcttctgaggccttccttttgg

SEQ ID NO: 262124 - DNA, 122 bp, Homo sapiens
gagggttttacaagtcttgaaagaagtcttcactttgcatttttggagagcttacaaaggcggccccaggggaggaaaggtggagtggcacattcctggaaatggtttcacctgcagccatg

SEQ ID NO: 262125 - DNA, 122 bp, Homo sapiens
cataatttctcaatatctttagcacagtatggtgatgatgacttttaagcatttacatcacgtactcataacctattatgaaaataaatgaaactggctgggtatggtggctcatgcctata

SEQ ID NO: 262126 - DNA, 122 bp, Homo sapiens
cattctgcagctgggctgcaggcgccgtgggcctccgccagttgtgttcgagacgcggttcggccacagaagttttagcttgtgacttttggcaagtcagtggccctctctgggcctcaggt

SEQ ID NO: 262127 - DNA, 122 bp, Homo sapiens
tccctgcatcgggggctcccgggccgggatcctgtggggcgggggcctgggacagacactcgggacccggcctgtctgcgccctctggcggtggcggggtggggggctgttggtgcgggagc

SEQ ID NO: 262128 - DNA, 122 bp, Homo sapiens
ccatggtgcgtgactacgtgcgccagacgtggaagctggaggtgagagcgcagcctggggcgcggggtctggaggggcgtggccgaagaggggcagtcgagggttttggggggataggaggg

SEQ ID NO: 262129 - DNA, 122 bp, Homo sapiens
ttcagttcagctttaaaggccaggacgggccacacgtggctggcggcctcgttccagtggcggcacgtccttgggcgtctctaatgtctgcagctcaagggctggcacttttttaaatataa

SEQ ID NO: 262130 - DNA, 122 bp, Homo sapiens
gctctattttttatatgatccagccatgacctgtttacatgttcagtctctgagaggttacgaaacaaagtccatgtcactagggctgccagataaaagagagggtgcccatctacactgga

SEQ ID NO: 262131 - DNA, 122 bp, Homo sapiens
gtgttggccccagaaaccaatgaggtccaaacgccagtctcagttccccatccctgacatcgaccgaggcaagttcctattaaggcccagagatgaccccgggacgagacaggctcatccgg

SEQ ID NO: 262132 - DNA, 122 bp, Homo sapiens
ctcaggggaggcagagctgcagccaggcctctggaagtggacttgggacaatgcccagcccgggcccctgctgacattctcctgtctgctggtgccgggtcacaggcggactggtgaatcag

SEQ ID NO: 262133 - DNA, 122 bp, Homo sapiens
ggtgatggttcatgacaatatcgacaccagtgattactgtgctttcggtaccttcgccctcggggccttcagcggaggcatttccaccaatgagcgagtcatcaatgttaccttctgtccta

SEQ ID NO: 262134 - DNA, 122 bp, Homo sapiens
actgtattgttttctttgacaacaacagcaaagagctgcatctgcgtgctcctcttaccccgcgctcatcagttccctgtccccagcaagaccagcaaaggccataaaaccccagctgagcc

SEQ ID NO: 262135 - DNA, 122 bp, Homo sapiens
ggaacaggacggcagcagcgtaggtggctgagcagagaggaaaggaaaagccaggttaaacgtcggccagcctccatcgtggctgggggagtgggacccagcctcctgccctcccccagctc

SEQ ID NO: 262136 - DNA, 122 bp, Homo sapiens
catacccccgacaactccttcatgggcttcgtgtccgaggagctcaacgagacggagaagcggctcatcaaaggcggcaaggccagcaacatggccgtggtgtacggcaaggaggcgagcat

SEQ ID NO: 262137 - DNA, 122 bp, Homo sapiens
ggctatgaagacggaatgcctcttaatgccggaattccaagacggaatgcctcttaatgccggtaggagcagaagtgcttttcctaagggggccgggttttcctagccggtgtagtgtgtcc

SEQ ID NO: 262138 - DNA, 122 bp, Homo sapiens
cttatgatcagaaactacttggaggaaagataacagggatgtaatcttggagtttttcctcgtaagaggatctccccggtttctcgcggtcctgctaaaacgctgtcaacctaacgctccac

SEQ ID NO: 262139 - DNA, 122 bp, Homo sapiens
cggtgctgctgaagcaggatattgccctgacctttcacaggactcacaacaggggtgccccgtttactcagcccgctgctctcaactcctcatgggagggagtacgcaagtgaacaaggcgg

SEQ ID NO: 262140 - DNA, 122 bp, Homo sapiens
tcacttttaatctgccccctggcaagccccggcttgaggctgttgctagagttatcttcccggaatgtgcttgcaaaacctgaggtactgtgtgatgatgcattatagacattcttggtaca

SEQ ID NO: 262141 - DNA, 122 bp, Homo sapiens
tcatgccaagaactcacaaatttctgacacattgcttttccgcaggaggttgcgggaagacgtacaaggaagggtcgggatggtgcttgaggtggtcagagccacacccagggctgcattct

SEQ ID NO: 262142 - DNA, 122 bp, Homo sapiens
agtcaggtcacagcagacgctgaccgccggcttccccattgtgcctggggataagatctccgagtgctgctcaagagtcgccggagttctcagatcctgaatcccagcagaaaggctggcgc

SEQ ID NO: 262143 - DNA, 122 bp, Homo sapiens
ggaagagcgccagcattgtaggcaggggagcactgggggaactgggatcagcgtggccgtcgcgggcggggacagcactgggggaactgggatcagcgtggccgtcgcgggcggggacagca

SEQ ID NO: 262144 - DNA, 122 bp, Homo sapiens
gcaagcagtctgttttctgcttacagactccaaaaaaatctggctgtttccaaagttccccgatgacaacaacatccaagtggcgctgggaagtaattggagcaggaaagggatgtggaggg

SEQ ID NO: 262145 - DNA, 122 bp, Homo sapiens
agtcgctggggaggacctggtggccccctgaccttggacgagccatattggacgccccggcgccgtcccgtcttccacgctgccaactccaccgctcccgccccgaactgcgggtaggtcca

SEQ ID NO: 262146 - DNA, 122 bp, Homo sapiens
cccaccaaaagccaatctctaagtatcccagagtcccggggccagagtgggatgggagtgcgggatcggaagttccatttttcagatgggaaaagtgaggctcagagaaaggtagatcccat

SEQ ID NO: 262147 - DNA, 122 bp, Homo sapiens
ttttgctgttagctgtgtgaccttaagcaagttactcagttccatgtgcctcagtttccacgattgtaaagttgaggttctattaatcatccaacagggttgttaggaggctgagcagagat

SEQ ID NO: 262148 - DNA, 122 bp, Homo sapiens
tccccaaggaatggggcgtgtctcggcacccctcggtgacgcctccactgacatcatctgcggattcccgccccgaggtttctaaatccagacattcccgtttggctgagcactctaggcct

SEQ ID NO: 262149 - DNA, 122 bp, Homo sapiens
gaaacactgtgacaggtcaccgctttctcaggaaggtttcaaaaaagtaaaaagtggctacgatgagatcaaaagtcttcgtttttaaacagacagaccagggaccatctcaggtgttaagc

SEQ ID NO: 262150 - DNA, 122 bp, Homo sapiens
ccatcttgctaaggtttcgtaaccggaaggggccggtcttatcccacgctcctggttcagcgcgaacttattctcctgtggccacgccccgcgttttctaaccgtcctcttaaaggtgcacg

SEQ ID NO: 262151 - DNA, 122 bp, Homo sapiens
gtacctcgcagctctcagtagatcggatcttgtctcccggcttagcgccggggaactcaccgcgcactaagagcggaacgtgaacttcagtctcccctcgcgttcctccccttccttgctga

SEQ ID NO: 262152 - DNA, 122 bp, Homo sapiens
ctctatctcgcctttgttctcctctcggtggttactgcgcagacgtagtcgcccaagtcgcgtccccgccttcccggtcgcgggcccagctcgggagcgccggcgcactggcgcgctccgtt

SEQ ID NO: 262153 - DNA, 122 bp, Homo sapiens
actgtgcagcctccgtacttcccgacacgttccgcctgcaaaccacttaggagcttctgccggcaatttctcggatgcagcgcggagcccagcctcccgcactgactcaggcccggcaccac

SEQ ID NO: 262154 - DNA, 122 bp, Homo sapiens
atcggtgagtcccaggtcgagagtagaggtagaattcgtgcacgtaaagtgcgatgaaaacgggcaagttcactttgtgcagcatctgtttttaccagcgtggttctggtaaaaacaaaatc

SEQ ID NO: 262155 - DNA, 122 bp, Homo sapiens
ccagtggatcccgcaccagggctgcagatggagctgccggctagtcccacacattgcacccgcattcctcagcccttgggtggttgatgcgactgggtgccgtggagcagggggtggcgctt

SEQ ID NO: 262156 - DNA, 122 bp, Homo sapiens
cgccctttccgtatcagaaactaccaggtgcttcatggttggactgaaattccgctttcccgtcttccagcgaggcctcgccccctggagagcacacgggaatctggggacgaagaaacttt

SEQ ID NO: 262157 - DNA, 122 bp, Homo sapiens
ttgttcatgaagaacccaaacgatggtgaaatatgagcagttacctacataccgagggcacggaaagaccagtcccaggtgacgagaactcagagggccgggcgatgccctcacgtcactca

SEQ ID NO: 262158 - DNA, 122 bp, Homo sapiens
gggataaaatataaacttagtttcaagaggaagctatcttgggaggtaatgcaaataattcgttgtgtgtttcctgaataagtgacaggtgctgactaccattgatgcttcattgcaataaa

SEQ ID NO: 262159 - DNA, 122 bp, Homo sapiens
tttgaccctgagaagttactgtttggcattttgatatttccacagagggccagctgtgtacgccacgttgctctttgccaattactgacactaaagaacaacatgccttgtacttcttcttg

SEQ ID NO: 262160 - DNA, 122 bp, Homo sapiens
acaggcaaccatcttggccaccctgactcagcatttccgggttcatcttcccccggttcccgccatccgggctagcatgtgtgcccactaaggcgtgtcacactcaggaaaacgaaacctaa

SEQ ID NO: 262161 - DNA, 122 bp, Homo sapiens
gccgccacgcctgactggtttttgtattttttggtggagacggggtttcgcggtgttggccgggctggtatccagctcctgaccgcgagtgatctgcccgcctgggcctcccgaggtgccgg

SEQ ID NO: 262162 - DNA, 122 bp, Homo sapiens
gggaggccaatcgaacgccgcgccttggagcgatcacccaatccgcgaaagggggcagggcgcatccctgccaggaaccaatagaaagcctccaagggtcaggagcgacgttcagcaggagc

SEQ ID NO: 262163 - DNA, 122 bp, Homo sapiens
tgagaacaatatccctgggggggtacactttctgcgatattgggagtaatatcgacctctcggcctctgaatattaggaacaatatcacagggtgggtgtacacctcctgctctgttatggg

SEQ ID NO: 262164 - DNA, 122 bp, Homo sapiens
tcatcgccatcttggttttggtgggttttagctggcttccttactgcaacctgttttatccgcaaggtctttgacctgtatcttgtgccaaactcctatctcccctgtgacttagaatgcct

SEQ ID NO: 262165 - DNA, 122 bp, Homo sapiens
tggccaccaggtaaccgtgggctttgcagaagagaaaggtcactgcaaaccgtagctggacggaaacttttcaagcctcaagtgagttatgctgtgacgggaccatgaccatctcccaccgg

SEQ ID NO: 262166 - DNA, 122 bp, Homo sapiens
ggctcccttccctgcgcagctctaggcttagctctcagccatttctcaagaagacgatcccgagggtcgaaggccgcccttgacccttgaccacggactctccgtgtaactcggaagagccg

SEQ ID NO: 262167 - DNA, 122 bp, Homo sapiens
caaaaggggaaagaacaaatctcccacaatgtgggaggggacccgaacggggaagctggccgcgatggccagcctttattcccttattggccccgcctgcatcctgctgattggtccatttt

SEQ ID NO: 262168 - DNA, 122 bp, Homo sapiens
tcttgtgggcaaatgaagagagggacagtcggggctgggctgagcctcatttccccacagcgtcccaggccccactgtcaagatacaggctggaggtgctggagttggtgatggtgcaggag

SEQ ID NO: 262169 - DNA, 122 bp, Homo sapiens
gagaccaaaggaatgagtcattggaaatgctgtaacgtagacccttatcccaaaccctttcgcccctccaccccgagccccctgccgagaagcgaagggactggagacggggagacttggtg

SEQ ID NO: 262170 - DNA, 122 bp, Homo sapiens
cccctcttttgctttacttttctttaatcctcggtgcaagatatcaaattaaaacaacctcgagatggctttattcccacaaaataaaaaaatatgtatattaaaatgagtttctagctgaa

SEQ ID NO: 262171 - DNA, 122 bp, Homo sapiens
cctgtggcacaagggtctgacttcaactctgttcccctggaactaatgggacgacgtcagcgacactgctaagcaacgctgcttatgggaaaaatgacccgactggccagttgcaaacatct

SEQ ID NO: 262172 - DNA, 122 bp, Homo sapiens
gcatccgcccagaagtgcggctctcggcagccgggcggggcgtgggggcggctcccgttccgatccagggggctttgctctggaccgcaattgctcaggtggtctccgaactcggcctcggt

SEQ ID NO: 262173 - DNA, 122 bp, Homo sapiens
agtgatgctgagtgtgagaaatggaaaacatcctcaaaggctatcaaagggagatgggttcgtcggttagacacacccacagcgggatgctctgcagagaatgacgcagagctcaatttatt

SEQ ID NO: 262174 - DNA, 122 bp, Homo sapiens
tggtcctcttaccctaacccatagcgtcttgcatatgcatgctttggtcacaaagattggcgtggggagagaacgtggacaaactcatcaccactaatggaaataacaactaaaagggcatg

SEQ ID NO: 262175 - DNA, 122 bp, Homo sapiens
tccgcttacactccaagactgaatcctgctaactcttccttgaaaagatttcaaacccaccgcttccttccactgccactgataacatttcaatggtctctgagccatcactgtatctcaac

SEQ ID NO: 262176 - DNA, 122 bp, Homo sapiens
ttcttttcttgttcacttttacaagaaagggcagccttttgcagttcccaaatttatgcacgggatctcctatcagaccttatacattttgtccctcatttcctatgcttccagtgactgtc

SEQ ID NO: 262177 - DNA, 122 bp, Homo sapiens
ttacctcgttgcactcctgagagcaagatgggtcaccagcagctgtactggagccacccgcgaaaattcggccagggttctcgctcttgttgcgtgtgttcaaacaaccggcacggtctgat

SEQ ID NO: 262178 - DNA, 122 bp, Homo sapiens
cccgaagaaacacgctcttttaaaaattaaatcttgtgctactgtttcggggttgtaacgcgtgcgtgaccctcgtctttgagggccggatcctgcagggaagagagggcgtacctgagggg

SEQ ID NO: 262179 - DNA, 122 bp, Homo sapiens
aaaatttaagcacaaattctggcatcatatctcaaatatttgttgaagctttttacacagcgaactaaggtaagaattattcttacagtttataatttatagatgaaacagacttggaatag

SEQ ID NO: 262180 - DNA, 122 bp, Homo sapiens
cagtgactcaacccaacactttcagaggccaaggcgggaggatggttttagaccagcctgcgcaacatagtgagactctgcaactatttaaaaaataataataataaaaagtttgtttaaaa

SEQ ID NO: 262181 - DNA, 122 bp, Homo sapiens
agcattccttcctcagcctcaaggtcccagtgctaccctctcccccacgacccctttagacgggcatgcgacctccacacacgcctcactttatgtgatagtcagactagtcgcatctctct

SEQ ID NO: 262182 - DNA, 122 bp, Homo sapiens
ttggccgggctagcgtgtggatcacctggactggggtttcagaggtgggccctgagcgtgcggcctcctgagacgatgcggtttggacccaacattttgtccccatggtccctcagctccct

SEQ ID NO: 262183 - DNA, 122 bp, Homo sapiens
caccctccctgcctgcagatggggctctggtgcagccaaagatgtcagcatccttcgtgccggaccacaaggcgtccatggtgctcttcctggaccgtgtgtatggcatcgagaaccaggac

SEQ ID NO: 262184 - DNA, 122 bp, Homo sapiens
tcggggaacagtctgaggggtactgactgggacatccgcgttgggttcctttgcagccagcggcgtcctttcgtgttgcagtgcactgcggtgcccgggccgatgcctgggtgggagtgggc

SEQ ID NO: 262185 - DNA, 122 bp, Homo sapiens
gagtggttctttttcttcaaggtctttgctttcttgccttggccgttcctgtggtgatctcgtcgtggtcgtgatcattggatgcatcctctcgattctcatcgttgcactgtcgcggagaa

SEQ ID NO: 262186 - DNA, 122 bp, Homo sapiens
gtgtggatggaggctgagtagagagcctggacttccgcccccacctgacagcaacaaggccgtgcccctccacaaccaccaaagtcatgtgagagaaagccagttaaaacagaaagcgtaaa

SEQ ID NO: 262187 - DNA, 122 bp, Homo sapiens
caaccccggtgcgagtgcagcccacctgcttcagctggaagagcgtcctagagtggtctccgcctgtgatctggtccaggaggtcgtccaccactttcttgctgtagctcccagcatccttc

SEQ ID NO: 262188 - DNA, 122 bp, Homo sapiens
ttggtggtcccgatccggggcgtggccccaagggaggcacttagccctactggggatgcgcgcgcagacccacggcctctgctccgcccccagctggcctgtaattggcgcagtcggcccaa

SEQ ID NO: 262189 - DNA, 122 bp, Homo sapiens
gagccccgcaccccagcggcccaggctgttcccgttcctggatcgctgggcgccttgggccgtgcacctccctcagcggatatatacagtttcctcgcctatagagcagggccgcacctcga

SEQ ID NO: 262190 - DNA, 122 bp, Homo sapiens
ggcttgcctttcagagcagatcaggctctcctgatcctgaggtcccaagccgtgcttccccgcctgtttggcatgcagtccgtatgcgtgcctcctcaccctcaccccctgggaggttcttc

SEQ ID NO: 262191 - DNA, 122 bp, Homo sapiens
cccggaaaacggcggcattccgacacaggaaagcccgcggatcaactgatctgcagacaacgcttcttccttcctgggaagcggccacaaaggcagccagctgaccccggcccagcgcggct

SEQ ID NO: 262192 - DNA, 122 bp, Homo sapiens
tccctcacagtggtcaggtaagcaatgagggaaaatgatggaggtgagaaaggaagaacccgggctgatgtgggcccacaaaagaaagaagtctggaataacactggaaggggctgcctacg

SEQ ID NO: 262193 - DNA, 122 bp, Homo sapiens
tgccatttgggaggactgaaccagacccattttgatttggcctaccagtttctgaggagtcggcacagatctcaccaggtatgagggcagtctctgacgcggacatctcttttctgtggttt

SEQ ID NO: 262194 - DNA, 122 bp, Homo sapiens
actctggggtgagggacagttgaggttggagtgatgagattgaaaggaggaagagtcagccgaacattgggtcaacagcagggatgtgaccaccaggttccactatcagttacctatggcct

SEQ ID NO: 262195 - DNA, 122 bp, Homo sapiens
gcgccccagctctaggggctaggcccgcggaggggcacaccaggcgggtgttggggaggacgcagagggctggggctggagcccaggcggggcagggggcggggcggagctgggtccgaggc

SEQ ID NO: 262196 - DNA, 122 bp, Homo sapiens
gtgtatgcgatgacagtgcgtctgcttgtagaaggggctgggtcccctctgcagagcctccgcatggggctgcatgactggttccggccgacttgctggggagcgcacagcctgtccacaaa

SEQ ID NO: 262197 - DNA, 122 bp, Homo sapiens
gagcctgctgatgcaatcacctcatggagtggttttgatgagcagcatcacgaccacccccggcctgggataccaaatatatatcttcctaagtggcagtttctcctcctttaaaagctgac

SEQ ID NO: 262198 - DNA, 122 bp, Homo sapiens
ttggggaggcagcagctccgcaggctggcggttttgtttctccaaagtgtttgcaggagccgccgaccccggagtgggctcccagggcctgtgtgtgtgtgagttgtgtgtgtgtatgagtg

SEQ ID NO: 262199 - DNA, 122 bp, Homo sapiens
tgctcttccatccccaatcttgtctttctcggtgtcttgattacttgaaaatcatcccttcgtctctgtttctcgagcagtgccccttccgcaacagtacgcgctctccttttttttttttc

SEQ ID NO: 262200 - DNA, 122 bp, Homo sapiens
gccagcactgcagactccggggccgccccagccgccgccccgccgcggccccccaccccacgggctgccctctggttcggtgcctctgcctgattctgaagggctgcatcctcccttctcct

SEQ ID NO: 262201 - DNA, 122 bp, Homo sapiens
gcagcgccaaccaggccatcagtcccttcgcccatggccaatcagggctcgggagatgaccgccaacccccgcccccccaagacacgcccccgcgtcccaacgcagccagtcagagcgcggg

SEQ ID NO: 262202 - DNA, 122 bp, Homo sapiens
catgctacggagtcaacgctggacccactcactcatgctacagagtcgacgctgcgggcacgtccttttgttcaaaaaaatcatggtggtcaggcaccatggctcacgcctgtaatcctggg

SEQ ID NO: 262203 - DNA, 122 bp, Homo sapiens
cctctgtttacctctacagcatcacctctaatcagcaccctttactctgcagccacagtgcgttttcccttcttcacagcaccttcctctctgcctaggtaaagtctaccatcttttaaggg

SEQ ID NO: 262204 - DNA, 122 bp, Homo sapiens
gtcctgcagccaagccctgcctggtggctttcctgttgcgaaaggctcggttcccttcagcgtgttctgccatcacaagcagtctgcaagctggaaagaagagggagcggggtcgtatgccg

SEQ ID NO: 262205 - DNA, 122 bp, Homo sapiens
gcagctcgcgcgaccagcctcctcttccaacgtcacattgtgcgagagacaaaacccgggcgcgccggagctcacacgcgcacgcacacacatccgaccccgtcgcctcttctctcctggtg

SEQ ID NO: 262206 - DNA, 122 bp, Homo sapiens
tgcttgcgggacagctggagttccgggtgggcgtgggcttcgtgggccccgcactcggagcggcccgccggccctgctgccccgggcaatgaggggcttagcacccgggccagcggctgcag

SEQ ID NO: 262207 - DNA, 122 bp, Homo sapiens
caagcgggcgcagcaggcggccaggcccggctgcggctggagggcgaggcggggctctggcgcggggccgggcggggaggtcctgggcgttgttctattcttgaagccaatcatcctagcgg

SEQ ID NO: 262208 - DNA, 122 bp, Homo sapiens
ttctgggaaacgtagttcttagttttaccaagataatgtaatagtgtatcatagcctgttcgtgtaagaaaatgaactaagtaatctgtaaaatgggactcataacagggtatttgagaaga

SEQ ID NO: 262209 - DNA, 122 bp, Homo sapiens
ggaccgcccggccttggacccatccggagccacaggttggaggagataagtagctgtccccgtgctcatcgccctgtggagcagatcctgtctccttgctgacggtggagcccgggagttcc

SEQ ID NO: 262210 - DNA, 122 bp, Homo sapiens
agctgggccaggacacgctctcggtttctctgctgggagctctgcatgccctgcacctggcgccttgtagcctgctccacctcagcagacaggttcccctgggagcccatggcctggggggt

SEQ ID NO: 262211 - DNA, 122 bp, Homo sapiens
gagcaaacacctcagttcccaggggtccgcatcagttctggtggaggcggtgactgtgagcgtgaccagctgggctaattcgtcctgacatttagttgggacagctatagtttcctacctct

SEQ ID NO: 262212 - DNA, 122 bp, Homo sapiens
ggccaggatgtcacagggcgagtaggtgtctggccctaccactggggggccatgttgccacgcaagaattcagtgtccctctgtggggaacgtgcttcccggctgccacgctgtcgctctct

SEQ ID NO: 262213 - DNA, 122 bp, Homo sapiens
tagaggaggggcgggaagaagcgggggaggggaaaggtgctgcgggcgggaggaagaagccgagaaaacctgaggcgcaaggacccagggaccaagccgtttgagtgttttcctcccctatg

SEQ ID NO: 262214 - DNA, 122 bp, Homo sapiens
aagaaaaccacaacctttgggctttccttgtctaccagacagatgaggtcggcgagctcacgagtaaccacagagcctgggcccttaatcagcagtgaacagcaggataaacacacagatgt

SEQ ID NO: 262215 - DNA, 122 bp, Homo sapiens
tcagagtcctgaggggaagcaagcgggctctcaccatctcagggcagtaccactgctgtgcggctgtcagtcagtgctgcaggcgccgagaggaggggcttgtgaccgccccagggaagctg

SEQ ID NO: 262216 - DNA, 122 bp, Homo sapiens
gctcgcttgctggaacacaggggccttttaagttgagcgtgcgcactgcatgggaaatagcggccctggaggatgttagacttgctccctctccaagacagcagcagcctgcacctgccccg

SEQ ID NO: 262217 - DNA, 122 bp, Homo sapiens
tggctgttcttactcccacacctaaggtgtgaattcttttattgagtcataataatttcccgagaattccgagtcctgctactttaggttcttgcccaggaatccacctcttttcccccaag

SEQ ID NO: 262218 - DNA, 122 bp, Homo sapiens
cactgcccaccgtgatgactttgtgtaaggccaaattattctgacccttgggcttatttgcggccatcttgtgttgtagttctcaccaacaggttaggaagaatctgcaccgtgagccagtc

SEQ ID NO: 262219 - DNA, 122 bp, Homo sapiens
gcctcacgggcagcccctaggtgggccgtaggccaggagagtgagggtgggggtgggggccgtgggctcccagaccaggtggcacaccttccctgcttaagcccccagaaacgcccaggttg

SEQ ID NO: 262220 - DNA, 122 bp, Homo sapiens
tgcgggtctgagtgagcacctacatttggctgttgaggggcagctggtggagttggcaggcgactctgcactaagttctcaggttgaatgggagttgggtcgagggaagcaatggacgcaga

SEQ ID NO: 262221 - DNA, 122 bp, Homo sapiens
gagacgaagatacttgctgctgatagaggtgaaaacgagattgatccgtctggggttttacggtgtgcactgggtgctgcacagacttgtcaaggtttgctacgtcctctgggcatctgcaa

SEQ ID NO: 262222 - DNA, 122 bp, Homo sapiens
cgcagcgcgggcaggaagccttttcctcacttttgcctcggtgtcccggagctgcagcagcgtctccctgtcctcacagcggacgcggccccaggtgtcccaagccccggcccctcctgggt

SEQ ID NO: 262223 - DNA, 122 bp, Homo sapiens
taccacaaaatgccaccacttccctaagtgacgctgggccccgaggacctgatttgaaatcggtgttcagaagaccgagcccggctggacgcagctggcctccggctgagagcggaggggaa

SEQ ID NO: 262224 - DNA, 122 bp, Homo sapiens
ggagaaggggttcactatgttggccaggctggtctccaattcctgacctcgtgatctacccgccttggcctcccaaaaggattatttgcgtgagccaccactcccggccagaagactccttt

SEQ ID NO: 262225 - DNA, 122 bp, Homo sapiens
aacaaatgctgagcctttagatagtttgtctagatcccgggaatcacaggcccaaagaagcgtcataaagaacacaaattggctcagacacaacgtctaatgtagtcccctttaaattcaaa

SEQ ID NO: 262226 - DNA, 122 bp, Homo sapiens
actgtgcttcctccgtcctacggtgggagtgggcagggctctagattggcatcgggggttcgtgccctgacctttgactatgatagactgggtgctgggcactaaatgagatgatgaccatc

SEQ ID NO: 262227 - DNA, 122 bp, Homo sapiens
gaagcgtgggaggccggaggatcagtgactggctgtcgtggacatgctcgctacacctcccggggcttcgcttcgtttactattaactgtcgttactcctctgtatctcgtcagcaggggct

SEQ ID NO: 262228 - DNA, 122 bp, Homo sapiens
cagtcaagaacatgcccagagctggaaaacgctgcactcacagctacattcacgcctattcggggctccggcggtcacactgcgatttttccctattgcacgtggtcccgcccaatcttcag

SEQ ID NO: 262229 - DNA, 122 bp, Homo sapiens
ttatcgctttaacaaaactttcctctgcttctctagggagagcctagtattagagctgcccgacaggcgggaccccgaaatcggggcagctctggcttagtccaggctattcgagtgggcgc

SEQ ID NO: 262230 - DNA, 122 bp, Homo sapiens
tactatgtgtcagacactgggtcaggtttaatgcagttttttgctgcattttcctatcctcgaatatttccatatattctataagagagatattattatttccctcattttatagatgtaga

SEQ ID NO: 262231 - DNA, 122 bp, Homo sapiens
ttaaagctaaaatgatcaaagatccccaaaatttcagagcaagaaatatggggaagtcaacgttattgtgtgaataacatcagcctttggttggttgatggatggctattgagtttgggggt

SEQ ID NO: 262232 - DNA, 122 bp, Homo sapiens
ttccgttaaagcagaattaaggaccatcatcttgtccacattgctactggcatcaagagacgcctgctcctttttgacggtctgcatttttctcagctgcatcagaaacaaccttaccctat

SEQ ID NO: 262233 - DNA, 122 bp, Homo sapiens
ttaactttatctcttttttgtaggtaatgtcactcattctcatgacttttatgtcggcaacgaaatgcttattcccaaatttgtgtctctatgcttgatttttctctcaagcttagaatcca

SEQ ID NO: 262234 - DNA, 122 bp, Homo sapiens
gtgttaggtgggggctttgctagggggccgctgccggcgagctgcttggtgagctgtgcccgtgaacccctgcagatacctgaagcggttcaaggtgatgaagcccaaggttctccgcagct

SEQ ID NO: 262235 - DNA, 122 bp, Homo sapiens
gttgcccacggttccctagagaatcaggagatccttcgactccaaaccaccctgagcaaccgcgctggggcaaaatgaacgcagcctctgagccagccacggcctctgtccaggacgctggg

SEQ ID NO: 262236 - DNA, 122 bp, Homo sapiens
cagaagcccctcctgcaaggcaaatgaagaggaattggccccacaattccccctgcatctcgcccacctggcaggcacctggcccatgggccatgttaaattagtcagaagacatttcttcc

SEQ ID NO: 262237 - DNA, 122 bp, Homo sapiens
tacacggctcctgcttctctcacgcctcgtacggaacggaagtgacgtgtacgtcgcgagcgattgacggaaacagaaattgctttgcggcccgcacggaaattgctttccttcggcttccg

SEQ ID NO: 262238 - DNA, 122 bp, Homo sapiens
ctcactcactaagcaagtcccaccaggaacacacccgttccccagcccttcgccctggagcgtgctgcccgggagaactttctgtgaagagagaaacgccgtgtctgtgctgcggatgcctg

SEQ ID NO: 262239 - DNA, 122 bp, Homo sapiens
ctaactttgcatggaggtagaagtcggcccgtgccactgtctgtctctctcttgcctcatcgcctgtcctcgcagcccagtccttggggccggtctccataggccccaatgcccaggacagc

SEQ ID NO: 262240 - DNA, 122 bp, Homo sapiens
gtgatcaggggcatgcaggctcctggtgatgtctgtgaagccaagaccttggtcggaccacggacccttgcccccatttaactgatgagaaaagtgactttcagaggagggcagagctcacc

SEQ ID NO: 262241 - DNA, 122 bp, Homo sapiens
ggaggttgaattggctgacgaacatcttcttcctccaccagcagtttgtgggacacatcacgtttctgccaagtgctacagctgaagcccatattcatagaagcaccctgacagcccttctc

SEQ ID NO: 262242 - DNA, 122 bp, Homo sapiens
attgagtaaacttggggaaatgccttctcatgctagcatggattctcctttcctaaaattcggatattttcttttctctatttcatgggacatttggagttctcagaagccacggtgattta

SEQ ID NO: 262243 - DNA, 122 bp, Homo sapiens
cctccccactacccaaacgaaatctgaacacattagcgcgaagaaatatcaaacagatcacggcagaaatcaccaactcaacatgattggacagaagctgtcccgcggccaggggcggcgag

SEQ ID NO: 262244 - DNA, 122 bp, Homo sapiens
agttccttaaactccgtctcctcttcctggttgttcagtttttcattttgcttctctaagcgttcttcagggggcggggtgtccatcctgggagcctgctgtttctggagcataggcgctct

SEQ ID NO: 262245 - DNA, 122 bp, Homo sapiens
cagaaaactggccggtcaccaccccccatgtagcttggaagtccagtgcttgtgcatgtgcgtgtgcaagactgtgtccatgatgtcagtgtgtacgagtgtgtgttatgtgtgtttctgtg

SEQ ID NO: 262246 - DNA, 122 bp, Homo sapiens
caataacgaggcaaggaagggagggcaggcaccctctctggtgacacctccacactgtaccgaatgccaaatgcaggtggtgtgagcagggcgcactaacctgcctaaaaataaagcaccag

SEQ ID NO: 262247 - DNA, 122 bp, Homo sapiens
tctcgcttagctcccgggagccgcgatgggagccgctgagggccgaaactcctgcaatcgcgccgcagccccagagccgcggacccaggcagaccgcactctccagagcgcttgcacctggc

SEQ ID NO: 262248 - DNA, 122 bp, Homo sapiens
atctaactagcacacgaaccttccacgaggacgcctggcgagagaagggcctcgcgcccgcgcgtgccttttataatgcgaacaaagtagccaatcagaaaccgcggatagcgctcctgtct

SEQ ID NO: 262249 - DNA, 122 bp, Homo sapiens
gactcaccgaccggccccgccctgaacctggggaggggactggaggggggcgggactcgacgatgtagggagtgagtccggaaggggaatcctcggatctcccacaggatggggatgggggt

SEQ ID NO: 262250 - DNA, 122 bp, Homo sapiens
aacaataacagctttcatgtgagtatctactatgttctatgcactgtgcaaaacactttacgtgttgccttattaagttctcataacagcccatcaaatagtgtcttatttttctgatgagg

SEQ ID NO: 262251 - DNA, 122 bp, Homo sapiens
ctatctccatgaaagaagttctacagatgtttgagaagaatgaccatatgttttggtttgcgcagacagtcctggttagtgcttactgattgattagcgattgttaattatttttagctcct

SEQ ID NO: 262252 - DNA, 122 bp, Homo sapiens
ggaattcgacgccaacactggtttctggggcaacttctgcgtagctatgtgactagcacccggaaataattgccaccgccatcttttggtgcagaaggtgacgggaaacaggccgcagacct

SEQ ID NO: 262253 - DNA, 122 bp, Homo sapiens
ccggtccccgctcatctctacacttcgagcctccattccagatgctttccctggagagggcgagaactgagggtggggggtccagagagtgggcctggggcctgggccccggcccaggcacc

SEQ ID NO: 262254 - DNA, 122 bp, Homo sapiens
aattcaggcaagatggccaagcctttatactcaagcctggaccatcccttgcatgtgggccgccattccctccctcttcaaggggtatgttcttgggggagggaacctgaactcatgaaggc

SEQ ID NO: 262255 - DNA, 122 bp, Homo sapiens
cgtcgagcgtcaggcgtgaggcggcgcagccaaacagtcacatccggggccgagaggaaccgcgaacgagctgggcgtgcgcccttgcttcgtgccctcaacccgcatggcggagccgctgg

SEQ ID NO: 262256 - DNA, 122 bp, Homo sapiens
gcacgggaaacaggtttggggtgaggggcggtccagtcctaagaaagctctccagctccacgcggtcaccttcactcactcaccagatgcagattgcaaagaggcgaaacctgtgatttctt

SEQ ID NO: 262257 - DNA, 122 bp, Homo sapiens
tgactccgctccgtcagcccaggggacttggacgcaggggcccttgccagccctggcccgcgctggagcgggaggctgggatttttagttcacgtagttcttgagaaagacgaagaaaagct

SEQ ID NO: 262258 - DNA, 122 bp, Homo sapiens
caaaggtttttttttttttttttttttttttttttttttaacatataaggtaacgtctcccggggagcattattcagcctgctatattctccaaatagttttcattggctttggtttcatct

SEQ ID NO: 262259 - DNA, 122 bp, Homo sapiens
tgttccgttctaattaccagtgcatgcagcccccagtcatgtaccccctgcttgctcaatcgatcacgaccctctcacacagacccccttagagttgtgagcccgtaaaaggtacgagaatt

SEQ ID NO: 262260 - DNA, 122 bp, Homo sapiens
gaaaagtgaagagagggaagatgaaaggaggaaaaggagaaggaggagggaggcagtacccgttagaacagtggttctcaaagtgtagctctcaaattatcgtcatctgagaacttgctaga

SEQ ID NO: 262261 - DNA, 122 bp, Homo sapiens
agcagggccgtcttctgactgaatcacagcttcctgtgtctttgaaatagggtctagaaacgagcttgtcacatttgcttctccctcaaatgctcaaaggtgcagggctgccctaaaggtcc

SEQ ID NO: 262262 - DNA, 122 bp, Homo sapiens
acacagtatctggcgtttctcacaggtgtcggcttctctctctcgagtccatctgctggccgtggacctggctattcggggcaggcccatcctgcccacctccccacactctctcaagcctc

SEQ ID NO: 262263 - DNA, 122 bp, Homo sapiens
tagggtcacttgtgccattcagccaaggggacgaccgtgcctgctggcccagctgagctccgcccagtgagcccaccccccattctcctgccactgactctcgctcttctgcttttcccagc

SEQ ID NO: 262264 - DNA, 122 bp, Homo sapiens
aaatgcatgaacaatttgagccctgtattaccttattgcctagtagtgcctacaaatcctcggataaagtgaatatgcttcatttcctctgttgacaaagagtcaaactctgtaaaatattt

SEQ ID NO: 262265 - DNA, 122 bp, Homo sapiens
gaacatggtttggggggcaacccaggcccaagtgtagttcatgaaagtgtacacacacatcgttgtttagcatgaaggggtgcactgtgaccatgaaccagtctatggagcacagcacagtc

SEQ ID NO: 262266 - DNA, 122 bp, Homo sapiens
tcctggtgcctccgggtgctctgggatggttctggtctttgggagagtggcagctggtgacggcgctccgctcacctctgcacatgtcttgctgtgggcctgcgggtggccgccagggaggc

SEQ ID NO: 262267 - DNA, 122 bp, Homo sapiens
ggaggatgcaaagaggaaggagctttgctgttccctgagtgagtaggcagtcatgcgtgacgggagggtgatattgatacttgcagtaacagtaatattcaatttatctggagaaatgtggg

SEQ ID NO: 262268 - DNA, 122 bp, Homo sapiens
caggtgaagaagtattcactggcccactttgggaaagacagaagtatggaatttgaggaccggtaccttagatctctatgaatcacagtgaatggctgcttaaccaaaagtgttcataaatc

SEQ ID NO: 262269 - DNA, 122 bp, Homo sapiens
ggcgacgggaaggagccgagcttgggttatggcggcgccgggcgcgctgctggtgatgggcgtgagcggctcggggaagtaggtccgggagagggcggggggcgcccgggacaagtgttgcg

SEQ ID NO: 262270 - DNA, 122 bp, Homo sapiens
ccagcagctgcggagggtgcgctgggtcccccagcactgttggcccgcccacgctgcactcgaattctcacccggcctcagccgcctctctgccggcgcagggctggagacctgcagcccgc

SEQ ID NO: 262271 - DNA, 122 bp, Homo sapiens
ccacagcaggtgagtggaggcaggagccacgggtggggccaggccacacagcctgggaggcgcaggggctgggcagctgccagtgacccaagcccacacagagacttgcacagctgccccag

SEQ ID NO: 262272 - DNA, 122 bp, Homo sapiens
aattcgctctcagtcaacaccaaagaccctcaagcaaaagcaagagctcccgggcgtcttcgaaaaaagcgcctttgacaggtgaagccaagttgcatgctgggagcatccctgctgtccag

SEQ ID NO: 262273 - DNA, 122 bp, Homo sapiens
tggggacatgtgccaggccgagtcgggcgaggtggcggtgcggaccccaggtggggggcgcgccctgcggcgctatttccccgacagacgcactgttaccttgctgtctaggggcgagggcg

SEQ ID NO: 262274 - DNA, 122 bp, Homo sapiens
cttcgtgggctgcctgggtgccatcaaggagaacaagtgcctcctgctcactgtgagtgccggggcccaagcgatgctccgggtgggaccacgcagggtggggctccggtggcccccaggcc

SEQ ID NO: 262275 - DNA, 122 bp, Homo sapiens
accccaaccctctcactctcaaggaacgaggcggcctgcctcgccacccatcaggtcccacgctcaccccggacaagccgcgctgggactccgggttcttccattctcggggtttcttcggg

SEQ ID NO: 262276 - DNA, 122 bp, Homo sapiens
acattgtacagctgagcacgtggctcggtgggtggaggagaaactgcatcccctttgggtcgttgcctgactgaagggaccatgtgcatgatatgtttgggagatagtagaggaataaagtg

SEQ ID NO: 262277 - DNA, 122 bp, Homo sapiens
tgaagtctgctttgcaacaccttcactgatctgggattatatctaagcaaagtggatgcacggtggtcctttcaagaaggtgtcccaggggaagatctaagtcgtaatcacttgaagggact

SEQ ID NO: 262278 - DNA, 122 bp, Homo sapiens
ccgccccgtgttctcaaagtactttggctgctcagttgcatttcacaggaacctagatatcgaatcctcgggctgggggaagtaaacacatggacagtccgaggcgactgcaaaagtagatc

SEQ ID NO: 262279 - DNA, 122 bp, Homo sapiens
caggcacttctccgtggtatggcactcccgcgctggctgccttggcatccttgtaaaagccgaggctcccacgccgcaggacacagtacacgttctgccaggacctgcgagggacgcggtgc

SEQ ID NO: 262280 - DNA, 122 bp, Homo sapiens
cgcctgacgggttggttagggcggcttttcttccggctgtgacaaatccagcctgaggagcgctcctgtgtctttcttagttgtttcttcccgcccacctgcccctcaaagccacaacccac

SEQ ID NO: 262281 - DNA, 122 bp, Homo sapiens
cgctgctgtgcagcagcctcagcggcgccgtcctctgtggattcctgcaagtgagtcaaccgctatagacttcaagccataacgactgcttgcaggtcattccgcaggtagaatcttaacag

SEQ ID NO: 262282 - DNA, 122 bp, Homo sapiens
tgccagctaactttgtagcacctgcacgtgcggggcaccattttaagcactttttgtattcgaactcactgaattctcccgacagcccagcagggtacatatcattatcatcatctttcagt

SEQ ID NO: 262283 - DNA, 122 bp, Homo sapiens
ttgggaaaagggtactgccggtctagcagcctcctctgtactcagccaggacacccagcgcgtgggacctgtttgtgtctgttttgcttccttgggaacggcacagtcactcaccctgccat

SEQ ID NO: 262284 - DNA, 122 bp, Homo sapiens
aagattgttatttgagagcctttgtcgctgacatcagagcctgctctttggttcagcccacggccaagactcagggaggggcaaggattagaaaaagcaagcaagtatattgaaaaatgtgt

SEQ ID NO: 262285 - DNA, 122 bp, Homo sapiens
cagccccttttcaataccgcaaccctctctgggcccccgggtgtcaataacatcggcacccgtccaacccggtcaccgtggtcctgagctccgtgggacggcttctctccaccaccgccacc

SEQ ID NO: 262286 - DNA, 122 bp, Homo sapiens
ctctcaagttttgttctctgcctcacactcaatgtgtttgaggctctgattccagtccctcggcctccacttaggtcagggccagaagtccctgctcccccctcagagactctaactttcca

SEQ ID NO: 262287 - DNA, 122 bp, Homo sapiens
gtgcccacttacccagggagggccaggaatgaggatgccactgtggctcagtgatggcgccgagacacaggtgaacactgtaaaatgtggatgcctggaggcagcccacaccctgggccttg

SEQ ID NO: 262288 - DNA, 122 bp, Homo sapiens
cacggccccccgcactcagccccagcgtgcacggccccacacacacagccccagtatacacggccccacacacacagccccagcatacacggccccgtgcactcagccccagcgtacatggc

SEQ ID NO: 262289 - DNA, 122 bp, Homo sapiens
agctccccacagtcagctccagtgaaaccatcatcacactcacaccgcccgtctacacagcggccacgattgtgacagtcagcaggacacctcttctcgctgcagtccacaccggcaaagcc

SEQ ID NO: 262290 - DNA, 122 bp, Homo sapiens
aacatgtgaaaggagaccttaggtctgttaaggaagaggatgacactacgtgacaacttccgattccagaaacagtctggacttcagggattatatctggggggataaaaagcgcatgcaag

SEQ ID NO: 262291 - DNA, 122 bp, Homo sapiens
tccccacaggcaagagagtaccggcagacagcggcgcgagacaggggcagaacgatgaggcgccggagttagctcgccggtgcgggtgcgggtgcgcggcgcgtcgcggcccctcctccgcg

SEQ ID NO: 262292 - DNA, 122 bp, Homo sapiens
gggctccagtccctccggtaaatcccttccagatccggtgaaaagcccgcagcggaaaagcgctccgagcgctcgcggggcaccggccacgctgggctatttagggagtgggtgctgcccga

SEQ ID NO: 262293 - DNA, 122 bp, Homo sapiens
cataatgagtcacaggggggacaagcacccagcgttcagagccactgggaacctgtccttcgacaacgagctgtgtcacaagacaccaccttcctttcctcagtcgctctcttccccccgaa

SEQ ID NO: 262294 - DNA, 122 bp, Homo sapiens
ctcaattcagtccagaacagggtggccaaaccccctgacctctgctgcatgtgttggagacgcctggcaggttgaagcaccaggctattggtaaggcacctgcagtctctgaccctacagga

SEQ ID NO: 262295 - DNA, 122 bp, Homo sapiens
ccagcctgcctcacctgtcgaggcccagctcccagcaggccctgctgcgacctcggtgcccgctgggagccaggcccgcagagagcggcactccctcaagacccaggtccctggcctgccca

SEQ ID NO: 262296 - DNA, 122 bp, Homo sapiens
gagcagcgtcctgggcggattcagaccctggggaagtctggaattcctcaccccgaccctcgtcccggaggctcaggctggcccttccaatggcactggtggggcagggcagcggggcaccc

SEQ ID NO: 262297 - DNA, 122 bp, Homo sapiens
tacttaggagcagaaatagttatgaaataaacacacaaataagtggaagtgttggctggccgatgcaggaaatcaataaggtggtctggtggtgacttgctgggaatgcttctttgagtagg

SEQ ID NO: 262298 - DNA, 122 bp, Homo sapiens
gcgactctgtctccctctacccggcgcggtcacgtgacacgcctgactgccctgtggctgcgacccggacctggaatttctagagctcacggttcagggcaagcctggggcatgtagcaggg

SEQ ID NO: 262299 - DNA, 122 bp, Homo sapiens
tcttccagcctgccttaatctgagggccccacacgagccggctcaggcctcctcttccttcgtacctccctcgaagcctgggattctgggcagtgagtgctccagcagctgactgactccca

SEQ ID NO: 262300 - DNA, 122 bp, Homo sapiens
atatcctgggtgggagcggatgatatgactcccaatatcgcaggtggcggagacctcccccgtgatactgtccctaatatccaaaggtggagaggatgatatttcttccaatttcgccgggg

SEQ ID NO: 262301 - DNA, 122 bp, Homo sapiens
tgggtccacaatcagggagccccaaatagaaataacacggggcgctgattggttttccgccgctccagaccctgcgcttggtgcttcaagtgactcatccttatgttcacatgatcgccgag

SEQ ID NO: 262302 - DNA, 122 bp, Homo sapiens
acctccactgggaaactgagcaccctgggtgcatcaacctgcccagtgcctgccctcctacggacataaaccaacagtcggagtggccaaaaatagatgcacagaattaggagacgctccat

SEQ ID NO: 262303 - DNA, 122 bp, Homo sapiens
cacagcactgagcaccctaccagcaattaaagaggtttaaccaaagtgcaaaagcacatacgtaaccaggatcaactgactggcctgggaaagcttctgtgtgaactctgccaccagaagtg

SEQ ID NO: 262304 - DNA, 122 bp, Homo sapiens
gtgcgaacatgtaagttaaaattagatcaatagtcagcttagcggcctcaatcaatgcttcgcagggagagcatgcaaccatctatttataagctaacaccggcattatcttcctcttttag

SEQ ID NO: 262305 - DNA, 122 bp, Homo sapiens
agtgggagcggagggggcgggggcggctgcgtgtgttacaaagcgcaaagcgcgcgctcgcgtgtatgagtgtgtgtgtaacaatgtaactgtgtgcgagtgtgaccaggcgtaggagagga

SEQ ID NO: 262306 - DNA, 122 bp, Homo sapiens
cctggaaccggagctgtgagtgaacatctgtccattcagcgcctaactgacgtgggtctgcgtgtgtgcaccagggtctggggtggagagctggggcgctgggatttgtatccccagggact

SEQ ID NO: 262307 - DNA, 122 bp, Homo sapiens
cagacctctcccttagccattggtctgcactgtcttttctgcccatgacccagtcagtctcgcgccccatgaccctctcctaaaacacgcgcagtctcctctctcttccccttcctctcgtg

SEQ ID NO: 262308 - DNA, 122 bp, Homo sapiens
gggggtgacatctcgcggggagcgcccccacgcctctagctgggttgggagaggagggtccgggtggggagcgaaattgccccagagcccaggtcactgtgagcttctctccccgcccccac

SEQ ID NO: 262309 - DNA, 122 bp, Homo sapiens
ctccggcaggcgtggaaagggcacacgaccaaaagctgggaaacctgggtccgcgattagcggtgtgaccttggagaagtcattttctctcccacctctaagtgccctccaggattgcatga

SEQ ID NO: 262310 - DNA, 122 bp, Homo sapiens
tctagctgagtgttgattttttcttagaaaaacaaactttgggtcaacaaggaaagatcacgagtggggagggtgaatgggtgattcacctcatggatctccctggcagctcttgcacttcc

SEQ ID NO: 262311 - DNA, 122 bp, Homo sapiens
ctaacttctcgccccctggtttcagaatatcctggcagcggaatagagggcgttggggggcggtgcaggccaaaactttttgggctgccccacccatgcctttccggttagcgttgcagctc

SEQ ID NO: 262312 - DNA, 122 bp, Homo sapiens
accagcccccaggacagcgggcggcggaacttcctctccgccacaccagcccccggagagcgggcagtggttcctgagcactcggtgggtttcacatttcacatctcacagtgagccgagga

SEQ ID NO: 262313 - DNA, 122 bp, Homo sapiens
cttcattcaacagacatcgactgaggacctattgtatgctggacacgtgggacaaagagacgctaaaatagtccctgccctttgaagttcataacctggtggggaaaacaaaagtgtgctaa

SEQ ID NO: 262314 - DNA, 122 bp, Homo sapiens
tcctgggctccgtctgccaggccttgggtcgcgtgcaggtcccgccgttggcagcagctgcgtggccagggtcgagcaggtcctcagtgggtgcagactctcctgggatcacggggccgtct

SEQ ID NO: 262315 - DNA, 122 bp, Homo sapiens
ggataacaggactgtctcagaattaaatgagttaatacatgcgaagcgcttgccagtgcacgtttctcagtgcacgtttctcagtgcacgtttgacttccttaatgaacaaaatctcttgaa

SEQ ID NO: 262316 - DNA, 122 bp, Homo sapiens
gattttccgttgggttaggagatactactgctggctgtttgctgaactttacttagcacccgtgacggaacgcattgttacaaaagacatgatggtggttggggggaggtatccagcctcct

SEQ ID NO: 262317 - DNA, 122 bp, Homo sapiens
ttaccctgggcctggagcagccaagaatttcgggctgtttgactttctgtgagcccccagcgaggggaggcccagcctccgaggagaccaggaaccctgcttcagcagcccctcagggcttc

SEQ ID NO: 262318 - DNA, 122 bp, Homo sapiens
ctctcctctcatttctttcggaaagcggaaaccagacgacccagcggccatgggacgagtcgccccaactcaaccccaacaggacgctggaggggcctcccttgcccacctctcttcgctgg

SEQ ID NO: 262319 - DNA, 122 bp, Homo sapiens
agcagagcttccaaggcctgtctgtgcagagagagcttgaatacatcccaggaaagaccacgagtgaggcgctcattcagcagaagggttttacagaatggcttggaatatgtgaaggccca

SEQ ID NO: 262320 - DNA, 122 bp, Homo sapiens
ctgggcagctttcctctggaaagtgacactggtaaattagggcgtgattgatggctcccgcggcgctcggtgacaaaggaggtttgtaaactctcggtgaacttcccctggcattcaggcgg

SEQ ID NO: 262321 - DNA, 122 bp, Homo sapiens
aacccacacgcctggggagctgccagccagcgggagcctcggccgtcggggaacagactccggcttggggcagcctggcagccctgaaaggaacaagaagaaaatggagctgtggggcaggg

SEQ ID NO: 262322 - DNA, 122 bp, Homo sapiens
ccgcgtgctgtccgagcgccggtccgagcagcggcggctgctgagcgccatcggtacctccgccatcatggacagtgacctgctgaaactcaaccagctcaaggtgaggctgggctgcagga

SEQ ID NO: 262323 - DNA, 122 bp, Homo sapiens
accgagggctgcaagaagaagcgaacaaatagtccccagcgcctcctctggatgcggtcgcgtctgtggtcctggcagccgctgggcgggccaggccaggtcgggccgggccgagccgggca

SEQ ID NO: 262324 - DNA, 122 bp, Homo sapiens
gaacttagaactggctcagaaggatgagttggggttcatcaggaagtctggtgctccctgcggagacagcagtagacacaagggcttgccaagatgcagtatcttccagaagccactctaag

SEQ ID NO: 262325 - DNA, 122 bp, Homo sapiens
aatccccgcgggttggtcggggcgggagcggggctcggtgttcggggctgacggcgggggcgaggccatggttctcacaccatccagaggaagcatggctgcgacgtgggcccgacaggcgc

SEQ ID NO: 262326 - DNA, 122 bp, Homo sapiens
agcagcaacactggcagcctccgacctctcagaccgagtaagccaagcgaagcctgtatgcgcacgcttgcagctcagcgcccgcggggactccggaagcctctcccaagtggcgcggtccg

SEQ ID NO: 262327 - DNA, 122 bp, Homo sapiens
gtgttacagctcttaagatggcgcgtgtggagtctgtcccttctgatgttcagatgtgttcggagtttcttccttctggtgggttcgtggtctcgctggctcagaagtgaagctgccgacct

SEQ ID NO: 262328 - DNA, 122 bp, Homo sapiens
ggcctcagtccccgtgtgatccgggtctggtttcaaaacaagcggtgcaaggacaagaagcgaagcatcatgatgaagcaactccagcagcagcagcccaatgacaaaactgtgagtggctc

SEQ ID NO: 262329 - DNA, 122 bp, Homo sapiens
agttggttggcctccagctaagaggtggtgcttgcaaaagagcaccagctgcattattagcggtgggatttttgcaagccttgtgttgcccaggtatgggggctactatggattcttaggca

SEQ ID NO: 262330 - DNA, 122 bp, Homo sapiens
taaaaatattaacagtgcttgagcctctggaaccgaaccagcactggagttttgtttggtcgtcccctctcttccccctcaagattaacgatctggagggaattctggtgagttcgagttct

SEQ ID NO: 262331 - DNA, 122 bp, Homo sapiens
aggggagcaagcacgagccgggaagagagctctgcgctcgcacacgggattcatctccgccgcctctgcccgtttccagcaacacggagccaggcggaaacagtttctccagcccattcgcc

SEQ ID NO: 262332 - DNA, 122 bp, Homo sapiens
cccagcacaaagagtccggcgctcagagctagcggtttcccgaggactcaccaccaagcccgcggacacaggccccgattccacacttaacgctgccaaagtggcagagccggcgcgggctg

SEQ ID NO: 262333 - DNA, 122 bp, Homo sapiens
gaatactagcaatatgttaaccctacattttcttcctgtgggtaaaattcacagtatctgcgtcaatgaaatgctttacttcttttcatggatgagaaaacaatctagtatttaaaagcaga

SEQ ID NO: 262334 - DNA, 122 bp, Homo sapiens
tctggagagaccatggcctcccaacagtatttttgatgtcagtggcctagccttaggccccgaagccaggaactagatgtgataggggccaaatcccccaaacccgaggagcttttctggta

SEQ ID NO: 262335 - DNA, 122 bp, Homo sapiens
acttagatgctctctacttggcctctctgcgctcagttgtacagtaaattagggacatctcgctgcctggaacacggtcttctagggagtctccactccctgccagcctccactgggatccg

SEQ ID NO: 262336 - DNA, 122 bp, Homo sapiens
ttaaagtgctaacagaaaaaaaattatatgtcaattgaaatttcttgcaaaatgatatggcgatgtatttcagaacagtggttatctatgtgtgttggaagtgagggactggagattgacta

SEQ ID NO: 262337 - DNA, 122 bp, Homo sapiens
ttctgcattttccaatttacctttagcgaccgttctttcctgttaaaaaaaaaaaattcacgaccttgaagaagatacacgggctatgacttcgctgttgtcaccgagcgccccgcccaccg

SEQ ID NO: 262338 - DNA, 122 bp, Homo sapiens
aggcctggatctgataaccggctctgatgccaccatccctgaggccaggcaagtcccagccgggctacagcactgttgtgagaatgcagatgaggttgtaaaggtgaagcacgtgtcacgct

SEQ ID NO: 262339 - DNA, 122 bp, Homo sapiens
tcttttattatttgatgatagagacataattagcattatactttgttaaaatattaatggcgggtcataaaggatataagaaggatgcctatctctggaccagaaaaagaaatgcaaaatta

SEQ ID NO: 262340 - DNA, 122 bp, Homo sapiens
ggcgtaaacaaggtagggagggagatgtaaagaatccgcgtggaggggtgtcgggggttccggtcgggcctgcaggctgacctaaactcctggaagccaccgaggaagagtcagagacccaa

SEQ ID NO: 262341 - DNA, 122 bp, Homo sapiens
ggggtggcacaggacaggcaggcgacagggtggggctgaggcgcaggccctgcgacaacccgcgggcctccgccctcgggccctccccgcccttcgtctccgccatgcaaggggcaggagtg

SEQ ID NO: 262342 - DNA, 122 bp, Homo sapiens
gtctcgccgcgcgcatgcgcagaaacactgggcacagggggaggtaactgcagtaagtcccgcttggccctggagtccacgcggattttcgaagctggggctggcaagaggccgctggacac

SEQ ID NO: 262343 - DNA, 122 bp, Homo sapiens
gcaaggggcacgcagtgtgcgcaaaggcctggggcgagaggaacaggactcattagaacacggcttgcaggcatgttcgtttcaatatcccacggggtgggaggggtcatggggagccatgg

SEQ ID NO: 262344 - DNA, 122 bp, Homo sapiens
ttctttgactaggaaagggaactccctgaccccttgcgcttcccgatcgaggcaatgcctcgccctgctttggctggtgcacgatgcgcacacccactgacctgctcccactgtctggcact

SEQ ID NO: 262345 - DNA, 122 bp, Homo sapiens
ggtcacacaacccgatgtgtccctccgcgaaactccctgagcactgggtgtgaagggcagcggcgcccagcaaggccgaggaggggcgactgttatccaggcaggaagcggggtggaccgga

SEQ ID NO: 262346 - DNA, 122 bp, Homo sapiens
ggtggtaaaataaaatagggcattcacacagaactcatgggttttggtgagaattaaatacggtaatatgttctggaatcaagcaggtgctccaaaattgtcagttttgttttcctagttgc

SEQ ID NO: 262347 - DNA, 122 bp, Homo sapiens
gggagatagagtgcttttggtcgaatattgaacaggcgagtgctgccgttgtcatggggtcgtaagaatcagtctgtcggagctggtgaggccacttcccgagaccagagctcgggcacctt

SEQ ID NO: 262348 - DNA, 122 bp, Homo sapiens
cggatgggcacggggcttgccggaagttgtagttcccttggccctctaggcgccgggctccgcaatttttctcaggggaggcaggaactacaactcccagggacgcccggcggcagcaggtg

SEQ ID NO: 262349 - DNA, 122 bp, Homo sapiens
ccctgccatctgcacagcacatgccctcaggtccagaagagactgggcagagcaggtgttcgtatccatttttcagacctgcaagctgtggctcagagagcaaagagtcccacccagggtta

SEQ ID NO: 262350 - DNA, 122 bp, Homo sapiens
cggctggccgccggactccgccccctcccctggcccggccaggcctgctgtttatcctcccggggacacagcggctgcaggaacaacatgtaattgataacaagcccagcgccggccaaggg

SEQ ID NO: 262351 - DNA, 122 bp, Homo sapiens
ctgcttgctcagtagggaatgtcagttgttgcgctgggccatgagaaatccgccagaaaacgttaggtgagcagacatgccccccatgccagtgggctgctgtgagtgaggataaggtgtgt

SEQ ID NO: 262352 - DNA, 122 bp, Homo sapiens
gctgcgggggcgtccagaggcagcatgtgcagccctggccccctaatcccccttaacacccgctgcaccaggagagcgccacgctcctggcaaccctgatccctggccgcccccagcgcgcc

SEQ ID NO: 262353 - DNA, 122 bp, Homo sapiens
ggcgggaaggggaactgagacctctcttccaaatgttcaccatagctcatgacttcctctcggctatcactcacccctgtcctcagagtgataaactaagtcacatacagataaagcactga

SEQ ID NO: 262354 - DNA, 122 bp, Homo sapiens
gtttggtgtctttcttgttaaggaactagtctccagtgatctcaggcttcatcttcataacgacaagaaatccagaccatgggtcagacaacctagtgattcatgtgtcttaatgactgacc

SEQ ID NO: 262355 - DNA, 122 bp, Homo sapiens
atcaaatgactctgatactgcaagcacttcagagtatgtataagcaatttcagctggttccgtcctgatatttacaaaactgcctggatcatacttacaaccatgcaatgatatatatttct

SEQ ID NO: 262356 - DNA, 122 bp, Homo sapiens
tggggcctgtgcagcctgaacaagagcccaaaagtgaccttgggagcatctaagactagacgctcttagcagagcatgggtcccttttccttaccccttattccatagcctacaggttctct

SEQ ID NO: 262357 - DNA, 122 bp, Homo sapiens
gatcaagatagagaattaaatgagattttaaaagctgacagaagcttataaactgtaaagcgctgaagaaatgttggttttgagtattaccaggaggtggagcctctttcccattaaattcc

SEQ ID NO: 262358 - DNA, 122 bp, Homo sapiens
taatcttctttttccctgaaagaacaccctcacggcacggcgttttccttaacggtcaggcgttttcccgggcagcttacctgctcggcctgggtctttctggacagcaggcgctggaggtg

SEQ ID NO: 262359 - DNA, 122 bp, Homo sapiens
ctcaggtgatctgcccacctcggccacctaaagtgcttggattacagtcatgagccaccacgtttggtctgtgggtgctttcttaaaagacctacagaagatgtgaggcccttgagcttgaa

SEQ ID NO: 262360 - DNA, 122 bp, Homo sapiens
accccagcgcgcttgtgcttgtgggtgttggtgcgcaatcaccccgctgcccagctctcccgcgcctccctgggaggccttggtgcgcacaaggaaagccactcaaaaatgttaatgagctt

SEQ ID NO: 262361 - DNA, 122 bp, Homo sapiens
gttcggactggcagctagcgggtagatttagcctgaaaacatgttacgtggtttctccaacgtccttaaaaacaaaacaaaacacaaacaaaaacagtagtgttcaacatttaaaatttcac

SEQ ID NO: 262362 - DNA, 122 bp, Homo sapiens
ctgtgtctgattattccaccctgctgccacgttaaggttactcctctcccatcggttgaacgtcccctcatcaaggctccggataccatgaccctgagggcacagcctcccggctgacaagt

SEQ ID NO: 262363 - DNA, 122 bp, Homo sapiens
ccctgggccttgctggcagctgtgctgccgggtcactgtgggagatgagacaaggacctgcgacctgctgtgcctcagtttccctgcctgtcagtttggacaaccatgactgcagctaattc

SEQ ID NO: 262364 - DNA, 122 bp, Homo sapiens
cctcattacactcccacccctggccctcagcgtgggagtcaagagcaacagggacacttccgtactccttgtaggattggtgaaaccgtaatgacgaacacccctaaactcccataattggt

SEQ ID NO: 262365 - DNA, 122 bp, Homo sapiens
aggggtttggggggctaaggacgctgaggctccgggggcaggaagttctctctggttaagcgttctctcttctctccggcatacactcccctacccacccacctcgcctaccctcggggcga

SEQ ID NO: 262366 - DNA, 122 bp, Homo sapiens
aggccgaatgctctcctctgtgctatgttacttttgtgtttgatggattgtacttaggttcgtgctttccgggatgaaaccttctttggtatttaaaaggtagattttccttctatggttac

SEQ ID NO: 262367 - DNA, 122 bp, Homo sapiens
cctcccgtccccttgtctcaagccaggagctaaggagacttggggtacctggtgtgctcacggagcctcagcacctgccttgctgtttagccactctcaggccagtgccacacacatgcggg

SEQ ID NO: 262368 - DNA, 122 bp, Homo sapiens
ttgcttcccacacctctccatccgctgtttcaaattagggttcttttggctagaagagaccgaaatcccaactctaagtggcttaaataaagaggatttattggctcacattactgaaaagt

SEQ ID NO: 262369 - DNA, 122 bp, Homo sapiens
atcctcgaaacgatcccgcagagggatcctggcattatttcgtcttagaaaaactgaattcgaaatgcagagagttgaacccacgtgtccaggtctggtctgcgatcggcaggcgccccagt

SEQ ID NO: 262370 - DNA, 122 bp, Homo sapiens
taggcggtggctgcaggcagctgaggctgcgccattcatggctgcaggaccgaggccccacgcggagcggagaccaggcggccacagccgctgattgggcgtcgcggccgggggttcagcca

SEQ ID NO: 262371 - DNA, 122 bp, Homo sapiens
ttagctgtgacccgctgaactgccattcatttcgcaaagacatcggggtccaaattttcccgaagtcaatagcaggtgagggctcagaaccaaatctatcctgatacagtttttttttctgc

SEQ ID NO: 262372 - DNA, 122 bp, Homo sapiens
ttcccggctgtgcggtgtcccgggtcctcccaactcccgtagtcagggtaggtcccagcgcgacaaaagccaccacagatgtcccagggcgtctctcagtgacagaatacggaacagaggtc

SEQ ID NO: 262373 - DNA, 122 bp, Homo sapiens
tcaggaaatgggtttgttccccaagccatgggtcttgctgggggacaaccggagtctagacgctggggacttaagaattgggatgcatcaggaaactcactccaggctgggggctggcttgg

SEQ ID NO: 262374 - DNA, 122 bp, Homo sapiens
cgggcggacacgacctttgttgtggtcggcgggcagacaggggaatcggcacagggcctgcgccccacctacagcctctgtgggtggaaggtgccagaaaacttgaagagtggctctggcca

SEQ ID NO: 262375 - DNA, 122 bp, Homo sapiens
gcactctcccaactggcgggaggagggcgccctcccagccaatcaacgtcccacagggcccgcctcccgcgcgtctttcaaaggtcttctaggaaccagtcagcgattagaggccgagtctt

SEQ ID NO: 262376 - DNA, 122 bp, Homo sapiens
ataatctcgaggtgatttatgcattcttccatggccaccagccttatgattgcatctgtgcgtcacagcttagagatcaatgtgagtaatagtcaaagttcttggtgtggtttaggtggttt

SEQ ID NO: 262377 - DNA, 122 bp, Homo sapiens
tcaggtccacagagaacagctgttcctcatcaaattcatgggtgaactggcccgaggcgccgtaagactggtagaaggcgggtccgtaggagcccatgtggtcagctgtgtttggcgagttc

SEQ ID NO: 262378 - DNA, 122 bp, Homo sapiens
actcccagggaagggtccccagcccaagagaccaccaagggtcggcggctacgcgcccgccgacccctgccagcctcacagccccccacccgccgccggacgccgggcgcccgccctccgca

SEQ ID NO: 262379 - DNA, 122 bp, Homo sapiens
agggcaggacttagcttccacagcacagccccgaggggtaaccctcatgtcaggcagagccgggagacagtctccactcacccaggaaggaaggctggaagagtgcctcagggcagcggaac

SEQ ID NO: 262380 - DNA, 122 bp, Homo sapiens
ctcagacacagaaatgtgaatgagcaaactccccttcctcctctttttcctgttcggtcccgctccctgggtcaggggctgggacccagaggacctgataaggaaaggggagaagtaggtct

SEQ ID NO: 262381 - DNA, 122 bp, Homo sapiens
gtgggagaagcatcctccaacaaccgagcacttcctgtacattgaccaggtaggtaggcacgttgatcacaaacaccttgagggacagcttccaagtatatgcattcacagatgagaagcat

SEQ ID NO: 262382 - DNA, 122 bp, Homo sapiens
ccagggcaagatacaggattttcaggacccggtgcaaaatgaacacgtggtcctctagttcgaaaactaagaatttcaggccaagcatggcggctcacgcctgtaatcccagcactttggga

SEQ ID NO: 262383 - DNA, 122 bp, Homo sapiens
agttcagatggagcaggaagcatgaggggtgtgtgtgtgtgtgttaggggagagggatggcgtacaagcctatgctggggcctgaccacctgaaggctgaactaaggaaccagaactttctc

SEQ ID NO: 262384 - DNA, 122 bp, Homo sapiens
gggaggtgcagagcgcctctgcccggctgccccgcctgggaggtgaggagtgcctctgcccggccgacccgcctgggagttgaggagcgcctctgccctgccaccccatctgggaggtgtac

SEQ ID NO: 262385 - DNA, 122 bp, Homo sapiens
aggggctcaggcccgtgtggtctctggaggccccacggggcttcgatgagggccacacggcgggacttctgtcctcgctgcctggttttgcgcaaagcacccagctccctgagcgccttctc

SEQ ID NO: 262386 - DNA, 122 bp, Homo sapiens
gcgtcagccggagttcggcgggtctgcccacgcaggagaggcgcccagagcgggtgcccccgactttcgggggcgacacacccggggatctaggtcacaaatcagtaactccaggctgcact

SEQ ID NO: 262387 - DNA, 122 bp, Homo sapiens
actacactcctaggctgcatggtgtagcccactgctgctaggctgcgaatctgcccagcacgttactgtactgaacactataggtgactatatgggaagtatctgtgtatctaaacatagaa

SEQ ID NO: 262388 - DNA, 122 bp, Homo sapiens
aggcagtcccggctcgcaggtaattattgccagcggagcccgccggggagcgggggtgggcgcgccggcggtgggcgggcgggcgcggcggggcgcgggcataaaggggcgcggcgcggggc

SEQ ID NO: 262389 - DNA, 122 bp, Homo sapiens
aaggcagcagcacgtcctgcctgctgctttgctgggctcagaggaaaccctgtcccagcccgccggaaggtggtgacttcccgggctgctgtgtccagaggcaagcggccaggctccaccag

SEQ ID NO: 262390 - DNA, 122 bp, Homo sapiens
ctgggaaggcgctgccccttctgggaagggccttgatgcaagggcacacccccatgcccgcgccctgcacccccgcttccggcagccccggcggggctctcgggaaggcgcggggcgggggc

SEQ ID NO: 262391 - DNA, 122 bp, Homo sapiens
agagagaggaaagtgagaaatgaaacctcagcttcagatttgtaccgttaactttgcagtcgtgtattgctcttcataaaaacagcctcgaagtcaagagtaaaaattctgtgaaggtcgat

SEQ ID NO: 262392 - DNA, 122 bp, Homo sapiens
aagtacgtaaactcttaaatgaagcctgataggagaacggaccaggcctatctcctggtacgtgaccaggggatatggacaagtaaggaaaacagttttatattttactacctttattttca

SEQ ID NO: 262393 - DNA, 122 bp, Homo sapiens
agttacataggagtcactacacctgggcttcaagaccagggtgccaggcgtggtggttcacgcctgcaatcccagcactttgggaggccgaggcaggtggatcacctgaggtcaggagtttg

SEQ ID NO: 262394 - DNA, 122 bp, Homo sapiens
ggggaccgcgaccagctgggcccctggctcagggaggggccacgtcagtgctgccagagacgtcacaatgccggcccagccgttcggtgcgcgattggctgccgctgccacttacgcgtcgc

SEQ ID NO: 262395 - DNA, 122 bp, Homo sapiens
agtggttcttcgtctcactagcaagatgcctgatttcctcaggatcaaggggtgagtgagcgttggggtggttgcacaaagctcctgctagctacacacgaaaatattcttgtcatctagtt

SEQ ID NO: 262396 - DNA, 122 bp, Homo sapiens
cggggatgatggccaactgggggcggtaggggcggtagttactcggaaatccatgtattccggctcctcctccctcagcaggaagccagtggggcccatctctcgtaggaggtagatgctgc

SEQ ID NO: 262397 - DNA, 122 bp, Homo sapiens
tttgtttgtcggagtttaacagcctccctctgtgtgaaggtaaggtaaagggaatgagttcgtctgaacttgatagctcatttagagttggctgtcttttctatggccttgccctttctgaa

SEQ ID NO: 262398 - DNA, 122 bp, Homo sapiens
ccagcatcccccaggcaggcagggcccgctgtacctgctccgcagaggcccgaggggcgccggcctgtgtgcatccagtcccgcttcatcctctgtaggagcctcagggcagtcatggacac

SEQ ID NO: 262399 - DNA, 122 bp, Homo sapiens
cactataatagtattattcagacaagatttaccaccttaaaatatcttctgggccaggcgcggtggctcatgcctgtaatcccagcactttgggaggccaaagcgggaggatcaagaggtca

SEQ ID NO: 262400 - DNA, 122 bp, Homo sapiens
gtctccaggccccgaacggcctccagtcggtggattcctctatgcccagcttgggcctcccggcggcctctgctggcccaaatcgtcctgaagtcgccctctccaggcccagctccggcctc

SEQ ID NO: 262401 - DNA, 122 bp, Homo sapiens
cccggagtcgggagcctgccggggtctcgccctcaggacccccagggagcggccgggcgccgcctatcaccctgacccaccgcaccttgagagcgctttcactgcgcctcttttttctcctc

SEQ ID NO: 262402 - DNA, 122 bp, Homo sapiens
cgcctccggaaggggcactcacagctggtcaagcgcgtccttcggaactcggggaggctccgttggggcttacacagagctaagccctgggccagggaggatggatgcaagtaccgtgcatg

SEQ ID NO: 262403 - DNA, 122 bp, Homo sapiens
tttgattcaagttaaaaacacctgtactaagtatgacatctttcctactccagtccctctcgttgatatttgaataaatgcttttgaaccttaatgagagtctgtcttaaatatcattgccc

SEQ ID NO: 262404 - DNA, 122 bp, Homo sapiens
ctcagctgcttgtcacaaaggaaggtggtgaggggatgcagagaacacaaggcaggcactcggggcagctctgggtgggtggagcactcccagcagaatgaacaacttagctgagtcccaaa

SEQ ID NO: 262405 - DNA, 122 bp, Homo sapiens
ggacaagggtagtgacagacaacctgcccaagtcaacagcacaactataccaacacatgacgaaagggagggaggtcccaaagttgatgtatcattgcttaggagggcaaaagcatggcaca

SEQ ID NO: 262406 - DNA, 122 bp, Homo sapiens
gggataacacgttggtcacgttggccaacatttccgggcagctagacttgtctgcttacacggaaagcatctgcttgccaattttggatggcttgctgcactggatggtgtgcccgtctgca

SEQ ID NO: 262407 - DNA, 122 bp, Homo sapiens
tgggtgggaattgtcgcctaagtggttccgggttggtggatgaccttgagccctcaggaacgagatggcggttctctggaggctgagtgccgtttgcggtgccctaggaggccgaggtgagg

SEQ ID NO: 262408 - DNA, 122 bp, Homo sapiens
cgtggacgtgtgtgtagttctttgcaaacttaccccccgtatatagatttcagtaaccaccgccccagtcgagattcagaactcttccgtcaccacagggatcttgtcccccccactccacc

SEQ ID NO: 262409 - DNA, 122 bp, Homo sapiens
ggccacgcctccttctcaagatccgcggcacctggacccttccttggctggtccggatcccgacccgatcccacccctaaacacagccccagtggtgccccgcccccacgtatggccccacc

SEQ ID NO: 262410 - DNA, 122 bp, Homo sapiens
ccctgggctgtcatttgatttctctggagagatatcttcaagatagtaaaattatggcctcgttctttgagggagaagccctctttcagtgcttcctaactcagggatggtttcattatcca

SEQ ID NO: 262411 - DNA, 122 bp, Homo sapiens
gttgaagagtcatagagtcaaaaagcttggctgtgctgtctttggatgcagtgacaaacacgatcatgtccctggataactggatgtcattaatctgctaggagtgctccttaatattcacc

SEQ ID NO: 262412 - DNA, 122 bp, Homo sapiens
cgtaaccccagctgctgtgacgggccagggctcgcagctcgcctgctagagtttgtggcgcgccctcgggatcagggcactggggtttgaaggggctgcagcgtgggaagccttcaattttt

SEQ ID NO: 262413 - DNA, 122 bp, Homo sapiens
cttagcacgatctggcacatggtaaattctcaagatgcttcatctagaactgaaagcgtacgggtcagagctagcgctgaacccaagatgtgggtcaccacagaccccaagctgggtgtgct

SEQ ID NO: 262414 - DNA, 122 bp, Homo sapiens
ctgaacactgctcagcatcttgctttctgccacatactcccttatgcagatgtatcattgcgcattttacttgtcccatgttgctgaccacttgggttatttctaaatttgtgttatattaa

SEQ ID NO: 262415 - DNA, 122 bp, Homo sapiens
agcaatagagttcaagatctttaacagaacacaatattggagaaaacatccaactcttcccgcatcttttttctagctgtctacttggctaaaaatagaaaaatgctgataacagagggtag

SEQ ID NO: 262416 - DNA, 122 bp, Homo sapiens
ggagcggggaaagaaaaactctaaggtcctcgctgcaaagcaaccatcagagctccgccgcgccgtgccgctcctctccgccccgtggtccgggtgtcaccgcccgcaggggcgcaagggcc

SEQ ID NO: 262417 - DNA, 122 bp, Homo sapiens
gggaggaaggtcatactccaccccctggagattattcggtgatattcggatcaatatcaccggctgtgtgtacacctactgcgatattgaacgtaatatcatgctctctccctccctggaca

SEQ ID NO: 262418 - DNA, 122 bp, Homo sapiens
gggagtccggcgctgacccgcgtcctcccggtagatctcctgcaccgtcgagggggcacccgccagctttggcaagagcttcgcgcagaaatctggctacttcctgtgccttagttctctgg

SEQ ID NO: 262419 - DNA, 122 bp, Homo sapiens
ggacaagggggcggcagggggcccggaggttaaccctggggggtagaggctgcccagctccggatgtgccagggcctcagggagctgggtgtggcaccagcttagccctcaggtttgcatta

SEQ ID NO: 262420 - DNA, 122 bp, Homo sapiens
agttgggagagagtgggaggcaccctgagacccgcgctgagcatgggagtggccaggccgcgtcctcccgggggccagcctggagcctgccccaccctgcttgccgacaggattatcctggc

SEQ ID NO: 262421 - DNA, 122 bp, Homo sapiens
taaccgccgcggtagatcatttttatcccgccagggagtgtgatgcaggaagaccacatgcgctcctggcttttaaacctgttcctgactgttctcttactgccgaaacccttgactgttat

SEQ ID NO: 262422 - DNA, 122 bp, Homo sapiens
tcacgggctgctccagagcaggggtaggagacgtcctggtgggctgagacgctgagcagccgcaggaaggtgagctggaccacacccactggggagccctctgagtccacgtaagagaactg

SEQ ID NO: 262423 - DNA, 122 bp, Homo sapiens
gaggccctctatatcgcagcacgttaaatgactcgcgtccagctccccatttcctagcctcgggcctacagggctgggggcgacctctgcctcccgtccccagagcttacaaaattccttcc

SEQ ID NO: 262424 - DNA, 122 bp, Homo sapiens
ttgagtggggagtgccgggtgggagttgaattgcgggaccacgatccctccacttccagccggtcctgggggtgtcatgtgaccccttctgaccagccctgggcaacctctggatggacggg

SEQ ID NO: 262425 - DNA, 122 bp, Homo sapiens
gcttaggagagaaattggccacgatgaatacactagaggtaatactttagagttttgctgcgaaaggcggcaaggaaaaaggatagtacctgttagggaaagcagagttcagattcttttag

SEQ ID NO: 262426 - DNA, 122 bp, Homo sapiens
caccccgtctgggaggtggggagcacccccgcccggcagccgccccgtctgtgaggtgggcgtgcccccacccggcagccgccccgcctgggaggtgaggagcccctctgcccggccgccaa

SEQ ID NO: 262427 - DNA, 122 bp, Homo sapiens
ggtgctaagcccctcactcacccggccggcagcactggccggctgctccgagtgtggggccgccgagcccacgcccacccagaactcgcgctggcctgcaagcaccaggcgcagcccggttc

SEQ ID NO: 262428 - DNA, 122 bp, Homo sapiens
ccagaggccagcaaggtggacatggagaccccactctttggaggagaaaacagtggtggacgaggggcagagctcgtccagggtcaccaaacctaggacgccagagtcaggatctgacccac

SEQ ID NO: 262429 - DNA, 122 bp, Homo sapiens
gtggatgctggggctgcccctctctccctcatcaccgccgcgacacccccatccagtgcccgcaggccccagcccccgctccgaccctcggcgggcggcctgcccctttaagagtggccccg

SEQ ID NO: 262430 - DNA, 122 bp, Homo sapiens
tcttttcattgtgaaggcttgaagagcttttggctgacttcccaaaagcaacctgggacacgcaaatagaagccatctgacgtctggtctacccagtgccatgtagattcggggaatcttcc

SEQ ID NO: 262431 - DNA, 122 bp, Homo sapiens
atgtcctgccggcccttctttcgggcctcggctgggcgtggtgacctcaagcgaccccggcggctcccgtcgcccactcaagagggcgcccccgcccgccacgcccccagcccctctcgggg

SEQ ID NO: 262432 - DNA, 122 bp, Homo sapiens
tgggtgcgtcagccccaggctggctttggagacacagggctccctgcagggtagccatgccgacggcctacagggaagggtgggcacgtggaggacccccgacccccccttgtcccccagag

SEQ ID NO: 262433 - DNA, 122 bp, Homo sapiens
gctttcccatcagccaacctgaggcctggtctgtggcttcatgtggtcttttatgggacacggcttagaactttctagtcgtcctgttagagccatttattcaacctgaagatatttcttat

SEQ ID NO: 262434 - DNA, 122 bp, Homo sapiens
gcctcagtcctgaagtggggacctgggatacacatcacggtgtctactatctacgcatcacggtatctacaaatgtggactgctccccatttgctcttgtgccctcactgtctgttctctct

SEQ ID NO: 262435 - DNA, 122 bp, Homo sapiens
ttggaattggtgagaaaccgaggcccagaaaggttcagcgaattgcccgaggacacatagcggtgccggcgtctctgcatcccaggtgtctgctggggcctcggtttccccatcgcacagag

SEQ ID NO: 262436 - DNA, 122 bp, Homo sapiens
cttgctctctaaagttgcaattgtaagaagaatgttgggtttccagattgctcttctgggcgtgggagaaggttctgtctatcagtgctgcgagaaaggaaagaaacaagtttgctctcagc

SEQ ID NO: 262437 - DNA, 122 bp, Homo sapiens
tgaatgaacgaacgaaagtggagtggtggagaggaccacagaagacgcggtcatccagcgcgtgaaccttcaccactgctgggctgtggaccctcacttccgccgccaggaagtttcggggt

SEQ ID NO: 262438 - DNA, 122 bp, Homo sapiens
gtgggctgggggtccagggtgctgagtggaagcggcggtttccctcccgcctctcaaggacgccttgcagaaggcgcggctgctcctccccgtggcacgcaagctcccgggcaccgcctccc

SEQ ID NO: 262439 - DNA, 122 bp, Homo sapiens
aagggcagagctctgcgaatgttcagaggctgtggcgaagctcggacaccccacaggagacggctgtggagcgagggcagagctctgcaaatgttgagaggctctggtgaaactgggaccat

SEQ ID NO: 262440 - DNA, 122 bp, Homo sapiens
gtcggtgcgggcgtgatgaatgaaattggcaaactgagagactgccatttggtcactggacgaaaggagagtcctttgcactgcagaccccacatgtgttagcaggagaaagggacggagaa

SEQ ID NO: 262441 - DNA, 122 bp, Homo sapiens
ccactggggcttcaggagctgtaaacatccacccctcgacactgccgtggggttggagcccggtagccttcgcgtctgtatgctccctagaggcctgagtaatggggcactgaagaagcaag

SEQ ID NO: 262442 - DNA, 122 bp, Homo sapiens
gttagggcggggcgtgcttccgcgtctagccggagaaacttgagccggctgccccgcccacggtgcccgaagccccaaaggctggaattaggggctagaagtctggcacccaccgcctggcc

SEQ ID NO: 262443 - DNA, 122 bp, Homo sapiens
aaaatgtaggttagcctgcattaaaggttaacgttcatgcaaggatagaagtccctcaaacgatcagctgggttttgttcccttcccctcaacaggacaagagtcaagcatggggtgaaggt

SEQ ID NO: 262444 - DNA, 122 bp, Homo sapiens
aatggtattcgacgagtcctggccttcatatcccgaaaccaaaactagtgagtggattgccgaagaggagctcccaccttccccactgccgtcggggggagtcttcttgtaaatatatctaa

SEQ ID NO: 262445 - DNA, 122 bp, Homo sapiens
ccccggaacccggggccgggatctggggcagtagcggtggcggcgactgcagctctaggccgccggggggcggaggagaccccggcccgggagagccagggagcccggcgggataagagggg

SEQ ID NO: 262446 - DNA, 122 bp, Homo sapiens
caagttcctgcaccggttgacctcctgcgatgcccgaatgctacttctactccacgttcccgcaccagttgacctcactgtgatgcccaaatgctgcctctactccacgttcctacaccggt

SEQ ID NO: 262447 - DNA, 122 bp, Homo sapiens
tgatcctgaaataagtggtatgtggagataaagagtgtaacagagaacacatgaagcccacgggaaaaacagaacaaatgtcacaaggatcagagaaatccctgaaactcgagggaggtgtc

SEQ ID NO: 262448 - DNA, 122 bp, Homo sapiens
atgattaaaacacaatgtgccatcctgggaagagggccagacctggaagtcaatcttcagcgtttgagatatggtggagatcagggtggacgacctctgaggtctctagccaggaccagtca

SEQ ID NO: 262449 - DNA, 122 bp, Homo sapiens
cacgtggcagcaggaagtgccgaacaagagggaaaagccccttataaaaccatcagatctcgtgagaactcactcgctatcacgagaacagcacggaggtagccgccccgaggattaaatta

SEQ ID NO: 262450 - DNA, 122 bp, Homo sapiens
gtttagaaacctgcttagacactgttgggtgtgcaagctcacccctggctgtgagcccagcgacgccagggcaaaggtgacatggctgtggggaaatgggagactcctgatgagacagaggg

SEQ ID NO: 262451 - DNA, 122 bp, Homo sapiens
gaacgggcaaatggacttagttttactacttcatgccctgaagtcatttctcttttggagcgacaggtacaaaatctcctctgtgcatatctgtgtctttctaattggcaggaagaaaataa

SEQ ID NO: 262452 - DNA, 122 bp, Homo sapiens
tataaaattcatttcagaagaccaagaccatttaaggtcttccatttaagactggcctgtcgcgaccagcctgactaacatgttgaaaccccagctctactaaatgcaaaaaaaatagccgg

SEQ ID NO: 262453 - DNA, 122 bp, Homo sapiens
caaggtggttcctcaccccacccacccccgtgccgacgacggtggcagccaggctcgccacgtgccatttggcccagcagccactgtggctcttcctcattggaggggagctgtggcgtccc

SEQ ID NO: 262454 - DNA, 122 bp, Homo sapiens
gtccctccagggtctctgctgtttcctacctaggggtgactgcagccatggctaagaaagcgccagcgcccacccacctgggccaatggactggttctgctcgtgccacgctggttctgctc

SEQ ID NO: 262455 - DNA, 122 bp, Homo sapiens
atgcagcagcccccagccttcaaggccctgtggactacaccctcggtagtccgagagcagcgcggggctgggagcctgtgctgccgttccggccacgccggtgaagcgcttccggtccccgt

SEQ ID NO: 262456 - DNA, 122 bp, Homo sapiens
aaatcaggtataagaagcccagtagactctggctttctattcttcagttcaccttgcagacgatctaaaattgcctttcatcattctttactaaaaaatgttcactggtgcctacccattgc

SEQ ID NO: 262457 - DNA, 122 bp, Homo sapiens
ccctcggggcgccgagcctccttggcggggcccgggagcaggcagcacacttcacccacccgcacatcgatccccgcccgcccccggcgccaagccagcccctgggtgaccccggctccctc

SEQ ID NO: 262458 - DNA, 122 bp, Homo sapiens
gaagttcctgccggagcccctgatgtctagccagcgctgggggttatagcgctcaggcctcgggaacaaggcggggttgcgacccagagagtagaggaacacgcgcaccaatgtctgcggac

SEQ ID NO: 262459 - DNA, 122 bp, Homo sapiens
ctgaaaaaaacagacttgactggaggcagcgcctcttcttccaaatacagccccagctgacgcagattagcacaaccgcctaagcggcggaactctggagagtgcggaacctaggatcctag

SEQ ID NO: 262460 - DNA, 122 bp, Homo sapiens
gcgggtctggcgtctaggactggcgcagttcctacctcagcgaccttcgccccagccagacgccgcccagtttatgatcctttacgaccggcttctgccaagggggctcccgctggccggct

SEQ ID NO: 262461 - DNA, 122 bp, Homo sapiens
gctgtggatccacccagcccaggcactcaggctggggttgagcccctgaatccttcctggcgaggcagccctcaggtgttagtccaaggtgaggtctattgcagagctgcctgcccttcaac

SEQ ID NO: 262462 - DNA, 122 bp, Homo sapiens
tgaggtcaataaatctcgccggctgtgcggcctcccgcccgctctgttcagcaatctgtccggctgcctttcaccagcccagtggctcccattacctcgggggaagagccacaaatcaccgt

SEQ ID NO: 262463 - DNA, 122 bp, Homo sapiens
gcatctgcagctactccctctgctcctttctcgccgagcgttacctgtgccaggccgtggcgcgttacagcaccaggccatcactgacagaaacgtttacttaacgaatgttcttaaaccag

SEQ ID NO: 262464 - DNA, 122 bp, Homo sapiens
tcacaaactagatgcaaagtgtaaccaaacaagaagtgtaaaataacaacaggaatctcacgctatgggtaacaagaaccaaatgagtgaggggtccagacagactaaatgctgtgttcctt

SEQ ID NO: 262465 - DNA, 122 bp, Homo sapiens
ttaaaaacgagacccatgtttacaaatgtgagctgacatgtcacatttgtggagaaataacgaagtagctgccaggcggcagcaagattcttcatgttcagaagctcctccacgtaaaagca

SEQ ID NO: 262466 - DNA, 122 bp, Homo sapiens
tcaggagttcacactgtatattctatacatacataaaccacatttatacagatgtattcacggaatagaagtcagtacttacacacatagtttttaaaaattcgtaagccaggctctttctt

SEQ ID NO: 262467 - DNA, 122 bp, Homo sapiens
acccagtcaccattctgtaggctttttgtcattttcctttacaaaatatgtcacctataacgataccattcttgggtgtatagcatttgcccccttttttttttttttttttttttttttga

SEQ ID NO: 262468 - DNA, 122 bp, Homo sapiens
atgtaagatgaacattggttttttccagaaaggcgtgacaatttgacgcaaaggcagactcgaggcaaaggcagaacaactcaaagaggggagtgggtttccaggtcataggtagataagag

SEQ ID NO: 262469 - DNA, 122 bp, Homo sapiens
ttccaatttcagagccaaatagctccaaaaagcattgtgggtattgtagttttctgcacacgggcactaaaggtaggttagggtgatttacggatgctgcaaaagaatccattgcttactac

SEQ ID NO: 262470 - DNA, 122 bp, Homo sapiens
tttatgctcctgtaccctgctgggtttagttttgcctccctgaaatcaggttagtagtaccgtcgctttcctggatagtggctgtaagtgataaaacaggatttttggctgctaattaatcc

SEQ ID NO: 262471 - DNA, 122 bp, Homo sapiens
ctggctacacctccggcccatctggcccaccccaaactgcgcgaagcccctctccaccgacgccaggcctgtggcctcgcgcgaagctgttggtcgttaacatctcccccgcaatgggcggg

SEQ ID NO: 262472 - DNA, 122 bp, Homo sapiens
ccgagagaagccgtcgccgccccgcccgagctgggtgccgcggcactctgctctgcgccgcgcgtctccgcggctgcctctttaatcaggaacacagaaggggcgggccctgagccggcgcg

SEQ ID NO: 262473 - DNA, 122 bp, Homo sapiens
cacctctccatcctgagatctgctcttgagctgcaccatggcaataagtgagggagcacccgagcagcagccaattgattcatttttttcaaacagagaaaggcgccatggggacatgcatt

SEQ ID NO: 262474 - DNA, 122 bp, Homo sapiens
tttatttgacaaaaagccagctttggcaacacatacccataataaaagtcattttaaaatcgtggcccaaacaccaagaaaaaaaagaaaggaaaagcttgaacaacaacaacaaaaaaatt

SEQ ID NO: 262475 - DNA, 122 bp, Homo sapiens
gggtcggggagggggcagccgccagagtggggtggatggaatcgtttaacctgttgtcagcggatctgtagtaaaagaccttaatacgttgcgtcttttaagttctctgtaatttgaaccct

SEQ ID NO: 262476 - DNA, 122 bp, Homo sapiens
taatagaaatgtcctagacctgccctgcccagtatggtagccactagtcacacgtggccacggagcacttgaaatgtgactagtgtgactgcggatctcaatttttatttcattttatttta

SEQ ID NO: 262477 - DNA, 122 bp, Homo sapiens
tccaggtggaaggagattgataacccaggcctgggcaggaaccgatggcagtcctggggccgggagggtggggagcagagcaggcatcgccacctcctctgtcccctagctggtctccgtct

SEQ ID NO: 262478 - DNA, 122 bp, Homo sapiens
cttccccatgtcctcttctccccctagacactgccaccttaggggtcctggctgttacttcgtcccagggcctgactggtagtcttagttacacacacaacacaggggagggaggaaggagc

SEQ ID NO: 262479 - DNA, 122 bp, Homo sapiens
ccacactttgattgtgttgccaggacacaggcagatattttttgtttttgtttctgggagcgtgtgggttcttaaacactctggacagtaatacctggctttatcatatgcctgacagcatt

SEQ ID NO: 262480 - DNA, 122 bp, Homo sapiens
ggtttttcagcctaggtctgtgccatgcctgaaatacaaatttaacaagacattcttagacgtaaaaaactattccggggttcttttacttggcaaccccacctggggcttcagagggtctg

SEQ ID NO: 262481 - DNA, 122 bp, Homo sapiens
tggaaacattttgaacacaaagaatattagcctagtccttaatattgagtgaatgaggaacgcaaattggaagggagtctatgttgagaagaaaattaaatgatatttactttgagtagggg

SEQ ID NO: 262482 - DNA, 122 bp, Homo sapiens
tccatcagctgtaaggggaagagaaggagggccagtcatttgagaaggagatagggccagcgacatgatgaaaccatgatctcagtaacctaaagggatcagaggggtcctgtgagccagcg

SEQ ID NO: 262483 - DNA, 122 bp, Homo sapiens
tgaaaaaaggaaaatgattcttctctagtacacagctgaaaactccctactgaggcatgacgtcacactgaacccatttaagggaggtcacgctcctccttccccagcacaggcaatcctgt

SEQ ID NO: 262484 - DNA, 122 bp, Homo sapiens
tcacgggcttgccagttcacggtgggaacagccaatagaagagttaagaaagaaggtgggcgagaattatttgcgcgcctgcgcggtgaggcacttgacgcaccctgccacgactacaccag

SEQ ID NO: 262485 - DNA, 122 bp, Homo sapiens
ccacccctccctagcgccccgggccatttaaagaagtgcaactggcagggggcggggcagcgactccggggtggagggcggccggtccaacagaaccgcttccttccactcagctacagtcc

SEQ ID NO: 262486 - DNA, 122 bp, Homo sapiens
tcttccatctcttttgttggcttcttttcctctgctttacactagtcactgcaatgttatcggtgagcacacttgccctaggtagttttccatatgctggtgactcccaactttgcatcttt

SEQ ID NO: 262487 - DNA, 122 bp, Homo sapiens
tcttgttcccttcctttaggggctttcgtgttgctttgagatgcccccttgggcgtgacccgcagctgggtgcaaggcagaagctccaccactcgcctggcccggagcagggtctgccagga

SEQ ID NO: 262488 - DNA, 122 bp, Homo sapiens
aggtgtggcatgagggagaagtgaaaatgattactagtgaacatttcaatagttattatacgacatatagggattacctctgtgtaggttaaaatgagggttgacatggcagaagaatttcc

SEQ ID NO: 262489 - DNA, 122 bp, Homo sapiens
ggcccgcgccggaggaagcagcagctggaacagctggctggggagccgcttgcatgcctccggttttttcttttcccttccaccaccccttcccccaacccatttctgcctccccgtagccc

SEQ ID NO: 262490 - DNA, 122 bp, Homo sapiens
aagcttcttggaactgctatttttcagtccccagttgagtactgtggtgtgggggaagcacggagtcccagttctgcgttcctgacgctgatgggcaggtggctgcctctccaatgcttcga

SEQ ID NO: 262491 - DNA, 122 bp, Homo sapiens
aggtgggaggatcttttgaacccaggagttcagggtcatagcatgctgtgattgtgcctacgaatagccactgcataccaacctgggcaatatagcaagatcccatctctttaaaaaaaaaa

SEQ ID NO: 262492 - DNA, 122 bp, Homo sapiens
ttcggcaaatgtgaaaaggcgaataatgaaacggaggagggaaatatagaacagaatgaacgtgccttcttgaacagcgcgtctttcttaaggcactggaatcccacggatggagtgatggg

SEQ ID NO: 262493 - DNA, 122 bp, Homo sapiens
gaaattaatgtgatcctgttggggcaatggtggtttccaaatctgaccaaacatcaaaatcgattaagaaactttgcaaaaatacagcttcccaggccccaacccagccacacttaagcaga

SEQ ID NO: 262494 - DNA, 122 bp, Homo sapiens
ttacaggcggggacagccacattcctgcgccccaacttccacctccgcttcctgcgcgcgcgagactcaagctgccacagtggctctgccgccagcgtcccagctcctcccacacccgagtt

SEQ ID NO: 262495 - DNA, 122 bp, Homo sapiens
cgggtccacacgggcggccaagagtgcttgggccgtgctattgggcagcgacaagttttgcgtcaggaaacgccagagctcctgcgggtttctggccaccgagtccagagagaaggaagaca

SEQ ID NO: 262496 - DNA, 122 bp, Homo sapiens
gagagacaagtagggaggaagttaggtttgggtagtgctggagttttgtgagattgtcagcgggtgtcaggggaaggtggaaagacttgaaagtacattaaacaacttactgcaatgatgga

SEQ ID NO: 262497 - DNA, 122 bp, Homo sapiens
gacctttgcccagcaggaaccaggtttctgcagcgtctggatgagcgtgcacgaagcacacgcccgaaaatcctgagcacgtggctctaccgagggactggaagcgctccaggcctcgtttt

SEQ ID NO: 262498 - DNA, 122 bp, Homo sapiens
cgggccgtgcagagcagcacctccatcaggtacaacctcgaggagctctaccaggtgaggcggcggccggggctggggacgccgctcctgccccgcgtgacgcagacgcggccgggcggccg

SEQ ID NO: 262499 - DNA, 122 bp, Homo sapiens
acttttttgtgtaatatcctagcaaaaactgatcctaaaaatgaagaggaagaaaagcggcgaattgaggctcggcgagagaaacaaaggcgcagaagagaaaaaaacagtgagaaatacgg

SEQ ID NO: 262500 - DNA, 122 bp, Homo sapiens
ttgttcacctgtctccagtactagactctgagcttcttgaggtcaggcactgtcttaccacgacgtggcttcagtgccaaaaacatagtatattcacagtttacaattactgaagatttact

SEQ ID NO: 262501 - DNA, 122 bp, Homo sapiens
ctcgatttcctggctgtccttggggcaatcctgctgagtgaatgggccccgctgtgccagcgtattcacacagtgtccccatttggcagatgaggcactgaggctcagggagcacagggcag

SEQ ID NO: 262502 - DNA, 122 bp, Homo sapiens
gagcctggaaaacacggttcggtgagcggctgcgccgagccccgccccgccggcatctgacggattaacgctgcccgccccgggcgccccaggtacctgtcgcttgaaactttctggttgtc

SEQ ID NO: 262503 - DNA, 122 bp, Homo sapiens
gccagtaccagcatagcgcccccacgcgccgagtcggggaactgccgcgggggccggccccgcccaccagcgcctgcgcctgcgcagaggcaccgccccaagtttgttgtgaccggcggggg

SEQ ID NO: 262504 - DNA, 122 bp, Homo sapiens
atctaagactagcagatgtgaacataaatcaaagttacaagggcgtagcttccagataatcgagttgctggtattttcctttaccagaagtgagaaagttcaggtaaatggatagacagatg

SEQ ID NO: 262505 - DNA, 122 bp, Homo sapiens
cctcccgcgcgcgcggttaaatccccgcacctgagcatcggctcacacctgcaccccgcccgggcatagcaccatgcctgcttgtcgcctaggcccgctagccgccgccctcctcctcagcc

SEQ ID NO: 262506 - DNA, 122 bp, Homo sapiens
aacagctatggccggagtgaccattacggaagaggaggctgctacgaggaataccaaggccgctcgcccaatgcctacggcgggggccgcggcctcaacagttccaacaacagtcatggccg

SEQ ID NO: 262507 - DNA, 122 bp, Homo sapiens
gaagcagggcaagtaaaagcttggatgtcttcgtctctccgtagccagaggaaatctgggcgcgcagagagatttggagtttcatcctccccgctcagccagtcccaggcctcggctccgag

SEQ ID NO: 262508 - DNA, 122 bp, Homo sapiens
actcaaaatgtgctcccaggacctaggagcttgttagaagtggcagacattgggcaccaccgtgtacctcctggatcagatttggcattttaacaacatcaccagggaactgatgtgcaccc

SEQ ID NO: 262509 - DNA, 122 bp, Homo sapiens
ctcgctcaacatcattgactttgtggccatcctgcccttctacctggaggtggggctgagcggcctgtcctccaaggcagccaaggacgtgctgggcttcctgcgcgtcgtccgcttcgtgc

SEQ ID NO: 262510 - DNA, 122 bp, Homo sapiens
ttggaagatccacagctaacatgccaggtgcccctggcagcctagaaatggtgagagtgccgggtccgacatcccgagaaggggaaggggctgattggaaccggtgggaagtggctgtggcg

SEQ ID NO: 262511 - DNA, 122 bp, Homo sapiens
gtgactcccgcctccggccggcggacccgccggggcagcaggccagcgccgagcgcggcccggagccttggaaaataggagctcagagtagagccctctcctgctggaagagatggctttgg

SEQ ID NO: 262512 - DNA, 122 bp, Homo sapiens
taagagaaagaatttctaaccccaaacggaagaaaccacagcggcacttcccacagaaatcggagctgtgttgtgagccactagtaatccctccttagaggtggcagggaagaggatcaaag

SEQ ID NO: 262513 - DNA, 122 bp, Homo sapiens
ataatttctgatttctgtccggccgcacacatctagagcatccaggtcagcgatcagccccgagagcacacaggataagtgcctgcaggtctcattgttgttcacacccatcagaagtgcaa

SEQ ID NO: 262514 - DNA, 122 bp, Homo sapiens
cctcacgcaggagccaatcctgagcaggctaggagacgaacccggaagtgagatgcaaggcggcgattttcccttctgtcaggtgggttgttattccctgtcccggacctcgctttttgatg

SEQ ID NO: 262515 - DNA, 122 bp, Homo sapiens
tcttttcaggacagctggattgataaaggggactgagcatgcctgtcttatccaggcacccggtaaacaagccaggctccagtgcgggtcccctgtgttccatggctatacatctcatgttt

SEQ ID NO: 262516 - DNA, 122 bp, Homo sapiens
cacctcggtcattcatctcaggaaactacaaagaggatggactgagaagatggttgatttcggcctaatcattcctgagaggaaggaaaatacacagaccacgaaaagcttcctgctgggct

SEQ ID NO: 262517 - DNA, 122 bp, Homo sapiens
ttcacatggaaggaaggtagtttttggcaaatataataaatgatggattccatgtaattccggcttattgttccaagggagttagctgcaccctttgctttgctttacagccaggaccctgg

SEQ ID NO: 262518 - DNA, 122 bp, Homo sapiens
tttgaacaatatatcccacagaatgttgtagagttcaatgcgaacttcagtccaggtcaacgtcccttggcttatgctctctcataaactctcgtggaagtgacgcctttcatgacgcattc

SEQ ID NO: 262519 - DNA, 122 bp, Homo sapiens
accgcccggctcaccttgcaggtagcatggttcagcatctcctgccacgtggggtccagtcggttcttgtcagccatgacgccctgctcagccacaaacaccatttctcgagcagcgttgtg

SEQ ID NO: 262520 - DNA, 122 bp, Homo sapiens
catctgagtgttcaagtacagttttacagtggctaaggttgtctcttgatcttttttctccgttgtgtgatcacagatgctatttctgttttattggtgattatacgagacttctaatacat

SEQ ID NO: 262521 - DNA, 122 bp, Homo sapiens
gcgtgaagccggccccttacattttgcgaagtgcattatagtccttgtttttctctccctcgtgggggcaacgacccctcccctggcagtaggggtggggtaggtgactctcgctagatccc

SEQ ID NO: 262522 - DNA, 122 bp, Homo sapiens
cattacctttctgttaagatttcccaggtaatttaaaagggagtaacaggagctgccactcgtgagcgcctcacagtagcttaggcttcagccctgcagggaccccgccctttcctctgact

SEQ ID NO: 262523 - DNA, 122 bp, Homo sapiens
cccgaggcagaccctggcccacccagggaccccctcccatgcacacaagcacacacaacacgtatatgggcatgcgtgtgcacacacactcgctgcagcccgcagcactggctggcccaggt

SEQ ID NO: 262524 - DNA, 122 bp, Homo sapiens
caacaaacaaaaaaacagaggtcaccaggatccctgccccgcaacagaggcggaggcaggcgtggagcagcagcccctggcctgggtaacctcgctccccggcccccacagccaaggcccaa

SEQ ID NO: 262525 - DNA, 122 bp, Homo sapiens
tagattaaccgtgctgaggctccacatagctcctggacctgtgtctagtacatactgaagcgatggtcagagtgtgtagagtgaagttgctgtgcccacattgtttgaactcgcgtaccccg

SEQ ID NO: 262526 - DNA, 122 bp, Homo sapiens
ggcggccaggagaagcagaaccaaaggaccgctgggacttgtagtccaccatgtttccctcgggattgccgatccccttacgagaaccacaactcccaaggtttaccgcgcgcgtcggtctt

SEQ ID NO: 262527 - DNA, 122 bp, Homo sapiens
aacccagtagaagaccagactctcatgaagttgaaatcccaaagaactatatcttcagtccgaggatgagtcagaaattaatcaccccatgtcaccattcccaggacagttatcttaacact

SEQ ID NO: 262528 - DNA, 122 bp, Homo sapiens
ttactttgacttttctctccaaattcggtatctcttccataagtcagaaacattaagcggcgggccggaagaaatcgggcgccactagtatcctgaaaagtgggagctctgggccgatggaa

SEQ ID NO: 262529 - DNA, 122 bp, Homo sapiens
ccaaggctcttgagggctgagcagtgtccccatgcacactcctgaaacactttgtcccttcgccattcagaaggcatcattttggggaaggcagcagccggtttttcagagccagcgagtgg

SEQ ID NO: 262530 - DNA, 122 bp, Homo sapiens
tagcttacgacagcctcaaactccagggctccagccatcctccagcctcagcctcccgagcggctgggattaccagagtgagccagcatccctggaagcagcttctactttaaagactcttt

SEQ ID NO: 262531 - DNA, 122 bp, Homo sapiens
cgcggctccctgcgcggttctggccctctggggcccacttggggccgagcggttctcacccgccctctccgcacgtccgccggcgcctcaggtttcccccggtagccaccggcagtcctccg

SEQ ID NO: 262532 - DNA, 122 bp, Homo sapiens
tcgcgggcgaggttgggtatggtgggtgggggcgagcgagtggaggatcgcccctgtccccgcgcagacgcgcacacgtgtggccgttcctgctgggactgggtggcccggccttgctcccc

SEQ ID NO: 262533 - DNA, 122 bp, Homo sapiens
gctgtccttgactgtgtctctttccttctaggcggcttatgacccctacgcttatcccagcgactatgatatgcacacaggtgagaccacgggttaggctggctgagtactcgtagggatca

SEQ ID NO: 262534 - DNA, 122 bp, Homo sapiens
gtaaaatagtccatcatcaacttattctgatgtaaaaactaaccttacattcaaagcctacgatagtatatttaaagctgaaattatatattgtaagttaaaaaaatcccattcaaaaatgt

SEQ ID NO: 262535 - DNA, 122 bp, Homo sapiens
gcttcacctctctcagatgcctggggggccattgtagtcgtaagaccaatattatgtaaccgcaggctctttcctggagagtaaggtggcttttaattactgtaacaaagttgctcctttgg

SEQ ID NO: 262536 - DNA, 122 bp, Homo sapiens
aaagtacatgcaccggggtgctactgagccagcaggatccacggggcggactggtggacgcgggcagccgggtccaggttgagcatgaccccgggctttcaactcgtgcgggcccgccccga

SEQ ID NO: 262537 - DNA, 122 bp, Homo sapiens
ctggcctccggctttttcgcccgcctggtggagctgttctgtagccgggaggacagctctcgcccaagccgagcatgccccgggcccccgcctccttcccaggagcccctggccctggccat

SEQ ID NO: 262538 - DNA, 122 bp, Homo sapiens
tacagactcattgccaatagaaacacatatcgcaacaggtgttaaaaagtaactggagatcgggccatgccctaagcagcctctaagcaatttatcatatttcactgttaacctagtcattt

SEQ ID NO: 262539 - DNA, 122 bp, Homo sapiens
cagactgctgtgctaggaatcagcgagactccgtgggcgtagaaccctccgagccaggtgcgggatataatctcgtgatgcgccgttttttaagccagtccgaaaagcgcaatattcgggtg

SEQ ID NO: 262540 - DNA, 122 bp, Homo sapiens
cttccaggggatggggaaatagtttcttataagatgatcacttgggtttaatgttgaggacgacgctgttagtttgcagtaatgaccctacacctctaaggtattaaaaaaatgccttttat

SEQ ID NO: 262541 - DNA, 122 bp, Homo sapiens
gtgaaccagtttaattggcttgaatacctcagacatgctatcagctgataaatcagcaggcggctcttagaaaattaggtcaaccttaatcttattttatttagaacctggagttggaaaga

SEQ ID NO: 262542 - DNA, 122 bp, Homo sapiens
tgaactcctgacctcaggtgattcaccagcctcgccctccccaagtgcagggattacaggcgtgagccactgcgcctggccttggtctcaaacttctgacctcaggttatccacccgccttg

SEQ ID NO: 262543 - DNA, 122 bp, Homo sapiens
aattcccaccacagctctgtgacagccctatgaaatcattcatttcatatctgctgaccccgaaatcccctagagcccccgtccctgcctgataatggcacttcaaattgcttcttggaagc

SEQ ID NO: 262544 - DNA, 122 bp, Homo sapiens
ccacctgccccgcctgtggcccctccccctcaccaatgcggtccaggcggtccagcgccacggtctcgaaggcccttcgcatcatggggtactcctccagcacctcattgaagttgtccacg

SEQ ID NO: 262545 - DNA, 122 bp, Homo sapiens
cttgaagcacacaaagacaatactgtaaaactataacaattaagagcacaaattaacaaacgcaaattaaccaaaaaaactgtaataattaacagcataaatacttatattagaataaagaa

SEQ ID NO: 262546 - DNA, 122 bp, Homo sapiens
gaggaatgtgcctgtgctgagctctgggcctcgtgtttccacagcacagcatggccgtcccgcctgattaaagtattgatgcggcctggacgctaagcatttagctgccagacgtggtgtga

SEQ ID NO: 262547 - DNA, 122 bp, Homo sapiens
gaagaacgccatcatcgatgactacaaggtcaccagccaggtcctggggctgggcatcaacggcaaagttttgcagatcttcaacaagaggacccaggagaaattcgccctcaaagtaggtc

SEQ ID NO: 262548 - DNA, 122 bp, Homo sapiens
tgttggattagatttaggcttgagcccttttagtatcctaccttcagaaagggtgaagggcgggctccagcagcgttactaaatgcagtgtatttgcctctttgcctgactgggtttgttct

SEQ ID NO: 262549 - DNA, 122 bp, Homo sapiens
ttattttagtagcaggattcagttttagaaatggtgtccattattcagaggagagtgtagcgtcatctgtcagagagacaagaatagagtcaagtgattggtccccaatacagttgaaaatg

SEQ ID NO: 262550 - DNA, 122 bp, Homo sapiens
ggctggtgagcagtccaggtgcccaagggccagcttgctgctgcccaaagcagaggaagccgggctggctgagggtccgaaaagcctgcaggggcccggcgagccccaggaagagcctcagc

SEQ ID NO: 262551 - DNA, 122 bp, Homo sapiens
tccaggccagggccaagcaaatgaatgctgatccctgatccgtgtgtgtgtgcgcgcgcgcgcaagagagaaagggtttaaaaaatgttatgtatatattttggccaggagtggtgactcat

SEQ ID NO: 262552 - DNA, 122 bp, Homo sapiens
tccccgctgggccggaggagcctgggcccgaggtatccgggcaggaggtggcggcctcgccgccctggtcaggcctccgggagggagcaggcgcgggagcgggaggaggaagtcgggaagag

SEQ ID NO: 262553 - DNA, 122 bp, Homo sapiens
gcaccacctacacgcccgtccccgccctccctcaggcccacgtgctccgagggccgccttcgcaggttgtttctggcgatgcctgtctgaaggcctcagactgaggccccgcccactctccc

SEQ ID NO: 262554 - DNA, 122 bp, Homo sapiens
aaagggagaagacttcctccccttggccctcacagcctgcccgaagagtgcaaagcctcacgcttttgcaaaacaggccgcacctagcccagattctggagctgattcagtccatgcctctc

SEQ ID NO: 262555 - DNA, 122 bp, Homo sapiens
tggtgctactcttggtctcccacaggaaaaggcctccccccttcttagccccatttaccccgtttgtggaaggcactgctcgctctgttttgtcagagagtggcctatccagattggtgcta

SEQ ID NO: 262556 - DNA, 122 bp, Homo sapiens
ggaatgtcccgggtgggaaggttacagctcccggagttggagggagtgagagggggctaccgtgaaaaactgacactggaatttcctgaagcggcaaatgtgcttagttctgtctgatgtgg

SEQ ID NO: 262557 - DNA, 122 bp, Homo sapiens
cccaacttaagagggtctaacatacgattttttcaaattaacaacagtccaaaagtgatacgcattcagtggaaaacatactctaggtaaccacacaactattccatttttcactttcagtt

SEQ ID NO: 262558 - DNA, 122 bp, Homo sapiens
ttgaggcaggagtgaaaattgggtctgggggttagtcctggggtggaggtctgggcacgccgggtcggaccccctccatcttcggttttgcacaccccgctttccagcgcggagtcgcggcg

SEQ ID NO: 262559 - DNA, 122 bp, Homo sapiens
acaatttcgggcccggaactgactttgtggttgagtacatcgacagtaagcattgctgtgcggggtggtggtggcggcagcggcgtcggcagcagcggcgggtagtggtagatgccattaaa

SEQ ID NO: 262560 - DNA, 122 bp, Homo sapiens
gaacaggagatgtccctcctgggacatcaactcttccacaacagggctgggcacgcaggacgctcagaagaaggagcatgtgcctgccttcagcttgtactgttcttgttgaggggaacagg

SEQ ID NO: 262561 - DNA, 122 bp, Homo sapiens
caagggggtcctcctggcattgaccaacataggtgagtggatcctgctgctgtcatggtccgtgagccaggctgcttggggttgccaagggtcagacttcgggccatgaaggtttcctcagg

SEQ ID NO: 262562 - DNA, 122 bp, Homo sapiens
aatgaaattcaagaagactgtggtggtgttggcttcacggtgtatagttatccccaaactcgttgagttgtatacattaaatatgtatagcgttttacatgtcaatcagacctcaataaagt

SEQ ID NO: 262563 - DNA, 122 bp, Homo sapiens
tgacaacggcacaatttcctggcttctattagccaaggtggctagagtgactgaggatttcgatggggcaataaaatctcacaggaaggaaaggaccaaaattcagtccagaccataactat

SEQ ID NO: 262564 - DNA, 122 bp, Homo sapiens
gggtggagccgggggaagggtggggaggggatgggctggagctccgggcagtgtgcgaggcgcacgcacaggagcctgcactctgcgtcccgcaccccagcagccgcgccatgagccgtgag

SEQ ID NO: 262565 - DNA, 122 bp, Homo sapiens
tcaatgagaagatcaagaaggatggtgagttctcgggatagtccggagtccagactgtcccgcacgggctggcccctcttccgtcccctgcacccgcctctctttctaagtgtttgtccagc

SEQ ID NO: 262566 - DNA, 122 bp, Homo sapiens
ctaaagccggggtcaggcgcagaacagtaccttggaggggagctctgggcacacctggcccgtagtgagtgtgaatttgcgtcagagagctgtcgagacccacggggccaccttgagggtgc

SEQ ID NO: 262567 - DNA, 122 bp, Homo sapiens
gctctgccgcgcgcggggttcctctccggaaggtgggcagcgcggcgggtttgggacgagcgtgcacccgggctccggcccggagaagggggggctcgcaggatttctcctgctgtttgcac

SEQ ID NO: 262568 - DNA, 122 bp, Homo sapiens
ccgcatctgcagcgagcatctgagaagccaagactgagccggcggccgcggcgcagcgaacgagcagtgaccgtgctcctacccagctctgctccacagcgcccacctgtctccgcccctcg

SEQ ID NO: 262569 - DNA, 122 bp, Homo sapiens
ttggaaaaacgattggagagaagacagaaaacacatttacagaggaagcaatccctatctcggcaatgtgctacgactatgaaaaagatgaaaaaaaggaaagattctcttgtatagtttcc

SEQ ID NO: 262570 - DNA, 122 bp, Homo sapiens
agctcagctcgcccatggcgggtgctcgcccagtttccttttctgcctccctcctctgagcggccgctcagggacaagcacgccctctctatccatatgctccaataagggagggcctgctg

SEQ ID NO: 262571 - DNA, 122 bp, Homo sapiens
gtttgtgtatgagtttatactgctgtgacactcttagtagggatgagtagaagaatttcacgaacagcatctatggccctggggttacagcaaaatgttgaaaagccacatgaagccaaggg

SEQ ID NO: 262572 - DNA, 122 bp, Homo sapiens
gaaagtctgagggggtccgtctccccagactcgggcgtttccggatgcctgacgcctccccgcagatctcaggttctcaggaacccggggtgatatcccgaatggtctctccagcctcagaa

SEQ ID NO: 262573 - DNA, 122 bp, Homo sapiens
ggagcagccctgtggggaagaaatggtggccatggctggaggcaaacacagatcaccttgcgaggggctgacatcaagagcgtaagtagatccacaaaggaggcaggacctgggacgttttc

SEQ ID NO: 262574 - DNA, 122 bp, Homo sapiens
gttagctctgtccagccctctggcggccctgatccgaaaggaaaccccaaagccagtacccggcagcaggagcctagtttgggtttgtccaagccatggccacggattacgatcttcttgac

SEQ ID NO: 262575 - DNA, 122 bp, Homo sapiens
gtctacaacggcagcccggcgggggctgggcagaggccgggcctgtctagcttatgttggcgtgaaccgcacatggacaggggtttgcgggtcctgacgaggactccagggtgggagcagct

SEQ ID NO: 262576 - DNA, 122 bp, Homo sapiens
tccccttcaacaaggtaatttgaccttaagattatgcaactaatgagttaatgactgaaacgcggaaacagaaataatccattgtacatttactgtaatgggtacttgctagtttggaggct

SEQ ID NO: 262577 - DNA, 122 bp, Homo sapiens
cgcctggatgatgtgcgtcttcacggtggtcatgacctacagtatcacctgccccatcatcgtgcccttcggtaggcaccgccgcgccgggacctgggccctgctcggggggacccaggact

SEQ ID NO: 262578 - DNA, 122 bp, Homo sapiens
taaccactggggaccattaagtgtcacctactctaattaacctgctgtcataaagctgcacgagtcattgtgttaaatatgcatctggaagccaaaatggcaaacccaccacatgcatgttc

SEQ ID NO: 262579 - DNA, 122 bp, Homo sapiens
gttcgcctgctttcaagcctccagggagtctcagaaaagctgctttcctctgggtgtgcccggtgtgtgtgctgcctgcctgcattctctccaactccccagtaagtcctgggtagaggtag

SEQ ID NO: 262580 - DNA, 122 bp, Homo sapiens
gcacttccaccccagatgcatacacaagtacatatgttcactgaaagtcaagtgcaagaacgttcaaaagagccaaaactagaagcaacacatatgtttatcaacagtagagatgataaaat

SEQ ID NO: 262581 - DNA, 122 bp, Homo sapiens
tgggcctaatgatgtcggtgcttaatgatgtctatggaatatatgaaacttcctcagctgcgcgaaggccaatgttacaagttaatcaaaaggaaaaaccccaggcccttccccttttcccc

SEQ ID NO: 262582 - DNA, 122 bp, Homo sapiens
gtatccatttccttgcacccttctcagtagtattaccattaaacaaacaaaatttatatgcgtcagtttgttgggctcaaaggagcctctcgacaagtttcctattccccacgctgcctctc

SEQ ID NO: 262583 - DNA, 122 bp, Homo sapiens
gctcgcccgtccgggcacacgacacttgtcggctgagggggacacgcgggcagacgggggcgttagccccagaggaaacaaaagccaaatgcccaccgccgggcgctcgatggccggaggac

SEQ ID NO: 262584 - DNA, 122 bp, Homo sapiens
tctaaaacgaacatcctctcggaagacaaatacaatttgcaaggcacactagtgtgagaacgcagtgcttggtcaggaggtccaactgcagttcagactaatgttccaggctttgaatcttc

SEQ ID NO: 262585 - DNA, 122 bp, Homo sapiens
tgctcggattttttgcttggctacccggagtgaagcggccgggttgggcgattaacaggccgtggttaggaaggacggagaaggggcgttcgctcctttgggacttttcatgcctcgttttt

SEQ ID NO: 262586 - DNA, 122 bp, Homo sapiens
aaacaccaggaggctcattcaccgtgagggagacagtactcacaagagctgtggcgcctacgtttacttgttctgatgggatgaaaagccaaactaagaagggatcagatagaagcacgatt

SEQ ID NO: 262587 - DNA, 122 bp, Homo sapiens
agaacacggaggagggctgggggcacgcctggcccgagaaggggctgggacaggactgcacgcccacacgcactttcttgccaaagccgcgcggcactgcgtgcatggccggctgggcgggc

SEQ ID NO: 262588 - DNA, 122 bp, Homo sapiens
ggcggcagagggctccgtgcgctgcgccgcgggcccggcttttagcagcgggtgtggacgcgggcacccccgccccgctccgaggtgtcctttgccccttgatctggtgcctccttctctcc

SEQ ID NO: 262589 - DNA, 122 bp, Homo sapiens
gtctaaatcagggtgcaagtgacagggaacacaggctacttcttgtaggcatgatgccttcgggaatgccctttctcccgattctttggggtttttgattttgcgccaatggaaaatgaaga

SEQ ID NO: 262590 - DNA, 122 bp, Homo sapiens
gggtggaatacccagaagagggctgggacgtggttaactctagttctttattggttaaaacgtacgaagctggaggagaaggtgggacctagcttcctccggacttctcattggctcaaaaa

SEQ ID NO: 262591 - DNA, 122 bp, Homo sapiens
aataaaaaagaaaagcatcaagccggttttaggatagataatcagcctttctttgcaggccgaagtcctctcattcttactcagccagtcagcccacaaatataagcaagctcgccagatcc

SEQ ID NO: 262592 - DNA, 122 bp, Homo sapiens
caataaacccaaccccttcagtaaactgtgaagaccgaggggccaggtgctacctcttttcggaggtggggaggggggtctgggaaggcttcacaaaggtgatgactgaactgggcattaaa

SEQ ID NO: 262593 - DNA, 122 bp, Homo sapiens
gaccccaggaggacctggagcctctcaccagcccagcacaggctctctcggctgtgcttccgggacagctccccagagccagagtgcgcctctgcacccctgcggcaggaggacagccagag

SEQ ID NO: 262594 - DNA, 122 bp, Homo sapiens
tgtgggactcaaggcacccacagcacctggaggcccagaaatgcacacaaggaatgtgtccggaaaggcagtggaggggatgtgaattggagcaggagttcaaagtggaaggcgtgaggcag

SEQ ID NO: 262595 - DNA, 122 bp, Homo sapiens
ccggaactggggaatcacggcagggccgctgggcaaggcatgcagggttgcagcatttaccgaggaccctgacctgggggccaccagctgttcatttctattcttcttttcaaacctttaat

SEQ ID NO: 262596 - DNA, 122 bp, Homo sapiens
ctatctctgtaagaatttgaaataccaaaatggattgcatatgcttggcatttttgcaggcgtataaattgcatactttaagcaaggagggtgcctctttctgaattcaccggtggtagttt

SEQ ID NO: 262597 - DNA, 122 bp, Homo sapiens
ggcaggcagatcactcgcggtcaggagctggagaccagcccggccaacacggcgaaaccccgtctccaccaaaacatgcaaacaccagtcaagtgtggcggcgcgcgcctgcaatcccaggc

SEQ ID NO: 262598 - DNA, 122 bp, Homo sapiens
gcgtgctgtgtctgcattttcctgggagtgcacggtttacattctcgaaagtagtgctgtcgactagaaatattgagcgatacacatgtacaagttttgtcacttaaaaagaatttgaaaaa

SEQ ID NO: 262599 - DNA, 122 bp, Homo sapiens
gtttcactaacactaattcagctaaactacaaacttagttaaaacaagctctccacactccgtatctccaactgagcagctgaatgcatctcgagaaaaaaactgaaagcaatttcactgat

SEQ ID NO: 262600 - DNA, 122 bp, Homo sapiens
cttcatcccactctgagccacattccagctcagtcccagattacatctaaacccagaaagcgctgactgaatttactacattttaactagactctgcatggcccctggctgaaacatgtaat

SEQ ID NO: 262601 - DNA, 122 bp, Homo sapiens
gcccacaaggactagatgaaggtggaatccagaggtcccccgtcctgctggctcagggcgcgggcctcaaacagctgcttaatgagcgccgacttctcctgctccagctgcgtgatgcgctc

SEQ ID NO: 262602 - DNA, 122 bp, Homo sapiens
acgggagtgggaagtggaagggaggggagagagggccaggtggggccaggtggggccaggcgttgcaggagtgggcatagcagtgtcatgcagcttttgctcattcgtcaaggacaatgaag

SEQ ID NO: 262603 - DNA, 122 bp, Homo sapiens
gcgtctcccctcccgggcgggctgggtgcaggcggtgtcagctggcggcaagcggagcagcgaggcagggtagcttcatcacactcgcggcggatgcggattccgcgccgccccggctctag

SEQ ID NO: 262604 - DNA, 122 bp, Homo sapiens
gcagacagtgtgggttgagtcatattttccgtttacagaaccaatgggtattttacataacgacagggaggtcacgctgaggacatactgaagttagcacatgtatactacactccagggaa

SEQ ID NO: 262605 - DNA, 122 bp, Homo sapiens
ggcttttccctccagagcctgtcctgcccacccaagacgctgtggttggcctgaggagggcgcctggaacaggtcattccttgcccacactggtcttgcaggaatgcagcaccaccttaaag

SEQ ID NO: 262606 - DNA, 122 bp, Homo sapiens
gacctcaagaggggagctgaattccttgagccctcgcctttcaatcaagttttcaaggcacgctttggccgggccctcccggactggctgtgctgctacctccagaggaaatcaacgtctgt

SEQ ID NO: 262607 - DNA, 122 bp, Homo sapiens
atagtcaccagatcccacaagtagtcactgcaatgcattaggtgaccagtgggcaccttccgttcctgtccgcagggagacagacaggatgatctgctctccctcaccagcctgggagggga

SEQ ID NO: 262608 - DNA, 122 bp, Homo sapiens
ggggcagtcccgctcctttagacgcttattattgttgttgtcattgctttgtgcgattgacgtgggactactcttgggaaccacttttagtaaccagggtagaaacttctcagaaaagctgg

SEQ ID NO: 262609 - DNA, 122 bp, Homo sapiens
cgaggctcaagccgaccacctcagctccgtgcatcctcagcaggcgctgcagagcctctgcgtgggccccttcccaggggtctctggcacctgcaaagctggctgccagaggacttgcccgt

SEQ ID NO: 262610 - DNA, 122 bp, Homo sapiens
ccgcgcctgcctagcccggctctcaggacacctctgtctgcgtctccttcgtcgccactccgggtttcgactccgcgtggccaggcaccccgggtcaccacctctcgacccagggcgagctc

SEQ ID NO: 262611 - DNA, 122 bp, Homo sapiens
aaggagcgagggggagggagcctctctcctcagcggtgcagctagtctccctccagcgggcggcgactccgggttccccctcgcgccctctcgcagaggctcgcccccttccccgcccaccg

SEQ ID NO: 262612 - DNA, 122 bp, Homo sapiens
agacttcaatgcctgatgtccagtgtcatgaaactgctgtttcatatattttgtctggttcgggaggttcttttaagcaggtgcataaatccagtccctttactctctcttggattaaagca

SEQ ID NO: 262613 - DNA, 122 bp, Homo sapiens
ccacatagaccctccctggagcagccgtggggtcccaggtcccagtgccaggttctgtgtcgctttgactcgggtgctgcgtgggtgtgcacacagtggcgtcacgggccacatgccgaggc

SEQ ID NO: 262614 - DNA, 122 bp, Homo sapiens
aactcggatagcggaaaatggggtttcagaaagagactcagaagcggcgaagcaaaaccacgtcactgccgacgactttgtgcagacttctgtcatcggcagcaacggatacatcttaaata

SEQ ID NO: 262615 - DNA, 122 bp, Homo sapiens
tggcaattggaacatagtttattctttaagttgaggggtgcatgactccaccttgcctggcgtggccttaggtctcgtttatcataccatatcttactactgcaaggagtctgttctgtcag

SEQ ID NO: 262616 - DNA, 122 bp, Homo sapiens
gcggccgctccctccgcctattccctccttgctcgagatggatctgcccgtgggccccggcgcggcggggcccagcaacgtcccggccttcctgaccaagctgtggaccctcgtgagcgacc

SEQ ID NO: 262617 - DNA, 122 bp, Homo sapiens
gtcctccgaggggtccgggtacttgcccctgacgggtgcgtgccggtaatcctcgtaccccgtcatccagatcttctcccgggggttgatgcgcacgatctcctcgtcgtcgtccgggaagc

SEQ ID NO: 262618 - DNA, 122 bp, Homo sapiens
ggtccgcggcgttacttacaaggctgcaacttgaccgggtgcaacttcctagcgagcctccgccccgcccctcgtgacgccgcctgcaggcgggcccccgccggcctcagctcagccaggga

SEQ ID NO: 262619 - DNA, 122 bp, Homo sapiens
gctcgcggctccctcgctgggtctgaaccaggagcagctgagaacgtgccggggagaggccgagctccgactcactcatcccttagcaccgagccgcctacttattttaatccaccaccctc

SEQ ID NO: 262620 - DNA, 122 bp, Homo sapiens
gcaggggaaagagcaccagcatcaatgtgaacattctagctgggacgcttccttgtggtacgacttggggcaactttgatcttctaaatgggtattaatagttcccacctgcaggactgaac

SEQ ID NO: 262621 - DNA, 122 bp, Homo sapiens
tggggcggggaggaggtgcagagcctggccggagctggcctggccaagagcaggggacagcgaccgcctaggccagggcaggtgagcgcggcgcaggccccggcccggcgtgtccgcggtgc

SEQ ID NO: 262622 - DNA, 122 bp, Homo sapiens
cttctggagtggtgcgaggacgcgcgcgtgtgtctgtgtcggagcgagggcggggacgagcgtgtcgggcgcgcgcgggcggggctggggcggcgtcggggcgcgcgggggcccggcccggc

SEQ ID NO: 262623 - DNA, 122 bp, Homo sapiens
aaatggatataactgagacaaatgcaaagactgaaaatatcctaaaaacctgaagatgctcgtgtggtttcacaacaaagtccctttataagatccacagcccaaatgactgcatctttcaa

SEQ ID NO: 262624 - DNA, 122 bp, Homo sapiens
aaaagaagagaaaagacatagggagaaaggggaggccatgtgaagtcagatccccacccccgcgacctctggaaggagcgtggccctgccgacaacaccttgagtttggaattctggcctcc

SEQ ID NO: 262625 - DNA, 122 bp, Homo sapiens
agatcttcaagggattgatataaggcagttctcaaattgtcgtcctgggaccaggagcatcgcatgagaacttgttagtgacaacgttgaactttacctgagaaccagagaaacaaaatgaa

SEQ ID NO: 262626 - DNA, 122 bp, Homo sapiens
gacgtttggatttaattggtctagggtatggcttgggcatgctaattcttaaaagctcctcgggtcattgtagtgtacaactaaggtagaaagctactgattgttttgttttgttgagttgg

SEQ ID NO: 262627 - DNA, 122 bp, Homo sapiens
gctgggaggtggagtcgttgctgttgctgtttgtgagcctgtggcgcggcttctgtgggccggaaccttaaaggtgagtaactctcggtggctaatgagaagctacaaaagggtccgctttg

SEQ ID NO: 262628 - DNA, 122 bp, Homo sapiens
acgtcccaagaatgattagacggcgcctctaaaataacaaggccgttgcatgcaagggcccgagagctggccgtccacatttcctcccaactccaccttcagtgacactgcgtcagtaactg

SEQ ID NO: 262629 - DNA, 122 bp, Homo sapiens
tcctgcccagctacgacatggagtaccaggtggggtgagcaaaaagggaatcttgtgatccgtatttcaatatttcaagggccgagcccattcatcgttagggaacgtggttaagcgctact

SEQ ID NO: 262630 - DNA, 122 bp, Homo sapiens
ccctagctgcagctatcccagtgttggtgatgaatacgcttcagtcgggactgaggtttccgtctagggcaccaaggtgttgccagttccgctgcttctgggtatagaaagagtagaaaagg

SEQ ID NO: 262631 - DNA, 122 bp, Homo sapiens
tctcaaatgtcagaatctcctggttgattaataaacatgaaggtacctgggctgccctcccggatttccgattctttaggtctggctggggcccaggaatttgcatccttgacacgtgtttg

SEQ ID NO: 262632 - DNA, 122 bp, Homo sapiens
ttaggagggtggtccccatttcacaggcggtgatgagaggctctgagcctgagccagcatcgtgaggaagtcaacaatagacggaaacacggctcgcgcccagcatcgccccaccgtgcagt

SEQ ID NO: 262633 - DNA, 122 bp, Homo sapiens
ggaaatcaggtgctgcggccgcctgggccctttcctccctcaagcccatctccacaacctcgagcctgggctctggtccactactgccccagaccaccctcaaagctggtcttcagaaatca

SEQ ID NO: 262634 - DNA, 122 bp, Homo sapiens
ggcctcaatagcaaagccctcacaacagcaatccttctcagttcccactctgagtgaacccggttcaacttctcgggctaacagagattttaatcgaaatgaactgacagagaatttgctaa

SEQ ID NO: 262635 - DNA, 122 bp, Homo sapiens
tccccttttggacaatgaggagggaattgagattcttgaagagaggattgatgtgaaatacgggttataagggagtggcaacgtcacactggcaacatgaatgaaggatgcattgatggagg

SEQ ID NO: 262636 - DNA, 122 bp, Homo sapiens
gtggggagcgatttctttaacagatttctaagagcagcgctgagcaaaaattaactccttcgcggaggccggatgctggcctggcgctggggcagcgcccgggaagcaggtggctccaggtg

SEQ ID NO: 262637 - DNA, 122 bp, Homo sapiens
ctctgccagcgctcggacccaaggacagggtcctcaggagccgctctcctagagctctgtcgccctgggggacgcacaccctccatcctgcctccggagctggggactgggccgaggggagg

SEQ ID NO: 262638 - DNA, 122 bp, Homo sapiens
gccgagcactctccacaggcctggtcagtgcggacacggccatccccggctgccggagagcgccgtcacccacttgaaaaccccacccaccagccgccaagcggtcacaccaaacccaggac

SEQ ID NO: 262639 - DNA, 122 bp, Homo sapiens
ggaagacgagtagaagggagcggcaccgaggcatgctggaggctggagcctgagccaccccggctcgcctcgctgcggttggtggtgacctcggacactgcagctcggccagagtggtagaa

SEQ ID NO: 262640 - DNA, 122 bp, Homo sapiens
agacacagtgtacagataactttcacagaaccgcaagggcttgatgctcccccaacagaacggcttgagctttccccagcgcaattcagaaatgctgtggcggtcgccagactcttcgggta

SEQ ID NO: 262641 - DNA, 122 bp, Homo sapiens
acctgaggaatctactttgcactcactcaccgactcagaaaactagagtcaaggattccgcggcagcgtctgcccaagccggaagatggacttagcctggaagaaaacacatccggtgccaa

SEQ ID NO: 262642 - DNA, 122 bp, Homo sapiens
tcaggtcttaggcaggagcttgcgggcctaaaatgcattagctggtttttactgaatttacgcttagcagagacctacagaaaaatgagatccagctcgccgctggagggaacagctctggc

SEQ ID NO: 262643 - DNA, 122 bp, Homo sapiens
cagaaaaaatggctgtcctggtagcctcaggagccactgtgtccaggacaaggcctgtcccgtcagcaacacatcatctaaatcatatattgggctctgcaggactgggagcagatggttac

SEQ ID NO: 262644 - DNA, 122 bp, Homo sapiens
ttaacagtggtaggaatgcaccttcgatccttctactcctattggctgctcctctgtgggcgtctcccccgccgcatagcacagctcctctcccggtgttgctcaggcagcgccttaggcag

SEQ ID NO: 262645 - DNA, 122 bp, Homo sapiens
ctttttcttcgactgaaatgacacagcggggagagagaacccaagtacagccctctgttccgggtgcttttaaaccagtggcttccaacgtttctgaagcaggaaatctctgtcaccatctt

SEQ ID NO: 262646 - DNA, 122 bp, Homo sapiens
aaggaagggccccgaataatttgtgcggggcacggtcgggaatacagagcaggggactcccgagatgggaggttctgcaggtaatttgttttgctggctgggggtagggggggtaggggtgg

SEQ ID NO: 262647 - DNA, 122 bp, Homo sapiens
acaaagctgggggaggcagccccagctcatccctccaggactagctgcccattgaaaactcggcctgacctgctgctgccatgcatatgaatgatggggtgcagagcctctgagattcgctg

SEQ ID NO: 262648 - DNA, 122 bp, Homo sapiens
tgaaaaccgtgtttccgacgcaaccgcccattagaaaaacacaattccaaattaaaaacccggagaactgagcggcggggctggcgccaccgtcccgggacagcgcggcctttcccagccac

SEQ ID NO: 262649 - DNA, 122 bp, Homo sapiens
gctgggcctggcacggagactcagcagccaccgcccccatggcctgggctagctaataggcgccagggagggagggaaggagggaaggacctgggtgggggcggtggggtcccatcctcagc

SEQ ID NO: 262650 - DNA, 122 bp, Homo sapiens
ccgaccgcctgtgctgcccgggaggagtggccccctccctccagcagccgcaaggtggaacggctgcccggcaccccattttgctccgcctgtggcaccaacccagacacgtgagcgcccga

SEQ ID NO: 262651 - DNA, 122 bp, Homo sapiens
cattggcctcttgccgacggagccgcaggccccgcccccgattggctggggatctcttcccggcgcctgattggctagtggtctccactaaggtcagggctgtgtcacacacacgggcgcac

SEQ ID NO: 262652 - DNA, 122 bp, Homo sapiens
gcgcggggagcggggacaccagcggggcagcgagtgtaccggggacgcagaccacgattccgcaggacccacctcacccaagacggcctgtagaggacagcgaggaagaggataaagacaat

SEQ ID NO: 262653 - DNA, 122 bp, Homo sapiens
acgcgcggcctttttgttttgatacattccagtcacctcttaaaggggccgcgccggccgcgttcctctcgcagccccaaacaaaacaacacgggccgccgccgcgccgcgccggctacttt

SEQ ID NO: 262654 - DNA, 122 bp, Homo sapiens
tgttgctcagtttaaaaacccttctggaatcacgtctttaactggcgttgtgacgtcttacgtcatgatgttgcgtcaccacgtgatgacgctgtgccatcacaacacatcatcgcatattg

SEQ ID NO: 262655 - DNA, 122 bp, Homo sapiens
aatataacctcatcccctgcttctgccagatgggctctgttttgatctactgtacaaattcggtttctaggtaagatgttgcttagccaagaatcccatagctaaatgcatttcaaaatcac

SEQ ID NO: 262656 - DNA, 122 bp, Homo sapiens
ggcccgagccccgggccgagtcctcgcagcaggagagggcaccagacagggagccgctgccgagaaagccaagagcaccgggccctgagaaccccagaaaaggccaccaggagtcccagatg

SEQ ID NO: 262657 - DNA, 122 bp, Homo sapiens
ctcctccaggaaagaatgtctttcacagatggagctttgcttctggtttgcacaggacagcgacaatgtggcagagccatgcctgcccttcctgctctttccagtgattcacagaacttctg

SEQ ID NO: 262658 - DNA, 122 bp, Homo sapiens
gcgggagccggcactcggtggggccgagggcccggggacgctggggctgcctgacctgagcggcggccgctgaccgttgagggtctctgtggccgcagcgcccagacccggggagaagggcg

SEQ ID NO: 262659 - DNA, 122 bp, Homo sapiens
tcctaagcgcagtggtagcacagcctcccatggtccaggaaggagcatcccccaacgcaccgctaacactggtgaccagactccaccccgaccgccaggtcaacatgcagcagccacagcct

SEQ ID NO: 262660 - DNA, 122 bp, Homo sapiens
ccatcgcccgctcccgcccccgctccctcggccgcggccgcgcacgcgcgcccctcccggcgcccggccccgcccaccccgtcacccgtaacaaccacaagtgccgtcgccgcgccccttcc

SEQ ID NO: 262661 - DNA, 122 bp, Homo sapiens
gcctattttcacataaataatgtttgtaaaaatgatgggaaatgtttactgcagttacctcgcataatacggaggtgcagtgtgtgccattgatgatgaaacgtatccaagaagttttaagg

SEQ ID NO: 262662 - DNA, 122 bp, Homo sapiens
ggcggcgcgagaggagaggagccgagaggaagttgagatgcctgttctgcagctgctgcgcgtcccaccgacccgctgctcgccgtccctgggccgtgctggccctccgccctcggcccaga

SEQ ID NO: 262663 - DNA, 122 bp, Homo sapiens
aagtgagcaaatcctgagccttcatttgaatacaaaacgtacaaatagagttactccgagcgccgcgcgtttctgtttggagagactcagccatcatgccagacccgtccaaatcggctcct

SEQ ID NO: 262664 - DNA, 122 bp, Homo sapiens
cagctccaccttcgacaccatgtcgccggcgcctgtcatcccctccaacaccgactaccccggaccccaccactttgaggtcactttccagcagtccagcacggccaagtcagccacctgga

SEQ ID NO: 262665 - DNA, 122 bp, Homo sapiens
tcctccgccccttcccaggcttccctgacccagcgcgcagccaatccccgcccgccgtcgcgggcttctggtccaatcaccatggtctccccgcccacccccattgctccgccccgggggtc

SEQ ID NO: 262666 - DNA, 122 bp, Homo sapiens
accggacaaatggctcaagccaagggcaacccacttcaatcccttgggaactttagacagcgttgcctacgtgaaatgagtcctgaagcaggagggtgaagaacggtctgaacagagctgcc

SEQ ID NO: 262667 - DNA, 122 bp, Homo sapiens
cagggctgcaaagcccaccctctttccaccgcaccgaactacctcctttcgcctacaaaacgtaggtggggaccactggtgttggaatgacggcccacctcgagtttcaggtgacttccact

SEQ ID NO: 262668 - DNA, 122 bp, Homo sapiens
tttcccattcttttcattattttgtatgtaaaaaaaacccaaaaagccagttgtacctctcgtaaataatacatgttttcctctgcagaactgtagtctatgtgacacctacaaacaaggga

SEQ ID NO: 262669 - DNA, 122 bp, Homo sapiens
gactaatacaggcctcattgctgcctctactgtcacctaccagggaagctgggccattctcgtcatctgtggactccgtctcagctctgctcagttttgggaagaactctaggctctgccat

SEQ ID NO: 262670 - DNA, 122 bp, Homo sapiens
tcttccatttaagctcagacttattaagtgacttgtccacatttctctggaagtgacaggcgatgaatacggagttcctgaggcgctttgtccagatctgaccatggaaatcaggagaaaga

SEQ ID NO: 262671 - DNA, 122 bp, Homo sapiens
aggtgaggaaaatatccccagaggccactacagcagacttacctctatttgttcatagcgcgcgaggggctgagtgagccccacaccccgagccacagaaccacaagttcctgaacaaaact

SEQ ID NO: 262672 - DNA, 122 bp, Homo sapiens
ggcccatcgatctggagacggtagggaaaactaggagcagcatagccaccagggccagcacgcaaacgcaccgctgagccatgcttctctcgagctcctgctgtcaggctaccggggtagtt

SEQ ID NO: 262673 - DNA, 122 bp, Homo sapiens
aagacgcgggtttccacaggcagctccccgtggagggctcccagctgatctgtcacggtgcgggatgaggagcccgcagccccttccagtgcccacctccactctgcacacccgtcccctgc

SEQ ID NO: 262674 - DNA, 122 bp, Homo sapiens
agcaaggccacacagggcgttaaagcaaaaaatgtacagttggaatgcactgaaccccctcgactgggggagataggcctcagaggaggtaatttttaagaacctgccttttatttccagtc

SEQ ID NO: 262675 - DNA, 122 bp, Homo sapiens
gcagggtggagaacaggggcagactgggaaacttccctatatgcaaatagcttgtcattccggtttggggaaaggctcacatcagatttcagcatcttctaaagtattgcagagctcctgta

SEQ ID NO: 262676 - DNA, 122 bp, Homo sapiens
gcgggagggggcgaggttcgagtggggctgctcgcgggcgcgagggccagagcccgggatcgcgccgtggagcccacgaccggcgaggccagcgctgggggcagggcctctggatccctgac

SEQ ID NO: 262677 - DNA, 122 bp, Homo sapiens
gctgatctccagtctgcacactgttggcaaattaatctttctgagctcttgttttcatcgcgtccctctcctgctccaaagccctctgggactgcctccagtagcgcttcacaaacttcagc

SEQ ID NO: 262678 - DNA, 122 bp, Homo sapiens
gcccggcgtggtggcgtgtgcttgtaatcccagctactcgtgaggctgcggcaggagaatcgtttgaacccaggaggcagagtttgcagtgagctgagatcgcaccactgcactccagcatg

SEQ ID NO: 262679 - DNA, 122 bp, Homo sapiens
gggggcggcttcctcctgaggctggactagtcctccgagttctgagtggcatttgtggcccgtttgctctaaaaatagacgtacaagtttggtgttcgggaagaaggatgtttgctctcttg

SEQ ID NO: 262680 - DNA, 122 bp, Homo sapiens
cttcccttccttcccccaggagctctttgctctcgaaagggatgcaagctaaggaaatagcgaaccaactaggccccagcgaccagaccatcgcctgtgaaaagggtatcaggaacccatgt

SEQ ID NO: 262681 - DNA, 122 bp, Homo sapiens
ctctcaaggccaaggtacgctccctgtcaaaaccgtgggagaattcaggtgcactgagcgcgttaaggccaaggagggaaacgcggcgcaggcctaggcgatgcttccctctggcaaccgac

SEQ ID NO: 262682 - DNA, 122 bp, Homo sapiens
gccgcaccgcgccagccgggctgcagcggccgcgcaccaaggctgcgatggggctggagacggagaaggcggacgtacagctcttcatggacgacgactcctacagccaccacagcggcctc

SEQ ID NO: 262683 - DNA, 122 bp, Homo sapiens
aatgagtgcaaagttttattgagtgggagtagctctcacccgataggggagccagaagggcgatggttttcccctggagttgggcagctcagcggcctgactcttctccgaccactcgggcc

SEQ ID NO: 262684 - DNA, 122 bp, Homo sapiens
ggcgcccgatcccagatcccctttccccgccccgccgcgccccgcctgctctggcacagccgcactcccgcaaatccctcccgcggaacccccactcctgcctgcgcgggcgctggaaggcg

SEQ ID NO: 262685 - DNA, 122 bp, Homo sapiens
tcttagaagtcagatttttctcagtgatctactcaataccctcccgtgggttccgtcccacgcagagaagccgcatacaaagaaaggcaacaggggtctgggccccactgcccccagtcact

SEQ ID NO: 262686 - DNA, 122 bp, Homo sapiens
gccctcccacgcggagtcgtctacccctttagaaacagacttggcccattagagcctccgcggccaggccggggcctccttacctggggatttaggtgtggacccagcacgcgtcgtccaga

SEQ ID NO: 262687 - DNA, 122 bp, Homo sapiens
taattaatgttattcctcttgtcctttactaatgtgaacaaacaatgattaaagagtaaacgtttggcctctctcatgggccagggagttgcttgctagatcttacttgtttgccagagtgt

SEQ ID NO: 262688 - DNA, 122 bp, Homo sapiens
cagtttggaggagccaccccatggaccccactgtctgcatgtggggagccttctggaacacgttgctttgcccagtcagtggtgctgaggggtatagacagagcatgccacacaaggtgaga

SEQ ID NO: 262689 - DNA, 122 bp, Homo sapiens
ggtgggtaccataaatgaccgttttatctgcctgcccggggcgtggcaacagggcctccccgccccccagccctgcctgtcagctccttttgctttcacaacatttctcgtcttgccctcta

SEQ ID NO: 262690 - DNA, 122 bp, Homo sapiens
aggcctgcacccactaagggctgaataaatacttgttctaagaccaggcccagtagtgcacgcaggtaatcccagcactttggggggccacggtgggaggagcccacgagtccaggagttaa

SEQ ID NO: 262691 - DNA, 122 bp, Homo sapiens
ggaatctttggctgctgctcctagtaaagagtgagtcactgtgagtctttttcctgaggccgatttctgcagagaagaatccttccctgtgttgcatgtggggcaggtctgcattatggagt

SEQ ID NO: 262692 - DNA, 122 bp, Homo sapiens
cctagccccaccgcgctcccggcgcggcctccgccctggtcccgccccccgggagtcgcccgccctgacatcatcccggttatgtaagagccgcggcttccggttccttgctccaccggtaa

SEQ ID NO: 262693 - DNA, 122 bp, Homo sapiens
tccagtaatgggctttggattttcaccgggaagccaggccaaatgtgtcagcttgctttccggctctctcagagatgcctttcccctgccagacagcattgagccagggccgcaaacagctt

SEQ ID NO: 262694 - DNA, 122 bp, Homo sapiens
ccctggtcctcctccgagttgatgtgctggggtttcgcctgcttgcgcctcgacatggtgcgagcatcggggcgccgggagagccgcagttatttgccctctccgccacaaattcctggagt

SEQ ID NO: 262695 - DNA, 122 bp, Homo sapiens
agtaggacagcttcaaatccttttcagaatgacacaaggtaggggtaaaaataatccaatcgcaggacaggagaaaatacacaccataaggccatgtgattaccagcaaattaccctgttct

SEQ ID NO: 262696 - DNA, 122 bp, Homo sapiens
ttctgggagctgtagtccggtcagcgggcttccggctctgcgcatgcgaggtagccagcgcgaccctcgccccaaatccggttgcacacctggctcacggcgagtgcggagcagaaagcact

SEQ ID NO: 262697 - DNA, 122 bp, Homo sapiens
ctgcggccgccagccacatgcagaggaagaaggagccagaggccggccccgcccccgccccgccgggccgccaccctccagccagtccccgccccgctctccgccacagcccgctcaagggg

SEQ ID NO: 262698 - DNA, 122 bp, Homo sapiens
ggcgcccagggactcaaaggaccctcccgcgccccgcgaggctccggggtctcgggcttccgccttcttgctgccctcgttcttgccagggccgcggttagtccctgctggccaccccactg

SEQ ID NO: 262699 - DNA, 122 bp, Homo sapiens
ccaagcaggttgacgccacggtacctgcaagccctgccatggcgccgccgccactgtcgccgtctgccgcagcctgcctccacctcagctcgccaccgacgccgcaggaagccggggagacg

SEQ ID NO: 262700 - DNA, 122 bp, Homo sapiens
agttcccaggcagctcagctgcgccccctcccggctgggcctggtggggctgatccatgacgttgacttggagtccagccaagcagtgtttcttgtggtaaaagaaacagacctccccctgg

SEQ ID NO: 262701 - DNA, 122 bp, Homo sapiens
gcagagatgggacccacgctagctaccagcagaaaggaagctaccggcagggtggtacctcgggctggctccagagacacatgcacgcacacatgcatgcacaggcacacacatatgtgcac

SEQ ID NO: 262702 - DNA, 122 bp, Homo sapiens
gtagccaacagcctgtcccagccttgaccccatccattctctcagcttactctcagggtccgaaacgtgaaaaggccagcagcttagcaaggtctccgacctctgttccactcgccctcgcc

SEQ ID NO: 262703 - DNA, 122 bp, Homo sapiens
gaagaaagaggtcatgctgacaattgaagggtaacaagggtggagaactttattgagcaacgaaaccgctctcagcagagaggggatgggaaggtggtctctcacccaaagtcgggttgtct

SEQ ID NO: 262704 - DNA, 122 bp, Homo sapiens
ttcaggcattgccctgcttcaaagcagacagaaacgtaaacagtggcagtacaccaggatcgggtttctttgctttagctaccaagagtcaggaaagagaaaccaggtatttatttaggttt

SEQ ID NO: 262705 - DNA, 122 bp, Homo sapiens
cggaggtggcggcagctccacgagggccggcgcaggcggcggtggcggccctgcgggcggcgacctggcggccaacacgttccccatggtctctggcagaggcgcctgctcccggcctgggc

SEQ ID NO: 262706 - DNA, 122 bp, Homo sapiens
catttattttcatttacctagtattttcaagcatgccctcctaccttactctttcagtaacgctgtgtgctggataatacaaacccacttctagaaaagggcaatggagtgcagagagagga

SEQ ID NO: 262707 - DNA, 122 bp, Homo sapiens
tgcaataggccaaactaacttacctcctgtgccagcagcgcccaagtgcagctgcccaaacgtgagcactgaccgtgagccaggcactgtcctaagcactttgcaggtaaatacgtgtaatc

SEQ ID NO: 262708 - DNA, 122 bp, Homo sapiens
gtggggacgtcttctagggacaatggactcgtgctttgtcctgggggccccctggagccccggccaggtagggcctgaaggtagaagggggcagtggggggtggcagtgggaggaattcatg

SEQ ID NO: 262709 - DNA, 122 bp, Homo sapiens
ttcctaagccaccactacaaccacccctcaattccggaacgcccccaatacctgcccggccgctgctgctatcgcgataattctcgggccagtctcccgtcagtccgctccacgccttcctt

SEQ ID NO: 262710 - DNA, 122 bp, Homo sapiens
cccctcccaaagcgggtttgttgggttgggagccgggtgcatctccggcgaggccacgggcggggagccctcctgtgcctgccagagcgcccagatccctcagtctccgtctcctttgcaca

SEQ ID NO: 262711 - DNA, 122 bp, Homo sapiens
tagggctagaatggttcatgcagaatcattcagaatttggctccattcatggatgccaagcgaaattaacggagaatgagataaggccaagtgtgggagagtgctgggattagagctagttt

SEQ ID NO: 262712 - DNA, 122 bp, Homo sapiens
cggcgatgctgtcctcagtgccccaggaggacgaggccccccagctactgagcttcccagcgagtcccatgcaaccctcagccgggcggcccccggacccagctcgggcagccgtggccatc

SEQ ID NO: 262713 - DNA, 122 bp, Homo sapiens
taatatcctaaacgcttaacacaaacgctttcttttattttcttttttgagtcggagtctcgctctgttgcccagactggagtgcagtcgcgcgatctcggctccctgcaacctccgcctcc

SEQ ID NO: 262714 - DNA, 122 bp, Homo sapiens
gagggtaagagttggggaaatgcagcacagcttttgtgacagctacagttgtaatctacccgcagggccctctgggtggcagaaatacaatagctgactctgtagggtgcctttgtgggttt

SEQ ID NO: 262715 - DNA, 122 bp, Homo sapiens
gtcccctacccgcggctcgagcgcgctgtacctggggttctggggccgccctcacccttgcgccgccgccaccaccactgccgccggcctagctcccccaggaccgaaagtgaaagtggagc

SEQ ID NO: 262716 - DNA, 122 bp, Homo sapiens
gcagccatgcccccaccccgaccctggcccagctgcccgggacacgcgccacgcggcggtcgttaacactcaggggacagacaacagtcacactgcactgacagcacgcagacaacaccggc

SEQ ID NO: 262717 - DNA, 122 bp, Homo sapiens
cagaggacgacagtgacgctaaggctgacggtgatgatggcagagaccagcaggacgtcgcgcgagggcgcccctggggaggacaggtacaggtcacaccctcattggccagggcctgccac

SEQ ID NO: 262718 - DNA, 122 bp, Homo sapiens
tttcacacacatgagtctcttggcgctcctgtgcgtctgttggccaggggagggagcatccgccgctccgccgtgctgagcccttggcgctgtcatctgagtcttccgtctttcgtgggtct

SEQ ID NO: 262719 - DNA, 122 bp, Homo sapiens
gcagtggcggcgagtctggggccccgagggctttctcctccgcttttgatagtttccttccggcagaaagtttaagttgctcagccaagtcgctgagtgctcttttgcctcctgggggcaat

SEQ ID NO: 262720 - DNA, 122 bp, Homo sapiens
ccgccaagctgggcgagaggccggggccccccttccatcacgaggttcctgccctcggctcggcctagtttccctagccaggagaagtcctgttttcaacgttctagaaatatccccgcccg

SEQ ID NO: 262721 - DNA, 122 bp, Homo sapiens
acaaaaaaaacattcacaacctgtcacagagtcctataagctttggccatttattcccaacggagtctttcatccaaaggcaggtggggaatttcagccaaaaggccccttcatggttttca

SEQ ID NO: 262722 - DNA, 122 bp, Homo sapiens
gatggggagaggcggcccagggaatgcgttggggtgggagagagggcgtgtgtctgcagccgtttagctgtctgatggccctcattctgcatgcatgggcaccagtggcttacggctcatga

SEQ ID NO: 262723 - DNA, 122 bp, Homo sapiens
tccagtctcagttctgccatgtattgactctgtgatcctgggtaagtcacttaaccactccgtgcctcagtttccccattttgtattcctcccctttcacctgccttatctccctccactgc

SEQ ID NO: 262724 - DNA, 122 bp, Homo sapiens
attcacataatcattcagccctcttattgtgttgcctgcatatttgcatggaatctgtgccgcagctttatcgaagtatgactctagaaaaggaaaacgtgaccagcctctgattaatggca

SEQ ID NO: 262725 - DNA, 122 bp, Homo sapiens
tcccttaccgtcctcctgagggtgtcctggagcttcagtgctgtgtgttcttggcctccacgctggggctgccaccaactcccactgtccagggcttccagtggactctccgaggtactgat

SEQ ID NO: 262726 - DNA, 122 bp, Homo sapiens
gcaggccccgcctcggtctcccccttcccaccccggtgcgcgcacagtgctgaccacggacgaccccactgttgcccccggcgagcaccaggactctgctggttagggctgcgcggtcagac

SEQ ID NO: 262727 - DNA, 122 bp, Homo sapiens
gcggggccgtgtcagtgaggcctactcccagctttttcctcccggaggctgagactgcgccgttgaagccggttctctgtgcggggccggcgccgggcccagcaaagacccgagtgccccga

SEQ ID NO: 262728 - DNA, 122 bp, Homo sapiens
ctaattttaaagtcaaagtatgttaaaaacacaaaaaacctcttaataaatattaagccacgtaactgtcagggaaatagaatgctcaggtgatttagtgttttaagtgtccaagaaggcag

SEQ ID NO: 262729 - DNA, 122 bp, Homo sapiens
caaactcctgacctcaggcgatctgcccgcctcggcctcccaaaatgctggggttaaaggcgtgagccactgcgcccggctgtgtgtttgtttcttagagatacggtctcactatattgccc

SEQ ID NO: 262730 - DNA, 122 bp, Homo sapiens
ataggaccagccctgatccagagagggaggggatgacacctgagtgtgaataccaggaggcggggatccccggaccatcctggagaagacataccacagtctgctcatgtagacaaagacct

SEQ ID NO: 262731 - DNA, 122 bp, Homo sapiens
actagttggttcgccaggtacaaacctatgcggaaaaggcggggtacaggcctcggaggccggacccaaccagtcagggaaagaaagagggcagaagccgcaggctgcacagcctcacaacc

SEQ ID NO: 262732 - DNA, 122 bp, Homo sapiens
ctcgccctcctggagcgctcacaaagaccccctgccgggacggccggagcctgcggagcgcggccctgggcccctccgggacccgccggccttaggtgccccgctgctccccgtagggaccc

SEQ ID NO: 262733 - DNA, 122 bp, Homo sapiens
ccttagggcaagcgaccagtggttgacaccgcatatacacctggcttaaagttattgactcgctgccagttggagacccagctgtcctctggactcatcatcgcaatgattccatcaaagga

SEQ ID NO: 262734 - DNA, 122 bp, Homo sapiens
gccgtggctgaggctgccgcactggggaggagtgggaccaggggccgggcctcccctgcacgatgtccacagattcaccgagataaaggaaccgcagcttcatccaacttgtgctgaatcgc

SEQ ID NO: 262735 - DNA, 122 bp, Homo sapiens
gggggcgctcgcgacgaggcgagtgctgcctccccagcattaattagtgcgggtcaatgccgcggctcccgggagagcagccgctttaatttcccgtggtatttcagtgcctgaggcccatc

SEQ ID NO: 262736 - DNA, 122 bp, Homo sapiens
agggaggccaggaaggggttctctgggcgtgcacaaggagtccaaggcagtccctctggacgggatgagagacactctccagctcagggggataatgtggggtgtccgagacgctcatgccg

SEQ ID NO: 262737 - DNA, 122 bp, Homo sapiens
ttagcccccatctccaacactgaggatcaaatttcaacacgagacttggcagggatcacacgaatcctatctaaaccacagaagcatcccactcaggtgtacatgcttgagcagaatgccag

SEQ ID NO: 262738 - DNA, 122 bp, Homo sapiens
aggaaaagagcaccgggggagggtgtgggggaggggtcgcagataaagcggtcactggctcgcctgcccttctgctggggcactcaccccgcccgctgtcgcccatcccgtcccgtccagcc

SEQ ID NO: 262739 - DNA, 122 bp, Homo sapiens
gaacaaacaaacggaagggcagagctcagttcctggatggaagcggcacctgcatggaagcgccctcagcaacctcagggcccagacttccgggaaagtctcacagggcccctggcttgagt

SEQ ID NO: 262740 - DNA, 122 bp, Homo sapiens
ccggtgtcctgatgtgtagacccctgtggagacctacttaattcacacctggcatcctgacgtgtggactcctatgtatacctatttaattcacaccgggtgtcctggcgtgtaaacccctg

SEQ ID NO: 262741 - DNA, 122 bp, Homo sapiens
ctacgacaaagtgtcgggcgacatgcagaagcaaggctgcgactgtgagtgtctgggcggcgggcgcatctcccaccagagtcaggacaagaagattcacgtgtacggctattccatggtga

SEQ ID NO: 262742 - DNA, 122 bp, Homo sapiens
agcatttagcacagtacattgtaattatttcattgtttcccactgaaaccaagagcttctcgagggcaagggctgtatcttttttctctataaccctaaaacctaagacatagtagtgaatg

SEQ ID NO: 262743 - DNA, 122 bp, Homo sapiens
cagcctcctcgtgctggccacagagttggggcccctcacgtgcctcacaggcctgcccagcgcagcccatgcgctcactgggggctccttcccagggcacgaccctgatggatgctgggcct

SEQ ID NO: 262744 - DNA, 122 bp, Homo sapiens
ggggtgttgggtgggttcgcggtgggggatgggcatccaacggaggcacctggttgagggcgacctccaacatgacggacagggccaggtggctgtggaagaggggcacacagtcggtgagg

SEQ ID NO: 262745 - DNA, 122 bp, Homo sapiens
gcagggagggactcaggctctgcagtctgagagcctgaattcagatcctgccctggcactcgggagcttgggtcaccttgggcaagtcacttccctctgtcccctccatctagcctcaacct

SEQ ID NO: 262746 - DNA, 122 bp, Homo sapiens
cgcctgactgtgtatttttagtgatgacaccaacatgtgcaaggcaccttactgagcatgcggtttcaggagcacgtgcgaaaggtcttccagaagcaggcaagcatggaggaggtgttcca

SEQ ID NO: 262747 - DNA, 122 bp, Homo sapiens
agcctggcttctctctaattatggttgtgtgtgatctcaaacaattaacttccctgagcccgttttcccatttgtacaatgaagggattggatcacatctaaggcttatgatttactccagt

SEQ ID NO: 262748 - DNA, 122 bp, Homo sapiens
gcggggggcggggcggggctcgcgttaagggagcgcggaagggcgggacaggccgtggggcggggcctgggtggggcggagccggtgggggtggggaaaggggcgtaaccgggagggaccct

SEQ ID NO: 262749 - DNA, 122 bp, Homo sapiens
tgagtccaaccggcgcctctggccaagaaaggcgagctgaaccgggtgcggttagctatgcgcatgcgtcagcgcttaccgcggacttgctactcctcgcgttctcctctttcttcctctca

SEQ ID NO: 262750 - DNA, 122 bp, Homo sapiens
ggccgggcctgcggccagtgggcggcgctcgctctcccacgccaaggcctgcccgcgagccgtgggcccagtaccttgttggccaacttcttgttcagctcctcggcaatggagtcgttgag

SEQ ID NO: 262751 - DNA, 122 bp, Homo sapiens
cacggcggagcaggacagcatcctgagcctgtctgcccgctgcctgctgctcacctggcgcgacaatgaagagctcattctgcgaatccctacgcacgagatcgccgccgcctcctacctgc

SEQ ID NO: 262752 - DNA, 122 bp, Homo sapiens
tagatacacaaatacttaccattgcattacaattgccaaagcgtattcagtacagtgacacgctgtacgggtttgtagcctagaaacaacaggctatataacacatagcctaggtgtgtagt

SEQ ID NO: 262753 - DNA, 122 bp, Homo sapiens
caggaggctggccaggtaccccgacaggctaaggggttgccagcaggtgaggggcctacccggtgcggcagccttgttggacagcgaggctacctcctgccctctgaacttctgccagcatc

SEQ ID NO: 262754 - DNA, 122 bp, Homo sapiens
agagtagttatcaaacctgaactgtctgaccactcctgggatggatgtgagaggcaagtacgttagaaacatttaaaacatttattccaagtttatagaatggctactgtgaaccaagcctt

SEQ ID NO: 262755 - DNA, 122 bp, Homo sapiens
tgccgggcgtgccaaatgtggggggagcgacggattgttttaggttggaagatggaaaaccgcacttctccgaggacagaagacccaatgtaatatttacataaacgatgttgcttgattca

SEQ ID NO: 262756 - DNA, 122 bp, Homo sapiens
ctaaggacacgaaatcgggatgtggtgcaaatatgtgtcctgctgcgttggttgtcggcacgctgcctgtaaccaagacgtggaatcgacctaagtgcccatcagcagatgactagagaagg

SEQ ID NO: 262757 - DNA, 122 bp, Homo sapiens
aaccccaatgtgggggattgtctgtgcccacctggtgctcccctgctcagatcacgtatccgcggcaggcccagcgctgactcgccctccagggccgggctaggctgcccctcctcctggcc

SEQ ID NO: 262758 - DNA, 122 bp, Homo sapiens
ggcggcggctgtgcggcgccgcggccgcgcggggaaggattcccgggaggcactctgcgccgctcctgctgcaccgctccctgacgtcctggtggggaggctctgaggacacagcgttgctc

SEQ ID NO: 262759 - DNA, 122 bp, Homo sapiens
gggcctttgagggtcccgcagttctggggaggtccaggcacagaaggggccttggccaaacgtgtaagaagagagccactaagcaagacaggtgtttggagcaggaagaataatataggccg

SEQ ID NO: 262760 - DNA, 122 bp, Homo sapiens
aaagtgcccacccaaatagcctcatcattgctgagggtctgtacatgacagtgactggggcgtaggcagctgcacacaccagggctgagtcccagcacacgtgttctacctgtgtgactccg

SEQ ID NO: 262761 - DNA, 122 bp, Homo sapiens
aagttggtgtcccaccaaagttggagtctatgaatatctagagtcagatattcttgtgatcgtgatatttattcagcttttgttgagcttagtagtttagaagtacagaaggtggatgattc

SEQ ID NO: 262762 - DNA, 122 bp, Homo sapiens
gcccagcaaattgtccttatcttaaagggtttttgtggaaattgaatgagatgactcatgcgaggcatttaacctcgaaccagcacatagtaggtgcttgatacattttagctttccttatg

SEQ ID NO: 262763 - DNA, 122 bp, Homo sapiens
cctgccaccaggggcttcccacctgccgccgaggacgctcctgccccgggctggaaggggcggaaaacagcctcgcgcacggcaagggcacacggatttcatccgatccgccaaagcttccg

SEQ ID NO: 262764 - DNA, 122 bp, Homo sapiens
gagggcgcctcggccgccggcacccgccacacttccggcctttgtgggccgcagcgacggcggtctgcggctgtcggttctgtttgttgctgtcactgctgtttgttcttgccagcggctag

SEQ ID NO: 262765 - DNA, 122 bp, Homo sapiens
cacccccagccagcgggggccaactccaccctgtcaggaaatgcctggggcccaggatcccgagctgtgggcttggtgacgctggcctgaccagcctctcccctaagtccccctgccagccc

SEQ ID NO: 262766 - DNA, 122 bp, Homo sapiens
atgcaccgcaccgccccatgcttctagccccagcgccacacgccacgcggcactccaccccgtctgtctagccccagcaccacgcaccgagaccgagaccatgcaccatgcaggctggccgg

SEQ ID NO: 262767 - DNA, 122 bp, Homo sapiens
aggacctcttccatgcctggtggtactgttgtgcctttgaagggaggtgtggcaccaggccgggtggtgtccgccatgccaaaggccactctgcatcccggcccccagcccctgggtactgc

SEQ ID NO: 262768 - DNA, 122 bp, Homo sapiens
ggagggggcggggctcacaagccaactccgcgctgctgcccgacccacgcagtccggcctcgccccgccccacccgcaccctccaaccaatggcgtggctcgatcggctcctatgcaaatct

SEQ ID NO: 262769 - DNA, 122 bp, Homo sapiens
ggcacccacctgcccgctctgtgggaagaccttctcgtgcacatacacactgaagaggcacgagcggacacactcgggtgagaagccctatacgtgtgtgcagtgtggcaaaagttttcagt

SEQ ID NO: 262770 - DNA, 122 bp, Homo sapiens
acaaatgagagtaaatgtattaaagacccttgctatttgaggtgtgctccacagatgggacgctttagcattacctggcggtttgttagagcgacatcctgacctactgaatcagaatctgc

SEQ ID NO: 262771 - DNA, 122 bp, Homo sapiens
tcccagccagcagcaccacgctgggggccggaggcgtgggcggggggccgaggctctgtccgggaaagtctaagttgtttccatatcttgctgattataaataatgctgcagtttacgtggg

SEQ ID NO: 262772 - DNA, 122 bp, Homo sapiens
actttgctcctggtggttttcactgttctgccatggtggggttctgaagaccaggctcatcgtactcaccttgcaacacctgcccctctaatccacactttttctagaagcactttaagata

SEQ ID NO: 262773 - DNA, 122 bp, Homo sapiens
cccctcgagaggctggccaagcgggtgtagccgttgggggaggctcccgccgggggaacccggcgaggacaagagcagggcggccgccttccactcgggctgtccggcggcggctgcctccg

SEQ ID NO: 262774 - DNA, 122 bp, Homo sapiens
agcagcgcgcccgaggcgggatcctgcggggtcgggccttgggtccggggcgctgagcggcgttcgcggggccgttcctggcgcggggtgggccgggccccggcggcgctaaagttggcggc

SEQ ID NO: 262775 - DNA, 122 bp, Homo sapiens
gtgcaggtgggtcattactgagagtttgtctattacatttaatttttaccattatctttccgcaatgccttcaagtagggcaaatcactgttttgaaaggaataatttaggagttaagcttt

SEQ ID NO: 262776 - DNA, 122 bp, Homo sapiens
gtcggagcggcctcggccagctcacgggagggggtgagttaccggtccagagactcctgccgctcggggtcctggatccccagggagcccagaatcgcatccaccagcggctggtactcgaa

SEQ ID NO: 262777 - DNA, 122 bp, Homo sapiens
caggaatacaatcgattttctgaacctgcgtaaggccacaggcagctctgaaaatgaaagcgtttgctaagtgggggagatctcaccgatcgaacgtttaaaaatggctttgtcttcattca

SEQ ID NO: 262778 - DNA, 122 bp, Homo sapiens
taggcccacagggctccaagaattcagaggaggaggaggaggcggtaggggctggggtcccgggaccccgggtgggcacagcctactgtgccacctgcatcctccctaagcctgcacagtgc

SEQ ID NO: 262779 - DNA, 122 bp, Homo sapiens
gggaaagtggagggcgaagaacccccgaataatttcggactgatgtttcacaaatcatttcgccagggaacaacccgcgagcctccccttcccaaatggcaaacagttcagaagtcttattt

SEQ ID NO: 262780 - DNA, 122 bp, Homo sapiens
cgtgcgcccccagacctccggtactgggagactcgggccctcctgtaagagacctgagcgcggagcgttatgggcacccggtgaatgagcaaatggcagggaaaaccgtgcagccccatgga

SEQ ID NO: 262781 - DNA, 122 bp, Homo sapiens
caagccccagggggccagctttatagcccaggccaccacctgggtgcacctgctcctgggcggagcagatggaagcggaaggcacttcggctctgagactccggcccccttgtccattgttt

SEQ ID NO: 262782 - DNA, 122 bp, Homo sapiens
cagcccagattaagactggggttcatctggaggactctacttacaccctcccggtcccctcgccctcccccacacacagctgcctctccccaggatatgcgcggcacagtgaatttagtggc

SEQ ID NO: 262783 - DNA, 122 bp, Homo sapiens
gcgcggggcacagaccaggaaacatgggagaagaggtctcaagtgatgcagaggagggagcgataaactttgccaggcaatcaggacagggatgtgctagcaaggttttgaaggatgagtag

SEQ ID NO: 262784 - DNA, 122 bp, Homo sapiens
tggccctaccttaccctagcccagaactcaatccttcgcttctagtcccagctttactcacggaggaagaggggtggcaatggccagagaccagcataggctccacaaccccagtgcaacgg

SEQ ID NO: 262785 - DNA, 122 bp, Homo sapiens
tgagctagtgctagcatcagttccatgattctcaaatctcccaaaactcaatggtgtaaacggcttgcactattaacagcagctatttatttccctctaataaacctgaatcaaaaacacca

SEQ ID NO: 262786 - DNA, 122 bp, Homo sapiens
gtgatagaagattgatgtggtagtcatggagatgagcctcccaacaccccccaccccgcccgctgttcaaggaagggcctgctgcccagctgcagggagtttggacagcagacagcctccag

SEQ ID NO: 262787 - DNA, 122 bp, Homo sapiens
cccttcccttcagtctccgaacctcaggaacactctgcacccggataaagcaaacacaaccgtccctggtccgaatctcatttcctcctcttgctgggactctctgagcccggctgtctcca

SEQ ID NO: 262788 - DNA, 122 bp, Homo sapiens
tgtggcaagaaactgacaagggcccaagaagggcgatgggtatcggaattcttttcatcccggaatgaaatgctgcttgctttgtgtacccaagctctttttttatttttatttttttgaga

SEQ ID NO: 262789 - DNA, 122 bp, Homo sapiens
agctgccagaggacatggagtgaactcagggccaccgtgccaggcccacagggtgcccagcgtgaggcctgcacgtggctccaggcagggctgccctgagcatttgtgcgcgttgtgcactg

SEQ ID NO: 262790 - DNA, 122 bp, Homo sapiens
gcgaggggctggggtcccgctttacatctggggtcggtgtccgcgggatgtgcgtcctggcgctggccaccgccgccgggtgggcgtagggggctgcgagcaggaggaggcgcggcgctcag

SEQ ID NO: 262791 - DNA, 122 bp, Homo sapiens
gaaccacagcccttacccagatgccaactttccttttgctttgcagtctcggaaagggagcgacccagacaaagagaagaaaggcctggagagtcgtgcggacagcattgggagcggccgag

SEQ ID NO: 262792 - DNA, 122 bp, Homo sapiens
gctgagtggatgagagggtggggccctctacggagatgagatcttacctatgtaaaaccacgctccagagttcctaaaccacaaccctacctgggaagcacccagggctgagagttggtctt

SEQ ID NO: 262793 - DNA, 122 bp, Homo sapiens
cgcgagaactacgcatgcgtgtcggcgttttcccgccagcacactgttggtggatgggggcgattgaattcccacagtgagtccagcccaccgaagctcagaggattcctaaccttcctctt

SEQ ID NO: 262794 - DNA, 122 bp, Homo sapiens
cctccttctcagctcagcagcagatgcggccagcaaggcggatctccatcagcatctctccgctcctccttaagtctaaaactctcttttctcttggctcttcttattcgagtgatgaggag

SEQ ID NO: 262795 - DNA, 122 bp, Homo sapiens
gggccgcggggctgcctccattcggctgagtgggggaagccgctgccgctgcttttgtggcgcgtgggctgcggaggagcagccgggccgaggctcggcgccgccgctggaatgtcactgac

SEQ ID NO: 262796 - DNA, 122 bp, Homo sapiens
ggcggccgggacgccgctcctacggatgggcgtgggaggcgctcgccatgcgctggcagccgggatattagcgcatttacagcggaatctctgtttatataaacagctcttcccacccaggc

SEQ ID NO: 262797 - DNA, 122 bp, Homo sapiens
ccaaatattatgcaacgctggattctaaatcggtcttaatttctaaaaagcctacaggcacggatataaattctcagctctcgtggctgtggccgccctatgcactcttcccagtggtggac

SEQ ID NO: 262798 - DNA, 122 bp, Homo sapiens
aacaactggcagcaattgcttatatttgaggcacttaaaaatttttaagctggctgggcgcggtggctcatgcctgtaatcccagcactttgggaggccgaggcgggcagatcacgaggtca

SEQ ID NO: 262799 - DNA, 122 bp, Homo sapiens
gccaagggacggcacattagccaatcttcctagccagatgtctgaggctttgcagcaagccgaaaggagccagctggaatttggagacctgcctctcttcccttgcagctcagaagctgggt

SEQ ID NO: 262800 - DNA, 122 bp, Homo sapiens
agagtgagactctgtctcaacaaatacaaatacaaaaaactagccagacgttgtggcggacgcctgtagtcccagcccctcagaaggccgaggcaggagaaccgtttgaacccgggagacgg

SEQ ID NO: 262801 - DNA, 122 bp, Homo sapiens
ccccgaggaaaggagtctccctgggctaaggcctctggaatactggcacggagaaaccctcgtttcccgccctggatgttcacttttccatctcggtggaagtgggtgggagagacagaaag

SEQ ID NO: 262802 - DNA, 122 bp, Homo sapiens
ggaagtcattgaggatcaggaactgcttgaggtcggacaccagcttcatcagggactcgccggctcggacctgtggccatcagaaccagggcgggcacagggtgaggggggacagcggcctt

SEQ ID NO: 262803 - DNA, 122 bp, Homo sapiens
atgcggctcgcagatgtgtttcctggtgaacatctggggtggggcggcgtcggctctgggcgtggtgcagcctcactgtgcggggagccctacagctcagggagcggccctcgtgtaggcct

SEQ ID NO: 262804 - DNA, 122 bp, Homo sapiens
gcggggggcgggggtgggggggcggtgccgggcggctgtcacgtgacgcggttccggggccgccgctgccgctgtcgctgtcgccgagcccagtcgagccgcgctcacctcgggctcccgct

SEQ ID NO: 262805 - DNA, 122 bp, Homo sapiens
caggtgggagaggggctatgactcggccgagtccaggtgcgagaggggctatgactcggccgagtccaggtgggagaggggctatgactcggccgagtccaggtgggagaggggctatgact

SEQ ID NO: 262806 - DNA, 122 bp, Homo sapiens
ggcctccttctttctctttgtcctgaggtgtggccttggggaaacctaccttgcttttgacgctttcctggtcgtcgtatcctacccactggttgcccttggtggcataggggacctgctgg

SEQ ID NO: 262807 - DNA, 122 bp, Homo sapiens
aagctgcctgtgtgggcttccagaaaaggcagacactggcaggcccgaactgcctgcctgcgcctggtgcaccagccacccccacagcctcccctgcgctctgtctggaacagtcagcacac

SEQ ID NO: 262808 - DNA, 122 bp, Homo sapiens
cagtcctatgggattagggccccatgcttatgcttatgacctcattagccttaatgatctcgtaaagaccctatttccagctggccacattagggtctagggcttcaacacatggattttgg

SEQ ID NO: 262809 - DNA, 122 bp, Homo sapiens
gcgcgtgtatgttgggggccatagcaatggttgttctcacctgagctggggataagtaggcggctctgcctccttctctgcacccatgggcctggactgaggtggggggtctcctgcccagg

SEQ ID NO: 262810 - DNA, 122 bp, Homo sapiens
agactgtaaagtctcctgtgaaagttatgctgaataatagaattgctctggattagtaaccggctaaacagatgtatctatgcaatgctggcaattcttgttgcccatgaagaaatacatca

SEQ ID NO: 262811 - DNA, 122 bp, Homo sapiens
gcacactggccacccgcagagcaccgggaccacattttgcagaatccttcggcagtcccgcgatgccttcgcggtcagcagatctcattggtttacagagaaacttgtcaacgtcacttggg

SEQ ID NO: 262812 - DNA, 122 bp, Homo sapiens
ccaggcggctggcctggcccggggctacctgacccggcctcacctggtggcaatggaccccgctgccccagccccagtggcgggcttcccggctgtcaccctctgcaatatcaaccgcttcc

SEQ ID NO: 262813 - DNA, 122 bp, Homo sapiens
ttgataattgatggcgggattcatgttgggtgttgtggtgcgtacaaggccaggcttaggcgggccccgctgaccctgtagctgggctgggtttggtgcaataacacgttgagacatcaaca

SEQ ID NO: 262814 - DNA, 122 bp, Homo sapiens
cacagcagtcagttcaccgggaaggcccccagcgggccaagccttagcaactcgtgcactcggctacttagctattcctgccccgagctgtcccctggccggataggtctgatgacaggggc

SEQ ID NO: 262815 - DNA, 122 bp, Homo sapiens
ccccagcacggagacccacgcctgtaatcccagtgctttgggaggccgagacgtgaggatcgctggaggccagaagttgacaccagcctggacaaaatagtgagaccctgatctctacaaaa

SEQ ID NO: 262816 - DNA, 122 bp, Homo sapiens
gcgtcacggcaccattgtgggttttatacttctcactatcacacagccaacttaaagtaccgcaagctggctgggtgtggcggctcacatttagggaggctgggacaggcagattgcttgaa

SEQ ID NO: 262817 - DNA, 122 bp, Homo sapiens
ctctggaaggaagtccaacctgccaagcggagggcattgggccctggtcaggagatgactcgggcagagtggtctcccaggaagaccggagtctgggtggattcatgtgaagccctgtgtga

SEQ ID NO: 262818 - DNA, 122 bp, Homo sapiens
tgtttttccatctgtatagtgggactaatactacttacctactcctactgaagggtgagacgcagcaggcaatgcgcttagcacagggcctggaacatagtaaatgctcagtggtaatagtg

SEQ ID NO: 262819 - DNA, 122 bp, Homo sapiens
cacagcctctgctgggagcacagctggtcgtgtggcacaggtccccgggcctggcatgggcgtcccctggggggtcgacccggtcgtgggctgtctggcaggagaggggctgggcggcaggt

SEQ ID NO: 262820 - DNA, 122 bp, Homo sapiens
tggcggcgatgctgggcctcacggacgcacaggtaaggcagttctggctccagcgcacagcgccctcgggcgggcagcagcgcacggcctagtctggtaggtcccctccatcccggccgact

SEQ ID NO: 262821 - DNA, 122 bp, Homo sapiens
gatccctgccttcagtcacacctctatctctcatctttccgctcttagctgggagtgctccgcctagtcacttttcttaaggtggctcgtcgaggcctgacttcttccccgaaatcacgtcc

SEQ ID NO: 262822 - DNA, 122 bp, Homo sapiens
tcttctgaacccagcaaagtatgctttggaccccacccctcgaaatccagcccaagtgcccggctccctggcctctggggcctcccactggtgtgacaaccagaccgagtaaaagatcaagt

SEQ ID NO: 262823 - DNA, 122 bp, Homo sapiens
gcccttgccgctctgccgcccagtccacacccgccgccagctcaccatggatgatgatatcgccccacttgtcattgacaacggctcaggcatgtgcaaggccggctttgcaggtgataatg

SEQ ID NO: 262824 - DNA, 122 bp, Homo sapiens
aaagttctttgggctttgggaaccttgggctagagaactttgggcttgattaacgtctttcgcgttgttgtgtacttgggaaagttatcgggttttctcagcagtcctacagcccggcatct

SEQ ID NO: 262825 - DNA, 122 bp, Homo sapiens
caatttgacttttcctttctggaaaccagcgagcagaaatgaaaccgaaactgaattgtccgggaaattcgcggtgggggcggagagcgcagggagaagtaagcccagtgcaggatcctgag

SEQ ID NO: 262826 - DNA, 122 bp, Homo sapiens
ccccaggcactgcagcacttcctctcccactccccaagctggtcatttgtggaaagatcacgggaaatttcactcccttttcattctgagagggaaaatgtccactatgttggtgatgccag

SEQ ID NO: 262827 - DNA, 122 bp, Homo sapiens
caggtaggagacaggtactggggaaacagccacttatctctcgaatatgttccacacgtacgcaccaatcaaacttgcccacttggtcttcgtagaccgcggccgcaggaatcagcagcgta

SEQ ID NO: 262828 - DNA, 122 bp, Homo sapiens
ggagaagcttggtgctctgcggacagcgtccccactggcaggaaaaaccactatcaacctcgaagccaaaagggacaccagacgtgcattttaatattcacgacaaggcctcaggtgacgag

SEQ ID NO: 262829 - DNA, 122 bp, Homo sapiens
ttgtgcaaaaagagagtagaaggtacagagatttatttctgctttttgctgttcagccgccgtttgccccagcgaggtgggctggaggctgaatttcaagccttgtttaacctctacaagag

SEQ ID NO: 262830 - DNA, 122 bp, Homo sapiens
agtgcccctgacagaaaagaacatacagggaaaatccaagctaatatctaaaaaaagatacggaggtcttttctaagcatcttgaatttgggtgatggctgacagctgagtggaaatggacc

SEQ ID NO: 262831 - DNA, 122 bp, Homo sapiens
acctcgtgatccacccgcctcagcctcccaaagtgctgggattacaagtgtgagccactgcgcccagccgatctttgtggcttttaaagtcactaaagatggtggtaggaggccgggtgcgg

SEQ ID NO: 262832 - DNA, 122 bp, Homo sapiens
tgccagaaggacctgtatgagatagcacagctgctcatggaacagggccacaccattgcccggccccacccggtctcctgtgcctgcctcgagtgcagcaacgcccgccgctatgacctgct

SEQ ID NO: 262833 - DNA, 122 bp, Homo sapiens
ctgggcgtccttgggtgtgggtgggtggcgcggagacgagctcacacagtcccgccccctcgtctcctcctgactcacaggaccaggctcacagcacgcccccaaccggtctcccagcctcg

SEQ ID NO: 262834 - DNA, 122 bp, Homo sapiens
aggatcacttgagcccagaaggttgaggctgcagtgagctgtgatcacaccattacactccgacctgggtgacagagcgagcccctgtctcaaaaagaaaaaagaaaaagcaaaaaagaaaa

SEQ ID NO: 262835 - DNA, 122 bp, Homo sapiens
acccaggagcctccccagtttgaagcccgatatcacatttcccagaatacttgatgccctcgcccgcctcctctggctatcaaccagacggaaaggggatgtgcctgggagtttgatgccaa

SEQ ID NO: 262836 - DNA, 122 bp, Homo sapiens
tactagccgcattatagctaatcacagcatcatcaccatagtcttttaaaaatttttcaccgtgaagttattatttaaaaatctttttcaaattttatgatcattgattaccatttcccccc

SEQ ID NO: 262837 - DNA, 122 bp, Homo sapiens
cagcaggccgcagaagagcgcagcacaccacacatgtggggttgagggagaagctggccccggttctttacagtcttactggaaaaattaattcaaattgggctttgtctaagcaccccctc

SEQ ID NO: 262838 - DNA, 122 bp, Homo sapiens
accaggttctggagcgggacattaaggggtcactagcgatgcccagttaccagcatgtatcgcacgtatgtcccatgtctaccgtaggcaaaacagatagactttgggcacttttccaatgc

SEQ ID NO: 262839 - DNA, 122 bp, Homo sapiens
cctccttcctctgaccacccctcttccctgccctctgcactgcatttgccacagtgactgcgtggtgagcacatcccgtcaccgccatgttcccagagcctcgagcaaggtggggcccggcc

SEQ ID NO: 262840 - DNA, 122 bp, Homo sapiens
gaatgttaatgtgtcagcacagcagtgttcctgttaactactgatttgttttctcatttgcgtaaacacaaacggaactctctgtgatgctagggaaagaaaccctcatcagggagttttat

SEQ ID NO: 262841 - DNA, 122 bp, Homo sapiens
tggtggcgggaggtaaggttcattgttcttgatgaacaaaattcttagggcgtgaagagccgatgctttaattaaccccccgggagcgtctcaggcctccccccgggagcgtctcaggcccc

SEQ ID NO: 262842 - DNA, 122 bp, Homo sapiens
ttaggtcagcagggtttactcattccaattgcaatgctccatgttgccggagtagctcctcgctagaagagagattagttatgtcaccgtcggctcctcccattggtccgggcgtgtggagc

SEQ ID NO: 262843 - DNA, 122 bp, Homo sapiens
tgaggatggtgatgttgttggcacagaaggcgaggtctcagggggacaggcgcatcacgacgcacagccttcccatcctggaccacagcattgcacggcccaagagctcgtggccacgacgg

SEQ ID NO: 262844 - DNA, 122 bp, Homo sapiens
ataggccccgtggaggaaaggggtggagaggcccgcccagagaccgaggctgcgagtgtgcgctggctgttgattgccaaggcttcaggcacgcctggcctccacttccagtggtctttccc

SEQ ID NO: 262845 - DNA, 122 bp, Homo sapiens
cacggtggcgggggtaaaaagcagcggtggcaagaagccgcgacggtgggggcaagaagccgcggcggcccaggcaaaaggccgcaaaagccgcggcgacgggggcgaaaagccgcggcggc

SEQ ID NO: 262846 - DNA, 122 bp, Homo sapiens
tcacagggcgccgccatcttggtccgctgccgagttgcttccccgagagtttgaaggctccggaacttccgtcctgggaggttaatatccgcctcttgaggcagcctggctgggaaagtcta

SEQ ID NO: 262847 - DNA, 122 bp, Homo sapiens
ggaaatcctttggtccaccttaaatgctgcagctgtgtagctggcgtccctcctcgacctcgcagctggaagtccctgcctgagggcgccctctgtgcagcccacttctggctgagtccaga

SEQ ID NO: 262848 - DNA, 122 bp, Homo sapiens
tgagtgtgttgcgcgactgtgcaaagtgaaaatgaatgccctctctgcaaggctgaccttcgggagagggtgatcccggcagcccgtgtgtttgccgcacgcgagggacatgcgtgcagagg

SEQ ID NO: 262849 - DNA, 122 bp, Homo sapiens
caagcttggaaacctggcaaggttagttttgttctatttgtttagaaaaggcgcagagagcggcagggctctctgcatgctgctgagtcagagcttcggaggcaactgggatctgcctcagt

SEQ ID NO: 262850 - DNA, 122 bp, Homo sapiens
aagttttcctcgtttcctccgattattttgctcggcataatagcagccagatttcaatggcgtgatgctgaggaatgatttttatctggggattaaacgtctttgaaaggccagtccctccc

SEQ ID NO: 262851 - DNA, 122 bp, Homo sapiens
gagacaagcggtcagcagagcctcagtgctgatcgtcggagcttgggagcaggaagatgtcgaatgaacttgagtgagtaaacatcggtggatacctgccgctctcagagcgtggaggctgg

SEQ ID NO: 262852 - DNA, 122 bp, Homo sapiens
ctggaaaggcggaagcctccagtctaggggtggctgcagaacccggatctcggagttacacgttctacggagcggggcgccgggagacggcgggcgagaaaacccggcgtccggaagcccgt

SEQ ID NO: 262853 - DNA, 122 bp, Homo sapiens
tccagtcttccagtctataaggtgggaataacaaaatttgcatataggaatttggggaaacgtgtagttctgggtttgggtgaagacctccacttttgtagtaggttcataaatcaaatcag

SEQ ID NO: 262854 - DNA, 122 bp, Homo sapiens
gcatcattttaggaggcacataatggcaaattgtccctaaatttgatcacctggtggagtcggtagcagtcagatctctccattataaagttactttctttctttttcttttttttttttaa

SEQ ID NO: 262855 - DNA, 122 bp, Homo sapiens
agtgctaggaatacaatagtgaataaaatatggtttctcctctcaaagagcttatagactcgagttgaccaaacaggtaataataatatttagtgccagaatcagaatctcagatattctgg

SEQ ID NO: 262856 - DNA, 122 bp, Homo sapiens
tgtgagatgaaggtcacagaaataatttacagttgggctccttttactttgcttctttgacgatgtttgtcagaaagcaaaggtgaagagttaactcctatgaaactggaattttccagctt

SEQ ID NO: 262857 - DNA, 122 bp, Homo sapiens
tccggctccgctgttcactagagcccccggctcgccccgccgcttctctaggcgccaggccgcgcctccggacgcccagccacgccccctacgctcactgtcattggctattgcaaagggcg

SEQ ID NO: 262858 - DNA, 122 bp, Homo sapiens
agaatggggacatagccgtcagtgatgctccacttcttgaggttgacaggtcggcggctacggccccgcagggagccgtaatggaagacctcattggcactgttggagctgtagaggatgag

SEQ ID NO: 262859 - DNA, 122 bp, Homo sapiens
aaaaatcacatcaaggaccattcatgcattaacagaagactgctggggccagtggagccacggcctgcctatctgatacccaggcaagtaacatccacacgggtccaagcattccctggcct

SEQ ID NO: 262860 - DNA, 122 bp, Homo sapiens
ctgaggggtctgtttaaacaagtgtgtctgagcaggaaagtcaaagagacagggaccctccgggcgctgaggggaccaccccagggactacagcctgaatctgataaggctggatctatttt

SEQ ID NO: 262861 - DNA, 122 bp, Homo sapiens
atctttttttgtgatattagcaactgctggtaatcattgcctgcattgtttaactcattacggattgcaaaacagtgatattccacttctatggttccttgtttattagttggaatacttca

SEQ ID NO: 262862 - DNA, 122 bp, Homo sapiens
gagagccccacgcgccggaggttccggggcagccgggttacacgcgagagccccacgcgccggaggtccggtttgtgcacctgcacacgggtcctgtctgtgctcccctgcagcccggggga

SEQ ID NO: 262863 - DNA, 122 bp, Homo sapiens
tctagtggtttgatgaaaggcattctgtttagaatctccctagcacagtgcagggggcggcgggggtggtggggtggggttgtttcccctcttggagaggaagctgcacagatccctccctg

SEQ ID NO: 262864 - DNA, 122 bp, Homo sapiens
ttattgagttcctgccgtgtgacattggagtggccttgtctttgtggaaacagatggccccgagccagctgccctctctcctctacacgtggctgaggggctgccggggctcttgagtggtt

SEQ ID NO: 262865 - DNA, 122 bp, Homo sapiens
atccccagtcctgccaatgtcaccctgcccccttcgtcctgggatcaaaggacatcagtgcgatctcatctctgtgcctctaccgcaaatatgctcaaccccaggcacactcagcacatgtg

SEQ ID NO: 262866 - DNA, 122 bp, Homo sapiens
atggagcgacccagacggcttccctcgggaggacactcccctctctgttttgggggtctgcgattttgtacagaaggttttcttaaagaagtgctcatccagatttcgtgggctcaggagat

SEQ ID NO: 262867 - DNA, 122 bp, Homo sapiens
attaaaaacccacccagactggtgtgtcagtgttcttttcacagaaaaagtgtcaacccacggagctccatccttgggtagtcccctctaggaccatggtatccgagggtttgagatagacg

SEQ ID NO: 262868 - DNA, 122 bp, Homo sapiens
ggaaggccaacgcggccgaaggtttcggagccaggcttcccgggcgtcaggggctagggacgggtccccggagctggggaagatgaggggccgagaggccgtggaggcggaggacgcgggca

SEQ ID NO: 262869 - DNA, 122 bp, Homo sapiens
ttcaaaaagaggccactcttctcgccatcccctcaaccaaggacatgccacaaaaccatgcgtaaaaagtaaagctcttgggagtctgaaatgaagtattccaatttggcatctattttgga

SEQ ID NO: 262870 - DNA, 122 bp, Homo sapiens
gggcatgaaccaggagcactgcaagggctttgggtgcagtggaggaggccagaaccaggtcgatggcagctagcatggacaggaagaggtacatagattggtgcaaggatgggtccatccag

SEQ ID NO: 262871 - DNA, 122 bp, Homo sapiens
tgcccttgaggaggcaaaaggttgggatgtgacgcaggcagggaggatgacttgggtaggcgaggacaggtgggcaggcttggggatgagaaactcagcatcctctatgaacagacacttct

SEQ ID NO: 262872 - DNA, 122 bp, Homo sapiens
ccactccacacccgccaggacggctctaacgaaacgtggaaaatttcacacccgccaggacggctctaacgaaacgtggaaaatggcggcaccactgtcacttctctcacgcccaggagcgt

SEQ ID NO: 262873 - DNA, 122 bp, Homo sapiens
ctgcaagatacagtattgtcaaccctctgtgcccacagctagtaatggcagagtcaggatcgaacccaagtctctttggcttcagaatctgttgtctttctcttcttacacactatctttaa

SEQ ID NO: 262874 - DNA, 122 bp, Homo sapiens
cccacccgtgccccagagagaagtggctcgctgctcacaccccctcctgccagtgcagcgcgagtaagagcgcccaagggaccacagctggcatcccaggggttaatttcggagcagcccag

SEQ ID NO: 262875 - DNA, 122 bp, Homo sapiens
tcattcacaggtatgtgctgtgtgtgtgtgtgtgtgtgtgtgtgtgtgtgtatgtgtgtgcggtgtatgtgtccagggttacaatggaaaatttacttgttaagttgggttacaataaaaaa

SEQ ID NO: 262876 - DNA, 122 bp, Homo sapiens
cccaaaacctgccctacctccagagctcctacgctctgctggccaccacactgcacttggcggaggcaggaacctaggggtccccctacaatccccccattactaagtccttcctcttctct

SEQ ID NO: 262877 - DNA, 122 bp, Homo sapiens
gccccggccgctcctggcgtagtccatcacatggcaatagtcctatttaagccgcgccgccggcgcctttcagcaccactagcgctggccagcaccccgcgctctttgggcggtgcccacgg

SEQ ID NO: 262878 - DNA, 122 bp, Homo sapiens
cctgggacctgcctccagccctgggcttggggccgtggtcactcacacaagggagcagcacgtcctgggacctgcgtccagccccaggctcggggccgcggtcactcacacaagggagcagc

SEQ ID NO: 262879 - DNA, 122 bp, Homo sapiens
ctgctggtttatgcctgcttgcctgtgggtgggcctccgtcctttccagttctgccatcacgaggaaacctgctgtgactcccatagacttgtttttaatggacatgaatttttatttctcg

SEQ ID NO: 262880 - DNA, 122 bp, Homo sapiens
acctagaatacagtgttgtgcttatgagctcaaacagtcagcttccacagactagatccccggttgttgtaacaatttggtaatatcatgtatggaaaacgcataccacagtgcctggccca

SEQ ID NO: 262881 - DNA, 122 bp, Homo sapiens
gggctctggttgaatgtttactgttgctttgcaccaggtgactatgcccaactcagcttgcgcatcctgtacctggaggccgggatgtatgacgtccccatcatcgtcacagactctggaaa

SEQ ID NO: 262882 - DNA, 122 bp, Homo sapiens
tcaagtaggaatatgaaagcatactgccatcgtctaaaaccctgctaccctggccgagtgcggtggctcacgcctgtaatcccagcactttgggaggccaaggtgggtggatcacaaggtca

SEQ ID NO: 262883 - DNA, 122 bp, Homo sapiens
ttgagatggaatttcactcttgttgcccaggcctgagtgcaatggtgcgatcccggctcacggcaacctccgcctcctaggttcaagtgattctcctgcctcagcctcccaagtagctggga

SEQ ID NO: 262884 - DNA, 122 bp, Homo sapiens
cgagggggtctctttcccacgtgtccctgagactcctcagccatcccagaggctctcggccgtctgagcacccctgaccatgaagccttcctggcccactctctgtgtgtgaggcagagccc

SEQ ID NO: 262885 - DNA, 122 bp, Homo sapiens
ggcggcggtggcagcgcccggtctgtctgcctccgcggcggcagcagcagcagccgccgccgccgccgccgctgcatgaacctctgcaccacggctgccccccgcgtgcagcgcacccagcg

SEQ ID NO: 262886 - DNA, 122 bp, Homo sapiens
tcccacaagccccgtcccaccctcagccccgccccttcgccgcggccaccgctgagtttccgggcgcgcgctcctaccccgagctctttgcgccacgactcccacaggccccgccctgccct

SEQ ID NO: 262887 - DNA, 122 bp, Homo sapiens
gcgcggttcgtgtgtgggcctgcgggggcgtgcgcggttggggggcagtgagggtcgccgcggcggcgcgcagcacggcgggaacatggcgcgcggaaccggcgcacgcgcctagctggtgg

SEQ ID NO: 262888 - DNA, 122 bp, Homo sapiens
aggcggctacccggctgcctcccggccactcagcgcccgtcccgctcggatgggcagtgccggtcgcagcacccgtccccaacacccccgccacctccggagaccgcggccgtaccctccac

SEQ ID NO: 262889 - DNA, 122 bp, Homo sapiens
ctcccacttgcagcgggtctgcatcttaattggcaaaacgaagttggggccgcggtggagcggaggcttcttccagaacggtcagctcacctccggatgcggtcgtccgagcagccgcctgc

SEQ ID NO: 262890 - DNA, 122 bp, Homo sapiens
ccttgccagcacacagactcaaaagagaaacatgctgagacaggctcagccgtggggcttcggagcgcctggagtttccagcattaaacgctacagctgcagaagcccatgctgttaccttc

SEQ ID NO: 262891 - DNA, 122 bp, Homo sapiens
tggtgtcttgcgcggagaagcaattgccagaaggcctggtgggccagagttgggacctgccgggggccacaggccccagttccacttgagtggctcccctggacccccgccgagaccccagt

SEQ ID NO: 262892 - DNA, 122 bp, Homo sapiens
gactgcgggccccggatgtgagagccttggcttgacgccctggctgcgctgcaggtgcgccgggccgaacggagccggcagcctggcggcgacctgaccgcccgaggctccccttcacctgc

SEQ ID NO: 262893 - DNA, 122 bp, Homo sapiens
atccttaaagatggtcataaggactcaacatgctgagtttgaaaattaaattctttggtgcggcgattatatactcagaaacctgggtgttggcttctcaagacttctttgcaactcattgc

SEQ ID NO: 262894 - DNA, 122 bp, Homo sapiens
tcctctgtcagggaagcccaagcagtgcttatgacctgggtcaccccatggcacgacgaccggcatgacacagcggagacggctccctggacgtggctgtaaggccctcttagcaaaccatc

SEQ ID NO: 262895 - DNA, 122 bp, Homo sapiens
cgacgtggaaggcgctggccgaagacgtcaaaggtgagaagcgggggcggcccgctcccccgtgccccgccgcccggacccctccacctgcccggtgggcagcctcctactccgggagcgcg

SEQ ID NO: 262896 - DNA, 122 bp, Homo sapiens
attactatgtactgacttctgcctgcctttttgccccttctgctcccatccccaggtggacgccctgcttcatctggcccgccagaatcgggctgtggcccgcacagcccagaatgaacggt

SEQ ID NO: 262897 - DNA, 122 bp, Homo sapiens
gggctggagcgcggcattgcttaggggggtgggcggaccctgggcgggggctgcgcgccccggaggccgagcgggccgggggctccgagaggcggtgcttgggaagcctcggggccgggagg

SEQ ID NO: 262898 - DNA, 122 bp, Homo sapiens
catcatccagacccactaccagccctggggcttcctgagtgcagctcataccgtgtgtcccggcctctttgaagagctgctgctgctgctacagcccctggccctgctgcccttcagcctcg

SEQ ID NO: 262899 - DNA, 122 bp, Homo sapiens
cgtggaggagtcacagcacaggcttcccatgtcccccggcaccgtgacatcagccctagacgtttttagcccaagaatgccatgaaatcctgcactatcttcggcccggctcggaggcacgg

SEQ ID NO: 262900 - DNA, 122 bp, Homo sapiens
atggtctaggtctgtgaaaaggactctgcccctttaattcatcaaatgcagaaaaactggcgtagccagtatctacaagccacattccaaagggagatgttttcaattcactcattatagaa

SEQ ID NO: 262901 - DNA, 122 bp, Homo sapiens
tttgcggaactatcaaccgctgtctgaggcgtgtcgggagcgacacccctgcggaggatacggtgccggggtccttccgatcgcaaaaaccggcgttcctcagccttcaagactgtgagcgc

SEQ ID NO: 262902 - DNA, 122 bp, Homo sapiens
gtgtgtctttgggacatcactgactcacctttcttgatgtcttcaaaaagggacagcacccggactggctgtctcctccacacaggcacggtttcgaacatctcaaggggattctcctattt

SEQ ID NO: 262903 - DNA, 122 bp, Homo sapiens
gcctcatctctgggtacacccaggtgccatcagcatcacctggctggaggatgggcaggtcgtggatgtgaactggtccatcgcctctcccatactggaggatgagctggcctccacacaaa

SEQ ID NO: 262904 - DNA, 122 bp, Homo sapiens
agcccccgggtctgtggcactttgtgaaggctgcccccacagaagaagacactgagtcttcgagaagttaggaagccctgaaccgtccaaagacaccaggagggaaaagggtgggaggcgag

SEQ ID NO: 262905 - DNA, 122 bp, Homo sapiens
gctggatgccgcagcccttcacagagagcaggctcctccgcgcacgactgcagccccagtcgtttgcagttcccttgccatttatgggaccctttggcttttacagagcgtgtccagccatc

SEQ ID NO: 262906 - DNA, 122 bp, Homo sapiens
gttcagactgaaagctcccagatggtctgttttacacttctgagcatgtatcatggctaccgaggattttgtgacaatggtcacaaaattaggactccataaaataaatacctgattgggac

SEQ ID NO: 262907 - DNA, 122 bp, Homo sapiens
cggggttcgggctgggagcagcttcatgactacgcggagcgggagagcggccacaccatgcgaggtaagcgagtctgcgggcaccgaggctccccgagtccggccaactccagccagacggg

SEQ ID NO: 262908 - DNA, 122 bp, Homo sapiens
ctcttccacaataaaggattaatgggcccaaaatctcaacatcgagattgagaaacacctcgccctcaaggaatgtcacccttgaggccctggccaggaggccagcgatgaggcaaccctga

SEQ ID NO: 262909 - DNA, 122 bp, Homo sapiens
tgcaagaatggaaaggaaacaggagccacagggaagctgctgggagatggctgggccacacgtttttgtcataggccagccttggagaactcctgtgctgggtgatcttaattataacctta

SEQ ID NO: 262910 - DNA, 122 bp, Homo sapiens
ggtcctcgagcggattttgttggactcggcccgctccagacctgtcaggcgctccagggccgtggccatgcgcccgataaggtcttccagctgcgccagccggatgtccacggtctggagtg

SEQ ID NO: 262911 - DNA, 122 bp, Homo sapiens
ccatcaccgtcccgccgtgggacgcacctgccgagggtggaggataagggggtgactgcgcggctgctgttgagcccgccaagagctaaaaatatttcccaacaaagaggagtaaggaggct

SEQ ID NO: 262912 - DNA, 122 bp, Homo sapiens
ctccgcttccctctagttcttgggcgatgagtcgcggggttcgctcacccaaagccacagcgaggagcagagacagggacttcatggcgctgcgacctcctcagccatgaagcctcctcttc

SEQ ID NO: 262913 - DNA, 122 bp, Homo sapiens
cctcccactcctctgcctggctccagccgacagggttgcctgcgtgttccttgaccttcccgggttatggtggctcgctttttaggggtcctcatgacccatttcacacttccctctcgtct

SEQ ID NO: 262914 - DNA, 122 bp, Homo sapiens
ttctttttgataaaagatatacctaaagaggcacctacacataaccctggcaccgtccgccgccccaagaaccttcctgctttaccaatggcctgggagttggcaaacacgctaacaaaaaa

SEQ ID NO: 262915 - DNA, 122 bp, Homo sapiens
catggaggcctgaagcagcaaggccagcaacagggcccccgagcggctgcagcacgatctcggcatcttccaggcaggctgaggctctgcagaagcaaacaagattggtgggacccctgcaa

SEQ ID NO: 262916 - DNA, 122 bp, Homo sapiens
gagaaacacgcgggggagacagcggccctcgaggaggccatgaaaggtctaagcctgatgcggccccacggctccagctccagaaatatcagtatccgcaactgggcccaagcggggccagt

SEQ ID NO: 262917 - DNA, 122 bp, Homo sapiens
ggggccttttgagcttctctcttcattccccagttgacaccctctccactccagaggtgacggtctgtggcacacaagttttgaaatacagttcccaggcctgtgaagacctggtcagggac

SEQ ID NO: 262918 - DNA, 122 bp, Homo sapiens
ttgtccactttcatgctcctcccatactcctggttcctctttgaagctcgtagtagatagcggtagaagaaacagtgaaagtcttaaagtctttgatctttcttgtaagtgcagagaagaaa

SEQ ID NO: 262919 - DNA, 122 bp, Homo sapiens
atggctcgggaaaccgagggtgggaagcctcttcggctctttccggagactgctaggggtcgggattcttcggagacgctcgggtgcgtcctcggccgccgttcgggagggctcaggggcta

SEQ ID NO: 262920 - DNA, 122 bp, Homo sapiens
gggggctgccacagctgctatagttcaccgtgtgcaagtggcagccgcccctgagcccaccgctgacgctgcagggctggtccggtcccagacggcctgagggtcatttgcccgcgcccaga

SEQ ID NO: 262921 - DNA, 122 bp, Homo sapiens
ggagacgccggaggttgggttgggcgggttccgggaggcgttcgtccctcctacaacgtccgcagcctgcgccgcgcggtggctctggactaggccttttcctctgggttgtggatcctctt

SEQ ID NO: 262922 - DNA, 122 bp, Homo sapiens
tgtacctgaggcataagacagagagaatagcagaacagtgattactcttttgaccaataccgtagaagctctcagaaaaaaaggctggacctgcaggagcaggaacaggactcctggcctcc

SEQ ID NO: 262923 - DNA, 122 bp, Homo sapiens
ctctcataattaccatgcacaatgctgtgttatttcctccaacatcaaccctgcaaaagtcggagatgaggttgtttctgctcaggagtccaggcttacaggaaatgctcaagattttcttc

SEQ ID NO: 262924 - DNA, 122 bp, Homo sapiens
tttttcttcttcttcttcttttttttttttttttttttttttttttttgagacggagtttcgctcttattgcccaggctggtgtgcaatggcgcaatctcagcatctcagctcactgcaacc

SEQ ID NO: 262925 - DNA, 122 bp, Homo sapiens
agcccaccactgccatgcctagtctctgacaaagaaaatgccagaaaatggctttctgaccgaggtcccactgccccagatgaagtaaggaaggttgagatacctccacatgccacgctttc

SEQ ID NO: 262926 - DNA, 122 bp, Homo sapiens
caggcctgtgcacggcatccagagcttcaggagacacctagcaaaggatgcacatgggtgcgggacccagagcccagcaccgcacacagcagccttccgcgggatcaccagctggcgcgtgc

SEQ ID NO: 262927 - DNA, 122 bp, Homo sapiens
agttttaaaaataggtatgctagaaaactgaaatacctggcctctacatttagagattaccggctctggcccacaggctgcagtgcagtggcttgatcacagctgtccgcctgtatctgctg

SEQ ID NO: 262928 - DNA, 122 bp, Homo sapiens
gacggatcttacagaggcaagtggtccctggacctctcttgcatccattctctagacggccgtgtcagaggctccaccctgttgtgaacttggtatggaggcaaaggcttagaggctggacc

SEQ ID NO: 262929 - DNA, 122 bp, Homo sapiens
tgcccctgtttgttgtaatctataatattactgcctcccgtggccccagagcagctgccgcgggagaatccagggatggtgggcgctaggtgtgcgctgaggggatgtggtggcaggcgctg

SEQ ID NO: 262930 - DNA, 122 bp, Homo sapiens
cgggacagcggacggggcgcagaccagacggtggggccagctctggggtcactgggacagcggacggggcgcagaccagacagtggggacagctctggggtcactgggacagcggacgctgc

SEQ ID NO: 262931 - DNA, 122 bp, Homo sapiens
cctgagcacgcacttccgcgagcaggacggcatccgcagcaagcccgccgccgatgtcaacgtgcccacgtgctcgctgtgtgggaagactttctcttgcatgtacaccctcaagcgccacg

SEQ ID NO: 262932 - DNA, 122 bp, Homo sapiens
ctgtaaaatagaaggcacagtcttcttctgagatttggagagcagagggcaagtgggcagcgtgacaatggtaggaaaaggcttgccccagagtgaagaagagaagaaaattgactggtaaa

SEQ ID NO: 262933 - DNA, 122 bp, Homo sapiens
cacggtggcggcggcggcgcggcgttaacaactgtctgctcatcagtctccttcctggggcgtcgtggaggggatgaccccatgcggctctcctcgaaggagcttgaaactggatcccaaca

SEQ ID NO: 262934 - DNA, 122 bp, Homo sapiens
aggtcctcggccagggtcccgatgaccgtgccgggggcatcctcctcgaaggtgctgtatcggactgttttgctctgggccactgagagcacccagcagaggctgaagagctgcaaggggaa

SEQ ID NO: 262935 - DNA, 122 bp, Homo sapiens
ctaagttgtctacatttgtcctctcctctctccttagcggagggcatatattctaaatctcgcttattttttgtgtatttactctttttctagtgatgcccccaaacacgtagtaaatttgt

SEQ ID NO: 262936 - DNA, 122 bp, Homo sapiens
gagcattggaggatggaggagcaggtttaaccagcagatcatgagggaggactgtctgagcgtcagaggacagaggagcaggtttcaccagcagatcatgagggaggactgtctgagcgtca

SEQ ID NO: 262937 - DNA, 122 bp, Homo sapiens
gatgggctggaaagagccacgagccagccaggcgcatcctgcgtttgtttgtgcggggagcgaggccgggaatatctgatcgggcggagcaagccgggcgggagaggcccacccaggcccga

SEQ ID NO: 262938 - DNA, 122 bp, Homo sapiens
cagcctgagggcttggtgtcccgagccatggtcgccccagccctcagggacgggccggggcgtggtggagagtccttcgaaacacagtttttgtcatatatgtggccatgttgcgacccccg

SEQ ID NO: 262939 - DNA, 122 bp, Homo sapiens
ggacgcctctctttccctcaggcctaccgcctctctctccctcaggcctaccgcctcctccggggtggaactgagccccagaagtccaggggccaagaggttagcacctttgcccttctcac

SEQ ID NO: 262940 - DNA, 122 bp, Homo sapiens
cccagcagatggcctctgccaggggtgacctccagaggagcctccttcctccactgccctcggagaacagtgccccttccccggaggagccagtataaagacagccaggatggaaaccgggc

SEQ ID NO: 262941 - DNA, 122 bp, Homo sapiens
ggcctcctgtggacacggggcctcaccgaggcgctggcggctctggggtgcagctgtgggcggcctgccagctgcttgaggcttcagggccttcttccaggacatggggtggctggccagcc

SEQ ID NO: 262942 - DNA, 122 bp, Homo sapiens
aaacacaaggtgaccccatttacaactggatcttcaataagcgtctggtgattcaatttccgccaattagaaagagcccaaccagaacacgcaggcgccttaacgctgagggcataacgaag

SEQ ID NO: 262943 - DNA, 122 bp, Homo sapiens
aaaatcacatatttcatctcataggccgtaaacagggccatttaggaagccatgtgttaacgaggggagacggatgctctgtgccgtgtgcagggataacggtgccaggccaggcagttacc

SEQ ID NO: 262944 - DNA, 122 bp, Homo sapiens
ctcgtcgttccagactcaggcatggtcattacccacgttgggtttcagctccaccattggcgtgtagtggttggcacaaatcttcagggtcttgtccctcctcatgaggaggcgggtggtcc

SEQ ID NO: 262945 - DNA, 122 bp, Homo sapiens
ggagacctgggcgaacagagcacacacttgtatgctgtgctagagtgagcacacaaagcccgaagaaagaagacggacagaaggcaccatgccatcttccaggtgacaaggggagaatttca

SEQ ID NO: 262946 - DNA, 122 bp, Homo sapiens
ggggtggttttcacacgtgcgcctgcctgcgaggagaaacgtgctgtgtcatagtttcctcggtgcctgggacggcttggcctctgctttcgtgtgagcccacgctggccatgcacagctgg

SEQ ID NO: 262947 - DNA, 122 bp, Homo sapiens
gcgctgccgggtaatggtgggatctacttttagtgaggcggaggcttcaagccccagattcggggaggttgttctgagaattcacgttttgaaagaattttgtgacacctatttcaagtgtt

SEQ ID NO: 262948 - DNA, 122 bp, Homo sapiens
tgggccacctgtgccgcagattattcctcacttaaccttccctggcctttctctttcattcgggaggtgtttaattaccttggattcacaacgctgcacttcaggtgagcctctcctaatgg

SEQ ID NO: 262949 - DNA, 122 bp, Homo sapiens
tagagggttctaggagttagttctaggataggtcaaaggattgaggctcccaaatgatgccgctcaggcactgcattaagagaggctcaggtggctattcatttgccagtttgacttgttaa

SEQ ID NO: 262950 - DNA, 122 bp, Homo sapiens
gagtacagtgaggagaagtagaaccccacaggccatggcatggagtgtgcaatggaaagtcgtaggagactttttttttttgacacggtctcactttgttgcccaggctggagtgcagtgtg

SEQ ID NO: 262951 - DNA, 122 bp, Homo sapiens
tcccccatctgggcggcgggcggggctcacaggctttagcaattagcgggcgcgggtgggcgcgcggcgcgggcggaggaagggccggagcaggtgagccgcggcggagcctcattagggcg

SEQ ID NO: 262952 - DNA, 122 bp, Homo sapiens
caagctgattggctggagcggtgcccgggctgcgcggctataggtgagcccaggaggggacgggcggggcgggccggaggcccgccccctcccccctgggtcggacgctgagcggagccgcg

SEQ ID NO: 262953 - DNA, 122 bp, Homo sapiens
cccagggtggctggctcggggccagagccctggtgggagcccagcctgcccctctagtggcgagggcctcagtttcctggccttgtgaactgcttttctgggttagtgctgtggggctcctg

SEQ ID NO: 262954 - DNA, 122 bp, Homo sapiens
ttggctgcaggacaactgctttgaactgatgtcacacaggagatcagctatttctcactgcggttccccatggacaccttgcagggagcttgtttattactccactgtggggcagattggct

SEQ ID NO: 262955 - DNA, 122 bp, Homo sapiens
ctgactcgcaggagggccacgtagatgagaaagttccgtatggaggagatcacatcctcgcgcatcttccgtttcatctcctccgggtccagcttcggcgcgaggccctcaatccggaacat

SEQ ID NO: 262956 - DNA, 122 bp, Homo sapiens
acctctttccttctttgtggcttttggtgcaaatccctttgaatttttccttctacttctcggatgatactttatcagtcttctttgctgggctctctcctcttcttgctctgttttctcat

SEQ ID NO: 262957 - DNA, 122 bp, Homo sapiens
ggaacaataatgggagatggcggtcaccacaatggcatgtgaaaggtgctgcttaaaatacgaaaaaccagtttcgcaactttacacactgcacccacccctcccgtcaccttgccttccct

SEQ ID NO: 262958 - DNA, 122 bp, Homo sapiens
ctgcaccttcctggtgtcattggcatggaaggaaggcccttgtccaagaaggatggtcttcgtcttgtgtgatctttgagatgccatgaggcccctggatacaaatggtgtgggctcctttg

SEQ ID NO: 262959 - DNA, 122 bp, Homo sapiens
tccaaagagttgtattgatttacactgccaccagcaaaaaagctaatatatcaactgaaccgtgtttctaacaaccatttactgaatgcttatcatctgtcaggtgttgtgccagaagaatg

SEQ ID NO: 262960 - DNA, 122 bp, Homo sapiens
actgctgcctgggccggccccttgattggggctcccggtgggctgggatacctgaagcgccgggtcgtccatttggtgcctgtggctggtgtggcccgtccggctccctgtcgggttcctgg

SEQ ID NO: 262961 - DNA, 122 bp, Homo sapiens
agcgcgcccacctccgcggggctccatcccggcctcccccggcccgctctgcagcgcccgcgaaggctcccacccgcagcctctgttcgcccggggaccccgggcctcccagcccgcgaagc

SEQ ID NO: 262962 - DNA, 122 bp, Homo sapiens
gaggttccggtcggtttcgacttggcgttgggttgtggcctgtctgggcctcagcggctccgcggctctacgagcgagagtgcacgaggggaggggcgccgccgggggcgcgcacggcaggg

SEQ ID NO: 262963 - DNA, 122 bp, Homo sapiens
gcacgctgcgagctgccctccagctaagacgctgcgggcaagggagggggaggccgacatcgccaggcgaggggccaaggtcgggctctttaactcagccaggaaacatcgttgggggctcc

SEQ ID NO: 262964 - DNA, 122 bp, Homo sapiens
gcaaacagtggaaagttgggaacctcagtcgctggcccaggcggagagcagcggcggcggcgagggcagcgggattcgggccgcggcgccgcaggctcagagctgcccccggggcatggacc

SEQ ID NO: 262965 - DNA, 122 bp, Homo sapiens
tctttaaacaatctattgttagataaaatagggggcagccgggattaaaattgtttcaatcgtttgagaaaagtaactgccatagcattctttaaactgaagtatcattttatttatggagt

SEQ ID NO: 262966 - DNA, 122 bp, Homo sapiens
tctaagcactgactatgccaggaaggctgcccagccaggaccccgtggcccacggggcgtcgtcctgttcctgcagtggcacatgcagttgtgggagagccagtgcccccacgccgtgtcat

SEQ ID NO: 262967 - DNA, 122 bp, Homo sapiens
gtctgaggcaatgtttgcatttcgaagctgcaggaaatctagtcatgctggggaagtggtcgtggagtcggccgtcatgggattcccgtgggaggacctgcctgaaaagagatgagagtttc

SEQ ID NO: 262968 - DNA, 122 bp, Homo sapiens
ccagaatctcagctttccgcctaccaaaggtgccccgatcccctcccactgccctagcagcggcccagccccaacgcctttggctagagattgaaatcctctggaaccaaccactggacgct

SEQ ID NO: 262969 - DNA, 122 bp, Homo sapiens
tggcggcgctaaacgcacccccaaagctgccccataggaacttgggagggtcgcagggttcggaaagtgccaaatccagcaccggttcgcccaggcagtctgtgtctctggaagagacgcag

SEQ ID NO: 262970 - DNA, 122 bp, Homo sapiens
cgctacagggcgagctagggccagtgctgggcaggggtccgagaggcccggggctgcgggcgggcgggcggttatcctccagagatcgcgcatcagcacagaacatctggactgatgttctt

SEQ ID NO: 262971 - DNA, 122 bp, Homo sapiens
tagtaccaaccccagatccaggcctggccttcctgaccagtcaaagccagttggactgtgcgcctagaagtggacagacatgcgaaatgccatactgtatacgtacaatgcataggccaaag

SEQ ID NO: 262972 - DNA, 122 bp, Homo sapiens
tcttaaatatattaagacttgttttgtggcctatcgtattgtatatcttggaggatgttccgtgtgctggtgaaaagaatgtatattctgcacttgttgggtagaatgttctataaatatct

SEQ ID NO: 262973 - DNA, 122 bp, Homo sapiens
tgctcatctaggtatcaaaatggtggcaagccccaagtgcaactaacaacctacagaagacggaagtctaactttagtcaacactcagggagtggggatgaagaatgtagtcttcaaagctc

SEQ ID NO: 262974 - DNA, 122 bp, Homo sapiens
cagaagactggctctattaaacaccagttgtgtgaccttagacaagtcactcatgggtctcgagtacctcatgggaaatgaagacctgtgacctggtaatgttgtagctcacaatctgcttt

SEQ ID NO: 262975 - DNA, 122 bp, Homo sapiens
ggacgtttgcatgttaaatacagcctggcaggcctgcaggctggccatcttcccccactgcggctgtctttggccctgcctctgcaccttcgcctgtgccattccgttctctctgcttggat

SEQ ID NO: 262976 - DNA, 122 bp, Homo sapiens
acagggcaagactctgtctcaaaaaaaagaaaaggagcgaggctcccacacaggccacagcgtggatgaaggctgaggacatcacattcaatgacagaagccagacacaaaatgccacacag

SEQ ID NO: 262977 - DNA, 122 bp, Homo sapiens
actccccgctgctcaggttcaacgtgggccccagcgagccgttggcgggagacttgagcacgcaggtggcacccacccccgacggcagccggaacgtgctcacgagctgctgggggctggcg

SEQ ID NO: 262978 - DNA, 122 bp, Homo sapiens
cccccacagccctggggcagacaccagcctggggaggggtctccatgctcagttccttcccgtcttgttcagagagacgtggcctgcccacgtgcagtcagcggcatccgcaaccctgccag

SEQ ID NO: 262979 - DNA, 122 bp, Homo sapiens
cgagacccttccctggtggaggctcagagttccggcagggtgcatccggcctgtgtgtggcgcgaggcagggaagccggtacccgggtcctggccccagcgctgacgttttctctccccttt

SEQ ID NO: 262980 - DNA, 122 bp, Homo sapiens
gaagagcccagggccctggtcatgacaggttcaggtgccaaaaaggagacgggaagaaaacgtgaggcgccagaacaacaggttctacaaggtgcacacgagggtccctgccattgaatgaa

SEQ ID NO: 262981 - DNA, 122 bp, Homo sapiens
ttagtctgttgggtctgcagccagaaggatcctgttaacacattagccagagctggttcccgcagtggcttctacctcactcagggtgaaatccaagtcctgcactggcctctgaggtccca

SEQ ID NO: 262982 - DNA, 122 bp, Homo sapiens
agatgtttatagctgtaaaccaaagataaaactccaagcccggcagctgactgaatggaacgccctcttggccagggaaacccaaagggacctgaaggttcaggccatgatgggcagtaggg

SEQ ID NO: 262983 - DNA, 122 bp, Homo sapiens
gagatgattctttaatcacttgaggttgtaagagcccttcaagagaaagaaaatgcacaacgttctgcccctgggattggggcttcaggcccttagatttcagggtgcagatgatgacactg

SEQ ID NO: 262984 - DNA, 122 bp, Homo sapiens
aatgaatacatgtctacacacacatacactcagttatataaatgacgatacactctcaagcgtctccatagtgatttgtctatcttcagtcaaacccaacttcacttttcctgggcttctag

SEQ ID NO: 262985 - DNA, 122 bp, Homo sapiens
aggaggagcagagctgaagaccgccacgaggcccaggccctggcagtcattcctgtaacacgaatgtcacctgccactgtgcaagaccccaggaggggacaaaatgtaatctcctcccagca

SEQ ID NO: 262986 - DNA, 122 bp, Homo sapiens
aaggcgctgcgggtccagtgtccctttgtttgcagagtcttgggccagtaaggagtgctccgcgggccccaggggaggacaacaggtgcctcttgccccacccgggctcctctggtgggagc

SEQ ID NO: 262987 - DNA, 122 bp, Homo sapiens
ccgcgcatatttatcctcgcgcgcggaggggagactctcagaacgctcctcgaccagcagcgaggaagtcgagcccgcatcccgcatcccgcatcccgcatccagagcccccgagggacgaa

SEQ ID NO: 262988 - DNA, 122 bp, Homo sapiens
ttgttttcgttttccaaggagcgtggagatgggcagggttaacggaccctgcgcctccttcggcttcttagtttgggtgttgaaactcacctcctttggtcctgttcgtctctgattcaaga

SEQ ID NO: 262989 - DNA, 122 bp, Homo sapiens
ctcctcctcctcacccagcgcccggtccgctctcggcgcccgaccccgcagcccgggcagcgcgagtgctccccactgcgatgcgcctggaggctccttgacttgccctcacacttaatcct

SEQ ID NO: 262990 - DNA, 122 bp, Homo sapiens
aaggggaaggcggcggcgcgcgctgtctcctggggaagcagtcccacctgctgtggggggcgccgctggggaggggccgagccgtgctcacgcctgcacgccccgccccgctcgccgcacgg

SEQ ID NO: 262991 - DNA, 122 bp, Homo sapiens
cttcccatttgcctctaaaggctcacctctcacgtgggagacagcagtgagccccaacttcggggctccagggaaaggcttgcatcaaccttgaccttttttagggggtgagcagatcctgt

SEQ ID NO: 262992 - DNA, 122 bp, Homo sapiens
aggcagcaccctggcaaagcagctcacacactgcagccacactcatcagctgtggtgaggcggctggagcaaagtcaaagtcatgcagcaaaatgaaaactctgggactcttcggcaaaatc

SEQ ID NO: 262993 - DNA, 122 bp, Homo sapiens
aaattctaggggagtttgccctccagccgcgctccggaagcggaggctgcgttgggagcacgtggtttgccccgtcgcccaactaatctgaaatgtgtttgtggcgtgcctggtttctcagg

SEQ ID NO: 262994 - DNA, 122 bp, Homo sapiens
tccggctcttcttgccattctgagggtggctcccacgggacacgtgctggcttcaaaggccgaggcggcatttcctggctgtggattcctctctagctacagacgccagtaacagagcccag

SEQ ID NO: 262995 - DNA, 122 bp, Homo sapiens
cacatgccccgggttgcccagagcttcagaccctgacgaggccgggggccctgagggctccgaggcggtgcaatccgggaccccggaggagccagagccagagctggaagctgaggcctcta

SEQ ID NO: 262996 - DNA, 122 bp, Homo sapiens
cacacaacccatacacttatatacacatacaacccatataccacaaactcacactcaacccgtacacctatatacacacacaacttatacaccacacactcatacacaacccacagaccaca

SEQ ID NO: 262997 - DNA, 122 bp, Homo sapiens
cacttgaccacctatggcaaccggaagcagatgcagagacatgtgcgcgaggcttcagcccgccccttacagggaaccgccccccctgggccacgccctggagtggacgctggagaatgtgc

SEQ ID NO: 262998 - DNA, 122 bp, Homo sapiens
tctgttgagtaatttttgtctgacagatattggtttaatgctgaaaaaaacagcagccttcgtctttgccttcatggagagtgccatccatgggtgatcacaggaaagcacagtgtgttaag

SEQ ID NO: 262999 - DNA, 122 bp, Homo sapiens
atgcgtgtgtcctggctcgtggtgtgtgtgtaggttgtgtgctgggtgcatcctgtcatgcgtgtgtcctggctcgtggcccgtgtgtaggtcgtgtgctgggtgcatcctgtcatgcgtgt

SEQ ID NO: 263000 - DNA, 122 bp, Homo sapiens
ttctcctagggttatcatgaaggatttaacagtgtgaacatttccattttctaaggtgaccgtgcctttattttgatggctctgaattgtattttccattcagttgcagcaccagccctccc

SEQ ID NO: 263001 - DNA, 122 bp, Homo sapiens
cagcagctgcaggagagcctgctgcgggatgaggggacgtcccaggaggagatggagagccgctttgagctggagaagtcagagagcctgctggtgaccccctcaggtacagggtcacaggc

SEQ ID NO: 263002 - DNA, 122 bp, Homo sapiens
tagcgccgcggcgggggctgggcacgcccctagcgcatagctggcttctgattggctttccggtgctcgcccgagcagggttggggcgagtggaccgcgcctctaaaggcgcttgccagtgc

SEQ ID NO: 263003 - DNA, 122 bp, Homo sapiens
gtaaaagcaaaagcaatttccaaaaacatgcaagaatgaaggacagataacattgctgcccggtcactacaggggcaaaaccttttgtaattaagcatccgtgtccttacggaagttagagg

SEQ ID NO: 263004 - DNA, 122 bp, Homo sapiens
gtttatttgaggaaagagaaaaagaaaagaacctataggaagagttggtttggattctatcgcgggcagtttatgcttctacgatagtaataaaagcaatgagagaaaaaagctacagaacc

SEQ ID NO: 263005 - DNA, 122 bp, Homo sapiens
acctgcaaagactaaatcaatgagaacctctgagctgagtttccctcgggagatgccaaacgcgtaagactctcccaagatcccagaactaatctgtccccaccctgcaaggaaaaggtgaa

SEQ ID NO: 263006 - DNA, 122 bp, Homo sapiens
cgccggcgagtgggacccgggcgtcgaacccgggcgggctcctcgaccatcactgccgggcgtgtgtcaccctcccggccaagacggccagcacccgctgcccgacggccgctgcccagagc

SEQ ID NO: 263007 - DNA, 122 bp, Homo sapiens
gggaccagctgggctgctgtgatttcactttcgcagaaaatgaaactgaagccgtggtcacgtgacaggacatgtagtatatagcaggctgccagcgactcctgctcttgcttctggatctg

SEQ ID NO: 263008 - DNA, 122 bp, Homo sapiens
ctcacaccacaaaacattctagaaggtttccaaagaattaagctgtgtttcgaaaagagccgacaatctccctcacccatatttgtaatttaaataacgtaagcttgaagagcgtctccctc

SEQ ID NO: 263009 - DNA, 122 bp, Homo sapiens
cgcacaaaatcccagcctcaagggcagaacattttaaatgacccacccatcctagagatgcgccagttaggtcatcttatatatcttgagatagctgagatggtcagatcaaccaaggacct

SEQ ID NO: 263010 - DNA, 122 bp, Homo sapiens
tttgctcagaattctgataatggaatgggagcttcacaaagctaagtgcttccagcagggcgagtgaacagttgtaaaaactgtttatagaaattcctgtgtttgaagatgaaagtttctta

SEQ ID NO: 263011 - DNA, 122 bp, Homo sapiens
ccttcctgcaggggactccaccggagccttgccaattccgtttgtttccctgttgtcgcccgcttcaccctggatcatgttcaagaagtttgatgaaaaggaaagtgtgtccaactgcatcc

SEQ ID NO: 263012 - DNA, 122 bp, Homo sapiens
gacgttcattgttccagccatcaagccttttgaccactatgatttctccagggccaaaatcgcctgcaatctggcctggctggtggccaaagcctttgggacaggttagtggtgtcaccctt

SEQ ID NO: 263013 - DNA, 122 bp, Homo sapiens
ctggtcaaaagcaggaaagtgggggtctgggaagaagacaaaaacaaacgccacataaaacgtcatggagcaaactaatcaagaactttagcaagaaacggagagaaagtcttaaggaggac

SEQ ID NO: 263014 - DNA, 122 bp, Homo sapiens
cactgcacagcgatgcggggaccaggcccggtcccttcagcccggggcttcggcccccggcgttgtctgaccctcgtgctcagctgttcctgcttcttcaggttcccaaggcatccccagcc

SEQ ID NO: 263015 - DNA, 122 bp, Homo sapiens
gcctcgtctttgaatgaaagttaaacattaaaatctgaccctagagttgtctaaagatcgcggaattttgaagctccggcagagcggactaaaaaacggtgctatgagagatggtgagaata

SEQ ID NO: 263016 - DNA, 122 bp, Homo sapiens
caggcagaaaatgtagcacaagtttttggttgaaagagcacctctgtgcccattgaagggcgttgatccgaaaagacagaaaggacaagtaaaatcgatttgaagcgaccctctctgtccct

SEQ ID NO: 263017 - DNA, 122 bp, Homo sapiens
gggctgagcagacttctagagtttgagagaaagccttgaggcagaaatgcagagacggaccggaaggccttctaagtaagatgctggccacatgcatggaactgtccattcatctgcattaa

SEQ ID NO: 263018 - DNA, 122 bp, Homo sapiens
actttttaattcattcatgcaaaaaaaagaaaaaagaagtaatgtgctaatataagggcacgtagtgtgtggctctccaatggagctataaagtaaagaggtctctaatttgaggtctctat

SEQ ID NO: 263019 - DNA, 122 bp, Homo sapiens
aagggacaacagaaagcagtgctgacattacaggtagcaggatgactgccaagacagaaacgcatttcatatgtgtttgaggaacaagcagcaaggtgaccagcatggggagagtggagaat

SEQ ID NO: 263020 - DNA, 122 bp, Homo sapiens
ggaaacagcggttcaagacctgcccagagctgggtggggtctctcctgaatccctctcaccgtctctgactttccgttctaagcactttgaggatgagtttctagcttcaatagaccaagga

SEQ ID NO: 263021 - DNA, 122 bp, Homo sapiens
cctctggctccctcccacaatacgtgggaattctgggagatacaattcaagttgagatttcggtggggacacatctaaaccatatcacaccggtaacatggttatttattatcattatcaag

SEQ ID NO: 263022 - DNA, 122 bp, Homo sapiens
ctcctggttggggtgctgtgctcagggctgcggggctttcaggtgtccactagggggccgcgtgagcgctggctccctctgccttctaaaagatattttttggccaggctgggtggctcacg

SEQ ID NO: 263023 - DNA, 122 bp, Homo sapiens
aaatgggaacaacatgttgagacgctgcagcaacagcaggcgcttcccaccagctacagtcggagatttggagcgcttgtgtctgaggctcaatcccgtcaggtgccgcgcaactcagcggc

SEQ ID NO: 263024 - DNA, 122 bp, Homo sapiens
ccacgacggcggggacatgaaggcgcaaaaaccctccgcggcaggagcaaaaacccgtggcggcgggggcaaaaagcggctggggtgataaaaagccgcggcggtgggggcaggaagccgcg

SEQ ID NO: 263025 - DNA, 122 bp, Homo sapiens
tcgccaggtgccttcccaggttgaagggttcggaacgtgtcagattgagcagggagacaacggagttgagacaggacaaaattaaaacccacgtgcgcacactcactacggtggggtcggat

SEQ ID NO: 263026 - DNA, 122 bp, Homo sapiens
caggaaaacccgatgcacagcttgagcagcttagtgtggccctgctgggcaaagaccgtgcgtcctggtgaacccagggttccccaggctgactggaccaagtcccttttgtgggttttaag

SEQ ID NO: 263027 - DNA, 122 bp, Homo sapiens
gctgtcccgcctcctgcttgaacagtttaccgcgttcacagctctcaccagcgcgtctgccgcgccgctggcgtgatagccccaccgaatgcagtttcccagtcccatcctggtctcgtgca

SEQ ID NO: 263028 - DNA, 122 bp, Homo sapiens
cggcgggatcgaacggctggtctcccgacccaacacctccagctctcgctgctatcaatgcggcagagagcactttctctacaggactccagaaaaagcatataacttcctgcctcgcgctt

SEQ ID NO: 263029 - DNA, 122 bp, Homo sapiens
tcccggcacctctgccaaggctgggtaagactcctctatgttgcctgctgtccaggagcccgggagggaggggtgtgcaggagccgcagggccgtgtgggacgagtggaggccgcggcctgg

SEQ ID NO: 263030 - DNA, 122 bp, Homo sapiens
agtttccccgagataaggcctggggcaaagaccgcggcctggagacctcaggccaaaaggcgggtctcccagaagacggggaaacccaccaccccacgctgagtttttacgcgcgcattttg

SEQ ID NO: 263031 - DNA, 122 bp, Homo sapiens
acagccccgaagcgcggccgggtcccctcatgcatatgcagcagattgtgatccttactccgtgagcgctgggcgggccgggttgtgttcatgttggtgaacccgcttcgttcttgcccgcg

SEQ ID NO: 263032 - DNA, 122 bp, Homo sapiens
actttacaattttatacattttcaacctggaacctccaccttgtctctttacagcctacccgacccattgacctgtgagccctgtcctggcgcccccaggcgtgagggttctaaggcgggtc

SEQ ID NO: 263033 - DNA, 122 bp, Homo sapiens
ttaataattactaatgatgtgtctgttcgtttaggaacttctaagaggctccatgcacaccgtctgcagctctgggtggaggaactatgctcagggcatcttgggccttaccttcccctccc

SEQ ID NO: 263034 - DNA, 122 bp, Homo sapiens
tcggtccagcccagttgccggaagccggagatccggggggcggaacctctccgcctcctccgggaagagccccgcctccttaaagagacagcagctcccagagaaacctgcgtgctgcggcg

SEQ ID NO: 263035 - DNA, 122 bp, Homo sapiens
gtcgggcctgcgggttaggtctaccggcggaggaggcagggttcgcccaaaggcccatcccgctggcagtcgctggccgacggcgtgcgcgaggccggtttggggagttattttctctttct

SEQ ID NO: 263036 - DNA, 122 bp, Homo sapiens
agcgggagcgcagctgcgcgggcaaccgccgggtttgtggccggttggcgggctcagtgccgcctcagtgggctctagcagtagaaaagtaaagcgactaccctaagatacccagagcgaga

SEQ ID NO: 263037 - DNA, 122 bp, Homo sapiens
agacacaggctccttcttggagcctatgggcttcagatgtctttgccccatttgtcacctcgcacacttatagcgtttcctcctcgaaattctaccaagactggtcaaatgttgctgagggg

SEQ ID NO: 263038 - DNA, 122 bp, Homo sapiens
gatgaaggattcctgcatcactgtgatggccatggcgctgctgtctgggttctttttcttcggtaggcaagggaggaggcaggggaagggacatgtgtctgtgaccagagaaactgcagggc

SEQ ID NO: 263039 - DNA, 122 bp, Homo sapiens
aaagaagaaagaaaaagtatcccagtcggtcagagaagcctgccagtggcagcggaccagcgaactctgttgggaagaaaggccaacttcgagcagttcctcgcgattttttcctcctttat

SEQ ID NO: 263040 - DNA, 122 bp, Homo sapiens
gctgcgcccggatgcatacttgtggtccccagcacgtgcagggtcaaactgtaacttgcccggccttcaggaatcttcatgttcccttccctgcatgtatctaccttcctgcagtttggtag

SEQ ID NO: 263041 - DNA, 122 bp, Homo sapiens
aatgcttttttctcctcttgcaatgttttttatgacctagtcttggaagtcacaccttgtcgcttctaccgtagtctattcattagaaacaagtcattaggccaggtgtggtggctcatgcc

SEQ ID NO: 263042 - DNA, 122 bp, Homo sapiens
tcctagaagagagggagggttggcagggcccacagctggctgacttggccgcatccccaacgctggggtcctggtcagagcgggcggtggatggggcgtatgtgtgtgtgtgtgtgtgtgtg

SEQ ID NO: 263043 - DNA, 122 bp, Homo sapiens
ccgttgagaatccactttgcctgagcttcttccctttaagcctcataaaccaccctgaagcggacactatgatcattatccccattttacagaagaggaaactgagggacgaccaaagaaac

SEQ ID NO: 263044 - DNA, 122 bp, Homo sapiens
ttatacggagaggaaactgagatccagagagggagagggaggtgccccaggtcacacacccggcagggactggggagcagggcagacttcagtaaggaccatccagcccaagcccagaaggg

SEQ ID NO: 263045 - DNA, 122 bp, Homo sapiens
ccaagggctttcatgtgttctctgcatctgagggagcccaatggctgtgagataccataacgattgagggttttccatatcactccgtcacaaactcatccaatcagatcctgttttgcagt

SEQ ID NO: 263046 - DNA, 122 bp, Homo sapiens
gatggtccacccccaggggcctcaccctctcctgtgagcggggctcggagtagatgcacacgaggggacaccagccccggctcgggccaaatggagggaggctctccagtcgccctcacgtc

SEQ ID NO: 263047 - DNA, 122 bp, Homo sapiens
tcccagccctcctcctctggtccccgccggtgtcagctttctgcctcccgctgcaggctccggttcgccagcctggtgcccatgcaactcagaaacttcctcattgaaggcttccgaggagg

SEQ ID NO: 263048 - DNA, 122 bp, Homo sapiens
ggcgctcaggctgctggaagagtcctagaccttcacccgtggtcccttgggcccgtttcacgcccacgttctgacatgtcctgtggtattctgtacctctgccttctaccctgtgtcccacg

SEQ ID NO: 263049 - DNA, 122 bp, Homo sapiens
tgtggttccaacagcaatcggtatgaaagactgaaggccacacaggtgtccaagggcatccgggacaacgagcggagtggccgggcccgagtgcacgtgtctgaggagggcactgagcccga

SEQ ID NO: 263050 - DNA, 122 bp, Homo sapiens
attctcgttttctaggtatatgtaccaagacattaggtagtttggcaagattttataactcgtagatggccgtgctgggattcaaacctacagtttgctttgcatgatcaatcattctctgt

SEQ ID NO: 263051 - DNA, 122 bp, Homo sapiens
cgcggtcaacttccggcgcggagtttgtcacgtgcccggatataggaagtgttgggggaacggccgcttcccgttcaacgctttattgaggggcgtatcctagtggcccccatccggtctcc

SEQ ID NO: 263052 - DNA, 122 bp, Homo sapiens
tgttgtgcaactcgctcctgagtgagtcgggggccgaaagggtgctgcggctgggaagcccgggcgccggggacctgcgcgcgctgcccggcctggccggagcctgtagcccgggggcgcca

SEQ ID NO: 263053 - DNA, 122 bp, Homo sapiens
cttatgtaaaggttaaatggtgtttacaagtggatagataaggcggagatggtgagaagccgggttttctctatgctaaatgtgtctactaagagcagcacttcctactagctaagcacaat

SEQ ID NO: 263054 - DNA, 122 bp, Homo sapiens
tcaactgggggcgggaggctgtcttctccctggtgccttcccagccaccttctggcctggcgatccctaagctctgaatgagggattctgagggctaaggtcagagtctatagaccgggtcc

SEQ ID NO: 263055 - DNA, 122 bp, Homo sapiens
ctgctttccctgagagcagcactcccttatccctggaacgccgcgccctgcgtggttccccgccctccccacgcgcgggggcgccctgacagtcccctgctgctcctctgctgggcgccaca

SEQ ID NO: 263056 - DNA, 122 bp, Homo sapiens
ttcaataaaggcagagactggaatagctttgtaatttcttctgagtcagctctgaacacacgtcctgatggcagcaggatgatgttacgatcacaagagggcagtgcctccctctcctcaga

SEQ ID NO: 263057 - DNA, 122 bp, Homo sapiens
gggccgtgcccgcatcttcctaaggcactggttccggccctggggagactggaattgagacgacagggcctccgctgaccagtccttggacacaacgcggagcggggctgaggggccgccct

SEQ ID NO: 263058 - DNA, 122 bp, Homo sapiens
cacctgttctccacaggagaatgaatctacacatccctctcggacctgcctgggagatcgcggggccccatccctgccacacagggcctgcggctgccacggggaaaagaggccgaggcccg

SEQ ID NO: 263059 - DNA, 122 bp, Homo sapiens
cgttgggtgggggaggagcttctgggtgatgtaaggccgggaatgggagtggcctctcctcgactcgctgctaggaagggggcgggactctcggtgaccagacgccggggagggggcaggcg

SEQ ID NO: 263060 - DNA, 122 bp, Homo sapiens
tgaaatcaatgcacaggaattgtggggggaagccctaaggagtccagccgcgattttcagcgcgattttcagggcagctacatttcacttcaaaactcccagtaagtctgccactaagaccc

SEQ ID NO: 263061 - DNA, 122 bp, Homo sapiens
ctccgtgggtccccaagaaaggcagccctgctgggggcagtgaagcccttatccaggtcacgtgagtcttggaaggggaaggctgctgtgcttaacgattcaaaaacacaaatcaaacctcc

SEQ ID NO: 263062 - DNA, 122 bp, Homo sapiens
attcttttcatcccgaattagaatttccaacactgcacacttaactagcctggcagccaacgtggaaaactccccaaggcctttgaagcagctcctctgctccatggcttactcacagcagg

SEQ ID NO: 263063 - DNA, 122 bp, Homo sapiens
gaaatagcatgtacatttcggatggtgattagtgtttttgtttttttccccgaacgctcacgttaatggcgctccttcctgaaagcaaattggaaagacttcagtttgacggagccttgtcg

SEQ ID NO: 263064 - DNA, 122 bp, Homo sapiens
tcaaacacccgccgtcctgctgctccgcgctgccgaatctgctcctctctcctctggccccgcgtccctcagaaggagctgaggtcagaaggaggtgtctccaggaaacactaggggacctt

SEQ ID NO: 263065 - DNA, 122 bp, Homo sapiens
aaatgccccacaggcccgcttggaaatgctgggcgcccaggtgagggctgaggggcaatgcggtgtgtgggaggacattctgctctctagtcatcaggaccataatgcaggagctgagaaag

SEQ ID NO: 263066 - DNA, 122 bp, Homo sapiens
caagaaaaagaaaaatgctcaggcctaatcaatttcactagtaaattctaccaaaaatttcggatagaattaattccaattccgacccattctataaggtccatattcacctaataccaaag

SEQ ID NO: 263067 - DNA, 122 bp, Homo sapiens
gaggaggcctgcggcatggtgctgagatggagcgcacacgctggttcagcagagaagatgcgggagccagctccagcccggacgggagggggttggggtcagcatcatggatgtctgtcgag

SEQ ID NO: 263068 - DNA, 122 bp, Homo sapiens
taaggctttgtactctgagttctccttggcaaattattttttgcagcagttctttttcgccgtcatggtatagttcttggtatcatcttattaggtggcctgttgtcgtccctttttgtgtt

SEQ ID NO: 263069 - DNA, 122 bp, Homo sapiens
atgcaaacaactcagcaatcacctctccactgtttggttcaactgccagggaagtttgggcgtttttgtcagccagcagcacagtgtgtgtgtgtgtgtgtgtgtgtgtgtgtgtgtgtgtg

SEQ ID NO: 263070 - DNA, 122 bp, Homo sapiens
atcccgatggtcttttttttggatgctaacatgtacaacgctctctgtaagaccctgcagcgtggctgtttggtgctgcagatctttgagataatggactatagcctcttgatgtcaatcca

SEQ ID NO: 263071 - DNA, 122 bp, Homo sapiens
tcccggagcccagctctcacctggaccaggcccacagctctgggctgagggtcaagccggcgtcatcacaggagactctctggccgcgggagcagcagcggggccggggcctccccttgagg

SEQ ID NO: 263072 - DNA, 122 bp, Homo sapiens
gcatttggcagagacaagcctgcaccacacaccctatgacaaggcagatggaaaaacaggcgggaatgaaatggatctgaaaagcctgtgtggaaaaccccctggcctctactccgggctgt

SEQ ID NO: 263073 - DNA, 122 bp, Homo sapiens
aagatgcagtcagatttctcttgagcttggtgatatcctttataataacctttagagatccgttctattaatgaggcatgatattgttactccaattgtgcacacaagctgggggacctccc

SEQ ID NO: 263074 - DNA, 122 bp, Homo sapiens
gagagacagggaggaggttaacaaagatgaaggagggaaacagcagcacacacctcacaacggggtttccgtggtacaggatgtaaatgccagcctccttattggaaaagatttgattgttc

SEQ ID NO: 263075 - DNA, 122 bp, Homo sapiens
tttcccacagtggggaccaaatctcatttgaggaccaaaaggggccagggccagagaagacgacttctccatgtgactacccacagctcctgcagaaaacagggagtgacctttgaccctta

SEQ ID NO: 263076 - DNA, 122 bp, Homo sapiens
tcaccctggagccccacctgccacctggtcttggcttagcatctttgtcttgggacagcacgtcccacgtcctgagctatgaacaggaaggaaccctgaatctcaggatgagattgttaact

SEQ ID NO: 263077 - DNA, 122 bp, Homo sapiens
cagcgagagatgacgccactgtcacctttccaatccctcactcaacaggccaaaatctagcgcagctgctccagtcaattctgtgtttcacggctgtcacatgagcaatacactaacttctt

SEQ ID NO: 263078 - DNA, 122 bp, Homo sapiens
tccaaacggagctctttgttcttcttctctcccacttaaccgctctggggtggtcagtctcggtgaagggagccagcatccacacagttgcttggtctagaaacctggagtcctgcttgcct

SEQ ID NO: 263079 - DNA, 122 bp, Homo sapiens
gagaagaaggtcattaacactaaggaagccaaaggagtctggagaatcaggtagggtatccgtgtggctttggaacactctcaggatgacagcacaacttagactacaggaggcaatggaaa

SEQ ID NO: 263080 - DNA, 122 bp, Homo sapiens
tcaaacaaacaaacatgtttaacaagagactgggagtctcacctgccacagctccttctacgcacacacgagtcggaattctgccctaatgacccgcctggcatccctgaacaatccgggaa

SEQ ID NO: 263081 - DNA, 122 bp, Homo sapiens
aacctgtttgtcaacctggagtcagcgcaaaggccccaggtcgggtcgtacagatggaaccgggtcgtacagatggaaccggagacagagaggaggcgtggcgggcgagccagccaaggcca

SEQ ID NO: 263082 - DNA, 122 bp, Homo sapiens
taggtagaagctatctttgacaggcaagggacatatgtaggctctagctaattgcactgccgatgctgctccagcaaggctttgcttggatttttctggcatggagttgagatagggctaac

SEQ ID NO: 263083 - DNA, 122 bp, Homo sapiens
ccttggtttttcctttggcatctgaaaaaggcacaacctgaaagacctagaacccagtgtcggtccccaggccctttgggacaggaagagaagagccgtgtggccgcggggaggatgtcctg

SEQ ID NO: 263084 - DNA, 122 bp, Homo sapiens
gcagtgtgtccaatgcccaccctttttcttgcaggtgctccgaaccctgggttatgtggacgaggcgggcactgtgaagctggcagggcgggtggcttgtgccatgagcagccatgagttgc

SEQ ID NO: 263085 - DNA, 122 bp, Homo sapiens
ccgcccgccggccgttgccccctcagcccccggaggcagggtcctgcgaccagcaccccgcgggtcagttgccttcgtgccacctgggctccaagtcctcgccctgccggatgaagcaatgg

SEQ ID NO: 263086 - DNA, 122 bp, Homo sapiens
ggggctgttcatgcgggtccgcgaccgcctcaatattacggtggaccacctggagttcgccgaggacgacctcagccactacaccaggctgctgcggaccatgccgcgcaaaggccgaggtg

SEQ ID NO: 263087 - DNA, 122 bp, Homo sapiens
ttcctttctcagcctgttttctgatagccctgcatccagcccacacagggatgcagtgtccgccctctagcccacatttctttttccccctctcagatctttgatctctggattatttacag

SEQ ID NO: 263088 - DNA, 122 bp, Homo sapiens
gacactcgggagaggcaggtgtcaagggtgccgtggagacgcccttcccactgggacccccgctctgggccctttccctgggcagctgtgagtcggccttggcctcacacaggaaaatggga

SEQ ID NO: 263089 - DNA, 122 bp, Homo sapiens
tgcctgttacatcccactccgttgggtgatccttgacagcagcccaactgcgccacgcctcggtctcctcatctgcagcaccaagggtttggacaggacgctggccctgctcgccatggtgg

SEQ ID NO: 263090 - DNA, 122 bp, Homo sapiens
ttcagtgcttctcaatgttttaatgactcacgggggcgtctgtgaactgtctgtagaagacgacctttcaaactaatccccccacgggagccctacctagctcacggctgcaggcttcatgt

SEQ ID NO: 263091 - DNA, 122 bp, Homo sapiens
gtgtgtcaccgcaaaaggacctcaaggttgtgtggcagcactcaccacctccccctgctccgcggacttgtacactccagacaccatctcgttatggagaagcaaaaacaacgcctcatccg

SEQ ID NO: 263092 - DNA, 122 bp, Homo sapiens
caggcccacgttgccatgggccctgtaacctgcgatgcttgacttcacgcctccgaggcgcgtctctactgtgaagacagcaactgcaaggctcgcgtaggacagtctgtgtatgagcggag

SEQ ID NO: 263093 - DNA, 122 bp, Homo sapiens
gtttgtttttccccagcctcacccccatggtgcctaatacaccacatcgtgcacagcaggcgcttggagcacgcctgtaaactgaaggctgcttgggatgcccatcacgttcccttatgcca

SEQ ID NO: 263094 - DNA, 122 bp, Homo sapiens
gattaagcagcgtcatatatttccaccttgcaccatttgccaagattttgggtttcacctcgtcttttccttcctgtgagatgtaataattgaggaaagtataccagctcagaacaaggaag

SEQ ID NO: 263095 - DNA, 122 bp, Homo sapiens
aggcatggataacaaaataagtacatttttcttaaattagtagttcctcaacttcaggaccgccaatcccctttgtcagatgttacaggtctggagtccctatagcccccttttcactttcc

SEQ ID NO: 263096 - DNA, 122 bp, Homo sapiens
ttttttacgccggtctgaaaagcgcaatatttgggtgggagtgatccgattttccaggtgcgtccgtcacccctttctttgactcggaaagggaactccctgaccccttgcgcttcccaggt

SEQ ID NO: 263097 - DNA, 122 bp, Homo sapiens
gcgctgtgacctagaatgggcgcatgcgccgagcggaactggctggtttgaaaaccatggcgtgggtaccagcggagtccgcagtggaagagttgatgcctcggctattgccggtagagcct

SEQ ID NO: 263098 - DNA, 122 bp, Homo sapiens
ccccataccatatatgataatgctgaaaaagtttgaagtattgccagaattaccaaaatgcgccacagagacaggaagtaagcacatgctgttggaaacaaatggcagcagtagacttactg

SEQ ID NO: 263099 - DNA, 122 bp, Homo sapiens
ggagcgccgtgtagctgtacctgcgaaggcacaggattccgcgggaagatcccgcagtttcgggccgtcgtcattgtttttatacctgtggcaaatggcatgaccagacacacggttatgtc

SEQ ID NO: 263100 - DNA, 122 bp, Homo sapiens
aactctgagcgagcatccatttagccttagactctgttacaggaaacagaccgcgaaagacgcatgttcctgctattagttcctatcattgctgtaatagattaccacaaacctggtgtctt

SEQ ID NO: 263101 - DNA, 122 bp, Homo sapiens
agacgggccaggcctgatgtcactgtcgcatgtgctcctgggctcacacggtggctgccccgatgggcttcaagcctcctgtgtcctggaggaggtgcagcaccaatgccctggccaaattg

SEQ ID NO: 263102 - DNA, 122 bp, Homo sapiens
gacagactgtggagccgacagactgaaggacagcggcaccgccagacggccagaaagttccgccatgagctggggcacggagctgtgggtgagtcggggagaggggcgccccgcacggaccc

SEQ ID NO: 263103 - DNA, 122 bp, Homo sapiens
gatggatggacggacgaacggagaggcaggcaggtcgaaccatactgcggatgagacggacggacggacagacaggcaggccacaccatgctgcggatgagatggatggatggacagacgga

SEQ ID NO: 263104 - DNA, 122 bp, Homo sapiens
agtggcccgaggactgtgatctcacagtttaccgtttttgcagagagcctcttttattttcgtgtcagattatctgtaaaatggacttctccctccagtgttgtaaaccataacaattctgg

SEQ ID NO: 263105 - DNA, 122 bp, Homo sapiens
cagtccccgttgggcctaaactccgcaagggatgggatataatatcagtgcatgtccaaccgccccgctccactcccgcttcctgtaatggccataactagtttttaaggtttccttcggca

SEQ ID NO: 263106 - DNA, 122 bp, Homo sapiens
ctcaagcaattctcccacctcagcctcccaaactgctgggattacaggtgcaagccaccacgcctggcatatttgatttttaaatactacaagtatttgggtaaaaattaaatttaaaaagt

SEQ ID NO: 263107 - DNA, 122 bp, Homo sapiens
taacccggcaaaacgaaaaatgaaacaggcccccaatctgcgcctgtgaagaccaagccgcgggctgagattttcgtcctgccccctccctgccgcccagcgcctagctcctctgcctggcc

SEQ ID NO: 263108 - DNA, 122 bp, Homo sapiens
gccgtaatatttggtgagctgtgagatgaggtggcaagatttgcaactggcattcccttccggccctgccctgtgattcaggtcagtggtgtgacaaagtgaggccacccctcctccccact

SEQ ID NO: 263109 - DNA, 122 bp, Homo sapiens
cagcgcccagagctcaaggggcgcccagtgaacggtggttgactcggaatctcagagcctcggcttcctcttccggcaagtgggggggaggggggaagggcaccaccggctctgcactgggc

SEQ ID NO: 263110 - DNA, 122 bp, Homo sapiens
ccatgttcttcgctatgctgttcctcctggtgtctctgtacatacacatgttcctcctggcgcggactcacgtcaagcggatcgcggctctgcccggggccagctctgcgcggcagaggacc

SEQ ID NO: 263111 - DNA, 122 bp, Homo sapiens
ggagacgctccgggcccaggaacgggggacctcgggtgccccactacctcactcctagaacgcccaccgctcacgaagccttcctgagctctacccgaaggtgctgacagcctggagctgag

SEQ ID NO: 263112 - DNA, 122 bp, Homo sapiens
ggaaaatgcagcccctccctggtaatcagagaaaggcaaattctgaccacagggagaaggcgccacttttgacctctggaattagcaaagacaaaaatgagtgacagggcctggtgtggtgt

SEQ ID NO: 263113 - DNA, 122 bp, Homo sapiens
cccaggttccagccttcggctgcctggctggaggacacacagcagaagaaacaatagggccgtggcggccgccgtacctctcccggtcgcggccgtcgaagtagacgaaatcgccgctctga

SEQ ID NO: 263114 - DNA, 122 bp, Homo sapiens
aaagttacgggttgcaagcttgagtgtctaagaaccgcctggcgagcttcttaagcagatcgccaggttccatcttcgcagactctggttcagcaggtagcaggttagcccgagaatctgca

SEQ ID NO: 263115 - DNA, 122 bp, Homo sapiens
ggaggcgcagcagaggagctgcggtcacgccctagcatgagccctggagtgcttagcctgcgaggctgggatggatggtcacagtgtgggacttcctttccctcctccctcattgtatcccc

SEQ ID NO: 263116 - DNA, 122 bp, Homo sapiens
ccggctcatttgcatggtccgaggggggcggggctgacgtcgcgctgggaatgccctggccgagacactgaggcagggtagagagcgcttgcgggcgccgggcggagctgctgcggatcagg

SEQ ID NO: 263117 - DNA, 122 bp, Homo sapiens
tagtttgttccctctttaaagaaaaatccttactttctggaaggacttggtacacgtggccgctacaggaaatgtatcctgatggataaggcaggcagaaggaatcaaggaactgaattcaa

SEQ ID NO: 263118 - DNA, 122 bp, Homo sapiens
tggaaatgaaacctccacgcataattccagagcagtatctgcttgggaggcaaatgaactcggccacaccacatactgtgaagggggttgaggcttgaaatgagggccaatccccggtaaag

SEQ ID NO: 263119 - DNA, 122 bp, Homo sapiens
tggtagctgagagcgaaaggtgtggcgggatccgcctggctgctgctggagccccaggctcgtgaatcgcctctgcgtcccgtcccctgcgttgggcagcttcacctgctcatcctgctcgg

SEQ ID NO: 263120 - DNA, 122 bp, Homo sapiens
tttagtttagttttccaaatatggatggaaaaagctttatatttaaaaaaaaatagtctgcgtttaggggatccaatcaaaaatgtcacaacctggaatttgaagggtggtcagtatttacg

SEQ ID NO: 263121 - DNA, 122 bp, Homo sapiens
agctttgggaggaattccttaccctcagcttttgacccagtggttgaaggaggtactatgcgggctttcaaacttccccaaataacccaggcagagaggctgggtgcgcgaacccaacccaa

SEQ ID NO: 263122 - DNA, 122 bp, Homo sapiens
gggttgcagggagccgagatcacgtcactgcactctaccctgggtgacagagcgagatgccgtgtcaaaaaaaataaattaaatcaaataaaaaatttaaaaatgtatatatataaaataaa

SEQ ID NO: 263123 - DNA, 122 bp, Homo sapiens
tcctaccgcattcaaatgatttctagaaatgtttttgttgtaaccttgatcaatttcagtcgataaagcagcagatactaagggaacaattccacgctccccacccctgactctgcaacaca

SEQ ID NO: 263124 - DNA, 122 bp, Homo sapiens
ttccataaccatttttcccaccaaaccagtcaccccctcaccctctttaaattagctaatcggaattagtttagcttgtgtggtctaacctagccaatagatgaatgacacagcagcaggag

SEQ ID NO: 263125 - DNA, 122 bp, Homo sapiens
tgccgtatacatggaatcacacagcatctgtgaccttccgggcctggctgctttcactcccgcagtcctgttgtgatttgttggtgctggcatgtctgttcgtgacgtcaggagttcgtgcc

SEQ ID NO: 263126 - DNA, 122 bp, Homo sapiens
tgcctcactggcctgcccgttccaggtgaacctagtgtcctgcgatgggaggtgcccatccgccagcatctacaactacaacatcaacacctatgcccgattctgcaagtgctgccgtgagg

SEQ ID NO: 263127 - DNA, 122 bp, Homo sapiens
gcgataaagggattgggtggtggtggtggaggggtggagccaacgattacgcacgttgtgcgtgctgtcgtatagctgtgggaggggccatattaccgcgtaggctaaccagtgcgcttaat

SEQ ID NO: 263128 - DNA, 122 bp, Homo sapiens
ggtcgcctccttggggcagaggagcgctcgggcggtcctgggatgcggacctcttaacgccgccagtcggctgtggcggactccaggaaggccgggcctggtgcacccctcggggccctccc

SEQ ID NO: 263129 - DNA, 122 bp, Homo sapiens
ttctgtgcgcagaggccctcagctgtgggttctcattcgcgtgttcctaggtcacagtgacgtggacaaattgcccattccagaatacaatgggattgagaaataattgggtccccccaacc

SEQ ID NO: 263130 - DNA, 122 bp, Homo sapiens
gaagggcatgcagtcaggcccaagggggctgagggtgaagccctccaggtcccagggaaacggaccctgaaaggggctgcaggcagaacggccctggggtctcagcaaccacaggcagcagg

SEQ ID NO: 263131 - DNA, 122 bp, Homo sapiens
actggagcacacgtgtcatctcagagagagtgcagctgcaccgaggtgatgccctgggcccgggaggtggaatggctcttgcactttggcaggggtgggagagtcctgaaagctctggtttt

SEQ ID NO: 263132 - DNA, 122 bp, Homo sapiens
cctactggacgccccacgcagggtaaaccccgccctccgggcaccgcccagagcaaaccgcgttcgtcgcaggcctcgcccacaggacgcctcacgcagcataaaccccgcccactgggccc

SEQ ID NO: 263133 - DNA, 122 bp, Homo sapiens
tttctcaagaaggtctcaagaagacagacgtgtaaacaaatcattgtaatgggtgtgctgcgtgctttatttgctgtatgctgtacataagtacagcagaggctcaaagcaaggactgggaa

SEQ ID NO: 263134 - DNA, 122 bp, Homo sapiens
tttcctttcactgtagtcatactccgtgtgtggatggaccacagctgtgtatccattcagcggagtcgtaccccgtgtgtggatggaccacagctgtgtatccattcagcggagtcgtaccc

SEQ ID NO: 263135 - DNA, 122 bp, Homo sapiens
tgcgtttacacctctgctgaagcggctttttctccggtgctcagagtaacctgacggctccggccccctccagggccgctgtccttggaagccctggcccgggttttccttcgttcctcacg

SEQ ID NO: 263136 - DNA, 122 bp, Homo sapiens
cagtttgggaaatggcggtgctcggggacgtcgatactgacccagggcgggaggcagctgcgagtggattgtcgggccttttcagaccggggtctgaacctctgggccggggcggggctcgg

SEQ ID NO: 263137 - DNA, 122 bp, Homo sapiens
ttacagtccttccccaaaactcaattgcctttgtaaagctaatgagagaccaccagacaacggggatagatgagcctgaattctgttaagtgtagacataagtgattgccagccattattcc

SEQ ID NO: 263138 - DNA, 122 bp, Homo sapiens
ctggccaagcgcaggaggatcgagatcgacaccttcatcaaggtgcgtgcggcgaggcggcgcgggggcggctctgccagcctctgcctggggcagctggggacttggggacagaagaatcc

SEQ ID NO: 263139 - DNA, 122 bp, Homo sapiens
ataagattgccagtggccagcagaagacgaaagggaatgcctgcctaggagagaagagcacgccttgtgcaaacatcaaagcgctgcttctaagaggggtaatttttatattgctattggca

SEQ ID NO: 263140 - DNA, 122 bp, Homo sapiens
gtcgtgaggtggccttttcgcccggctccccagtgggacgctccgcggaggcagccaaggcggggagtgtcgagctccctcacactctggaccttaccttctggcgtcttcgcccgggaggc

SEQ ID NO: 263141 - DNA, 122 bp, Homo sapiens
tatacaaacacttaaatataatgaagtcaatagataccgtaaggatctaaatccagggaccgcatctagtctgtgtagttagggaatgtcataagcaagtgaagtttctttttatttatttt

SEQ ID NO: 263142 - DNA, 122 bp, Homo sapiens
ggtgggattgcgtgcaggagggtcgtggtctggctgtggcggaggagcataagaaggtaacgcgacctggcgcggcagacagggctcgaagacctcatcttgattaagaaggccacaaattc

SEQ ID NO: 263143 - DNA, 122 bp, Homo sapiens
tccacacagatctagaagtagggcaagggcttgtgttccctgctgtccctgacaaaaggtcgagacactctgcttcgaacccaggagaagggcttcctgacccttagaacagatgacaccaa

SEQ ID NO: 263144 - DNA, 122 bp, Homo sapiens
actcactcccacttagccccagaaattgtggttgccactgtggaacagggaatggcagcccgattcctgtcttaggggcttagacgaaacccagaggcttaaattgaggcgttaagagcgaa

SEQ ID NO: 263145 - DNA, 122 bp, Homo sapiens
gaatcttccacccttatggtgcttctgtctcctggggcagaactttgtatactacaaagacgggtgaggaaagcaaaaggctcactcagcccgtggatctgggtggcagagggctggggcac

SEQ ID NO: 263146 - DNA, 122 bp, Homo sapiens
cgccccggcaggtcgccgtccgccgcctgggccgacaggagtcacctttgagcctgggcgcggacccgttgctgcccgagggtgcctccaggccaccagtgtcgagcaaggagaaggaatcc

SEQ ID NO: 263147 - DNA, 122 bp, Homo sapiens
ggccagcgcagccgctgacatcgcccgtcccgcttgcccctcccctgagcccatggtcctcggcctggcagccagccgcccccggccacctaccggggctcagggccacatagcggggcccc

SEQ ID NO: 263148 - DNA, 122 bp, Homo sapiens
gcaggtgttttgtgaagccgcgccgctatagcggggctgaaacgctgctgaaagtagaagcggaagtagtcgccttcctgggattgtgagagacttttaaacagatgttaaattcactcttg

SEQ ID NO: 263149 - DNA, 122 bp, Homo sapiens
atgttcaccagggaggttttcagatgagcaaaaagcagaacacagggctcgacacatgaacggacccagagggaggtcgcgaagccagttaaggagccagtggggcaaagtgccaaaagaag

SEQ ID NO: 263150 - DNA, 122 bp, Homo sapiens
cactcctacttcccttccagggcttcatgctccaaaattctctctacatacaaaattccccgcctccctccccccccccctttttttttttttttttgagacagagtttaactcttgttgcc

SEQ ID NO: 263151 - DNA, 122 bp, Homo sapiens
agcgcctactgtggtggtggtgggagctatctgattcccattcccaggcctggccatcgacgcgaaggcctccagctgatcggaagtcggcgttggccggcgcggagcccggcgcggaggct

SEQ ID NO: 263152 - DNA, 122 bp, Homo sapiens
gacgcaaggacagctcacaaccagtgtccttgagtagcccctgggggccgcaagagaatccgcccggtagggcatagaagatgggttttcggtgaatcgtgaaaagacatgatcgggtttcc

SEQ ID NO: 263153 - DNA, 122 bp, Homo sapiens
ttgccctgtttgttctggcacgagggctgatgggggtgcctgcggagctccctgtcagcccggcctggagctggttcccagggccttgcaccttgtccgcccagccccgagcacggctccca

SEQ ID NO: 263154 - DNA, 122 bp, Homo sapiens
gtcctctctccagagcctcgagggggagggcactgcttgacctgcccagtccccacccgacgctgtcgcttacctggagcccaattctgcccggccccggggtgagccagccggggctccag

SEQ ID NO: 263155 - DNA, 122 bp, Homo sapiens
cctgcttttttgctccccccagtaagtgaaaatggtgatcacctaagcacatggatgagacgtgagcacagttatggcagagaagtttctccgcaccagaattatccacagcaacttggctg

SEQ ID NO: 263156 - DNA, 122 bp, Homo sapiens
aggggaaaggatggaacaggaaaggaaaggagagtcagagagaggggacaggagtggagacgacagaggaaacggaaaaaagaatgagaaaagtgggggagaaatgtagagaaagaaggaaa

SEQ ID NO: 263157 - DNA, 122 bp, Homo sapiens
gctatccccggccacatgtgggcacctgccaggcatgccctatgctccagcaactgcttgcgtgacctcggaggaagctgaggtgcagcagctaggggcccccaaccccatgtggcccccat

SEQ ID NO: 263158 - DNA, 122 bp, Homo sapiens
gagccctgcccgaggagaggtggctgaggcccagcaagaattcgagcggcattggtgggccggtagtgctgggggacccggtgcaccctccacagctgctggcccaggtgctaaacccctca

SEQ ID NO: 263159 - DNA, 122 bp, Homo sapiens
tcattgaaaggcgtgatcctggagcctgttataatgtgtgcaggccacatctggccatcacgggcaggttcgcatctcacacagaaaacatttctagccagagagctgcatggaagcccacc

SEQ ID NO: 263160 - DNA, 122 bp, Homo sapiens
ccttctttttggggcattcaggttgatttcagcccttgctatttatctcaaataatgttgcgtacaagtcaatttgtttgactttacctgtcattaggcaaatctctgagattctgttcatc

SEQ ID NO: 263161 - DNA, 122 bp, Homo sapiens
acataagatggacagatgaaggtccacacccctgggagaggaaggagccagggcctctcccggctctgcacccacgtaccttggctgaaccacagcggggcaagtgataaggggtgggtgca

SEQ ID NO: 263162 - DNA, 122 bp, Homo sapiens
ctatctccagcttctgtatcgaatccatgcacctcgctgccaattcgtcttccggacgctcgttgtcagtcctctgtgatctctaattaaggctctgctgagtctcctctttatctataggg

SEQ ID NO: 263163 - DNA, 122 bp, Homo sapiens
caatacctcagtccttaattcactcacccagtagacacagcgcacatcagggccagaccacgtgctcctcagagaccagcaagtcccagcctcaggaggacacaccaacaggcagctcagct

SEQ ID NO: 263164 - DNA, 122 bp, Homo sapiens
ggcctcaggttgccgtggcagcgacttgtcgggacctaggggtactgcgggaggggcacgcgagcgcgccccacctttcccctcagccgtctccgtccaccattacggtgcctccacctgca

SEQ ID NO: 263165 - DNA, 122 bp, Homo sapiens
caccgttccatcacagggagcactcacccacacacctgttacaggtagttaggcaatgagcggggcaggagagggctctctcccacccgctaggaatgtcaggtgacatcgttcagcaatta

SEQ ID NO: 263166 - DNA, 122 bp, Homo sapiens
gtgaccccagaaaagcccataagaaaaacaacctatatgagcccagacaagccacagaatcgtgaaaaataggaaattgtgaaaagccaataaatcgacatatgatttgttatgcagcatta

SEQ ID NO: 263167 - DNA, 122 bp, Homo sapiens
gaatgcaggcctagtagctttgtgacatgtgcagctatactatgacatcataaaccccatcgtgagggaacctagctacgggtcagagctagtccactaggtgctaatcaaatgctgtgtta

SEQ ID NO: 263168 - DNA, 122 bp, Homo sapiens
agctttgaatgtcaatgcccacatgtatctagtatgggaatttaaaaaatcttctatttccggagttgtcaataactcattttgtaaccttgggccagtcaccttatcaccccatgcctcag

SEQ ID NO: 263169 - DNA, 122 bp, Homo sapiens
tttttcctctccacttaaccaactcatcattagaaactacaagtcccaggatgcactacacgatgaacgtcggatcgaggacctcgtgtctctgaagtggttgccctcgccttatttgaatg

SEQ ID NO: 263170 - DNA, 122 bp, Homo sapiens
accatcttggattgggtccccccttagcttcccttccttcccccaggagctctttgctctcgaaagggatgcaagctaaggaaatagcgaaccaactaggccccagcgaccagaccatcgcc

SEQ ID NO: 263171 - DNA, 122 bp, Homo sapiens
cacaagcagtatacacatgcacacaccaggtgtgcagaccaaagcaaagtgagcgaccagcgtgctaaactccaggtgggcaggaccccaactcccaggtgaggtgggcaggaccctaactc

SEQ ID NO: 263172 - DNA, 122 bp, Homo sapiens
atcttacattggaatagctttacagaatatactaaccaaatccatagcttttaccccagtcgaccctcacaaccatgatgaaaagtgagtcaggaagcctgtgcataggaaagcattttcca

SEQ ID NO: 263173 - DNA, 122 bp, Homo sapiens
gggggaggaggcccacctgggccggatggtgggtggggtgctcacctagccagtgctccccggtgagcctgccaaagccgtctcggtacgcatcccagccccggaagaagttcacggagccg

SEQ ID NO: 263174 - DNA, 122 bp, Homo sapiens
ccctcccctccccctcctgggcttctcctctgcacaggtgtgctgcataccagagggctgcgagtcatgttcgccaggcttaccgttgggacaaaggactctctttcaccaaatgcacgcag

SEQ ID NO: 263175 - DNA, 122 bp, Homo sapiens
ccgacgcccacccgcccgccccttccctcccgcccctccccgggaaaaatcctcatcgcacgcccggcccttccccaaccagcgcccggcagtgaagccgccgcctctcctccaaccagcgt

SEQ ID NO: 263176 - DNA, 122 bp, Homo sapiens
ctccgcctcgcacccggcgccccacgctctttatctctcatcgcagcggccccggccctccggccggctaagttcaatcacataaaagcgtttcacttgacctactcttccaccttgttcat

SEQ ID NO: 263177 - DNA, 122 bp, Homo sapiens
tgctcctcgccgctgacttcctgaggcggacctacctgtggaggcataccaggaaccagacgatgaccccctccaaaagttgggtctttgaggagagctactaacttgggttcctggtacac

SEQ ID NO: 263178 - DNA, 122 bp, Homo sapiens
tctctgaaaagcctgggcaggaggctccagttctccctaaggatggtgcagtcaatggaccgtcagttgtaggagatcagactcctattgaaccacagacttctatagaaagactgacagaa

SEQ ID NO: 263179 - DNA, 122 bp, Homo sapiens
gcaagaacttccccactcagagcctcagtctgccctctgtgaaatgggagaatgatggcacgttacttaccgtggtggggagaaagcgcaggtacctcctagatactctctctcccacccca

SEQ ID NO: 263180 - DNA, 122 bp, Homo sapiens
cagcgagggcccgaggggcaggtactttaacgaatggctctcttggtgtcccctgcgccccgtcggcccatttttctttttacaaaacgggcccagtctctagtatccacctctcgccatca

SEQ ID NO: 263181 - DNA, 122 bp, Homo sapiens
tggcggggaattggggggcagctccgtgagggacggtttctgcctttgttccccccacctcggccgccccccatccgtcgccccctgttctccgcgctcctcggccgggtttcatggcctcc

SEQ ID NO: 263182 - DNA, 122 bp, Homo sapiens
cagcggatttaggcggacaggctgtgcgcttgagggcagccagggcggtcagtggagggacgtggtccggggcctggccacagctccccacccagggccctgggctattgttactcaccgcg

SEQ ID NO: 263183 - DNA, 122 bp, Homo sapiens
tgcttcaggtcagccagggtgaaggcttcattctctgccttccaactctgcagttccttccgggtcttgaagggaaaggagcccagaccttggaaaggagggagaatagatcttgaaaccca

SEQ ID NO: 263184 - DNA, 122 bp, Homo sapiens
taaaaggtgattaggtcatgtggggctccacccctaggaacagtttaatgttgttatcatcggaatgggttcctggttaaagtttactcccctcttgccctttcttgctctcttgtgctctc

SEQ ID NO: 263185 - DNA, 122 bp, Homo sapiens
ctgcttgactatacttacccactgaggcccgggcctcagctcccaaagcaccttgatagccgtgtgccagctgaccctgtcctgcaggactccggggtagacctggatagcttctctgtctc

SEQ ID NO: 263186 - DNA, 122 bp, Homo sapiens
tagctgggactacaaggaccccccaccatgcccggttaatttttgtagttttagtagagacgggggtttcaccatgttcggccaggctgatctcgaactcgtgatctcaggtgatcctccca

SEQ ID NO: 263187 - DNA, 122 bp, Homo sapiens
ggtatccagttgcccacctctgcatggctgggtctgtccttgattcatacctcttgggttcgtcaccccccagaagaagacaatttattccacatgaggagacagcacggtgccattcctga

SEQ ID NO: 263188 - DNA, 122 bp, Homo sapiens
aggcctgggaggagtgctccaaggtaagacactctgctcagggctggctggctccagaaacgtgtccattcaagtgttttgtttttttttttttttggaagcacctactatgtgccaggcac

SEQ ID NO: 263189 - DNA, 122 bp, Homo sapiens
acacctactggcaggtcccagccacctgggatgtgcctttatttgtggggcaaggaaggacgctcctcattgcctggcccatgtgtgcccctggccttgggttcgcgagtgttcacctctta

SEQ ID NO: 263190 - DNA, 122 bp, Homo sapiens
tcccttaatcttaaactcccaccgctttcagacactatcataccccgccccccttccccccgcgaacccccgtgcattctgggactcatggtttggtgagtgttgtccaggaatggctacaa

SEQ ID NO: 263191 - DNA, 122 bp, Homo sapiens
ttcggctgatgatctggccgcctaataaaagctcatccccgattggctgccccggcaaatcggagtgtaaagccgccccggattggctgaaacacttcctgagcgattatctttgtgaggct

SEQ ID NO: 263192 - DNA, 122 bp, Homo sapiens
gaaggcggtggggggatggcctagatgtcctgaaacaaggaaggctgcatctcattctcccgttgaacacctgccctgagatgtggggtggccctgctggttcctccagagagctcatagtc

SEQ ID NO: 263193 - DNA, 122 bp, Homo sapiens
caatcccggcacctcgggaggccgaggctggaggatcactcgtggttaggagctggagaccggcccggccaacacagcgaaaccccgtctccaccaaaaaaatacgaaaaccagtcaggcgt

SEQ ID NO: 263194 - DNA, 122 bp, Homo sapiens
tttcgtcccgaaggtcttgggtggggcgatggcaccaacaatttaacagcgcccagagtccgtgagcgagaacagaaagagatcccttccagtcccataccctaaaaaataataacaataaa

SEQ ID NO: 263195 - DNA, 122 bp, Homo sapiens
tggttctcacaccatccagaggaagcatggctgcgacgtgggcccgacaggcgcctcctccgcaggtatgaacagttcgcctacgatggcaaggattacatcgccctgaacgaggacctgca

SEQ ID NO: 263196 - DNA, 122 bp, Homo sapiens
attggcggccggagggatggcaaagctgccacgcgcacgggggtgcaggctgcgggactgcgatcgctgccggataggaccaggtagtgtgcacacctccgtccttaggaaggaacccagcg

SEQ ID NO: 263197 - DNA, 122 bp, Homo sapiens
gtgagcccctcaagtcggctgcaagcaggcgatgcctgcagggcactgcgtccctggagccgcgaaggaagcgctggagccctggctggggttccgtggcagccggcctcaagcttgggaag

SEQ ID NO: 263198 - DNA, 122 bp, Homo sapiens
gatgccgcggcttgggagaggcgcccccagccccttcctcacgctttgctttctctctctcgcctcattcccccaaagctggcctctgcgggcaccttccgggtgctgaaggagccccttgc

SEQ ID NO: 263199 - DNA, 122 bp, Homo sapiens
agctggaatttgggaaatctcaggtgggtggggggtggctcttccaggggctggagcccgcgctgccttgaagctccaccccaagcctaggcatacctgagtccaatggcccggcccagccc

SEQ ID NO: 263200 - DNA, 122 bp, Homo sapiens
cctcaatttcaaaactgaccacaggctcaagctgccgggaagcacagccccaagttggcacgactcccgagtggcccaccaggcccggctgcgggtgacgggtgggtgtccactatggctgc

SEQ ID NO: 263201 - DNA, 122 bp, Homo sapiens
actgtcactcactagataccatcaccttatatggagtaagactggaaattgtcttagatacgtccttacttccaacattgtctctctcccagcaagaggctatgtgaggaactaagaacaag

SEQ ID NO: 263202 - DNA, 122 bp, Homo sapiens
atgcactgctcccggcgcaggagggcggggagggggaggggcgaccgggccccgccccgccgggaaccgtgggatccgcaaacccagctccgccttagatccaggggtagaaacttagggtc

SEQ ID NO: 263203 - DNA, 122 bp, Homo sapiens
ccaccacgggctcccagcactggcaaaatgccactcagaccacagctgcaggggcctccccgatcctggggctgtttctgtaatagagtgtgttttgtcaccaaatgatatttattttgttt

SEQ ID NO: 263204 - DNA, 122 bp, Homo sapiens
ccgtgaatggctgcgcttctgcgggatagacttccggccgccggctgcttagcaggcctgcgaaccgcagctctgggcttcctagcccaggcggaggaaggcaggaaagaaagaggtggttt

SEQ ID NO: 263205 - DNA, 122 bp, Homo sapiens
gtagctgaatattgtccccctcaaattcatattgcctggagcttcaaaggtgatctcattcggaaacaggtctttgttgatctcataatggtaaggatggggacgaggccatcctggatttg

SEQ ID NO: 263206 - DNA, 122 bp, Homo sapiens
gctccaacacggagtgcgcgtgcgctcaaggaccagctggctaggagcgccttctctccccgaggggatctggaatgttcatccgcggtcttcccagtggtcctctcctgagcaccctgggc

SEQ ID NO: 263207 - DNA, 122 bp, Homo sapiens
ctctcgtgtctcaacgggagccctgtggcgggaggggaggccagggtttggggttgtgttcgttgtacagctgtcaccatttgcactatgaaagttgttagtgccccttccttgggtctctg

SEQ ID NO: 263208 - DNA, 122 bp, Homo sapiens
acgcgggaggcctgcaccctgatccctgagcagcccccacacaccggcacccacgcccctcggttctgataaccaggaggctttctggcccgtgcagctccttcggactctgaggagaggcc

SEQ ID NO: 263209 - DNA, 122 bp, Homo sapiens
tgcacccgagctggggcctgaggggaccagcgagtgccccaaggtctcagcgggaaggagcgcctagccttcggggcggggcctataagaaggcggggtccaatcgccgatctggaacgggg

SEQ ID NO: 263210 - DNA, 122 bp, Homo sapiens
tgagaagggttttggtacaagaagagtcaacattttaagcaaaaatggcacagtcagaggcgtcaaatacaaagtgagtgctggccaggctctatttaacaatttgaccaaagtattacagg

SEQ ID NO: 263211 - DNA, 122 bp, Homo sapiens
cccaggctgagaagaacgcgaggctgtgttcatggccaggacgccagcgactcccactttcgcctggtcaaaaaaatcccccaaacctggtgtcacccagaggtagggagggaggcagcggc

SEQ ID NO: 263212 - DNA, 122 bp, Homo sapiens
ctgggatgaaaagatccttactttatagaaagggagcaggaacacctggtggacagctagcgtgtcctgccatgtggttggaattcagttctgaacttgtctccggcctgttctcctcgcga

SEQ ID NO: 263213 - DNA, 122 bp, Homo sapiens
tgacacttttaagaaatataggagacttcgttgtgcagtagtgctagcggcttcacggttcggtcctcggacccggcagccgccactggtgctgagctgttaggaagcccctatcggcgagc

SEQ ID NO: 263214 - DNA, 122 bp, Homo sapiens
ccatcctcttcaaggctcagtggttcatcgtgttggctgtgctcaactccgccatgaacccggtcatctacacgctggccagcaaggagatgcggcgggccttcttccgtctggtctgcaac

SEQ ID NO: 263215 - DNA, 122 bp, Homo sapiens
tggtagccagggaaggtgcggtgcccgtgccggggccgcggggcgtgcgggagtcctgggcgtcgccgcacctgccggtctcctctgggagtcctgggccgaatcctcagttcgggcgccct

SEQ ID NO: 263216 - DNA, 122 bp, Homo sapiens
ccttatgcttaatagcattcctttttaagtcaatatgtgaaaataccttctcattcataccgttttccactgttttaacactcagctcactgtgttaaccaatctttcttgtttgctattct

SEQ ID NO: 263217 - DNA, 122 bp, Homo sapiens
gaagggggcgtgggcagccccaagggcaggctgggatttagagcagagaatgcaggaacccgcaaccacagggaagaagcctccagctctttcggctgactcttcagggcagctcgggcaat

SEQ ID NO: 263218 - DNA, 122 bp, Homo sapiens
gggagcaattattcatttgtaccaagtgaagccgatctcagactctaactgctgctgtttcgttttttaataacccccacccctttgccccaccaagcttgactgcttcttaacagctaaaa

SEQ ID NO: 263219 - DNA, 122 bp, Homo sapiens
gcctccccaactgtgggtccctggaggagagataggtttctctgtgatggtgcaaatccccggggaagctgagccaaacctgagagaaatgcattgtgcccgggcctttccttcctggagac

SEQ ID NO: 263220 - DNA, 122 bp, Homo sapiens
ccccatcatctctacccccagggactcggagatcatgcagcagaagcagaaaaaggcaaacgagaagaaggaggaacccaagtagctttgtggcttcgtgtccaaccctcttgcccttcgcc

SEQ ID NO: 263221 - DNA, 122 bp, Homo sapiens
cacagccagcccagtggataggcctgtttgaagtcaggctgtgtgcacctatgccagtgccggctctgctttggggtgggattttgggtgtaggacgaggttcaaaggacctggctgaggac

SEQ ID NO: 263222 - DNA, 122 bp, Homo sapiens
acacgtgctgccacacgataccggcaaagaagcgatgctgcatgatctccttggcgtcctcggagcccccgccaagcctgcaggcaggaaacaaggccacagtgtcggtaccgccacctgcc

SEQ ID NO: 263223 - DNA, 122 bp, Homo sapiens
gctgcagtgtgacagggccgggtggccaagtcctcctggcagctactctacagctgaaaacgggagaaaagagagcgttagaaagcggtcatctgtcgcttcctgtttatctgacaattgaa

SEQ ID NO: 263224 - DNA, 122 bp, Homo sapiens
gtgcgcgctggggaggaagtcccgcccctatggcaaactcagctacctgattggctgcctcgcggaccgcagcagtgccggcgggagagctggcttggggcgctggcacctcctcttacagc

SEQ ID NO: 263225 - DNA, 122 bp, Homo sapiens
tcagcttctccgttgagtctgtctgtctctgggatgcaggcacgtgcttgcacacttccacggtggcgatcccgcccccttagtagcgtccttagctcggcacttcttgcagggaagttcct

SEQ ID NO: 263226 - DNA, 122 bp, Homo sapiens
tgaccttgggcaactgagtccagcttacctggggtagacctgattgtgccagtgcagcagcgcgtagcggtcggccagcggcagcctgcgacgggcggaggcccccagccactcggccaggg

SEQ ID NO: 263227 - DNA, 122 bp, Homo sapiens
tcatccactgaggaaagggatatcattaagaagaatagttttccactaacgccgaaccggcggcaccatctcaaccaacaggtcaagttacagtaggcaagcacgcatagaaataaacgtct

SEQ ID NO: 263228 - DNA, 122 bp, Homo sapiens
ccttcccaccgggagggtacctagccctccctaccaccgcgcgccaggtaggtgggtgggcgcatgggaaagcaataacccggccttgaacctcagacccatgaatataacccaccgcggcg

SEQ ID NO: 263229 - DNA, 122 bp, Homo sapiens
cggggcctgagatgcagtcctgcgagggcggcctcctgtaagacctcttagcgggcccatcgctgaggtgcagggacatgtcgcggccgaactcacctcgtggcctcggcgtggtgctctca

SEQ ID NO: 263230 - DNA, 122 bp, Homo sapiens
ccgccccgtgacgccagcgagcaggaagtcctggttaatgatcagccacccggacaggtgcgggacaaggccgcgcacatcagaagcagccgcggagcgagtgcctttcactctgctctcta

SEQ ID NO: 263231 - DNA, 122 bp, Homo sapiens
tcaactcgtgggggaggctcacaaagacaagggtaagaattaagtgctgaggttgtccatcgaggcatcagcaaaatggaggaagctgaaagacctcggaacacaagcgttttgcttggtca

SEQ ID NO: 263232 - DNA, 122 bp, Homo sapiens
tcatgagaggaaagaagatacactatgtgatagaagagttatttttggagaacttattttcgtgactctgaatgcccagaggagaaaacatatggatggtattgctaatttagtaccatgtc

SEQ ID NO: 263233 - DNA, 122 bp, Homo sapiens
aatttggtagggatgagcaggaagaattgggctgggaaaaaaggcagcaaggagagttctcgctatgcacccgcctcagctgacagggatttattggtggaacaggaagccagtcctctcca

SEQ ID NO: 263234 - DNA, 122 bp, Homo sapiens
gggcgcgggaacagcgcgtcgggggcgggtgggcttgggtgtccgtggcggaggttaccccgggccccacgcgcccgctctctcccggccttggtctttgtccccgcgcccccgcaagggcc

SEQ ID NO: 263235 - DNA, 122 bp, Homo sapiens
ccagcagagaggcccctctttcatactcagccaaggtagactaatggattctccttcttccgagggacagagttggtgataatctgcaagatgaactctgtctgctatctcagaaggagatg

SEQ ID NO: 263236 - DNA, 122 bp, Homo sapiens
aggttttgtagcctacagttttaaacagacattttgaagctgttttttaactttatgttgcgtatgcacaattctgcctttgcacacaaggtcagcatgtttgccagtttaacaacatatta

SEQ ID NO: 263237 - DNA, 122 bp, Homo sapiens
ctcgcacggagcctcgctcggcctcgggggagccacgagaggtgggagttggacccgcagcgggccaggagccctgtcattggaggacccgccaaaaaggaagcaaaccctctttttcttta

SEQ ID NO: 263238 - DNA, 122 bp, Homo sapiens
ataaaaatgggtctaagttgtcactgggagattactgagtatcagtggacactatgagctcgagtgggcaaccccatgcaaggttagagcagggacttcaccaatgtttgaattagggaact

SEQ ID NO: 263239 - DNA, 122 bp, Homo sapiens
ttagcgccagcagtctcctccctcagggaccactctcttcactgtctctgccctttcccccgcaattttcctgagtgagaaccttgagcctgtcacccactttgttctgggaagatctgcat

SEQ ID NO: 263240 - DNA, 122 bp, Homo sapiens
ttttttttttttagacggagtctctctctgtcgcctaggtggagtgcaatggcgtgatctcggctccctgcaacctccacctcccaggttcaagtgattctcctgcttcagcctcccgatta

SEQ ID NO: 263241 - DNA, 122 bp, Homo sapiens
aagcctctaaaaaagtctaatgataacattttcttatacttcggtgcttccatcttttgtcgttttgagagtagtcagcaattgtgctgaattttgtggcactcacactgcctttgttgtgg

SEQ ID NO: 263242 - DNA, 122 bp, Homo sapiens
tgaactcaggaggtggaggttgcaataatccaagatcgcgccactgcactccagcctgggcgacggagtgaagctccgtcttggggcgaagaaaaagtatctaccacaaagaaaggataaaa

SEQ ID NO: 263243 - DNA, 122 bp, Homo sapiens
agaaagtgctcattttccttggaggtccaggtgttgcttgcaacagaaacagaggcttctcgcattttcttgcactggcgatgcacctagtcagaggtagtggagtgaaaaataactctgga

SEQ ID NO: 263244 - DNA, 122 bp, Homo sapiens
acaggcccggctgcatccctgcgggaacctgactcacagcccaggcagggtcaggggcaccgaggagctgccaggctgcaccccagccccagactccaggccccagtggaggcctcgtgggg

SEQ ID NO: 263245 - DNA, 122 bp, Homo sapiens
tatcatcctctccctcccaggatataaggaacaatgtcacaagggggcgcacaccccctgcgatattgggggtaatatcttcctctgccgcgctggctattaggaacaatgtcacagaaggg

SEQ ID NO: 263246 - DNA, 122 bp, Homo sapiens
tgccggttctggagggagagaccccagcaaggaggtggtgactcatgggccgctcctccccgccccgccccgcccctcccctcccgccccgcccctcccctcccgcccctcccctctcctcc

SEQ ID NO: 263247 - DNA, 122 bp, Homo sapiens
ttaaaaaaagagagagagaatacatactacacgagggtacgtcacacagttccatgcgtacgtttttattctgcgtaaagcaccaggggccctccatctggcctccggggttccggcagtag

SEQ ID NO: 263248 - DNA, 122 bp, Homo sapiens
tctttaggccccgccccaattcggctcagcccgccccagcgtagaggcaccacctttcctcgctgcagtcatccaatagccaagatacacggctaggtgatttgcgagcgggagttaggtgt

SEQ ID NO: 263249 - DNA, 122 bp, Homo sapiens
gaagagctgcaccccaggacagcagcatgcacgacaatagtctcgacgcttacttctttacggttgctgggatgtaaccgagaaatctaataactgtgacagtggggcctttcggtttttcc

SEQ ID NO: 263250 - DNA, 122 bp, Homo sapiens
atttggtagaatggaaaatgtgttaggaaaagcaaaaatgaattctagccctagcttaatcgctaaggtactgttagggcaataggctcaacttctttcagttatgacaagaatgaaatgaa

SEQ ID NO: 263251 - DNA, 122 bp, Homo sapiens
ctgacgtcgggggccctgggctcaggccccgctcacctctgcatgcgctcctgcagctcgcgctgcttgcggatctcagggaactgcttctcgtagtactcgcgcaccttgctctccttggc

SEQ ID NO: 263252 - DNA, 122 bp, Homo sapiens
ctcatctctattcaacaattaatcagttctgattgggtttcaagtaaggcttagtaccaacgcttagggaggggcgtgcaaaaacgagaaaggtagtgtttgaccttaccggtttaaggttt

SEQ ID NO: 263253 - DNA, 122 bp, Homo sapiens
ctgtgggtcagaggaaatgtggaagggagtgttatttagagtctggtgtcagtttccacgcgattacttcagctatgtcacttgggtcgccataaaaccatccactgatttactctgggctc

SEQ ID NO: 263254 - DNA, 122 bp, Homo sapiens
cgtcagggctgcctttgctgacgctgatgaccgacgggctgccgtactcgctgccaggggcgctcagcgacgccttcagcacgaacttgcccatcagcccgccacctggcggctgcggctgc

SEQ ID NO: 263255 - DNA, 122 bp, Homo sapiens
tatcactgcctttgatcctttaaaaccaggccctaaatgtctgcatggacctttctctaacgaccaagaggaagagagtgttactgcagcgacaaatacgagagagggagatcttggagctc

SEQ ID NO: 263256 - DNA, 122 bp, Homo sapiens
ggctggccccggcggggcttctgcctggagctcgggtggggtgggggcgcggggaacacgcgggcggccgcgcgctgggccttggccggccgggaggatgctctggccagcccgggcgcact

SEQ ID NO: 263257 - DNA, 122 bp, Homo sapiens
atctgtgctgcctgggagtgtcaagaggccgtgtccttcattcacctcgcgcgtgggcggcgctgccctgaagatgctcccgggctcagtgcagacggctcagcgttctctcgcgttcaacg

SEQ ID NO: 263258 - DNA, 122 bp, Homo sapiens
cgggcatctgctgcgtgtcccgctccgggctcagtgccctcgccgccgccggcactgcctcgatgttccagctgcccatcttgaatttcagcccccagcaagtggccggggtatgtgagacc

SEQ ID NO: 263259 - DNA, 122 bp, Homo sapiens
aagaaaaatgccccatacctaaccagtaggaatgttgtacttggactctgaggttctgaccgtagcatcagatcacacagagaactaccttgctcgcccgaatgtgtggctttctctggctt

SEQ ID NO: 263260 - DNA, 122 bp, Homo sapiens
cctggagacacgagtctgtcagtcttgcctcattaagtgtatggtcgaatttctgtcactcgaattctgtcactcaaagcttgagggcgtagagctagtagttgtatccaatgagggcgctg

SEQ ID NO: 263261 - DNA, 122 bp, Homo sapiens
ccaaggaatggtcgggggagccggcaccttcatttcctcccacactgatggaggactgcccggtgtgtggagcctccacaactccaggtgcctgtgcacctgctgaggaagagcactggtcc

SEQ ID NO: 263262 - DNA, 122 bp, Homo sapiens
caacctattcagttgccaggcgacatcgttgccaggcgactccagcagcgtccgcggcgccgcggtcgacataatcagcacccactgcgcaggcgcaaacagcccaaggctgcggccggctg

SEQ ID NO: 263263 - DNA, 122 bp, Homo sapiens
tgctgtgaggttagcaaatatcatgacttcctcttccattctccaataaaagccctgctacgatcgcaatccccagctctggcacaatggcttttcttccttcctgggtttgtgtactagtt

SEQ ID NO: 263264 - DNA, 122 bp, Homo sapiens
ctgacctccttatggttgggtcagactttggctgaacacctaccagctctgtgccaggggcggcgctggggaagaattaaaggttcgctttctattctacagtccctggcctcaagttcttg

SEQ ID NO: 263265 - DNA, 122 bp, Homo sapiens
tgcaaggaattcagatctgtatgtgaagttggcaacaaactttacatataattttagtcccgtttgggtcaaaccaaacggatctgcagccataattagcccctgggctgccagttggagac

SEQ ID NO: 263266 - DNA, 122 bp, Homo sapiens
aaaaagaatgttatgctctgttgatgcttttggtgactatgacacaggggccctgtcttccgcagaccctgcagggccaggctggcatagacccagctgagcaaccgtcgcctgagagcttt

SEQ ID NO: 263267 - DNA, 122 bp, Homo sapiens
ctggctccctgagcctcggataaaccacatagccttctacgcaaatgccaagctaaaatgcggctctgaggagtggtgagaatgccgtgaaaatgtctatacaccaaatcacaagaaaaagc

SEQ ID NO: 263268 - DNA, 122 bp, Homo sapiens
ccctttgcacccgcccgccttggtgtctggggaggggctgcgcagggccgtgggctgggtcgtctctctcgggctgcgtgtgttgcgctcccgtgtgcacgtgtgtgtgtcgggaatcctgc

SEQ ID NO: 263269 - DNA, 122 bp, Homo sapiens
tcagactcatggttttcgtaaagacagaaggctgcatccatgccgtccccctactcagtgcgtgttactagctagataataagtgtttgcatgtgatcaggaatccttcacggccagaagac

SEQ ID NO: 263270 - DNA, 122 bp, Homo sapiens
gatgcacaggtttatttttgtgtcaccagcagagacatttcctacactgctgtaaaacagcgtgggatggtggttaagctactccgaggaaacaatgctcatttttccattcgcacgctcgg

SEQ ID NO: 263271 - DNA, 122 bp, Homo sapiens
tgagcaagggcgtttggcttttattgaaaaacgccccagaggaagtactgggaactgcaccggcaacagcagcctgacccgcagaagtttctttggccagggccagcacaggtttgacctgg

SEQ ID NO: 263272 - DNA, 122 bp, Homo sapiens
ctacctggctgcggtcgcgcggccacctgtcctccgccctcggggcgccgcccagcttcgcgccaggcgccttctccagcgcccgccgccctttcccggcgagaccactcgggcgcgccccg

SEQ ID NO: 263273 - DNA, 122 bp, Homo sapiens
cccaggcagaccacgtcccaggcagaccaagcccaggcggaccacgtcccaggcagaccacgtcccaggcggaccaagcccaggtggaccacgtcccaggcagaccaagcccaggcagacca

SEQ ID NO: 263274 - DNA, 122 bp, Homo sapiens
ccctcctcggcctgatgccctgcatggcccatctgccacctgctcacccatgtccctcagcgtctggccagctgtgccccaggcgaggcatggtcctcacacatttcaggcccccatactcc

SEQ ID NO: 263275 - DNA, 122 bp, Homo sapiens
ccttcctctcttccccgagctcctgccagcgctccattcatcccccactcccctccacctcgtccccccagcccgtccccaacgccctggagcctcccctagccagccgctcaccttcgcgc

SEQ ID NO: 263276 - DNA, 122 bp, Homo sapiens
gcttaagccgcgcgagggtgcccgggtgggtggctgcgcagggccctacctgggcgggagcggctgcagagccctgtccacgcggtgcctccccagcacggcacctcccactccaggctgtt

SEQ ID NO: 263277 - DNA, 122 bp, Homo sapiens
acataacattcagaactaagcaatttcttttttcccgattataatactgggcagagaatgcgcgtaaagagagaaaaggacaagtatcaaaaagcaatatttgcccgaggatcttgttcttt

SEQ ID NO: 263278 - DNA, 122 bp, Homo sapiens
gctgagcccagcattttattcctctacttgcttggtgaatggattgcctgaggagcccaccgtgtttgtctgaagcctgtcaccctgttcaccccgtctggcagagccaggctctttctccc

SEQ ID NO: 263279 - DNA, 122 bp, Homo sapiens
ctgtcctgtagccacaactttcaggaggcggtatgagcctgaactaggaggagccaggcacgcactctttttttcccctccactatttagttggctcatttagtaaggataccaactgcgga

SEQ ID NO: 263280 - DNA, 122 bp, Homo sapiens
catctgccaggcattcaggttgctctccacatggaccatcttatcagggacacggagctgcgggacgtttctcccgcagacacggacagcgtctctgcgtcgccgttgccagcccgttcatg

SEQ ID NO: 263281 - DNA, 122 bp, Homo sapiens
tctctcgtgccctcattgttgttggtttgaaatcatataccagctcctttgcagacactccgagggtctgtgctcaccgtggctgtgtttctggaggcttcccgttttgtggtttgccgtgg

SEQ ID NO: 263282 - DNA, 122 bp, Homo sapiens
tctcggggatcctcctcccgggctctggaccccaggtgatcctaggtccccagccgccggcgaacaccatggccccccaggggggtgaggtaggagcagcctgagtacccccagaaggtgcc

SEQ ID NO: 263283 - DNA, 122 bp, Homo sapiens
agcagcctgagcagcggcttcggtgggtattttctgcctaagtgctacgtgatcctctgccgcccagacctcaacagcacagagcacttccaggcctccattcaggactacacgaggcgctg

SEQ ID NO: 263284 - DNA, 122 bp, Homo sapiens
acactttcgctcaaacactcctcaccctgcaacctctgacctgaatgcagaaacagtttgcgtcttgtgctgagctggccgggaggcctccgctcgtgtcaaagcctctcctctgccgcctg

SEQ ID NO: 263285 - DNA, 122 bp, Homo sapiens
tgggagctgccggccttcagggcgcgcctggtggcgccgagcatcctgggaggtgtggtccgggcgctgtgccgaggattcggggtagtgtagtcctggcgccccgctggaggagctcccca

SEQ ID NO: 263286 - DNA, 122 bp, Homo sapiens
ggtccaggctgcagcatctctgtggctcacggctccgtgctgccccttctgcgccttcctcgccgtggtggctgtcgggtcccttacgtttcagggaccatcctgaaaataaacagcatggg

SEQ ID NO: 263287 - DNA, 122 bp, Homo sapiens
cagagtgaattggcagatgaaatgctcattaaaatgaagctcatgacattatttgatggacgggagcttctcaattaagtacctaagtgtttaaggctatctgatgcttccaggaatgtgtg

SEQ ID NO: 263288 - DNA, 122 bp, Homo sapiens
ggggacaccgtgggccttggcagtcgcgttccgactccggtctggtgtatgggttgcactcggtctctctggctattttgtgtgttccgatctgacagcccacatgcctctgctgtacgcct

SEQ ID NO: 263289 - DNA, 122 bp, Homo sapiens
taacaaactgaacccagccctgccacccctccccagctgttctctgtaattccacatctccgttgatggcaccaggaccacccattcggaaatgtgttagctgccctttctctttccttcat

SEQ ID NO: 263290 - DNA, 122 bp, Homo sapiens
ggaccctgctggaggcagccttcggggccttgcactactttctctttggattcctggccccgaagaagttcccttgcacgcgccctccgtgcacgggcgtggtggactgctacgtgtcgcgg

SEQ ID NO: 263291 - DNA, 122 bp, Homo sapiens
tcaacgccctgaacttggcgccaggatctttaaaacccggaagttcctgtggttcatccgcgaaccttgtcctccggtcctcgcatcagagcacttagcattttgcttccctagggcagctg

SEQ ID NO: 263292 - DNA, 122 bp, Homo sapiens
gaagacggatgtccctctggggcagacacgtggcacaacaggacacagtctttggagccccgccacttcctgggcatcagccctctggccctcagttctcctaacggtcaaatggagcagca

SEQ ID NO: 263293 - DNA, 122 bp, Homo sapiens
ttatcctaattaatgtctatctaattaaattactgtcagcagctaaccaatggcaggagccgtttcatcggctgcacaagcagcaagatcaaaagtgagccttttctgattgctgcatagtg

SEQ ID NO: 263294 - DNA, 122 bp, Homo sapiens
ggaggcgacacaatgagacaagagcaaaccgtttctcagcgttcttgcccagggccttcccgtctcgcggcccggcctccctcacccggaagtgctggtcccggtactggctcagctccacg

SEQ ID NO: 263295 - DNA, 122 bp, Homo sapiens
ctcagcatggaacaggttcccaggctcacagaggaaggtggtggcaacacggagacttctcggtcacctggaacacaccccgctgtggacaccccctctgggactttttttctgcctctccc

SEQ ID NO: 263296 - DNA, 122 bp, Homo sapiens
gagcgctgcacagatttatatcctacgcagctgcctgcctgctcccgccccttctccgtccgttcaccaatcagaactcgatcttgcgctttcaggccgcgggacgggaaggctccgccctg

SEQ ID NO: 263297 - DNA, 122 bp, Homo sapiens
aaggccatcgggtgctgcagcctgcacaccagcgtggtcctgggccacacaccgggcagccggagagaatctctgcagctcccaggcggcagggtgcacaaatcacagcctttccttgaccc

SEQ ID NO: 263298 - DNA, 122 bp, Homo sapiens
gatgcgttctacccacaaagaaaacggtctccagcatcataaactccacatccatcaaaccgggcaggggctgggaatagaaagcctttctggaaagaaaacaccagctaccctttgcaccc

SEQ ID NO: 263299 - DNA, 122 bp, Homo sapiens
ggcattcagactccagagcccttgattctgaaagctgcatttccagacccagacccgctccgaagtgtccccagtttaattcgagttgaagagttgatggaggaccgccagtgggaaacagg

SEQ ID NO: 263300 - DNA, 122 bp, Homo sapiens
ctcagacccactggctatgtgacctggccctgcaggtccaactgtcaatgggtctaaccccgcccacctcaatgatctgtgagagctgagcgggggagacactgttcagaaaagactgggtc

SEQ ID NO: 263301 - DNA, 122 bp, Homo sapiens
gggaaatggctaggcctatttttgccaaatttggaactgcctgaattagaatgtcagtttcggcaaaatttacattgaagggtctgagagacacctaagtgtgtagaccgtctttctctgca

SEQ ID NO: 263302 - DNA, 122 bp, Homo sapiens
attctctgccttgcacttgaaaaggctcatgtccccgtggggactgtgagtcccaatgggcgggaccctggtctgatttctgtgccattcctagacattgtggcccgaatgtatttaataaa

SEQ ID NO: 263303 - DNA, 122 bp, Homo sapiens
atgagtggtcgggacaatttgcaactagagggtggtcctcatgggtaccctgtggggtgtcgcgcgaggtgaagggccaggccatttccgtcgggtcagcgatttccgccttcgccccgctc

SEQ ID NO: 263304 - DNA, 122 bp, Homo sapiens
acagcctggaaaggaacacaaccactggcaagctgggcttacgcatccccaaagaggacacgggaacaggccagaaacacacacggcagagactgcaagccccatggcagcccctacccatt

SEQ ID NO: 263305 - DNA, 122 bp, Homo sapiens
aactgaggctcagatattgaggtagattaaagatggctgccagttcagtgccacttgtcccgttgaactgtgaagtcttatccccctccttgggtctgcaccagccttgatgacttgctcac

SEQ ID NO: 263306 - DNA, 122 bp, Homo sapiens
cgccgtgctggctgcagtcattcgggcactgcctcacaccgcaatcctcgccagagtagccgtcctcgcacacacaccgcccatctaggcactggccgcggcctcggcagcccccggggcag

SEQ ID NO: 263307 - DNA, 122 bp, Homo sapiens
tcaaggttgaaaatgactgctctagagtaaaagccaaactcggcccggtgcggtggctcacgcctgtaatcccagcactttgggaggcccaggtgggtggatcaggtgaggtcaggagttca

SEQ ID NO: 263308 - DNA, 122 bp, Homo sapiens
cacgtgcacccgcatccccaagacacacaggcacccgcgtccccgagacacacaggcacccgcgtccccgtgacacacaggcacccgcgtccccgtgacacacaggcacccgcgtccccgtg

SEQ ID NO: 263309 - DNA, 122 bp, Homo sapiens
acccgagtgcccctggcagccgtgcgggaaccccggcatgggccttggaggcacctaaggcgcccaggagggccaccagatctgggagcttttcaactcaagcctcttcaactcttcccaaa

SEQ ID NO: 263310 - DNA, 122 bp, Homo sapiens
gggccagagtcaagtcagcgcccccgccccacccgagccaaaggaggcttctggaggccccgccaggtccccctgagccagccggagcccagccaggcctccgggacagactcaccgggtgc

SEQ ID NO: 263311 - DNA, 122 bp, Homo sapiens
ggctttcacgtggtctttaaagagataccatctttaacataaacagccttatatcattggcgtgggaaaacaccttgcattcactcacccattcacccttccacatatctattctgtcatgt

SEQ ID NO: 263312 - DNA, 122 bp, Homo sapiens
gacgcgtaggcggctgagccgcagtaggtggtgctcaggtctgggtagccatgggcctggcggccgaagccgaagtcggtgagcttgacgcggcgctcgtccgggctcagcagcacgttttc

SEQ ID NO: 263313 - DNA, 122 bp, Homo sapiens
tgattcctcatggttatataggtcctccaacctatctgctgataagtacactgtacacttcgtgggcctagctgtaggtctaagaggagttgattttgcacatactatacttattgcattta

SEQ ID NO: 263314 - DNA, 122 bp, Homo sapiens
gggcccacaggaggccggcccaggcagcctcgcgtccacttaccaggccaggcccaggcacgtccccagcgacagcaggctcaggcacgttcgggggtctgcccagcccccgcctccgctgc

SEQ ID NO: 263315 - DNA, 122 bp, Homo sapiens
ttggtgacatgccgggccagcgtccgggcatccacttctgccagcagctccttgaccttgcgcagaaggcccacctccagtggccggttatccctggggatcagtagtgactggaaggtggc

SEQ ID NO: 263316 - DNA, 122 bp, Homo sapiens
tgagccagccacagagcataacactgtggctgggacacatgtccatgtgtgtttcacatacgtgggcatctgtgccacaagggtcatgtggcaccacagttcatcagctgtgtttccccttc

SEQ ID NO: 263317 - DNA, 122 bp, Homo sapiens
tcaggcgtctgtgcgagttgctgcgcgcgtgtgggtgtgcggccgacgtaagctcgtctgcgtccctcccgtttagtgcccggggtcgggccgtctgttacaaaccgtcctgttggtgtgag

SEQ ID NO: 263318 - DNA, 122 bp, Homo sapiens
tctcgggggccaccacgataatttgggggtctggggaaaccatctcctggagagtttgaacgatgtaagaaagcactgtgatttttaccaagtcaaaaaccacgcacaaaatcccgcacccc

SEQ ID NO: 263319 - DNA, 122 bp, Homo sapiens
gaagaaaggagaagacactgtgccccccgattagctgagtgtggccaggctgtgtgtttgcgaggtgtgaagggcatggatggagactcaccagagaaagcatgtggccctggggccccagg

SEQ ID NO: 263320 - DNA, 122 bp, Homo sapiens
tgccatggcaaccttaggaagttaccctatatgatctaaaagcggagaaccctcagttcccggtattgtccaccccttgtttagcatataatcaagaaataagtgtaagtatactcggtcgc

SEQ ID NO: 263321 - DNA, 122 bp, Homo sapiens
atgattcagtattaatgtagtgcctctgtgaatgccagggcagggttgggagcgcaaggccgaggtcctgccatttggagtaagattttccagacagggcagggctgggctgtgaatctatc

SEQ ID NO: 263322 - DNA, 122 bp, Homo sapiens
ctcaacccagcgcgccgcctggaacagcccccggagccggggagctgagctagggaaggccgagggctttgcctgcaggccattgttaataaaactcattactctgggaatgttccgaggca

SEQ ID NO: 263323 - DNA, 122 bp, Homo sapiens
cgccaatcacctgcatagtcgaaaatccacctataacctttgactcccaaaaagcttaaccgatagtcttccgttgacctcaccaataacacagtcgactaacatatatttcgtatgtttta

SEQ ID NO: 263324 - DNA, 122 bp, Homo sapiens
ctcctgggagtctgctctgccttggaacccagaccaggctccctcttgttgaagcctccacgggcccccggacggtcccactgcaggcctacctgtcctgaggtgagcgagggcagcctggg

SEQ ID NO: 263325 - DNA, 122 bp, Homo sapiens
tgggccagtaatagggagagtttcttttctctcgtcaaattgcttaaaggattctagttccgtttggtgtggtcactcacatttgaattctaatactctatgtgatatagattctgttgact

SEQ ID NO: 263326 - DNA, 122 bp, Homo sapiens
acgtctcacactccccagcatgcacacccgcgtgaatcagggcttgggggagtgggaactcggaccagaatatcttggtatttagtaacacaggaaaggacacggatgggaagctgcggcta

SEQ ID NO: 263327 - DNA, 122 bp, Homo sapiens
ttaggcacccaggctgagggtgctgtaagtgctgtggtgacggtggaatgaggaggtgtccgcctaagattgtagggcacaagagatggctgcccaagtggggccaggccctacacagcagt

SEQ ID NO: 263328 - DNA, 122 bp, Homo sapiens
attaaactaactaaaagtatcccttatgggaaacaaagggatgggccgaattaaaggaatcgattgggctagttaactgccgcaggagcgtgtccttaacgcacagatcgctcatgctattg

SEQ ID NO: 263329 - DNA, 122 bp, Homo sapiens
cctccacctaaccccacagtgctcactgtagacagcagcagtgagagtctctgtgactcccgtgtattgactgctggaatctgggaatccacttgcccagtcccacataaaatctctcccta

SEQ ID NO: 263330 - DNA, 122 bp, Homo sapiens
agttccttgaatctgagtcatcagatcctgcagtttttctttcctcaatactggatccttcggaagggtagaggaagaacctacaggctgatgcacaggcttaggcacctacaagataaacc

SEQ ID NO: 263331 - DNA, 122 bp, Homo sapiens
cgaccgccgaacccgctggagaagcgggcgcgacagggcgatgagttaacgcggagggagcgcggaggccgcggaagccgggggcgctgggtctcaggcccggatgctgagcgcggaccggc

SEQ ID NO: 263332 - DNA, 122 bp, Homo sapiens
gacggctgcccgatgcccggcattggacccggcaggagggtggctgagcgtcgttctggacggctgcccgatgcccagcattgggggcaggagggtggctgagcgtggttctggacggctgc

SEQ ID NO: 263333 - DNA, 122 bp, Homo sapiens
gcctgagagttggaagtgcttcaccaataaacatttgcccagggcattgtaggatgggcacgggttcggcagaagaactttccaaataaagataacacaccaccgataacagagatatacaa

SEQ ID NO: 263334 - DNA, 122 bp, Homo sapiens
gctgcagcgggggatgggtgctccgaggctcccgaggcccgcgcaggtcacgggtgcctccggctgtgcattctacctgcaggtcctttgacaccagagtgtttaggtttcaacacctctcc

SEQ ID NO: 263335 - DNA, 122 bp, Homo sapiens
cgctggggcggggggtcccccactcgccctccccgcggaactctggcacagtcagctgaccgcagacactcacgtgacagctcggggcccacgcccgggtttgacagttctgcgcagaactt

SEQ ID NO: 263336 - DNA, 122 bp, Homo sapiens
catctagcctggcacatggtggatagctgttgattatatagatgctcaatgactagaatccgttatcttcagcaaacaaacgcaggaacagaaaactaaataccgcatgttctcacttacag

SEQ ID NO: 263337 - DNA, 122 bp, Homo sapiens
tacttcactcccactccatcctccccatccccctctccctgcctcgtgcaaatcccagcacgccgcccaccatatgcagcgatccctcactatcacacagagcccaacatctggcgggcgct

SEQ ID NO: 263338 - DNA, 122 bp, Homo sapiens
gagtcaccatccacacccactaccccaccccggactgtcgagatgcctgagataattcaccgcagagttgactaagtgaatagtgagtcaccatagtgatggctggacctttggagacgcca

SEQ ID NO: 263339 - DNA, 122 bp, Homo sapiens
aggggagatgttggcctgcagatcgttctgcagcacctccacgaaccactcctccaggaccgagtgtagcccgtggcccctcagaacctccaccgccgcccggagctcctcttcctttggcg

SEQ ID NO: 263340 - DNA, 122 bp, Homo sapiens
gattccagggacatgtcttcagtaagctagataatccatttgccaccctcagtttttcagcgattgctccccaagaatagatatgatttctagagattgcataaaaatataaaatcctattt

SEQ ID NO: 263341 - DNA, 122 bp, Homo sapiens
ttttagccttttataaagtgtgtgtttttacatcccctcagaacctgatgtgatgtaaggcgcacagcaggtatgcagtaagtggctgctggactgagagacagagtcaacagagttggtca

SEQ ID NO: 263342 - DNA, 122 bp, Homo sapiens
gggaatcctgaggtccaaactccagtggacaggagcaggttagaaatgcatattcctggtcgggcgcagtggctcacagctgtaatcccagcattttagaaggccgaggtgggcggatcaca

SEQ ID NO: 263343 - DNA, 122 bp, Homo sapiens
gggtcttgggagggggcgcagggcagtccacgtttccactgcagtttctcctttgttttacgtttgggaggaggtggcattggaaatagcagagtgcttcgcggtaacaggggtgagtcttg

SEQ ID NO: 263344 - DNA, 122 bp, Homo sapiens
tccagataggagagctctgagaacttgatgtcacaaaccacagagcccaggtcccttgagcgcagcactgcggtggcctgcccaaacacgtccagctgccgcgccagcgcctggggccgccg

SEQ ID NO: 263345 - DNA, 122 bp, Homo sapiens
cgtgtcgagaccaaaatgctttctaagaagtgacagtattgccagtcacaggcttacaagcgcaggaatgcagtgacaaaatcagatcagtgctgaggaggctctggggacagggtgaaggg

SEQ ID NO: 263346 - DNA, 122 bp, Homo sapiens
gcatctacgagctcacggtgctcaaagacccctacacggggatgcacaaaggtgggcgcccggccccctcccccctctccccctccctccgcctcccaccccaccttccggcatcttctctc

SEQ ID NO: 263347 - DNA, 122 bp, Homo sapiens
cttttaggcggctccacagagtcaaaggggccatcatcagctagggatttatagatgtggcggccagcctgcccactgttgctacccatggccactgggagaggaaccttcctgcgagccca

SEQ ID NO: 263348 - DNA, 122 bp, Homo sapiens
aaactttccgaaattcactatccgagtctaggcgccgacacagaaggtggagcagggaggcgtcggctgtgcccgcccctgcgccgcagaaacgccccctcggctacgggtttgggaagact

SEQ ID NO: 263349 - DNA, 122 bp, Homo sapiens
gcagattggcttcggtccacactgactgacgagtggccacacgccattcctcagaggaggcgcgtccgcgctctgtgtgcagttcattaagttgtcatgtcaggggacagcggccatcggcg

SEQ ID NO: 263350 - DNA, 122 bp, Homo sapiens
gagtgattcccccaagttctagacatcttcctccctgggcccattatgtagcagcaactccgactcttcaagataatcagtcaggtgtccctgccagtatagtactcccatttttgcctgct

SEQ ID NO: 263351 - DNA, 122 bp, Homo sapiens
ccggggtgatcaccacctatcgtccaagccaggagtcccactgcgttccagtcactgctccggggagagggcgctcagccctgccccaggtgtccttacctggttctctagtacccagcacc

SEQ ID NO: 263352 - DNA, 122 bp, Homo sapiens
acctttgaggactttgtatgcacttttacaaaactctgggagccccgagatcttcaagcccgaataatttttatcaggcgcagtgtggacagccccgaagcgcggccgggtcccctcatgca

SEQ ID NO: 263353 - DNA, 122 bp, Homo sapiens
ccagggacccgtattccccgctcagtctgtgaagaccgccggctctccccacagcactagcggtctttacagttatctgtggaaggtttcttaggaaaccggggacccacaccgctgggact

SEQ ID NO: 263354 - DNA, 122 bp, Homo sapiens
attattataaatgtatatatttctttgaaattttatcacgtgtagcttcatgtaacttaccgtatttaagatagagactgtcctatcatcaaatggctccttcgttctacccaactttagcc

SEQ ID NO: 263355 - DNA, 122 bp, Homo sapiens
tgccagaaatctcaggagtcatccttttttcttagctgtgctgccaaggcacaggttaagcgcctggctcaattcagctactttgcttgctattcactctgtcactcaactctcggtgtgaa

SEQ ID NO: 263356 - DNA, 122 bp, Homo sapiens
aaagcagaacctgcgccagccgagggccctagggctgctggtaggaggactgttctctatcgtccagctgctcccgacctcttctctgaactggccctgctctggggaacagcgccctgctt

SEQ ID NO: 263357 - DNA, 122 bp, Homo sapiens
cccgaggatccagtggctgatgcatatcagagcgtgagagctggcgaagtgggagcggagcgccaggaaagcctcagggcttgtactcatcctcacgaaggcccgcctacaaaagagacaca

SEQ ID NO: 263358 - DNA, 122 bp, Homo sapiens
caggcctggggaaggacgggacgcatcactgctgatgccccttctgaaaccccctgcaggcgcggctgcacctcaagcccggcggggcgaggacgctgagctgcagacagcgccacctagcg

SEQ ID NO: 263359 - DNA, 122 bp, Homo sapiens
gaggaaacccgaggcattatcagagcaggagtcgtcaagttgggttttgaatgactcgagcgtgccaagcactgcagggtcttccaaatggagaactaagaatgtgccaaggttggaggggg

SEQ ID NO: 263360 - DNA, 122 bp, Homo sapiens
atttgatcacagtttagaggcacagtggaccaagtggaaggcgatgcacaacagattatacggcatggttagtgaaacttccccagaaagaatagtcctggctgttgagaagttttagtcag

SEQ ID NO: 263361 - DNA, 122 bp, Homo sapiens
taccagagttacagcaattacctgaaaagtttcctaacattttaataatgttagggatttcgttttggttttagttgtcctcaagagacaacaggttcacagtaatttccatgatgttgggt

SEQ ID NO: 263362 - DNA, 122 bp, Homo sapiens
ggcacgccgggctacacccaggagatgcagctgcgggagacggcagcactgagcagccagcgtccccaactaacagcaaggctgggggctcaggaggaggctctggtcctcgcattccgagg

SEQ ID NO: 263363 - DNA, 122 bp, Homo sapiens
acttcaagtgatctgtccacctaggcttcccaaagtgctgggattacaggcatgagccaccgtgcccagccacatcggagcattttggatttcaggttttccattagggatgctcaaccctt

SEQ ID NO: 263364 - DNA, 122 bp, Homo sapiens
aggcctcccaccgagaagcaccagggcttggtggacggggcccgcgaacccagggccacacgccgcctccctccttccttccccgcgggcctcgccccaccccggagggggttcctacctgg

SEQ ID NO: 263365 - DNA, 122 bp, Homo sapiens
caaatagatccatgggttgccttttatcagacagaggccgatggggaattgcagctctgccgtggccgcgcttctccagctccctgcaactttgtcagaccctagagatctgttcagtgtca

SEQ ID NO: 263366 - DNA, 122 bp, Homo sapiens
ctggctgtgggctgtggccgcagtctcctgaagggactgggatctgcttccaggctcacccgtgattgttacaggcctcagttccttgctatctgatgtccccgtgatgtgacagtggcttc

SEQ ID NO: 263367 - DNA, 122 bp, Homo sapiens
ctaggtgcttcacacagggacccctgcccattatctctatgttgctcaagcaatttcgagcggtcactacaagaaaaaaccattacatggatatttctgttttcacaagatatgctctatgc

SEQ ID NO: 263368 - DNA, 122 bp, Homo sapiens
gcccctcaatgccaactccccatccttcagctgaccccgggctcattaagtgctaggaaacgccaccagcagcgggtgcagggctgagggccaagctgccggctggaacaaaagagcttgtg

SEQ ID NO: 263369 - DNA, 122 bp, Homo sapiens
gaaaatctacacacggtagtgagtatacctgtattaatcaatacagaaaatcaacatgcccgagtgtgcctgcattgatcgatccaggaatcttggccggggatggaatggtgaaagccagg

SEQ ID NO: 263370 - DNA, 122 bp, Homo sapiens
ccttctccctcctcctcctccaaggcacgctgagatttggagcggaggagctgagccccgcgggaaaagcagaaaagggtcattgccactttaaatgactcaggaagtaaaaggaggcctcc

SEQ ID NO: 263371 - DNA, 122 bp, Homo sapiens
gtggagggacagaagggatgcagaggaccagagaagttgtggctgcaggtcccctcttcccgctcgcgcctggggttccctctcctccccctgtgcagcacagccggcgcgggcgtccgagc

SEQ ID NO: 263372 - DNA, 122 bp, Homo sapiens
cactcacctcagcctcccaaagtgctgggaatagaggcatgagccactgctaccggccgacgattacaattttaaaacgtagttgtgcccagctcttcgcagttatggaagggctgatacac

SEQ ID NO: 263373 - DNA, 122 bp, Homo sapiens
ccgcccgcccgctcccacgccacagccaccggcggcgaatagagactagagcggcagcgccggcagcgcggggccgttgcccagtgtttgcagttagagccccatctctctggcgtggttgt

SEQ ID NO: 263374 - DNA, 122 bp, Homo sapiens
aggacaggcagagcagcactgaggccccgaccccgggacgcgcaccggcagcgaagccggcgggcactcagggccagccccacacccgcaggagccccgaacacggagacacagagacgcac

SEQ ID NO: 263375 - DNA, 122 bp, Homo sapiens
cccggggtcacaaggcgccacgaaccaggcgaagggcaggtctagaaatacaggccgcggcgcttccctctcacactcgcgaaacaccccaataggtcaatctgtctgtgctgtcttggccg

SEQ ID NO: 263376 - DNA, 122 bp, Homo sapiens
aagtggagagatgacacattctgactcccaggagcaggaccactgtgaaaagaacagtcacgtaacaggtcatgggacagtgctagtgtcacaattcacaagtgacagtgtggtggggacta

SEQ ID NO: 263377 - DNA, 122 bp, Homo sapiens
gtccggccagcgcggtgattgggtacaggtctcgggagcgcggtgattgggtacaggtctcggccagcgcggtgattgggcgcaggtcccagccggcgcggtgattgggcgctggacccggc

SEQ ID NO: 263378 - DNA, 122 bp, Homo sapiens
cggggcccccgccctccctctcctgacctgcgtgctcttttccagcttgcgggaagttgacgggcatcagtgaccccgtgactgtcaagacctccggctcgaggttcggatcctggatgaca

SEQ ID NO: 263379 - DNA, 122 bp, Homo sapiens
tttttagttgagatgggtttacaccatgctggctaggctggtctcgaactcttgacttcacgtgatccacccgcctcggcctcccaaaatggtgggattacaggtgtgagccactgcacctg

SEQ ID NO: 263380 - DNA, 122 bp, Homo sapiens
acacagtaggaagctgaatgggcaggctgactacttgctcagcacattgcaacatcagggcgctcttgtcagcctggattatgtagggcctgttattgtcaaactgtctgcctaatctttaa

SEQ ID NO: 263381 - DNA, 122 bp, Homo sapiens
gataatgagaggctgatggtgttgtagtcagagtcagtagttgggctatggtggcatgaccgtcgaggaattaggggacagagtgagtaaagagagggcaatagtaaactagggttgggggg

SEQ ID NO: 263382 - DNA, 122 bp, Homo sapiens
agttcatgactcttattacttggtctatccatctggaaatggtactgcccttctttggaacgggatttcctcatctgcacatcaaaagatttaactacatgattaccactgtttcttcaacc

SEQ ID NO: 263383 - DNA, 122 bp, Homo sapiens
agctccgcccctgggcgctcccggagtatcagcaaaagggttcgccccgcccacagtgcccggctccccccgggtatcaaaagaaggatcggctccgcccccgggctccccgggggagttga

SEQ ID NO: 263384 - DNA, 122 bp, Homo sapiens
catcccgcctcacccggcgttgccactgtcagttcactgctcaggccccttctgttcggacggaaaaaggaaacggtaggcagtgagatggtcccattaaaacccacaacctggccgggcgc

SEQ ID NO: 263385 - DNA, 122 bp, Homo sapiens
agctccttcctccccagcctggctctgcaagtccagaaccacagagagcaaagtgtcagccgggaagaggcgagggtcggtcccaccaggctccaggtcaaagccttctcctaagtgagctg

SEQ ID NO: 263386 - DNA, 122 bp, Homo sapiens
ttgcttaccatcttgtcaggaagatgatgatagtaacatagcaggcacttcacaaagcaccgtaagtgtgctgtgaaataaccaaggtagtcccattaaaatcaggaacaaggggagaggag

SEQ ID NO: 263387 - DNA, 122 bp, Homo sapiens
gatgagtgggacccgagctggggccgctgccttcaggaagtgactgtggcttctgctccacggtcagcacacagggtgggggctgctagaggtggggcgggggagggcagaggaggaaggga

SEQ ID NO: 263388 - DNA, 122 bp, Homo sapiens
tgcaccggggctgggggtgcagggcggagaggccctggggacgagggatggcccgggcgccgaggccctgggggtctgggacaggcccagaagggaagttacctgcgcggtggtggtagcac

SEQ ID NO: 263389 - DNA, 122 bp, Homo sapiens
gatggtggccgggcaggaggctgtcctgactgatcccgcaaatgtatttacagctattgacggcctgaacgtggcctattgatccacgcctgagcctggccgggcggcgcgtgcacttggcc

SEQ ID NO: 263390 - DNA, 122 bp, Homo sapiens
tagaggataatcgttgcataatgaaatcattgggacaattcgtccatccacttctacctccgcctctaacaatgaactccttgtttctgcggtgcccaaatctctctaaacccgggtgggcg

SEQ ID NO: 263391 - DNA, 122 bp, Homo sapiens
aaaggggtggccgtggcttggtgccatcagcgtcctgggaccctaggtctctcttccccgcgttgtgggcattctgtgtgtgcctcccaccctgcgccgcggatccctggactcgtggggtg

SEQ ID NO: 263392 - DNA, 122 bp, Homo sapiens
ctgccttctctgggagccgtcggtggcacccaggctgcccctccacccggcctgcaccagcgccgccttctccggagccgtcggtggcacccaggctgcccctccacccggcctgcaccagc

SEQ ID NO: 263393 - DNA, 122 bp, Homo sapiens
tcctgccggaccacgcggtgctgcttctccagcccccgcagccgctgcgtggagtcctcacgctcttggcgaagcgccactgtgtcctcaagctgtcgctcgagcctgtttgaatctggaca

SEQ ID NO: 263394 - DNA, 122 bp, Homo sapiens
taacttcgagttatggttattttctatgcaaatgataaatccaagttgagatcaagccttcgaagtctgcttcctggagaagattttaagcttgctttcttgggtggttaatttatctgaaa

SEQ ID NO: 263395 - DNA, 122 bp, Homo sapiens
cacacggtggccagctcccatcccacccccattcctgaacatcatggctagagttcttatcgctgtttattgaaacctcccatcaaagaaaagtgtgggaggcaagaaggggaggacttctc

SEQ ID NO: 263396 - DNA, 122 bp, Homo sapiens
ccgcggcgggccagggaagtgcattagaacacggagcacagggagctatttccttctcgccgcccctggtctgtgcagagctgcctctgagacatttcctgtgcgggaatgaatccagggct

SEQ ID NO: 263397 - DNA, 122 bp, Homo sapiens
gagtgccgtgggagggggcctggggacacggccgccggctcctcccgcctgcgcagcacgcgcgagctaatctgcagcttttccgttgccgcgtgaaaaagccctttgttccgccttcttcc

SEQ ID NO: 263398 - DNA, 122 bp, Homo sapiens
tgggcaatttccacctctaagggggtcgggaaaggcacgctgagggtgaatatgtgcggccgcattcctggcccttggccacagacgctgcgtttctgctaggacctgacacgtgcggtggg

SEQ ID NO: 263399 - DNA, 122 bp, Homo sapiens
aggaactcctactcatccctcagtcatcagctcgaaggtttcttctccaagaagcctgcccggcactcgagaagtagagccgcgagccttctcccgggggcccagccttccccagtaccggc

SEQ ID NO: 263400 - DNA, 122 bp, Homo sapiens
ttgagctgggcacgggatgatgttgccgtgtcacagtgagctgcaccttgctctgtcccccgcagagtagatgatgtggtgggccggcagggcaccccaaaccacgaccataaatagcctgg

SEQ ID NO: 263401 - DNA, 122 bp, Homo sapiens
tcccgtaccgcggagcccggaaggggctgtactttttcggcctctaagcactacggtggccgagcgagttcaaacctcgcggaaccatacctgaaaactcggggtaattcttttttcttcat

SEQ ID NO: 263402 - DNA, 122 bp, Homo sapiens
aattctttattgcaatgccttggtctcagttaattggtttcatctgcacagtaggcaggacgaacccatcaggcaattaaaaacataaaattttatcctcttgagcattttcaaaaattgag

SEQ ID NO: 263403 - DNA, 122 bp, Homo sapiens
tgggcgcacaatgacttcccctcactgtgtctctcgcacagtaatacacggccgtgtcctcggctctcaggctgttcatttgaagatacagcgtgttcttggaattgtctctggagatggtg

SEQ ID NO: 263404 - DNA, 122 bp, Homo sapiens
gggtgagagctggcgcccacgcaggggacagaaacttgggatcccagagctagaaacaggcgactctagaactttccgtggctgagcccaaggcccgggtgaaatgcttgacccgagagccc

SEQ ID NO: 263405 - DNA, 122 bp, Homo sapiens
tttttccttccccacaaatcctcttttctgtgcatacagtgtgcccaagttcatcccttacgtgcctacaagaattcagacgttagggaattcaagaccatgccttagacctggctgttgta

SEQ ID NO: 263406 - DNA, 122 bp, Homo sapiens
ccactcgtctgtcccaggggaccggaacacggagcaggaggagggcggtgaggcggtgcacgaggtggaggtggtcatcaagcacaaccggttcacaaaggagacctatgacttcgacatcg

SEQ ID NO: 263407 - DNA, 122 bp, Homo sapiens
cagctttggaaccgggtaatgggtagaggctggaagggttttgaagtacatgctagaagacgccaaaattgtcatgaaggaacttttaaaagtgattctggtaagggctcagaaaagaggag

SEQ ID NO: 263408 - DNA, 122 bp, Homo sapiens
caggcacaagcctcaggatccttatttgatcttttttaatacgaccaggtcttaaatttccgaaccatgttttccctaattgccattttctctctaaaatgaagaagcctggaagaaccttc

SEQ ID NO: 263409 - DNA, 122 bp, Homo sapiens
aggctggctgagaattgatcacgaacctattgtctgtaaaacttttgttatttcctgagacgtggttcacagcaacccaggtgcgaacagccttgtgattctagggttcttttctatttttt

SEQ ID NO: 263410 - DNA, 122 bp, Homo sapiens
cgggcccggccggggtcgctatggcaacgcgccgccccagcctaccaaccaagcagtgcccgccccttcctgccgagacccggtagcggcaaaatttgataggcaaacttacgtcacactgt

SEQ ID NO: 263411 - DNA, 122 bp, Homo sapiens
cggtgagccacagaggcaatgagaccaaggggaaaatctctcggctcggtctctcccccgcgcagggagctatgggctccttcagcgagtggttgctatgcagccttgtttattcaaggaga

SEQ ID NO: 263412 - DNA, 122 bp, Homo sapiens
tcaacacacacttgtacggcaactccggcttcagccttcacccgtctgtctggattcctgcgttcatgtcctttttggccctgaatgtttcctgctagctcagttatagttaccagccccca

SEQ ID NO: 263413 - DNA, 122 bp, Homo sapiens
tgtcagatgtttcacacgtcttatgtcaggggcgccatgcgtcctatgtcggatgtgtcacgcatcctatgtcacgtcatgcgtcgcatgtcagatgcgtcacgtgtcctatgtcagatgtt

SEQ ID NO: 263414 - DNA, 122 bp, Homo sapiens
accgcacgctcccaccgccagcttctctctggagctctgcaaggatgggctatgatcacccgtgatactgatctgccgtgtttcgtgtttaaattgctgagctgcagcgtggcttcgtgggg

SEQ ID NO: 263415 - DNA, 122 bp, Homo sapiens
acctgggccagcggctgagctgtacataccgtgtgcaaagtgtatatgaagttatttattcgtgacccatgagcccgtgaccgtgtccgtggattagtgagtctgtggcctgtgccctcccc

SEQ ID NO: 263416 - DNA, 122 bp, Homo sapiens
ggtagagggactgctggccaccgttaagcgggcagtacttgagcgtatgggcctggtcaccggtggccccgcacacgggacacacgtagtgcctcaggatgggacacaccaccacgccatcc

SEQ ID NO: 263417 - DNA, 122 bp, Homo sapiens
tccccgccgctcgccgcgtaccttcctcaccaccgccgccttcgccccctggcactaccgcgggtccgcactccacgccgggctgattccggcgctcgctcactctcttttttcttccgtcc

SEQ ID NO: 263418 - DNA, 122 bp, Homo sapiens
gtcctagcggtttaggaggcagggaggtttcctccagcctggagctctggctcgggccctcgggccccaacaccttcccgctgagaccgcgggcgttgtccctgggtctctctgcctccatt

SEQ ID NO: 263419 - DNA, 122 bp, Homo sapiens
ggtggtcgatctggcggccggtcaggtagacagagtcgacaaggaagtcgctcaggaagtcgacaagatggtagaagacgaagtgggaatagaaatcgatcaagaagtgggggccacaaacg

SEQ ID NO: 263420 - DNA, 122 bp, Homo sapiens
gtcgttctcttgaacacttaaaaataattaactcagaaacacagggtagcatcctacatgcggcggtgctgggcttgggcctctccaagcggcctatgactttctgcaaaccaaccagcgcc

SEQ ID NO: 263421 - DNA, 122 bp, Homo sapiens
tttcgcctttccagataagttcagtgggatgtggtcctctgggattatatttatgagcagcgttgacacaacctgcaaagaaaaagaggacaaactgatggcaaaaagaaaagtgatggcaa

SEQ ID NO: 263422 - DNA, 122 bp, Homo sapiens
agtggcgctcagtgtggggcctcctggctgaaggaggggacaatatggtgtcccatctcccgagatgctgtatgcacctcacctggctggtgatttacttgaaagaaacccatgtgtggagt

SEQ ID NO: 263423 - DNA, 122 bp, Homo sapiens
gagggaaggggctcgagcaagtggaatagcatgagcaaggcacaaggcagtgagagagaccgggctgggaactattaatatatacaagatgccccctacaacaaggaggggtggcaggggag

SEQ ID NO: 263424 - DNA, 122 bp, Homo sapiens
agccggccccgcgccggcgtgtcgcctcccgtccccctagcagcacgctgcgtggctgctcgctggctatttaggacggaagctcggttggtgtttctccagaagtttcccccttgggcggt

SEQ ID NO: 263425 - DNA, 122 bp, Homo sapiens
ttcgaggaagcgcggaccaatcggaggccctatgtagggctgaagaggcgggactctggtcgccataacaactcatcacgcctgtgctgcgcgcgcgcgtcgccttagtgccgcagccctat

SEQ ID NO: 263426 - DNA, 122 bp, Homo sapiens
agcttaaaaactattcactgagtcaatgagctactaaggacatagagcccttcacatccacgtagctattcagccaggattgtttttcatcctgtcattgagcttcacaagcccagtatgat

SEQ ID NO: 263427 - DNA, 122 bp, Homo sapiens
cggcccctcgggaagccgcgccgaagaaagggggccgaggcctattcaagtcctacgagccgcccacaatggaccgatatactgagggcctctctattaacgcccatgaatattaaagagat

SEQ ID NO: 263428 - DNA, 122 bp, Homo sapiens
caggaactaggatggagaagtgcaaagagagagaggaaaggtgaaagcattgctggctgtcgggcagactcggaaggggctgtgaccgatcctgcaactgaaactactttctttatgttgtt

SEQ ID NO: 263429 - DNA, 122 bp, Homo sapiens
caacctagggaaaggaggagccataggagctgggcagggaaggccagagcacacacgctccggggacgcacacccacgcctagagcacacacgctccggggatgcacacccacgcccagagc

SEQ ID NO: 263430 - DNA, 122 bp, Homo sapiens
cctcgtgggaaatgccttccagtggaattgcggcaaatttcaactctaacccagggatatcgatctaggcctcattcccacacccagctctgctgccagaagcgttccaaggcttctcaggc

SEQ ID NO: 263431 - DNA, 122 bp, Homo sapiens
tggaaggaaacccccagggccacttgccttgaccaacttttagagcaacagctaagctttcgggggaccatccccaagtccttccactgatgtgatctacagttgtgaggggacatttgcct

SEQ ID NO: 263432 - DNA, 122 bp, Homo sapiens
tgccttggcttctgcggcttgactcctgtgttcagcctggtcctctaatatgcgtactctcgtttcgaccagccaccacccatccaattttctgtccttcagcttcacaacacagccatgtg

SEQ ID NO: 263433 - DNA, 122 bp, Homo sapiens
ccttccatttcttttcccagggtcagaactttttggttctgaatgtcttatgtaatccaccgtgaagagcttggtgaacagctgtgctaggaaggatcaggcgccatgggaagtgtggtgcg

SEQ ID NO: 263434 - DNA, 122 bp, Homo sapiens
cactgcctcctgcaggtacctccagaccccggtacaccgtgctgttggtgctcgggggcacgctgatgggctgctgcccctccagctccaccgcatacttggcattgaaccggaagaagtcg

SEQ ID NO: 263435 - DNA, 122 bp, Homo sapiens
aagccaaggtgttactccccggaggctggaggagatgaggggatggagagcctcaatcaccgggctgccttgactggagcagtgacctccaatgttcctagcaaccccaggcggcagtgcag

SEQ ID NO: 263436 - DNA, 122 bp, Homo sapiens
ccagttgtaggtgctccattaaggcttgtggtggccacattgctcctctgtacattctcccgcccctcagctcgctgtagttggatcgttcacctacctttgcccacaccctcccaatgccc

SEQ ID NO: 263437 - DNA, 122 bp, Homo sapiens
gggcgcgatggacccctcggactagacactcaatgcaacttttctcctcccaacccgcgccgcccaggaaagggaggtcactttcgacgccccggaagcctctgccaccgaatccttaaggc

SEQ ID NO: 263438 - DNA, 122 bp, Homo sapiens
ttaatgttgtaaagtgcaaagttggtgcttggagctggtggagtgggaatgcggcttgctcgttggcgcattagacacacatctctccagcgccttggatgtttatgcagctactgtgagga

SEQ ID NO: 263439 - DNA, 122 bp, Homo sapiens
ggcttcagatgtggtgtcttcaagacaaaaagtaagaccattactggcagttttagctctcgggacaagaactgcattgctaatttggaacagtaagaattaatcagtaggagaaacttgac

SEQ ID NO: 263440 - DNA, 122 bp, Homo sapiens
gcagggggcagcgtggaggggcgcgggctccgggagcggacctgagctagccgggctggccgcgaggcgcggctggggcgcaggcagctgcggggcggccggcggcagcgggcggccggctc

SEQ ID NO: 263441 - DNA, 122 bp, Homo sapiens
cgtggagcgccctctagtggtatatatatacaaacggaaggatttagagaaaatacagatcggctttagctggctgagatttattttcaaagcatgttactttataagaatcaatttttatt

SEQ ID NO: 263442 - DNA, 122 bp, Homo sapiens
tccgagccggggatgtgggagagtctgggctccaggccagcattgagtggctgctgagaccgaggttgggacttagatttgctttattacccttccttgcttttccttgccgttctcgcttt

SEQ ID NO: 263443 - DNA, 122 bp, Homo sapiens
tgggcctggctggggatgaacccctgtagccaggccccggggtctcgcctggtttcggtacgggcaggcagcgcaggcccgcggggaacgtaccccgcaccgctccgggagagcgggtgtgg

SEQ ID NO: 263444 - DNA, 122 bp, Homo sapiens
gcatccacctcctgtccggacaaggggtcgcctcgtgaggaaactagtctggagttcccacgcccgtcccggaggaggacgcgggcggggcgcccgaactgcggggagagggcgattccgcc

SEQ ID NO: 263445 - DNA, 122 bp, Homo sapiens
ttcttttttggtgaataattgacactacatgccaattctatgatgttagtgtattcagcacgattaacttcattacacacattagatgatatgactctccttgaaaacacaaataaaaaaga

SEQ ID NO: 263446 - DNA, 122 bp, Homo sapiens
agttctgggaaaagaaacgaaccatagagatgtggcttcctagagatccgggatgaggggcggggtgcaaccggaagtcgcagtattctcggctcggccattattctgtgcctcggctgccg

SEQ ID NO: 263447 - DNA, 122 bp, Homo sapiens
ctcgtctcaccgtaggctgtgacgacatgagcaacaaagaaggtggcgtccttaacaacacggggcgttatttatccggagggggaggttctccagtctttctatgcagttttccccttttc

SEQ ID NO: 263448 - DNA, 122 bp, Homo sapiens
agtacaggctggatgtccgtgtcattgaccctaaaaaggccatggctatgaagaaggacccggtgaagaaaatcttcgccgagggtctgaatcctgaagccactgaggaaaagatcagggag

SEQ ID NO: 263449 - DNA, 122 bp, Homo sapiens
acaccagcctggcatttgggaagtggaagggagataaagattaggactatgtagggtgagcggagacatgtagcagcctatatgcaagtgtcgcttctcaaatacgaaactgagaaatagat

SEQ ID NO: 263450 - DNA, 122 bp, Homo sapiens
acccacgtccgccgtccgttccagacataagccaacgctcgctctggcgttctcagaaaccgttccggtaacagaaaaagctttttaacttcccgtgagatccacgaggatccgtgaggttg

SEQ ID NO: 263451 - DNA, 122 bp, Homo sapiens
gccgccaagaccttcattatgggctgcacttcagagggccttggaggaaacctcagatgccggcagttttcagaggttcatgctcaaatggggaatttgcctgatttatatactggagcctg

SEQ ID NO: 263452 - DNA, 122 bp, Homo sapiens
catacccagcctttgcccgtgctgttccatccgccaggagcgccgtttcctgcctgactgcgcggccctgggcctcagtcttgcgctctgcaaaccggggtctcgaatctaccccagccctc

SEQ ID NO: 263453 - DNA, 122 bp, Homo sapiens
ccacctctgatgtgggcactagggagctggtccttcccagaggatgcatgattttgacaccgtgcagtgtgggatgttggaccagggaatccagcatattttcgggcttttgtagtctcaga

SEQ ID NO: 263454 - DNA, 122 bp, Homo sapiens
ctgggctcggaaacacgtgctttacaaatggggaaatgagtgagacgatgcaggagagaccgcaaccagacgtaaaaggtgaagaccaccgcgaagaggaagctctcagccagagctgagtg

SEQ ID NO: 263455 - DNA, 122 bp, Homo sapiens
ggtatttaggtggataagacagtaacaatgctatgcatatatcgcttgtcttttaggaatcgtatattcttgtgcaggtagaaactgtgtttgatcagttgaagtacttacgtctaattttc

SEQ ID NO: 263456 - DNA, 122 bp, Homo sapiens
ctgcggggtgctgtagccacctctaagggcgttttcctcagcaatcagagcctccagctccggcgtggctcctccggtcaccagggtccgtatcagggtgaggatattgtcattgaagtacg

SEQ ID NO: 263457 - DNA, 122 bp, Homo sapiens
aaggtgtcctaagatagtcatcacagcaaccacaaatctttctactatcacaaacaaaaccgagcaactacttatttacctttttcttctgggcaacctcctcttctggtttaggaacaatc

SEQ ID NO: 263458 - DNA, 122 bp, Homo sapiens
ggggtgtgtagggtgtgaacaggtccgtgggcccctgcacctgcgcgcactgggtcacttcgagcaaccacctggtctcgtggagtccacgcaccacttgtccccaggacttgtgaagaatc

SEQ ID NO: 263459 - DNA, 122 bp, Homo sapiens
aacggctggctgtttgaatagtctgagggatgaggttgctgcagcaaaaagtgggttacacgacagcccagctttcctgctggagatgggagaccaatactctcaggaaacagtgcacagtc

SEQ ID NO: 263460 - DNA, 122 bp, Homo sapiens
tactcagtgttcactttgtgccaaatactggaatcagcagcactggagaagacagagacacgatgcctgctgtccaggagaccataatctagtggaagaaatagataatatatcacaataaa

SEQ ID NO: 263461 - DNA, 122 bp, Homo sapiens
ggccccctgcttagttcttactaatcagaacacttaatttacaatcaaatgacatgtcaccgtggagcctgtgttcctagccctggcccaagttctatcccaaaaaccagtggttccttgag

SEQ ID NO: 263462 - DNA, 122 bp, Homo sapiens
atctagccataggtctccaagggcttggataggatgcggccagggggaatggaaaggaaacgagataatatgcaagacactttattatatttttggaattgcgaggccatagtcttacagtt

SEQ ID NO: 263463 - DNA, 122 bp, Homo sapiens
ggtaggcgactccgctattgaggtcatcaacgccacgactgggaaggatgagctgggccgcgcgtcccgcctgtgtaagcacgcgttgtactgtcgctggatgcgtgtgcacggcaaggtac

SEQ ID NO: 263464 - DNA, 122 bp, Homo sapiens
ctatccctgtgacaggaaaaggtacgggccatttggcaaactaaggcacagagcctcaggcggaagctgggaaggcgccgcccggcttgtaccggccgaagggccatccgggtcaggcgcac

SEQ ID NO: 263465 - DNA, 122 bp, Homo sapiens
gacagataaagacagagcagcctgtctttattggaggttcctctgccagcgggaagggtccggggaaaaccagagccagagccagagccagagaaacatgaagcaccccggggcctcccaca

SEQ ID NO: 263466 - DNA, 122 bp, Homo sapiens
tcagctgtcagggcctccaaataagggtggagaggaggaaatggcaggcagccagcagcccgagacaaatggatccagatgctcaagctggcctcacacctgcctcatccgccacgtgggca

SEQ ID NO: 263467 - DNA, 122 bp, Homo sapiens
ccttccctcaactcatagataatccgttccacaggccttccgctcatctcgtagataatccgttccacaggccttccgctcagctcatagataatccgttccacaggccctcccccaactca

SEQ ID NO: 263468 - DNA, 122 bp, Homo sapiens
atccctgagtcgggcggggctgccacttcctcctcctcccactcctcctcttaaatttcccgttgttccaggtacatcttggcttaaggaagggagcttctgacttaagccttgtaaaaatg

SEQ ID NO: 263469 - DNA, 122 bp, Homo sapiens
ctctctccctgactagaatgtaagcccgtggaaacacgaccttggtctcatttgttcactcgtaaatttccggttcctggaatagagcccatcatggtaagtgcttaataatatttgagaat

SEQ ID NO: 263470 - DNA, 122 bp, Homo sapiens
gacagtcacctgatctccttcaaggaaacttaagttccttgttgatcagggccaatgtaccgccagtctcttcctccaaacagagcacacacagcccggcaaatccttgaagggaaggaatg

SEQ ID NO: 263471 - DNA, 122 bp, Homo sapiens
tcacattttcccatatccaaatatgaccaatcattgatggcccagctcaagggtcaccaccgattcccctttccctgccctcaccacccacaccttctcatggcacccatgccattctgcct

SEQ ID NO: 263472 - DNA, 122 bp, Homo sapiens
ttgagccccatcccctcgctgggcaaagaccatcgcccacacaccgctcacatctgctgccgagagcttccagaattccaggccgcgtttaggaagcttcagcggaggcatgcaggctgccc

SEQ ID NO: 263473 - DNA, 122 bp, Homo sapiens
tgctgaggttggatagaaacatttgagaagaaggtcgagaacttggcaaggcaaagcaaacgggagtggacgtgtcgcatagcacacagggaagcagcctaaaaaccctcggatttggagga

SEQ ID NO: 263474 - DNA, 122 bp, Homo sapiens
caccgggtgcccgggaggcggctgccccagtgcggcgccgggagccacctgcccgccgcccggaccagatacattccgtgtacatcacgcccggggcagacctgccagtgcagggcgccctg

SEQ ID NO: 263475 - DNA, 122 bp, Homo sapiens
ttacgtttcaaaagacaccaggaaatgcgaagcttgaactatagcttataacagagctcacgacaggttccctttctccttttcctttctttcctgtcttttcttcttcctttttaaatgga

SEQ ID NO: 263476 - DNA, 122 bp, Homo sapiens
atatgtcggaatcatggacccaaacacaaagcgcttagtagttatgtgtaatattcttttcgggggatcagagagcgcacttcaggcaccatttctttctcacatctttcgagtgggccagg

SEQ ID NO: 263477 - DNA, 122 bp, Homo sapiens
gcggggctgaagggcaagggcaccgctcaagctggctttggtcagggttagggacagggccggctccagaggcgacggggtcgcaccctgagcggaggggctcccggggtccccaggggtta

SEQ ID NO: 263478 - DNA, 122 bp, Homo sapiens
gcccagccaagatcaggtgacatttgaacagagaactggaggaggtgggggggggaaccacgtggatatcttggagaagaactgtacagggaacagtgtgcaaaagccctggtggtagccaa

SEQ ID NO: 263479 - DNA, 122 bp, Homo sapiens
acctgaggcaggccatgcttgaacattcactgggctcagaatgtgtcaattatctctgcccgacaaacgagtgttcagtcagagtattctctcagtgaataacagaaattaagggcaagtcc

SEQ ID NO: 263480 - DNA, 122 bp, Homo sapiens
agggtggcggtgagtggtggggcggaactggaggtgcgacccgccggggagccggggcggcgcctcgcgctctccctccctccctcccaccgcgaggggcaggggcgccggcccccggcgag

SEQ ID NO: 263481 - DNA, 122 bp, Homo sapiens
agaatgtctatatttcacttgtaacaggacagaaatacagttttgaatttgatatggttccgagtacgattcttaaagtaaatacataatgagagaattcttggatctgtaaaatgttcagg

SEQ ID NO: 263482 - DNA, 122 bp, Homo sapiens
cctttcctagtcaaagaaaggggtgacagatggcacctggaaaatcgggtcacttccacccgaatacagcgcttttccgacgggcttaaaaaacgccgcaccaggagattatatcccgcacc

SEQ ID NO: 263483 - DNA, 122 bp, Homo sapiens
gatgagaacatttttggactatcttagagactggttaaatggttgtgacaagaattctgacgaaaacatggacagtgaaggccaggctgagggggcctcagataaaaataagaagctttctg

SEQ ID NO: 263484 - DNA, 122 bp, Homo sapiens
aaaataatctgacaaagaaatttcgaaatagaactattagtgtgttttcacaaacttactcgtttgcaacgttatttctagggtttcttcccagtgtcacttctctgactgagaaatgtctc

SEQ ID NO: 263485 - DNA, 122 bp, Homo sapiens
tgagcactgcgtcgcgacgggagagagctttacggcttctgttgcggctaacgggcggggcgtctggtcagcggcgggaaggcccttaggcgctcagagcgggcgggccctgtgaggcggaa

SEQ ID NO: 263486 - DNA, 122 bp, Homo sapiens
cccagaaacgaatagggccccagttccgggcctaggaagggaaaacccaggtctcccgggcgccctggagctgtgcccccctgcccggagcaccagccccactcgggctttccttctccccg

SEQ ID NO: 263487 - DNA, 122 bp, Homo sapiens
ccggagcgggcggggtggccatgaagcctgagagagaggtgtgtgtcctgctctctgcaccgtgacgcctcccgctccctgaaaaccagggagaaattactctgcccaagcggaacacgccc

SEQ ID NO: 263488 - DNA, 122 bp, Homo sapiens
gcggcagatgccaggcgggcagccccgcccctgcgcgccgcctcagcggcgccttcaagacgctggtcccaggcacccacgcccagggcgcctcggatacccaccccctcggccccccgcac

SEQ ID NO: 263489 - DNA, 122 bp, Homo sapiens
ctttcaaaataaaactaataatcacgtaacaggccgggcgcggtggctcatgcctgtaggcgggtggatcacgaggtcaggagatcgagaccatcctggctactacggtgaaaccccgtctc

SEQ ID NO: 263490 - DNA, 122 bp, Homo sapiens
agaaaaaaatgttaaagtctctctggagagtagaagcctgggggaaaaccaaaccaatcccgttctcacattgccacccagagatactgccaatgttttcagttcacgggtgaagtgtaggc

SEQ ID NO: 263491 - DNA, 122 bp, Homo sapiens
ttagcaggacctgtgtgagaatgacataacttcaccgcctcttacctgctccagctgcaacgcgtgagagtgctgaactgtggcctagatttttctctagggctttccacggaagtgagtca

SEQ ID NO: 263492 - DNA, 122 bp, Homo sapiens
ctatacttaggaaactgggaagaactggtgaagtacttgcagatggcccgtaagaaggctcgagagtcctatgtggagacagaactgatattcgcactggctaaaacaaaccgccttgcaga

SEQ ID NO: 263493 - DNA, 122 bp, Homo sapiens
ccacccgcggcacaaccccaggcctcagtgccgtcaggtgggctaagacagaacagacctcggttctcagggctttaacgaaataacgcgggtaaagcacctagggcagaagccacacagaa

SEQ ID NO: 263494 - DNA, 122 bp, Homo sapiens
gggccgcgcgcccagggagaccgcggcggttgaggagctcggagacgcgggagtaggcggcgggcccgggaggccgggagagaacgttggccggagcgcgggcgcgcggcccggggacgagg

SEQ ID NO: 263495 - DNA, 122 bp, Homo sapiens
ggcacagttcccggggcccgcagcctccagggcaggcgctggctggaggctcttcctgcccgcagtcctcaccgccatagcccacgtggcacaggcacactccttgcacacaccgcccacgt

SEQ ID NO: 263496 - DNA, 122 bp, Homo sapiens
ctcctcctcggggccagggtgagtgtcatgggttaataaggccggccccgccttcaggagcggtccactgggagatgtgtgctgcgcagccctcttgcgaaagctctcccctggtgggacat

SEQ ID NO: 263497 - DNA, 122 bp, Homo sapiens
cgttcaacctaaaaaccctttaagtcagtcttggttaatgaaaagaaatcagaggccacacggcctctgtgttttcaggaaagacagaggcgagtagattatgacttcaggaacacaaacaa

SEQ ID NO: 263498 - DNA, 122 bp, Homo sapiens
tcggccgagcggatcggccgcagaactcggcggagtcgaggggtccaggcccaggaaggacgccgccggggcgccccccgcccctcaagcttgcgtggcggcagcgcgcacgagcgctgggg

SEQ ID NO: 263499 - DNA, 122 bp, Homo sapiens
cggggccctagcctcgaccgcgacgttcgctcgcatcgcgtacggacagaaacccgtgagcgctgaagaaagaacacctgaatccggagccccagcccccgtcgctcgtttgcgcgacccca

SEQ ID NO: 263500 - DNA, 122 bp, Homo sapiens
cgctttggggccctctccaggcagggctgcacaccccacccttcctccaaaaaagttccccgcaagacaagttacttctcaaagttggggagacggaggcggtgcttttaatgtctttccat

SEQ ID NO: 263501 - DNA, 122 bp, Homo sapiens
gaccgcggcgtccagggggcgtggccgcgctgtgccgggcggaccctacccgttcattggcgggaggctggagtccgcctctgcggagcttcccactcaatcagttgtgcgggtcgtgttgc

SEQ ID NO: 263502 - DNA, 122 bp, Homo sapiens
ctggcttttttgccacatgctctgctgtttggtagaactgtattatagtcagaaaccttccgcttttctgcagttgtttgcatgctgtttccaaggctagccctctgagtctgttttctaga

SEQ ID NO: 263503 - DNA, 122 bp, Homo sapiens
ttcctattggggtcacctttgtgcctccctatcttaagagcacacttgggcgggtcggggcgggacgtgctgggtgtaggtgactcaacaccggacagttttgcttccagaggctgacacgc

SEQ ID NO: 263504 - DNA, 122 bp, Homo sapiens
gcccaagcatggccttgagcgacttcatcacacctgcatgaggtcacaagcagtcactagcgcaggggggtgaggcgagttctgggtgaaagaaacggggcggggctgaggccaaggaagag

SEQ ID NO: 263505 - DNA, 122 bp, Homo sapiens
caattgtgatctttgtgtaaacgcggtcggtctggggcccgcatgcttataaaaataaagcgtagggaagcacggggcggggcgggaacaaaaggggctttttcgctggctctctaatatgg

SEQ ID NO: 263506 - DNA, 122 bp, Homo sapiens
acaacaaaatcctgggctctgcttcagactagttaaaccagaatctccagggtggggcaccggaaagaacaagaaaaaagaacaccttatttttatcttcttcagtgagccaatgttcattc

SEQ ID NO: 263507 - DNA, 122 bp, Homo sapiens
gacgaggctgcgcagaacatgcgtgtggtactgagctgggtgtgggaaggcatcacgtgacgaggctgcgcagaacacgtgtgtcgtgctgagctgggcgtgggaaggtgtcgcgtgacgag

SEQ ID NO: 263508 - DNA, 122 bp, Homo sapiens
ttggggaaagggagtaactttagaaccttctggggtctttcactttaaaatgaccgttgccgagtttagagctctctcagcattcaatctattccatctctggggttagagagggagcagga

SEQ ID NO: 263509 - DNA, 122 bp, Homo sapiens
agtcatagctcccagcctctctactagggtagttaacagtcccaggttcaaaataatccccgtccctcttataagattaggcggtgtcaagagcaactatctgtgagaccctgggccagtga

SEQ ID NO: 263510 - DNA, 122 bp, Homo sapiens
gcccgtcgtccgaaggtctggcactgagtatctgcagggtcagtctgccctcgtcaatggcgtcactcaccagtacagtcctccctctgtactctgccatctgctctccagccacatggtcc

SEQ ID NO: 263511 - DNA, 122 bp, Homo sapiens
gctggcaaccacgcgcgcagcgagaggtgaacaatggggggtcaaattcgccaggaaacacgtcccagccttctcccccggccagaagcgaccgcagcggagggagtgggcataggggtcgc

SEQ ID NO: 263512 - DNA, 122 bp, Homo sapiens
ttttttttttttgagagggagtcactctgttgcccaggctggagtgcagtggcatgatctcggctcgctgcaacctccgcctctggggttcaagcaagcaattctctgcttcagcctcccaa

SEQ ID NO: 263513 - DNA, 122 bp, Homo sapiens
tccttttgggggcctggttgtgctttccctgtgggagcctgggatgtggggaacagacagcgacactcatcccccaccgccacaaagcggaggattcctataagctccacctccctaatgcc

SEQ ID NO: 263514 - DNA, 122 bp, Homo sapiens
agcctttaacagactgacttatccgcgtttctaacgtggcaccgcgaccctgacccttggcgcctctaccaggcctaaagaaagaacttgcaagctgggcatgggaggatggaagtcaaata

SEQ ID NO: 263515 - DNA, 122 bp, Homo sapiens
cagaaaaacctcatttctattgatgaatggctgttggcatacagaaacctggcatgtggtcgaggagaagggatacagctgacatgagaaaagcttgagaaggaaactataatcccccttca

SEQ ID NO: 263516 - DNA, 122 bp, Homo sapiens
gtgacacttcaaactcgtaccgtgagtaataatgcgccgtccacggcaccgcatcgaaaacgccgctgagacctcagccttgacctccctcagcgtggccgggaccctgagcctctgcgcag

SEQ ID NO: 263517 - DNA, 122 bp, Homo sapiens
ccaggccctgagccgctgctgtctgagaagcctggggcgcactccccaggcgagcggggccgtgtccatcgggtgccaaactttgcctggaggggcctttcttaaaagcctggggtgggggc

SEQ ID NO: 263518 - DNA, 122 bp, Homo sapiens
ctcccttactttctcagcgctgtgtggagggggaatgccccgtgcttctcaccctgtcttcgcctgtccccaccccaagctccactgggcggggaggagaggggcacctccataggactcag

SEQ ID NO: 263519 - DNA, 122 bp, Homo sapiens
tttaacatgggggtgtgggggggttcgcggcagccgagtgccaaggcctgggaagcggcgcggcgcgtgcgcagtggcgttcggcgggacccgctgaggcaaagcggagccgcagtgacaga

SEQ ID NO: 263520 - DNA, 122 bp, Homo sapiens
gagccagggcgcaagataacgccagcccccgcgtccctgtgatattaattactcgagacacgtgcatgacatgctgctcatttgttcctcaccgccagctatcttatctccactgacgaccg

SEQ ID NO: 263521 - DNA, 122 bp, Homo sapiens
ggagaaccaggaaaacgtcctgtcagtgaaggtttggttcaggaagaacagccaaatccccgacaccgttgagaacaccagggtggtgctgactctggtgtggctgctcggaacccttagaa

SEQ ID NO: 263522 - DNA, 122 bp, Homo sapiens
tcactctgatagagaggggctttcattcctgtccaggtccccctcagatttgctgcctatcgattccaatatattctgtcagaattctaaattattcaggtccaaggtctcccctcccgccc

SEQ ID NO: 263523 - DNA, 122 bp, Homo sapiens
acctttgagaagatcttttcccagaagctgggtgagtatggcagtggctctgccagccaccggacttaacttcttgcccctaccccagccagcccagctgtgctccccactctccagagatt

SEQ ID NO: 263524 - DNA, 122 bp, Homo sapiens
ccctaactggattatgtatatttggcctggaagcctgatacttaatatcagcctgctctccggtgaatgcctttcttcccccggataatctattcccactccgcttccttctagacttctaa

SEQ ID NO: 263525 - DNA, 122 bp, Homo sapiens
tgaacggagaagggggcagcggcgggaacagcaggcagctgcagccgccggcagcaccttcgcctcagagctatggcagccccgcgtcttggagctttgcccctctgtctgctgctccctcc

SEQ ID NO: 263526 - DNA, 122 bp, Homo sapiens
cccttctcttccccgaggctatgtccacccggtgcggcgaggcgggcagagccagaggcacgcagccgcacaggggctacagagcccagaatcagccctacaagatgcacttaggacccccg

SEQ ID NO: 263527 - DNA, 122 bp, Homo sapiens
cctccctgacagccagccccccccccagtctcaggaggcattttacagtgagcagaagcacgttctggtccagcaacaagtagatgtcagttggttagggtaggagttggcacccgttcgga

SEQ ID NO: 263528 - DNA, 122 bp, Homo sapiens
tcgtggcctggcattttgtgtcagtgttttttaacctttggaccctagttcaaccgactccgagacctaggggacagatcttaagttttacaataacccaggggtcagacagggtctgatct

SEQ ID NO: 263529 - DNA, 122 bp, Homo sapiens
tctcaaagctgggagtaggaaatatggacaaggaatttctaagcccatccccatgtatatcgtgttcctgggctggtcaagccatttttctcagaaggaaagcagtgggttctgattggggc

SEQ ID NO: 263530 - DNA, 122 bp, Homo sapiens
ctccacagctactgcctcctggctcacactgaggtctgcgccgcccccgcgccacccccgcgcccattgcctcggtgcaagcgaccaactcacctctcggagccgacaccagcagcgaagcc

SEQ ID NO: 263531 - DNA, 122 bp, Homo sapiens
ccggcccccggctctggtcccggtcccattggccactccgctgctactggaaggtagatccgagccgagtacgcgcgcgtgcgccgtgagcggcggccaggccgctctgcttggcgctcatg

SEQ ID NO: 263532 - DNA, 122 bp, Homo sapiens
gttctagagacagcgagaagattcccaaacaagcccttttaagggcgcctcctccggcggcggcagcgggagggaagaggccatctttcaccggactgcgtcccccaaacggctcgacctca

SEQ ID NO: 263533 - DNA, 122 bp, Homo sapiens
ctgaagccaacttagaatttttagtagtcttaagaagctgtattgtttttctgaacccaccggaggttacaatgtatatgctttcttaatatactgtatgggatggttttgtcaggaaatca

SEQ ID NO: 263534 - DNA, 122 bp, Homo sapiens
taatttcaatgtaattaagttccaagaaagcaggaactgcgttttgttaactgctgtatacgcagggccaataagaatgtgggggtagatcttacacactcagaatagataactgaatgaat

SEQ ID NO: 263535 - DNA, 122 bp, Homo sapiens
tcgcagagccgcttaatctttgttgaaggcagctgcggttcagccctgagggccacgggacggacgccactcattcagccctaccgggggcgctgtggcagccggcattggttgccgtgccc

SEQ ID NO: 263536 - DNA, 122 bp, Homo sapiens
aggcattctgtgtaaagagattgtacctttaaccatgatctcatactgcctttcaagttacgatactgctaatgtttgtaggttctcaggagaaggagcacacacacaaagtaattccttaa

SEQ ID NO: 263537 - DNA, 122 bp, Homo sapiens
ctcagacgcaggctttcttcagtagacatctggtcaaagtgaagaaatgatcagtcatcacgaataggggggccagcccctccaccacccagggcagcgttccctgagctcgtctcttccag

SEQ ID NO: 263538 - DNA, 122 bp, Homo sapiens
gaacgtgtagtatatgcgtgtatgtgactgggcacgtgtgtgtgcatgtctgtatgtgtacgtgcatcctgtatatgtgcatgcatgtgtaatgtgtgtgtacatggtttgtatgtgcatgt

SEQ ID NO: 263539 - DNA, 122 bp, Homo sapiens
ccaccgaggtgaaagcctagggggccgggtgaagaaatccccatacccgggcccagaaaccgctccaggtggaagtaacttgtctaaagagaacagggtgtaacgggggtcatttcagggct

SEQ ID NO: 263540 - DNA, 122 bp, Homo sapiens
taggggcaccagaaagaaccatggttctggggaagatgggccaggcggggcggcactcaccgagacgagggcctcacagacgctggtgagcaggtctggccgcagcgagtggactagcagct

SEQ ID NO: 263541 - DNA, 122 bp, Homo sapiens
ctaaattcaaggaactctataactgcacctagcatattgtctgacactcctcaataaagacgcatttaatacatagacaaataatgagtgaacattttgagtggagggccggaaaatgtcta

SEQ ID NO: 263542 - DNA, 122 bp, Homo sapiens
tgtccatccccacggacagcatctgggtcccggacattctcatcaatgagttgtgagtaccgttatccattgtgaggtggctgggtggcttaggagctggagaagcccggggacagagagac

SEQ ID NO: 263543 - DNA, 122 bp, Homo sapiens
ggcttgcatcccaggtcgtggcggttttggtgcctgaagcagggagcgcggagtcgttcccgagagaggcggccaggctatgctcgccggtttccggcgttccgctccggccagccagagtc

SEQ ID NO: 263544 - DNA, 122 bp, Homo sapiens
gaaaccctgagccaccatgcctcagggaaagtggtggcacttcctggtggcaccaggaatcgcacaaggccatcactgccgcctggtgcacagggctcccgcggctggcatctccagagcct

SEQ ID NO: 263545 - DNA, 122 bp, Homo sapiens
tctcgctagctgaagagtaaagctacaaacattcacgtcaagcgttacagctcttaaaagcggtgtggacccaaagagcgaaacaacaaagcttccacactgacgaagaagaccctaagtgg

SEQ ID NO: 263546 - DNA, 122 bp, Homo sapiens
tgtgactcctctgttctagcccagctgtttgggttgcaagaaagagactcactccagttgcgtcataggatggagttttattgggaggacattctggacgggctcccagcaagagtctggca

SEQ ID NO: 263547 - DNA, 122 bp, Homo sapiens
gacctcgctcccctgccggtcctccatggcccccggtcctcctacctgcgtcctcctgcccggctgtcccagccccgcagctcccgccccaggcccccacccgccccgcccccgttgtcggc

SEQ ID NO: 263548 - DNA, 122 bp, Homo sapiens
aattaactttatctgttgtcttatataatcttcagtttaatggtgtgaggcgagtatcaacgactctatttttacagataaggaagctgagaatcacagaagagccaatggcagaaccagga

SEQ ID NO: 263549 - DNA, 122 bp, Homo sapiens
ctgttctcctccctcacagtaggaggcctcaggactctggagtgagagggaggggacctgcgcggaggatcccaggggagctggttccagggcccaccggtgccttcccccgtccccggccc

SEQ ID NO: 263550 - DNA, 122 bp, Homo sapiens
ctctcagttaagaaaccctctggtgactcagaccaggtttcccagcttcccatctgcattcgctgtctgggaggaatctggtatcagtcatctacactgtagtgggaaagtgaggcaaagcg

SEQ ID NO: 263551 - DNA, 122 bp, Homo sapiens
caggacctctgggggcttggctgcgcggggatgtatcctcagccacctccatctgtgtaacgccccaggtacctcccccagttgctttccctgcctacctccggcgctgagctctgcggtcc

SEQ ID NO: 263552 - DNA, 122 bp, Homo sapiens
gatggaagggagacgggtactatcgccatccatgactactactccctttggtatgccacccggccagaacatctcagttctcatttgcagtgcagctctgcaggccccggactcacagggca

SEQ ID NO: 263553 - DNA, 122 bp, Homo sapiens
ctggcgcccccaactgcctggccaaggtgactgctacacacgtggggtcgcagaatccctcgagtcacaacgtcttcaacgtcttgtcagtcccgtgatcgcactaaacgtatttaaagccc

SEQ ID NO: 263554 - DNA, 122 bp, Homo sapiens
cttcggccggccgctgcgagcagagctggaccgcagcggggactcagatcgccgtagccacgcctacccacgcgggaaagggcgagacatgcaaattagaaatggcgcttcagccacggggc

SEQ ID NO: 263555 - DNA, 122 bp, Homo sapiens
gtatatatgggagtggtatgagtgaggctgaaaaaataggttggaagtagataatgtatgcgggaatcagggaaaaagcaatgtcattaaggttttgaggaaagtgtagggatgtatgaaaa

SEQ ID NO: 263556 - DNA, 122 bp, Homo sapiens
tgcttgtctcccttgtctctccttagtaagcgatacgaatcccagcttcgggatcttgagcggcagtcagagcaacagagggagacccttgctcagctgcagcaggagttccagcgggccca

SEQ ID NO: 263557 - DNA, 122 bp, Homo sapiens
gttgttagttttggaccgtgtgtgtgtgtgtgtgtgtgtgtgtgtgtgtgtgtgtgatcccgccagtgtctgctgatgtgcaagatcaaactaaccttcccctgaggaggaggggaaacagc

SEQ ID NO: 263558 - DNA, 122 bp, Homo sapiens
tgggcagcgcctgggtgtcgtggaagatgacgaagatgctgggctggcagatgcagtccacggcgctgtcgtagcgcaggagcacgtggccaggaccccgcagagggggcgcccgcagaccg

SEQ ID NO: 263559 - DNA, 122 bp, Homo sapiens
agagagagagagagagagaaacgaggggtgggggattggatcagagactcggagagacagcggaggcccgaagagaaaacccaagagagactgacgcagagccagagacacaacgatagacg

SEQ ID NO: 263560 - DNA, 122 bp, Homo sapiens
tccaaagcctgctttgcttccttgaaagtacacattttgttccctggatccggaaagcctcggaccccagaggcagatcattcctcacctttttctcgggaaaaccatccctgaccccatcc

SEQ ID NO: 263561 - DNA, 122 bp, Homo sapiens
atccaattctgagagatccaactccttttcctgcagccgccggatctctgccacatagagcgccagcagctgctccaaacgctggatctgccgccgggaaccacgggtccttggagactgag

SEQ ID NO: 263562 - DNA, 122 bp, Homo sapiens
gaggctgaggcagagaattgcttgaactcgggaggcggaggttgcagtgagccgagatcgcgccatttgctctccagcctgggaaacagagcaagactccgtctcagaaaaaaaaaaaagac

SEQ ID NO: 263563 - DNA, 122 bp, Homo sapiens
ccctgaagctgccgggttctggtctccgcgactacgagccaccggtgagacagcagcccacgcgcacacagggagacctgtcctcgacatcacaagggcgccacttttggggagactcaccc

SEQ ID NO: 263564 - DNA, 122 bp, Homo sapiens
gctgcttttaagattatttgcttaataaactgcattagtttcattcttttgcatttttctcgcaaaaaatgttcataaaggttgggttctagggtgacaaagtgttgggaaattttgttgat

SEQ ID NO: 263565 - DNA, 122 bp, Homo sapiens
tatatatatatttttttctaactatagcaagcaagaagtggcagggcgcgcaccggctgtcgccaagtgctgttcaactcagggagccggggcttcgctccgtccctcccccggcttccaga

SEQ ID NO: 263566 - DNA, 122 bp, Homo sapiens
aggtccaaggtcacaaccacgcaggagaacgagggcagcacgaagccggcaaccccctgccgcccttcagaagcagcacagaataaaggtgggatcaaaaggagcgccagcgctgcaaggag

SEQ ID NO: 263567 - DNA, 122 bp, Homo sapiens
ctcaaatttctcacccacaaaatagggataataatatcctgttgttgtgcccttagatgacgcatatggcatctaacacatacttagcatgtggtttagtctggcacatacttagtattcag

SEQ ID NO: 263568 - DNA, 122 bp, Homo sapiens
cgcagcgggatgggcgggttgccccgtggtgtgcgcggcgcagcgggatgggcgggttaccgaggtgcagccagcagcccagacagctatgagcactcagtggacttgggcccaaacactgg

SEQ ID NO: 263569 - DNA, 122 bp, Homo sapiens
catgttggtcaggctggtctcgaattcctgaccacaagtgatccacccacctcggcctcccgaagcactggaattacaggcgtgagccaccatgccctgctggcctcccgctctgagattac

SEQ ID NO: 263570 - DNA, 122 bp, Homo sapiens
ctgcgcctgcgcagtgcagcttagtgcgtcggcgcgcagttctcccgcccgtttcagcggcgcagcttctgtagttgggctactggaggggtcgctcagaaacctcatacttctcgggtcag

SEQ ID NO: 263571 - DNA, 122 bp, Homo sapiens
ctagaaattagcaggcctggaattcaaactattcagatgtttctaactttggcaatcttgcgaatgacaatgcagttctctgaaatgcagaacacagaatgagaagcaaatttctggcagtt

SEQ ID NO: 263572 - DNA, 122 bp, Homo sapiens
tagcgttttcttagtaagtccagcttttgaacgtgcgactggccagaggtgcccatttctcgggtgacgctgccctctggcggcagcatacctcacgcctggcggcgggaagtagccctctt

SEQ ID NO: 263573 - DNA, 122 bp, Homo sapiens
tcatagtaggcacatgataactatttattgaatgcatgagtggatggaagcaattgatatcgtggagggtggaagagcagaaggtaacagctggacatctccgtccacttcagcttgctagc

SEQ ID NO: 263574 - DNA, 122 bp, Homo sapiens
attggtgagaaaggtctgttcctattcctattccaatagtgggcttccagagtgtgcagtcgacgcgctgcccctcactgccttctgtcttccttcacggcccctagtcaactccacagaga

SEQ ID NO: 263575 - DNA, 122 bp, Homo sapiens
gggcagggcgggccacgtgaggcccttcatcgtacccagctcttcctgccttgcagacaccgaccacgggcccgacattttctcaagaaaagaaaacacaagagcccacatttcttatctga

SEQ ID NO: 263576 - DNA, 122 bp, Homo sapiens
ctacatgtggatttattgaatgtggcccttccaaaatccgggacagatcttttcaacactcgcaacagatgcctatgcagttcgtcgttttgcgctttctggttttcctgaggctccagctt

SEQ ID NO: 263577 - DNA, 122 bp, Homo sapiens
gggattgctcttccccttctgtctcccggtggtagaagtaattgaagttggaaacaatcacgggaactggcaatgcgatggtcaagacaccggcgatggcacagagagatcccacaatcttg

SEQ ID NO: 263578 - DNA, 122 bp, Homo sapiens
cccgaaggcgttcctggagggccctgggatggactcagagatccccagagccccaggggacggaaaatctagccccgggcacttgccttggagtctgagtgatgcgcgtcgttggagcgcga

SEQ ID NO: 263579 - DNA, 122 bp, Homo sapiens
tttctcatttgtgtgaaatatcactggattctctccctatgctccgggggcacacatgagcgcacacgcacgcccgggacggagactggggttcccagccccggcgggggaaattaactgtg

SEQ ID NO: 263580 - DNA, 122 bp, Homo sapiens
tgtcaatccctttacggacagggaagcagaccaatcagaattcccaggtccgcagctgtgcgaaggaccaataagaggcctttttgaacagtgacgccaggcgccctggcgctgcccccaag

SEQ ID NO: 263581 - DNA, 122 bp, Homo sapiens
tataatgccaattaaaacaagtggatatttgacagttggatatttgagtgtggagatcaacggagaaatgcaaatctgataataagcacatatatagatggcatttaaattaaatccagggt

SEQ ID NO: 263582 - DNA, 122 bp, Homo sapiens
ccgccgactggagactccctactacctggtgggccggaggccagctggagggaacagctccggccagagtgacaactgcagcagcagcagcgaggccaacgggacggggctggagctgctgg

SEQ ID NO: 263583 - DNA, 122 bp, Homo sapiens
ccagcaccagagccaggggacagctccccgcgcgcgtcctcgctcccgggcggggccgggcggtacgtcccagagcgcagcgcgccccccgcctgctgtctcagtgccccctcacctccgcc

SEQ ID NO: 263584 - DNA, 122 bp, Homo sapiens
atgtgcaggcagaatcagctgtggagtggctctgaacaagtccctcccatctctgtgcctcggtttccccatccataaaatgaggaagccaggtgatagctcggtccctcctggaatccttc

SEQ ID NO: 263585 - DNA, 122 bp, Homo sapiens
atcgtaaagtttggtgagccaaggcttgccaccacaagagcgggcagtctgagccgaggccgggctgtggacgcagctggctgagtgggtgagcttcatgctattcagttggcggcctgtgt

SEQ ID NO: 263586 - DNA, 122 bp, Homo sapiens
acatgttgtatagcctgccttaataaagagctgatggtggctttctcattttactgtattcgaaaacttatttatccattttagaatttttcagcagttacatagcaggtttacccacagat

SEQ ID NO: 263587 - DNA, 122 bp, Homo sapiens
tatgccgcgctctttcctcgtcaggaagccctccgaccccaatcggaagcctaactacagcgagctgcaggactctaatccaggtgcgttggaggggttctgggctccaggaggtttggggg

SEQ ID NO: 263588 - DNA, 122 bp, Homo sapiens
attacagggccagatacacctggggcttcaccaaggccctacatgggcagtagtccctcccggggtgccgcatccagagctggtctcaccagcggggtcacccactccggagtaagctttcc

SEQ ID NO: 263589 - DNA, 122 bp, Homo sapiens
caaatcccgcccgggaagggaagggtcgcgaccggaccctggagacccacggctgcctggcgatctgagcccaccccggcgctgccgtcccgcccccacttccgatcggtcgaaggtcacgt

SEQ ID NO: 263590 - DNA, 122 bp, Homo sapiens
catacagaagagacaggaaggcttcaattccccccaacccctcagaggctcctcagccctcggcctccattaaagaggccaccgtggggacccgggagctgcagcttcccccatctcctcac

SEQ ID NO: 263591 - DNA, 122 bp, Homo sapiens
ccccaaagatatcttctctggtcaaagagtttccaaaccgttgaatgtgaatcttgctaccggcagcatcagcatcaatgggagcttgttaggaatgcacattcttaggccccaccccagac

SEQ ID NO: 263592 - DNA, 122 bp, Homo sapiens
gcagccgtggaagagacggactagcgtcacggtgtcacagtgagggcgagaatgcgtgcgcgtgctcagacatcgcgtgccacgcacgcatggccgattactgtctttctcagcaattgctt

SEQ ID NO: 263593 - DNA, 122 bp, Homo sapiens
tcgcccctttctctgggaggacaacctgctgacccgaagccaggtaggccacctcgtccccgtccccctcacgttgcagcgtccaccaggccagcccactgctcagagtggggctgggggta

SEQ ID NO: 263594 - DNA, 122 bp, Homo sapiens
tgaccttatctttttcaagtgtgaaattcagtggcagaaggagatggatctatcccagggcgactctagattcttcccgcaaagatatgcgtgctgctttccgtcactagcgccccgagagc

SEQ ID NO: 263595 - DNA, 122 bp, Homo sapiens
tctgtgccgcccccttcattaaacttgaccgttagcgccttgtgtgcggtttgggggtcacgctctgccctgtcctgttcttgcttgcttgggtcgtccgaagtttcttgttgcttttgtct

SEQ ID NO: 263596 - DNA, 122 bp, Homo sapiens
gcatttcattaacatccatttcatccaaacatcacaggagaaatgagaggagattttctgcgggggatggatggcttcagttacaggagaaaacagaaccaggacccacgcacgatggtcct

SEQ ID NO: 263597 - DNA, 122 bp, Homo sapiens
agccctacttccggtggtgctgtggtctgcccctggagaacccagaagaacacagctgtgcgcgcccacaggctctgggggcgggagaagataagtcgcaaggagggggcgggacctacacc

SEQ ID NO: 263598 - DNA, 122 bp, Homo sapiens
ggctacaccttgcagaagttagggaaacacgaaccacacagacaaatctcaacagcatggcgacgagtttcaggggcaggacaaaagaagcgcgtgccacgtgatgcctttagagaaagctc

SEQ ID NO: 263599 - DNA, 122 bp, Homo sapiens
actgctagaaagtcatacgcatttggggcatgtatgcctgatttagagagtgggaaattccgttgcagtttgtaatccgggacaagttactgatactctatgttggtttactaagaaataaa

SEQ ID NO: 263600 - DNA, 122 bp, Homo sapiens
ggggaaggatgagggtatttattctcctggctctctctctgctggtctgttggtaggcagcggctgcatgaggccacatcctaaggccacagcctctgttgatgaactttcctccaccacag

SEQ ID NO: 263601 - DNA, 122 bp, Homo sapiens
tcaaagcttagagaacagaggaggaagagtgagaggaacatagaaatgctaaaagcttcacgcattgtttaaggtgaataacaagatttaccctttgtacttaggtgaaattttcttcactt

SEQ ID NO: 263602 - DNA, 122 bp, Homo sapiens
gtggcctcctctctctctaggctgaacctgagctccggttgctaggaggcgggtgtggcccgtgggctcccgagcgcgcgcgcctgggaccgctccgggggacccgccaggtttgtctttag

SEQ ID NO: 263603 - DNA, 122 bp, Homo sapiens
gctctgattcagtaggctggggaggagcccaggagtttgcaggaggctcccaggtgttgccgatgctactgatctgggaagcacactttagtagacagccgcttagtatagtttattacaca

SEQ ID NO: 263604 - DNA, 122 bp, Homo sapiens
ctgcccggccgccccgccccgagggcggctcccgcccgcgccctgcccaccccggccgcgcgcaccacaacgcccccgccccgccgcccggaaccagctgagcgcagctggacccagcagcc

SEQ ID NO: 263605 - DNA, 122 bp, Homo sapiens
tgaactcctgacctcaagtgatttgcccgcctcagcctcccaaagtgatgggattacaggcgtgagccaccatgcccagcctcaaatgtcttctaataagtgtaaggcaagcactttaataa

SEQ ID NO: 263606 - DNA, 122 bp, Homo sapiens
atttctgttcaactggacccgaaggacaggttgggaggtcagcggaaccacagcccacagcgccagctgaggtggggctgtagagggcctgaacactcaggcagagggaaacccagccttcc

SEQ ID NO: 263607 - DNA, 122 bp, Homo sapiens
aaaggaaatgaataaagttaacagtaatcttattaatgccattacatattaattcatcaacgtacttagtaagcattcaataaaaatttcacatgagtaccgcaggcgatatgaacacatga

SEQ ID NO: 263608 - DNA, 122 bp, Homo sapiens
ggctatgaaattggtaatgtcattcctgtttcacagatgaggaaactggggttcagagagcgaaagtgtggtcctgccaggagtagtggagctaagactgaacctcacacctcggggccagc

SEQ ID NO: 263609 - DNA, 122 bp, Homo sapiens
cggtgcgcgcgcctcaaagatcgcaaacccaggttacggcggctggccacgcccctccaccgccaggccacgcccccgcagcgctcagtcggctccctgcaaagcccagctgcttccggctt

SEQ ID NO: 263610 - DNA, 122 bp, Homo sapiens
cactaagctttcccagcctcaggtcaatagtattaggaggttggttcctcaccggagggtcgggaacaagacgccagagcccttcttccagcgcctgcagcgagttaaggccgagggtatgc

SEQ ID NO: 263611 - DNA, 122 bp, Homo sapiens
cagcgttcagaggcctcgttctgtcgcgtttctgcttgttgctgccgctagggagtctgccgcccctctcgtcacccgcccgtgggtgaccggtgtcttctccctggaggtctgtgagccgt

SEQ ID NO: 263612 - DNA, 122 bp, Homo sapiens
atgtccagtctgctatggttcttaaaatattcatagaatagaaattgaagtaagtctattcgtttttatattaaaagtagctagtacggtgctctgtacttatgcactccatggatgctgaa

SEQ ID NO: 263613 - DNA, 122 bp, Homo sapiens
atgagacaggaagtctccagctcactggaagccaatccaggcgcctcccttgtgtagggacggaaaaagtatgcccctgccccgagctggagggagaccgggattttgccggagccagtccg

SEQ ID NO: 263614 - DNA, 122 bp, Homo sapiens
cctccaaggagcgcctgctcgagtactcccgccgctgctttctggccctggacgacgagacgctcaagaaggtgcaggcgctcaagaagagcaagctgctgctgcccatcacctaccgcttc

SEQ ID NO: 263615 - DNA, 122 bp, Homo sapiens
tctcggaagactctcccaggagctggttcttcgattaaatttgctctgccactccggtgccgctgaacaagtgggaagaaagccggcaagcctttcatatagggtaataatagtcctgaaca

SEQ ID NO: 263616 - DNA, 122 bp, Homo sapiens
gcgcggccgctcggctgcgccctcgcggcaaagtcacacacccggcggggcgcggggcgccggccccttcctggcccgcgctggaaacctggaagtctgttgctaaaatgcacgcgccgcgc

SEQ ID NO: 263617 - DNA, 122 bp, Homo sapiens
ccctgccagcgacgctggatccctgcagagaatcaaggaaggcagtatcatcaaccggatcgaggcagtgtgcgtgggtgacagcatcgaagccatcaacgaccactccattgtgggctgcc

SEQ ID NO: 263618 - DNA, 122 bp, Homo sapiens
ctgcgccctgatggctacccagggccgcctgagggcagggggctcgagctgagcgaactgcgcaggcgtgacagggaagaggcggggagaggggagattgctggcaagcgggtggggcttag

SEQ ID NO: 263619 - DNA, 122 bp, Homo sapiens
ccacctttccggctaggtgagggcgcgagcgggcgagcgagcgagagtggtgaggggggacggaaaagcagaattacctgtagctcttgttctgccatctcgggcgctctcacacaccttca

SEQ ID NO: 263620 - DNA, 122 bp, Homo sapiens
gccgagagcggggggctgcggagcccccgggagtgggcgccggcgagaggagtgggctggcgccgccgcctctttcccctcctcctcctccttcttcctcttccttgtctctccgccgccag

SEQ ID NO: 263621 - DNA, 122 bp, Homo sapiens
gctttgtgacatcccacatggcttggtcccgcctttcagccccccagggttcactcgaaccgcctccgcgcaccccaacagcagagacgtaacgtgcaggactgactggtgcttcccaaaaa

SEQ ID NO: 263622 - DNA, 122 bp, Homo sapiens
tcacctggcgggcgtctgctccggttcagctgcaggaggtttcttgggagttcagcccagcgcgcagccccgccgcgacgccgcgagccgagaactctcctggggcgaagggagcgctgaga

SEQ ID NO: 263623 - DNA, 122 bp, Homo sapiens
ctattcattattctctccctctgacctagggcgttaatatgatcaggcctatgactcggccgtgttctgttttcctattttgcatttaatgctgggacccggctgccctagattaccatcga

SEQ ID NO: 263624 - DNA, 122 bp, Homo sapiens
ggatcaggtataggaggccaggccaggggccagagccagccaggaggacatgcagtgctacgccagcgagtttgagctttctccttagctctgtggaatgaggccttagcccatctttctaa

SEQ ID NO: 263625 - DNA, 122 bp, Homo sapiens
ggaggtaacaagcaggaataaaaggccaccagagtcacagagacgaagctgcggcgttaccgaggtgcgaatcactgtgattcctaggtgcgaatcatcaccagcaatcacttctctcagga

SEQ ID NO: 263626 - DNA, 122 bp, Homo sapiens
tgtactagattgagagttacggagaaggatttatccttttattcatttctgcatcgccagcgcccgacacatggtaggcgcttaatcaatgcctgttcggtgaataaataagaccggggact

SEQ ID NO: 263627 - DNA, 122 bp, Homo sapiens
ttaaggcacagcctgccgaagtgcacgaggaggctgttaaaatgaaggatgcgggccaggcgcggtggttcgctcacgcctgtaatctcaacactttgggaggtcgaggcaggtgcatcacc

SEQ ID NO: 263628 - DNA, 122 bp, Homo sapiens
ttcagtagagaactgatggatgaatgcgtgtcaagaagctaccagatgctgggacagaagcgttccgggggactggaagcctggtaatgacgcctgtttccagtagtcaggctggaggacct

SEQ ID NO: 263629 - DNA, 122 bp, Homo sapiens
ccgacgaggggcagcccccgactgtcttggtggcagaggggacttttattcagctggaaccgcgcggcgaggcccaagtgtctctggagagattcggggttcaggaggtggcgggtgcaccc

SEQ ID NO: 263630 - DNA, 122 bp, Homo sapiens
ttaatggaggaacctcagggggacggtccttcgtaggaaactctatcctggctctgcgcgcgctttaaggaaatggcttccctccaggacctcgagggatgcagcttttgcgcggatgacgg

SEQ ID NO: 263631 - DNA, 122 bp, Homo sapiens
ctaagaaggtggcttcagacccctttccagaaagatgtccctgaggacacacacacaaagcgccccttgaacagtctcctgtcctggccatgacaggatgtcttggcttccaccgggggcta

SEQ ID NO: 263632 - DNA, 122 bp, Homo sapiens
aaaatctgctccgccgagtccccggagtgaagagcgcgcggcgggaagggtctggggtagcggagcggattctcggcccaaagcctggggaccgctcagcccaccttggcttcgccagcgcc

SEQ ID NO: 263633 - DNA, 122 bp, Homo sapiens
gcgggcagagcggctttgtggcccagcgccgtaggttatgcactgaagcacacacagatccggaagccggcagcccttcccttgcacggggctgtcacagctgctgtaacaaataggccctt

SEQ ID NO: 263634 - DNA, 122 bp, Homo sapiens
gaaccagaagcatctgctgcgcttcatcaagcgggcaatgaagcggcacctggaggagatcgtgcacgtggagcagggccgtgaacagacgctgcgggaggtctttgagagcatgaatctca

SEQ ID NO: 263635 - DNA, 122 bp, Homo sapiens
cctgcagccgcacaatagtaatgcaagacgccgtgaaaaggaggaagagctcgacgtcgccgcgtcgacgtcatcacgcacggactcttccgcgccacacctaacaaatacgccgacgagag

SEQ ID NO: 263636 - DNA, 122 bp, Homo sapiens
gcccagccaagcccggggcggggaggaaagtccccctcagccgcactcgggcccccaacccggccaaggggtcgccaactcgcggcactttctgcctgtttgttttcgctcagtactcacag

SEQ ID NO: 263637 - DNA, 122 bp, Homo sapiens
agcggatggagcacccagccaaggggaatccatggagagcggagaagcccatggccaccccgaggacagggcttgctgtatcctccagtgctgtggtctgttgaaggctttgaggcaggacg

SEQ ID NO: 263638 - DNA, 122 bp, Homo sapiens
tggcagccctgaggtgccccccgccgagtcccagggccctgcaggggcctcgacaggagccgggcctatctctaaagcagagggaatggctgggcatgaacttcgacattccaaaaccccaa

SEQ ID NO: 263639 - DNA, 122 bp, Homo sapiens
gcgcccccgggcgcaggggaccccggggcggggggctgtggccggcgctggcggggcgaccgcgtaacggtgctgctggccgcaaacctgaccggcagccacaagctgaagccgctggtcat

SEQ ID NO: 263640 - DNA, 122 bp, Homo sapiens
gtgggccaggcactgctccaagatccttgtggaaattaactgattcagtcctcaggcaaacgtattttataggcagaaaaacagggatgtttagtaacttgtcacagttcaagctggcatag

SEQ ID NO: 263641 - DNA, 122 bp, Homo sapiens
ctccagggagaaaagtggtgccgagcgacactgagggtcgtttccggctggacaggccagcgccagcaaccgtaagctggacaggcaggggcttcaggtgagccaggaactgccggggaggg

SEQ ID NO: 263642 - DNA, 122 bp, Homo sapiens
cctttaaagggggcgagattggggtggaggggtctctgctctcttcctaatgcgaactgtcgcctgctggctttattcaaggagaggctcttggggatttccgtaagtaaagtctccgcttc

SEQ ID NO: 263643 - DNA, 122 bp, Homo sapiens
gttagaagctgggagcagcttcctttgcacggaggagagaatggtgaaatattaggcttgcgtttagtgaggcgtagagattaaacaatgatagcagactagattgattacctgacaaataa

SEQ ID NO: 263644 - DNA, 122 bp, Homo sapiens
aggaaacccctggggcgtacgggtggccccgggggggccgggggcggggaggcgggcggccggcaccgccccggccgacaaaagtcccttcagttcagccggctgcaggggaagtcccggcg

SEQ ID NO: 263645 - DNA, 122 bp, Homo sapiens
acacttgcgctcttcggggaggtaaacagcatttcctctcagctctgggttggaaaaagccgcagcagctgatgggcccgggaacccgaggccccgccccctaggtggtcctagcctttgcg

SEQ ID NO: 263646 - DNA, 122 bp, Homo sapiens
ggctgggtaggccccctcccagagtggcaggattcctgggccaaggtggggcattctccacgaccctccctcccctaactgggccacccagacctcagcagtcctagctgctgagggggcct

SEQ ID NO: 263647 - DNA, 122 bp, Homo sapiens
ttcagccctcacaacctacaagaaaagcagttcaccaccagcagtctcctcgccaccctgcgccctctccacgcccccagccgaatccaaaagccgcctgcaggcctctgcagctcttctga

SEQ ID NO: 263648 - DNA, 122 bp, Homo sapiens
aatgtggtcacttaggaaccaaacggtagacaggttttccctgagcccaggcatttttggcggcagggtcaacaacgctggtagagacctgtctatgcacagcctaggataacatgccaaga

SEQ ID NO: 263649 - DNA, 122 bp, Homo sapiens
gggaggagggcacccaggggcgatgcgccgggctctctccttcgcccttcttggcccgctcgccttcagctcccacccgcagcagcaaccgcagcctgcttccggggactgagcagccctgg

SEQ ID NO: 263650 - DNA, 122 bp, Homo sapiens
ggccatcaacgaaatctcaggccagctggatgtcgatctcattctccgctgcatgtctgacgagaacctgccctatgacctcagggcgtccttctgccgcctcatgcttcacatgcatgtgg

SEQ ID NO: 263651 - DNA, 122 bp, Homo sapiens
tgttgtgtgtacatttatcatctcatggcacaggaaaaacgtgatttaaggagaaggaagcgatccaatgggaagaagagatccaatggatcctctatcacgaagatattgagataagaacc

SEQ ID NO: 263652 - DNA, 122 bp, Homo sapiens
gaacattgacctgaatgagactgtgtggattgaaatggaatgaaataatgtgaattggcacgtgtgtcaccctgctcaccttggcatgtgtgtcaccctgctcaccacccgtgccatagggt

SEQ ID NO: 263653 - DNA, 122 bp, Homo sapiens
ggcggaggccgcgcctgggtccggtggggtcagtggggtagggctgaccaggtccactcccgcctcttctctccgagaactgaagtgcgcacctagtccgcgcgccgccttcaaatagccgg

SEQ ID NO: 263654 - DNA, 122 bp, Homo sapiens
cctgctccatcctgagaggggtgagggagacacgggtcatccctttgtcccacgcactcacgctgctgcattcaccactcagtagctggcttggttctcagatggaaccactcgggtcttgg

SEQ ID NO: 263655 - DNA, 122 bp, Homo sapiens
catggcctttcccccattccaataccatgtgctaaaaatactggatgagcataggctgggcgcggtggctcacgcctgtaatcccagcactttgggaggccgaggcaggccgatcatgaggt

SEQ ID NO: 263656 - DNA, 122 bp, Homo sapiens
tgtatatattttatggtgtacaacgtactgtttatacatatatatacatacattgtggagcggctaaataatatatgcattacctcaaatacttattttttgcggtgagaacgctgaaaatc

SEQ ID NO: 263657 - DNA, 122 bp, Homo sapiens
gctgcacaccagctcagggctgacctcctccagcaggatggacaggatggagctgccgtacgtgtccaccacctcctggcactcttccgacagggacttcggcagcttcgagcacattttgt

SEQ ID NO: 263658 - DNA, 122 bp, Homo sapiens
ttggcaggcccccagggagtccaccttgaccaccaccccctcggggtcctgaggcagctccggggaaaaccacctccgctttcctggagccagttcctagaagatgtgcagtttgcaagacc

SEQ ID NO: 263659 - DNA, 122 bp, Homo sapiens
gtaattgtagcgttggccgggtgcccagatggcaagaatcatcgaatagagatgctttaacgcgtggagtcagcggacacccaccgggaccccagcaccgcggagcccctgccctggggctt

SEQ ID NO: 263660 - DNA, 122 bp, Homo sapiens
ctcgcctgaccagtggggtctccatccttgtccgtgctgacaaaagacaagaacagacagcgcctgaaatcttcccgcctccgtgagggaagcctgcgtctgggaacgcgccgcagggaagt

SEQ ID NO: 263661 - DNA, 122 bp, Homo sapiens
cttcatctggcccgccagaatcgggctgtggcccgcacagcccagaatgaacggtcatcacgcagccacagtgtattccagctacagatttctggggagcactccagccgaggcctgcagtg

SEQ ID NO: 263662 - DNA, 122 bp, Homo sapiens
agtcagtctccagggtcgcgtcgctaacttgcagcagctttgactgagctttagtgggggcgttgagtcagcctcgggaagcaggggatgcccctagggttaggagtcaggactctggcttc

SEQ ID NO: 263663 - DNA, 122 bp, Homo sapiens
tcagatcctcatctcatgctgtgtgtctggatcacacataagtcttgttaaagatgggcacgaggacatcattgtgctgtaatgactactggggtgctgctgctggggctgttcccctcttg

SEQ ID NO: 263664 - DNA, 122 bp, Homo sapiens
gtgtctgttctccgggtctctgggcctggaggcgggagtgtttcaaagcacttcacgctccgcggccccaccggctggctgcgctgcccgctgcggccggcaggggtagtccacggacaggc

SEQ ID NO: 263665 - DNA, 122 bp, Homo sapiens
cccatccatggcctggaagtcatttccatcacagccagggtgccactccttagagactgacgatttggtggagcagaagggatccaggcttagggtctggggaccagcgtgaagaccctgtc

SEQ ID NO: 263666 - DNA, 122 bp, Homo sapiens
cggggtcgggggccagggagaggcctagttgcgtcgaggggggcaagcgcctggaggacccggcgcccgctccaggccctgcccctccaagtcccccgccccgcgccaggccccgcctctcc

SEQ ID NO: 263667 - DNA, 122 bp, Homo sapiens
caaagacgtaggcgtagacccgggcaccctgggcagccagtcgcccagccagctgggccacggggcacacgacattgtggtcgcccaccacatcgctcagggcctccctcaggcgtgccggg

SEQ ID NO: 263668 - DNA, 122 bp, Homo sapiens
gaactacccagggtataaaaatagccaccggccacaaagtctgtgtccaactccgggcagcgcctgcccagcctggtgcctttgaagaggggtcccaggagtgcgggtcgatgaggaggcga

SEQ ID NO: 263669 - DNA, 122 bp, Homo sapiens
gggcgccctagggcagcggcgtgcagtgttcgggtaataggacgcagacggcggggtcgccgggggcttcggggtggcctcggccccaggccatccagccctgtggaccgaatggagtcccg

SEQ ID NO: 263670 - DNA, 122 bp, Homo sapiens
tactgggcccagaatcccgcggaattttggatccgagggaggcgctggggcgcgggacctcgggcgtggggtcccgggcgctggatcggcgcggacgggaggcggcgctggtcccgcgggcc

SEQ ID NO: 263671 - DNA, 122 bp, Homo sapiens
tgatgtcatccagtcagtgggatgttacacatgaatacattccaacagaagctaattcagcgatgggctgcattccgctcacaccgcggtgattgattagatgctccttgaagatttgcata

SEQ ID NO: 263672 - DNA, 122 bp, Homo sapiens
ccggagtcctgaaagtcgagcgagctccgggttttgaaaatgttggagggaaaagctcctcggagatgagcgtgaccccctggctcgtggtggccgcctgttctcactaacgccatggcggg

SEQ ID NO: 263673 - DNA, 122 bp, Homo sapiens
gccatcaaagtccccacccctcaaagacgaaccttggcagcgatgctgcaaagcccctctcgacttctgggcttagaggagttccagttctgggagtgagtttggtcttgttttggcgccca

SEQ ID NO: 263674 - DNA, 122 bp, Homo sapiens
ggctcgaggccaggcaaagcctggccaattaagaagttcaggaaaggttatgggcggaagcgccgacctatcaagctgtttgacaccggaagaggacggacctaagatggcggcctccaggg

SEQ ID NO: 263675 - DNA, 122 bp, Homo sapiens
tgcactgtgggcacagcatcaacatggccctgcccgctgcatccagacgggattggttaacgggaggcaatggaagaataagaagagcaggggagtcagatcagaatagcccttctgggccc

SEQ ID NO: 263676 - DNA, 122 bp, Homo sapiens
atcgagtccgctgcagaaaatccaaccggatttgcagtttccagaaatgttcctcagcgtcgcctgtgacgggaacaaaatgaaccgcacatctcggttcatctcggtccaagtgactcagt

SEQ ID NO: 263677 - DNA, 122 bp, Homo sapiens
gctcttctcttctccacttctgagtggggtctccatctgcacagcgtgagcctgttcgctcgtgtgctctgccttcgaatgcggatgacacagcttcagagccgcggcatcgtcaccagggc

SEQ ID NO: 263678 - DNA, 122 bp, Homo sapiens
tttcacacccgaccccacccttcctgtggtcataccgagcctttcctcaccccaggtggccgtctcccagtggccctctcctgggcctgcctactcaccgtgggaatgctgcaggatgcggc

SEQ ID NO: 263679 - DNA, 122 bp, Homo sapiens
gaggcggcagggaggggctgtcatgctcgggctctgcttcgagtaggcgcctcctgttcccgggagcagcgacagcctctaatttcctgtgacagcagcggcccccgcaccgccccacgctg

SEQ ID NO: 263680 - DNA, 122 bp, Homo sapiens
gaccacgcaccatggcttacagggcctggggctagagcccggcgtggctgcaggccgagccgctcctcctgccagcccctgtgctgtgtccggtgggcctcggtggccctgctgcccctggg

SEQ ID NO: 263681 - DNA, 122 bp, Homo sapiens
agtacaaatgacctaattgccaaagcagaaatgtttacctaatcaggattcagtgtgtttcggaaaagagagagaataagctaaagctgttactttacttgtgcacttacaagatgatgctg

SEQ ID NO: 263682 - DNA, 122 bp, Homo sapiens
gggcacctccccagcccccacgggggagacgatactgccgggaaggcccggactagcccccgcccccgcagagtagccttcggggaacaccgattccaccaggctctcacgaaagccgagag

SEQ ID NO: 263683 - DNA, 122 bp, Homo sapiens
ccatcatcatactcataatcataataatagtgcttactattatgtgtcagaaatggttctcgatgttttatgtggataatctaatcctcacaaaatactttatgtgggccgggggcagtggc

SEQ ID NO: 263684 - DNA, 122 bp, Homo sapiens
gggaggtggggggagagtccggccattaaatgtaacttttcattatgaaaaggatttcgccggttttatcttctaataagattatgtcacgaacacaagtacctaggatggtgctgagtgac

SEQ ID NO: 263685 - DNA, 122 bp, Homo sapiens
tgcagccgcttgtcagtgtgatgaagattggcacccaggtaagctgtcactcaaccgctccgccgccgccgccgccgctctcgccgccgccgtccctatcaatcacaccggcccgcggccgc

SEQ ID NO: 263686 - DNA, 122 bp, Homo sapiens
gccctaagaagggtgattgtctaaacatcttcacaacggatttacactgaaattgtaacacgcacttgattggaaccccacaccacaggcagtcccaggaatttgtacccgccccggtcccg

SEQ ID NO: 263687 - DNA, 122 bp, Homo sapiens
cgactttccagggcctctcttcctattggtttccacggtgacccgggcaggcaggaactgcgccagagtttccgacaattgtgcgaaaggaagcaggaagcgggcagataggaagcgggtca

SEQ ID NO: 263688 - DNA, 122 bp, Homo sapiens
tcccccccctttgaatcaattattcaatacacaaacataattgcttgggccagaggtgcccgccattagcttatttaactccaaggacactaattacccgcagggcacgggaacttttctca

SEQ ID NO: 263689 - DNA, 122 bp, Homo sapiens
gggcagtcgggaggggcggggctggtggcggcgggggtctgccggagctgtgaggccaggcgtatggctgtcaggaatgggccaaggagcaggttggcagacccagtttccgcaaggccggt

SEQ ID NO: 263690 - DNA, 122 bp, Homo sapiens
ggcctctgctgctacgatgacagctgtgcgcgagcgcccccagattatctgtgtgtagggcggaacagggtgcccgaggagtgtccacccaaatgggacaatttaatatagttgaggtgttc

SEQ ID NO: 263691 - DNA, 122 bp, Homo sapiens
ccagtggaaagatggagggaaaaccctgagctagacacacttgtcctggttctcagcagccgctcacagagagcatgggaaagcaatttcaatttcagcctgcagttagagttcccaaactt

SEQ ID NO: 263692 - DNA, 122 bp, Homo sapiens
gcccactctgccaccacagcattaaatattattatgtgggcatcgggagcctcaatgccccgtcacagagccctcctactccagggtctgtcactttggagaatgagcccagttcctttcct

SEQ ID NO: 263693 - DNA, 122 bp, Homo sapiens
acctgagaatttctgtcactctctgcatatgctcctaagtgctttaatcccaattaggggcggctgacacacggtcctattcattcccatcagctcttgaatacatttgcctagaaatgaac

SEQ ID NO: 263694 - DNA, 122 bp, Homo sapiens
acctcaaatcgtcctcctgcctcagcctcccaaagtgctgggatgacaggcgtgagccaccgcgccccgccgtttttaagggtatagttgcaacccttgcttatgggaagagaagcaccttc

SEQ ID NO: 263695 - DNA, 122 bp, Homo sapiens
tggcagcggtggcgagggcccccagtggggctccaggcggccatagggcacaaagatgtccgagtcgcgccggtagctcagcacccagttgaagatgcctcggaggtggctgaggccgtggg

SEQ ID NO: 263696 - DNA, 122 bp, Homo sapiens
cggagaggagtggcctcgcccgcttggtgagtctccaggagtgggacggagggagctggccgggatgaagtctgagactatgtcctgagaagaaagagtgtatcgtattggttgaaaagttg

SEQ ID NO: 263697 - DNA, 122 bp, Homo sapiens
agtcagtaggtgagtcctgctgcagaaggagccactgcttctgacgcgtgccttgcacttcgaccgtagcaggccatgatcctcctcagtgtggactttccttctgttgcaagagggaggcc

SEQ ID NO: 263698 - DNA, 122 bp, Homo sapiens
gcagtggcttgtaatttataaattagtgtgtaacgtgtcactgaggcagaagctgagggacgtagcactaacgggagtttcctgaaattgctcagataatgggagaaaagagtttgcgtgtc

SEQ ID NO: 263699 - DNA, 122 bp, Homo sapiens
aaaggaacttgaggaacaatgaagtccgtactcaactgttctatgacctagaagcatagtcggtgaagtctttgtctgtgtacattgacaaatgtgcatctgatacatgtgcgcttacatgt

SEQ ID NO: 263700 - DNA, 122 bp, Homo sapiens
gaacaagccaggatgcacggggagctgggggagcccccagcctggggcagcccagcaggccgctgaacaaacaccccagaagccagcactgtggcagggtgctggggagatgcccctctgag

SEQ ID NO: 263701 - DNA, 122 bp, Homo sapiens
gagagatcggattatttgctctaaatcacatgtctcgtaagtggaaaggctggacttggccgggtttatttctaaactgaatctctgcacacttttttcttttggatatacaatttcacatt

SEQ ID NO: 263702 - DNA, 122 bp, Homo sapiens
ggaaatgctgggtcacatggtagctctacgtcccactttcaggaactgccttcccatttccgcacagcagctgcactgtttttgttcccctggcgatgtgtacgaggctccagtctccctgc

SEQ ID NO: 263703 - DNA, 122 bp, Homo sapiens
gcgcacgcgggggtaggggcgggggtacaggtgggggcgggaaactactggtacaggtcgcggtgccacttggcttccagtttccggtgggggagggagagaccacccactcccattgcctc

SEQ ID NO: 263704 - DNA, 122 bp, Homo sapiens
ggagtcttggtgcaggcggactcgggcgcgtgccatgggaccacaactcccggcacgcaccgcggactgcgccgaacacggttggctgggagatccaaccctactgctcccaccggccaatg

SEQ ID NO: 263705 - DNA, 122 bp, Homo sapiens
taaaggtttcgtatgcagggatgcacactaatacatcaatgtaccacccatgaggatggacgattccaactagcagttgtataaagccccacgcagaggaacacagaacatcagtaaccaac

SEQ ID NO: 263706 - DNA, 122 bp, Homo sapiens
ccaggaggctgccttgccaaacatctccttgctctgagttttgctgtgtgggaggtgctgcgtgaacctgtcatgttgatgaaagtttcatgtctgtggaatgttcggaagaggtaaaagca

SEQ ID NO: 263707 - DNA, 122 bp, Homo sapiens
tgtgtggtggggacaacagcacgtgcagcccacggaagggctctttcacagctggcagagcgagaggtaggcggcctccctcggggcagaggctgggcttcccccagcctccaagatggcca

SEQ ID NO: 263708 - DNA, 122 bp, Homo sapiens
ctggcctcctgcttgcggccgtctccacccctcacatccatgggatcctgcacaggtccacggttggtaaaccgcttagctgtgagcccgacccagggcctgattcgaaacacttggatcaa

SEQ ID NO: 263709 - DNA, 122 bp, Homo sapiens
taacacagcgttgctgaggggatgatgtgggcacacgtctggctggggctgcagagcacacggtgcctccctgatgctccacggtgactgtgggcagagtcccctcctcggagccgggagca

SEQ ID NO: 263710 - DNA, 122 bp, Homo sapiens
tggcagaaacatgttttctcctgctcatttccagtcagtatttgaacacagaggcttccacggttttgattctttccacaaaaggttagttttgtctgttttcaccatttatgtaagtgaaa

SEQ ID NO: 263711 - DNA, 122 bp, Homo sapiens
ctcaattatcacccaggtctccgggagtatcccaggtatagtgccaagagtccagctttccgaaccggggtccctgggttctgaaggcctttttggggaaagtactgatgtttttgtcaagg

SEQ ID NO: 263712 - DNA, 122 bp, Homo sapiens
gggctgctgcgatgccagcagtctgggaaggtggggctccggggcacaggtcagaagcagcggagggaaggggccccgcgggggtgcgggggagctcagagcggggcgtgccggagggcgaa

SEQ ID NO: 263713 - DNA, 122 bp, Homo sapiens
ccatgaataaaaagataccatctgatgagcagcaatgaagaaaacttattatctgcacagcgacatctgacggttgaaaggcagtaattggattggctgggggaaattcccgattgatttat

SEQ ID NO: 263714 - DNA, 122 bp, Homo sapiens
agctgccagtaacctgcctttgagccactaagccataaaagaaaaagatcccaaccaacacgtgctaggagacacccaagccaaatcaagcagaaacaagagactcaagaaatgtggatggc

SEQ ID NO: 263715 - DNA, 122 bp, Homo sapiens
ttttcactcaaccacaaatatgaaattgtagtacaaactgtagctggacaccgtggctcacgccgataatcccagcactttgggaggctgaggtgggcagatcacttgaggtcaggagttca

SEQ ID NO: 263716 - DNA, 122 bp, Homo sapiens
tcaatcacgtggacactaaggcacgttttagagtctcttgtcttaatgattatgtccatccgtctgtccgtccatttgtgttttctgcgtcgtgtcattggatataatcctcagaaataatg

SEQ ID NO: 263717 - DNA, 122 bp, Homo sapiens
catcagcaagattggggatgagaactgtgaccccgagtgcaaccacacgctgacgggccacgacggcggggattgccgccacctgcgccaccctgccttcgtgaagaagcagcacaacgggg

SEQ ID NO: 263718 - DNA, 122 bp, Homo sapiens
cacttaccagttgtattaacttgaccaagttaacttagcctcctgtgcctgagtttcctccgcagcaaaataaagacaataatagcaattatctcatttagttgttgagaggattaaatagg

SEQ ID NO: 263719 - DNA, 122 bp, Homo sapiens
aggacaagagaacactcaagttagctcaagaaattggagtttcttgcaagaatatacttgcgcctgtgtctgaagctgaaaaaccatgaggaacccagacagctctggggacccgtggcttg

SEQ ID NO: 263720 - DNA, 122 bp, Homo sapiens
tgcagttacaacattattaatcaatgacacacttgagcaaagttcaggtatatgcacagccggcaggagagactgaatactctggtctgcattcagtcaaggtaacctagagcagattagct

SEQ ID NO: 263721 - DNA, 122 bp, Homo sapiens
ccgaggggcccagggcccacagccagcggtggaggtgtcttgctccgggcccgtagcccacgccctctctgggtggcagggccttctgaaggaaacttgcaggcgagcccaacgtggtgggg

SEQ ID NO: 263722 - DNA, 122 bp, Homo sapiens
tcctcatctcggagtgtggaggatttcgcgggggcttctcctttaacccgagcatgctgacgtctatgaacttccgccatggctgccgcagcagcggtggcctggcggcggggcctagcggc

SEQ ID NO: 263723 - DNA, 122 bp, Homo sapiens
tttccgcggtggctgtcgtagctggactacagaccccgcctcctgagcggcccgaagccccgccccttactgccccgcagtcccgcccccgtggcttgtgccgcgcctgcgcactgtcccgg

SEQ ID NO: 263724 - DNA, 122 bp, Homo sapiens
ttttcttatgtagctttaaatgacacagaaagcatcagtggggccggttgcagtggctcacgcccataataccagcactttgggaggctgaggagggcagatcacttgaggtcagtttgaga

SEQ ID NO: 263725 - DNA, 122 bp, Homo sapiens
aaaattcttattttgaagcaaactcaaagctaggtcctgatgtctcaaggcacaggtactcgtacttaaaggtgagtctgaaatctgtggatttggggaactttggaaaaacaaagatgagt

SEQ ID NO: 263726 - DNA, 122 bp, Homo sapiens
tttccacaccgtgtcccttgatacaacagcaagacctggcctgaatagagctgagaaactcgtttaaaacaggcagaagggggctggggcaagggggaccctgtgggaggagaaagagagaa

SEQ ID NO: 263727 - DNA, 122 bp, Homo sapiens
ctgggcggggtcggaaccactgcaatgcctctgtgccttacctgttcacaaggccttcgacgtacccctggaggcggccccagggcccggatgactcctggccggggttgtggggggctgta

SEQ ID NO: 263728 - DNA, 122 bp, Homo sapiens
gagagggggcattgctgagcgagggggcgtccgtgtgggccaccgcatcatcgagatcaacgggcagagcgtggtggccacagcccacgagaagatagtccaagctctgtccaactcggtcg

SEQ ID NO: 263729 - DNA, 122 bp, Homo sapiens
ctcgggcggggaccggggtgccgggttggggatgtaaggaggctgcggacagctgtctaacgcagagagctggtgaactactacgtatccaaacttgaaagaagtggtgtcccaggaccccc

SEQ ID NO: 263730 - DNA, 122 bp, Homo sapiens
gcagtaccccttgggaggacttcattagagagtaggtcatggaaccctattctgagcgggcgctgccaagagcacaacctgcctccctctgtcctcccctctctctgcccaggggggcgctg

SEQ ID NO: 263731 - DNA, 122 bp, Homo sapiens
gaggcctggtactaggagtgagacccaacccattgacaaatatattctgcgcagcatccgcgcaccccagacactgctaaagcaccccaaaagccgcagaaggtgaaaactacgacacccat

SEQ ID NO: 263732 - DNA, 122 bp, Homo sapiens
gacaatctgtgatgatgcacctgtgttttgcacattacgtacttaactgctgaaagaatacgttcatagtaaacacatgctaaccactctggccatgtcagaatgcctacacaataataacc

SEQ ID NO: 263733 - DNA, 122 bp, Homo sapiens
aatggagggctgaagatggatgtgccccctcccttttaaaactcatgcagcggtgaaattcggtcctttccgggcagccccccgcagattttgcactggtgatggcaggcgcgaacccgccg

SEQ ID NO: 263734 - DNA, 122 bp, Homo sapiens
acagcttatctgctttctgcgtagatacaaaaggctttttacctggccaaatgattcatgcgggaatacacctcagcttctctctgcaaactcttttttccctactgcccccaaacccttcc

SEQ ID NO: 263735 - DNA, 122 bp, Homo sapiens
tccagatccgagaggggcggcgcgctccgcccccgggccgcgcacgtcggtgctcggcggcgcgcacgcctgcgggagccctctccaggcaacctagtgctgatcgctcgtgccggtgcggc

SEQ ID NO: 263736 - DNA, 122 bp, Homo sapiens
cccctccccctctccccacggtctccctctccctctctttccacggtctccctctgatgccgagccgaagctgtactgtactgccaccgtctcggctcactgcaacctccctgcctgattct

SEQ ID NO: 263737 - DNA, 122 bp, Homo sapiens
agatgcatttgcttgtcacaactgagagaggctactactggcatcttgtaggtagaggctcgtaatattgctaaatatcctacaattggcaggatagttccccacaacaaagaattttctca

SEQ ID NO: 263738 - DNA, 122 bp, Homo sapiens
cctgtctgatgaggatgtcactgcttgatttgaggacatataaggaccttggctgagcagcgtccctgtaaggggaagccaatttcctcatgtcctattcacttccatctctcattgtcttc

SEQ ID NO: 263739 - DNA, 122 bp, Homo sapiens
gacggggccagctaggggccggccgcagaccccggtcccagagctagtttcagaggccagcgttccccctagcgcctcgctgtgccccactctgggaaccggaaacaggaagcgccaagagg

SEQ ID NO: 263740 - DNA, 122 bp, Homo sapiens
catctccctgatttgtcacattttatagaatagcccggcatcccctacgtgtctccctcccgtccacatcgtagctcagctgtcagccggtgcaggctcagcacatctcctgggtctggcag

SEQ ID NO: 263741 - DNA, 122 bp, Homo sapiens
aacaggcagcagtccagtagagtgtggggtgacttaggcatcttcatgccatagtggggccgcctgggggagcttgtgaggctgctattaccaaggaataaggaagtatttcaacattttaa

SEQ ID NO: 263742 - DNA, 122 bp, Homo sapiens
ggcgcagccacagccgcgctccgagggttggggccctggggccttcccgggagccgccaccggcccttagggagagaattgatggactcgttgaaatcacaagttgcacacgttacttttca

SEQ ID NO: 263743 - DNA, 122 bp, Homo sapiens
ccctgtgggtgtggtacagatgaccttcctgcggctgctgagcgcctctgcccaccagaacgtcacctaccactgctaccagtcagtggcctggcaggacgcagccacgggcagctacgaca

SEQ ID NO: 263744 - DNA, 122 bp, Homo sapiens
aaggggaggggatccagtttgcagggctagggtgggagcgggcaggcggggtgtgcgccccggccgcttccagtcggcgcgggagctgggacggaagctgtgcgccctcggagcccctgcag

SEQ ID NO: 263745 - DNA, 122 bp, Homo sapiens
cgcttcggatttcctgtgctaggaaaccgcagcacttcccactcctgcccctgatgtctgcgggaaaaggaacttgatgaggggccctaggggtgcaaatgtctttagtcccaaatgtcttc

SEQ ID NO: 263746 - DNA, 122 bp, Homo sapiens
gcagggtagggggtccccgttcggtccgcagattcatgccgggtagaaagtccccgaatgcggtgaatcagttccagcgttcaggaggatccaaccccaccctcgacgggcttgaggggtta

SEQ ID NO: 263747 - DNA, 122 bp, Homo sapiens
ttatcgaatttctccatctcagccatatcgggtttgtcagacatagttgccgaggaaaagcggagtgaggtgcgtgagaacgagcgaagtctggtctgcgcagtggccaccaccgagttctc

SEQ ID NO: 263748 - DNA, 122 bp, Homo sapiens
atcggggggttggctgggtgtgaaaggtaatcattttcttgtgaatccttttaactgtagcgagcataaaacagcaaacctggggcagcctttagttctgcttttgtttctggcattccgtt

SEQ ID NO: 263749 - DNA, 122 bp, Homo sapiens
cgcacaactccggagtaagcaaaagagacgaggagtcgcaggtcctgggtggagatcgtccgcagagatacctctgtgccctgggattccctcatcccgctcaggagcatggccccaaagaa

SEQ ID NO: 263750 - DNA, 122 bp, Homo sapiens
aaatgaaattcgtagttggttaaaacggggcttgccagcacgatttacaaacaagacgagcgctcgctgcaatcacatgaggagaaaaggaaaggactaattcataatgcggtcactagagc

SEQ ID NO: 263751 - DNA, 122 bp, Homo sapiens
ggttcctagagaggaggggcatggaaaacgcacttccggcggagggtctcaagctttccccggtgtcggcggcaggtggaatttccacgctttatctgcgcctgcgccgcgcgggattcgcg

SEQ ID NO: 263752 - DNA, 122 bp, Homo sapiens
gtcactgacaagtccccttgtttgtgcccgcagaggatcagcactgccagtggagatgggcgtcactactgctaccctcatttcacctgcgctgtggacactgagaacatccgccgtgtgtt

SEQ ID NO: 263753 - DNA, 122 bp, Homo sapiens
agctacatgtttctggcctagagggttgtttttaaagatagtaaagtaaatcaatgaaaacgaaggtatgttataatatccagagtcatttgcagggggaaggtgtcatgtcaagtgggccc

SEQ ID NO: 263754 - DNA, 122 bp, Homo sapiens
gcgtgggcagttgctgtcagctcagagcaggaaacgggcagctgaggaggccaggctcctcgggcatctgcggctgcgtctgcccgcgtggacatgggactctctcactgcagccccagagc

SEQ ID NO: 263755 - DNA, 122 bp, Homo sapiens
gtcacccacaggtggggagattgggccttacctccccttccacaccacatccagatgctgcgctcggtcttctcctcggcgttcggggtgcttggtgccatctactgcctctcggtgtctgg

SEQ ID NO: 263756 - DNA, 122 bp, Homo sapiens
gcaggacccggaccctgagtggctgggatccttcttcctgtccctggctgttgctgagcccgtccccatggtaactgatctgccttgaggaaggagccctgccctgcctgtggaattgtcct

SEQ ID NO: 263757 - DNA, 122 bp, Homo sapiens
ctcctgctgcgggcccaagcgcagttcagctcttaagcccccggcgtccagccgagggaccgccgaggctcagtgtccaacccaaaatcccggaacctgatctctgggggtggggagtagcc

SEQ ID NO: 263758 - DNA, 122 bp, Homo sapiens
cctcgaagggccgctttctgctgccctgggagctgggtgcttggggtcctaatctgtcggcgggggtgcagcgccatgcagcccatcccccagccatagctcttcccagccccccaggctcc

SEQ ID NO: 263759 - DNA, 122 bp, Homo sapiens
tcttccttcctctgtcctgtgccccctccatgaagtagaagcaggaagagaaaacacacccgtaacaatgtgaagttggtctcactgtatttttccagtgataggaggaatttcttctttgt

SEQ ID NO: 263760 - DNA, 122 bp, Homo sapiens
tgcggggacgagcgtaagagtgggcacgagcgacaaaaggtcgtgaagcgggtgggaaaccgagcactggaatcatggagccgaaggactctgggcgagcagaactggaaccttcggattat

SEQ ID NO: 263761 - DNA, 122 bp, Homo sapiens
ctaaggctatgctaggaatgttgggagtacaaagttaaataaggcagagtccaagtgtaccgtaatgatgcaaggcagataggaagtattgagagaaaacaggcagaagggacggcctttca

SEQ ID NO: 263762 - DNA, 122 bp, Homo sapiens
ggtgtcctgagggtctggaggtggctctgggacagttccggggacttgggcctgagcacccgggagccggcaggactgctcaaacgccggctcagacccgcgtcgccctcatagcgctgggg

SEQ ID NO: 263763 - DNA, 122 bp, Homo sapiens
gagggggagctgaaggctttgtcctgctgcacccaggtccagagcagacagaagcagtcccgcgcacacacactagggggcacacagggtcttaaagcacccagaatggggagtgagtgggc

SEQ ID NO: 263764 - DNA, 122 bp, Homo sapiens
tccgggctgcgcggaggaagcgctggggtcccggagggcgggggtggcggcgccggaggtcgccatggctaccgagcccgaagccgcggagccggtggtgccttcgctcgtggatcgatact

SEQ ID NO: 263765 - DNA, 122 bp, Homo sapiens
aagaatctggagctgggaggcccatgtggtgcttggagaagcactgcacctgggaggctgcgctcccaaagctcatcttggcaagccgtctgtcccaccgctgccaccctcccctctgcctc

SEQ ID NO: 263766 - DNA, 122 bp, Homo sapiens
ctcaagtgatccgcccgccttggcctcccaaagtgctgggattataggcaggagccactgcgcccagctctgattggataaaattccgtgccaggctgtctcaggtgtggcctctcttgctt

SEQ ID NO: 263767 - DNA, 122 bp, Homo sapiens
ctccctcactttgtaacccttgctcagaacactggggttgcttccactggagagactccacggtagctctagaagtgtcattaaatactcagttcgccaaggttgaccacctccattgtcat

SEQ ID NO: 263768 - DNA, 122 bp, Homo sapiens
caacgcagtctgccctagcgcatgcgcgcaatctgcttccggcctgcgagctcggtgttccgctttttgtgggccgggtgggtttcctaatctggtttcgtctgcctggttcatctgtgtgc

SEQ ID NO: 263769 - DNA, 122 bp, Homo sapiens
ggggccccacaaccaccgcagcctcttaggtttctccattgtgattggaaatccgagtaccgcctacccctcccctcggctcgctcaatccccttcaaggacaagggctcaagtatgcacac

SEQ ID NO: 263770 - DNA, 122 bp, Homo sapiens
tgccgctgccgtcctggattcacgggcacctactgtgaactccacgtcagcgactgtgcccgtaacccttgcgcccacggtggcacttgccatgacctggagaatgggctcatgtgcacctg

SEQ ID NO: 263771 - DNA, 122 bp, Homo sapiens
ctgtgacagcgaaggtgtgcaagtcccagtgtcccagttttattgcaaactcaggctgtgcggggtgggcaatacactgcacacggggcgggactcggggaaacggggcgtgtcctaggcca

SEQ ID NO: 263772 - DNA, 122 bp, Homo sapiens
aaatgttttcatgatcaatgtgaaagtgttacttagaacaggggttggcaagctacagcccgcgggccaaatctggcctgctgcctgcttctaagataaaagtctttctagagcacagccgt

SEQ ID NO: 263773 - DNA, 122 bp, Homo sapiens
tggaaggggttcgggctttcctgcagacctattcccacgaggtctcactcactgcagactcgcgtaagagtcatctgattttcccccagcccaactatgccgacacgcttatcaaccaggag

SEQ ID NO: 263774 - DNA, 122 bp, Homo sapiens
agagaaagtcataaggtacagttttattgactacttgccaaacaacacggacccatgcaccgtaagcttgttttgctcttgtaagtcaagcaacaactaggcttttattttctaacattatg

SEQ ID NO: 263775 - DNA, 122 bp, Homo sapiens
actgcttttataagctgtaacactcaccgcgaaggtctacagcttcactcctgaagccagcgagaccatgagcccaccgggaggaacgaacaactccaggcggcactgccttaggagctcat

SEQ ID NO: 263776 - DNA, 122 bp, Homo sapiens
gtcctggcagggtcctggccttgccccacacgttccattcaaagttttggcagtggggaccgacacctgcacaaccaagatcacttccctgtggctttcgcaaagctagtgtggctgccttg

SEQ ID NO: 263777 - DNA, 122 bp, Homo sapiens
atgcaaagacttggagaaaaaaaggaatcattgaggccatagagaatacatgagatacctcgtgaagtatatggaatgataagagggtgggtctttaccaatagctctttcagagggagctc

SEQ ID NO: 263778 - DNA, 122 bp, Homo sapiens
gggtccccgactcacgccgcggaacttgggggctgcagaaggcgagtgcgcggcgggagtcgtcctgccgcaggctcgagtcctcctcctgccaccgtggggtctcggagctgccccgcgct

SEQ ID NO: 263779 - DNA, 122 bp, Homo sapiens
tgtgaactgtgcatgggagggatctaggttgcacgctcctcgtgagaatctaatgcttgacgatctgaagtggaacagtttcatccggaaaccatccctccaccccgcttcgtccatggaaa

SEQ ID NO: 263780 - DNA, 122 bp, Homo sapiens
cagtcagtctgctggttgaggctttggatttgctgattgcagcccatgggtatttgcatacgccttcccttctcccaaggcctttctcccccatcagtgcttgtcattgctgaattcattgc

SEQ ID NO: 263781 - DNA, 122 bp, Homo sapiens
ccacctcagtgcggctagggggcaggatgtgtcaaggaagtttagtcaagtatggaaatgcgacacaaaggtcaggaaaagataaagtgctgtgccaaataatatcgtagcaaaaacctttc

SEQ ID NO: 263782 - DNA, 122 bp, Homo sapiens
ccatagactaccgaaaaggtgatagttgggcatatatccagtatgaaagcctggatgcagcgcatgctgcctggacccatatgcggggcttcccacttggtggcccagatcgacgccttaga

SEQ ID NO: 263783 - DNA, 122 bp, Homo sapiens
gggtggcagcggggtccatgagggcgggcgggcaggcgagagggtcctcagctaaagcgacgtctccaggctgtggatggggctccctggacttgaagaggtagctgatttgcttgtgtcgg

SEQ ID NO: 263784 - DNA, 122 bp, Homo sapiens
gggttcctgggtgcagccctttggccttctctcaccccacccttctgtccatgcggccctcgggggctgggggttttttctgcaggccgtcctaaagtgagttcatcagacacggagctcgc

SEQ ID NO: 263785 - DNA, 122 bp, Homo sapiens
accctactgctcgagtcatagaaacctgggaatcatccttgactcctccctgtctttcatcgttgactcctccctctctttcacccaattcagtctccaaattggagaattccagctgctta

SEQ ID NO: 263786 - DNA, 122 bp, Homo sapiens
tgaagctgcagttgcctagggcagggatggagagagagtctgggcatgaggagagggtctcgggatgtttggctggactagattttacagaaagccttatccaggcttttaaaattactctt

SEQ ID NO: 263787 - DNA, 122 bp, Homo sapiens
ttgtctcacgtgagaaatggtgaacccacatacactttgtctcatatgggaaacggtgagcgcatagacactttgtctcatgtgggaaagggtgagcacgtagacactttgtctcatatgga

SEQ ID NO: 263788 - DNA, 122 bp, Homo sapiens
gcagggcgcggggcggggcttgccgtgacagctaccactcctattggtcaacgcgaacagcgacgtcctctgcgataggctgtaggtgaaaagggtaggcctccactgctctgggacgggcg

SEQ ID NO: 263789 - DNA, 122 bp, Homo sapiens
agtggctccggaaactgggggaggttgtactggcctctccgcaaacacagtgtgtgcgggcgtgagggctgtgagtctggtagggaaaagtccaccactctcccgctcccgagacgggggcg

SEQ ID NO: 263790 - DNA, 122 bp, Homo sapiens
cgagggctgcgcatgtgcgaggcgtgcgtggtgcgtgtgtggcgccgcgggcttccgctccgacgtggggatcactagacagcaactgccccccaagttctcgtatcagctgcgggaaggag

SEQ ID NO: 263791 - DNA, 122 bp, Homo sapiens
cagaggcgaatgagagctgagtcctggggagcagcgctccgactcacgccctcagcaagccgagtgtttaaaatacattcagccactagatgtcgctgtggccccaccgcgaggacgcggag

SEQ ID NO: 263792 - DNA, 122 bp, Homo sapiens
tccccgccccctgagacctggcaccggacgcgttgaggccccgcccactcccgtgctgggcgcgtgcaaggagcgtcttctgtcagcgtagtctgcatctaggctttctggagcatcttcca

SEQ ID NO: 263793 - DNA, 122 bp, Homo sapiens
ggatgtctaagcagaggcggagagttcctggtctcccgagttcagaggtcacggtgggggcggaagccagcatggcctgggtaaagagacgcgagcagggagaggcaacaggcgtcccctct

SEQ ID NO: 263794 - DNA, 122 bp, Homo sapiens
ccattgggctatgacagtagataaaacaggccaaaatacctgccctcctgggttttgtaccgatggatgttagaaatttcatacaagggaagaaggaataggaagtccttggaaatatgata

SEQ ID NO: 263795 - DNA, 122 bp, Homo sapiens
agggtcaagttacagtttatcaatggcacagagcattaaatcaagaacaaagacgctccccgtgattatatcggcacatatatttgaatatgtttcagactgtcgcttagttattaattaag

SEQ ID NO: 263796 - DNA, 122 bp, Homo sapiens
tggggggccctgggccagggactttatctccatggcatccatcccttggacctgtaccaccgaatactctggaggacacagaggcatggcaatggtggggcacctgtagtcggtggtgcctc

SEQ ID NO: 263797 - DNA, 122 bp, Homo sapiens
cggcgggggctgtactcacgtagtgcttggaggggttcctccgcttctccacgtccaccacggtggcatcctgcacgcagtaggcgagcatcttcccccacaaagcgagtggcgcccccggc

SEQ ID NO: 263798 - DNA, 122 bp, Homo sapiens
caggctgggtggctggggcttcctgtcgtcccagaggtactcgggggacagcaccttggacggcttgtttgagatgaagtgacggttcaggtggctttcctcccgccaggcagccatgatgc

SEQ ID NO: 263799 - DNA, 122 bp, Homo sapiens
agggcggaggcctgcccacctgcccttggtgttactgttggtctggtctgcaaggctccccgggagcttgtatataaagggggcgcccactatgactctgcggccccgcccagtccccaccc

SEQ ID NO: 263800 - DNA, 122 bp, Homo sapiens
gaatggaaatctcatcctacaatccattcagttattaatagagcaactgaggcccagagacgggcagtggcctgcctgcctacagcttcgtagagagttctcagcatgcttacttttttttt

SEQ ID NO: 263801 - DNA, 122 bp, Homo sapiens
catcgaggtgggcccggcgagcggccccgggcgggtgggactggggcttcccctgcaccccggagccatccacatgcatttatacgtttatttgatggtggctgttgttgttattgttggac

SEQ ID NO: 263802 - DNA, 122 bp, Homo sapiens
gtttcctttccaccattccagtattttttccccttcattttccttcttcctctctttatgcgaatttgagagaatgtggcttaacttcaactctcgcaaaggttgtttctccgcgagtgtgt

SEQ ID NO: 263803 - DNA, 122 bp, Homo sapiens
gttggcgaaggtgcgagggcgcagggggtggggcggcggccgttggaggcggagcctacgcgcccctccctccccgcacgctccgcccgatcggccagggctgggggcgctgggggcgctac

SEQ ID NO: 263804 - DNA, 122 bp, Homo sapiens
ggaacctgggagtatattaggttacacggcaagagggaaggcaggctgccgctggagatgcggatggatgccaatccgcggagttttgagtagggaacatagcctggattatgcaggtggga

SEQ ID NO: 263805 - DNA, 122 bp, Homo sapiens
gggggaggcatgcaggccagacacgggtcagctgccggcttgctggagtcattcctcccacgcagtcccctcctgaggggctggagctggggctggagggtttcagcagtcagggctggaga

SEQ ID NO: 263806 - DNA, 122 bp, Homo sapiens
taaaagtgttcaagcggcctctgggcgccagcaaaagaggctggggattaatttcctgcgcgctccacaagaggcggggctgggcggggcgggggcgagagggaacgagggcgcctgcgcgg

SEQ ID NO: 263807 - DNA, 122 bp, Homo sapiens
attgcctagaatgagcgctaggcgaccgtgacaggccctgtcttccaggaaaggtagtgtcgcatttcctctgcacttcctgtctcattcatgagggacatcctctcctctgctcctgggtg

SEQ ID NO: 263808 - DNA, 122 bp, Homo sapiens
tgttttatgagggtggttaggacgtggtatctgggggccagcagtgcccttaagcttggccggcagggtggagggctgccctgggactgtgcttcacagagccacgctctgtaactcctttg

SEQ ID NO: 263809 - DNA, 122 bp, Homo sapiens
gtgctgggctttccatccctcggaggctgagactgcttggctactgctaggagagtacagcgatgggtatctcagcatggggtggcatcttgtgcttgctcagtttagcaagcactgtgcct

SEQ ID NO: 263810 - DNA, 122 bp, Homo sapiens
aggagggcttggagctgggccggaagacagtcgacacctgcaagacctgaaaagggtgcccggtgtgggctaaggacagagagccctgagtggggctccctcgcggcctccaccccttaaca

SEQ ID NO: 263811 - DNA, 122 bp, Homo sapiens
tcttcagttttttttaaagcaacatgaaacacactttattcctgctaacattaggaaaagcgagctgttttccaagccctggaggaaggaaattcagctaactaacgtgaggtaatgtaggg

SEQ ID NO: 263812 - DNA, 122 bp, Homo sapiens
cgctcccttatatctctatcacttctttactagtccgtcttgaccccttctcatagcctccgcattaggtctgcctcctttgctctgacacatgtccagtcgagcccttcaggtgtattccc

SEQ ID NO: 263813 - DNA, 122 bp, Homo sapiens
cccccggggccgctggagaaggatgcggacggggccagtgactcgtagtagatccctccgcgcggagctcgggccggcgcttcttcctgcgggaaacccctgggtgcccaaggcggcggggc

SEQ ID NO: 263814 - DNA, 122 bp, Homo sapiens
agggggcagggtaggactaggaccactcagagatgggaatggggacggattgagtgcagccgtgggtcttacccgggaccagaataaggtgatgacgaccaccagatgcgccaggagcgtca

SEQ ID NO: 263815 - DNA, 122 bp, Homo sapiens
tgtctgtcgcagattggctgattctgcaagtgccctatgcgccagtgttcgagggtgagccgctagtcctgcgctgccgcggctggtacgacaaggtggtctacaagcttcactactaccac

SEQ ID NO: 263816 - DNA, 122 bp, Homo sapiens
ccggttcaggtaggagcggggtgggccggctggcagatctgagagcgtggcacgccccagcgggcagggcgcacagcgcggaggaaggcgcgagtcagtctggagtgctccccatttatcaa

SEQ ID NO: 263817 - DNA, 122 bp, Homo sapiens
cggccggccagctttagaggaggggaggagcagggcgagttcacattattccttttccatcggaagtggcgctcgtgcattcaactcgttcccgctcatggaacccctctttaaaaagacgc

SEQ ID NO: 263818 - DNA, 122 bp, Homo sapiens
atgaatagaatttcctgggagtccaggaagcctgaagacacctgcgacctcaggaacgcgcgcctgcgccctcggggtcggtcccgtcccgcccgggttgtagccaggctcctggtgggctg

SEQ ID NO: 263819 - DNA, 122 bp, Homo sapiens
gcagggcctgtgaatctggactttaaatatgactttctaaaacacactaagtttgcaaatcgctgctttagtgaataaacagaaaagaaaagctgtcatcctacttcctacgactgcccata

SEQ ID NO: 263820 - DNA, 122 bp, Homo sapiens
aggtggagtgggaaaggcacaggcctcggggctgcctccagcctgagtttgggctgggaccggggctaacccaagctgtgatggggatccaggccctagtggagctggacgccgagttctgg

SEQ ID NO: 263821 - DNA, 122 bp, Homo sapiens
ggaggcaaagcatgacaagtgccacaagagacctgcacactgctctggatggtaaagcgacgcaaggagggaagaaggtatttgcaacggcctcccagatcggcgctaggaccccgccagca

SEQ ID NO: 263822 - DNA, 122 bp, Homo sapiens
ctccaattaatctgccttttgccagctgatttttcagccttggccccctcgaaggagtggcgtcagcccccgggctcctgaagaggacagggcgcttctgagctctgagcctgcggttcctg

SEQ ID NO: 263823 - DNA, 122 bp, Homo sapiens
gacggctaagaccagagcggacacaaaggagataacaatgaagagggcgccggcaaatggcgaagcatcgcctccggacaggccatctccgggcagggcccctctagggagcgggaacgttt

SEQ ID NO: 263824 - DNA, 122 bp, Homo sapiens
tggccgtcaggtttcccctgggatcctgggacggtatcaggcggggaatctgtgcggccgcggcgaggtaggtgaggtgaggcggggcgaggtgggcgaggggggcgaggtgaggcggggcg

SEQ ID NO: 263825 - DNA, 122 bp, Homo sapiens
ggcccgagcttagtttccccaggactggcctaggaaggagcaccggccacagctgctccccgtgccactcagggtggacccagcatctcaggagcacctcagggtgtcggttaagagacagg

SEQ ID NO: 263826 - DNA, 122 bp, Homo sapiens
ccccagcttggccaagcagagctgggggggcggtggccggcaccgcagtgagtgtgcgcgcgtcagccgggccgggccgggatcgggcagaggcgcgcggggcctccgcgggcgcccggagt

SEQ ID NO: 263827 - DNA, 122 bp, Homo sapiens
cctgcttgacgcgactgctcgaatcgccgtaaagctacgcttttgcgcctcgccccttcacgacttgtagagctctttacggctctgcggaggccctgccggattctctgggcgaacaagcg

SEQ ID NO: 263828 - DNA, 122 bp, Homo sapiens
cccggcggatgaggcctggggagagggaggggccaatctgtgagtcgggagccctggcctcgccactaaccagtctcagactgtgggtgggtcactgccctctctgcctgggcctccctgga

SEQ ID NO: 263829 - DNA, 122 bp, Homo sapiens
tccttcagtttttcttttctcagttagaagtttgctgctactcatttaaaagtacgcacacgcttacccttccaaagagcaaacggaggaggaatttcttctcgccacggggtttctgtttc

SEQ ID NO: 263830 - DNA, 122 bp, Homo sapiens
aggacgccccgtcctccacatgctgccacttggctgagccgggcgccggcgagaaggcggcgccgctgccctggcagctggactgcactttgcccccgcccggcctcagctgccgcccgccc

SEQ ID NO: 263831 - DNA, 122 bp, Homo sapiens
ctcgccacttgttctcctcacagcaggttcaggagaagtggcacctggtggaggacctgtcgcgactgctgccggagccaggcccgagcgactctccgggccccaagtaccctgcctcccaa

SEQ ID NO: 263832 - DNA, 122 bp, Homo sapiens
gtcccacctgcctcatgccccacctgccccacctgcacctgcgcggaggcccaggcgcagcgggagcacccagtcaggcctgccctatggcccagctcccagctcccagagccaacctgacg

SEQ ID NO: 263833 - DNA, 122 bp, Homo sapiens
gtggagccccggcagcaggagcgtcgcaggtgagactccgcggggtacagggtggcagggcgcgggtgagggtgacccgggccgggcacggcgcgcagggcctgtccctccagcctcgcatg

SEQ ID NO: 263834 - DNA, 122 bp, Homo sapiens
gaccctcgcccgcaaagtaaaatcaataaattccacctggattccttttcagcaaaacgccgtcagacacccgtaggcaattcttttctaagtggaatcacttgtggcttaggcctttgatg

SEQ ID NO: 263835 - DNA, 122 bp, Homo sapiens
ctgggggttgctgagccagcagggcctccggatggggtagactgaatagcagtactttcccgtctgagcaggccagagccaagagacccaaccggggcaggagaggagcctaaagggtaaaa

SEQ ID NO: 263836 - DNA, 122 bp, Homo sapiens
cgttgtcaaatatgacagaagtaataacttgactgcaattcctgagcctatcaacctcaccgtttgtccacaaacataaccagaatatattttatcttgatttccgacttgagggaaaataa

SEQ ID NO: 263837 - DNA, 122 bp, Homo sapiens
gcagagtaacagctgagtgcgaggtccttgggggcagatatgcagccctccagctcttgccgagcaggatctccaaagatcagaggcattacctggtgtgaaagagggtaatttcctggaac

SEQ ID NO: 263838 - DNA, 122 bp, Homo sapiens
ctgtcctcaaggcgagggttcccggaccccaggtgggctgcgctggaccccaggtggagacgggcacagcggctcccaggggtacaaatcttccttgcctgaagcagtccctgccggtcctg

SEQ ID NO: 263839 - DNA, 122 bp, Homo sapiens
ctttcccactcctcccaggtcttctgatagccgtcagcgtctccgttgataaaatcatctcgcatttcggggccgcccggaacttggtgcagaaggtgaaggtggctggggggaggctgttg

SEQ ID NO: 263840 - DNA, 122 bp, Homo sapiens
aaggtcggaaggaccaagattatgtccgccagcctaagtgggacgaacaaccaagttgtgcgatgcagctttaaaggggctggtgattgacagaatggtgtagtagtagatggggtggagcc

SEQ ID NO: 263841 - DNA, 122 bp, Homo sapiens
ctccgcctgggagccgttttcaaccagccccgttagtggttgggacgtaagcctaacccccgctcatcccccaggtcccaggttggagaacacttcctctgcgaagaggtcggggctgggtc

SEQ ID NO: 263842 - DNA, 122 bp, Homo sapiens
ataaatttgagatttaattaaatacatttaattaaataaaaagtgtgaatggctcagaatcgtttatgacatgatgctgttctgcagtgtttgtagataatatcaaatgcttctatattctc

SEQ ID NO: 263843 - DNA, 122 bp, Homo sapiens
atcccaggagtgcacatgggcccctcgggtgtctgaacagaagggcataggagggagggccgcagccctgcagtcttactctgctggtgtagcggtcacctggcaactcccaccccaccctg

SEQ ID NO: 263844 - DNA, 122 bp, Homo sapiens
aaagtacctccccggggtcgattcaggcggacaggtcgtttgtctggaggatgatcgccccgggacagaggatccgaatcttctgctggctcgtggccatgtctccttggggagcgatcctg

SEQ ID NO: 263845 - DNA, 122 bp, Homo sapiens
caaaggctccccaaagattaggttttataatgcttcctgaaatttacagctccactttgccggcctgtttgaattcagatgactccaagttgatcccaaaattataaatcaaagtatctcag

SEQ ID NO: 263846 - DNA, 122 bp, Homo sapiens
aatcttccatcattaaataatgcgagtggaaatttgccttcataagctggccattccaaccgtcttagaggctggtatccccagcttcggatttaggctgtttggtcactgccgtcaccggc

SEQ ID NO: 263847 - DNA, 122 bp, Homo sapiens
tgcgggattgggagaggcagacccaaagcaagcgctgggtatgtgacggcatcgaacgcgcgctcaggtcctcccactgtaatacgcacctgggatgcggggtcaggaaggcaggcccaaag

SEQ ID NO: 263848 - DNA, 122 bp, Homo sapiens
agggtgcaggatccaggtaccttttcacagcttacaccacatcccagttgaacaacacagcgattgttctcaaatacatcattatactcacttggagccagtcactctggcttttctctaag

SEQ ID NO: 263849 - DNA, 122 bp, Homo sapiens
tttcgatttcccctcctggtggatgaaagtcctgaggcaaccctgggaagatggaagttccgaggcaacctctggatgtgaaaattccttggtgggtgtgctttggtctgcaaatcgactgc

SEQ ID NO: 263850 - DNA, 122 bp, Homo sapiens
gggaccccgggtccgagtgccacactagagttttctcggggacccgagatctgagtgcagcgccagggtttcctcagggaccttgggtccaagtgccatggtcagggtttccttggggaccc

SEQ ID NO: 263851 - DNA, 122 bp, Homo sapiens
gctcccagtgtcttggttacattggggtcacctagagtagatgctcggaacatgaatgggcgtcctctgcctttgttctcatgctcgtgtttctcctatcctagacttgcacctagctgcgg

SEQ ID NO: 263852 - DNA, 122 bp, Homo sapiens
gggatatgggcgaaggaggctgggctggctgttagttttgcaggcctgagtggtgcaaggcggccgctgttgcggtcacaggcatgacctagggtaggatggtgctgcccgtaaccaggctt

SEQ ID NO: 263853 - DNA, 122 bp, Homo sapiens
tcacggtctttgcctgggcatcgcctacaagcagtcggagcggagaggccgcgggtcaggcgcggcgggcggccatactggaaacgggcacggcccgcgagccctgagcgctggcctgcgag

SEQ ID NO: 263854 - DNA, 122 bp, Homo sapiens
atttaagagagatgtcaccacagacaagcccatgtccagcctgtcctaataagcagccgccgggctgcccagaaagtcacggtcttctcaaaggaaatgcttcagtgctgatgtgtgacccc

SEQ ID NO: 263855 - DNA, 122 bp, Homo sapiens
agcaaagggacgactgagggaataatcaggagaccactgaggcgtgaagtactaggcgtgcgataactgaaggagttagtaactgggagcacagagttggaaacagcttaggggaagatgga

SEQ ID NO: 263856 - DNA, 122 bp, Homo sapiens
gtagtgatactaaatttagattattgatatgtttggctttttttctttgttaaaggaaaacgtccctttggtgtttcattgctgtacattggctgggataagcactatggctttcagctcta

SEQ ID NO: 263857 - DNA, 122 bp, Homo sapiens
aactcccaggaagggagccagtgtggccatgaagtaacacacacctccggcatggctggacgatgggcccatgggccgtggaacgtaaaacacaaaacaaagacaacccagctgaaacccag

SEQ ID NO: 263858 - DNA, 122 bp, Homo sapiens
agtgacatgcaggaagcttccctagaaacattctcattagccttccttgggtctgtgcctcgatacaccagcccatcatcatcatgatcatcaacaccattatcatcatcattgtgctctgt

SEQ ID NO: 263859 - DNA, 122 bp, Homo sapiens
gccctggcccggacgtccaggggccgggaggctgcaggcgatggagccggtatggggagacgccctgctggagaagtggccgggtcccggccgtgcgtgggccggccctgcgccacctgggt

SEQ ID NO: 263860 - DNA, 122 bp, Homo sapiens
ttttatcacctatcagttgagtttttggaaagccttccagggcagcgttgtggttttgaacgcactcttgttcgtgatttatctggtagtacagctctgctgacaaggctctgaaaactcag

SEQ ID NO: 263861 - DNA, 122 bp, Homo sapiens
ctattgagtatttgaatttccaagatgtgagtctcgcccggaagtttcccggaaaacggtcgctgacacagagtcctcggctaccacacaaaggccagagggctccaccgcccgcatcctga

SEQ ID NO: 263862 - DNA, 122 bp, Homo sapiens
aatctgagaaaggtttacctcttcctgtgtccctccgtgccctcctttcatcccagagcccgccatcttaaccaaagtctttgagttttcaaggaggtgataaaatctgtataaacctttgc

SEQ ID NO: 263863 - DNA, 122 bp, Homo sapiens
ctttactcctgagccagcgaaaccacgaacccaccacaaggaagaaactccgaacacatccgaacattggaaagaacaaactccggacatgcggcctttaagaactgtaacactcaccgcga

SEQ ID NO: 263864 - DNA, 122 bp, Homo sapiens
gagagatgtctgcaaaatttgtaaactagaaagcccctggctctcattctgtcatagaaacgttttaaaaaataaaaccacaacaactcccaaaaactaaacttgaggctggctaaagaaac

SEQ ID NO: 263865 - DNA, 122 bp, Homo sapiens
cctctgggagctgagcctggcagattttaagcaacccttcacccagggaagattcagaaacggagcagaaaggatgagggcaaggccaggccctaggggacaaggctagtgtgagccaagag

SEQ ID NO: 263866 - DNA, 122 bp, Homo sapiens
ctctgggcctcagtttcctctcctgtaatgcctgaggataatgggtgctggtatcttctgcgcccctgggcctggggcacctgccccagcttggtgagagggtatcatttgtccttgggaag

SEQ ID NO: 263867 - DNA, 122 bp, Homo sapiens
ggtggaaactctagcagagggtttttgaaagcaggttgcacttcattcttactgagtgcacgtgtgtgtgtgtgtgtgtgtgtgtgtgtgtgtgtgtgtgtatgcagcgcccctgggtctgt

SEQ ID NO: 263868 - DNA, 122 bp, Homo sapiens
agcaagcgcggaactggggttgcggcgtctaagtgtttccggtggattcccagggactgtcggaggtgtggactctgcctgcctacctggtctgggaagatgttctaccatgtgagcagggc

SEQ ID NO: 263869 - DNA, 122 bp, Homo sapiens
cgcggggaggggggtgggaggtgtcaaagttttcggggaacttttccacttgagattccacgaccctgcagtgccccctacagaaagcggcagctggggagggcgggcgcccccgacgaccc

SEQ ID NO: 263870 - DNA, 122 bp, Homo sapiens
gccattcatctccacccaggcgcgccctggtacccgatcaacagccgctctcggaagaagcgcaagccctattcgaagttgcaactggcagagctggagggcgagtttctggtcaacgagtt

SEQ ID NO: 263871 - DNA, 122 bp, Homo sapiens
ggggacagcattgtttctgtgaccgtaggcgtcgaagctatgcagaagcgttccgcggaccgcagagagatggggctcaggccagcatccctctcgctccggcccttcccgggaggagctgg

SEQ ID NO: 263872 - DNA, 122 bp, Homo sapiens
agggtgtgctagcgcgctcagccctctccggccggcttagtctagttcccgggcctcgctcggttccagaactttccagaaaatgccgcgctccctacggctcaagggtcaaatcgcgtcat

SEQ ID NO: 263873 - DNA, 122 bp, Homo sapiens
acctcgtgatccacccgcctcggcctcccaaagtgctgggattacagttatgagccactgcgcccggctgacccttttcttggtgccagagatgggagcttctcacaaaaggatatttatga

SEQ ID NO: 263874 - DNA, 122 bp, Homo sapiens
agtatgtgacatcgccagcacgatgctatttccatctgtgtgacagtctaataataccttcgaacagaaacagacagccatcggccacataagataccacgatgcactggagaatgtgctgg

SEQ ID NO: 263875 - DNA, 122 bp, Homo sapiens
ccttgtgtttgaggactgtcaattctagatctgcaacaagcattataagaaaccaacaaacggtgcgtgtatttattccacctctcttcacactgggcactgtgcttctttgtgtgtgtatc

SEQ ID NO: 263876 - DNA, 122 bp, Homo sapiens
tgcccagctcacacagttagtaagtggtagagagcagatgtaaactccaaagttcaagttcgtgctgaatattggtaggaacctgtcttcttgcaaagggcagaaacctaattcaaaatagc

SEQ ID NO: 263877 - DNA, 122 bp, Homo sapiens
caccctacgcccaaagcacccctctgacccgccgctgccaccccgcactctggcccccgccgtaccccggtcctgcagcgccccctcgcgttctcagcgtgcgcttctagcggagcgcaggt

SEQ ID NO: 263878 - DNA, 122 bp, Homo sapiens
ctccatggagacaggggcggggccaggcggcaggggcggggtgcccaacagccaactgcccgccctcaaccgccaaaaacccacactcaaccgccaaaggccaaggccaagggccctctggc

SEQ ID NO: 263879 - DNA, 122 bp, Homo sapiens
tgagagacaggaccggcggggaagacgcctcctcctcggccgcggggccccgcagccccgcgggcggcctccgctcggtcgggctcacttcccagcagcctcgccccactcgccggttcgcc

SEQ ID NO: 263880 - DNA, 122 bp, Homo sapiens
ctggagggatgaggaagtgaggaactctacatactgagctctcaagcctaggagtgaaaacgggtgagaagtttgggcttgttttaggctatgccgagtttaagttcacagtcgagtggatc

SEQ ID NO: 263881 - DNA, 122 bp, Homo sapiens
tgcagtggggcttttgcaatgacatcatccctctgtccaaacgtccccaatagccatgctcgggagcggtgctttctgggaactgtagtcttcttacgtcctgaagggatacccaggcaatc

SEQ ID NO: 263882 - DNA, 122 bp, Homo sapiens
aggcctgtaaagaggaggagacactggctctggcggaatggggactattggagggttaagcggatgtggctaaggctgagtcatctaggagtaaacaagaggccttcctttgggaggagcca

SEQ ID NO: 263883 - DNA, 122 bp, Homo sapiens
tgatttgttctcatacagtacaatacaatcacaataaatgagaaccttttaagaacaatacgggacaaaaaccaccttgcaccctgttaacactaaagcagttacagatttaaaaaaatgtt

SEQ ID NO: 263884 - DNA, 122 bp, Homo sapiens
ttaatcacgcggggacacctgcctgaatattcaccgacgtttcagaggtgtctgaccacgcggggacgcctgccttggtccttcacccttagtggcaagtacctcttttctagggggcaaga

SEQ ID NO: 263885 - DNA, 122 bp, Homo sapiens
aatccagatgggaagacgcaggagtgcaccagctcctcgtgctctgtggcgaggcctctgcgaaacgggcgcacatcaggaaatgttcgctctcccttcaccaccaaggagactggccgatt

SEQ ID NO: 263886 - DNA, 122 bp, Homo sapiens
ccgtggagcagggggcagcgctcatcagggaggctcgggcggcacaggagcccacggaggcggggggaggctcaggtatggcgggctgcaggtcccaagccctgccccgcggggaggcacct

SEQ ID NO: 263887 - DNA, 122 bp, Homo sapiens
gggcgcgcggctgacgggctgggggcggagcgtggcctgaacgccaggctggggcgcgtgcgtaacggtgtgtgttgtgggtgcgtgtgcgtgcgttcgcagcaggggcgggcgtaggacca

SEQ ID NO: 263888 - DNA, 122 bp, Homo sapiens
actaaagcctgggtgactgggaaagtttgggctgggaatgttgggcttttcaagcgtgttcgaagctccctaattggtactaaatttcaggcattcagaccctctaggaaagagttctttct

SEQ ID NO: 263889 - DNA, 122 bp, Homo sapiens
ctcttctctgagtcctccccattttactgatgaggacggaaatcgaggcacacgattaagcgtttccctgggtcacacagctaatgaatggcgagctggaagtcagtcccaggtcatcagac

SEQ ID NO: 263890 - DNA, 122 bp, Homo sapiens
tccctgcagatctgaaagttctttaattgctgagtcaagtcccatcctcaaggaacctcccggcccatctcccaggagaacaatctcttcctactccccactccccatctcagtgcttttag

SEQ ID NO: 263891 - DNA, 122 bp, Homo sapiens
gcccgtggagcaccagcccgcacaccacggtgactgagtagaagcccagcttcttgccgacggccctggggtcgtccatctccaggatcttacccgcaatgaggaacacaatgccgaagggg

SEQ ID NO: 263892 - DNA, 122 bp, Homo sapiens
gccagtgagatggcagagcattacgtgggtgccttttggccatctggatccataggcacccgaagacaacactaattccatgattaggaaactctcatcacttctactaacataattgtttt

SEQ ID NO: 263893 - DNA, 122 bp, Homo sapiens
accacagtgcccggccgaagaacgctttttaaaacgtgttctctaatgggtccgggagtccgccgcggtctcgggcgccaccaattggccgtcataagaactgcaggcgacggccgcccggg

SEQ ID NO: 263894 - DNA, 122 bp, Homo sapiens
tcctcctcctccttctcctcctcgccctcctcctcctcctcctcctcgccctcactcctccgcctcattcactggctggagtctaggcgtcccacacaatggaataatcaatacccaggcgc

SEQ ID NO: 263895 - DNA, 122 bp, Homo sapiens
cagcgccggaaccctgggtccggggctgggtcctggagtccctgagcggcctggtacactcgggatcgcggcttcccattccagacgcaccaggaaagtcagaagtgggtaccgacggtgac

SEQ ID NO: 263896 - DNA, 122 bp, Homo sapiens
ccccaactctctgcaggaataaaaaattcctaaaacgttagatttgagaactcagcactccgttcgccatagaaactcatttaactcaaaagtgtagttgacttcaaacaaacagccccata

SEQ ID NO: 263897 - DNA, 122 bp, Homo sapiens
ccacaaccactgcactgcctgggcttccccagccctctccaaggcccgctttcactgtaccggggttttctatttatggatccgccctgctacccgccactcccacaacccccacccataga

SEQ ID NO: 263898 - DNA, 122 bp, Homo sapiens
ataagccaccatgcctggcccccagaattatgaatcctgtgaggatggcttcaaggtgagcgctgagccagacaaaaggatggggtttgggagcaccctgcttagactggaaagataatgtt

SEQ ID NO: 263899 - DNA, 122 bp, Homo sapiens
cacagggcgcgcgcgtctgccaacgccggttcccattgggcagtacgctgtgacgtttcacgagcctccccgcctcgctcctcgaattgttgttgcttggcggggaggcaggagagggagga

SEQ ID NO: 263900 - DNA, 122 bp, Homo sapiens
ctgcgcatggcacttgtgatctagctagagttccgggtgggcgtgggcttggcgggtgggcgtgggcttggtgggccccacactcagagctggctggccggccccaccagccccagacagtg

SEQ ID NO: 263901 - DNA, 122 bp, Homo sapiens
agttcttccatttcacccttgcagccagctgttggccacggcccctgccctctggtctgccgtgcatctccctgtgccctcttgctgcctgcctgtctgctgaggtaaggtgggaggagggc

SEQ ID NO: 263902 - DNA, 122 bp, Homo sapiens
gctctttcctcgcggcgctgccgtggggtggccgggagggcagaacgaggggctgcgggacggtgttcggaagaaaatcgtgcgagtttaaaaacatccaaagtgagccgagctgggcccca

SEQ ID NO: 263903 - DNA, 122 bp, Homo sapiens
acttttctcccaaagcccacatctttttatctttgtggcttttctgccaaaagcccacatcgttttatctttgggactttcagagctcatgtgcctcagccattcagggctgagccatatca

SEQ ID NO: 263904 - DNA, 122 bp, Homo sapiens
agtcattccttctgcaaaggactgcctggcaggtgtcaaaggcagtggtggccacagaggcggtggagagatggccttcagcggttgccaggctccctatctgagcccagtgagttccgggg

SEQ ID NO: 263905 - DNA, 122 bp, Homo sapiens
ctcctgtgtccccatgtgtgctccagtgccaccatccctctcccagctgggccctgggcacgtccccgtgccgtcagccagtgcgctcttggagcagttatttccaaaccgaccttcacgtc

SEQ ID NO: 263906 - DNA, 122 bp, Homo sapiens
ggctcctgtgagttggtggtagcaatgggcaggaccaccgtgtgagggctgctgtgtctgcgggaagtgctctgtgaggcccagctttccctcagaggcaaatggcctcctgggccctcttc

SEQ ID NO: 263907 - DNA, 122 bp, Homo sapiens
tccctcctggcatcctctgctgtgaaccgcggcctgcagggtgcttgcgagcggcccgggcgcgcccccttccggccccgcaggtcacccggctacagcccgggttttcccgggacccgcgc

SEQ ID NO: 263908 - DNA, 122 bp, Homo sapiens
aggccgggacccctgcagcggcccgtaggacacctccctttccgagcacggactggtccccgcccctcccccgggaagtctccgcccacagggccccagcagcccccgcgcgccctcgctcc

SEQ ID NO: 263909 - DNA, 122 bp, Homo sapiens
attgttgtggacttgaaaaataaaggactggagaatgggtgccatgatgattggtctgtgcggccataccggcactctgtagaattgttttcttttgaaactcttgatggactagtagtttt

SEQ ID NO: 263910 - DNA, 122 bp, Homo sapiens
atatgcctaaaacctccttgattttattatatgctgcattctgtactcatcagatccacccgaactagcctcatttagattttgaaagagatattgtctctcaagtagcccattgtttgtat

SEQ ID NO: 263911 - DNA, 122 bp, Homo sapiens
taaacacaaggagacttacgtgcggctggaggacaaagagccttggcgcggctcagtcagcgtattaatctcaccgccctctgctggcccctccccagccagcagagaagccccagaagtgt

SEQ ID NO: 263912 - DNA, 122 bp, Homo sapiens
tactctggccctcagggttgtgtagtttccggggccacggcacctgggcacaccaggtggcgtcgcgcctttgctttcctgagccttctgagtaaggtaatgtggtgtccgtggggcgacgc

SEQ ID NO: 263913 - DNA, 122 bp, Homo sapiens
aaatgcccttagtggtatcttcttgccatctggctaggatcacacgagaacaacccaactcgtttggggaagaaaattgtcttcagtgtcgcagtagccacctctaaactcgcctcctccac

SEQ ID NO: 263914 - DNA, 122 bp, Homo sapiens
tcagacccttagctgggcatttaaggctccctcccggccctctcacatccccacatgccccggacaaagcgcacacgcctcgtcattttccagccatgcttcgtgcccacggccctccctgc

SEQ ID NO: 263915 - DNA, 122 bp, Homo sapiens
tttctggttttgctctagtgtttgggtttcttcgcggctgctcaagatgaaccgactcttcgggaaagcgaaacccaaggctccgccgcccagcctgactgactgcattggcacggtgggca

SEQ ID NO: 263916 - DNA, 122 bp, Homo sapiens
ggcgggccgggttgtgttcatgttggtgaacccgcttcgttcttgcccgcgtggatggtccgtggactccgggaaaaccttctcgtggctcaaagtccaccccctccctagcgtttcatcat

SEQ ID NO: 263917 - DNA, 122 bp, Homo sapiens
gtgctgggttaggcagtacgaatactaaaattggaaccagtgacacgcagattggtgaagcgttccatattttttccatgtgataccctaaagtaggatgaaagactgtgctgagcaaaata

SEQ ID NO: 263918 - DNA, 122 bp, Homo sapiens
gtgaggctgagacaggtgcctggctctctggtgtgtgtcactgaccctctaccctcctcacggcctcggtgtttgcacacagcagtgtccccaagagggaagtcaaatatcgagctctggga

SEQ ID NO: 263919 - DNA, 122 bp, Homo sapiens
ggggcacttggagcatggcaggctgtgagatggcacgttagaggtgcggccccatttaatcgtccccacatacagacctatgagagccctctatcaacagcctaatcacgaaaacaaggcag

SEQ ID NO: 263920 - DNA, 122 bp, Homo sapiens
tctgagtttctggagatgggcaagatggagcagtctccacacttggctcttcagccccggcgccccccacagccgcctctgctttcctggagataccgcaggctcctaacctcaggccggct

SEQ ID NO: 263921 - DNA, 122 bp, Homo sapiens
tttggagcccagtgtgcagacccgcagcgcagaggaggcggcggaacaccccgggttggtcgggtttccaagggctgacccgagctccagcactttttccgcgcctgatttttcaggtcatt

SEQ ID NO: 263922 - DNA, 122 bp, Homo sapiens
caagcctggaagaaatccaggctcaggaccgccttccctttcctccccagagccgcccaccgactgtttgacatgcacaaactggagttctttccacacggcgtggcagggccacggagaaa

SEQ ID NO: 263923 - DNA, 122 bp, Homo sapiens
cggccgcggggagaatcctaccccgcgccctcgccagggtcccggggagctctgggctggcggaggcgaacaagatgcggtttgacagaaccaggccgtgcttctgcaaacctcaatgccgc

SEQ ID NO: 263924 - DNA, 122 bp, Homo sapiens
ctgtggctgaaggggtggatatgtaggataactatgtcctctgggccctgtcttctctctcgccacttccgtccccaactgaggaagaaagggaagggtgagtgaggagcatcctcatccct

SEQ ID NO: 263925 - DNA, 122 bp, Homo sapiens
cttcatagctttaaaaggttttcgcactgcgtgcagttagagtagctaaatcttgtgtgacgctccacaaacacttgtaagaattttgcagagaaagataaccgttgccacccaatgccccc

SEQ ID NO: 263926 - DNA, 122 bp, Homo sapiens
agaccgccccgccctcccgccagctcggaacgccctgtacttcccctcccggctgctcggcgcccgccagcggccagaaactcccgccccgccttatgcaaccggggacttcgcgtccccgc

SEQ ID NO: 263927 - DNA, 122 bp, Homo sapiens
gaactggaaagaagaatagatgactcctaagtttgtggcctgagccactgaggggaccagcggtgccatttgctaggagctggattagacaatggaatggccatcaggagctgtatgtagac

SEQ ID NO: 263928 - DNA, 122 bp, Homo sapiens
tgcgcctcggccagtcaagcgggtgtgtggcaccttgtgggcggagaccacgcctctctacgcggggggcggggacacgcggctcgcgcgctgtgggcggtgcccggcggggccacgccttt

SEQ ID NO: 263929 - DNA, 122 bp, Homo sapiens
gcacccccccccccccccccagccctcctagccctgacacacagctgggactctcaggtccgaccagcggtcctgaacccactcccactgcacgggaactccttagtggcgaagcagcagcc

SEQ ID NO: 263930 - DNA, 122 bp, Homo sapiens
gagagtttatttcaggctcatcaagataaaataaattccgctggtgtgcagccggccaggcgcagggcagagcggcggcaagcggcccgcgggcagagggggcagcgagggtccatgctcag

SEQ ID NO: 263931 - DNA, 122 bp, Homo sapiens
agaaatatttctatcaaaatcactggttttgttaggagtattttgatttttctatttttacgctgggaaaaaaattaaaacaagtatgtcagtgttcattttatgggatagttggcttcact

SEQ ID NO: 263932 - DNA, 122 bp, Homo sapiens
ctgcgcaggtcctagactcctcccttcgggaggctcaccccctcccttctcggctacttccggccctcaccgaacgccctcaacgcgcttgcgccgttttgataggcttctcgggccgaagt

SEQ ID NO: 263933 - DNA, 122 bp, Homo sapiens
aacaaactcagccgtgctaaggtggacaattcagtgccgttgcattcattcccgatgcgtcgcagccacatccatctagttccagaacactgtcatgccctgggaaggaaacgccctcccca

SEQ ID NO: 263934 - DNA, 122 bp, Homo sapiens
ttttttttaacttggggatgcccttctcagcttctgtgccccatgacagtctgcagcagccgctagcttaatgcttgccttattctcctgccactccattaagctggagaaaataaactttt

SEQ ID NO: 263935 - DNA, 122 bp, Homo sapiens
ctcgcttctcggggtcggcgagccggagctcctgcgcgcgcttcgttcttatacgaacgtcgggctcactcatttatgtcctagaaaagttgtgtggacgactgctttaattttcattttta

SEQ ID NO: 263936 - DNA, 122 bp, Homo sapiens
gctccgcggccgcccccaatcgcctcggactgagacgcggggacgggaacccctgggatccgactccccaaatcagatgcatttgcatttcttatgtaatgtactgcaagttcccttgttgg

SEQ ID NO: 263937 - DNA, 122 bp, Homo sapiens
agctctccgggccggcgtgggagcccgcgctccaaggcccggtggggggaggggcgctcacgcaaccgccactgtctggagcgggctcgcctctgcggcagccctcaccgcccgggctttac

SEQ ID NO: 263938 - DNA, 122 bp, Homo sapiens
ccgccccctggactgcggcgcgggtgggggttgtgcgttttacgcaggctgtggcagcgacgcggtgaggagacggcccacggcgcccgcgggctggggcggtcgcttcttccttctccgtg

SEQ ID NO: 263939 - DNA, 122 bp, Homo sapiens
acctgacatatggcatttccatcaacaaagcaaacaccacatgaaaagcctacaggtctgcgtgaaaacagtaggggagccctaagctccagcccagccccctcactgcattgcacctccat

SEQ ID NO: 263940 - DNA, 122 bp, Homo sapiens
tctccagagatttgttacctcctttctccttttcctcctgcctggagcaggtaggaagtgcgctaagaaagaggtgagaggcaggaaggtagggtgggaggtgaggggtgagtgatctgtgc

SEQ ID NO: 263941 - DNA, 122 bp, Homo sapiens
gatttggggtgggaggagggtctggcctggcattctatgggcacagtggttatgtggccacggctgtgagagtcagtactctgcagtggcaagcagccaagctggaaattacataggttgca

SEQ ID NO: 263942 - DNA, 122 bp, Homo sapiens
ttgttcattcattcgctcattcattcattcattcatttccctcaagcctgcgtccccgcccggtcagcatcgcaggtgttacccaaactctgacggtccctttaagaactcacccggagtcg

SEQ ID NO: 263943 - DNA, 122 bp, Homo sapiens
agggactgctggagagggggcacgggcagccgtggcagtgcatcctggtgtgccttgaagcggctggaagccttcatcaaggagaagggcttcaggaagcccagaggcttcacctgcaggta

SEQ ID NO: 263944 - DNA, 122 bp, Homo sapiens
cggatgccctgcccgccggagtgtcccgagtccctgcacgacctcatgtgccagtgctggcggaaggagcctgaggagcggcccaccttcgagtacctgcaggccttcctggaggactactt

SEQ ID NO: 263945 - DNA, 122 bp, Homo sapiens
gttctctatattaatgagctgttctactttagtgctgtcgggagtgatgctgacggcatacgaggctgtgctgtactggtttgcaacatctgtcactggcttacatagctgttaatctttca

SEQ ID NO: 263946 - DNA, 122 bp, Homo sapiens
gcaaaaagccgtggcgggcaaaaagccgcggcaggtaaaaagccgtggcgggcaaaaagccgcggcaggtaaaaagccgcggcttttggcgggggtgcaaaaagccgcggcggcgggggcac

SEQ ID NO: 263947 - DNA, 122 bp, Homo sapiens
caagtagtgactcattcagagaccttgagccaggtcagagcatgatggaagaattagtgacgtatctccctagagctttgctccttctccctaaaagggtgattattttgtaaaaatacttc

SEQ ID NO: 263948 - DNA, 122 bp, Homo sapiens
ttggccagcccagagaggggctcccaccgtgcagcggtgggctgaagggttcctcaagcgcggccagtgtgggcgccaaggccaaggaggcgccgagagcgagtgagggctgcgaggacggc

SEQ ID NO: 263949 - DNA, 122 bp, Homo sapiens
gctccatctgtaaaatggagatgccaaggaagatccatctcccaagggcagtgtgaggatcggcggggtcaaaggcacgagtgctggcacagcacaccccccggaggagggccaggaccaac

SEQ ID NO: 263950 - DNA, 122 bp, Homo sapiens
aatttcctaatactctgggggtgtctcttctcctcctcctcttggggtccccctattttgcgaggcagaggctccctcaagcctgtggtgctcaagtaccttcaaccctagagaggggaaag

SEQ ID NO: 263951 - DNA, 122 bp, Homo sapiens
ggagtgggaggtcagagagagactcccaacgttacagcagaggccgtgggagtcatgaggcgggcaccgtgggcgaaagccggttgcatccatcgtgacagcgccgtctgcttgtgctgtct

SEQ ID NO: 263952 - DNA, 122 bp, Homo sapiens
cttaaagacaaacaggccacatctggcatgagtggccaggctgtcccgccctggaaacatcgatggcaaccccgtccccaccaagaagcggactgacgcttaccacaggtctgggaggaatg

SEQ ID NO: 263953 - DNA, 122 bp, Homo sapiens
cccctctggactttgctcctcgagtcttatccaagagactctgggaattgtttgggtttacgcagcccaggtaactggataatcagccttcatggaggacacagaaagtcacgtctacatgc

SEQ ID NO: 263954 - DNA, 122 bp, Homo sapiens
tgggagggacccagtgggaggtaacggaatcacgggggctggtctttcctgtgctagtctcgtgatagtgaataaatctcacgagatctgatgggtttatccggtgtttctgcttttgcttc

SEQ ID NO: 263955 - DNA, 122 bp, Homo sapiens
tgagcaggggatggcgttttgaaaagacctctctgccggtgtacgaagaatggattagaacggcgaagagtaatagggtggaaaccatcttcatcttggagagagatggtggtcgcttcgat

SEQ ID NO: 263956 - DNA, 122 bp, Homo sapiens
tgtcacatgatggagcaacctatcgaaagcggagggaaaggtgccgaagtcacgtgactacgcacgcaaacactcccgcttgcaccacgtgcaactcacgcccaccccctcagcccccccct

SEQ ID NO: 263957 - DNA, 122 bp, Homo sapiens
cgtcctctccctccgctttgaaactgagatacaagccgatgggtaaggactgcaggaagccggagagggacatttagagggtgaaactaggaggttcatttcccgagggtagaggaaccaga

SEQ ID NO: 263958 - DNA, 122 bp, Homo sapiens
gcccgcgacattccttccccacccccaggagcgccccgcccacgccgcagcgccagcctgcgcccccggcgtcagtgcccagccctcggcccagctcagggccaggttccggcggccacgtg

SEQ ID NO: 263959 - DNA, 122 bp, Homo sapiens
ggagtgtagtggttatatatttttaatcattgtttctttaatgtatcttttatataaattcgagtgttttatatataagtgtgaaaatgactttagaagctacaatgttgcttggcttctct

SEQ ID NO: 263960 - DNA, 122 bp, Homo sapiens
tgcccagcaagaattatgatcattgttagtatttggctttgagtaagtgcccacatgacccgagggtaaaacacaacaaagggatctgccagtcccctatggagtgacgcctatcacatttc

SEQ ID NO: 263961 - DNA, 122 bp, Homo sapiens
agaggagaaggccgacctggaccccagtaagttgggagcaattttcctttacaaccggcgcgggaggggaggggaggacgggcgggggcagccgaattacagccctcccgaaccgtgcaggg

SEQ ID NO: 263962 - DNA, 122 bp, Homo sapiens
cgtgatgcgcccccctcggcctcccaaagtgctgggattacagacgtgagccactgcgcccggcccgataggtattttttgaaaaagcccattatccagtatctggagaccttgggtcaaac

SEQ ID NO: 263963 - DNA, 122 bp, Homo sapiens
catagaagcatatctggcttgtgttacctgttaacacaaagggcacacctagccacccagcggatctgaaagctgccagctaaaaggaatacaattaacctagtgtgatagggcactgaggg

SEQ ID NO: 263964 - DNA, 122 bp, Homo sapiens
gccccgtcacagggactggcctttctccaagtgacaaggacaaatggatccagcgggacacgcctgtggaacattttggaaaacatcctgggtggtctgggctaaatgatcaagtgaaacag

SEQ ID NO: 263965 - DNA, 122 bp, Homo sapiens
tgtgctcggggaagaaaaggcgaggccctttgccgctctgccttctgcccctcgggcctgcgctgaccggtgggactcaggaggatgcacacagggaaggaggaaaataaaggcgccctttc

SEQ ID NO: 263966 - DNA, 122 bp, Homo sapiens
tcagggtccctgaccctactgaagaattttaagaggtacagacactgggaaagaaatatacgactgaggagggaagaagagtatacctctgcagtactgaagtgactctgaatacacacttt

SEQ ID NO: 263967 - DNA, 122 bp, Homo sapiens
acgaaggtgtccagccatgcagcaaacgtggatcaggcccaggtacacatcagatctcaccggttccagtgccttctgccacgtggaaatttcggctccttctttgtcttcttaatagactc

SEQ ID NO: 263968 - DNA, 122 bp, Homo sapiens
tttaaaggattttacgtatctccaaagacctgttacagctgcaatcagccatagtactttcggttttgcccatttgaagttccatagcacgccccgcccctacacctccctctgcccacaaa

SEQ ID NO: 263969 - DNA, 122 bp, Homo sapiens
cccagacatgccgcaaaggaaacacggcaaggtgagaaagagtgggcgaggtgtcgacaacgaacacgcaagaagtgcttgtccttgcccaaaatacctcgaaaagaagaaactgggagctg

SEQ ID NO: 263970 - DNA, 122 bp, Homo sapiens
gcggacccagtcccgtcgcggacacggcggggcgggcgggggtggcagcgtccgaggcggcgcgggccctttaaggcggccggcctcgttagcatacatttgcatggccccgccccgccgct

SEQ ID NO: 263971 - DNA, 122 bp, Homo sapiens
aatcgtcacctatatttgaccttcatctagtagtgattagcttgagccagtttcaattctcgtcagtgggtccgaggcaggccctgcgccaccatgatgaatgtgtgcgtggtgccagggat

SEQ ID NO: 263972 - DNA, 122 bp, Homo sapiens
gtgtccaagcccgtgtgggacttcctgagcaaagagaccccagcccggctggcccggcttcgggaggagcaccgtgtgtccatcctcatagatggcgagacttctgacatctatgttctcca

SEQ ID NO: 263973 - DNA, 122 bp, Homo sapiens
ccgaggcaaaagtgcaagtgaagaaaagtcgccttgccgggcagaggtacgggaccaaggcgcctcctctgggctgaggagttagagggaagaaaatggcgccctgtcatgagggcgcgagg

SEQ ID NO: 263974 - DNA, 122 bp, Homo sapiens
gagaccaacatgggcttcaggatgtgggattctgagtcagacctgggttcaaatcctggccgactagctgtgtgacttcaggcaagtcacttggcttctctgagcctcagtttcctcatctg

SEQ ID NO: 263975 - DNA, 122 bp, Homo sapiens
ggagacgccagtctctgccaggcccagtcagtcggccaatagacccggaacctgagggatcggaatcctggtccactccgcagaggcccgagcgggctcgcgagggaacgggttctccgagt

SEQ ID NO: 263976 - DNA, 122 bp, Homo sapiens
ccgcagcagctgggaaccgggcagcccagctggcccgccgcacggcgttaccagagctgccgcagccgcctggagccccagccgccatcctgagaattcgccgagcttccaggcgaatagcc

SEQ ID NO: 263977 - DNA, 122 bp, Homo sapiens
ccgggaaggggctcacgccgacgcctctgagagccccgagagccactcaccttactcagtcgccggcctcccaccagcagccagccgggccaggttaggctgggatcagctacgtcaggccc

SEQ ID NO: 263978 - DNA, 122 bp, Homo sapiens
ccctaccacagtggaggtgctccttctcctcggtggactcgggccctgtgctcacctcaccgctcgctccaggggccagtctgtctgctgccatcctctgcacccagaggcggtgagccagg

SEQ ID NO: 263979 - DNA, 122 bp, Homo sapiens
tgtcttccctggagacaaacattatacaaatgctgtgatggttaattttatgtgttacctcgatagcaacatgtggtagtcagattaaacattatttctgagtgtgtctgtatgggtgtttc

SEQ ID NO: 263980 - DNA, 122 bp, Homo sapiens
gagaaatcttcctccagagggatgggcagccatgtggctaaatgggttcctgctcagaggcgaggaggtgaggaagaacacagtgcatgtgctgagcagagatccagctcctactcctggtt

SEQ ID NO: 263981 - DNA, 122 bp, Homo sapiens
gatgattcggacttggatggacgggaccgtagagtgaatctaagcgccacatctctccgtcgcttcctctggccgtgagggaagagaggtgtccctagggaggtaggctggaccaggaagga

SEQ ID NO: 263982 - DNA, 122 bp, Homo sapiens
cgccgccttatcttccacgcaacaggctttctcccgcaacctagtcccgggaatcagctccgagggggcggggctcctttcgaatctctcaggccccacctactcaagccacacgcgcaccg

SEQ ID NO: 263983 - DNA, 122 bp, Homo sapiens
aggggcggggccggagaggtaggggcggggccgccccttgcgggggggttctgagcggcccgcaccgcaaaaggcggtgtcagggcggtgaggggcggggcctggcaatgcacaggggctct

SEQ ID NO: 263984 - DNA, 122 bp, Homo sapiens
gtgatccacccacctcagcctcccaaagtgttgggattacaggtgtgagccactgcagcccgccaagaactgttttgctctggacatgcttcttcacattattgagcctgtttcaggctcaa

SEQ ID NO: 263985 - DNA, 122 bp, Homo sapiens
gaggcggagcttgcactgagccaagatagcgccactttactccggcctaggcaaaaagagcgagactccgtctcaaaaaaaaaaaaaaaaagaaaaggaagttgggaaggggaagaaaagag

SEQ ID NO: 263986 - DNA, 122 bp, Homo sapiens
tacacaactgagcactggagcgaatgaggtgagtgagggcccagaaagttgaagcaggaacgatccgagccttcagttaatcctaacgtcacctctaacgtttggggtaagaacgtttcagg

SEQ ID NO: 263987 - DNA, 122 bp, Homo sapiens
gggccgcaccggcacgctgtgagtgataaaaggggctttggaaaggtgctgacgtggcaccgtgcttaatgaggtcatcgccgaagctgctgccccgataacctggaggtcaggctcccagc

SEQ ID NO: 263988 - DNA, 122 bp, Homo sapiens
aataattttgcttaggctttgggaacaccaggttcctcatgtattactcagagagtccagcgagtggaaggagaacctaaacaatgcccttgcatttgtaactggaagattttcagaaggat

SEQ ID NO: 263989 - DNA, 122 bp, Homo sapiens
gaacgtcaaaggattgaattcggagacctaaaataacagcacgtagacattagagaaatccgggctcaggctgcgccgttctaaaaggcactcgcttttctgtctcgcatccgcggcaggca

SEQ ID NO: 263990 - DNA, 122 bp, Homo sapiens
cctgtcagggagaccactgccatgccgtcccagtggatggcggggatctggctgtccccgcggcaccaggactccagggtggccaccaccgccgccccccgagcctgggccagggcagtgcg

SEQ ID NO: 263991 - DNA, 122 bp, Homo sapiens
aggccaacatggaaggcgccatcctaacttctgccgtgagcaggtgggagggaagagagacgagaggtattccattggttgtctgggaaaatgaattgcaccttcccctcccttgcggagga

SEQ ID NO: 263992 - DNA, 122 bp, Homo sapiens
cagactcctgacctcaggagatctgcccgtgttggcctcccaaagtgctgggattataggcgtgagccaccatgcccagcctcaaagtggttctaaacaggtaattaagcaaaagtatgtct

SEQ ID NO: 263993 - DNA, 122 bp, Homo sapiens
cggcccccgggtgggcatagtgggggagcccttgctgggagttgtggatgctgcccagaccggagctggagaggggcgagaggctctggcccatgccggccacgtccttgtggtagggggta

SEQ ID NO: 263994 - DNA, 122 bp, Homo sapiens
agtggaaatagcaaggccaaggctaaaatagccagccaacaataggcctctgcaactccccggccaggcattatagctctcttccatgctgtcttttatacccagagaaagtgagattaaat

SEQ ID NO: 263995 - DNA, 122 bp, Homo sapiens
ccgtgtgagccggagcacttgtttgtcacctcacggtcttcccctccatgagggcaggcacggcagtcttgctttcattcttgctttcatgcagtctacccagctgtgggcgagatgtgtgc

SEQ ID NO: 263996 - DNA, 122 bp, Homo sapiens
tcggactccccctggcggattggctaaggccgagctgccctagtgatgtcatcagtgagacgtggcagccgggcgagtcagcgccccacgggggagggggcggagaggggcggagggtggtg

SEQ ID NO: 263997 - DNA, 122 bp, Homo sapiens
tccatcctgggcaacattgagcactgagtgaacgagactccgtctgcaatcccggcacctcgagaggccaaggctggcagatcactcgcagttaggagctggagaccagcccggccaacaca

SEQ ID NO: 263998 - DNA, 122 bp, Homo sapiens
cacatcaaaagcacagcacttaattctttactttgtttaagatgcagagagctttgttcacgtgttttcctactaaccttctcttggctattaccctattgtcctgccaaatccccctctcc

SEQ ID NO: 263999 - DNA, 122 bp, Homo sapiens
aacaaaaagaagaactataatgcagtaggttctacatttataaagcccatgagctgatttcgtgccgaaagtaaaacagtctcaagagtttaaatgaatcctggaatcacagcaaattcagg

SEQ ID NO: 264000 - DNA, 122 bp, Homo sapiens
gtgagcgcgggtccggtctccggtgacgtggcggtgaggaggcggagccaagatcagcggcgggagggtgggggaggaagagcgaggtgagcgcggacgtcagagtggagagcggaaggtca

SEQ ID NO: 264001 - DNA, 122 bp, Homo sapiens
gcagttcacactctcatgccgctagaacccggtagaagttgccagggcagaggcttcatccgttctgtgtgcaaaccacaaatgtttgcaagctagaccacttgcggttatcccctctgtct

SEQ ID NO: 264002 - DNA, 122 bp, Homo sapiens
tgcgagggcctgccgaggggcgggcgcgagtcggaaagacaccgaccagggaatgggcgacgaggcttgccttaattcggaggaaacccaggacttgagagagccatacaatttgaaagacg

SEQ ID NO: 264003 - DNA, 122 bp, Homo sapiens
aaaatcaaagactgcccaggctgccaagcaagcatgttaacaccttgatctgggtgctagcgttggagaggtccaggattgaatcgtgactcccctgccttgtggctaggtgacactggctg

SEQ ID NO: 264004 - DNA, 122 bp, Homo sapiens
ctcggggccctctctccctcttgcgatttttatttcggggccacgtttgtttacttgcggcgtgacttgctctggcctgtgcacggcagccacaggcccagttggtaggaactaaagagata

SEQ ID NO: 264005 - DNA, 122 bp, Homo sapiens
gtggtgcaaatccaggccagttgcactgttgctaacaggaaggcataagtgtagatttcccgagttcccaccagttcgagaacacagtaatagcatcaatagcattctttttatccactcct

SEQ ID NO: 264006 - DNA, 122 bp, Homo sapiens
ttccgctggagttgggccactctgcatcctgggctctcctcggctgccccagccaaactccgcatggttctgcttctgtccatcagtgtgacctgcaggcgtcattctgcttctgccatcgg

SEQ ID NO: 264007 - DNA, 122 bp, Homo sapiens
agcgccgcgggtctgtctgccggccccggtggcgtcaacggcgcaggtgcagccggtgagcgccgtctcctagaaacacttccccaaaccccgcggcctcccgggggactcggggcaggcag

SEQ ID NO: 264008 - DNA, 122 bp, Homo sapiens
ttcattgattttcctgtggtctccagcccggggtaggagccgtgtgaatatctgtctattcgattgagattcataccctatttgggggtcaaagagcgagaccttgtgagcttgaactatca

SEQ ID NO: 264009 - DNA, 122 bp, Homo sapiens
ggagcactcctggcatcccgggggcagacgccgccctcctgcgcctcctcccgcctgtcccgggaaaccaccaggacacctctgtgtgcctcccgattcggccgcagatggacggcggcttc

SEQ ID NO: 264010 - DNA, 122 bp, Homo sapiens
ccgggttcggcccacacccaccacacccctccggtccccgcccagcgccgctcctcctcccgggcttctccagcaccgactcagcacctatcagcgccgcccccaggcccctggcccagccc

SEQ ID NO: 264011 - DNA, 122 bp, Homo sapiens
cagtgccttggcgcctttctctgcagtccccggcctgcctcccttctgctccctctcttccggagtctggtgctgccaatttgccaggtgagccccgccagcgtcccattgccggttctcgt

SEQ ID NO: 264012 - DNA, 122 bp, Homo sapiens
actctaatcaggaatggctaatgagcctccagaaatcttttataactctaacatgattatcgaatgtaatttaccaaacctatatgaccaaaagttcagagttgtcactattaaataaagca

SEQ ID NO: 264013 - DNA, 122 bp, Homo sapiens
tgtccactgggatgcactgcgctcccgcgttggggacgaaaaggccagtagttgttagcccgctgcttgagccgcccccactcagggatgaagctgcggggggagtgaggcgaagggaggga

SEQ ID NO: 264014 - DNA, 122 bp, Homo sapiens
atgagtcgaaggggccctgggccactgtccatgagagacgcaaggagtctggggtcacgccggtcactgtcagttcccccaggaggggctgctccaggaactcagggcgggggggctcctct

SEQ ID NO: 264015 - DNA, 122 bp, Homo sapiens
ctcactagggagtgccagacagtgggcgcaggccagtgggtgtgtgcaccgtgtgcgagccgaagcagggtgaggcattgcctcccttgggaagcacaaggggtcagggagttccctttccc

SEQ ID NO: 264016 - DNA, 122 bp, Homo sapiens
ataggcacacttgtgggtagaaagcataaaatgacctggctgctttggtaattgtgacatcgcctagtaaaatcagaggtgtgcatacgctgagtctcagaaatttcagtcctaggaatata

SEQ ID NO: 264017 - DNA, 122 bp, Homo sapiens
ctgctttgtttctgaggtctgggtgctcacaggcagccccaatacgcttgctagtgaggtcgataggatttgtttggtaagcgtactaaattctggggcccaaagccctgtctcctgaaagg

SEQ ID NO: 264018 - DNA, 122 bp, Homo sapiens
atcattgaaaaattccagcattcgttgcaaatgtgtgtctattttgaaacaaatgacaaacgaaacaagaatgcatagatctgtaggtaaccatgcttaaagacattctgtttcttcaaggg

SEQ ID NO: 264019 - DNA, 122 bp, Homo sapiens
gaaaattctacagttcctctacgccccatatttcctcatccgtaaaacgggaataagaaccggtacccatctcagagatttgttgtgagctttgagtgagataaactatgctgagtgcctgg

SEQ ID NO: 264020 - DNA, 122 bp, Homo sapiens
ccaggcattccaaggggactccatcccggttttcgacctgctgatcctgggggtgggccccgatggtcacacctgctcactcttcccagaccaccccctcctacaggtgagcacaccaatgc

SEQ ID NO: 264021 - DNA, 122 bp, Homo sapiens
actatgagaaatgaagagctgcttttaaggtatgttgttgtgtcctttgtttttaatgcacgcttttctagtttctagagctggctgagacaataattatgctctgaatcaagtagcttcct

SEQ ID NO: 264022 - DNA, 122 bp, Homo sapiens
agcatcggggtagcagacgctgagccagggactcaggaatacagggttcttgcagggcgtcgcggaaggaaacgaagtttttgggagaaatccgtttgataaagccttggcggcttcgaggt

SEQ ID NO: 264023 - DNA, 122 bp, Homo sapiens
agtgctgatggaattagtaatttgggtggattagagaggaaaagaacaaaactctagagacgttttaatatcaagagctataacctgaacagagacccccacaaacaccgagagtgggaagt

SEQ ID NO: 264024 - DNA, 122 bp, Homo sapiens
tctcgttttacataggtagaaatagatcccttgagagataaagtgactcggccaaggatacgtggcaaattagttatggggtagattagaatcctagctgtccttctgtaactccatgacct

SEQ ID NO: 264025 - DNA, 122 bp, Homo sapiens
agcctccttcctagggactactgtgtgcggtacctggggggtgccagcgcccgcggggtgcgcacccctcttttccccgcctgccccgcgtccccggctgccaggcccgtagatgcgcgcgg

SEQ ID NO: 264026 - DNA, 122 bp, Homo sapiens
agcctgaccctccacgcctctgactgcagggctgggtgggttcccgcactgagtgaagtgcgtggccacttggctgtgtgctctgggaccagaggatgtgcagcgcaaggattacaaggcat

SEQ ID NO: 264027 - DNA, 122 bp, Homo sapiens
gactccacttctcagggttgcctgcggtcctgactgttccgtcttggactacatattccacgggcgacggagaaatcttgtacctctggctccgtctcctggacctctgcgctgcccgtgac

SEQ ID NO: 264028 - DNA, 122 bp, Homo sapiens
gctggagaacccggaaattgcccagaacgggaaccgactttcgcgccaaccgcgcggccgcgcttgccttttccggtggaagtgacgccatcggcagctgcagcagaagagcggaaatgtca

SEQ ID NO: 264029 - DNA, 122 bp, Homo sapiens
aaacacagctctgcgcgcaggcaccggcggaccctggcacagacacacagcagggcggcgcggacccttggcgcagacacagacccaggacgcccaaacaggccacacaacaccttgcacta

SEQ ID NO: 264030 - DNA, 122 bp, Homo sapiens
accccgggactcaacaaagtctgtgtggagttgagatgagatcacggaagccccaagccccgctgaggcagtagagacgcggcgccacctggaacaggggtctgttatcaaaagcccttggc

SEQ ID NO: 264031 - DNA, 122 bp, Homo sapiens
ttgacgcggcctctcatgtcctgcccaagtggcctctgccagcatatgtcaatgaccatgcgccctgccgcccgtcagtgcgctgcctccgtgcacagcagacgtcaagggaggaacagggc

SEQ ID NO: 264032 - DNA, 122 bp, Homo sapiens
ctgcaccaagcacgaaaccatgataggttctgatgtcttttaaaatggaagatggaaaaacggaagaaggcacaggtgaggaagggcacactgtttggacttgacatccttcccctccctgt

SEQ ID NO: 264033 - DNA, 122 bp, Homo sapiens
ctgaggtggatgtttagggaatgagtcctcaaagcatatacgttggcaagggtggcagagcgctgtgggagaaggagaagcatgtgcagaaagaggaggccaggggaccttatggctccttt

SEQ ID NO: 264034 - DNA, 122 bp, Homo sapiens
gccaggacttgaatccaggccggtggggtgtagccggcaggttcaatcacgtgctcgtcccggcctgtctcacgtgggcccggaaggccggggtgagaacaagatgtctggggctttgaggg

SEQ ID NO: 264035 - DNA, 122 bp, Homo sapiens
cttgcaggccgggaggtgcatgcccacacacacagcgaggcccaggctttgcttagcaaccgtgttggcagagggggagccagtcactctgaaaagaaagaatcgccctgatttatcctttc

SEQ ID NO: 264036 - DNA, 122 bp, Homo sapiens
ctgttctgccagggagcctgattttggcactggtgtatttccagaaccaaggtgggtgcccggtctgaggccctagcgggtgtctgggtcccttcctggaggccccttgcctccctcagccc

SEQ ID NO: 264037 - DNA, 122 bp, Homo sapiens
tgaggggatctcccccagccgccttcctgtgaaagtggcgcagcccctcccggcggctgccgaccctgtgaattccagggcgggggataagacgtacccactgcaggatgatgtgtgtcctt

SEQ ID NO: 264038 - DNA, 122 bp, Homo sapiens
tcttggcctttttctcttctcatgacgtgctttgcaagggttagttatctacatccatggcgaccattaatacacctctatgctaacttcccaaatgtatatgaatagacatccacaattta

SEQ ID NO: 264039 - DNA, 122 bp, Homo sapiens
ggatccaaagtccatgaccctaaataactccagttcattttcagcactcacaactcagctcgggtttatttcctccaggaagtccttcctgggtgcccctcctctacctcccgcagcatttc

SEQ ID NO: 264040 - DNA, 122 bp, Homo sapiens
agccggccgcccacccggtccaccctgggaaggtccaggcgaccatcctgcacagccggccgcccacccggtccaccggggaaaggtccaggagactgtcccgcacagccggccgcccggcc

SEQ ID NO: 264041 - DNA, 122 bp, Homo sapiens
gagcgctggccacagggagtgcaacattgtgatgcaaggccactgtggagccattgctagcgtattaactgcaaagttttgaattgaatcagaaggtaattggaggcctccagactaagcat

SEQ ID NO: 264042 - DNA, 122 bp, Homo sapiens
ggcttctaagatggcgtctttttcctcgtttcagattcttcgctgctgctgccttaccgccgagaaccaccacccgccaggcgtcttgcggccacacccctggcgggttcaggcaggctacg

SEQ ID NO: 264043 - DNA, 122 bp, Homo sapiens
aagtgtagcctagaaattggggctggatttgaaaattagccccaattctgcaattttcaccgcaataaaagcttctccagttatacatggtgattggtcttgatgggctattgtggacagag

SEQ ID NO: 264044 - DNA, 122 bp, Homo sapiens
ctcatcatgtgtaattccgtgatggaccctctcatatatgccttccgcagccaagagatgcggaagacctttaaggagattatttgctgccgtggtttcaggatcgcctgcagctttcccag

SEQ ID NO: 264045 - DNA, 122 bp, Homo sapiens
acattactcagcaatgaaaaggaagaatggactattgacacacatgacttcggtgaatctcgggataattatgctgagtgaaagtagtcagactccccctgcccaaaggaaaagagtacaca

SEQ ID NO: 264046 - DNA, 122 bp, Homo sapiens
gaagcagctgtggatgaggatgatgaggatgaggaagaaggggaggaagtggtggaggaccgagattactactatgacaccttcaaaggagatgactacaatgaggagaatcctactgaacc

SEQ ID NO: 264047 - DNA, 122 bp, Homo sapiens
agagtaatcaatgtattattaaaaagtgtgaaatacagtcaaagatggtcaatgttatcccgatggtagacatggcagtgacatgaagtattaatataatactgaggataattaatgaaaca

SEQ ID NO: 264048 - DNA, 122 bp, Homo sapiens
gccattttggaaatgtagataaagaagaaaaatgctgaagatttgggtggtttatggagccgtatgattttgtcattgctgccacctactgtatgtggttgatgtttgtttaaacttaggaa

SEQ ID NO: 264049 - DNA, 122 bp, Homo sapiens
gctttgttccaaaggttcagtgaggcaaattgtatgcagcctgcttgatacatagatgcccggcagtaactgagagcttctgcccctgccttcatctggaggcagaagaatctccatgcagt

SEQ ID NO: 264050 - DNA, 122 bp, Homo sapiens
ccaaccttagttgtttgtgaccaggggagcggctggaaagcagactgaatttttagaatgcgctggatttgcatattgttttgcataaaatcacataacaaacttgaaaacctggatcccac

SEQ ID NO: 264051 - DNA, 122 bp, Homo sapiens
gatttccatcatggcggcgtccatttcgggctacaccttcagtgctgtgtgtttccacagcgccaacagcaacgcggaccacgtaggtgccgggccccctgccgcgcccgctgggggctttc

SEQ ID NO: 264052 - DNA, 122 bp, Homo sapiens
aaataggcttgttttgcctcccaacacctctgcaacgctttctcctaacactttcactcacgtagccctcagatttggtgttagtagtaaaataaagagatactcttttagggacggtgttc

SEQ ID NO: 264053 - DNA, 122 bp, Homo sapiens
ctggaatgctttcattcctaagcagctcatgtgggtgagtttctaaagccgtgtttgggccgaggcatcacacaagagggtgtccctaagatgcatcacgtccgtggagaaaacaaagcagg

SEQ ID NO: 264054 - DNA, 122 bp, Homo sapiens
ctcagagccttaagatgattcaaacctattgtttctgattttccattgtggtgacttctacggagataactatcattttaatagaacaaaaccagaggtgagttgccatattttaagaggtt

SEQ ID NO: 264055 - DNA, 122 bp, Homo sapiens
ctgtggacaaagccccactgactatcaaacccagagcagcctgcaagctgaggtggtgtccgccagcattctgctgcttcgtgtaccctgaacccaaacattcactagaagggccagcgcag

SEQ ID NO: 264056 - DNA, 122 bp, Homo sapiens
accacacagcggccaagattgaagcgcccgcgctggccttcctgcgtgagaacctgcgggcgctgcacatcaagttcaccgacatcaaggagatcccgctgtggatctatagcctgaagaca

SEQ ID NO: 264057 - DNA, 122 bp, Homo sapiens
agggcaaaaaatactaaagtctgactgttttcccccatgtcttactccttcatgcaagctcgtctttgacatcatggttctttctttgcagaagctcttcaaggttcttaatggtgtctgtc

SEQ ID NO: 264058 - DNA, 122 bp, Homo sapiens
ctctcccggttcaagtataacgcagacaaggccatcgtggacagtggcaccacgctgctgcgcctgccccagaaggtgtttgatgcggtggtggaagctgtggcccgcgcatctctggtgag

SEQ ID NO: 264059 - DNA, 122 bp, Homo sapiens
caccgatttgggtcgtagcctcgtggacccagcccctgagaaggctgctggttaagcctgcggatatgatgggtcacagactccccgtccgaggtgtcggtctgttcctctcgccgctcccg

SEQ ID NO: 264060 - DNA, 122 bp, Homo sapiens
aaacacaatctgcaggaaagcaaatggggactcggactcgctcctgggcgagctgaaagtcggctgcagcagaagctcctgccttgggtgatccatcatttaataaaccccagagaatccag

SEQ ID NO: 264061 - DNA, 122 bp, Homo sapiens
cttgccttggggttcaaccaggttcccgcacctacgtggggggcccacgagaggggtgtgcgcagcgctcaagcagtctcggactccgggcctcccccggctgcctcacgcatcacagcacc

SEQ ID NO: 264062 - DNA, 122 bp, Homo sapiens
tgatgaagcggtggtggttgcccttgcgactgtgctcattctggatgtaggtgacacattcgtccggccccttgggctcgtagtagtggtagggcatgcgctggaggcggggccgctggctg

SEQ ID NO: 264063 - DNA, 122 bp, Homo sapiens
gcaagaagtaagatgtattttactattaactatatttttgttaatatattgataactcttcgtgccactgtagttcctgtttggaaaaggtaaatgaaggtaaaattctgcatactaagagc

SEQ ID NO: 264064 - DNA, 122 bp, Homo sapiens
aaagttagaggaggggaaaacccctactaggataaggcagacaggaatcaaggcttggagcgcatctggggccccggccgccctgcccaggtggaggaagagccggctcgaggtgcagcaag

SEQ ID NO: 264065 - DNA, 122 bp, Homo sapiens
cctaataacctgccactgtaaaataaggagttccatttccaaatggtttctagtacattccgctacccactcccaccgaggaccaccaggatacattcagttaaacaggaattacctgtaga

SEQ ID NO: 264066 - DNA, 122 bp, Homo sapiens
cgtatcatcttacactcaacccaaatcacgctagacaataaattctgacattgaagcccccgccaaacaccatttcaaccattcggaatcttaaactttttggaacagttgttctgatttcg

SEQ ID NO: 264067 - DNA, 122 bp, Homo sapiens
gccgtgggcatggcggccggggcgctcttcggcaccttttcctgtctcaggtgaggggcgcgggcggtgatctctgggcaggacaaccagaccttccggccctgccccattcggcctggagc

SEQ ID NO: 264068 - DNA, 122 bp, Homo sapiens
cagacaccagcccgccacacatcacgcggtgcataccctgctcactcattacctaacatacgtgctgaaatgtgatcttgtccagcaattttaatggtgcctggggtatagtaactgctgtg

SEQ ID NO: 264069 - DNA, 122 bp, Homo sapiens
acagaatacgcatcgaattcattctgcccaaggaagggagggagggaggacacagcggggcgtgagccagcagtccccgcccccttggtcctgcgagtgatggggtcaccgactgtcggcct

SEQ ID NO: 264070 - DNA, 122 bp, Homo sapiens
ctggttgtaaagaggaatgggccccagctgaccccctgaacccaggtggtgacatgtgcacggtggtgcctgctgaaggtgggcaagggagctgagcagggaccgggggctactgtacctcc

SEQ ID NO: 264071 - DNA, 122 bp, Homo sapiens
aatcctttcattccagcgaggcataaagaatgttgtcccaatagcggtaactcaggcaggcgcccccgcgcacaatggcccctcgagtggggctgctattcaggccgccttttgttggcgcg

SEQ ID NO: 264072 - DNA, 122 bp, Homo sapiens
tgatctcgctggcttcacgaatgaagctgcaaactggccttacagctcttaaacgtcacacggacccaaagagtgcccagcaccaaaactgactgcaaagagagaaagcacaacgctgtcgc

SEQ ID NO: 264073 - DNA, 122 bp, Homo sapiens
taatcattctgatttgaacattgaaagaaatatgagcttttttttttcatactgagctagcgaagcagggcacgagttaagagtatttgcatacacatctattcctcttatcaagcttgaga

SEQ ID NO: 264074 - DNA, 122 bp, Homo sapiens
ggcccggagggacaggggaaaacaacaagatggcggcagccgggggcggggtcagcccggcgtccctgaggctgcgagccccttaaagggccgcgttcgaggagccgggcgagatgaactga

SEQ ID NO: 264075 - DNA, 122 bp, Homo sapiens
tatcccaggcgcccgcagtgctatggaagtccagcagggggagacattagcacgtgggtacgtcctctggggtccgaccagcgagagtgggtcggacctggaaggtctgagctatgggatcg

SEQ ID NO: 264076 - DNA, 122 bp, Homo sapiens
ccagatttccaaatccaagctctctatcaatacagagaacagaagccagaaatgaggacacgcgacttgagtcactttcaatggagaaaattctcactggttcgcagccctgactgatatac

SEQ ID NO: 264077 - DNA, 122 bp, Homo sapiens
gccattctggctgagagcccgccctaggcctggcctcacaatgggaatcaagtcccaaaccggttccgggttagtgccctggaattccgccccctcgtgattcacctccctgtctgtgcccc

SEQ ID NO: 264078 - DNA, 122 bp, Homo sapiens
tgagtccctgcaagatcagagtcgctcctttttaggtctcccgggaacagcgctgaggagcgtgttcctgctgcggagggagtgtgctcctggcaaggggccgtgggctggagtgtagacag

SEQ ID NO: 264079 - DNA, 122 bp, Homo sapiens
aagaccccagccccctcctcgttgccctaaggacactcctccagataactgccaccggtgcgaaaggccaggccactaaaaggcaaagcacctcaactgaataaatgaaaaaaagtcccaca

SEQ ID NO: 264080 - DNA, 122 bp, Homo sapiens
gatattccgttcggtcatctacgagccctacctggccatgttcggccaggtgcccagtgacgtggatggtaagcctgacttggctcagatggaaacagcttggaggaggcatttgctccctg

SEQ ID NO: 264081 - DNA, 122 bp, Homo sapiens
attattcctatgcaggtcctggggcggctgtggcaaccaggcagttagaaaaaaaaaaatcgtgaagcattcccatgagcaaacacttaagtgctaaatggcaccatgtgcttatttcattc

SEQ ID NO: 264082 - DNA, 122 bp, Homo sapiens
tgccccacagcccttcacccggcaggaagtcattggcttcgtcatcggctccatctccagcgtgttgtacctgctttcccggctgcctcagatccgcaccaacgtgagcctccagcaggggc

SEQ ID NO: 264083 - DNA, 122 bp, Homo sapiens
gtcgcgctccgcggcccagggttccgcctggctggcaccacccctggaagggcagcccctcgtctcccggcctgacaatggccccttgggtcacccatgacatcatcatggacattgtgacc

SEQ ID NO: 264084 - DNA, 122 bp, Homo sapiens
gccgggggagcggggccttccacaccccctccgtgggtgtgtggtgagtgtgggtgtgtgcgcgtctcctcgcgtccctcgctgaggtgcctactgtgtctgcatgggttgggtcccgcgcg

SEQ ID NO: 264085 - DNA, 122 bp, Homo sapiens
cagcgcgcccacaggtacaggtagcacagcgtgatgagcatggccgcgccgccggcagggcgagcccgccttgcccgcccgccccagcgccccaggcccggccccgccccggccggaagggc

SEQ ID NO: 264086 - DNA, 122 bp, Homo sapiens
atgtctacccaccaggtcacctggctctcctgacaaagatggtattaagatgtcatctcccgtctcctgactccccaggccccgtgggtttcctctagtgcctctcgtccccaggtctgttt

SEQ ID NO: 264087 - DNA, 122 bp, Homo sapiens
cacccactgcctgtcctcattcccaccttgaaccagccttttgcgcgtgtgacgtcatggcgccgtgcgtggcctcggcggtggcgcagggggcgggcccgcggcgcggcgccggaggagga

SEQ ID NO: 264088 - DNA, 122 bp, Homo sapiens
cggaaagggaactccctgaccccttgcgcttcccaggtgaggcaatgcctcgccctgcttcggctcgcacccgttgtgcacacccactggcctgcacccactgtctggcactccctagtgag

SEQ ID NO: 264089 - DNA, 122 bp, Homo sapiens
caggcgcctctcaagaaaacgctggagaacttctggcggctggtgcgggagtagcaggtccgcatcatcatcatgctgaccgtcggcatggagaacaggagggtgatgcgccttacaggctc

SEQ ID NO: 264090 - DNA, 122 bp, Homo sapiens
gggagagccgcggcgacgtcagttcctcctttcggggctctgattggtcagagcgcccggcgcttctggttggccggccctgctatcatcccagagtgcattgcggggccgcttcctttccg

SEQ ID NO: 264091 - DNA, 122 bp, Homo sapiens
aatgagcggacagcgagggccggagtggggctgaggcttcggtgcagagctggagagccgcggctgggaccggagtggggagcgcggcgtggaggtgccacccggcgcgggtggcggagaga

SEQ ID NO: 264092 - DNA, 122 bp, Homo sapiens
ctcaccacctctggctagagggccctaaataaactcgaaaggcagcctgggccacaaggacggctcacgcctgtaatcccagcactttgggagcctgaagtgggaaaattgcttgaggccag

SEQ ID NO: 264093 - DNA, 122 bp, Homo sapiens
tccctgtgttcgtgaaaatctatactttcccagggaagaatggggggcgggggcgagccacgcaggaaacaattttcaacagaactcaagcaggtgaacggaatggctgtagggagccacct

SEQ ID NO: 264094 - DNA, 122 bp, Homo sapiens
cccgcagccgctcgctggggcttcccaccgcctcggacatgggactctgaggccgcgcctcggaacgtgtccagggccccgcgaacaccctggggacctctgttatccagggccgcatttcc

SEQ ID NO: 264095 - DNA, 122 bp, Homo sapiens
tccgctgtcggcccgtctgtccagcacagggaggcaggcaggagcgagggcccaagtggccggccaggctgggcagcggcccatgcaggagcaggcgagggcaggtgtggccaccaccctag

SEQ ID NO: 264096 - DNA, 122 bp, Homo sapiens
agaggtagcgaaagaaagggagagctgaggagcaaagaggagtgtggacgatgcagagaccgaagggtgcgcagacaaaggaaaggacaagcttgtccagagagaatgagagacaaacagat

SEQ ID NO: 264097 - DNA, 122 bp, Homo sapiens
tgaagaattggttctattaataagactacatctctctaggtaacgagcctggcagatagacggtttgctgccagagagggaaagatgacaaggaaagaagcaaaatgatgacagcagagagg

SEQ ID NO: 264098 - DNA, 122 bp, Homo sapiens
atacaagattacttgtaatttgaaaaaaattgttgaagcattaagaaagctttgaggaaacgtttcttatcactgttaggtcatagaaactaatagagatttgaaagtatatttgggtcatt

SEQ ID NO: 264099 - DNA, 122 bp, Homo sapiens
ctcacccctcgctccctaccccagctcaattcggctgaggctgagatgatgggagagcgccgtctgcaggatgctccctaaaatgcagcaggaggaagagacttgtcctagagagcccagcg

SEQ ID NO: 264100 - DNA, 122 bp, Homo sapiens
tcttggatgattctctatgaagaagcaggagggcaccctacatgtccaaatttcctttttcgagaaaacagggtagtattgagattctttaccttatgaggtagccaaacacttacatgtac

SEQ ID NO: 264101 - DNA, 122 bp, Homo sapiens
gacatcttgcagctgtgtctgattaaaagcatgggtacaagacaaacccagaacatcagacgctaagtgttacttcagtcaaactgaatttacatttttgcctcaatttcttcatatgtcta

SEQ ID NO: 264102 - DNA, 122 bp, Homo sapiens
gctgggggagttgggattcagggagaagagggttggagaatctttgggacgcgattctctcgcctaaccggtacaggtgagacttcagtccttatgtttttgatcttggttcatccgttgtg

SEQ ID NO: 264103 - DNA, 122 bp, Homo sapiens
ttctcttcctttctccttccccattcctgccagtttctgggtgtccttcatccgcatccccggcgcccccagtttgctgttgctcaatggccaggaccctccgcacagggcgcgatgcctgg

SEQ ID NO: 264104 - DNA, 122 bp, Homo sapiens
tgcaaacgtggacaaacaacctctgaacctgtcacctctcagtggaaaaagtggtgataacgtcccacctcagaattgatgctcaaaatgaagcagtatttgtgaaacgaaaatacacacgc

SEQ ID NO: 264105 - DNA, 122 bp, Homo sapiens
ttccgggatcctgggcacctgagctgggagttcccggagaaacggccagacccaggaaatcggagccgtgggtgctgtgcacatgcccggagctcgccagccttccgcggggaagaggggtt

SEQ ID NO: 264106 - DNA, 122 bp, Homo sapiens
gaaggggcagcggcgggggctcacaccccaacccctcctcggttctctccccagccgggccgcagagccattatcctccccaggtgaggaagccgatgaggctctgagaggtgagctcaccc

SEQ ID NO: 264107 - DNA, 122 bp, Homo sapiens
caactcttttcatgttatatgatctaatgtgagcatctatgccggtggatttcacatccccgtttcacggacgaggacacctccggtgacctgcagggaccccgcgccagtggctgctgcag

SEQ ID NO: 264108 - DNA, 122 bp, Homo sapiens
ccctccaggccccccacccctttgtgcctggtcggcctcacctggtcgctggtgtggcgccgccagccttgtcaaaccacccgcaggcgagagctactgccgcagccggcaaaccccaccca

SEQ ID NO: 264109 - DNA, 122 bp, Homo sapiens
aagatggccaccctacagctcccaagcttacaccttacagccaagactatggagaagaaccgtctctcacagtcacaactccaagttcccaatacaggaaatgatttgtcaggtgtctgtcc

SEQ ID NO: 264110 - DNA, 122 bp, Homo sapiens
gggaacccctttgagctggacacccagcaggggcctcaggtggacaaggagcagtttgaacgagtcctaggctacatccagcttggccagaaggagggcgcaaaactcctctgtggcggaga

SEQ ID NO: 264111 - DNA, 122 bp, Homo sapiens
acgagctctgagattaagctcggcttctgcccactgctctcttggtccccaaaacacaaacgctatttgcattacaggcacgctggacatggcgttggctgcaaggaccatgctgctgtcgc

SEQ ID NO: 264112 - DNA, 122 bp, Homo sapiens
ctgcggccctggggcctctgccaggtcacccatcctccacccccaggagcactgcctggccgaggctcaccctggtttgaccgccaggacaaaggcaggccagcttcccccgaggagtgtcg

SEQ ID NO: 264113 - DNA, 122 bp, Homo sapiens
ctcactcacttgacctttctgagtagcagtttacttataaaataggtaggacactagccccgcccacccccttgcttcatagggcttaaagacagaatgaggaaggaaggaaggaaggaagg

SEQ ID NO: 264114 - DNA, 122 bp, Homo sapiens
ccctgtctaaagacagccatgccctagcggttagagcacagaaccgggagctgggccgcccgcgtccctcctggcgaaggcatttctcctcttgacgggcgtctggatccttccttgtcctg

SEQ ID NO: 264115 - DNA, 122 bp, Homo sapiens
ctcagatgacatatctgtcgcgggctcggcaaaccattaaatgaccattttctgacagaacgacttccctgccgctgcgagctgccaggacttgccgggactcattttctcttcgcgccctc

SEQ ID NO: 264116 - DNA, 122 bp, Homo sapiens
cggttcttgaaccagttgctgacctgcgtgagcgacaggccggtgagtgtggccaggcggcgcttctcgtccggcgtggggtagcggttgccgcggtagcaggccttgagcgctgcgcggga

SEQ ID NO: 264117 - DNA, 122 bp, Homo sapiens
caccaccaacctcagcctcagccatgccctcccctccactcccagcccctcaccctccagcgcccaagactggctcccttggtccagctgccaagcaagaagagagctccttctccaggggg

SEQ ID NO: 264118 - DNA, 122 bp, Homo sapiens
caccgcgagcccagacgtctgtcctccagagccggaggaagggccactctgctgacaccgcgagcccagacttctgtcctccagagccggaggaagggccactctgtgacaccgcgagccca

SEQ ID NO: 264119 - DNA, 122 bp, Homo sapiens
gccatgatgccgcccatgaaattggccacggcagatttcactcgagtgagcatattactccggcgcccggctgcagcggtgcgagcaggaggcggcgggggccgggcaaggcgcagcgcggg

SEQ ID NO: 264120 - DNA, 122 bp, Homo sapiens
ctctctagcaggtggctgcagccatggagaggctctgtgccgccgctgtcaagggccagacgggcccagagcgcccaagccccttcagtcagctggtctacaccaacaacgactcttacgtg

SEQ ID NO: 264121 - DNA, 122 bp, Homo sapiens
gtgcctttagtgcttaggctcttaacctggggtccaggaacccactttcctatgacactgcgtgaagaagtgatgttacacgcacacatgacttcactacaggacattggatattaatattc

SEQ ID NO: 264122 - DNA, 122 bp, Homo sapiens
cgttactcccaatatagcactgggtgtgcatccacccggtgattttgctcctaatattcacggaagaagagaatgctattactcgcagtatctcaggaagtgtacaccccttctgtgacatt

SEQ ID NO: 264123 - DNA, 122 bp, Homo sapiens
ctcaggtgatctgcctgcctcggcctcccaaagtggtgggattacaggggtgagccaccacgcttggccttacaaataaagaatctgaggcttcagatagtttatttcttttttgcttgttt

SEQ ID NO: 264124 - DNA, 122 bp, Homo sapiens
cctttaagaataaggctacaaaagcatgcagtttctggggcctaataaacaggcatagctcgaaggccaaaacagattttgagagggatttatccatctctaattcttggggttccatgagg

SEQ ID NO: 264125 - DNA, 122 bp, Homo sapiens
caggaggcactgtggagccaggtactccagcaccccaggccgagagcccaggagaaccctcgtgttgtggatgcagatgcgaagggctatggggagacaaggaagagatttttctaggcaac

SEQ ID NO: 264126 - DNA, 122 bp, Homo sapiens
ttactaaaacaatcatttgttccttcctaagcaaacaacttaaggaaaatgacggccagccggcaagcccggagccgcacgctcgcgtcagggccggcctttccataccaaggggcggcacg

SEQ ID NO: 264127 - DNA, 122 bp, Homo sapiens
ttgtgccattttaaaatgtaaaaaccatttttagctaacaggcagatttggcccaagagtcgcagtttgccaagtcctgctggagaccatcactgaggatagggctaatggaaaataagttc

SEQ ID NO: 264128 - DNA, 122 bp, Homo sapiens
gcgggcggcagccgcaagcgaggaatccagcgcagggaaagtagccccagtggggcccggcgcgtcagccccactcgcgtggcaaaacttgcgggggcccccgcgtgccgcgcctcagccca

SEQ ID NO: 264129 - DNA, 122 bp, Homo sapiens
cgcagccgcgaagatgccgttggaactgacgcagagccgagtgcagaagatctgggtgcccgtggaccacaggccctcgttgcccagatgtgagtgcagctgcgcggagccgggttgcaggg

SEQ ID NO: 264130 - DNA, 122 bp, Homo sapiens
aggcagccacagagctgcagggatctgaacaagaaaacctggggccagcctccctgctgccgaccaccacgctacacgtgacctacgggcttgcgtccgtgggaaataagccgaaattccag

SEQ ID NO: 264131 - DNA, 122 bp, Homo sapiens
ggagggtccggcgggcaggcgtggcgttggcctcctctaggtctgggggtggccgggctgcgtagcctcggcagggaccagcccagcccggaaggcccgactatggtacccctgcggactgt

SEQ ID NO: 264132 - DNA, 122 bp, Homo sapiens
taaatcaagggaaaatggcttcccagacacagtttttaaatgcaccagttttgtttaaggcgtgaaaattgtgagaatcccatggatccagggtgatgaatcactgcttccgccagtcactt

SEQ ID NO: 264133 - DNA, 122 bp, Homo sapiens
aagaggtctgatcagctttacatgggaacaagcccacatgggatatgatcacctcatatccgcaaggtctgagatgccacgggatttgctcagtactcacatatatgcaatctgaaatttca

SEQ ID NO: 264134 - DNA, 122 bp, Homo sapiens
aaacatagtgcagtatttagcaggtcatcaataatttttgttgttgggtaaatggctgatcgaatgaattaacaaaaggactggatactccatttctgatcaccatagagataaccaaatta

SEQ ID NO: 264135 - DNA, 122 bp, Homo sapiens
ccaaggatcggaaaaagaaaggcaaggacaggggtcatcgacccaggacccaagtttccccggcacaggcggggcgcgtcctcccagatttgtactcaagactttacggagctatcacggaa

SEQ ID NO: 264136 - DNA, 122 bp, Homo sapiens
cacgaggctggtttcaatcgagactttggctctgaaaatctctccaagtagaaggcatggcgcccagtaagtatttttatgcagaaatatgagagctattccacctatgcggtgtggaactg

SEQ ID NO: 264137 - DNA, 122 bp, Homo sapiens
acaagtgcatttctcaaatacccagaagagctataacagcagttttattttccaaagccacggaattctggttaactggtggcggttccggggagttctagaattcgcccttgaaactgggg

SEQ ID NO: 264138 - DNA, 122 bp, Homo sapiens
cataaaacagtctttaattatgcctgcagattctgtagttcaggaatttagatagggattcgtggtcctgacttgctctgctccatgatgtctggggcctcagctagaagactcaagggctg

SEQ ID NO: 264139 - DNA, 122 bp, Homo sapiens
gcgccgccggggtaggcgacggtgacgcgacaatccggtgacgtcacggaggcccggggccgccccctggaaccactgtcccgctgttgccgtaaacacacaatggcattgccggagttgat

SEQ ID NO: 264140 - DNA, 122 bp, Homo sapiens
acctcgtgatccgcccgcctcggcctcccaaagtgctggacttataggcgtgagccaccgcgcccagcctatgatagaaatcttattagctccatggttacaaacagacaaccctgaggcct

SEQ ID NO: 264141 - DNA, 122 bp, Homo sapiens
gccgggccccggggcgagggagattccccaggtggaggagccgggcggagaccggttccccgggaaggtgaggcgcgggcagagatacccgagcgcccgggacgcgccgagaaagggggaat

SEQ ID NO: 264142 - DNA, 122 bp, Homo sapiens
gtccaagatggcctctccgttgtccggggaggagtaaggaagcccctcgggccccgtcctcgggttcaggcccactggcggtttacaccggaaattccagccccaccggacccctccgaaga

SEQ ID NO: 264143 - DNA, 122 bp, Homo sapiens
gaaaccaataagaacaaagatacaacatgacttgctttttaaatggtgcactcaatgtctcgatcctataaaatgaagcacaaatgtgaaatttcaggaagtgtgacagaccaatggagaag

SEQ ID NO: 264144 - DNA, 122 bp, Homo sapiens
tttagaaaagctgctacctagcgagtgggggtgagggtgccattctaagagctctgacctcgtccttcagtgcatgaggagcagatggagcctgcgcgcctcttggtgcaccctttgagctt

SEQ ID NO: 264145 - DNA, 122 bp, Homo sapiens
ttcccgccctattaagagcttctccaggcggggattccggcgcggtctgcgtttccccagcgccctgctggaaatcttttttgacaggtttctaaggctggcttttagcctttttacttgta

SEQ ID NO: 264146 - DNA, 122 bp, Homo sapiens
cagaggaccctcgcgcccgtccggccggacccttcggccagcaccctgcaccccctcgggcgcacctcaccctacccaactcccggtcctgccgctgctccccggaggcgccccgcatccgt

SEQ ID NO: 264147 - DNA, 122 bp, Homo sapiens
aggaaataactctggcctttgtcctgtccgctgtgtgtttcaggatctcgatttccctcccgtcctagaagggagttggatcaggtgattctttccaaatgaaaaattgtattttaaataat

SEQ ID NO: 264148 - DNA, 122 bp, Homo sapiens
gttctggagtgggaaagtccaagaccaaggcactgacagatttggtgtttggtgagggctcgcgtcctggtttgtggacagccgtcttctcactgtgtcctcatatggtgtaaaggatgcct

SEQ ID NO: 264149 - DNA, 122 bp, Homo sapiens
cagaggtctctgccttgactcccaagtgctggctgtctcgtggaggcctcgcagggtctccgtccattcagcagtcgagattcccccacggtggcgcgtctgccagaggcctgtgccttggc

SEQ ID NO: 264150 - DNA, 122 bp, Homo sapiens
gcgggtgctgggggctcggccagcagggaagctgcgatccgggtctctggggatccgagccggcggcggatggagggaacacttgctggagagtcatcagcccttcacctggtgctctcctc

SEQ ID NO: 264151 - DNA, 122 bp, Homo sapiens
ggccgagcagccccttggcgcgccgggctcacctcgtcctccttgtggttacggatgccgcggaccaagtcctgcagattcttgtcgaacatgcggtcgatgctgcccttcaccatcttgag

SEQ ID NO: 264152 - DNA, 122 bp, Homo sapiens
ggaaggtacgaggagccagccttcggtggatttattgaacgtttcgtctgcgttggtgaccgggaacagcagcccagttgctcgttcatctggagagttgggatttgggtgttccggccccg

SEQ ID NO: 264153 - DNA, 122 bp, Homo sapiens
gtcgcctgcccctcagagcactgctctccctgcccacactggcctggcccttagaggaagcgccccaggaaggcaccccatgcggaggctgggcctctcgcggccgtccactcccgtctcgc

SEQ ID NO: 264154 - DNA, 122 bp, Homo sapiens
attgggaatgcgaatccgcgctccccggaaaaatgcgaccgcgcaacaatcagacgtcagcgccctccagccaataacggttcacttacttacggagaccgccgagggacagaagcctctct

SEQ ID NO: 264155 - DNA, 122 bp, Homo sapiens
aagcgagaaagaggaggtggctttggtctcccagggaagcccctttacacttgggctccacggactgcgtcctttgccctcaggcgcgcgcaccgcgggagtccagagcaaattgcccttag

SEQ ID NO: 264156 - DNA, 122 bp, Homo sapiens
tcgcatggagtgatggtcccaccgcagcggtgagttttgctctgtgttgtgttaagtctgcgcttcccaagtccccggcgcttctgtacctgggacgtggggtccccatagacctggaaatt

SEQ ID NO: 264157 - DNA, 122 bp, Homo sapiens
agaaggcctcactaaggacctgacatttgagctgagacctaagtgaccaagagccagccacgcagatttagaaccagagaccttcaggtaaaggaaatagtataagttcctaaaataagaac

SEQ ID NO: 264158 - DNA, 122 bp, Homo sapiens
aggttgcagtgagccaagatcacaccaccgcactccagcctgggcaacagagcgagactccgtctcaaaagagagagaaaaaataaaggagacaggaagagaccctggggagctctcaggga

SEQ ID NO: 264159 - DNA, 122 bp, Homo sapiens
tagcatcgtgggaccttgcatatcctcaccgatctcctgtatgttggacaccatctctcccgagaacctcagcctccaaaaggtaaaggtacacctcagttgtttttctttttctttttctt

SEQ ID NO: 264160 - DNA, 122 bp, Homo sapiens
accactgaacaaactccacagagtctcgccatctgccagcgggggcgccgtccaaactcacggcaaataaaaggcatcaggtgctcaccatccacaacaggagggcgtttcattttcatgga

SEQ ID NO: 264161 - DNA, 122 bp, Homo sapiens
cccaccagcagcccggtcagactgaagtgttccaggtaaatcgagcgagcaccgccttctcgtaggtaccggcgccttctctctgcttcctttccccctcggtctctgccgcaccaccgcct

SEQ ID NO: 264162 - DNA, 122 bp, Homo sapiens
ctgctgcacccacacctgcacctccgtccatgatcaagatcgtgcctgcgcacgtgcctacgcccatccagcctacctttggcggtgccacgcactcggcgtttgggttgaaagccacggct

SEQ ID NO: 264163 - DNA, 122 bp, Homo sapiens
gtcctcggcagagaaggtcagactgtggcggacacgaaggatcacagacgccttcctcctcgattgttcagcatgatctatcttgttctccaaaaatgacaaagtgtgtcaaaaagtgagag

SEQ ID NO: 264164 - DNA, 122 bp, Homo sapiens
ggaggttcacagtattccgcctgcctctgtcccgcgtgctaatcggagcccagtgattcccgctgcaccaatggctgagtgtgttagggagcagaaaaccgaacttgaaggatgttggatgc

SEQ ID NO: 264165 - DNA, 122 bp, Homo sapiens
tgggctgggcggccatgttggagtcgggcagggctctcatatccggtcactctccactggcgatgatcgattgcatttgacggacgcgacgctggtcgagagtcgctcgcgttgctcgacgt

SEQ ID NO: 264166 - DNA, 122 bp, Homo sapiens
ccagcctggtcaacatggcaaaaccccatctgtacaaaaaaaaaaaacaaaaattagccacgcgtggtggcttacacttgtggtgccagctacttggatggctgaggtgagaggattgcttg

SEQ ID NO: 264167 - DNA, 122 bp, Homo sapiens
ccctctgcctgccgcccccgggacgtagcctcccaccacccgctcaccctcagtcacactcggctccatgtgagtgacgcctcttggctggaagcttcctggggtcactgtccacatgccac

SEQ ID NO: 264168 - DNA, 122 bp, Homo sapiens
ggtctccctgtgatgatattcggggcccccgacccctgcccggtgagggagcatgtggagcgtcagggcacacgggatgcacagctcagcagcccaggcaggcctctggtggagacgtccca

SEQ ID NO: 264169 - DNA, 122 bp, Homo sapiens
tctcacacgctctgttaactgcaaaactcttatgatctaacagcgagccccctcgcctctcgaacatgttttcaatttttgcagagccgccagagacgtcaggagaccctcccctgctgaag

SEQ ID NO: 264170 - DNA, 122 bp, Homo sapiens
tacccctctgcctagctacctggagccggactttggccgtgtccagcgggaaggtgatcacgtccgccaagcacgccgctattccagctgagaagagctggacccccagggtcgggtgtacg

SEQ ID NO: 264171 - DNA, 122 bp, Homo sapiens
ttgagccagcagaaggctcagcctgtaatccagcacttagggaggctgacgcaggaggatcgcttgggcccagcagttatcagcctggcaacatagccaaaccccatatactgtaaagggct

SEQ ID NO: 264172 - DNA, 122 bp, Homo sapiens
gctggcggtgcccctgcgtgtgctgctggtgctctgggccctctgcgtgggcctgtcccgcgtgatgatcggccgccaccacgtcacggacgtcctctccggctttgtcatcggctacctcc

SEQ ID NO: 264173 - DNA, 122 bp, Homo sapiens
tgcgcggcccgggcagtctctgcgagcccgggctgctgctcatctgggggggacggcggccgcccgactgagcccagagctgtgggccgcgcccgggttcctgcctcgggccggaggaggga

SEQ ID NO: 264174 - DNA, 122 bp, Homo sapiens
gaggctgagcagggagagggggccagggccagaggggacagaggctggcggcagacgggccgggacaggcaggtcctaaatggcattgtttgaaggggccggctaattgcacagagcagtct

SEQ ID NO: 264175 - DNA, 122 bp, Homo sapiens
agaactcgaaagcttcctattcactcaagcacaatctagcgactgccatggaggactttgcggatggaatcaacgtttgaatcagctgactttaaataggattatcctgggttatccgaggg

SEQ ID NO: 264176 - DNA, 122 bp, Homo sapiens
ccaatccaggaaggactaaactggaaagagctcatcttcgagaacttataatgtataaaacgtcaacctaaatttttttgttgttattaatattttagtgcttagaaaaagaactgttccta

SEQ ID NO: 264177 - DNA, 122 bp, Homo sapiens
gttccatggagcccaaagagtgtgtttgaaagcagagttatagaccagcaatgagggcctcgtgatttaagaattactttcatatgtagtatctctgaggttcatgctgatctttggggaaa

SEQ ID NO: 264178 - DNA, 122 bp, Homo sapiens
catgttcgctacacgtttctgcatctctctttgcagtgttccgctgaggacagtgattcacgcccagctgggctgtcctcagcttctctttctctcacagaggacacggttcgtcgttcctc

SEQ ID NO: 264179 - DNA, 122 bp, Homo sapiens
gaggtagcggttgctgagctccttcggcgcttcggctcctgtagctctgactattcggaccgtcaaggtagaataggaggcggccagttccccgctctaagaagttgcctgcgctctgaggt

SEQ ID NO: 264180 - DNA, 122 bp, Homo sapiens
ggaggagtttcctcttggcctgaacttggctgacctccgcagcttccgcccggtgagggacgtgagttgccaggcgtgttctagggggctggggggactccaggattcccggccggggaagg

SEQ ID NO: 264181 - DNA, 122 bp, Homo sapiens
ttttcctctgtggttcctagaagagggcctggcacatagccggccttggctagctttttgcgtaaatgtgaagggatccaccttcctcccttataagaggtagcagtacctcctgttaccag

SEQ ID NO: 264182 - DNA, 122 bp, Homo sapiens
gtcactctcagcatctccggggacagccacgaggctggtaacgggggaaagtcagagccccgtgggcacccaggcgacagggaggccttgggacatttccggccgcagcccccaggtacttc

SEQ ID NO: 264183 - DNA, 122 bp, Homo sapiens
gcggcgcatcagatcagcagtaacgacgtccacctgaaggtggttgggggaagaggggagcgctaagggatcctgccctgcctggccgcccaggttcctgggctccctaaacggctccgccc

SEQ ID NO: 264184 - DNA, 122 bp, Homo sapiens
gaaaacgagttgttggactgttacttgtctcagcagagttagggtgaacatttattggtacggaattattagacatttaagttctcagttttatgttttaccgcattgtacaacaaactgtc

SEQ ID NO: 264185 - DNA, 122 bp, Homo sapiens
ggcagcatccggggctgggtggatgcaaacaaccatgaaagactgggttctcgctctccccggctctgctgctgctgctgctgccgccgccgccgctgctcctcctcctgccgccgccgcta

SEQ ID NO: 264186 - DNA, 122 bp, Homo sapiens
gcaggcagggcttatcctgcctccagatgctgagggactcctggccctgaaactgctccccgtggctgaacgagaatggatgctgagcccatcaagtcggcaccagggaggaagcgtggagc

SEQ ID NO: 264187 - DNA, 122 bp, Homo sapiens
tgttacctgcctgtcacctgggcgagtcacctggagccgcgtctgtgacatggaagggaacggttacaaaagccacatcatgtgagatgtgcgggcccagccaggcatctggggcagaccag

SEQ ID NO: 264188 - DNA, 122 bp, Homo sapiens
acctcatgagccctctccatcgacccgggcctccccctggcccagtggtagcaccgtcctcgctgagggtcagcaggcacggtctagatacaaaaatatgaggaagaaacaaacgaagagat

SEQ ID NO: 264189 - DNA, 122 bp, Homo sapiens
tagctgagttcttccagtctccacggcaggtctagcctccaaaacgagacgagctgggagcgaggcggagggaagcgcaggctccgcccaatcccacccgggcctggcctcgcctcgcctct

SEQ ID NO: 264190 - DNA, 122 bp, Homo sapiens
cccccagctgccctgaaccttcaaagtcacatttcagtcactccccagtctgaccaacaacgctcacaatgagggcgctgccagcacaggcgacggcctgcgctccagtcttacgaggaacc

SEQ ID NO: 264191 - DNA, 122 bp, Homo sapiens
aggctggggccctcggcggggcagatttcgttggatccctgggactaatgtcgcagcgctcgcactcctgcaggtctccagggttggccattcccggctgcatgctcggcccctttcttccg

SEQ ID NO: 264192 - DNA, 122 bp, Homo sapiens
tttctgctggaccctcaagagaccactggagctcctatctgcactgcactgaaaattgcccggccttgaaaaatattgccctgccagtctgctcttccaaggacttaatgagccccttaaaa

SEQ ID NO: 264193 - DNA, 122 bp, Homo sapiens
accacagatcatgtctgtttcctttgtcctgtgacacccctcaaagacttggaggtgacccggatccattgagctccaggtttgtgcctcagatccctcagccattatgtccttccagaatt

SEQ ID NO: 264194 - DNA, 122 bp, Homo sapiens
gccgcgccgagcgcaggccccgccccgcgcgttcccaatggccggcgccgttcacccggccggagcgcccaggcctgcagccccctattggcccgcggaggtccccaccctcagcgcggccc

SEQ ID NO: 264195 - DNA, 122 bp, Homo sapiens
cgcgtgggcatagggtggttaaagtaaatgagggagaaaccagaaaccgtcctggtaacacgggaggtaattacgtcagaaaccagggacgagactgacgtttaccaaatgagcttcctggc

SEQ ID NO: 264196 - DNA, 122 bp, Homo sapiens
tcattttctcttgaaataacccagaggcagcctgtccagtcaggcccaggtgagtgacagcgtcagaacaggcaccccttccctgacgcgctaagtaccaccggccagaatcctcaccctgg

SEQ ID NO: 264197 - DNA, 122 bp, Homo sapiens
ggggctgctggccactgctctggggaccggaagtggaggcggctcgtcgcctactggtagcgcaattagaggcgggcattgtaggttacatgcctaaagccacttccggtgatggccccgcc

SEQ ID NO: 264198 - DNA, 122 bp, Homo sapiens
ggcaacacggtgaaactccatctctactaaaaaatacaaaaaattagctgggtgtggcagcgagcacctgtagtgactacaccactttgttgacggccgtccggacctgcagctgtccgggc

SEQ ID NO: 264199 - DNA, 122 bp, Homo sapiens
caagcaggtgttgctggtgacgtcacaggaccggcctctctgctgggtcccagagccacacgtcacggagcactgggtccactctgcccacggagaccagccctcctcaccgtccaccgctg

SEQ ID NO: 264200 - DNA, 122 bp, Homo sapiens
ccttccgaactgcgcatgcgccaccgcgtctgcagggggagaagcgggcaggggcgcaggcgcagtagtgtgatcccctggccagtccctaagcacgtgggttgggttgtcctgcttggctg

SEQ ID NO: 264201 - DNA, 122 bp, Homo sapiens
ggaacgcgggcgggctgtgttctcagtcacaatcagctcggatgagctggggggcgcgggcgcaagcgggcatcggcacctggcagaaagcgccgcgccccccgcgggtgcgcacacctccg

SEQ ID NO: 264202 - DNA, 122 bp, Homo sapiens
ttttggtgctggcggctggctggtaggtgatagtccgcaaaagctccatggtcgccttgccgccccgcactgcccgctgccaccccctaggcgcggtcacacgtccgagccggccgtggtcc

SEQ ID NO: 264203 - DNA, 122 bp, Homo sapiens
ctggggctgctgggaaagacgcggcgtggtatcgcgagacgggagtgggcggtgctagaacgtcctataaaggctctccccgaagcacgtgactcctctccgccagaccgccgccgcgccgc

SEQ ID NO: 264204 - DNA, 122 bp, Homo sapiens
tcagggccgcccacacacagggacgctgactgcagaggggctggccatctccatccagcccgcctggagcgctggctgcgccagatgctagccacagctgttcaaagctaagtctatccact

SEQ ID NO: 264205 - DNA, 122 bp, Homo sapiens
caggcaagaggggtgtggatattccaacaggatgcctttctgttttgcagcaaaatttaccgagtttccgcggaacgtgacggcgaccgaggggcagaatgtggagatgtcctgcgccttcc

SEQ ID NO: 264206 - DNA, 122 bp, Homo sapiens
ccttactgttttgaagttggctcttatgcctgtttgtctttgcaatctgtctctgcgtcgcgtgttggtagtcatttatttttgtccctagtcatgattcccagaaccttgctgtggtcatt

SEQ ID NO: 264207 - DNA, 122 bp, Homo sapiens
gcttcctggagtcaaaggccactcacagtcagcttgtcctcactcaggattccatctacccgcccagttccatactgaatggcaaacttggtcccactgggcttgaaggagctggaggcatt

SEQ ID NO: 264208 - DNA, 122 bp, Homo sapiens
ccccacactgcggcgacgccgcgccttttttccgacccaactgagccggaagtggaggcgcgggcttcccatgatgccccgcgagacctttattctaaccgcaaggagtagcggaggggagg

SEQ ID NO: 264209 - DNA, 122 bp, Homo sapiens
cgccacacgtgcatctcgcgcttgacccagcgctccaggttggcgatggtctcctggcagcggcacaggcaggccttgatggacttcttccagcgctgcgagtcgctcgtgggcacgtagcc

SEQ ID NO: 264210 - DNA, 122 bp, Homo sapiens
ggacgacagaaaagggccagaggtcaccggaagcccagggcatgccgggccagacctggccgtccttctcctccagtatcaaccgaagagggagaggaggggcggaaatcacttccgggtta

SEQ ID NO: 264211 - DNA, 122 bp, Homo sapiens
tcctggttgttcgtgctgtattccccggaagcttaacgctttttattcagagaacctaagcgtctggagagcaaactcccgtgggctctatctaaggcatttccactaccttgatctctttg

SEQ ID NO: 264212 - DNA, 122 bp, Homo sapiens
tgaacccaggaggtgaaggctgcagtcagctgagatctcgccactgcactccagcctgggcgacagagtgaggcactggaggaatcctcctgaactcctccatgtgcctcttcatttggctg

SEQ ID NO: 264213 - DNA, 122 bp, Homo sapiens
ctctgttctcgctcctgagcagctgctaggtttcccaagcgactgtctcaaccgcccggccgcctcccccgggcagccagagcttcacatctacctccagccgggacccgcccccgagccgc

SEQ ID NO: 264214 - DNA, 122 bp, Homo sapiens
cggcggggctgcatggacgcaggaaagttggctcggcacccgacagacacgggctcggagcgggcagtgccggcgctcgcggaaataaggccgtggtgggcccctcccctccgcccccaggg

SEQ ID NO: 264215 - DNA, 122 bp, Homo sapiens
ttgtttttctcaacacctcctatgcggaccctgaggaggcccaagagctactggtccacacggcctggaatgaactgaaagtagtgagcccagtctgccggccagctgctgaggctttgttg

SEQ ID NO: 264216 - DNA, 122 bp, Homo sapiens
acacacacacacacacacggcgaggatgcgcacatttagacgcacgcaccccggcacccgcggccccagctgctagtccagggtgggagggagatcttattttgccgcttggacgccttccc

SEQ ID NO: 264217 - DNA, 122 bp, Homo sapiens
tgtgctgccacctcatggcaggcagagggcaatgaaactcatctttccggccatgcagggcgcatgcgcggtctgcctcccgcggcgggccgggtctccagggaggacctgagtttttcttc

SEQ ID NO: 264218 - DNA, 122 bp, Homo sapiens
agcatgaggctgaggagcactgagcctcacatggtgccctgcactgccaagacaagtgaacgatacagtaaggatggctaaaggtgacctcagaaacccgaaaggcaaaatgtctgctaatg

SEQ ID NO: 264219 - DNA, 122 bp, Homo sapiens
tcaggacgggcgggggcggggccgagacaagtatccaatgagggacgcccaatcggaatccggggaactgcccaatttacagcgccaggggacggactggggaattctccaatcagagtcgc

SEQ ID NO: 264220 - DNA, 122 bp, Homo sapiens
cacggcctgaccccttttaagagagggacctcaagaggggagctgaattccttgagccctcgcctttcaatcaagttttcaaggcacgctttggccgggccctcccggactggctgtgctgc

SEQ ID NO: 264221 - DNA, 122 bp, Homo sapiens
gctcccacctgcacctcccttgttccctgggttcaggaagagagcgatgtttcagaagatcgtggatgagtccaagaactaccaggacaagaagagctgggtggagtacctgtccctggaga

SEQ ID NO: 264222 - DNA, 122 bp, Homo sapiens
ttcaccgcaggggagttggagggctcagcccagggagctccatggcacccacccgcttcgcgcagacagctcggaggcaacgtcacgtgctactttgacctttttttttctccccttttcat

SEQ ID NO: 264223 - DNA, 122 bp, Homo sapiens
agttgggaagtgagaaaccatgtttttaacttgtggctgcttttgctgctgctgctcctccgtatctggctgtatgggtggagaacccaccccctgcccaccacaggggtctccttccaggc

SEQ ID NO: 264224 - DNA, 122 bp, Homo sapiens
gggggctgtgctgtgagtgctgggcctccctccgcagggtgccagccccggcctttatctcgctgcttcatgagctgattaggcgtctcagtgccaccctaatgagattgttgggccccgag

SEQ ID NO: 264225 - DNA, 122 bp, Homo sapiens
acttaggccgctgtccacgacctttccccacctcggaggcactcatgaaagaagcagaaacgctccgaaagtagctgcgcccagagaggggaagtgctttctctgaaggtgacagagccgca

SEQ ID NO: 264226 - DNA, 122 bp, Homo sapiens
actttaatggttaaaaaatgctaatggatcatctgagtctccagcaagtcttaatcttttcgctggtggatcttgcctcaatgttgttgaaggctgctgaccagtcaggctagtgttgatgc

SEQ ID NO: 264227 - DNA, 122 bp, Homo sapiens
gcgcccagccagaaatagttttaaaaaaagaaataaggagcgtgcggcccgcgggggaagcgcctttaccagctcgagcctgcagccccccaggccgcgccgtcctcggctcccccgggcag

SEQ ID NO: 264228 - DNA, 122 bp, Homo sapiens
gttgaggtggctgctgaccttgggtctcacctcgttgattttctttatcctcttcattgccgtcctctctaggctgtctttggcgaggagggcccctgcggaatcgtggtctatatccctga

SEQ ID NO: 264229 - DNA, 122 bp, Homo sapiens
cccggagctgcgtcagtccccactgggttcctccaggccaaggaggtacgacctccgccgcggcatataaagtaaatgtccaggacatgggaagaaacccgccgatacagcacccgggtgcc

SEQ ID NO: 264230 - DNA, 122 bp, Homo sapiens
caaaagagtgctgtgaataagtgtggagaccacggagagcccctgaagcagaatgaatcccggggctcagcaccacctcctgcagtttgggcctttggccggcagattaaagggctgctggt

SEQ ID NO: 264231 - DNA, 122 bp, Homo sapiens
gagtggctcacaggccagatgggctcccctcccgggcccctgagcctccagttccatccacgaggtgggtgtagttcaaatctctgctgcaccaggatgccttggccagttaccatcttttt

SEQ ID NO: 264232 - DNA, 122 bp, Homo sapiens
cacaccacctagcacagacagcaccagctcacggccgccgcagtccctgggtggcctctacgggaatcctggggcagagatgggattacgaaaccctaaaccactcccgctgcgcgcgaatc

SEQ ID NO: 264233 - DNA, 122 bp, Homo sapiens
tgtccacagacaggttttggtttgaataaagaaagattgtgaagacacgtatcagaatcacgcaaccctgaaaggcaggcaggactgagcaggacagtgaagcaacaagcaagtaccacaag

SEQ ID NO: 264234 - DNA, 122 bp, Homo sapiens
gggaaggggcggggcgaacggaagccgggaaggcgattcatagctcgcggggtacgggcgcgcgtgcgcactccgcagcccgttcaggaccccggcgcgggcagggcgcccacgagctggct

SEQ ID NO: 264235 - DNA, 122 bp, Homo sapiens
gggagctggcgctggctggaaagggctggattctcactgcacagaaagctgcctcccttgcgtgtgcccccagccgggccttgaatgtttacgaccggctgagtccccagatcctgtccttt

SEQ ID NO: 264236 - DNA, 122 bp, Homo sapiens
gtgccatccgcctccgccatgacaacagacacattgatgtgggtgggtttacccgccatgcggtcgatggtcttctgtgtgaaggccagcggcagggcctcgtggcccaccatgcaggagaa

SEQ ID NO: 264237 - DNA, 122 bp, Homo sapiens
cactgtcttccacttagaataattgtcaggaatagttcatcagctgtaagcagcacatctcgcttcctggggagctggaaataatgtaaactcctctgtttttaaatttttttgaccacgcc

SEQ ID NO: 264238 - DNA, 122 bp, Homo sapiens
agcttggccggatgtggggctctagcggggacctctttccctgagaacatctgggccatgcgttcgtgtctcccggcacccggccctgcccttgagaccaacaccatcctgattcttgatac

SEQ ID NO: 264239 - DNA, 122 bp, Homo sapiens
agccccttcctggcatggctgaggccggagccgactccctcaacctgcggggaggtgcagcgggacaggagagagaggcacgggcgggaaccggggctgcgcgctgcgcttgtgggtcagct

SEQ ID NO: 264240 - DNA, 122 bp, Homo sapiens
cgacattctacacggatagcaaatgagggtctgagtcttcatgtctttcccctggagctacgcttcccacctgggaagctttcaaagcaaactggctgggactccaccctcaggtttccgat

SEQ ID NO: 264241 - DNA, 122 bp, Homo sapiens
ccatcgctcggtcctgtcacgtgaccacgcctactacaccagccacgtgagcttctgagccggcttccgcgcaggcgcagtggatctctcttgcgccattccaaacatggcggctccactag

SEQ ID NO: 264242 - DNA, 122 bp, Homo sapiens
ttcctaacgacttcagcctctgcacctcctgggttttccctgctgcaaattgccatttggcgtcgtccccaatttccggccaaggccgcgtcgtcgtgctgctgtgtaatttgatgtgtgga

SEQ ID NO: 264243 - DNA, 122 bp, Homo sapiens
acagattgagcagctcctagacaccctcctgcttgtactcccagcggtccctttcctcagcgcaggcatgttgaaacaccatgccaggccaactggtgtttgagaaaacaatgggaattaaa

SEQ ID NO: 264244 - DNA, 122 bp, Homo sapiens
taattaaattctaattaggacactatcaatatcctatttagctgcgtagcttttgtgcgccgcggtccctttcagcgcggtaaatagggtctcgacgccttatctcgcctgcaggagacgcc

SEQ ID NO: 264245 - DNA, 122 bp, Homo sapiens
cgcctgccaacactgctccccacaagactaagtcctgcagcctcagcccagaaggacccgcgcctacccccacacggaggtcatgttcagccacaccccagtgaaccctggcgacccacccc

SEQ ID NO: 264246 - DNA, 122 bp, Homo sapiens
agctatagattgaatgaatgaatcctgaaaagagaaaatttcagggctacatgctgagagcgtttggattttaaaatgtctgtgagatgttaaattaccagtgagatctcaaaaagtcatct

SEQ ID NO: 264247 - DNA, 122 bp, Homo sapiens
tgttggacagcaaagctgttacttggcaaggtggaactcggccgagagcggctccaaagtcgcgtggccagtgccaggaattcagattttggcaaccgcaccttgtgcgtccccgaaaccga

SEQ ID NO: 264248 - DNA, 122 bp, Homo sapiens
gggcgctgccatcagacccacctgaactggacccaggtctcacctcactgagccttcatgcgagcaccaggctgaataccttcttggggctcagagactcagagaggcagtgtcctccgccc

SEQ ID NO: 264249 - DNA, 122 bp, Homo sapiens
ggtcccccctgctgccggctccctacttccaggcccaggcagaagcagtgtccaccattccggccctgcgtcccagctcctcagcgtcatggtgaggtggtcagccacagcggtgttggggg

SEQ ID NO: 264250 - DNA, 122 bp, Homo sapiens
cgagagatggtgagcagtgttctgtgctgcgtggccgtgactgccgaggttctgtgaagacgggaaccacgggctgaaagcaatagagaccccagaccaccagggtcagctcgcccccgccc

SEQ ID NO: 264251 - DNA, 122 bp, Homo sapiens
agccggggccgagctcgggggcgtgcagctcgagactcgcccgggcacctgctcctcgtgcgcacgcccggagcccgggtcaccttgtcgtctacaagaaccaaggtgtgcccggccacccc

SEQ ID NO: 264252 - DNA, 122 bp, Homo sapiens
tttttggttttctttttcccgtcttttctttcccctccccctacaggtcaaagcctttaacgtcgtggctaaatcagaaccgtattttctcggcgcagccccgcaggaaggaggggagcgcg

SEQ ID NO: 264253 - DNA, 122 bp, Homo sapiens
ctcttggtctgtgcttttcctgtacttttttgctcctgtgcacaattaccatgtagcatgcgcatagaaacacagattagaaatacacagaagataatcacataacttagaaatgagttttg

SEQ ID NO: 264254 - DNA, 122 bp, Homo sapiens
acacacagccgcctgcagggacagagctggagaaggctccaaggatctgtcccggaccagcggggccaccaggcggctttccctactgcacccacgccccctgacaaagtggccccatctaa

SEQ ID NO: 264255 - DNA, 122 bp, Homo sapiens
ttctccagctgctctaccttttaggcaaaatgagattctcttaagtctcccaactccaaccgatagctctcctgactccatagctgggtttattatattccctccagctgcagtgttccttc

SEQ ID NO: 264256 - DNA, 122 bp, Homo sapiens
gtgcagaactgtggcaccgagaaggagaggcgctatgcccgcaagattgagcccatccggcgcaagggcaactaccttctctgctcgttgctcctagggaacgtgctggtcaacacctccct

SEQ ID NO: 264257 - DNA, 122 bp, Homo sapiens
ggcgcccactcaccaggtctgcgcgggagccctcgtgggggggcttgggctgccggagctcgctgggtgccagctgcagggacacaccgtggctgtggcccccgtggctatggctgctgtgg

SEQ ID NO: 264258 - DNA, 122 bp, Homo sapiens
tcccctttaactttgaagtgactttttaaaaaatcgtgattcctaaataacttagctaagcgaaggcatggtattaactcttagggccctgcagaagcaaaactgctgtaggcacagtggct

SEQ ID NO: 264259 - DNA, 122 bp, Homo sapiens
atgcctctcctaccacagatagtcacagaacaagcggatttgtgctgaacctgcacatcacggagcagggacaaggctgtgggcccctaattaaatgacaccctgatggatgaaagcgctgg

SEQ ID NO: 264260 - DNA, 122 bp, Homo sapiens
gtccctcccagtcagcgtgttaactcagctgggctgcgttttgtatgggaggttggacaacgtgcccgcctgccaggacaggggaggtttgtggcagggcctggcagtggcagaacaatctc

SEQ ID NO: 264261 - DNA, 122 bp, Homo sapiens
tcagtcagggcccctatggagccgtgttacagcctttagacacaggatcgaggatcttcacggggtgaggagacacgcccggcccatgccttctttctcccgccagcctacagggatctttt

SEQ ID NO: 264262 - DNA, 122 bp, Homo sapiens
taacaataaaatctacctcaaactaattctgaaatacaatgcagctgcctttgctgtatccggttaacaactttgacataacataccagaagcaaccagcaacagattttatttcagtaaaa

SEQ ID NO: 264263 - DNA, 122 bp, Homo sapiens
ttcttttttctttcctcctttcttttcttttaccctccaccagcccagtcagccagagaacggcatcaacagacatgctttgaactccagaccctccctagctgtgctactctggacatgtt

SEQ ID NO: 264264 - DNA, 122 bp, Homo sapiens
tttctgcttctggctggcatcttcccttttgcacctccgggagctgctgctggtgagtggcgttcctggcggtcctcggcggagcgggagcagtgggacgtttccgggggtcgggtgggtag

SEQ ID NO: 264265 - DNA, 122 bp, Homo sapiens
tcctggaagttatgcctgtggggaccagctctctcagcatctctctgcctgagggccactcgcctgtcactgcctcacagtctctgaattgggtgacatttcagacccaatccctctgtgga

SEQ ID NO: 264266 - DNA, 122 bp, Homo sapiens
cccgtttcctctgtgtttggcttggcagcgcctgggcctggcctgttttgagcctcacctcgtgcttgggcttttgtggcctgtcggtggatgaggtggcgcggagtagccgtttctcctca

SEQ ID NO: 264267 - DNA, 122 bp, Homo sapiens
ccacaggtgtccacgcgcagccactaaccgctttcttatctgacactttaagtgcttcttcgtacccagctcctctaacgccttttgaagcagctccatcatctttgaagggcagttcatgc

SEQ ID NO: 264268 - DNA, 122 bp, Homo sapiens
agcccctgaattcacaaacagaaaccagaacctgcgtctcctccctggcaggccaggcctcggtccatctgggcagacagatgaccattcaccgacctggccctctgggaatactgtcctgg

SEQ ID NO: 264269 - DNA, 122 bp, Homo sapiens
ctcaggagctggccccatggacccaactcccatctccagtgtgaagccagtgttgtgtgccgacgggccctgtgcccgcccacctgacttgcccgccctcgcctacaggttacgcccccagt

SEQ ID NO: 264270 - DNA, 122 bp, Homo sapiens
agactgtgtggcaggcaaaaggtgaacgtcaaagcctgtccccggcttcttcacatctcgcgcctccgcgggcgtcgggccgcccccgtgagcctccccggatggactgggttttagggacc

SEQ ID NO: 264271 - DNA, 122 bp, Homo sapiens
aggatatttcactttgtttacctccccggccgggcgagggagctgcgaggccggtgctggcgcccccggcacggagctgcaatggcagcggcgcggggagccgcccgaggactggcagcggc

SEQ ID NO: 264272 - DNA, 122 bp, Homo sapiens
aagcaagcagaaatggaacagagtgacccagacatgtttgtctgggtctttatgctacaccgccttccctacctcacagctttattcttgatttatctcccacagctgactctctgccagcc

SEQ ID NO: 264273 - DNA, 122 bp, Homo sapiens
tggggggtggcgtgcacagcgtgttaagtgtcgtaagtaatctggggatggcgtagagtgcgtggggggtggcgtgcacagcgtgttaagtgtcgtaagtaatctggggatggcgtagagcg

SEQ ID NO: 264274 - DNA, 122 bp, Homo sapiens
aaagaaggggcacctaactcactccaaaaaggcattctggcaaaaattacctttgatttgcgatgcactggatgagtaggagttaaccagacaaagttgagggagagaaaagtaaggagaca

SEQ ID NO: 264275 - DNA, 122 bp, Homo sapiens
tgtctaaccaatcggaaagaaagttacattcaacgctggttctagcatccaatccaaggacgtgtttcagactctgctgcccggtcccagccagccctgagctggcgccttagacgctcgcc

SEQ ID NO: 264276 - DNA, 122 bp, Homo sapiens
aagactgattccagaaaattggtcttcatgtcatccaaccttgcagtaaactctaaaaaacgtttggcaattgttgtgaatcagttaattctacctcctgagtaggcacacatgtcactggg

SEQ ID NO: 264277 - DNA, 122 bp, Homo sapiens
aggctgcgggaaggggcggactgcagctgagttggctccaaagtgtgggactcagccaatcggaaccgtgcagggcggggctggcctgcggaagggggcgggttcggaggagtgaactgtgc

SEQ ID NO: 264278 - DNA, 122 bp, Homo sapiens
ttgctcaaggcccccgtacaaaatggcggcgaggcctgaggaaccaaccatagagacgcccgccggccgcggacagagcgtaggcctctgagcgctggccccgccccgcgccggcctggtct

SEQ ID NO: 264279 - DNA, 122 bp, Homo sapiens
gatgggaccgggcagggacgacaggaggtcagtctcccttcccttctctttaaaatttcccgccagtatggccggctcgcagcacgagttacgccctcttcaggagtccctccccttctgct

SEQ ID NO: 264280 - DNA, 122 bp, Homo sapiens
tcaccaggggctctcaagcaggggacactgggccctatctggcgacatctctggtcatgccggggtggggagggaggcaacactggcatcgggtggggagaggccagggatgctgttgaaca

SEQ ID NO: 264281 - DNA, 122 bp, Homo sapiens
aaaaaaataacagaatagtagttgtaaagactaactctatatgaatggttttaatcatagcgcagttaaaacaacatttaatgtagattcatttcgctggatgatgtcaaccatttaaaata

SEQ ID NO: 264282 - DNA, 122 bp, Homo sapiens
ggtgtagaactgctaggggtatagcgattcagccactgcccttaacaactagcagttacccgtctttttgcctttgcttgtgctatgcctttcacctggaagccctgcccttccttcttttt

SEQ ID NO: 264283 - DNA, 122 bp, Homo sapiens
gaggcccgcgcgcgggggccgggccgccgccgccgccgttgggcccgggccccggagctgcgggctccacgtgctccgacatgcctcccagcgtcgcgccctaacgacccgcaagtgtccga

SEQ ID NO: 264284 - DNA, 122 bp, Homo sapiens
caacggttgccaggggcaacgcagtccactcccgtttccaagagcctgttgctgggcaaccgggagaatacttcccaaaccaaacaatgtcatcccggagcaaccccctctatctcacatta

SEQ ID NO: 264285 - DNA, 122 bp, Homo sapiens
taccacctgtcctttcagggacaatcataacaagatccgctcccactcactggagccaaccgatggccagcccccggtgaagctcttcattttacacatcctttcctgcctctttttctgtt

SEQ ID NO: 264286 - DNA, 122 bp, Homo sapiens
ccagctgactccagattctgacgtaggcgtttatgtactagcctttctccaggttcagggcgctgccacaccttcagccccgccccgccccgccgcaagcccaacccagaggttgcttatgg

SEQ ID NO: 264287 - DNA, 122 bp, Homo sapiens
tccgggaggagcggcccgggcgcgcggcaggtgcggcggcgcaactcgcgggtaggcgaccgctggtcccgccgctgaggcccctccactgccgcccgcccggcaccccctccgggccgccg

SEQ ID NO: 264288 - DNA, 122 bp, Homo sapiens
gtgaggagtgtttaccatgctgaccacggtccagggctgagaggcccgcagtggctggagcgaaaggcaggctgaggccccgggagcgagggtctgggactgcccggccgccagcgcaggga

SEQ ID NO: 264289 - DNA, 122 bp, Homo sapiens
cggggctcagtaagaaggcctgcggttggtggctccccacctcatagctgcaagtaggggcgaaagctggagtgtctcctcccagcagcctcctcgcctccccgcaaacctccgaatctccc

SEQ ID NO: 264290 - DNA, 122 bp, Homo sapiens
gaaggcgcgtgtgggcagggaaggcgccggcgaggatctggaaggaacttagagccggaccgagctaattatcattgagagtagagtaggagggggaaacatgtcctgttcttctgacctga

SEQ ID NO: 264291 - DNA, 122 bp, Homo sapiens
caggcgttaggacagtgtgccagggtcaaaggcagcctgggaccgggtcctggggtcccgcgccttccggagctggcggctgcgctcccggttgggccactctagctgcgggaggtcgcttc

SEQ ID NO: 264292 - DNA, 122 bp, Homo sapiens
acggaaagaagatgaaggatgggtgtgttctcagcatcaccctggaaagcacacaaagaccgttcaaccacaccgccagctgcaatgcacacggggcacggatgaggacacactgcagctcg

SEQ ID NO: 264293 - DNA, 122 bp, Homo sapiens
ggctggaggccggcgtcggggaaggtcctggtgccggattccgcacgaggtgttgacgggcggcttctgccaacttctccccagcgcgcgccgagcccgcgcggccccggggctgcacgtcc

SEQ ID NO: 264294 - DNA, 122 bp, Homo sapiens
gcgtgctctggagagagacaggcacttttcctctccatcgtgagtgaccttgggtgtattcgtcaaggaatgtgttgaaacgaattgtgcgatgcgggaactgcgcagcgcctcgggtttgg

SEQ ID NO: 264295 - DNA, 122 bp, Homo sapiens
gccgctggcctgggtgctaagcccctcactgcccggggctggcagagccggccggccgctcggagtgcggggcccaccacaaccacgcccacccggaactccagctagcccgcaagcgccgt

SEQ ID NO: 264296 - DNA, 122 bp, Homo sapiens
aaggcgactgccccactgtccttagacaaaggtgatctccccatatttttgttctccagtcgcttgacttaagaagtccattccgaaggctctgtagggaaggaactggctctgggtgtttt

SEQ ID NO: 264297 - DNA, 122 bp, Homo sapiens
atcaaaggcagaggcacaaagtccctttcctgccctttggatgagtagacctgttgggggcgctggtgggacagcccccaggtggcttctagacttagctcatctccctcctgatggacagc

SEQ ID NO: 264298 - DNA, 122 bp, Homo sapiens
ccagtgggtaaataatgtgcacattccatgtcgattttgtgtatcccttccttcccaaaacgactgacagcagatctctggtccttgtgtgagcatcttgatgcaaggatgcagcttgtttt

SEQ ID NO: 264299 - DNA, 122 bp, Homo sapiens
gggtaccagggctgctgccttttccttctgtggtggccctgagcgtcttcaagaaagaggcgatggcacccccctttccaggcgctcatttcactggcccagcgtaacaggccccttctgcg

SEQ ID NO: 264300 - DNA, 122 bp, Homo sapiens
tctatgaatcaggtcactggagtacagtttctgtcaagttctcaggtgatgctgatgctgcgggctccagtgactacacttttagagccagttttaaaatacaaggacttgcagatcccacg

SEQ ID NO: 264301 - DNA, 122 bp, Homo sapiens
agtcagcacctgttagtggaaccgcgactgctccgcagagctgctggtatgagcgcccgtcgccaccccacatcccaggcccagccattctgacaagaactagactttgggctccttgagaa

SEQ ID NO: 264302 - DNA, 122 bp, Homo sapiens
agcccgccatgcctgagcctcccacccactccatgggctcctgtgcggcccgagcctccccgacgagcaccaccccctgctccacggcgcccagtcccatcgaccaaccaagggctgaggaa

SEQ ID NO: 264303 - DNA, 122 bp, Homo sapiens
gctgggctgaaactcaacatgtgtccagactgctgcagttcagaaccagcttggcaacgccgaaccgcattccggtttgcacgaggtgcacgttacttagaaaagtagccacagtctgcctg

SEQ ID NO: 264304 - DNA, 122 bp, Homo sapiens
gccggggccggcccggggcggggccgtggccgcagctgcctggcagccagaacctgggagcgctcgcagtgctgcctttcggggttctttgtccttcgcttctgctggtaggtgaggtttaa

SEQ ID NO: 264305 - DNA, 122 bp, Homo sapiens
ggaaccccaggtaccaggtctcaaacctggggctcttgggggagggtccccaccgccacgcgatttgtttctagcccctcaagtggttctaaacgcacaggcagggtcagctccaaaacaca

SEQ ID NO: 264306 - DNA, 122 bp, Homo sapiens
ttttctacctaacaaaaggttcacagatgccaaacacgtgctccaaaatgcccctcctcccgtcgtctgagacccagatgaagcagggtccttgtggcaataatattctctgcaatgctttt

SEQ ID NO: 264307 - DNA, 122 bp, Homo sapiens
atgcatgtccacatatcattgactgtatcctgtaatatgcaacggcacagctagttttcccgatttggataaaagttgatctgtatagtcaacatcttgaactatatttcaaatgaatttaa

SEQ ID NO: 264308 - DNA, 122 bp, Homo sapiens
gaagcagaactggccgagcacgaagtcgctgttctgaactgcctgcatgccctcctggcccgccagccccacgcccacgtccgcggctgcagggcacaagcagctggtcagccccccgcacg

SEQ ID NO: 264309 - DNA, 122 bp, Homo sapiens
tgaccgggcgcggtgtcacgcctgtaatcccagcactttgggagggcgaggtggactgatcgcttgacaccaggcgttcgagaccagcctgggcaacaggtgaaaatccgtctctacaaaaa

SEQ ID NO: 264310 - DNA, 122 bp, Homo sapiens
tcgcaagccggagcaccaccatgtagcctttcccgaagtaccggaccttctcctcctccacgctcacatcacggacatcatggagcaggaccaccactgcggggagacggtcagtggccgag

SEQ ID NO: 264311 - DNA, 122 bp, Homo sapiens
catggtctctgatcttcaacaccacccgagaacttactagaaatgcaaatctttacagtccgggtgcagtggctcacgcctgtaatcgcagcactttgggaggccgaggtgggcagatcatg

SEQ ID NO: 264312 - DNA, 122 bp, Homo sapiens
tctggacaggacaaaataaacttgtagttacatatagggcacaacacataaacagacacacgccatgatggaaaggaaaattttggaatgcattccttctaggccaacatgtattctccaaa

SEQ ID NO: 264313 - DNA, 122 bp, Homo sapiens
cctctgatccccacttcacccgcgcttgggccgtcccccgtgcctcggcgcggccacccgcggcagggtctccacctggagcccggcgtgaccctcacccactgctcagccctattcttcat

SEQ ID NO: 264314 - DNA, 122 bp, Homo sapiens
tatttagacattccggtgggggcatgctcataccgtgctgaagtgcgcggatgctgaggtcgccgggccgtcactgctcctgggttcttctcctccttatcgtccaagatggttcctggagg

SEQ ID NO: 264315 - DNA, 122 bp, Homo sapiens
cgcctcatgtgccacatgccaggggccggccctgacagactgcctcagctgccccagccacgcctccttggaccctgtggagcagacttgctcccggcaaagccagagcagccgagagtccc

SEQ ID NO: 264316 - DNA, 122 bp, Homo sapiens
cttgatccagcgcagactgttgttgacaacccggcggtagcatttgtagaagccctgaaacggaggttcatagggggccaaagagtgttattcctcactccttccaagccaaggactgcaga

SEQ ID NO: 264317 - DNA, 122 bp, Homo sapiens
ggacctggccggtcgatccgcccgggctggaaaactttctttataattacttctccaggtcggagcgcgcggcttgctaggcgcgcggggccggcgctgttacccggcgtggagtcgccgat

SEQ ID NO: 264318 - DNA, 122 bp, Homo sapiens
ggaccttgtgagatgaaagagtgggtctgttaataatcaggccgagaccaccagcataaacggtggcggtccagactctcaggacgcatggttatcccactgtccctgctaggtctttccta

SEQ ID NO: 264319 - DNA, 122 bp, Homo sapiens
gtccgttcattaggaattgtctggttgatactgacaagagcggaggagaactctgcatagcggcgtgtgatctaggagagagtgggaaggaaaatcacacccacctcctggcccaaccaaca

SEQ ID NO: 264320 - DNA, 122 bp, Homo sapiens
ctggggaggaaagggaaccacagtatgtgtgttggtttctcttctatctgaaagctctttcgcccttttctgcactcaggcccctggctagctttcctgatgtgcctctgggattcttcccc

SEQ ID NO: 264321 - DNA, 122 bp, Homo sapiens
cagcatagatcagcaaattggcaggggcccacctaactgttcaaccagagattggaatgccgttctctacttcttgccagcatgcctgtctctatcagagcataccccttctttggttttca

SEQ ID NO: 264322 - DNA, 122 bp, Homo sapiens
acctcgtgatccgcccacctcagcctcccaaagtgctgggattacaggtgtgagccactgcgcccagccaattttgtgtttttaaccacaattttaaaatgtaggccaggctcagtggctca

SEQ ID NO: 264323 - DNA, 122 bp, Homo sapiens
ccggcccgcacccgccctgccgggctcctgctccattgctgccccagcccacgtccctcacggctagaccctgagtctgtcacccgttggcagcgcccagaatgggccaagcaccctccccg

SEQ ID NO: 264324 - DNA, 122 bp, Homo sapiens
atttcaggtagctgcgacgggtgacaacttctctcccagccccctacaaaagagacctggcgcgaggggagcgaggccgtgagatgccagctggggctcctgcgggagcgcacccggagatc

SEQ ID NO: 264325 - DNA, 122 bp, Homo sapiens
cgggcacccgcgaaggccggggacaactggtcacggggcagtgggggggtgagcttgttccgcgcggaggatcaactcaaagcctaggggattagggaggggagggcgcaggtcagagcggc

SEQ ID NO: 264326 - DNA, 122 bp, Homo sapiens
attttctccaccacagtgcacacactggaaggttgcctttattatatccatttctgtattcgtaccagcacctcgcaaaataatgtgagtatggtaaggctccatagatgtttgcaaaattt

SEQ ID NO: 264327 - DNA, 122 bp, Homo sapiens
gctgatccgcaagggcatcccccaccacttccgggccatcgtgtggcagcttctgtgcagcgccacggacatgcccgtcaagaaccagtactccgagctgctcaagatgtcctcgccgtgcg

SEQ ID NO: 264328 - DNA, 122 bp, Homo sapiens
catttggtaacagtggcattcatcactcattgataacagtttttcatggggcacagtggccggtggagcctctgggatcaaggagtgacaatgtcacagtgttctattatttgcccggttct

SEQ ID NO: 264329 - DNA, 122 bp, Homo sapiens
attatttagctgcctaacagatcctaacaagagccaaatgaagcaggcggcgtccagccgcgctacagagggatcatcgcgctgttatgctctcatacatcactgtcaacttaatttgttgt

SEQ ID NO: 264330 - DNA, 122 bp, Homo sapiens
tccggagccgcagcagactcggcggggcccggagccccacgcccccggcccgcccctggccgccacttgtttactccccggcgcagcctagtccgaccctggggcccgcccccgcccaccgc

SEQ ID NO: 264331 - DNA, 122 bp, Homo sapiens
aagagctgtggcgctacagcgggcggggacatggggtgcgcatgcgtgcgggggggtacgcgtgcgtgcaagtgcgcgtgcgcgcgcaggaccgctgaggcgggagccccgaatgcggttct

SEQ ID NO: 264332 - DNA, 122 bp, Homo sapiens
aaatgaaatggcatggatgcagaccagttaaaactaccatccaaatctgctcatatgaaacgtcattcacaaaatcagagaagtactctctcaacagtcagataagttttattccttttagc

SEQ ID NO: 264333 - DNA, 122 bp, Homo sapiens
attctttcagccaagagggagaatcagagatgtctgcatggaggaagtgacatttgaactcgaccttagattaacaatgtacctcttcaggaaaggtcaaggttattgaaaatcagtaaagt

SEQ ID NO: 264334 - DNA, 122 bp, Homo sapiens
tcaacgctccagaagcccccagcggcccccggcagccaccttcctccctgcagaggcacccggggtctgcgcgtgcaattcccgcgctctatctagcactcactgtcacctgctcacttcct

SEQ ID NO: 264335 - DNA, 122 bp, Homo sapiens
gtgtggcgtgcaaactaatatattcacctgattggcctccacacgtgagggggacgcagccgggcctcctcgagtcccgcgttccttctgtgagggggacgcagccaggccttccgggcctt

SEQ ID NO: 264336 - DNA, 122 bp, Homo sapiens
tcccacctcccctgaggggagcaccgcctctgggggcagtcaggcactggacaagcccatcgacaatgacgcagagggcgtgtggagcccggatattgagcagagtttccaggaggccctcg

SEQ ID NO: 264337 - DNA, 122 bp, Homo sapiens
tggaggcacagttcattccggcttccagaagtggagccactctgactccaacctcagcagcgtctcccacccccacctccccggccctcctaagaggcggtgggtcagtccgccggtccagc

SEQ ID NO: 264338 - DNA, 122 bp, Homo sapiens
acgccacgccccggaagtgacgtacatctctgcacgttctcttccggccggagtcagtggcggggttctcgccggtcctgcgggtcgctgcttggctgtgggttagcagcaccctgagcgga

SEQ ID NO: 264339 - DNA, 122 bp, Homo sapiens
cagatgaaatatttaccaaatatatacctgcagcaaacagtcaaactaaaataagaaaaacgatgtcattttccagtagtatatggaattcgaagtatataggaaaaacctaatatatgtgc

SEQ ID NO: 264340 - DNA, 122 bp, Homo sapiens
ccggtgggggggggtcagggggtccctgctggggttgagctgacctggagttttgggacacggctgacgacactctacccgtcggggtgcagctgtatggcctttcagaacactgcctgtcc

SEQ ID NO: 264341 - DNA, 122 bp, Homo sapiens
cctggcgaggaggggagagggcgcctggctgggcgctgggggccccaggccggagggaagcgagggtccctcgggaggcagcgcagggaaggaacgcgaagggggaggggagggcggcgagc

SEQ ID NO: 264342 - DNA, 122 bp, Homo sapiens
ctgctccccttgttttcaagtgcaagttccatgtttccgtgctgggaataaggccagccccgggtgccaccatactcgcctgatgtcttaccccgacccgcgccgccgagagcttgcggcta

SEQ ID NO: 264343 - DNA, 122 bp, Homo sapiens
tctgctgccccatttccagtgtcttcgcgcccagccagccggcgctgggccacaccccgccgggggagaccacctggtgtttcatcacctcgagcccttggacttcagccagtcacttcgtt

SEQ ID NO: 264344 - DNA, 122 bp, Homo sapiens
ggcgctcacgccggagccccacggtagaaggattgggggtgccggaagcaccgcaccgtgcgaggccaaaggtgcgcccctccagcacccaccaaaacaaaagacttcacaaggctcaaagg

SEQ ID NO: 264345 - DNA, 122 bp, Homo sapiens
tgaactcctgacctcaggtggtacgcccgccttggcctcccaaagtgctgggattacaggcgtaagcccccatgcccggctgattatacatactacatagcagacatatctgctcagtttct

SEQ ID NO: 264346 - DNA, 122 bp, Homo sapiens
cctctcttctcccctcccctccctcccctcccacagtcctcaggaggaggaacgccgctgcgttctaagttctcccgggccctctggccccgaggactcagatcccggccgcgggagagggc

SEQ ID NO: 264347 - DNA, 122 bp, Homo sapiens
gcctgtatttttccagaactgatggccaggaccatgcttgacttttggcttaggatggcacgcataggaagtaggcacttaggctttgcaggaacgctgctaccctggggaattccagacaa

SEQ ID NO: 264348 - DNA, 122 bp, Homo sapiens
gtctgagagaagggtggaaacacggtagcccgagagacacccagagggctgtgtgggctacgcgacttcccgcgtgggtggaggggtcgggcagggtccctcccggtccggggccgcttctc

SEQ ID NO: 264349 - DNA, 122 bp, Homo sapiens
attgttttgaaaataatttgtcaaagtgtttgaggtttttttacagcaagctccataattcggtaactcaaaattatgttcctaatataaaaatgtcatttggaggtttaattatttgtaat

SEQ ID NO: 264350 - DNA, 122 bp, Homo sapiens
cctcccaaatgcacaggacgcgggctgtgtcgggaagctatccatcacagctggctgacacgcgtgggcttagtgtgtatccccctgatccatcgaagggctggatggttttctgggaagtg

SEQ ID NO: 264351 - DNA, 122 bp, Homo sapiens
gccgctcgggcttgccttcggctgtggcttggcggtagctttccagccaggagccgggtccgcgctgccaagtgaagctggggaggggggcggggaggcggggcggggagagcgccgcgggg

SEQ ID NO: 264352 - DNA, 122 bp, Homo sapiens
ccctctctggtcaaacaacatactaaagaggcgaggcaatgactgttggccagttctcaccggggaaaaacccactgttaggatggcatgaacatttccttagatcgtggtcagctccgagg

SEQ ID NO: 264353 - DNA, 122 bp, Homo sapiens
ctgccgtcagaacaggacctgtgcgaggcctcgcagatgccgggagccgggcggtgctctcggtgcttctcatcaaatccactggctcttcgagaggaagcacatgtcacagcccagctcaa

SEQ ID NO: 264354 - DNA, 122 bp, Homo sapiens
acagagaggcagagtaactggtcccaggtcacacagccagtctgcagtggactcaggagtcgactcagcatctttgcctccaggagcccctcttttaactagggcctcatggttgactgggg

SEQ ID NO: 264355 - DNA, 122 bp, Homo sapiens
tgataggaggtatttcagtgcaattttgagggtagtgcacagattgataactctggatcccgctggtttgtttatgggtgggaccacctaagttgactagggcaggcctatggcatatttcc

SEQ ID NO: 264356 - DNA, 122 bp, Homo sapiens
agggttctggccttcaaaatttctagatttcttgtttctctcacgtacagttcagagtctcggaagcatggtatgagggccttgtaggaaggcacagattatatggtggaggcaggcagtag

SEQ ID NO: 264357 - DNA, 122 bp, Homo sapiens
ggccctgattacaggaattaaaatagtgtgtgttggctccctgctgctccccagcaggaccgctcactcataattcctttgcatctagtctcagcaggagaagattgacagcattgcagacc

SEQ ID NO: 264358 - DNA, 122 bp, Homo sapiens
ctctgttttacatagccagtttaaaaggccctcacattctgatttcctctttcagaaaatcgagagccttggttacaaccgacttatcctgcaaattggtagaggaacggtggtacctgaac

SEQ ID NO: 264359 - DNA, 122 bp, Homo sapiens
atgggccttggcttgtcaatgcactcatccgtggatgcgcatccgggtctatccacctctcggctcctgtgagcacaacgctgtgtgtacattgcgcgtctgtttgaatccctgctctaggg

SEQ ID NO: 264360 - DNA, 122 bp, Homo sapiens
cccccctccaggcaccctctccacctgtaaggatgtggtctttaacaagtgcctcttggccgggcacagtggctcatgcctgtaatcccagcactttgggaggctgaggcggggggattacc

SEQ ID NO: 264361 - DNA, 122 bp, Homo sapiens
cagccctcccccacccttccccctgagccctcccaagccacccacccacatgggcgtggtcgtggcccctaagcaccctcagactttgtcacagagggcaaggtgggcggggcacgcacact

SEQ ID NO: 264362 - DNA, 122 bp, Homo sapiens
agctagagccaaaaaggactgaaaaaaaagacttttcatagagagataggtggacagttacgctctggctggcatgcccactttgcctctgctgttgaacaaaaggtccccatgcaaggtca

SEQ ID NO: 264363 - DNA, 122 bp, Homo sapiens
caggccgccgcggggaccccccctaagggactcgggaacacctgcctaccctagaagaggcggagaataaccccgtagggagttaagcggcctctgcctacagcgttcctcccgcctccacg

SEQ ID NO: 264364 - DNA, 122 bp, Homo sapiens
tgcttctcgggaaaagatctttacgctaaaaataattaaaaccataaagcatgtaactcccgacgacagctctctctaaggaggatgtgtgtgttaacagtggattgcagttgtttccaggc

SEQ ID NO: 264365 - DNA, 122 bp, Homo sapiens
ttcacctgcgggccagggaccacgtgcgtattcaggacccagtgccgccacagacagccacgtgctgggggctccacacgctccctccaggatggggagactgaggcacagggcgaggggaa

SEQ ID NO: 264366 - DNA, 122 bp, Homo sapiens
tatgatagaaacatgttcaaccaatagccacaaaagtagtagcctcaggagactcattctcgcagtgaattgggcatgcaccaaattccaggcaagatgaggagacattgtggaagatgctc

SEQ ID NO: 264367 - DNA, 122 bp, Homo sapiens
gggaccttccctccccgagtacgtgctcagaatgctcccggaggcctgagaagcatgtctcgcccagcgcacttctgagcccccagagggccagcccggtgtgtcttcattgtttcccagca

SEQ ID NO: 264368 - DNA, 122 bp, Homo sapiens
atttgttttccaagccgaatcaaagaccagattgaagcagggtctcctgccatcccaagtcggcactaccactaacccctaatgtcttgcgaaaggcagctccatcttatttggtcaggcct

SEQ ID NO: 264369 - DNA, 122 bp, Homo sapiens
ccggggcagggcttgccggccaggggcggggcttcagctgatcaatgcgccggacagggccgccccgggcgcatgctcccggccgcaccgcgcacccctcccccccagcctgtggttctggg

SEQ ID NO: 264370 - DNA, 122 bp, Homo sapiens
aaaactgccattcccagtacctattgcacaaaaattcagccacacgaacgcctggtgaagcgctcaacctgtttatccagagaggaaaagagcaacgaattgctctcaacccgcgacaatct

SEQ ID NO: 264371 - DNA, 122 bp, Homo sapiens
ttagtctgatcagattaaactgccagaacgtatattcaactcatcactgtaactacaagccgtcttacttaggaaaccatgagttgctgccaaggcttttttttttccctccccaattcctc

SEQ ID NO: 264372 - DNA, 122 bp, Homo sapiens
gaagtattcggtgaccacgcctgcctcaatcttggcaggcccaaggccatggctcaagggcgctcaaggacctcacattccggccaggcaaacaggcaggtcggtaaatgttctctggaccg

SEQ ID NO: 264373 - DNA, 122 bp, Homo sapiens
ttactgtgcttccatgaggactgtggggcctcaaacgtggggttcaatggggagcacgaccgcttgttggtgctgatctaagatttcacaacagcagcagctacagggagagaaggctgggc

SEQ ID NO: 264374 - DNA, 122 bp, Homo sapiens
tgccctgagcagcaaagcccatggggacacctgcgtgtctgcccctctcctctatggaatcggccctccccaccttccaccccagcttttaccagattccctagcaccagtgtctgaaatta

SEQ ID NO: 264375 - DNA, 122 bp, Homo sapiens
acttctcgtggaggacgttgctctcgcggacgcgcctcacctcgtcgccgccgcggactgcggccagcactgacacagccagcatctcgcgcaagtccacggtgcccccatcggccgcggcc

SEQ ID NO: 264376 - DNA, 122 bp, Homo sapiens
agtgggctgcccctcaacagcagagagggcaggcatgggccttctgtcccttaccactcccgggccagataaaaataaaccctattaaactgggcgtggtggctcacgcctgtaatcctagc

SEQ ID NO: 264377 - DNA, 122 bp, Homo sapiens
gaagaggatgccccagaatgaaggtggaggctgctgtccactctgcagaaccccggccctcgtcacacccagaacaggataccccggaatgaaggtggacgttggtatccgcgtccgcttgc

SEQ ID NO: 264378 - DNA, 122 bp, Homo sapiens
tccacttgatccggaatgggaggaacgcaatgcgtcccgcgcggcgatctgggatagctgcgcaggcgcagcttccggctctgtgtctcgggaattatttgacgccaccggttcagccccgt

SEQ ID NO: 264379 - DNA, 122 bp, Homo sapiens
ggctggcggatcactcgcggttaggagctggagaccagcccggccaacacagcgaaaccccgtctccaccaaaaaagtacgaaaaccagtcaggcgtggcagcgcgcacctgcaatcacagg

SEQ ID NO: 264380 - DNA, 122 bp, Homo sapiens
cacgccggaaccggaactacctccgagtcttgcgtatgcattcacgaacttaaatctttccgggccgaagagaggcttgcgctcctaaccatagagagcaaaagaaaaactagagcggcagt

SEQ ID NO: 264381 - DNA, 122 bp, Homo sapiens
ctcttctcccggaacatcacaagccacttggatgtagtagaattcagtggtttgaagccccggctttaattctagctcatcattttattatctatgtggtcctcagcaagttgcttaatttc

SEQ ID NO: 264382 - DNA, 122 bp, Homo sapiens
ggaaaagctgtggctgggaatcaggaggcctgggttctagccgtggctcccccacggattcgctggcgattccagaaagctcttattgaagctgaatttaagattatttcagattgcacagt

SEQ ID NO: 264383 - DNA, 122 bp, Homo sapiens
cttgaacccaggaggcacaggttgcagtgagccgagatcgagccactgatctaggctgggcgacaaaagcgaaatttcgtctcaaaaaaaaaaaaaaaaaaagaaaaaagaccaggccggct

SEQ ID NO: 264384 - DNA, 122 bp, Homo sapiens
agaggatgcctcctgaccaaatagtgttgtggtattttctgcactttaaagtcgttgtgccgggggaatgttctcttccgaaatccctcagcaggtcagaagggctcacacaacacagagag

SEQ ID NO: 264385 - DNA, 122 bp, Homo sapiens
agccaagttcaagaaagtcaggggtctgcagcagcccagggcaggacggtgtctaggctgcgcttcctgttcttaattccaagtgttgtttggtgactttgaatcgccctctgttgtctttt

SEQ ID NO: 264386 - DNA, 122 bp, Homo sapiens
cttgaaccctgtcatgcagatggtgaacatgcatatggagaaggtggcccgaagggagatcggcaccttagccactgtccagcggctgccccccggccagaaggtcatcgccccagagaacc

SEQ ID NO: 264387 - DNA, 122 bp, Homo sapiens
cgccgagaggctcctgacagaaaaacgtgcgtggttgtccccacccctgggaggggttgccggtgccgcgcgcggccgcccagtcgccagcgctctctcctgggaggatccgctgccggagg

SEQ ID NO: 264388 - DNA, 122 bp, Homo sapiens
ctctacaaccattgggagagcgccccgggctcaagcgtggaacggggctgcaatggcaaccgctggaataacggcctcggctcccggtggctcctcaagcccgcaggggaggccggccgggc

SEQ ID NO: 264389 - DNA, 122 bp, Homo sapiens
actcggggagcggaaaccgcccagccctcccccggctccaggcctttgtcttacctgcagcgcaccgatggctgcgctctgaaacctcaggtcggttttgaaatcctgcgcgatctccctca

SEQ ID NO: 264390 - DNA, 122 bp, Homo sapiens
ggtctgaggagcagcaaatgctacaaatgcattggggagctggccgcctggcgttaacctcgtaactcagaattaattacaggagcacacactcagatctgggaagattagtgtaggagact

SEQ ID NO: 264391 - DNA, 122 bp, Homo sapiens
cctcaaggccgtctgggcgttggctttggtgcggggctccccagccgccccgctcgcgctcgctgcccccaccccacggctcctggggccctgggccctccgcggccctccccggccgcctt

SEQ ID NO: 264392 - DNA, 122 bp, Homo sapiens
gggcctgggaaatgagcgcgcgctgccagctctccagaagccaggcccagggcacgctcacgtcgagccagtgccgtgggttccagccccaggccccgtcgccactccgccagctgaccccg

SEQ ID NO: 264393 - DNA, 122 bp, Homo sapiens
gaatagactttggagaagatacacaggtggtaactgaacacgcagaaagtgtgttaaacacgcgaaccacagccccagcgagacgccaccaccagggaaatggctaaaatgtaaaaacctgc

SEQ ID NO: 264394 - DNA, 122 bp, Homo sapiens
ttcgtcgcttcgcgccgcataggaaccccgcccctagtctctcctcccgcctatcctgagcggcgcgcgcacaaatctctcccacggacccgcccaccctgatcctcaacctggcccctggc

SEQ ID NO: 264395 - DNA, 122 bp, Homo sapiens
ccggcctctgctcgctttctgcttggattaccaacagccactgggcttggggagatcggccgggccgcaggcctagccctgctgagcaggcgtttagtaaggaccacaggactttagtctca

SEQ ID NO: 264396 - DNA, 122 bp, Homo sapiens
tcgagaagggggcccacgccggccagcgctttttgctgctgcgcttgcgctggggcaaagcggaagtacgtccagctgtagcccttgtgggctgcggctgggcctttgttttggcttcctga

SEQ ID NO: 264397 - DNA, 122 bp, Homo sapiens
caaaaaagctgttagtgactgaacgcaagaattttccggttagcagacgacgggatgcagcgggcgcggcgcctgcaccacgctgggggtcccggtgtccgggctgggccgctccgactccg

SEQ ID NO: 264398 - DNA, 122 bp, Homo sapiens
atgtatatccaggttagtaagggccccagcaacatgcctacaccaacccattccaggatccgcatgggctctggattgatgtagtgctggagcctctcggggtgatacagcttgagataaag

SEQ ID NO: 264399 - DNA, 122 bp, Homo sapiens
aagacaaagcaatatctgattttaaaatccactgatctgagtttgctttcatttaccaaacgagagatcagatgagtcaactcctagcttgttttcccctgagatgcgctaagggtgattcc

SEQ ID NO: 264400 - DNA, 122 bp, Homo sapiens
ttaccacatcagtcagatgtcaaaaggcagcacgtaaattgaataagggaaggaaaatgccgggcggcctcattcacgtccggcatgttccgctattattgaaaggaaattgagaaattaga

SEQ ID NO: 264401 - DNA, 122 bp, Homo sapiens
gcccagaagaaaattaccccttgcttttaagcatttgacagaattacataacctagggaccgctgttcttggatcctcagtacttttggaggggtgtgaagatatgtgtaagttatcttcct

SEQ ID NO: 264402 - DNA, 122 bp, Homo sapiens
acctgtcctgcagtggtccagggcatgcgggagtggtgggcctcctgtgccatagtccaacgcgcggcggggcgggggtcacctcgtcctgcagtcaccatgcacgagaccccggtcctgct

SEQ ID NO: 264403 - DNA, 122 bp, Homo sapiens
acccctacctcgatgaggtcctcacctatccaccaccccagaaggctctgggtgaggctccgggcgaggcacagcgcccccagtgccacccaacaggctcttgctctgttgcccaggctgga

SEQ ID NO: 264404 - DNA, 122 bp, Homo sapiens
ccagggggcagctcctattagccagatgtggattgtcactagcccaggtcggtcccacaccgctcggagcacacagtccacactaagagatctgtgtctccccacattacttcctgcgttag

SEQ ID NO: 264405 - DNA, 122 bp, Homo sapiens
tcatatcctgcctgagcctgggccgggtggaggtgtcctgcatggagtcttgtgaaatcgcgtggactgcaacacccagcagcgcggtgagtccaccctgaaatccacagtgacccacgcgg

SEQ ID NO: 264406 - DNA, 122 bp, Homo sapiens
cccgggctgggcgcataaatcaccctggttggctcggctctccctatccctctccagacccgcttgcccccgctctcaggcccactcaggcctggttcccaggcaggcccccgccccgctac

SEQ ID NO: 264407 - DNA, 122 bp, Homo sapiens
ttgaaattgctctttggaaaccccactgtttccagtattgtgtctgcatagtggcttccacgggccgagggctcacctcattgccccctccccacatgccctagctggtctcttgaatgact

SEQ ID NO: 264408 - DNA, 122 bp, Homo sapiens
aaagggaaaggcctgtgttccttcccagttgaatcaaggcctccctcagggccaggggcccggctgtggtcagtgtggcccacgcgtgaggcctggaacggggaagcactgaggacccacgt

SEQ ID NO: 264409 - DNA, 122 bp, Homo sapiens
aggctcctggagaaagagaccacaggagtgccccacacagacagggtgaacgagcctcctcggacaggaacaccgtggatggccccacatgaagccaggaaagtcccacggaacctggcagc

SEQ ID NO: 264410 - DNA, 122 bp, Homo sapiens
ttgcaggggggctggtgggggagtcaaagagaaggccgtcacagaaaagggttggcagagcgtttggcttcggtttgggggcaagaaattgtacattctcttgccttgttttatttatttta

SEQ ID NO: 264411 - DNA, 122 bp, Homo sapiens
gagggcggtggggagatgggctgcccggggcattgagcaaagcccagttgtcacccttttcgcaggggtactggggaggcctcaggtggtggggactgggacttggcagagctgggtggggg

SEQ ID NO: 264412 - DNA, 122 bp, Homo sapiens
gctgttcgagtcggtgaatagtttgtgttgaaacctttgcaagaatgtctctcgaactcccgacggcaagtactaaacttcattgttaattaaacacttccccgtctcttttcacatttatt

SEQ ID NO: 264413 - DNA, 122 bp, Homo sapiens
cagcttgcagcgaccacccgatcccaggctgttcgctgaaggaggaggagaagcagcattcgcagccgcagcagcagcaacttgacccaagtaagtgcaaaagaaattgccccctgatttat

SEQ ID NO: 264414 - DNA, 122 bp, Homo sapiens
atacaaagtgatgtgaacgaggcttgtggaagcctgcatgatggtggatttgcactcactcgtgcatgcttaactgacctcaattgtgagcaaatctgaaagaccagcaacaaccatagaaa

SEQ ID NO: 264415 - DNA, 122 bp, Homo sapiens
ctggtgcctcaaggggaggacgaacggacctccgggcttgggccgcggcctccttcccctcggcgctccgccctgagcggggcaacaactagaaattagccaaccccgggcggctgccgggc

SEQ ID NO: 264416 - DNA, 122 bp, Homo sapiens
gcactgggctgggtgtctgccttccctggaggctgcactgcctgagccggtgacaggctgcggactggcctgtcgggcggcagggcagagcgagcaggaagcgctggttccttctccatttc

SEQ ID NO: 264417 - DNA, 122 bp, Homo sapiens
ccggccgaacccagacccgaggttttagaagcagagtcaggcgaagctgggccagaaccgcgacctccgcaaccttgagcggcatccgtggagtgcgcctgcgcagctacgaccgcagcagg

SEQ ID NO: 264418 - DNA, 122 bp, Homo sapiens
tcgcgcggggccccctctccgtccctgcccaacccgcggaggcttacctcactctctcttcgggttgcattcgccataagagagccggtagacccctgaaatcccgggaccgcctcccacgc

SEQ ID NO: 264419 - DNA, 122 bp, Homo sapiens
ttttttacatttttaacatgtaaattaaatactaggatactgaatatcacatatgtggctcgtgtcatatttctattggacacactggtttagagaatgggaagaatagccagcaggggatt

SEQ ID NO: 264420 - DNA, 122 bp, Homo sapiens
ggctgaggctgaccgcgggcttggggacagggtctcccacctccagtggatacacagctgcgacctggacccggaccggagcctcttcgcgcggggatgaacataccctacgatggcgccag

SEQ ID NO: 264421 - DNA, 122 bp, Homo sapiens
cgctctgccgccggctctgtgcgcggctgggccgggcagctccaagggttccgagagctgcgcgtcttggggctggggcggaccagcccagcccagcgggcactgatggggtcctgggagcc

SEQ ID NO: 264422 - DNA, 122 bp, Homo sapiens
atgtttttatttatctctttggacctcggactttggactgatttttaggtgtagccagctcgctgatccctcctgggtgcccccatggccaaccatgaccagcaggggaccctccaactctg

SEQ ID NO: 264423 - DNA, 122 bp, Homo sapiens
aaaatgcagaaaacccgcaggatgggagttggggttccttacgctgtcacagcccgggtgcgacactgtcttaggaccctctgtgctagccccaaaagaagagagaggcggccgcagggctg

SEQ ID NO: 264424 - DNA, 122 bp, Homo sapiens
aagaacctaaacattccagagcatgtctgggaacataccaaaaaaaacagtctcgtcgcacgcagtaggcaaagggcaaaaaaaaaaaatagcttaaaagcagtttacagatgggtggtaga

SEQ ID NO: 264425 - DNA, 122 bp, Homo sapiens
atcataaaacgtaaaacatcacaaacaaaaagtgtctctttacaaatgctcacggtatgacgggcagccctccaggagtggcgtggaggccggggcactcagtcacgtgtgtgccgggagca

SEQ ID NO: 264426 - DNA, 122 bp, Homo sapiens
gctccctcaggcctccccacggtcatttcagctggacagaggcagcagcgacagtgacagcgatagtggcagcagcggtggcagcgagagctatgcggggccagggtccacccctttctagc

SEQ ID NO: 264427 - DNA, 122 bp, Homo sapiens
ctctgtgtgccagcgcctgtagaaaaacagttattctcttgggcctcacagaatccttggcggtaacagcactgtggccattgtgcagattaaaacaaacaaactgaggttaaacagccagc

SEQ ID NO: 264428 - DNA, 122 bp, Homo sapiens
cagcaactgagtttcctaggcctcccagaaaggccagtgggagacactgggggtcctcagcggggtgggaggacggggtaagccaggatatttctcccactctggctgcgccatgagcaggt

SEQ ID NO: 264429 - DNA, 122 bp, Homo sapiens
taggattccctcggcacctttgtctcctacctcctgggagatgcagtccccactgtagagcgggaggcgcaggcggctgaggaactgggggtggtggcggtgggaaagacagggaagattgt

SEQ ID NO: 264430 - DNA, 122 bp, Homo sapiens
ggggggacggggaggcgccggacacccgcgcttggggccttcccctcgcaggaggggccgcggtaaagatggagcctccgcccgagccccacaacatcgccgccgctcgcagcgaacaaaga

SEQ ID NO: 264431 - DNA, 122 bp, Homo sapiens
cacagcagcatcatttacagcagccaaaaggtggaaacagcccaggtgtcctccggcagacgggtggattaacaagcggtctaactgcgccatggggtataatttaggcttaaaaaggacgc

SEQ ID NO: 264432 - DNA, 122 bp, Homo sapiens
gcgcccttggacgcccggtccttcagttttttgagcacctcaagcttctggcctacaaaacgctcccggctcagctggagctttctgcgcccgggtcctagagtcgcccatttctctaaggc

SEQ ID NO: 264433 - DNA, 122 bp, Homo sapiens
aggctggcgggctagggctgagtgcagcgcctgcttagagaccttcgggagaacttctgccggaaccccgacggctcagaggcgccctggtgcttcacactgcggcccggcatgcgcgtggg

SEQ ID NO: 264434 - DNA, 122 bp, Homo sapiens
caactttcctggaaggaaatgttcgcttaagcagcatcttgtaattcatctcttgatttacgccgggcatttcagtatgttcctcctccatcccactgattagatccaggcgctgggcctgc

SEQ ID NO: 264435 - DNA, 122 bp, Homo sapiens
cgcgcggtctgcccccgcgcaagggtagatgggttttggagtctcgggtgtggctgttgacgttacaggcccttggatcgcttttcaggccagaagaactacaatccccagcaggcaccgcg

SEQ ID NO: 264436 - DNA, 122 bp, Homo sapiens
cccaccccagtccggcctccgccagtgacgtcaccgcaagggcggaagggaagctaaagtcgttaccatggtgaccgcgacacactcagaaacgtctactagtgacggtcaagccacctaca

SEQ ID NO: 264437 - DNA, 122 bp, Homo sapiens
cccgcatcctattggcttcttcgtactcctcccggacagaacgcagagcgagggtgagagcgagagagagcgagcgagagagagagctagagcgagagagcgccagggagtgaggagagagc

SEQ ID NO: 264438 - DNA, 122 bp, Homo sapiens
gcgccagggtcacagcgaatgcgcacctcgctcctccttacgctctagccctccccgtcgcgtggcgtctcagggccacctctgccctggctctccctggcaccagggaatcggggtgtgtc

SEQ ID NO: 264439 - DNA, 122 bp, Homo sapiens
cccaggtcccatgctggcagaagcggacccgggccgagggatcagccctcccacttccagcggaggagcccttcgcaaccctagcctccagcccggggcgaagtcctccaggcccgcggggg

SEQ ID NO: 264440 - DNA, 122 bp, Homo sapiens
tacagaaaggcccaaagattttcttcatttctgctgactcttcaatgaaccagaggggcacgtgtaatatttccgctttcggttactccccaccccacacaccttgtagacactttgtcaaa

SEQ ID NO: 264441 - DNA, 122 bp, Homo sapiens
acatcccgggcgacccgcgctcggcccggggagcggcggagccccagggccgggcccggccggagggagccgccccacgcccgcgcctcacctgctttctcgatcttgccggacatttccgg

SEQ ID NO: 264442 - DNA, 122 bp, Homo sapiens
ggtccgccccctggccgccccttggggaatgcaaacttcgtgttctgctgcggagccagacgcctgtattgggaagtggggagaatcaaggcggggaaatcggacttttgggtcgctggggg

SEQ ID NO: 264443 - DNA, 122 bp, Homo sapiens
aatttcttaataattttctatccttttaacttatgctttcctaatgacttaccacctaagcggccgaataagataacacctaagaggcggaataagataacacctaagaggcggaataagat

SEQ ID NO: 264444 - DNA, 122 bp, Homo sapiens
cccagcggccggactcgctcatccttgccgattcttctgtccccggctggggtagccccccggtccgcagcaggaactgaggcatagctggggccccgcctcatcccccgaactggtgagga

SEQ ID NO: 264445 - DNA, 122 bp, Homo sapiens
tgtgcgaggagtggaactcgttgtcggtgaagcggcacagcaggcaggtcttgcccaccccggagtccccgatcagcagcagccggaacagcacatcgtactgcttcgccatgactggggcc

SEQ ID NO: 264446 - DNA, 122 bp, Homo sapiens
cacctgttggagggaacgctaggtcctccctttggctgtcacttgtccatctgcagcaggcgaggactgtggccttggaccatgggagacctggagttccaccacctgttctgggagtgggg

SEQ ID NO: 264447 - DNA, 122 bp, Homo sapiens
tacttcaaagagcattaaagcctcggtcagacccacggggaggagagaggatcttgaagccgtggactccagactaggaaggcacatgtgtaacgaagacacctggacagggagctctacta

SEQ ID NO: 264448 - DNA, 122 bp, Homo sapiens
gacttcaaaaggttatttgcctgtagagcagtagcaatcaaattaagcaatgtccaaacacgagaatgaaaattataggtcaatgaaactgccgtgtgctcaaggtctgccagcacaccacc

SEQ ID NO: 264449 - DNA, 122 bp, Homo sapiens
ggaactgtgaccacacgcaaacacgcacgcacgcacgcacactcgacgcgaccagacaggcgcgtgcgcgtcagtcgaaaactccgcccctcacacgccctcgccccgccccgccagtacct

SEQ ID NO: 264450 - DNA, 122 bp, Homo sapiens
tttagcagaacacaaatgtaacaattttcttcttgttaattgcatctcctgacatttctgcgcgttgggggaaaaaaagaagatgaagaagtaagagctgaaagaagagagaagccccgccg

SEQ ID NO: 264451 - DNA, 122 bp, Homo sapiens
gaggaaacggaagatttgaaaagattctgccgcccccagaaactgtgcgacccgtgccctcgcagccacccccaagaagctccgtctttaccaacgcgagcagcgcagcagcttctccaggc

SEQ ID NO: 264452 - DNA, 122 bp, Homo sapiens
gcaagagaccctcaacagataccagcgtgtgtatagaacttccaaatgctgagcccagagcgttgtctcctgcccatgagcaccacagtcaggccttgatgggatcttctagggagacaaca

SEQ ID NO: 264453 - DNA, 122 bp, Homo sapiens
tgccccctcctcccctctcgattccccttgagcgggctggggcgccctgcctggtttcagcgcccgttccagctgggagattgggattcagccctgatgtggattctccagccatcatcctg

SEQ ID NO: 264454 - DNA, 122 bp, Homo sapiens
acccctcgggcagaggagaaggagacccgcacagacgccccgtcccgtccccagtgcggccgtcttcgccctctgtggaccttcttggccgtggattgactattcagaggctgcctgctcct

SEQ ID NO: 264455 - DNA, 122 bp, Homo sapiens
ggccaggcagctctctgaaacctctttaagagggtattaatcccattcctgaaggagagccgtcatgacttaatcactattaaaaggccgcacctctttatttatttatttatttgtttatt

SEQ ID NO: 264456 - DNA, 122 bp, Homo sapiens
ttcattcattcacccaatgtcctaatctgttgagacctactgtgtgctaaagatgcaaaacgctccaataagacagataaactcacgatcttcatggagttaaaaatgaaaagaaaaaacaa

SEQ ID NO: 264457 - DNA, 122 bp, Homo sapiens
tccacctggctcccaggtggatctgacggccgctgtgcctctcggccgcgcgggacctttcgagggagccttgtggtcatgtctgctggtcacaggagctgtcctggccctcatggccatgt

SEQ ID NO: 264458 - DNA, 122 bp, Homo sapiens
aggacgcttctcctttgattcgcagacccgggcgcagccggagaccgcccggcaccgcggcgtctgtctgtctgagcgcctactcgcgggtcctctgctgccccgagtgaactctaggcgca

SEQ ID NO: 264459 - DNA, 122 bp, Homo sapiens
tggggttacaggcatgagccaccacacctggcccttctcttttaaaacattctgtatccacgctgaccaatatggtagccaggagggatatgaggctctgcaacacttgagatgtgaccaga

SEQ ID NO: 264460 - DNA, 122 bp, Homo sapiens
gtcagacgaactcagtgtacagccgccacgcgccacccagccgcaggctccgagtgccggcgcgggccacccgggtggtgcagaagctgccctcactggccctgccgctctaccagtacacc

SEQ ID NO: 264461 - DNA, 122 bp, Homo sapiens
gggcaggatgcgtgtgcacacgtgggtgtcggtgcgtctggggcagggcgcatgtgcacacgtgggtgacggtgcgtctggggcagggcgcgtgtgcacacgtgggtgacagtgcatctggg

SEQ ID NO: 264462 - DNA, 122 bp, Homo sapiens
ctggagatgtgaggtaattctccggcaggcctgcgtggcactagtgcgcatgcgtaaaggcgcgagggctacaaacgcggcgggaagcccgccagggccacgtgcggccgtccaggcttgcg

SEQ ID NO: 264463 - DNA, 122 bp, Homo sapiens
ggctgaaaccctgaactgtgtggtccatgggtcccgttgtggggacaccagcctagtgcacgggggaggtggggggcaaaccctctgtggcccacggcagctcacgagaggaaatgcaatat

SEQ ID NO: 264464 - DNA, 122 bp, Homo sapiens
cccacggcccggccccggcgccgtgaggactctcatgcgtcgggcgcggcggcgcctccccgcatccaagcctctcccaaccgcctcgtcgcactcctcaggctgagagcaccgctgcactc

SEQ ID NO: 264465 - DNA, 122 bp, Homo sapiens
tgggtctggttggtgaagcgggtgaaggcgtccatggcttctagcccaaaggccacgagtcgcacggggctcaggcgtgggtcctctggggcccgtcggatccccagggaacggtcagtccc

SEQ ID NO: 264466 - DNA, 122 bp, Homo sapiens
tattccactggggaccaaagggagcccatgctttgaatacaatttttgaatcattctattcgtcctgtttagccctgaacatttcaattttggtggcagtgccagaatatgcgaataaagga

SEQ ID NO: 264467 - DNA, 122 bp, Homo sapiens
ggcctgggcatggcattctcccagtcccacgtgatggccgctcggcggcaccagcacagccggctcatcatcgaggtggacgagtacagctccaaccccacccaggccttcaccttctacaa

SEQ ID NO: 264468 - DNA, 122 bp, Homo sapiens
ttgaattcctgacctcaggtgatccatccacctcaacctcccaaatgctgggattactggcgtcagccaccgcaccaggcctgagaatttcatctattaggtgtgtgattaaataaaacaac

SEQ ID NO: 264469 - DNA, 122 bp, Homo sapiens
ggctgggccttgaagaacgtgaaggagtcacccagctagagagggcaggagggtgttccacgaagtacaaacatcatgaacagaaagtcaaagagtgaaagtgaagggaggattggggagca

SEQ ID NO: 264470 - DNA, 122 bp, Homo sapiens
gcgcgctcggcgccccaccccccccgaacttcagccgatgggaccgctgctgccgaaccccgagctgctggcttctcaaactccgctgctctttggttcagggctcctggaacagacgagcc

SEQ ID NO: 264471 - DNA, 122 bp, Homo sapiens
gacccccaataagttacacagctcacatcagcctagggagcaaaaccgagtggtctgccccggtgttttttccccaaacgccacaaacatatttccacaaagtacatcaaaattgggggccc

SEQ ID NO: 264472 - DNA, 122 bp, Homo sapiens
taaggccacgtgatgcgtgcgtctagcacccacgagtgaggagccggaaacattctcccgcgccagctctgcggggttctggctacttgtgcttgggtgtaaatgctcgcattgcgttttct

SEQ ID NO: 264473 - DNA, 122 bp, Homo sapiens
ctgtcctgatgtgaaagtaccttttaatgatctcaagttcatctcatctcctatccagaccggaaaacttgaggatccttctagagttcttttccttgccaatccagtttactggtttttga

SEQ ID NO: 264474 - DNA, 122 bp, Homo sapiens
tcctggccgcagagccctcgctctcaatgggagggggtctatgtgagggcatcggctgtgcgggggcgtgtccccgcgctgaggccgccaatctcctccagtcccacgtggacagcgactcc

SEQ ID NO: 264475 - DNA, 122 bp, Homo sapiens
gcatgaagaccaaaatgtcagagccagcgtgataaagaattatgacagtcaggctggacgcggtggctcacacctgtaatcccagcattttgggaggtcaaggtggggagatcacttgagat

SEQ ID NO: 264476 - DNA, 122 bp, Homo sapiens
gacccgtggggttcccaagctttcctgttattttttttttcttttctttttagacagtctcgctctgtcgctaaggtaaagtgcagtggtgtgacctcggtttctgtaagctccgtctccca

SEQ ID NO: 264477 - DNA, 122 bp, Homo sapiens
aatcttatcaagaagaaaaatcacttcaagcgtagactggtaatggtcgaaaatttaaagcgtggctcaggtcgtgatctacaattgcgccacctcgctggaaggacggcctgggctgcgag

SEQ ID NO: 264478 - DNA, 122 bp, Homo sapiens
acacatagtggggctgtttcatccacacacgggcaggtattatgtcaggcaggaaggacacggatgcagaggccctggagactgaagagcggcctagggccccagagtgctggaggagaggg

SEQ ID NO: 264479 - DNA, 122 bp, Homo sapiens
gccggacctccggtctatttctccctcctggatccaccccgacttattaagcagttagaccgacccttccatactcattcaaggcagtgcagagcttttgctcccctgcccagtggaatcta

SEQ ID NO: 264480 - DNA, 122 bp, Homo sapiens
tggggctggggctggggctggggctggggctggggctggcgcttgggtccagtgcagctgcgcgtcttcctccatccggcgccagcccgagtccgcaccttccatcctttcgtcggctggac

SEQ ID NO: 264481 - DNA, 122 bp, Homo sapiens
ggggctgaccgaggggaccggaagtgcccgtgatcctaatcctcgggaaccatctggcggcgacttgggtccactgcagggggctcccgagctgcgcccagccgggagcggccccaccctcg

SEQ ID NO: 264482 - DNA, 122 bp, Homo sapiens
tgcatgtcttgataataaaatttacttcctgtcagcctgcctgctggctcccctgtcctgcgcgcatccattcctgattcctgcaactaggtctgctgtggggggatgggcacccgggctgc

SEQ ID NO: 264483 - DNA, 122 bp, Homo sapiens
ccaatccactagttccccattagtaggcagaagcagagtggtagtttttgagccattttccgcatagtcgccctgcacgcacttgtgagctaagctaatatgattcaatgcagaacacaaca

SEQ ID NO: 264484 - DNA, 122 bp, Homo sapiens
accctcattccacgctacagaattcctgactctgcttctccttccaccatgcattggacgcgtttgcagtgcaaacggtgatttactgggaatgtttaataacagacttttcttgtcttctc

SEQ ID NO: 264485 - DNA, 122 bp, Homo sapiens
gacggggccttttagtgggaggagttgccattacactacgtccagtaagctccagactttcggaaaagattggtggacgggaatgctgtcatggatgggatcttgccaagaaccatcacgtg

SEQ ID NO: 264486 - DNA, 122 bp, Homo sapiens
atcctacctgcggctggtgtgggacgctggcagcctccgaaaagcgcggggactgacgtgcgcctgcgcgctgctgtcgccctcggactcgcgccgtacgtgcgtgcgtgagtgcgtgagtg

SEQ ID NO: 264487 - DNA, 122 bp, Homo sapiens
tggcctgatccggagacgcccttggtagtggccactcacagactgtgattgcgaggaccccgatggggccgctgtgtgtgcctgggaactgcaggtgtggatgtcagaggcaaagcctcccc

SEQ ID NO: 264488 - DNA, 122 bp, Homo sapiens
aatcttttacatggccttggtctagaggaggcaggcttttagaatcatgttttgttaatccgcttcactaaattggaccttcacatatctaaaaagctctgaagtgtttgtatatttgaaat

SEQ ID NO: 264489 - DNA, 122 bp, Homo sapiens
tcacctgaggctcctgctctggagatttccaaacaccgatataggggccagtgtggacagcgagcccatggtcagtctcttcccctcactgccttaccccctgcagaccccttcattggagc

SEQ ID NO: 264490 - DNA, 122 bp, Homo sapiens
tagagggtgctctggaaggcagggccaggctggcctcagctctgggtcccacagggggttcgggggaatgaatgaaagaatgactgagggagaggatgggacctctgtctgtttctgtccca

SEQ ID NO: 264491 - DNA, 122 bp, Homo sapiens
cccgaatcgcggacgccacccccgcccgaacgctggcactctctcggcggctccctggcccgcccagatgcagcaaactcctctcacctgcattgacgccatgatggaaccatccccccaag

SEQ ID NO: 264492 - DNA, 122 bp, Homo sapiens
atcggaaacgagaagtcggtgcactgacagcagcagccagatttacctaaagggacttcacgacactgaatataaaatcagagttttataacacagaaccccaagtccaaactttgcccatg

SEQ ID NO: 264493 - DNA, 122 bp, Homo sapiens
tcccccctgcgtccccagccttgcctctgcaggctgtgaagctgccccacccccctggggcgcccctggccatgccctgccggaccattgtgccaaatgcaccggccactatccccctgctg

SEQ ID NO: 264494 - DNA, 122 bp, Homo sapiens
aggagaggtgcagagccaacgcttgaggctaccatttccatcctccccaggcactggtagcgattaagtttcagagtccaaagcactggcgataaatggcagtagaactcagtgtaacctcc

SEQ ID NO: 264495 - DNA, 122 bp, Homo sapiens
tggcatttcctccgcatagtctattcctgggccctgggccctgggccagccagtgccttccgccagaccagggaggggaggtgcttcttctgtcctgggaccctggaagctccagcactgac

SEQ ID NO: 264496 - DNA, 122 bp, Homo sapiens
caggggcagagcccagcccccaccctaaacccggtggaccccagaaccaggaggtagatgcgcagcctatgaccacatcacagtcaccctcagtgctcaggagcaagcaggattcctgcagc

SEQ ID NO: 264497 - DNA, 122 bp, Homo sapiens
ctctgcagggcatgcccactgcatgtgctgggaggctctcctacatccaatgggcagatgcgcagtctccacggaggcctcaggcctcggtgtgagccagggctgcttcaaacatgtcggct

SEQ ID NO: 264498 - DNA, 122 bp, Homo sapiens
agagatacggagcctggccaagagctgagcagtgggtctgagacccccaggggcattccacgaacccccgggcaggggcctgctgggctctgagaggtcagcagatggctgtgaggctcggt

SEQ ID NO: 264499 - DNA, 122 bp, Homo sapiens
gaagaatttatttattgaattcttcatttccacacttaaaggacaagggcaagccttgttcgccattgtattcctatcacctacacacaaagtaagcactcaacgaatatttattatgtaag

SEQ ID NO: 264500 - DNA, 122 bp, Homo sapiens
gtgtgtgccccgctgcccacagcgtgtgaacgtgagttggggaccatgtggcccactgcgcgctgggtcccgtccctaaagagcattcttggactgtctaaaattccctttgcagaatttgg

SEQ ID NO: 264501 - DNA, 122 bp, Homo sapiens
ttccccgcgtcgccccctgcgcaccgagttgtgtcttttggccggaggggcgtggagagccgcccgaaatcggcgccccgcgccgggagcagcccgcccgccatcacccccaccccccggcg

SEQ ID NO: 264502 - DNA, 122 bp, Homo sapiens
cctcaaactgcgccgagcggttggtgaagcaggggccgctgcgcagggccacatactggacggcgtcctgaacctccagcaccagcgtgcggttctcactgcccagggcgttgaaggcacgc

SEQ ID NO: 264503 - DNA, 122 bp, Homo sapiens
ggattacaggcgtgagcctcagcgcccagccaagttagccttttttaaacgtcctgtctccggaggttgccgaagttggttttcttcggcctccttctctctcccaggcccagggctgggac

SEQ ID NO: 264504 - DNA, 122 bp, Homo sapiens
ctttagaccagaaagggagctgagtgggaggcctggcaggagagagtcgcaagtatgaatcggggcttttggccctgaggcaataatgatgtcacgccatctctccaatgtggcctcccagt

SEQ ID NO: 264505 - DNA, 122 bp, Homo sapiens
gagattggctttggggggcttccattgtctcggagctggagtgggacctgacttgtaggccggccctgcatgaactaggaaggaagccttgggaatgcacaagccggagtgtggtctgatca

SEQ ID NO: 264506 - DNA, 122 bp, Homo sapiens
ccggcgctgtcgtaaactgctctcccgcttcctctgggttgggcggaagaactcacgagccgtaaagcgaaggtccacccggaaatccgttactgcgtttcgccaggcgtcctcattagcct

SEQ ID NO: 264507 - DNA, 122 bp, Homo sapiens
gggaggtcgaggctgctgggagccgtgatggcactggtgaacagccactgccctccagcccgggcatacagccaggcatggggctttgctttcacggaataacagccccgtgttctggtcac

SEQ ID NO: 264508 - DNA, 122 bp, Homo sapiens
gctgtctgtgatgtgctgggcacagcagcattgaggtggattctgtgcctttctgcagcacggccctggggtagaatttatggaaggccctgtgggggtctgtggctccacggccctggggt

SEQ ID NO: 264509 - DNA, 122 bp, Homo sapiens
tacaaacacaggttaaaaaaatatatatttgtaatactgcttttggtgtagggtgaggcacgataaagagactttcattcggtttgtcaatcagtgatacttaggtctgaataggcaagtgg

SEQ ID NO: 264510 - DNA, 122 bp, Homo sapiens
ttccgtgcccagagccctcctctcccacctgacaggaagcaaagggaagctccatctttccgtgttggttaattgtggccccggaggttaccatgacttaggaacaacaggacatggggtcg

SEQ ID NO: 264511 - DNA, 122 bp, Homo sapiens
tggccggggaggggagacgggactcgaaccctcggggtccggggcgcgggggcctgcgggcgggagtatgcggggccccaggaccacctcgaaaccagcctctgcctgggctgttgggcgcg

SEQ ID NO: 264512 - DNA, 122 bp, Homo sapiens
gcaaggacatggccaagacgtggctggtccccgacagcagaaaggatggctgctgggccccgactggcacaccccccactgccagccccgcagccccggtgtctagcacacccacccccacc

SEQ ID NO: 264513 - DNA, 122 bp, Homo sapiens
caccgacccgaccgaccaaccaaccaaccaagcaaccatccaaccattcaagagtgtgttcggggggattttcgctcggggctgacgcggttctctggccgctgtgccgtgctgggccacta

SEQ ID NO: 264514 - DNA, 122 bp, Homo sapiens
ggcctgcctcgatggccatcactacttccaaagacaggttgtagggtagcagcccttccacgcggttcaggttgtccacggcaaataggagggcgtcccgtggccacagggcctccgccctg

SEQ ID NO: 264515 - DNA, 122 bp, Homo sapiens
cgtgggtaacattcggtaataaaacgcgctcggacaggatgtattaaacgaattgggaaccggagctgctctttccataagcaatcaagctggggaaactttacaaggaaagctttaaattg

SEQ ID NO: 264516 - DNA, 122 bp, Homo sapiens
ggctggtgcacacagaacccctttcattccttaaagtggcccttcagccagtctaagccacggtgggagacaggagagcaggcagcctgtacccaggtcctcccaggccagttgggagtttt

SEQ ID NO: 264517 - DNA, 122 bp, Homo sapiens
ctcatgttttccaacaacgcagtcatctccatgcgggacgagaagctgtgcctcatgttccgggtgggcgacctccgcaactcccacatcgtggaggcctccatccgggccaagctcatcaa

SEQ ID NO: 264518 - DNA, 122 bp, Homo sapiens
caggcgtcaagctccagcggactcgaggccttttgcacatgcggtttcctctgccgaaaacgcgccttcgtgtctccaggtggctctctccaagcagcagcttacgtgccactcttcgccat

SEQ ID NO: 264519 - DNA, 122 bp, Homo sapiens
tgcgacgctgataggtcgcgccttggcgggcgggggcagctttggcgggagattcggccgcgcgcgacgcggcgcaggtcgtgggggaagggtaagcggcacgtttctcggcctgggtcgtg

SEQ ID NO: 264520 - DNA, 122 bp, Homo sapiens
aatgattcttttgcctctttgagcatgtctttcctatcttatcttgcccactaagcagaacgttacgatatttctgtttttgcattggatgctatctgccaaacagcttttcctaattgaaa

SEQ ID NO: 264521 - DNA, 122 bp, Homo sapiens
ctcagcccaaattcagcgctggcttccatctggagatctttgatgggtacaaatggtagccgactttcttcgatcatctctcgaacgggagttcggtgagcagcaactcggctcgtccggga

SEQ ID NO: 264522 - DNA, 122 bp, Homo sapiens
attttatggcaaactttcaaggtactaatgcctaagaagtaacaggagacaaggagacatcggctctcagtagtgaagggaacatcctgtcatgcaacaaccaagggacataggccagaata

SEQ ID NO: 264523 - DNA, 122 bp, Homo sapiens
cctgcatccctcgaattccttgacccagcccggggctggagcctggcggtggtttctaggcgctgttagaaaaatctcagcgaggtttctttgcctcctctgcagcttcctagggctttgtg

SEQ ID NO: 264524 - DNA, 122 bp, Homo sapiens
gacccaccacatgggtttcatgacccacgaatggaccaggcagctgtttagaaaacactgcggctcaatttctgccctctctgaggggtgttctagaaatctgtatggctgctggattggaa

SEQ ID NO: 264525 - DNA, 122 bp, Homo sapiens
ctgcccctcagggtgacttcatcacagggacccagttcttgtctctgaggaagccagccacgtggacgccgtgacaccccttattctaggtgcagtcagcactcagggagacggacaggaac

SEQ ID NO: 264526 - DNA, 122 bp, Homo sapiens
tcattccaaacattacagacacatagaaagtgaacagtgagtcaccctcctttcctggagcgccttccctcggggcgcccgccttgcattccgccgctaattccagctaattggggtgcact

SEQ ID NO: 264527 - DNA, 122 bp, Homo sapiens
gggagcccgggagctctgtcccccactcactgtcgcgtatggggctgggggaacagcaatcggatcctcacgaaacagtgacgtgaggcccagtagaggacgtgacctcctccaggccgacg

SEQ ID NO: 264528 - DNA, 122 bp, Homo sapiens
ggagctctgcgccttggaggtctgcccacaacaacatcgggacgaacaacaaagttaaaacgcagcgattcacgcaccttacccggtctcgttaatgcctcctccggcgtgggatgcaaagt

SEQ ID NO: 264529 - DNA, 122 bp, Homo sapiens
gcagcccgccgctcacccacagccgcaccgcggatccagctccggtccttgttcccggggcggctaccgacaacccctatttccgggtccagccgcttctggcgtccccgcgtccggtgtgc

SEQ ID NO: 264530 - DNA, 122 bp, Homo sapiens
ggggtgactgagttcgtcgggctgcaggggtttccgggccggcgcaccaggctccggcagcgaggccttcaaaggggcctcaccgacctcaggctgcaggggcttccttggaaacggagtgg

SEQ ID NO: 264531 - DNA, 122 bp, Homo sapiens
atgatcacttgggtcggctttaaggagctttctggctggccctaaccaacactgtcgcgccgggagcagggatcccctggcgcccttcagtcagggcgctggcccaccctggggcagcaacg

SEQ ID NO: 264532 - DNA, 122 bp, Homo sapiens
cgcctggcccctcagtgcgcgtcctcaggcctctgctcccagctggggctggcaggtggtcgggggggcacccagctcctccactccccacgcccaccacagctttcaaagttaggaacaca

SEQ ID NO: 264533 - DNA, 122 bp, Homo sapiens
ctgcgtctcgagtgaacgcctactgtgtgcctggctctgagcacgggactgtcgctgccacggcatctttaggaaccttcccactaacccagtgggaaggcacaatggctgttaccagcgat

SEQ ID NO: 264534 - DNA, 122 bp, Homo sapiens
tgttgttgcaaataacatttctgctataatcacaggatgccccggcttcttcactccattcgacgtaaccccttcccacgagctccaccttcactatggggtccaccagggtgctgttcagg

SEQ ID NO: 264535 - DNA, 122 bp, Homo sapiens
gcgccccttcctacatccaggaggccgcgttgcccgggttaccgaaggccgccgcaccgacgccccgcccctgaccgccgatgcccctcccacgccggctgcggtcgccctcggcgctgcct

SEQ ID NO: 264536 - DNA, 122 bp, Homo sapiens
acagcaaggaaaagaaatcaaatccagtaagtatatgcaagaagctatttgcaaaggtcacgcattagccctttggtgtataaatgctaagtgctctacatttcatgtactggagtgactca

SEQ ID NO: 264537 - DNA, 122 bp, Homo sapiens
tctccaaggccttctctggttctggggctagaggggcctcgggacttccctgtgcggtcccggccccacgcctccaacaggactccccagggacccacctcgcaaaccttctctcccatcca

SEQ ID NO: 264538 - DNA, 122 bp, Homo sapiens
agctgtcagctgtggccactatcagtcctttgccatgtgggcctctccgccctggcagctcgttgcatcagagagggctatggagagagtctgggaagaggtaggtcagtcttttgtaatat

SEQ ID NO: 264539 - DNA, 122 bp, Homo sapiens
gcgtcctcaagggaacccccaagaagtgagtggtgagtgctcgagtgagtttagtgaggacgctgggagctggccactgacacttgcacagccttcttgacctcaagtttgtatacattgtg

SEQ ID NO: 264540 - DNA, 122 bp, Homo sapiens
tccacgcctggccccgcagctcatggcccctggtctcgttccagctcattgtagttgctccgtcacttatagaatgaatgaatgaatgcaacacagggcagtctgtgtgcaaaggagtgctt

SEQ ID NO: 264541 - DNA, 122 bp, Homo sapiens
tgagaagccacgacagggaaggtggacaagagggcgaggagagcagggtgtggaatagatcgctggacttgtttttagaatgaagggagcccagagctgcctcgaaaaggagtgattcctca

SEQ ID NO: 264542 - DNA, 122 bp, Homo sapiens
cgaagtcaggcttccactgggcaccgggaagctctggggggatgaaatcgcattaaatcgcgaatagggtaggggcctcgttagcatacagaagtctggctaccattccaaagctgtttaat

SEQ ID NO: 264543 - DNA, 122 bp, Homo sapiens
aagaccctgactatcctttatccaggccatttctcagagttgtgcttgtagcgagcaacacggaaatacgaggtaatgcctctagccaggacaaatagcagggttactgcttgctctgaaat

SEQ ID NO: 264544 - DNA, 122 bp, Homo sapiens
tgggaagcattctgtttatctgtggcctggggtgaggctccccgtgcagggccatctgcccgtgggcctgcccagacctgggcttaccgtcctggaacggagaaaggaatcatgagcagtgg

SEQ ID NO: 264545 - DNA, 122 bp, Homo sapiens
ctgctttctagagaggtcattttcagtgaacacgagtgcttccacgtcagtttggtttctcgccccaagaaaagcgcatccagcaggtcatgattttcccacacgtctctccactccacggg

SEQ ID NO: 264546 - DNA, 122 bp, Homo sapiens
cctactatcctcccactcgagagttcacttctggttgggagacaggattcctagcacctccggtgtcaaaaggctgtcatggggttgtgccaattaattaccaaacattgagcctgcaggct

SEQ ID NO: 264547 - DNA, 122 bp, Homo sapiens
ctgagaccaagaaagggagatttctgaaattgaggctgggaggggaggggctataaccggcgcttccctggcacgcgccgctaggtttccgtcctctcagagccacgaagccaaagggcatg

SEQ ID NO: 264548 - DNA, 122 bp, Homo sapiens
gaaactctgggctcccccagcaggcgaggatctggagcagctccagaccattgtgtccagcgggcaggccttcagtgcgggaaggggcggcctcgaggctcccctcccccagcccccacatc

SEQ ID NO: 264549 - DNA, 122 bp, Homo sapiens
cacccgccgctcgaagctggaggggccgccggagcctgcgattggctgcttcgggcacatcgtcccgccccgacctgtagctcctcccaggtttccgttgtcaaggacgcgccgtcggttgt

SEQ ID NO: 264550 - DNA, 122 bp, Homo sapiens
tggctttcgcagtgtctccctctgttggtggagtctccttccctgcccctttgatgttgacgttgtcttgataaattgtctcgaccagtggaatgttgacagacacaacatgagaggaggct

SEQ ID NO: 264551 - DNA, 122 bp, Homo sapiens
gcagggacttgccaggcaaggcccactggcgcatggcacgggatgcttcctcaggcctatcgccctgcccgcaccctagcatccaccctgggaagggctcccctaactcaggcagtgccccc

SEQ ID NO: 264552 - DNA, 122 bp, Homo sapiens
tcgctgtctctgcaccacttccacctgcccgggcctttgcacctgcaggttcgtaccctacggggtgtgccctgccttgccctgacagcacagcactgcccggcctctgctcttctccacct

SEQ ID NO: 264553 - DNA, 122 bp, Homo sapiens
ggcggggagcctggagaaaggggcggagctcggcccgggccctgggctcagcgggtcccgcgcgctgctcttggacgccagggtgctcgctggcacctcgaagtgcttcttgcttcctccct

SEQ ID NO: 264554 - DNA, 122 bp, Homo sapiens
agcgccgcctcgaagccagagccctccgcaggctagaggattgcggtttcccttcatctccgcggctcttattcctcccccgcaaggccgcccaccggggtacgctctcccgcgcctgcgcc

SEQ ID NO: 264555 - DNA, 122 bp, Homo sapiens
gtgtgcccagattgtaaccttcgcactaggcatccaagaacgtgctttggacacactcggcggtgggagcgggtgcttggtttgcatcagggatgaggggtggagtagcgaaagcgcccgga

SEQ ID NO: 264556 - DNA, 122 bp, Homo sapiens
aaaggaaaagcagacctcaggactaaagcagtactatctagctagaatttaacaacatgtcggccaggcgcggtggctcacacctgtaatcccagcactctgggagggcaaggtggatggat

SEQ ID NO: 264557 - DNA, 122 bp, Homo sapiens
aatggtagtgtaactatcctgatttcttagttttgacaaatggcccatggttatgtaagacgttaacattggtgtaaactgggcgaaaggtatatagtaacttttgtactatcatgacaact

SEQ ID NO: 264558 - DNA, 122 bp, Homo sapiens
gcaggaaagcgccgccggccaggcccagctgtggccggacagggactggaagagaggacgcggtcgagtaggtgtgcaccagccctggcaacgagagcgtctaccccgaactctgctggcct

SEQ ID NO: 264559 - DNA, 122 bp, Homo sapiens
cgccgtggcaccgggtgcgggaggcgttttcccccctcccagcgggtccatgcaggggatcgggatgttctgaagcccccactgctgtgcctggaacacccgtgtctgccgctcacccctga

SEQ ID NO: 264560 - DNA, 122 bp, Homo sapiens
atctttcccatcccacctgggcgcctggctagcgcatcccggaaaacctgggagcggttgcggagaggggaggaagcgacttgtttgtcccctgacccctctgttaagatctagctcccttc

SEQ ID NO: 264561 - DNA, 122 bp, Homo sapiens
ggcggagtgacggattagtgcatttcctgaaactttaaacctttaaatgctaaagccagccgggcgcggggctcaaggctgtaatcccagcactttgggaggctgaggcgggcagatcacat

SEQ ID NO: 264562 - DNA, 122 bp, Homo sapiens
ggatggctgcgcttccgcgtcagccgagagctcaggatctctaagaccaagaagctggtgcgatcgcgggcgcccagacttcagtctgaggctcggcggcggcggcggcggcagcggtcgtc

SEQ ID NO: 264563 - DNA, 122 bp, Homo sapiens
cgatcacagctcactgcagcctcgacctcccagactcaagggatcttcttggtcagctcccggaatagatagatggaagcacaggcatgcaccaccatccccggataagttttgtatttttg

SEQ ID NO: 264564 - DNA, 122 bp, Homo sapiens
ttctccggggccagaagcacggaggtgaagtgcgcttctcaccccaccacgtgaagggtccgagctctcacccaccatgcggctgtgatgtgggcccggatcacctggctgagcgggaggtg

SEQ ID NO: 264565 - DNA, 122 bp, Homo sapiens
aggcggcacagctggagcccggattgtggcacgccgtcaccgtgctgctccggggaatcccgacccgctccctgcgaaagcgtttccgaacgcgaacccagagcctgtgaacgcgccggcaa

SEQ ID NO: 264566 - DNA, 122 bp, Homo sapiens
tcaagcgattgatcatcccgcctcagcctcccaaggaactgggaccgcaagttatagagacggcgttttgctgtgtattgaccagcctgatctccaactcctggattccagtgatcttcctg

SEQ ID NO: 264567 - DNA, 122 bp, Homo sapiens
gacggcgggcgtctgcctctgaagttagcagtgatttcctttcgggcctggccttatctccggctgcacgttgcctgttggtgactaataacacaataacattgtctggggctggaataaag

SEQ ID NO: 264568 - DNA, 122 bp, Homo sapiens
cggagaggcaactccatccttgctagggccacatggagacagggacatgcccaaatggcccgtgctcccagggtagatgaggatcataagtccacagtagaactgtgaccaggaagtcccac

SEQ ID NO: 264569 - DNA, 122 bp, Homo sapiens
ttttcagtgtgagatgccccctctcatcctccagctctgtgctctacttttgtctactttcgttttgccagaacacagtgtggaggaaatcctgtgctttctattgtgactcagttctgtat

SEQ ID NO: 264570 - DNA, 122 bp, Homo sapiens
actccactgagtagaatctgtagagggcagtgcaggggtctgcagttttggccagtgtcccggctgactgtgggtcccccaaggttccggacagatgccatccgacgtccaacagaactctg

SEQ ID NO: 264571 - DNA, 122 bp, Homo sapiens
tgttttgatatattcaatctgttcaatctgtattagtgcctactctgccactgtgttgggcgggaatctgattttgttctttggttggagatccaagttaaccagagcttaggcattttaag

SEQ ID NO: 264572 - DNA, 122 bp, Homo sapiens
tacccagttactacactgcatcgaggtcattccagcccaaagcaaaaaaccctgaaacctcggtcagcctgtgtaacctgatcctgggcaaagttatggttcctttctgtccttattggtga

SEQ ID NO: 264573 - DNA, 122 bp, Homo sapiens
ccaggtctaagcggcggccccgcgaggcccttgcacggcgccccgggtcgaggccctccccgcctcgccctaccccaggagcctgcctccccagctggggatgaggctaggaggcggccgcg

SEQ ID NO: 264574 - DNA, 122 bp, Homo sapiens
cagactccactcccggggccttcacctgctgggaccctgcactgcccctgcctgcaacttcgcctggctggggcctcccttgtcatcactggcctgccctcctacccagggtcgggccccaa

SEQ ID NO: 264575 - DNA, 122 bp, Homo sapiens
tgtttgttctatttttattccattctttcattctcttctcctgcatctgaatcattctaacgcgcttgcatatccttttacatgtgttttgtgtgcatctattttaaatttatgtagattta

SEQ ID NO: 264576 - DNA, 122 bp, Homo sapiens
cccggctgatttatccttttatttgggctcctttcactcagcgtctttaagcttcatacgcgaaagatgcttcagagattcctttttcaggctgaatatctgctgcgtggctaggccacttt

SEQ ID NO: 264577 - DNA, 122 bp, Homo sapiens
ccatcggaaacacctgcagtaaccggagtgccctcgctgatagcccttgttccggggcctcgtcctgggctgtgcagagctccagccccagccccagccccagctgcaggcggccgctcacg

SEQ ID NO: 264578 - DNA, 122 bp, Homo sapiens
cggccggggacgcgcgtcttccttctccaggcgccggacgtggaacctgcgagcccctggcggcgccccaagttatgcacaggtcgcagctgctcaccaagctcctcctgggaggccgccct

SEQ ID NO: 264579 - DNA, 122 bp, Homo sapiens
accatcaagaaggtaatctatggaaagtgtgtggaagaattcctggaagtatgcagaaaacgcaacctttaggtagatacgcacattttgcgtgcctcactttgtcaaagatggaaccctca

SEQ ID NO: 264580 - DNA, 122 bp, Homo sapiens
ggcctagtggaaagccatggagagcgctctccccgccgccggcttcctgtactgggtcggcgcgggcaccgtggcctacctagccctgcgtatttcgtactcgctcttcacggccctccggg

SEQ ID NO: 264581 - DNA, 122 bp, Homo sapiens
tattagaagccgcctctagaatcgcgttaatagtgggagatatggcggcgatgccttctgcgtgccccatgaattagggggggaagcacccgaatagaagggtctcccgggcatatttgcct

SEQ ID NO: 264582 - DNA, 122 bp, Homo sapiens
tcttggaatgactttttggtagaagatgctagtccatatatattcttcagccctgcagagcggcccttgatttgatggtggtcttaagaacccaaaggctggatcttctcagcctttgaaga

SEQ ID NO: 264583 - DNA, 122 bp, Homo sapiens
tggagggggtcgcgcgcagggcgcgggagcccgctgcgaggtgcgaggaccaaatagaggcgtaacaagccaagggtcggagtgggcaacggaacagttaaaggcatttcacaacagcgatt

SEQ ID NO: 264584 - DNA, 122 bp, Homo sapiens
catctgaatgcagttggggagtgagacacacacacacacacacacacagactggtggaaacggaactgcaggtgcaaaggcactgaagtcaggacaagtttggtacatttaaggaacagaaa

SEQ ID NO: 264585 - DNA, 122 bp, Homo sapiens
tggcaagtatggtaagtgttctgcagaaaagctaagcagctgaggggagcggcaggggcccgagggtgtgcattagcattctcttcagtgggttcagggagtcacccccgggggcggtgggg

SEQ ID NO: 264586 - DNA, 122 bp, Homo sapiens
acccaggacttaaggagggccattgcccttttctggtgggggtgaaggaggaggaagcagcgtgaccttggaatccgtcacctattaacttcccgcgtatcacctgatctcattcggcgtcc

SEQ ID NO: 264587 - DNA, 122 bp, Homo sapiens
attcgttcactgaaagctacaaaacatcactgagttttcatcagcaaaaaccgcaaacatcgtagaagagcaaaaccaatggagagacatttgtgctctttgaaaggttcaatattatttac

SEQ ID NO: 264588 - DNA, 122 bp, Homo sapiens
cgttgctgctccgctaagttctcagatgtaaaataatcgtgctttgttccctgaagttggcggagccttcctgaaatctccagtgaggatcaggagagggacagtgaacctgccggaactca

SEQ ID NO: 264589 - DNA, 122 bp, Homo sapiens
acacaacaacaaaaaaggcaactgcagctccttgagggccaaaggcggggcccttctgctcgagggacccaatttcccttgataaagcgcacacactttgtaataatagaagacagcattca

SEQ ID NO: 264590 - DNA, 122 bp, Homo sapiens
ggccagaatgaatcagcattccctgaagaagaagaaggcaccaatgaaagagaggagcagcgggaccattaattactggtctgcagcaagaaggcttcttggaaataactgaactattaact

SEQ ID NO: 264591 - DNA, 122 bp, Homo sapiens
ccaggctccctgtcggagcctctgcctggggccccacctggaaaaatggctcctctaaggcgcttccagcctaaagcccgtcctcttccacctcttgggtgcagactggccctcccactccg

SEQ ID NO: 264592 - DNA, 122 bp, Homo sapiens
tcctggaccgcggcggacatggcagctcagatcaccaagcgcaagtgggaggcggcccgtcgggcggagcagctgagagcctacctggagggcgagttcgtggagtggctccgcagatacct

SEQ ID NO: 264593 - DNA, 122 bp, Homo sapiens
catactcctcctgtccccccacagagtcccaggcccttgcacacctgccccgtgtgcccacgtccaccgtgcacactgagcctctcgtggttgcacacttttggcatcttcccatgccgcca

SEQ ID NO: 264594 - DNA, 122 bp, Homo sapiens
actgcgcccagcttccattattagatcaatggataaacacagcataggacatccacacagcggaatatgactcagccatgaagaggagcaaagctctgatgcaggccacagtgtggatgcac

SEQ ID NO: 264595 - DNA, 122 bp, Homo sapiens
gtggcccctgcactctccaggcaaggcgggtgtgctgcgtgccaccgctgttggtaaatccggcccctcttacgtccctccagctgtccccgcgtttataaatcttgcacagcctgttcttc

SEQ ID NO: 264596 - DNA, 122 bp, Homo sapiens
tagggcagatctcagaaccaactagatcgagggactcaaatggtatctaggctctcactccgtctcatctttcatctctgcttctctctgtatcgcctaattctctaagactcttacatggt

SEQ ID NO: 264597 - DNA, 122 bp, Homo sapiens
cgtgacacacacaccccgtgacacacaccccccgtgacacatcccccgtgacacacaccccgtgacacacaccccgtgacacaccccccgtgacacacaccctgtgacacacaccccgtgac

SEQ ID NO: 264598 - DNA, 122 bp, Homo sapiens
cacgctggcaacaccccgtcatcactcccgcccctcctcacaccgggctgatgtcggccgcggccctgagcagagtggacagggcagccttgctcctgcacgctgctcctggagccacaggg

SEQ ID NO: 264599 - DNA, 122 bp, Homo sapiens
ttggagagatttatgacatctcataaattataataataatcataattattataaatactccgaacttatatagggccttttattcgagaatgtcctggcattttgcaaacattaaccaattt

SEQ ID NO: 264600 - DNA, 122 bp, Homo sapiens
tgttttgtttttctggagtatggctggccaagtggcacggccgcaagtgcctgtgcacgccgcggctcctgttctgtttgtggcagtttagcggggaggacctcgggcccctttgtctgggc

SEQ ID NO: 264601 - DNA, 122 bp, Homo sapiens
tcacgtccctcccttcctccttggagagccgctagatccaatcagtgtttgacctggccgcgcggagggggcgggcccatgatacgcaatcgaaccccgcccgtctctcgggcaacgcctcc

SEQ ID NO: 264602 - DNA, 122 bp, Homo sapiens
aggaatcttagttggggcacagctactcacaggctgcaatcaaaaggttggccagagctgcggtcttatctgaaggcacaagtgagtaaggaccctttttctagtttatttatgtggtttta

SEQ ID NO: 264603 - DNA, 122 bp, Homo sapiens
aagaactaggtagtctcttctcgcgagaaagggaggggtcgcaggcccaggcgctcggagcgttaccagggaaacaggtctcggttttgcggctcccactcagctgcgggagaaagctaagc

SEQ ID NO: 264604 - DNA, 122 bp, Homo sapiens
gcccaccaggcctagcccaggcgctggcccgaaccctgccctgcccactcaggccccgcccggcccacccagggccgcccccgagccccgccagggccccaccccgacttcttctaggcccc

SEQ ID NO: 264605 - DNA, 122 bp, Homo sapiens
actgaataaaatcaagcagctccagcttatcgagactgctctttctttggcccttagtgccgggcagtcccctagctgctcttacactgcatacctgtgtctaagtactcctttcatctgtc

SEQ ID NO: 264606 - DNA, 122 bp, Homo sapiens
gagacggggtttggacatgtttaccaggctggtctcgaactcctgacctcaagtgattgccggccttggcctctgaaagtgttgagattataggcaagccacgcctggcctactgttaggat

SEQ ID NO: 264607 - DNA, 122 bp, Homo sapiens
gcagcagcagccactgcaaccagttcatcctgggagctgctgcgggttcttccgggaatccgcgccactgcgcctgcgcgctgagaaatcagcctctcacttccggactacaagcccctgaa

SEQ ID NO: 264608 - DNA, 122 bp, Homo sapiens
agcgacaggtctttctgcagtgccctctttacaatcagagttgcatttcgaggtgtgtaacgtacccgcttgatggtgactgctgtgtgcacacaggcccgcgtggtgtcgcagagcacacg

SEQ ID NO: 264609 - DNA, 122 bp, Homo sapiens
ggagggcggggggcgagttgtctgagggaggaagagagcgcgagaatgaggggaggggggcggagaagagagttgctaagaagctctgctcgttccagcctggtgcactctgaaagatctga

SEQ ID NO: 264610 - DNA, 122 bp, Homo sapiens
agtaaaagaaaagaagacctgggcttcagatatgattttgttaccttcttacagttttaccgcaccaaggtgtcaggttggggagcaaggagtagcatcgtcccgcctccctccagtcgcac

SEQ ID NO: 264611 - DNA, 122 bp, Homo sapiens
tcgaagtcggggaggagtttcatgaagagcccaaaacctattacgaactcaaaagtcaaccgctgaagagcaggtgagtggtgacagctgggcagaggcgcaccgggcggctggggggcact

SEQ ID NO: 264612 - DNA, 122 bp, Homo sapiens
caaactaatattctaataaagtcagtggtataaaccaaaagacatatgtaactgaggtctcgatatttcattaccacgtttccttgaaaaactaccgaggctataattacactaacaacaat

SEQ ID NO: 264613 - DNA, 122 bp, Homo sapiens
ctgcacgcagctgtcgtcagttcagtacgacatcactgagagctgggagaacctgggccccgggaggaagaggggtcgcagagggatcttgcaccttctccctggtgcagggtggggtggtg

SEQ ID NO: 264614 - DNA, 122 bp, Homo sapiens
gcgggtggagaaagagagtatggcgggggccacgggggtccgagtcccgacacgcggctgcgcactcgctcccctgcaccgcgggcggggctggggccggaaacgcgcgcggcggcctcgga

SEQ ID NO: 264615 - DNA, 122 bp, Homo sapiens
ctcacatagggaggccacaccacaaggggtgaaggtctccagctctggagttggaaggaccgggttcaaatcccttgggcctgtctgctggaggccatcctggctggcccagtactggctgg

SEQ ID NO: 264616 - DNA, 122 bp, Homo sapiens
ttcgctcctgctgggagccctgggcggactcccccccaccccgcccaattccaaggaccccgggctccatccacgaggcccacaggacccgcggtcccccgtgcagagtaaggcgtccaacg

SEQ ID NO: 264617 - DNA, 122 bp, Homo sapiens
ggctgctgggaagcctcagtagcggccgtgaatacagtggagctccggcgctgcttatttcggcctaactcttggtttcctcatctgaacaaccccaggctcccatggttcgttcatcagac

SEQ ID NO: 264618 - DNA, 122 bp, Homo sapiens
caacccgggtttctacccccgccctcccggtcctggctcaaactctcgtcacctgatcctcggcgaaagctcctatcgcgacactttgaccgtagccgttcccgccatcttgcttcctggca

SEQ ID NO: 264619 - DNA, 122 bp, Homo sapiens
acgtgtatccaacagacaatggagtttttcagccttaaaaaggaaggaaattctgacacacgctacaacatggatgccaagtgaaataagccagtcatggccgggcacggtggctcacccct

SEQ ID NO: 264620 - DNA, 122 bp, Homo sapiens
gtagctgtccattgacgtatccgggtcttcacttctgtatccttcttcagtttcatctaacgtcacaaagaacgctgctttctccacagcatcaagagactgcttatttttcccacgtccaa

SEQ ID NO: 264621 - DNA, 122 bp, Homo sapiens
ttcaatggtgctgtcatgtgttactatatccaggggatttcccagtgatttctcctgactcgcagactgacctgctggagctggccggcctaagagaaggaaacaggaatgggggtctggcc

SEQ ID NO: 264622 - DNA, 122 bp, Homo sapiens
gggaaggtctccacagggaccaccacatgggcaaggctggtgtccgcgccgagggatcggcgatcccaggtccggggaaactccgcgagcgacgcgctcgcccgcggccttccttgtcgctc

SEQ ID NO: 264623 - DNA, 122 bp, Homo sapiens
ttacaccgtttgatttctccttattataagtgttcagcattattctcattacagaattagcgtggatatcctcccccagatcttgacagcttccatgctgtataataaaacatgtgtctggt

SEQ ID NO: 264624 - DNA, 122 bp, Homo sapiens
tcccgcaggctggcgcggtgggagtggggcggtggtaactgcgcgctgtgcgaatagagacgtcgaggcaagcgcgacggcctcgagtggctagggaaagaatccaggggcgtgcacccagt

SEQ ID NO: 264625 - DNA, 122 bp, Homo sapiens
ggcagccccaggagagaatcccaccagccgccatgcgagtgagcttggagaccacgcagtcgggagaggccgcccggccacagaaaaaagtcgtcctgttgttcaggatccaggccagggtc

SEQ ID NO: 264626 - DNA, 122 bp, Homo sapiens
cacaaggcccactcgtgagagcgaggatgaggacgaggaggagcggcggggccggggctgcgcactgcaataccagcacgccaccgtgcgggtcctcacccagtttgtgtctgagggcgccg

SEQ ID NO: 264627 - DNA, 122 bp, Homo sapiens
actttgggacaaagacagtggtcagtaataatgatttggggctgagaaaaatatccattgcgtgcccaagttagcatgctctaattgaaggaaaggcagctacttggctgtgggaatacttc

SEQ ID NO: 264628 - DNA, 122 bp, Homo sapiens
aggacggagcccagctctagaggcgtggggcctcttctgggcctgggaccctgcgagggacggtcctgtccgcccagctcccggctggcagtagacggtgactccacggcgacagaacctgc

SEQ ID NO: 264629 - DNA, 122 bp, Homo sapiens
gccctgcttggttgtctccacacacagctgggctgtggtagggggtgtctcaggccacaccggccttgcattgcctgcctggccccctgtcctctctggctggggagcagggaggtccggga

SEQ ID NO: 264630 - DNA, 122 bp, Homo sapiens
atctccatctatcatatcaatgttatcgacaagcctattgggcacatcctctccaaaacccggggcaggtggagcccaaacccctttaacatttcctccaggctcctggtattcaccacctc

SEQ ID NO: 264631 - DNA, 122 bp, Homo sapiens
acatccccgccgctccctccagggcaggtttctccccagtcatctgcaccccacctcgaccgtgaccatcagggcgcctgtggcaccgttgccagccccgagccagcatccactccggccct

SEQ ID NO: 264632 - DNA, 122 bp, Homo sapiens
aggcgccgctgagcgctgactgggtgcgagtggggaagctgctaacccgacccggattggcgctgaggtggcccgtggggcaggtgagtgcggggcgggagtcagcggagacccaccggcgc

SEQ ID NO: 264633 - DNA, 122 bp, Homo sapiens
gggatcctctctaaagtacagtccccagtcttccctggattccctgctggtctcagaacccgctccaggctccaccgcctccttccctgcctgacctcctctcctcccaggtccatccggat

SEQ ID NO: 264634 - DNA, 122 bp, Homo sapiens
cgtcccggggattagggttggctgggggcgagtttcctggatcccccgggaggttggtgccggggtgggagggtggacagggagcgggggctgaggagtcctctggaacgcctgggccaagt

SEQ ID NO: 264635 - DNA, 122 bp, Homo sapiens
acccgtctgggagatccagatatcggatgaatgcctgtccgggggcccagcggagccagacggcagccgcctcctcctttctggatctgactgttccgggacccgtctcccccgaggtgggg

SEQ ID NO: 264636 - DNA, 122 bp, Homo sapiens
acgcgccgtagtacattcctgaaggcggaccggcccccttacgctgcccaatgcccgcgccgcctccccgcgaccggccaatggtcgcgctcacgagtccctgcccattcagcggccccgcg

SEQ ID NO: 264637 - DNA, 122 bp, Homo sapiens
accctgttgagtgtgtgacgaagtctatgactattcacgcacacacaacacttgctatatcggatcagcagtttcatggacactttgaagcccatctatatacaatgtcgtgtttgagaact

SEQ ID NO: 264638 - DNA, 122 bp, Homo sapiens
agctgcaggcgcaagggcagatgcagacccaggcaccccagccagcccaggtggccttggcgaagcctccggtggtgtccgtcccggcagctgtggtctcctcaccgggagtcaccaccctg

SEQ ID NO: 264639 - DNA, 122 bp, Homo sapiens
ttattctaaatgggctccaacacggagtgcgcgtgcgctcaaggaccagctggctaggagcgccttctctccccgaggggatctggaatgttcatccgcggtcttcccagtggtcctctcct

SEQ ID NO: 264640 - DNA, 122 bp, Homo sapiens
gacatcagtgatgagggtgagggcccggccagggggtgggaggggcagggacaggagccgcgggttggaggagatggtctgagcaggcatcccctgtgtttcccccagaggaaggtggagct

SEQ ID NO: 264641 - DNA, 122 bp, Homo sapiens
ccagcacagtggtccagaggacgaccttgtgcctagacccaccgggagtcagagccactgcgcatcccggaggcatctctctcaaccgttcgagcttggggcggtggcctcaccccttgagc

SEQ ID NO: 264642 - DNA, 122 bp, Homo sapiens
ttttctgctgcccatttgtgtcctggagacggtggtaccctgaaggcagaggccagctgccgcaagacagcaatgacagtccacctgccgacctgattcctgcatcatggaataaccacatg

SEQ ID NO: 264643 - DNA, 122 bp, Homo sapiens
attggcaatttttgacaatttctatggagagtgaattttaaaaagaggagagagagaagccgcagaggatagtgcacagaactgagtccagatcccagttctgtctttgtttttttgtttgt

SEQ ID NO: 264644 - DNA, 122 bp, Homo sapiens
gggaggcaggaactggagaggacgcgagtggcgggtggcgggggcggtgtgtaggggtgacgtccacccggcagagagggttccttgtcccctggagccgaacacaggaaaatcagctggtg

SEQ ID NO: 264645 - DNA, 122 bp, Homo sapiens
acaaccctagtaaaaattggtattgagagatgttgctttttctttgatgaacaaaaatagcgttttcatgcctctgctgctacgccccctatatagagttcgggatatagaattgcctatgg

SEQ ID NO: 264646 - DNA, 122 bp, Homo sapiens
caggttttcctcctaccttggtggtcatggtcctggtcagcctgggccctacaacagaggcgagagcctcctgcattctcttcccaatgccctgtggggcatgacggtttccaggctggctg

SEQ ID NO: 264647 - DNA, 122 bp, Homo sapiens
ggtcacaaagactttgctgatgaaacagcttgcggcaaagaagccagccaggggcgggcgcggggctcacgccagtaatcccaacactgggaggccgaggcaggcggatcactggaggtcag

SEQ ID NO: 264648 - DNA, 122 bp, Homo sapiens
catcaacggccagccccatacgcgtgaggattgcggcaccaggggcgctcaggattgggccgggctgcttctcagaagaggggacattgagcccaagcaggctgcactcctgcttggacgga

SEQ ID NO: 264649 - DNA, 122 bp, Homo sapiens
ctcggacccagtgcgccgagctaggggagacggcgcgggactgggggacccctgggatcccgccctcgtagcggaaggagtggcagcccttggtgccgggcctggtccttgaggctgccggc

SEQ ID NO: 264650 - DNA, 122 bp, Homo sapiens
atgtcaccctggagaaaaaggggaaaagaggggcccctcccggcttccgcacacctactgcgtgctgggcacccgtggcgcttcacctccatggtctcgtctaaatgttgtcattacgccat

SEQ ID NO: 264651 - DNA, 122 bp, Homo sapiens
agcggctggactacccccgggccaggatggccctctggtgagagacccgggcattggcaccgagtgggcacctaacccccagcttcgcagatggcccccgcccccggcggccctgtctgctc

SEQ ID NO: 264652 - DNA, 122 bp, Homo sapiens
ccctgtcctggagcaggaaggcaggccttaacctctccttctttcctgcagggaatagaacgtgtccgggctgtggccaagcggattggtgaggtccaggtggcttgtggcctgaaccagac

SEQ ID NO: 264653 - DNA, 122 bp, Homo sapiens
ttagaattttcttatagattttttttttttttctcagccaggcgtgctttatggacaatgcgctcctcaggccttgaccgcgtacttccccagcgggtacagccgctccttccgctgctgct

SEQ ID NO: 264654 - DNA, 122 bp, Homo sapiens
atctttcttgctgtctccgcatcacatcttcccccaagccgcctctgccaccccctaccacgccaccccaagcagaacaggccccagggaccagcctggcacctaagacccaattaaggcac

SEQ ID NO: 264655 - DNA, 122 bp, Homo sapiens
actcactcactctcgctctctctccctcagacacagacatacacgccctcattgagtgtgcgcaggcgcagcttccgctctgccctctgggaattagagtcttccagcctctgtgctggcca

SEQ ID NO: 264656 - DNA, 122 bp, Homo sapiens
aacccagatcagggtgtcagcagtgtcgtgctctcggaaggctccaggggacagtctacccggtgcccttctcccagcatctggccttgctggacccactgggcattccttggctcacaaat

SEQ ID NO: 264657 - DNA, 122 bp, Homo sapiens
ccatcaggtgatggtcaggtggttgttaactgtctctctaaaataataattagtcacagccggcaccagggaaaggcatagatagaaaacacctgaaactggtgatcagcctcttcccatga

SEQ ID NO: 264658 - DNA, 122 bp, Homo sapiens
gacgggggcgcccccgagggcggcactgggtgttgcggcgtgtgctttttatgacgcgcccggcagttttgaaaccacacctggaacgacagcctcggcagcctcagcctcgaggaaaagag

SEQ ID NO: 264659 - DNA, 122 bp, Homo sapiens
gtgcaggtatatagtactcattcagcaagtgcatgtttgccttcttcccagaattagaggcgcactacagggattggaaggagaaggaagtgaatgaaagtcaactcggagaggataaaagg

SEQ ID NO: 264660 - DNA, 122 bp, Homo sapiens
gggcgcatctaagccaatcagaaggagccaggtacggcgaccccaggagagagcgtgtgacgcacgcgccggaaaaagaggttacggggcgccggtgggacaaacgcagccagacgccggac

SEQ ID NO: 264661 - DNA, 122 bp, Homo sapiens
aggaactcctacctggtttccggacgacatatccgcgcgcggcctggaggaggagacctacgcagaaaagagagggctgaggaccatctccttaaatagcccacccctcagttcctttctgt

SEQ ID NO: 264662 - DNA, 122 bp, Homo sapiens
ggctgaagggctcctcaagtgcggccagaatgggcgccgaggccaagggggcaccgagagcgagccagggctgcgagggccgccatcacgctgtcacctctcacaggagcgatatgggagag

SEQ ID NO: 264663 - DNA, 122 bp, Homo sapiens
ctccgctcggccgcccgggcaagtcgcctatttagggtgcggcggcgggcgggagcagtgcgcccatggcggccctgggggacgaggtgctggacggttacgtgttcccggcgtgccccccc

SEQ ID NO: 264664 - DNA, 122 bp, Homo sapiens
gcccgcacgaagtcgcatgactcagtggtgcaggagcgcacggtctccgtcctcccctctcggaagagccgggtcatggaggcctcgtatgtgaggcaaaacttgcccatgtcctggggaaa

SEQ ID NO: 264665 - DNA, 122 bp, Homo sapiens
cacgggggcgccgtgcggactcggcctccacaaagcggcagaagcaagggcgtgtgcccgcgcagggaatggaggctgcaagtgcaaaactttatcccagcaaagcaaaggtcccaggaggc

SEQ ID NO: 264666 - DNA, 122 bp, Homo sapiens
cttgctgagaagaataaaagcctcctgtggcacctggaagaccttatcacacatggtccccggccagatcacagagcgattctagttaacgtgggcactttgctgcctctaaccatctacct

SEQ ID NO: 264667 - DNA, 122 bp, Homo sapiens
agcgctgcagcatcacccaaaccacaggccccctggccaaacgggtgctccaaaacccagcgtgcgccccgagacttacacgggtgcactccaccttgacacctctgataaataaaataccg

SEQ ID NO: 264668 - DNA, 122 bp, Homo sapiens
gagccgtaggcaagtgaggtgcaggccgggggggggggctcgcgtttccacacctccccgcgcagttcgctcctcccaggagggtcgaggcaaggtatctggctgtgaccgggaggagtgca

SEQ ID NO: 264669 - DNA, 122 bp, Homo sapiens
gccaagtttgcgcgcggtctccgctgactctcgggttacctgagccggcaaccacgtcagcgccacatcatctgggctttttatattgcaaggaaacaggaaaagaaggaagaaaaacatcg

SEQ ID NO: 264670 - DNA, 122 bp, Homo sapiens
ccccgggccccgccagcgctttggagacggctatccgcgcgggagtgcgccacgcggggccggagcgcctattagccgccaggacctcggagcgccccgaccacccctgagcccctctggct

SEQ ID NO: 264671 - DNA, 122 bp, Homo sapiens
atccactgtgaaagcttccaagttggctttctctttgtcaaactgttcatcaataggcaccgtctcccctaaaataagaaaataaagtggttaataaaaaaacgacgtctaaagctaatttc

SEQ ID NO: 264672 - DNA, 122 bp, Homo sapiens
ccctccgagggtgcccgagtgcggcgtggagactggcaggcggggggggcgcctggagagcgaggaggcgcggcctcccgaggaggggcccggtggcggcagggccaggctggtccgagctg

SEQ ID NO: 264673 - DNA, 122 bp, Homo sapiens
ctccggggtggggcggtggcgcttccctccggcaaatgcactgcatccctgtcccagatccggaagaccacggccagccaggtgtacgagacattgctcacctacagtgacgtcgtgggcgc

SEQ ID NO: 264674 - DNA, 122 bp, Homo sapiens
aatcagcctttgaaacgatggccaacagcagctaataataaaccagtaatttgggatagacgagtagcaagagggcattggttggtgggtcaccctccttctcagaacacattataaaaacc

SEQ ID NO: 264675 - DNA, 122 bp, Homo sapiens
gggtggggagcggagccgcgggccagctctgcgagcgccccgcgctggcctgtccggccccgcccccgccccgggccatggcccagcccttgtcccggcccctcgtcctatcccaatccccg

SEQ ID NO: 264676 - DNA, 122 bp, Homo sapiens
ttcatttccggctctgggtccggctaggccttctgggaaatgtagtcccttcggaggcaccgggcggaaagggagctagagcattctgggaaatggagttctcagtggtgctgagtccctgg

SEQ ID NO: 264677 - DNA, 122 bp, Homo sapiens
aggccggtgggtttggctgaccacttcttcccattcctcagtgagagacttgggccctcccggtcatccgagtctgtcccgaaggtttaactgcgcgcggcgaggggaggccttgtaggttt

SEQ ID NO: 264678 - DNA, 122 bp, Homo sapiens
ccccgccctggcgcgccccgcaaacgatgtgaccccggccccctgcggtctcccctcctccggacgctgcccctgccccacctgtggcgctcccgtcatctctagagcccccaaccagagtc

SEQ ID NO: 264679 - DNA, 122 bp, Homo sapiens
cctcaccgatggctctagcctccagatcccaaattccagcctcacactggcacagcctcacgtggcagacagcaggcccgaaggcaggcaaagtattccaccctaaaatacattcctttcac

SEQ ID NO: 264680 - DNA, 122 bp, Homo sapiens
tcggtgaacttctggatgtctttcgggaggggaaggctctatggtcgcgtgcagagcgcccgttccacgtcaggtacccgaccatagagcaaggcggccgcggactacccaagggaagggga

SEQ ID NO: 264681 - DNA, 122 bp, Homo sapiens
tgtcctctctcaccctgctcatgctggtcatcatctacgtgtccgtgtggaggtgggtgccgcccaggtgctgggcatgcatgtctgtggctcctgcatcacacgcctcttcccttgaaggt

SEQ ID NO: 264682 - DNA, 122 bp, Homo sapiens
ggaaagcgctggtatgggacgctcggacccagaccacagcccccggccgcggcaggggcgcggggacttgatcccacgtcaccctagggggcagaagtgtcccggagttgggaggggatttg

SEQ ID NO: 264683 - DNA, 122 bp, Homo sapiens
attttaacgtgtgccctttgtacaacttgacattgacactaccgtgaaatgtaaattacacggaactccatgggaccactaaaccctctcccactcagctacagagttagcagaatgaacgc

SEQ ID NO: 264684 - DNA, 122 bp, Homo sapiens
ctggctattacgatccacatctcagaagggtgaggcacttcttgcgatatggggagtaatcgcgcccccctctccccctctggctgttacgatccacatctcagcggggtgaggcacccctc

SEQ ID NO: 264685 - DNA, 122 bp, Homo sapiens
ggtccaaattcaccatcctggggatatcaggtgcggccagggtcccagatcctatggtaccgagggcatgttggttaggtacacttgctggtaaacgttttaatcatccaggcttgggggcg

SEQ ID NO: 264686 - DNA, 122 bp, Homo sapiens
ctgggctgcgtgcccccctccctcatgctgcttctcatgtgcttcatgcccgagaccccgcgcttcctgctgactcagcacaggcgccaggaggccatggccgccctgcggttcctgtgggg

SEQ ID NO: 264687 - DNA, 122 bp, Homo sapiens
cccagaaggctgcgcgcaaggagggcggggaagagggcgtccgtgacggcggcctcaccgcggcatcctgggaggcgtagttctcactcctatgacagaaaacgagggtgtggccagcaaag

SEQ ID NO: 264688 - DNA, 122 bp, Homo sapiens
taatcccagtactttgggaggccgaagcgggcggatcacctgaggccgggagtttgagaccggcctgaccgacatggagaatctaaaaatgcaaaattagccgggcgtggtggcgggcgcct

SEQ ID NO: 264689 - DNA, 122 bp, Homo sapiens
tgctttaatttgttccacgggtccaccagcagagatgaggaactttcttccggggaaaaccgagagcattactttcacttttaggtgaaagtgtttgggtgaatccactttcagaaattaga

SEQ ID NO: 264690 - DNA, 122 bp, Homo sapiens
tagatatctggaagctggggacaatggttatggacccgggcggggccttgtccttggccgcggtgctgaacgttctccacccgaacggcagcatcgacctctggcagctgccccctccttta

SEQ ID NO: 264691 - DNA, 122 bp, Homo sapiens
tcctctcctcatctgaatcatcaggatggagaacatctattatttatctttgcccattcacgcagaacctagtgtataccaggtgctttatgaatatacattttaaaagaaggatgaataaa

SEQ ID NO: 264692 - DNA, 122 bp, Homo sapiens
tgcttggagcaggcattgctgacagatcacagctgctgggcccaaaggtccctttgcacgcgggacttcaggaagttgctgctgacctatgggagttggtgcagaaagatgaaatttgttat

SEQ ID NO: 264693 - DNA, 122 bp, Homo sapiens
atggtgcgggtgtgacggagggttcaaggtctgcatgaagactgggggctttgcggttaccgggccctgggctgggtcaggacgcccaggtaaagtaggcgatctcatccaggtcgaccggg

SEQ ID NO: 264694 - DNA, 122 bp, Homo sapiens
acctgttccctcctgtccccaggcggagtctgaaatggccctggatgctgagttcctggacgtgtacaagaactgcaacggggtggtcatgatgttcgacattaccaagcagtggtaagagg

SEQ ID NO: 264695 - DNA, 122 bp, Homo sapiens
aagctgttgctgcaccaggatccccaaggcccggagggactccaaaatgtgagggcaaatcggcaaagatgatgtagcacaaagagcgccattaacaccataaggtgtgacgtgcacagcgg

SEQ ID NO: 264696 - DNA, 122 bp, Homo sapiens
gagatcagggaacaggccttggggatcctggagcggggtcacagtgagcattcggtcagccggggagacagacgccacaaagctcagcaggggctcagtttctggcctctcttcgccaccac

SEQ ID NO: 264697 - DNA, 122 bp, Homo sapiens
gttgagagcggtgtggcaggtgttgtagccgctatggtgaagttcgctttgtagcggccccggctagagagttgttctgttccctgcctttgtgacccggaggagcttttggggtgcgtcaa

SEQ ID NO: 264698 - DNA, 122 bp, Homo sapiens
gtcccccaggccaggatgtcaggcctggtgttggggcagcgggatgagcctgcaggccaccggctcagccaagaggagatcctggggagcacacggctggtcagccaagggctagaggccct

SEQ ID NO: 264699 - DNA, 122 bp, Homo sapiens
gtgtggtgtggtggggtggggtgtgggtaggtgttcctttctgctctgagaggctattgccgctccattttaagccacaggatgtaaaaggaaatttcacatgacttgcagaactgtctggg

SEQ ID NO: 264700 - DNA, 122 bp, Homo sapiens
cccacccctcttactccagcctcgtgttgtaaataaagtttcggtggtcatgctgagggccggctcccagctctgccggggacggacagggcagagggcagcgggcagctccaggaacacgg

SEQ ID NO: 264701 - DNA, 122 bp, Homo sapiens
cccagcatgccgcgcgcatttgggccgtaccacaacctgtagggtcatctgggtctgaaacgggcaccagcgacgcgggagcagggactgacgcccctctagcaaagcatctgtggtacatc

SEQ ID NO: 264702 - DNA, 122 bp, Homo sapiens
gacgagctggtgttcacggtggtggaggagctgtccctgggggcgcttgccggagctgggcggcccaccagcctggctagcttcgacagtgactgctccctgcgggccctggcctcggggtc

SEQ ID NO: 264703 - DNA, 122 bp, Homo sapiens
gaggctgtcacgttttaggaatctcaatggtcccccagacaataagccaacggcctttggcgggtgggattttgctgaagtcatttctttgtgactctgtgggcgaggcaagtatttgccag

SEQ ID NO: 264704 - DNA, 122 bp, Homo sapiens
taaactccgaaagctgaatgcccccgtcttgtcaggaagtcagtcagtctggggtgagcccgacacgcagcagtggctgaacttttggccacatctcggcaggcgcgtcgtcgtttggattc

SEQ ID NO: 264705 - DNA, 122 bp, Homo sapiens
cccggcctcctatggagcctccagagctcccgccgccagagccccggccgccagagctgccgccgccgccgcctccagagccacctctgtagcccccactgctgcttccggagccgtagctg

SEQ ID NO: 264706 - DNA, 122 bp, Homo sapiens
aacctcttataaaatcatcagctctcatgagatctattcactatcaccagaacagtatggcggaaactgcccccatatttcaattatctcccactgggtccttcccacaacacatggcaatt

SEQ ID NO: 264707 - DNA, 122 bp, Homo sapiens
tgccaccaaggaagatgctctactcatccggtgcagccagacagtaggcaagcctttgcacgggttctgttaaggcgcatttaaacccgcgcaaataaaagcgaggtaggaaagtaggatac

SEQ ID NO: 264708 - DNA, 122 bp, Homo sapiens
ggtgcttgcgggccagcgtgagttctgggtgggctgggcttggcgggccggcactcggagcgcccggccagtgccgctggccccgggcactgagggtcttagcacccaggccagcagctgcg

SEQ ID NO: 264709 - DNA, 122 bp, Homo sapiens
cttacatgtcttgattggtgtcttatgtctccctaaattgtataaacccaagctgtagcccgaccatcataggtacatgttcttaggacctcttgagactgtaccttgggccattggtcact

SEQ ID NO: 264710 - DNA, 122 bp, Homo sapiens
tagggtctcctttccacctcctgtaccgcaggggggcagctaacagactgattcgagaagcgaccctgaaaaggatcgatgaagactgaagaatgagaccgaaaaaggctcaggaggaaggg

SEQ ID NO: 264711 - DNA, 122 bp, Homo sapiens
atccgaaagaacctgcctttccgcccggaagtcggcgtcttgagtcataggagtgagccacgcccgggctgtgggaataagatggcggggaagaagaatgttctgtcgtctctcgcagttta

SEQ ID NO: 264712 - DNA, 122 bp, Homo sapiens
gccaagtgaggtcctgattcttctatgtgtctccggttcccatctatgagaagggcacaacgcaaccagggttttgggcagccttccatgaaagcacctggaagccggagaaggggggcggg

SEQ ID NO: 264713 - DNA, 122 bp, Homo sapiens
tcgccatgtcgggcggctggggtgagcccggggacgggcgggcgggaaggcgcggagtggcgggcgggtggcagggaaggtcccgggcccagccccagccccagccccagtccagcgaagcc

SEQ ID NO: 264714 - DNA, 122 bp, Homo sapiens
agggggagaagcttggataatcattagaaaaaccctgttcacctataaaacctattctgccgcctcgaagcaaacactggagaaaggctgatttgagtatttaggctttataaattgcactt

SEQ ID NO: 264715 - DNA, 122 bp, Homo sapiens
gcgttggtctgtcaggcttggagttccccgggttgtgggttttagggaagggaagggaagcgaggaaggacttgtgagaggaagtcctaaaggccacttaagggcacacagaggcccggagc

SEQ ID NO: 264716 - DNA, 122 bp, Homo sapiens
cctatcttcttgagggggcccctaggggtccccaaatcagttgactgtgtgctccctggccgctgggcctgcaacactctgcccagctgctcttgctggctgtagttctgctcagacctcct

SEQ ID NO: 264717 - DNA, 122 bp, Homo sapiens
tccgggtcggccagggagagcgaggccccggggtcctctgtgaggtccccagcgaagagacgcagctggggaaggcgccgcccccgggccccctgcgccaccctaaccgggcctctccttag

SEQ ID NO: 264718 - DNA, 122 bp, Homo sapiens
gaaactgatttctgaacccactaacaagctgcaaccttcagtttgataaacacttgtccacgagatctgcaaaaatgggaaaatcaggccatatgactaacttatatatcctccaagccttg

SEQ ID NO: 264719 - DNA, 122 bp, Homo sapiens
ccagaaaacaaagcctgccctgctgttaaggaagccttcgagggttgatgagtttgcaaacgccgtgccccatttctgacttaaaaaaggcttatagggacacaggttacaaaacccagaaa

SEQ ID NO: 264720 - DNA, 122 bp, Homo sapiens
ccaaaagttgctggcttttactcccaggcgaatcttctttccttctgctctgccttgccacgttcggggaagttcccagaaaatctaagcatgatttgggggaagagtcactgatgtaattt

SEQ ID NO: 264721 - DNA, 122 bp, Homo sapiens
ttcaggggatttcagcccgactcagcactgttgatgttgttatgtgaatttgttctatgacggttttgatggtcttgggattagccactaaacacacctggtgttctgtttactctggcaag

SEQ ID NO: 264722 - DNA, 122 bp, Homo sapiens
gggctcctcaagcgtggcccgaggagacgccaaggcccaggaagcgctgagagcgagagacggccgccagcacgttgtcacctctcacagtgaccttggcagatgcggtatgtacccatgaa

SEQ ID NO: 264723 - DNA, 122 bp, Homo sapiens
ttgtctaattactgtggagcttagggagaaggagccggctcagggcagtaaactgacactcggtctctgtgtgtggtatccaggcagggtttgatggaaaaagcctgcttccactcaacctc

SEQ ID NO: 264724 - DNA, 122 bp, Homo sapiens
ccaagtccccagagctggcgaagagttaggggtgctcccagctctgcctggggaccttctcgccccaagccccggtttccccatctgcccagtgaggggcgggaactagataccaggttccc

SEQ ID NO: 264725 - DNA, 122 bp, Homo sapiens
ttccgtgcctgttaccgccttccacccgtgaacggtcctgtgagctggaagaagggctagcgtcagaatcttcatttccaaagtgagatgattcaagcaggaggtggttagattgtgaacag

SEQ ID NO: 264726 - DNA, 122 bp, Homo sapiens
gcacaggagcatccagcctggtctggatgggaagactgaatcttggatcttcagaaatcccggctttggtttcccaaacactgtctcttccccacccccacctcccagctccctccttgccc

SEQ ID NO: 264727 - DNA, 122 bp, Homo sapiens
gaaacctgttcctctcaagtgccctgttgtgtggaacacttcacatattggcgcacagtacgtaaggaggtctcatgtgctgtaggagtaaaaaagtctttgcataaaacagtatttatttt

SEQ ID NO: 264728 - DNA, 122 bp, Homo sapiens
ggcccagctgtgtctcccgcacgggccggcgggcgctgtgatggaggcagtgcaggatgccgtgtgagcccgaggaaggacttgcagccctgctgaggggacgaggcgaggcttcttggatg

SEQ ID NO: 264729 - DNA, 122 bp, Homo sapiens
gacagccgtctggtgattttgcatcacacggaataaaacctggtgtcctttccagtctcccgggattacaggagctgttcccgactttgcctcccgtagctgttccgcacatggcgggaatg

SEQ ID NO: 264730 - DNA, 122 bp, Homo sapiens
aggatatttccctgaccccttcgcggaattcctgacaggggtgcctcatttactcagccccgctcgctgctctcagctcctcgcgggagggagtgcacgagcgaacgagtacgggagctgga

SEQ ID NO: 264731 - DNA, 122 bp, Homo sapiens
tttcactcatttagttatttagcaaatgacctttccgggtctgctgtgtgctgggcacagcgagagtgtgacactattttataagacccaggtccttgcctccgcaggaggcaaagaaatcc

SEQ ID NO: 264732 - DNA, 122 bp, Homo sapiens
ccgcgtagggctgggaaaaggaggcaggagctctcagcaaacccacctttagctggaaaacgtcgctgtcccgccaccacggtccgaaaagcgttcgccccgctctggcctcagtgtgccta

SEQ ID NO: 264733 - DNA, 122 bp, Homo sapiens
gctgcagacagacctagtgccgagggatggacaggcgaggtggcagcgtggagggctcggcgtggatggcagcctcaggacacacacccctgcctcaaggtgctgagcccccgccttgcact

SEQ ID NO: 264734 - DNA, 122 bp, Homo sapiens
ggactacatgttgccccacatgccactgcaaatgttttctcaattaggtgtcttatctcccgtgagttagcatcagatgaagcttgctgacagcgtaatggcagggaaagcttccgacggct

SEQ ID NO: 264735 - DNA, 122 bp, Homo sapiens
tcccctgctccctcccttcctcctaccacccacacatccttcccttttgcagcagatactcgttgagggcttactatgctgcctcactgaggcattgtgccaggtgtcaggaatacagtggt

SEQ ID NO: 264736 - DNA, 122 bp, Homo sapiens
gctggggagatgccaggatccccagggctcccgaggctaggctgagaattggcggggtgtcggagctttgccttagggcaaagggaaatgcaaattttaatgacaggttaaaaaaaagcccc

SEQ ID NO: 264737 - DNA, 122 bp, Homo sapiens
ggctggaggggggatgggagcatgagatgctggggttggggaggggagagcccacttcctcgccagcctctgcggcatcaacaacagctgttatttattgagggctgggcctggctcaaaca

SEQ ID NO: 264738 - DNA, 122 bp, Homo sapiens
ccagcggggtcccggccgccccgcgggccaaagtcgagccctcccgcccgtgggcgagcgcgccagccgccccttccagaacagccgccgccacaaagaagaacggggggtgccgaggtccc

SEQ ID NO: 264739 - DNA, 122 bp, Homo sapiens
ggttaagactgtgctgcaacttggtcgagtttcagaaagttctccggagagcccaactgccgcgtcccgtcgcggcccctgcctgcgcggccgactgtaacaggatgctggggctccaggcg

SEQ ID NO: 264740 - DNA, 122 bp, Homo sapiens
tcccagagcagccgccatcttatggctgaaggggattgaggccgagctgggcaagaactccggcacgcgcagattgtggagctgactgcgggaaggcctgagtcacgccacagccccttccc

SEQ ID NO: 264741 - DNA, 122 bp, Homo sapiens
caggagagccctggaccaggacctggacgaggctcacaggcacccgcgactcaggccctccgaaactctgggccaacttggtttcacacaaggaaaagtccagcccccttagggtcttgttc

SEQ ID NO: 264742 - DNA, 122 bp, Homo sapiens
aactcacaactctgacgccccgtgactgcatcccctagctgggcagagacgcatttggctcgccaccagccacctcccaacagcgcccagctcggggagctcagggaatttgcagttgaatc

SEQ ID NO: 264743 - DNA, 122 bp, Homo sapiens
tatttatggggtatatatgatcatatacgtagtatgtataatggtcaagcttgttatacacgtagtatgtataatggtcaagtcaggatatttggggtatccatcaccttgagtatttatca

SEQ ID NO: 264744 - DNA, 122 bp, Homo sapiens
cttagaccctgctgacctcaccctccagaggctgccctttaatgctagtcaggggcttcccggactgggaccctgttagtcacttaaaaatcctaagtcccggccatgcacagtggttcacg

SEQ ID NO: 264745 - DNA, 122 bp, Homo sapiens
gcgtcctgttcggcagtgtccattagagggcgccagcgcgcctcagaagagggaccgtgacgctagccctcgcgggtgcagcccggaattgcaagaaggctgcggaaggctgtgccagcaac

SEQ ID NO: 264746 - DNA, 122 bp, Homo sapiens
aagaatgggggtctttctggaatggaagacgctgacttcaagcattcttcaaattactctcgttccccagctgagctttgttgctgagggggttggggacaagccacaggggcacttgcata

SEQ ID NO: 264747 - DNA, 122 bp, Homo sapiens
gcctcgccttgaacatccttgttctctgccccaggtctgtgggtcagatggagtcacatacggcaacgagtgtcagctgaagaccatcgcctgccgccagggcctgcaaatctctatccaga

SEQ ID NO: 264748 - DNA, 122 bp, Homo sapiens
ccattcagaggccccgtgagtcggggccagagctgggttccagggtggcaggaggcccctcgatgggcttgtgagcaaggaagaggcccctgccggtcacactgaggtccctcctgagcctg

SEQ ID NO: 264749 - DNA, 122 bp, Homo sapiens
cctagcacacaacactgcctacactctgtgagaaaaagagactttattaggcacagagggcgactggtaggcagttacaaaatggctactgggcttcctcccaagctggagagtagtacccc

SEQ ID NO: 264750 - DNA, 122 bp, Homo sapiens
ctcccctggcctcaggttactgtgccatagcaggctcaggttctcttactggactctcttcgagttgacagttctcccactttaccaaatagccagaggcctcacaaagacctagaattgcg

SEQ ID NO: 264751 - DNA, 122 bp, Homo sapiens
cgtgatctccatcaggggagagggtgaccccagcctttactcaaacagcagcactgggttcgtgatctccatcagtcctcagggccccttctgctgagtgagaggggaaaaagccagaacag

SEQ ID NO: 264752 - DNA, 122 bp, Homo sapiens
gcctagactgaagaaataagtcaacatgtgcgttctccggcacaggcccctccatggagccggcagtcggctatgcagccaggggacgcagatccacagctctcgggctgattcaggactgt

SEQ ID NO: 264753 - DNA, 122 bp, Homo sapiens
gtgaaaatatatggagtagaagtagaagtaagggacattaacgacaatgcgccttactttcgtgaaagtgaattagaaataaaaattagtgaaaatgcagccactgagatgcggttccctct

SEQ ID NO: 264754 - DNA, 122 bp, Homo sapiens
agtggcatgccactcagcaaagtgggtgctcggcttagggggacctcctaattctcccatcgggaaggatattgcagccccatggccaagactgatatcctctagggaaggaggataagaat

SEQ ID NO: 264755 - DNA, 122 bp, Homo sapiens
agtttcttttccaaaaccctgctgtatttgctcaattttatttttgagcatgagcacacacgcacaccatagctgctttgatattacatgttgggagtgttttcacagagcagaattgctag

SEQ ID NO: 264756 - DNA, 122 bp, Homo sapiens
cagatcctggaaacagaggttgttatgagacccagaaagcactgggtccctggttgctctcgctgccctgagcccgggtccagctgccctgctctgtgtcccttccacatcacggaagttgt

SEQ ID NO: 264757 - DNA, 122 bp, Homo sapiens
tctggcccctcttatacaaaaacaagctaagggcatggtgtctaaacaacacacactcaccggtgcacacaccccaacacatcaggttgcttgctttggctgaggagggaccgcttgtttca

SEQ ID NO: 264758 - DNA, 122 bp, Homo sapiens
cccaggacctgagaaggggcagctccggtggcaatgtctgagcccctagctgtgctggtccgggctggcctctctaagacagtgcaggccacgtgatccatcctcctagaggcagtgagcag

SEQ ID NO: 264759 - DNA, 122 bp, Homo sapiens
tcacaacaaaagctgcgcacgcaaccgctgtccccgcccacctcgggagaggggcggggccggctttccttgggtgcgcgcgcagctttctgtgcgccagttcacactccgggtcagagttc

SEQ ID NO: 264760 - DNA, 122 bp, Homo sapiens
cctagtgcctgggccttgtctagaaggctcctgccccaaaccccagggccaagggagagacggcaagatcctgccagccctagatgtccccctagatgataaaactggactcttgggcaggg

SEQ ID NO: 264761 - DNA, 122 bp, Homo sapiens
ctgcatggctaagtgcccgggttcgtcctaatcgagctgaacaccagccactgggttccacggttctcttccatgacccacggcttttactagagctataacatgcaccgcatgtctcaaga

SEQ ID NO: 264762 - DNA, 122 bp, Homo sapiens
gcagagcagctagctacactccctctctctcgctcctctcgctggtatctggtgcccggacggggagccccaggttccagccttcggctgcctggctggaggacacacagcagaagaaacaa

SEQ ID NO: 264763 - DNA, 122 bp, Homo sapiens
tggttaaatccggtaaagagctaacttggtgttgctcaacccttctcacactacaagtcccgggaagcctcgcgatgccctaatcctttgtttcccaccgtgccccgcgcggcgcaggcgct

SEQ ID NO: 264764 - DNA, 122 bp, Homo sapiens
tgagagcagcggaggaggcccacgcaggccatttcccgccccgtccccagcccacgcgggcgagctaccgcgggggtacgcgcagctcagatcctagcagcttacaaaaacaaccttttaaa

SEQ ID NO: 264765 - DNA, 122 bp, Homo sapiens
cggagggaaagacgctttgcagcaaaatccagcatagcgattggttgctccccgcgtttgcggcaaaggcctggaggcaggagtaatttgcaatccttaaagctgaattgtgcagtgcatcg

SEQ ID NO: 264766 - DNA, 122 bp, Homo sapiens
gagggccgtccgcagccccgcgacgccttacagaggcgaacaccgtgcgtcttcccagcccggagctccaggatcggctctatttggccgtcctctgctttgctgcagttgggatgaggaat

SEQ ID NO: 264767 - DNA, 122 bp, Homo sapiens
cggctgccacccgctctgcctcccccgacctcttctaagctgctcccggtaaggattccgcgacccccggagaacaggacggaagcctcgattctctcaagtcttagccaagttccctctta

SEQ ID NO: 264768 - DNA, 122 bp, Homo sapiens
cgcgcgggggaggggcgagctgagcgagggggtggagccagccatgggcccgcccctaaacgcccggaagtgacgttggcggacaaaggcagcgcgcgccgcgagctgtcgcgtctggtcgt

SEQ ID NO: 264769 - DNA, 122 bp, Homo sapiens
atacttaagacacaaaactctttccttggtagtggaaagctgctggcctcacccggttcgcgttgagtgacgtcacatagtggcaaccaatcacaagtctgctttgaaagatactgttaggg

SEQ ID NO: 264770 - DNA, 122 bp, Homo sapiens
ccaacgggatgtcctgggcgctcagctgccatcagctgtgcttcctcaggccaccggccacggctctaggaggcagaccccaccatcacccccattctgcaaagaacggagccgagaaagag

SEQ ID NO: 264771 - DNA, 122 bp, Homo sapiens
ttctgcttaaaatgaatcctgggacaatgataacagctacctttcactgggccctcacttcgtgccaggcactgtgtaaagggactttacgtttaatcttcacagtaacccctttgagtgag

SEQ ID NO: 264772 - DNA, 122 bp, Homo sapiens
tccagcctgggtgacacagctagactccatctcaaaagagaaaaaaaagaatgaatggaccgagaacccattctctagggaaatcacagcctatctgacaggattatggagtgctctagggc

SEQ ID NO: 264773 - DNA, 122 bp, Homo sapiens
atcttggggagaaagggaagaaaggggatggagcagggcttcccagtcgagggcggcggccgagcctgtgtccccaccagcgtctctgtggccgtgaagtgtatgcatgcgtgcccatgttg

SEQ ID NO: 264774 - DNA, 122 bp, Homo sapiens
gcaacagatggatctgccctggactgttccacacagatcttacccccaacatggagcagccgctcctcagggagcctgcctctgttaccacagtcatgaactaaggttggcattcatcagga

SEQ ID NO: 264775 - DNA, 122 bp, Homo sapiens
aactatgagtgtcaattcaatcccagttattctagtctttctgccctgtcatgattcacacgttcattcaagggtccttattgtgtaccttctgtataccaggcagtgctttaggcactggg

SEQ ID NO: 264776 - DNA, 122 bp, Homo sapiens
gaaggaggcatgggagctaaaaatcctgtgatactaagatctcagtcatatgaattacaacgtagtatttactggcaagaaggagaaagttgaaggactcagctaaaggagtacagcaattg

SEQ ID NO: 264777 - DNA, 122 bp, Homo sapiens
gtgaaattgttagctatattaacaaggatcaaaaatctgatcgtgtcaaaaaccttcattcgctcttcaagctctttagggctcatgaagccctttacaatttagtgccaacaagtcttact

SEQ ID NO: 264778 - DNA, 122 bp, Homo sapiens
acaaggcgcctgtcgggcggggtgtggcttcgggtggcggagaacgctgcgattggccctcggctgtggcgacagcgacgattggtccctgcgtgcagagcgcggtgagagtgggtggtggc

SEQ ID NO: 264779 - DNA, 122 bp, Homo sapiens
tatgtgaaaaggaaaaaatgcaaacgttggagtttgggctggagctcctccctccagctgcgacttttaactatgtaataatgtacagaggaagctgttggtgttctaagactctgtgtggc

SEQ ID NO: 264780 - DNA, 122 bp, Homo sapiens
tgagtctccctggaatctgccccttagcccgtattgcaggggcggtgcagttggggattccggcctgaaaggagacttggttgtcaaggggctcaagggcttcatgatccaaggatattggg

SEQ ID NO: 264781 - DNA, 122 bp, Homo sapiens
gaatccacaaatcctaaaatatgcgtgccttaagtcggcacaaaatagattaatattctgcgcgtctgtaagattggctgcggctagaaactccttcccagacgattaaatccactaaataa

SEQ ID NO: 264782 - DNA, 122 bp, Homo sapiens
gagacagagggaattggactcagtcggggggcagcaatggaagtcagcaattgcttagggcggaatgcgatttccggggaggaggcgcgggtatgtagacagagggggttgggacacaccag

SEQ ID NO: 264783 - DNA, 122 bp, Homo sapiens
gttgaagtggtgcaaatccaaactgctttcttttttgctcataagtagtgcttttcaaagcgtttggcatccctgccatatggatgtgtcactgtgtgagatgacaacaggatttgctggaa

SEQ ID NO: 264784 - DNA, 122 bp, Homo sapiens
gttaaccattttcaagtgtacagttcagtggcattaagtgcatgaatgctcccctggcctcgtccttgtccctgagggcactgctataccactgttcctaccttccatctccagaacttcat

SEQ ID NO: 264785 - DNA, 122 bp, Homo sapiens
ctctcgctcccccttacctttcactccgacaacatggcggcccactggggactgggttggcgcggtgcatcctgggataggctccggccccggccccggcggtggcagcggcatgtgcggag

SEQ ID NO: 264786 - DNA, 122 bp, Homo sapiens
gcgatgggtcagatgactcccatacttttaaaaactacctctataggagcgtgacagcagcgagtccttgcctcccggcggctcaggacgagggcagatctcgttctggggcaagccgttga

SEQ ID NO: 264787 - DNA, 122 bp, Homo sapiens
gagcgggcaggtgaagggacacgcggctgcagcacgggggactctgatgctccagccccacgcgcccgccggcgcggggtgtccctcccaagcccagagccgcccccaccgatgccggccag

SEQ ID NO: 264788 - DNA, 122 bp, Homo sapiens
ggccgtaggagccacacaaggaaggcctcacacgaaccacacgcactacagagccaactgcgacccaagcacgatcgaggctgtgtgtttctgaaaggatctgaccgaactgagcactaaga

SEQ ID NO: 264789 - DNA, 122 bp, Homo sapiens
tcagccactgcatgtgtgtctgcaagaatggtcagtggggccccacaggttccccagcctcggcttctctgtcccaggcctgcacagagatttggggcagccttgggcctgtggcttcctag

SEQ ID NO: 264790 - DNA, 122 bp, Homo sapiens
tgataaaaccactgctgctttacaaagactctaacaccccacttgtcttttagagataaacgccttcctgttttcttgtaatcacacccagaatcaccactgccactttttggattagtttt

SEQ ID NO: 264791 - DNA, 122 bp, Homo sapiens
aggagctgacccaggaacagtcccggggagctgatcctcacctggatgagatcccggactcggaacagaggctgcgatgggttgagacttttggggtcgtctgggagggggagcgaggatat

SEQ ID NO: 264792 - DNA, 122 bp, Homo sapiens
ggcgcccgctcccggctccagcgcgcctgcacgtacgtagccttcacgtgtgtgtggatacggagtgcatgtgtggagacagaggaatatgctccaacaaatttcggatagaggcgccgaag

SEQ ID NO: 264793 - DNA, 122 bp, Homo sapiens
tggtagttgaagctatgagactgattgctgtcattaaggaagcaagtgaggggaacattacgactccatggtgtacattagtattgatgggaatttccatgagtccttaatttgttatcata

SEQ ID NO: 264794 - DNA, 122 bp, Homo sapiens
ccacctacgtgaccacaccacactaatcagggtctccttttggagatctgctcttcttctcgaatgggggcgctgcaccatcggtagaacagggtaggtgggggcgccagaggtgaagggga

SEQ ID NO: 264795 - DNA, 122 bp, Homo sapiens
cgtctcggggatgacggtggagttcactttcgtgtcctggggagggagaggggcttggtccggccacactcttggcccctgtggacccccactgtggttgagcccccggccaccactcacct

SEQ ID NO: 264796 - DNA, 122 bp, Homo sapiens
tttggccgaccttgccgggagggccgggtggactctgcccggagcgggcagggtatgcgccgtcctcagagctgcgggagcccaggctggctgggcgcactcactgagggagctgaagcttt

SEQ ID NO: 264797 - DNA, 122 bp, Homo sapiens
cagagtgccctgcccttgtgtcaaaggcatatcgcactttttctctggggttattcgtcccggctgagaagcaccgcggtatcatgtggtgattgagcagcacccagcacattcatggctgc

SEQ ID NO: 264798 - DNA, 122 bp, Homo sapiens
accggggttccgggtccagcggagacgcgctcgagtggtagagccagtcagtcccagggccggttccgaagtccgcgccgggtggggaacggcgccccagtgcccagctgcccaggcccggg

SEQ ID NO: 264799 - DNA, 122 bp, Homo sapiens
cacaagacgtaagcaaaggacttcagaggtcctgaactggtgcccttttataaacgctgacgctggggaattttctttttttcttctttaaaaatccaaatgtaatcggagttccccacggg

SEQ ID NO: 264800 - DNA, 122 bp, Homo sapiens
ctgtgcctctcaagggagatggggtgagcatagccacctccactggagcccgaaaatccccggccgagataccgccactaaaaaggtacacatgcgtcaaagcctctcggagccatttccgc

SEQ ID NO: 264801 - DNA, 122 bp, Homo sapiens
gttgggtccttgcctggattttgacacagcaacttcctgtagtgagcactttgtatgaatcgtggacttcctgttctcaaggcgcaggtatttattctgtatctgtctagagcacacaccaa

SEQ ID NO: 264802 - DNA, 122 bp, Homo sapiens
cgtgggggagggagctctttctctggccctgcagtcacctgaggttgttaccattatgaacggccgctgggacccccgcatgtgcatgtactcccccagagtgtccgggggccccagccaag

SEQ ID NO: 264803 - DNA, 122 bp, Homo sapiens
cacaggggacgcagtcgaagagacacgggatggcgccaagggagcaggctggtggtaaggcggtggaactgggtgaggaagactctcctcttcttcagagggaggcaaaacagggggagccg

SEQ ID NO: 264804 - DNA, 122 bp, Homo sapiens
tgtaggcggcatcagcatgtaggctcattaacagtcagactgagacctggctattggattcggcattgtggatgtcactggtggccttaaatcaggccttttctggtgctgtgggagccaaa

SEQ ID NO: 264805 - DNA, 122 bp, Homo sapiens
acgggcaggggaagagggcgggcattcgggcagaaagaactgcttagcgaaggtaaggcacgaggaggcaaacgcataaggcacaaggcaagaacatgcagagcagaggacaaggccgatgg

SEQ ID NO: 264806 - DNA, 122 bp, Homo sapiens
aagagaagctgccacctgcccgagtgggagccgctccggtcctcccgagaccccccaccccggggcacagctagcccaggtggcacagcctcacctgctttccgtctgatcctccgcccgcg

SEQ ID NO: 264807 - DNA, 122 bp, Homo sapiens
gcggtaacttgtgtgaagtcacaatggtagagctggatttttgcagcccatgctcttacccgctgtttcagagcagagggccctctgaaggaagcaagtcagcattcctaacactgagtttt

SEQ ID NO: 264808 - DNA, 122 bp, Homo sapiens
cagtctttgaataatagttgacgatcttgccgtccagtttatactgatggggaatgctctcgtagggcttgaggtcaaggtccagcacagacacggaaaaggcaaacctggacctcgatgaa

SEQ ID NO: 264809 - DNA, 122 bp, Homo sapiens
cccccataagtctccagccttttttattttaaagcttattttaaagcatgtccctgaagacgagtggggagagcagaccacccgctgattccaattccctaggcggccgcggcgagctgcgg

SEQ ID NO: 264810 - DNA, 122 bp, Homo sapiens
cacatctgcctggacatccatgtgtttccatacatcctttgaaatctagatggaggttctcgaacctcaattcttgtcctctgccaacccccgggaccaacaccacatgaaagctgccaatg

SEQ ID NO: 264811 - DNA, 122 bp, Homo sapiens
agagactaattgagaaattaggacagtggattcctgacatttatatagtgagtagatgatcgtttgttagaattgcgaatttcatccagagaattttgtccaaaaaaaattatagaatttca

SEQ ID NO: 264812 - DNA, 122 bp, Homo sapiens
atatgtgcccacagctcactacctaggccctgatttaggcattaggaataaaaactatctcgacttagttaaaaccaccagatgcattgcttgaaaacctgttctgccacttaatagctgtg

SEQ ID NO: 264813 - DNA, 122 bp, Homo sapiens
cgagccgctgctccccgcacccagcgcccccggaccccacgctgaagggcattctccatccgctgcaagataaactttgtctgggcaaagagtttccggctaaccccctgtgatcaacgccg

SEQ ID NO: 264814 - DNA, 122 bp, Homo sapiens
aacgctggagcggccaggtgtggcccgctggcccccggggtgcatggggtctgtgctcctcggtcctggcgccagcacctggctgggactggtgagggcaccgcccgggactggcctccctt

SEQ ID NO: 264815 - DNA, 122 bp, Homo sapiens
agggaaggaccatgtaagtcaacaaggtatatcccattcagtactgttttcattttggcacgtatgccaggatttgcatatgaaaatgaacaattgggtttgcaatcataatgctcactact

SEQ ID NO: 264816 - DNA, 122 bp, Homo sapiens
caaaggttaggaaacagttccttgtgagggaaaaggagaaccggccgagaggggacacttcggccaaagccagatttctaacaaagtagcttgaagcgccttttgaacgcagaagagggctg

SEQ ID NO: 264817 - DNA, 122 bp, Homo sapiens
cctgctgcccccacccgtggccggcccgtggagtctgaggccgagaggagtggctgggaccggccgccgtggtgtgggtaagcgggagtgggatgtaacgcgcctgcgcagggttctcgccc

SEQ ID NO: 264818 - DNA, 122 bp, Homo sapiens
ctcgtataaagtccgagaggttcaggtctgtaagtcagagtccgcctcctggtccctaaacgctcattttaatcccacgcccctccgtgacacgcccctgctgtctgtctccaaggcaacgc

SEQ ID NO: 264819 - DNA, 122 bp, Homo sapiens
gtcccgaggctctggagggtgggcgtgagggtagccctggctgaggctcggaggtcctcccgggctgttcagagggccccaagcggtagccacgttctgatactggctagaagccaggggag

SEQ ID NO: 264820 - DNA, 122 bp, Homo sapiens
tttccgggaggccctggaagcttccatggggcctcccacccctgcattcctctccagctccggcaggatgaggccacaccgagacacattccatagattttctgtgtcttgagcggcctggt

SEQ ID NO: 264821 - DNA, 122 bp, Homo sapiens
cggctgcgcggtctcgggcggaggctccctcggcctgtccagcagctccttccaggcgctcggcggccaccaccgcatctgcagccaggcccgctgcagcccacagcgcccccggcggcggg

SEQ ID NO: 264822 - DNA, 122 bp, Homo sapiens
ggcagccggagggaactggagtccccattgcagaactgcggggccgggctctgggctgggcgcctgccccgcgcggccggcagagggcgctgccgcacacgccttggatctcactgtcactg

SEQ ID NO: 264823 - DNA, 122 bp, Homo sapiens
tgggccgggcgcagtggctcacacctgtaatccctgcactttgctgacatgggcagatcacgagttcaggagttcaagaccagcttggacaatatggtgaaaccccatctctactaaaaata

SEQ ID NO: 264824 - DNA, 122 bp, Homo sapiens
gctagagtacttgggactgcagaaaagctcagcagggctgtcactggctgtgtgtgtgtccgccttccatctctctctcgggggatttatgggcctcagggccctccttttacacaggaggc

SEQ ID NO: 264825 - DNA, 122 bp, Homo sapiens
gacacatgtgcacccgcgtccccaagacacatccccaagacacacaggcaaccatgtccccgtgacacgcgtccaacatcctcgtaacacgtgcacaccgacatccccgtgacatacacaga

SEQ ID NO: 264826 - DNA, 122 bp, Homo sapiens
gagaaggtaaaccagcgccccgagttgaggcgcgggtttggtggcgcgtttcagcgaagtcgcacgtgaaggatagcagtggcctgagaaaggtgagagcgggccgaggtcggaatgtgggg

SEQ ID NO: 264827 - DNA, 122 bp, Homo sapiens
ccctgcgctgcgtctccaagtgctgggaagactccgcggggaaaggtctgaggacgcggccggctggcacaggtgtggcggcttcagagggccggggagaacccatggcttcgaggctgtgg

SEQ ID NO: 264828 - DNA, 122 bp, Homo sapiens
tcctaaccaaggattgaccatgtgatttgggattcagccaatcatagaacctccctcctccgcccacagccattggtacacggaagggcatgtgaccacgtgacctagcatcagccaatcac

SEQ ID NO: 264829 - DNA, 122 bp, Homo sapiens
cggtggaggctcggggtactctccgagctcggggatgatttccgtggcatcattcttgaacgcctgccacccctggccctccactacacggaaggctgtgtgtaccagcaggcagacgagac

SEQ ID NO: 264830 - DNA, 122 bp, Homo sapiens
gaaataagccagggcaaaaagacaaattctacatgacccacttctgtgaggccccagagtcgccagatccacagagacaccaggagaatggaggtgggagcagatccacagagacaccagga

SEQ ID NO: 264831 - DNA, 122 bp, Homo sapiens
atactaccattaggaggcgcaccctcaggcctcggctccgcgttctttatgtctctggaccgctctctctcgcagctcatctctatggtttccgttgggtgtgtggtttttttgtttttttt

SEQ ID NO: 264832 - DNA, 122 bp, Homo sapiens
gagagctcgtccaagcaagtgcaacccgctggtgactgcaaatgagcacatggaactgtgcgcccacgctacgctcggttaaaatcaatctgggctcttcctgcctcgtccacgccgaggtc

SEQ ID NO: 264833 - DNA, 122 bp, Homo sapiens
ttcttttggtaaatatacttccaagactgatactccagctgtcaagagccccagcgccaccgccagcaccgaccacagccagcgcctcctgtctggggctgcaatcactgccccggctccag

SEQ ID NO: 264834 - DNA, 122 bp, Homo sapiens
gccgggaccgcctgtgccccgggctcccacggacttggtttaggggtaagcagagaccctcggggcaagaggagcaaaggaaaaaagtgctaatccctttacaagagctttcctggagggcg

SEQ ID NO: 264835 - DNA, 122 bp, Homo sapiens
caccaaaacctccactgttcctactacactccagagtacctatttcatgttctcacttctcgcttttcccagcttttaaaactccatgcctgttattacagtcgttcccttgcccttgctta

SEQ ID NO: 264836 - DNA, 122 bp, Homo sapiens
ttgtaataggccaggcgcatggctcacacctgtaatcccagtactttggggaagcttaggcgggaggatagtttgaggccagcctggacaacataagcgagaccctgtctctactaaaaata

SEQ ID NO: 264837 - DNA, 122 bp, Homo sapiens
agccttgaagctgcctttggtgacacactgagtgaaagggactgggccagctcagtggaccgtgtggaacaggaacagctggagtggagttgaggactattagaactggttcccctcaccac

SEQ ID NO: 264838 - DNA, 122 bp, Homo sapiens
tccaaacaggtggacccgaagctcctgtttgatcggagaataacgttcaatttactccgccgctgaactgatggtttaaatattcatctttggatatggtttcacattaggcaaaagttagg

SEQ ID NO: 264839 - DNA, 122 bp, Homo sapiens
accctgcgcccctcaagacactcctctttattttagtgcccctctcagctgaggaggaaccgagagcggcgctggggcacctgagcccaggaaggcaacaggccggccgggaccgcgagtgc

SEQ ID NO: 264840 - DNA, 122 bp, Homo sapiens
ggaccctggatgtcagaagagtgaactgtcatgttttggctagaaaagcctcttagaacacgtctcaggacaactcggtggtggccactgcgcagaccagacttcgctcgttctcgcatgcc

SEQ ID NO: 264841 - DNA, 122 bp, Homo sapiens
gctttagtaggtgccgcggacactgcgcccggctttagtaggtgcctcggacactgtgcccggctttagtaggtgcctcaaacactgtgcccacgtactctgaatggcgtatacacaatgat

SEQ ID NO: 264842 - DNA, 122 bp, Homo sapiens
actgccgccgtctttctgtctctgtctccctccgggtctctgtctccctccaggtctctgcggcccgcgtctcacactcccgcccccgcaacccgaggtcctagcccgcccggggactcggc

SEQ ID NO: 264843 - DNA, 122 bp, Homo sapiens
cctgggtgacagagcaagactctgtctcaaaaaaataaaaaaaaataaaacacagaagtacgtacctcctgaatgagtgacaacagtttttattgtttgatgaatgaaggaatgggaaacat

SEQ ID NO: 264844 - DNA, 122 bp, Homo sapiens
ctgccagcgggaggtaatgggcagcagatggattagcgaccaggagatctagttctaacccgtttcacctctagcttgctctgtgacgttggccaaggccctcattagtaggtcatgaaatc

SEQ ID NO: 264845 - DNA, 122 bp, Homo sapiens
aggaacgaaggggagaggaagcgccctgggtgtgacatgaggacagtcatgggctgcagccgggcctggcgtcctgttctggttttgccatgtcctgcttgggtgacccgtggcaagctctc

SEQ ID NO: 264846 - DNA, 122 bp, Homo sapiens
gcctcacccgcgccagtgtagcaaaggggctccagcctccgcgctctccgaggcgaccggcgcccgctctcggccgccaacgcaacttggcaaccatggcagcgctggagcgcgggcccagc

SEQ ID NO: 264847 - DNA, 122 bp, Homo sapiens
tggtttatgttttcccatttatgagtggcctctgatgtgagaatggcaaggtctctggaccgctttcctcagagggtatgcaatagggtggatactaatagctaggatagactggctccttc

SEQ ID NO: 264848 - DNA, 122 bp, Homo sapiens
gtatatcctcggtcgggagtccccactgtctctctacaacgaggagctggtgagcatgaacgtgcagggggattatgagccgattgatgccacgggttcatcaacgtcgattccctcaggct

SEQ ID NO: 264849 - DNA, 122 bp, Homo sapiens
ccggcgccggcgaagaagacccggctgcggccttcttggcgcagcaagagagcgagattgcgggcatcgagaacgacgaggccttcgccatcctggacggcggcgcccccgggccccagccg

SEQ ID NO: 264850 - DNA, 122 bp, Homo sapiens
gtccttgttctcccgcctgggcaggagcccgctgaggctggggttaaggggtaggaaccacggtaattatgccttccgagtgggtgcccagctgccctcccgcactgaccccactcaccctg

SEQ ID NO: 264851 - DNA, 122 bp, Homo sapiens
ggacgggccgggcgcagggaccgccccccgcaccgtgcgccccacccagctgtccagaaacggtcagggtcaatgtcatcagcttctccatggaatgggaagcaggtgaaggacaaaagcaa

SEQ ID NO: 264852 - DNA, 122 bp, Homo sapiens
gagggaaggtgcaaatctagaccagtcgtcatcgaggcacaaacttttggtcacctgggccgggtacttcaggagaaaggcctcctgtcttacagtgctaactcagcagaccggcagttttc

SEQ ID NO: 264853 - DNA, 122 bp, Homo sapiens
accaatagggattgcgtgaaccggctcccggggaagctgggggaggggtgcagaactattcgacttgtgggcaaggtcaggtttctgcatttttttggcactcgcagtcttcactctctcta

SEQ ID NO: 264854 - DNA, 122 bp, Homo sapiens
tgcctgaggaggccaagcgtctggccttcaagcattcttctctgctgtgatgttgtttcccgtcctgaaaagcagggaggaaatgatcaatcagtgtgcctcaacctggagccgattggctg

SEQ ID NO: 264855 - DNA, 122 bp, Homo sapiens
gtatctgttggttttgctttttagaaagtccataaaccaccacaccagagactgataaaacgtatttctcccagcccataaatgtttattgtagcttcattcataatcaccaaatatttgaa

SEQ ID NO: 264856 - DNA, 122 bp, Homo sapiens
gatgactctgcttattcctgccaaccctgccctcagctgctcactggcccctgtcgtgagcgtgggcgtgcatgtgcacacacttgcacacacaggcacatgcacgcacacccggcctggag

SEQ ID NO: 264857 - DNA, 122 bp, Homo sapiens
catctgtgtgtatgtgcgtatttaaattagattatttataataaccagagccagccctcgcgctggccaggatcctcctgccgagctgatgtcgctcctgccctctgccggggtccggaagc

SEQ ID NO: 264858 - DNA, 122 bp, Homo sapiens
gaggccgagctggagctggagctggagcccggggccggcctagccctggccccgctgctgcggcacctgggcctcacgcgcatgaacatcagcgcccggcgcttcaccctctgctgaggaac

SEQ ID NO: 264859 - DNA, 122 bp, Homo sapiens
tggccatggctgggctcccctactgcaccaggagcatggctcatcccagcccagaggttgcggccaacaatgacacacctttaccagagagtgacacaggcaccgatggcaagcacaataca

SEQ ID NO: 264860 - DNA, 122 bp, Homo sapiens
gtcttccctctgaggactggatcctcaagatggtggagattatgcaaatgtaggaaagtacgatacaaaggaaaggagtccaaccaatgaagaccccagtggatagcagtgccaactcattg

SEQ ID NO: 264861 - DNA, 122 bp, Homo sapiens
tggatttaatctcttcgaatctccctctcttgtaggacatttttctccaagaccagccctcgataccctcagccgtcgcaaggcaacctccagccgccaggggccgcagtcgcgctcctcgc

SEQ ID NO: 264862 - DNA, 122 bp, Homo sapiens
aatgctgaaggttacgctgcccagaacgcttctgcaaataaacaggctgctgtgtttgctcgctttcataaacacgggaacatcctgcgcacagacaaggctgggagacaaaccccacacac

SEQ ID NO: 264863 - DNA, 122 bp, Homo sapiens
tgaccaggactcctgagcctgacctataaggaggtgctaggcagggacacagatgggagacggtggacagcggcagggggaacccagggagcgcgatgggctgcagggctgcatcagggctc

SEQ ID NO: 264864 - DNA, 122 bp, Homo sapiens
atagaagcttaatacatattttgtgaataaatataaaaattagaggttgaagtagaactgcggactgtccattaccatgcttgatacttcagtagaatgtgtgccaaagaatatggtcccag

SEQ ID NO: 264865 - DNA, 122 bp, Homo sapiens
atttggcccacaacagacgttgtttgcaaacgtcatcaacagaagatgagatctttacagcgggcaggccttgctgcaatggccggtgtccttataggatgaggagattaggacacagacgc

SEQ ID NO: 264866 - DNA, 122 bp, Homo sapiens
gggcggccgcgcaggcccgcgccccgctcccgccccgcctgccgcgcctcccggggcgcccgcattaaagcgcatatgcaagccatgaattatcaactgaaaggagtcaattaccggctcta

SEQ ID NO: 264867 - DNA, 122 bp, Homo sapiens
attaatcggccgcaaggcctcgaggggttgggggacgggcccttccctacagagctgtgccgtgattggcgtaaggggaaatgatggaacgctcacggcccctggagtcccgaggaggcgcg

SEQ ID NO: 264868 - DNA, 122 bp, Homo sapiens
ttcagcgcagagaacggaggtggagatgggctccggtgctcccgctgaacagggacggtgcgcagtcattccccgcctgcaccacgcggtggcagcagcagcatgggctgaaggggctgttg

SEQ ID NO: 264869 - DNA, 122 bp, Homo sapiens
tccccagaggcgggcacaggaccacctcctagagcagctgcctagtaacagggctggcagcgggaaccttgccctcaacaatttaggattgtgcattttgctcagttctggcagtagcctgg

SEQ ID NO: 264870 - DNA, 122 bp, Homo sapiens
gggaggcgaggaggctggtgagctgctgtggggaagcggctatgttgcacaggtcctgctcgcagcagtggtgccacagagtgtaggagtgcagccagtaggtggcatagcctggcagaggg

SEQ ID NO: 264871 - DNA, 122 bp, Homo sapiens
ctaatgacctgccttggctctctctgcatggtttatgcatatcaaataattatcaacaatcgacaaatatttattgagttcctaccacgtcccaggcgctgtgctacgcactggaagttaca

SEQ ID NO: 264872 - DNA, 122 bp, Homo sapiens
atggggttggaggtcccccgccgcacacgggggcgccgcacgttccacatccggggatatcgtttgaggtgacggctccctagcttccaagggccttcggcatccggcctagcggagggtct

SEQ ID NO: 264873 - DNA, 122 bp, Homo sapiens
ggaagtacacatacagagaagggtaagatgaaaacctggagagtgtggagtccctgaaaacgaggaaagaaagtgtttcccaagagggagtagtcaaaaagagtcaagggctttaatcattg

SEQ ID NO: 264874 - DNA, 122 bp, Homo sapiens
ccatctttctccccagcctgggaaggcgggcgggaggaggggatccgaggccgggggccgcggagcaaaaggcacgcggacccctaaacgacccccgagcgttgccacagccgggagggcgg

SEQ ID NO: 264875 - DNA, 122 bp, Homo sapiens
tagagccagggttttgccatgttggccaggctggtctcgaactcgagactttaggtgatccgcccagcttggcctcccgcaatgctgcaattacaggtgttagccactgcgcctgcctgatg

SEQ ID NO: 264876 - DNA, 122 bp, Homo sapiens
tgtggtggcgggacagtcgtatacaccttcaggagaaccacctcaggctgacaggcagtgcggagggccccaagagcgccttagggttgcctgctccagagagcgggactcctgcgctgcag

SEQ ID NO: 264877 - DNA, 122 bp, Homo sapiens
aggctttgggaagcaaaagtcgaagcagagagccctggtgggaagtggcagctgcgggtccgagacgggagtggtggttggatcctggatgtttgggaaggtggggcccccgggactggctg

SEQ ID NO: 264878 - DNA, 122 bp, Homo sapiens
tcaaataatcattaccataaacacgggttcctattacacccgttgcaaaaaggcttaaaacgccgataatagcgcaccaatattatttcaacagttttgaccggcgcgttaaaatgaacttc

SEQ ID NO: 264879 - DNA, 122 bp, Homo sapiens
aacccgccccaacccagggcaatcacacggggcctaccttcctggcaccgggggccggctcggccgggtgggcagctacagcgatacccgttgatctcatccacacacgtggccccgtaggc

SEQ ID NO: 264880 - DNA, 122 bp, Homo sapiens
agcaccagttagcatcagaggaatgttgtttccttctctgaaacagccatcaagtaccagcgatttcttggctccggcaagttaagtgctctgacccctcccttatctaactcaccccgcac

SEQ ID NO: 264881 - DNA, 122 bp, Homo sapiens
aatggcacagaaagatcttattcccgtccccactgccagtccctccagggaccccaccaacgctacccggcacacccaggctccccaccgacgtgccccccacggtcactgccccgtgttct

SEQ ID NO: 264882 - DNA, 122 bp, Homo sapiens
cttcctcgctgtcgttctcctctgactcggtcagcagctcctcgtccttatattcagccacgtccaccgcggagcccaggtgctctttcagcttcccgtggtgcttcacgtggtaccgctgg

SEQ ID NO: 264883 - DNA, 122 bp, Homo sapiens
ggaggaacaggcagtggccagagatcctgtctggagggacgttgctcacacctgagcgggcgggtggggggtgagttgtgttctgggagcaaagagcaataacatcccccttctccccgcaa

SEQ ID NO: 264884 - DNA, 122 bp, Homo sapiens
gtgaagacatgtctgttggtaataggtgcagggcactgttttcctagctggagtctgtcacggccaatgcctttctgatacagaaacctccttcctccataattaccacagcttttactact

SEQ ID NO: 264885 - DNA, 122 bp, Homo sapiens
gaactaggaaaggacagagcagaacctggggtaggtagccggggagccagggctgacccacgcctgaggacaggagggacgcaggcagaccccagaggagggcccgggccgcccagcagtcc

SEQ ID NO: 264886 - DNA, 122 bp, Homo sapiens
gctgcatgtgctgatttgaactcgagcctcagtaaaacattgaaatgaatgaacaccaaccggaagggaaagaagaggggaggggataaggagcctgaggattggtttgccccgcgggatgg

SEQ ID NO: 264887 - DNA, 122 bp, Homo sapiens
ccttgctctttgttgaatacctacagtgtgccaagtgtttggatattttgtctccaacaccgacagcataccgcctactcagtagcactagccactattttataggtggaaaaaccaacact

SEQ ID NO: 264888 - DNA, 122 bp, Homo sapiens
cctcagtgatgcgcttctcctcattgcggtcatcccggatgccctcactagacagctccgcgctgtagcccgtgggctctgcgccctcatcctgcaagctctcctggacatggtagctcacc

SEQ ID NO: 264889 - DNA, 122 bp, Homo sapiens
ttatagttactaaattcccatttgtatttgtattatatttactaaattcccatttgtatacgtggaagacacagtgttttaggaagaacagcaactctacacaaggacaagagacttgaagg

SEQ ID NO: 264890 - DNA, 122 bp, Homo sapiens
cagcagctgacgctggccgacgtggaccaaagcctgcagcagcccaccgtggcctggctccggcgtctccaggcctgcggccaagcgtgcttgcccttggtgaccacattccccgtggtggg

SEQ ID NO: 264891 - DNA, 122 bp, Homo sapiens
gaagagctaagcagaccctaagggcccaggccgggccggacgccaaggcgaggcccgggacgcccttggaggttaatcctctagatactaagggctgcggggcgcttgggggcggcactgag

SEQ ID NO: 264892 - DNA, 122 bp, Homo sapiens
actcagtcaacactgttcacagaggcccacaaaccgcaacgaggtgctttggttgatgggcgctcgggtgtttggcgggattttctggtttttgaagacaaccccaattctccatcgcgctg

SEQ ID NO: 264893 - DNA, 122 bp, Homo sapiens
cggactgggctcagaacctcccgtttttctgaggtcaggcctcagggggatcaatgggggcgttggcggcagtagagggcgtgggggacaaggttgtcccaacgctgcctccagggcgggcg

SEQ ID NO: 264894 - DNA, 122 bp, Homo sapiens
cactcctttgagtgacagggggtaattgagaagctgctcctccctccaggaaggaagacccggagctctggcttccctcggcaaagcacatataaacccacagccactgcgggtggaaggag

SEQ ID NO: 264895 - DNA, 122 bp, Homo sapiens
cacctagtctctgagcccaggccctcggcctccgggccactgcggcccccgagctcgtcacgggccccacccaggcggctctcagtggtgaacatgccgctgaggtctcggtacaggcacag

SEQ ID NO: 264896 - DNA, 122 bp, Homo sapiens
atggatatccccgtcttgcacactctttgggccagtctagaattcttcccatcagcatttcggtgatctggaccgccgccacccacactgcgctccagggcagaaaagacgccccatgcccg

SEQ ID NO: 264897 - DNA, 122 bp, Homo sapiens
aaaggaacactgtctctccaggagtttttcttccatgcttggacatacaattgcaaaggacgatctatttctacagtctcactcactctcactgactacaaggatagggaaaccttcaaaaa

SEQ ID NO: 264898 - DNA, 122 bp, Homo sapiens
tttttcaaggggtctccttcgttctcactgtgcctctgaggcttatggcgtggccgcctgcgtggctcgggctcctcactcctgagtaggactgtgccgtgtgcactgcacaccgtggtctg

SEQ ID NO: 264899 - DNA, 122 bp, Homo sapiens
tccatggccactatgtccacactgccaccaggccctgggaggtcctcactgggcgggttccggggcagcaaccatttgtccagcaccagataggtatcctgggcatgctcactgcccactgg

SEQ ID NO: 264900 - DNA, 122 bp, Homo sapiens
caacttgcagagggaggacttggggtgtggcaggggagcagccaagccggcagatgactacgcatctccacgtacacacaggtctccatctcaccctccattatgggccggagagaacatgt

SEQ ID NO: 264901 - DNA, 122 bp, Homo sapiens
ctgacactgcacagcgcctgtgtaatccacagtaggttatggtgacaatgtttgtggatccggtctcattgctatcacaaattcagcaggcgtacaggacaaataggaagatataacataca

SEQ ID NO: 264902 - DNA, 122 bp, Homo sapiens
tggggctccctctccctttggtgccccacggggcaggggctccggggtgcaggtaccacgcgcccaagtgacctcggtgccagctcggggaagccacagcacctgccccgagggcatctgcg

SEQ ID NO: 264903 - DNA, 122 bp, Homo sapiens
cctcaggctgaggggaccacgcctcccctgcagcagcccagggtcacaccgcggcctgcccgaccagccagcaccacggcccacaggcctcaaaccacagacgttttcccacggcagcctgg

SEQ ID NO: 264904 - DNA, 122 bp, Homo sapiens
tctcctcacagcagccttcacatccttgttcctcaggctatagatgatggggttgagcatcggggtcaccaccccatagaaaagggggatgagtttgtctgaaagatcctctttgtctgctc

SEQ ID NO: 264905 - DNA, 122 bp, Homo sapiens
tgaaagcaatttaggttctttagaaagttacataattccttgccatctcatttgccctgtcgtggggtctgaaaatcttgttttagttttgttttttaaatcataaacggatgttcatgtct

SEQ ID NO: 264906 - DNA, 122 bp, Homo sapiens
gatgttgccaagagcaacagtgaagcagagttaaagagccgccagctcaagctcagaacccgagtgggggaggctggggtgcaccgaggcccagcaatccaagcccgtacggagctgcggcc

SEQ ID NO: 264907 - DNA, 122 bp, Homo sapiens
aatgaggcagaggctcttccttcccttccctccagcaggggtgtgtggcgtgggtgtgtgcgggtgtggcagggtctgtctgtatgtctgatgcctgtccatcaccggtgtatattttcgcg

SEQ ID NO: 264908 - DNA, 122 bp, Homo sapiens
ttcatcgcatacctgagggcgcggtattttctaagtccacttgcgaggctctggaaagcccggcctggcagggcgcccggcccgcaggctcgcggttagcttttccacgggccagactggga

SEQ ID NO: 264909 - DNA, 122 bp, Homo sapiens
aaggggagtcctggggctgggggccttccccgggccgcgccgcactcccggctcacagcacgctcgccgcctccagggacagatcacctctgggggagccccactcagggcgtaaatacatt

SEQ ID NO: 264910 - DNA, 122 bp, Homo sapiens
gttacaaatgcactggcattttcctacagcagtccgagagatgcactgttgcaaattccacgtgggaaaggatacagtttgggctgcttgcagacattctgtggaagaagacatgctacctg

SEQ ID NO: 264911 - DNA, 122 bp, Homo sapiens
acaccgaagggagaggctatgattggaggatcaggttagtccaccactctgctcctcctgcgcggtgagggggtggtacacgcgccctacctcggagtgtgtggcgccatgatgcagggaag

SEQ ID NO: 264912 - DNA, 122 bp, Homo sapiens
acagcagggcgcctgcgcacattagacaactttgggcctgtgtgggttagagatgggcctcgctaggccgtggggcggaaaggcgagatggggctacgcaggcgcactaggactccgacgtc

SEQ ID NO: 264913 - DNA, 122 bp, Homo sapiens
ccgcggcctgcgcggcgggcgggccgggtcaatgaggagcggccggcggagtgctgggaacgggaggcttggactgggggcccgggcgaggcgcggcccgcggcgggtggaactgggcgggt

SEQ ID NO: 264914 - DNA, 122 bp, Homo sapiens
ctaaagtcccctcgggagacgaaaaaaacgccaagtatccccgcagagatcggggtaagacgcagttgagtcttgcacacgccgcatcacgaggccgcgcgagtacaatttcaaaacttaag

SEQ ID NO: 264915 - DNA, 122 bp, Homo sapiens
cactgcataactcacaccgtacactacaaaagccatctcataaagggtttcttcccaaatcgcatactttaggggagctgcagtggggcgcaggccttctggcctggctccacttggctctg

SEQ ID NO: 264916 - DNA, 122 bp, Homo sapiens
cgtgggaggcgcgggagttttgcggaatgatacgtggtgtggcgtcggggttgtgatacccgcccccttggagatgggcagcggggtcatcagtgatcttgatcactttcttcaggcttttg

SEQ ID NO: 264917 - DNA, 122 bp, Homo sapiens
aaacaaggatgcaggtacctgccttagctataggcactaggttagccctgcaagtaattccggcttcccgatgtggatgggtcatgtgatgactaggagcgtcacatgacacaggaagtgag

SEQ ID NO: 264918 - DNA, 122 bp, Homo sapiens
tcagctacttctccttgaacatctcttttgatcttcaaaacagataagggaaaaggggcccgattagcaccccaagtccaaggaaacaaagagaggagtttggacagttactcacagataga

SEQ ID NO: 264919 - DNA, 122 bp, Homo sapiens
ggggacactggcacgcccatgtttatcgctgccctattcacaatagccaggacgtggaatcggcctaagtgtccccccaaagtcggataaagaaagtgtggtacatatacaccaggaaatac

SEQ ID NO: 264920 - DNA, 122 bp, Homo sapiens
tagatcatcacacggccggtggcagatggcagaacggttctgagcatctttttttcccctcgggctgcccctctctgaaaagttcctaaagttcaaaatgtcagggtcgcctagagtgttct

SEQ ID NO: 264921 - DNA, 122 bp, Homo sapiens
tcccaactctgccaatccctcagacattcccgacagctgtggccagatccagctttgctacggacacggagccacagaactggtctggacatggagccacagaactggtgagagccccacga

SEQ ID NO: 264922 - DNA, 122 bp, Homo sapiens
ccttttgagccacagttcaggacagcctctcgcccttgtgaccacctgtccttcctgacacgctgacctttagtccctgagctgcctcatacctggcccatgatgctaactatccacaatga

SEQ ID NO: 264923 - DNA, 122 bp, Homo sapiens
tacacttttacatcctccatgtcctgtcttttctctgttcaaaataggatgttgacaatgcgtctctggcacgtcttgaccttgaacgcaaagtggaatctttgcaagaagagattgccttt

SEQ ID NO: 264924 - DNA, 122 bp, Homo sapiens
tcgccggcaagggatgacgccctgggccttttgtaccactcgccacggaaaatggtcacacgcttttgtcctcaagccgaacactatcagaaacacggggtccctggaagccgccatcttgg

SEQ ID NO: 264925 - DNA, 122 bp, Homo sapiens
acgctaaggccccaccgcctctgttttgaatgttttgcaattgagagacaggtgggagctcgttctgctgcgaactttcagctaggtcttcattctcctgccgtgtcagtggcagcctccgt

SEQ ID NO: 264926 - DNA, 122 bp, Homo sapiens
cgccccactgatcaaaatgtctcctttatgatttttggttaagttgaacatttccataatcgtcattattagtgcaaattacacgcctaatcggtccttaaatagattttaattaaataagc

SEQ ID NO: 264927 - DNA, 122 bp, Homo sapiens
cattaaagccttctctgacctgtataaatgagactggctttttcctcttagtattgtcttcgagcacttggcaggtggcatttggagccagagcctgatgaaagttgcccttgtgtattgtt

SEQ ID NO: 264928 - DNA, 122 bp, Homo sapiens
gggggcgttctcggaagacaccaaaagcccccataccagaaataacagtgcgtgctgggccgggcacccggggaggcggacgatgggcgaaggcatcggagggcgccgccgcggctcgggtg

SEQ ID NO: 264929 - DNA, 122 bp, Homo sapiens
gttcttaggcaatactgtcaatgccctgaaagcagagctctcttggggatgagggtcttgcggtcactgagacctgacacctttctggggcacacccatggaagtctatggaagatacccag

SEQ ID NO: 264930 - DNA, 122 bp, Homo sapiens
tcgctttgtagccttagtgattttccacctgcagtcatttatctatgtataatccctaagcgcctactgtgtgcctcaccagtgcattgttctagggatatgacagctaggaatatggtccc

SEQ ID NO: 264931 - DNA, 122 bp, Homo sapiens
ataaataacaagaaacatcacctgtctgcggaaggcgtactgtgctctggccctgggagccggctaagggatgtggggccagggtcagagtgtggcagatgggcctcttcagacagggacca

SEQ ID NO: 264932 - DNA, 122 bp, Homo sapiens
caacgaggagaagcagctgaggcagcacaaggtggggactgtgtgtggacggcctcccctcggcccacagccagtgatgctaccggcctcagcattgctatgaggcgggttcttttgcatac

SEQ ID NO: 264933 - DNA, 122 bp, Homo sapiens
aagagatttgtggaggccacgcccagaccatgcctaccctagcctttctcgagctccgcccgtttctccaagactgggcccctccagcctgaagccccacccccaggacatccagctccgct

SEQ ID NO: 264934 - DNA, 122 bp, Homo sapiens
caggccttaggtgagacccagcattggcctggcttcaggtgtgaaccagcacagtcatagcggtgttgggcacaggggtgcttgtgtcactccacccccagctttaggtggctcagaacaga

SEQ ID NO: 264935 - DNA, 122 bp, Homo sapiens
acggcctgctccgggggccgctggcctgaggatgcagcgatctctgctgtcctgggagggcggggtcccacgggggttctacaccctcttacacatggggagggggggctcagccagggcag

SEQ ID NO: 264936 - DNA, 122 bp, Homo sapiens
agatgtggacccgaggaagggagaaggttttgatgaaatattggctaacgctcggggcaccgaaggagaagcagctctggtcagggaactgtgctacattagaatttataatagattagctt

SEQ ID NO: 264937 - DNA, 122 bp, Homo sapiens
gctctcaatgtccaggctcggctgcggcgtggggaccgaaaaggggcggggtgggtcggacggcagtttaattacgtccccgggaactgcgccgatttggacttttggcacttggacctatg

SEQ ID NO: 264938 - DNA, 122 bp, Homo sapiens
agctccgcccccggcggaaaactggtctctggaccgcccgcccaggtcgggctcaaaatgcggcgtggatctgaaaggatcaaacacaacactaattcagcaagctattattgagcacttgc

SEQ ID NO: 264939 - DNA, 122 bp, Homo sapiens
acagaagagggcccctcggcacctgcctggcacaagtgcagtgggccggaggaggtgactcggacaaactgtcatacagccttaagcaaagaatgccgatggagggcccttggcctgcagat

SEQ ID NO: 264940 - DNA, 122 bp, Homo sapiens
gcgcgctccgcgcttggtttggaggggctgaattcatctgtttgcagaccattccacctgcgtatcacaacaaactgctcaaagacgctccagcactttcaacaggccgggtgctcttggcg

SEQ ID NO: 264941 - DNA, 122 bp, Homo sapiens
cttttgctcgctgtgtcaaatcataggttgtgagctctaagcgggcctctggtggcactccgccctgtgcccagcgggcacttaccgcacactcaacagtggggatagctgtggtttgggga

SEQ ID NO: 264942 - DNA, 122 bp, Homo sapiens
gtgacagggtcatgtgcacataatttgccttttccaaagtgagacgatatgctacgggtgcggtcaatgtaaatctgctcaggagagtcgagggaaaaagtgttaactgcatattgagctcg

SEQ ID NO: 264943 - DNA, 122 bp, Homo sapiens
ggggctctgcagggtggcgcacatccacacccgtgcaggggtgacactggtgacagagttcggctctgagcctccctggccgctcctcagcccctcctcctccctttctcccccacttctca

SEQ ID NO: 264944 - DNA, 122 bp, Homo sapiens
gcgcaatctcggctcactgcaagctccacctcctttcttaatagggcagtctgagtagtccgtttacaacttgagttggatcatttcatcgctctgctgaaaactctccagtggttcatact

SEQ ID NO: 264945 - DNA, 122 bp, Homo sapiens
tattttggtcacggacccccattaaatttttgagcatttgaaatgcccccgaaaatcgctcgtacatcatattttacatacacgggcagataattcattaagtttcttggggagagagaaag

SEQ ID NO: 264946 - DNA, 122 bp, Homo sapiens
gaaagtggaatactcgcctaatccttaaatgtcccaggaaggtggaaggggtcatccccacgtgaaggaagcacaagcccagtcagggaaaggagctcatccaaggaggttcgcaatgggag

SEQ ID NO: 264947 - DNA, 122 bp, Homo sapiens
atcccaggccccagcctgggggaggcccccagagccccaggcaggctgagcccacttacccggagtccagagtaaatgggcactagaccaagcgagcacctgcctcaggccggatgggcccc

SEQ ID NO: 264948 - DNA, 122 bp, Homo sapiens
attgaattatcacaacgaccttttcaagtaggcattatcaccatgcgacaggttgaggaccgtgaggcacgctggagttatttgactcgacttgcccagggtcccaggtcagtgctcctcaa

SEQ ID NO: 264949 - DNA, 122 bp, Homo sapiens
caggctcgagtaggaagcccgcatctccacggcgcttccggcctgatgctgtggcgcttgcgctctgctgctggcccacttcgaagtcggagcaagagccttctctgtgtttgcgccccttg

SEQ ID NO: 264950 - DNA, 122 bp, Homo sapiens
aggtggatttcgtgcaaatgaaacccacataatgcaagtctgtgtggaagtgatcgtctgcgatcggcgcgtgcccttcgccttatgaacaggagccatgggtgacacgagcgcctcggctg

SEQ ID NO: 264951 - DNA, 122 bp, Homo sapiens
aggggtcgcgatggcattttgattggcatccgcctctcctccggggaaggacctcgtgggcgatggtcctggcgcacccgctagatggcgccgcagaccggcttgtacaggccgcgcgccct

SEQ ID NO: 264952 - DNA, 122 bp, Homo sapiens
aggagccggtggtggccacggtggcgctgacggaggctcgggactcagattcgagtgacacggatgagaaacgggagggtgaccggagcccatcagaagatgagttcttgtcctgtgactcg

SEQ ID NO: 264953 - DNA, 122 bp, Homo sapiens
ggcccggccccgcccagaggttccagggagaagaccaggccaccgcccactgcccggcgtcggggaggaaagaggaggagcctctgtgtgcccacatctctggccgcccagggcagctcggc

SEQ ID NO: 264954 - DNA, 122 bp, Homo sapiens
actctggtcccacttagcgggagaaactcgggccacgtgactgtctgaccacgtgagccgcgtcgccgcgacctcttccgctccctaggccctgggacctcccggtcccttgcctgcttccg

SEQ ID NO: 264955 - DNA, 122 bp, Homo sapiens
caatgtgcgccaactcgcgctctggagacaggaaaaggtagcaccgctggcgtcctggcacgtcgagcgaacaatgccaccccacgcgtcactgatcgactcatcttgcaggtgtccgaaat

SEQ ID NO: 264956 - DNA, 122 bp, Homo sapiens
ggggcaggaatggaggctgggagaccagcagaaggtgtgagtccaggctagacacattggcggcttggaccaaggtgggacagtgaaggtggaggcaagtggactggacatgttcccgtggg

SEQ ID NO: 264957 - DNA, 122 bp, Homo sapiens
agaaggtaatctcctatagaagctgcatcactcagctctttttcttgcattttcttggagcgggagagatgttcctcctcgttgtgatggcctttgaccgctacatcgccatctgccggcct

SEQ ID NO: 264958 - DNA, 122 bp, Homo sapiens
tttagatgtgtttgcacagaagagtgcccagtgaagagacctactccttggatcgctttgcgcaaaatccaccccttttccctcctccctcccttccagcctccgaatcccgcatggcccac

SEQ ID NO: 264959 - DNA, 122 bp, Homo sapiens
gtaatcagccaatcagttaatcaatcggcgggtcaatccatcaatcacaggcccccagagcggctggggttgagcgctcagggtgtggaaagagctgagttctaatccctgctcggcctctt

SEQ ID NO: 264960 - DNA, 122 bp, Homo sapiens
ggggtggggggtggaggtggagttgtgttcattctattgccagaaggaaggagattggaccggataacagaagaaaatgagcagtgtctgccacagcatacaagcttatttctaatcatcgc

SEQ ID NO: 264961 - DNA, 122 bp, Homo sapiens
gtgtttcatgccatcgggacggccgtggctcaggctgtctgaggccaggatgaagaaacccgggacagagcaggaagccacagaggaagggaagactcccgcttcccatggcccaaatgaat

SEQ ID NO: 264962 - DNA, 122 bp, Homo sapiens
ggtgccatctctcttggcgggtgacacgtaactgttacaaatgggtgcctgtccctgtcacgtcaccggagtgtgcgtcttgatgccctggctccctgaggcagctcgtgttttcgagtgtt

SEQ ID NO: 264963 - DNA, 122 bp, Homo sapiens
ggcagaggaatatctaattgtgagtgtgagtgcgtgtgtgactgtgagtgtgagccagcccgtcagtgtgaatgtttgagagagcctctctgtatgtgcctgggggagggtgtgaggtgtgg

SEQ ID NO: 264964 - DNA, 122 bp, Homo sapiens
agcaggggaggctttgcactcccatcgcacttttctcgtccgaagatacgaaactccgtccgggcgtcgcaaataattcgaattcggctctctgacacctacctcggcgggcgcgcgccgct

SEQ ID NO: 264965 - DNA, 122 bp, Homo sapiens
cggtccgcctgtcacacccgccagttaactcttgtgtgtccaccctgcctggccagtgcccgcctcctctgttctggaccctgctttgggggtcaggggtcccctccatgctagccctgctc

SEQ ID NO: 264966 - DNA, 122 bp, Homo sapiens
caagccttcaactgattagatgaggcccacccagattagggagggcaatctgccttactccgtctatcagtttaaatgttaatcttatccaaaagcaccctcaaagaaacgttcagaataat

SEQ ID NO: 264967 - DNA, 122 bp, Homo sapiens
cagcatagtgattgggcccaggccgggggcgggtccaggacacagccaggcttccctggccgcagtgcccaactgcccgcagtgcccatggtggctcggatgggaggaaccaccgcggagcc

SEQ ID NO: 264968 - DNA, 122 bp, Homo sapiens
agctccagagccctcgacggataaagcagctgtctcattgccagacagatgcatgcagagcggcaccagcctgccagactccctctgcctaactgcgttgctttctaatttgctcccacatt

SEQ ID NO: 264969 - DNA, 122 bp, Homo sapiens
ttttgctttctctcacgcttgggttctcttctttcttccttcagtgctttaagcctgtctcgtactacccatgagcttagctcagcctgattactggtccttaccttttaagggatttctgg

SEQ ID NO: 264970 - DNA, 122 bp, Homo sapiens
tggctgaggcggcagagggcagcgtgtgctacatcagctgtgcacgtcccacagtgggcccgggcgggacagtgggaggccaggcggggtcagcggtgccctgggggtcaggggaccgaggg

SEQ ID NO: 264971 - DNA, 122 bp, Homo sapiens
aagaaaaaaacaaacaaacaaaaacaaacaaacaaacaaaaaacagcaatcagggccaggcgtggtggctcaggcctgtaatcccagcactttgggaggccgaggcgggaggatcacctgag

SEQ ID NO: 264972 - DNA, 122 bp, Homo sapiens
cctcccccctccctcccaggtggtcgggactcttgatcttcgctcgtggtactgtctgttcggctgtcttccccgcctctccccaggcacctgcatcctcccttggcacctgctgccaggct

SEQ ID NO: 264973 - DNA, 122 bp, Homo sapiens
cacccacgtggctgcaggctgctggggactgtgggcagcttttggggctgggtggggggtcgtccttgctcatgtcccatctccctcgctccccgccaccccaggagaaggagcggcagcgc

SEQ ID NO: 264974 - DNA, 122 bp, Homo sapiens
tacacagattgaacgccactcggcatcagtctgtataatgcatattgtaaagtttaacctcgctctttttttttttatttttattttgagacagagtctcactccatccctcaggctggagt

SEQ ID NO: 264975 - DNA, 122 bp, Homo sapiens
caaatggaagccggattgcagccttgttctaatcactaagccttgttcccctgtatgggacggagtctaccaacagagaaccgctgccccatctgtgttggacatgtcaccactgacttttg

SEQ ID NO: 264976 - DNA, 122 bp, Homo sapiens
ctgtaccatcctgtaatcaccatcctgcaatctccatgcatttgcacagccaaggagagccggcaggggctctggggcaagtcagcttggatcctaatccgctccatcactgagcagctgtg

SEQ ID NO: 264977 - DNA, 122 bp, Homo sapiens
cttctggcaggagggacagctctgggtgcgagtggcaatgtgtgatggggtggggtggatcgggaaaggcttccctgagaagacacctgagggagacccagaggatgcacaggaactggcca

SEQ ID NO: 264978 - DNA, 122 bp, Homo sapiens
ctcacagcgttggcggggcgcagtgaggtccgccaggactaggtggaaggagagaaggaacgtccctctctgcaactcatctaagggcctgctcggaccccggatctcacagcgagaactac

SEQ ID NO: 264979 - DNA, 122 bp, Homo sapiens
ttacctggaccatcaataaatgcccggaacaatatgagcttcagggacatggaatccattcgccaccaggcagctggtggtcagcactgagcagggagatgggtggctagtactggatccgt

SEQ ID NO: 264980 - DNA, 122 bp, Homo sapiens
gccgcgtggtgaccgacacgccgtcggcgccgtccccgctgggccgcagcagcaggttcccgcactcggggtagcgctccaggagcagttgtgcctccagccggctcaccttcaggaagcac

SEQ ID NO: 264981 - DNA, 122 bp, Homo sapiens
gcaagctgctcggtaggagggggcgccaccgcgcagctggctgtcggggggaggcctgtgcgttgccccctgtgtccaatagccgggagctctgacccctgaaagcctgagtcgagatgctg

SEQ ID NO: 264982 - DNA, 122 bp, Homo sapiens
ggattaaacagaatgattgccctcaggcagccaagctctgtcttgtccatcctcatgtcacgcattttggacactagctctgtcagcaccctggagagggacctgcaggtcactcaaaggtc

SEQ ID NO: 264983 - DNA, 122 bp, Homo sapiens
gggggcggtttctcacccgccccgagagcgccaggcctcccttcttctgattggccgagccgagtcgtcacgagccatgattggctcagggccaaccaccccgccccttcacctagggctcg

SEQ ID NO: 264984 - DNA, 122 bp, Homo sapiens
gagaaaccaaggctagaagtgactgagtggagcccagattcacctgtgggccctggaaggcggtgctcagagcctgcaattggtgaggtcagcccgtgaggtcacaatgttgccagggccca

SEQ ID NO: 264985 - DNA, 122 bp, Homo sapiens
catagatgagcagagaaaaatgcaatcttttggcaaacgggattaatgcacacagtacaacgacttcagatattgtgaacacacatcatagaaaataacaagtagaaatcatttttaatatc

SEQ ID NO: 264986 - DNA, 122 bp, Homo sapiens
gtaggttttcacagaggtaggatttaagttctgtcatcttcggcaagtgaagctctcccacgcgcgtgcccaagccctggctccgccctaactctaatcctctctcccttcccgccccgccc

SEQ ID NO: 264987 - DNA, 122 bp, Homo sapiens
ttactgggctcccagcaggctctgcggcaccgagcctgtggaagttcaccctctaacagacgcacaccgatttttatgtttctgggttgtgccagacactgagggtttcagcgtgggcaggg

SEQ ID NO: 264988 - DNA, 122 bp, Homo sapiens
cctcccagccagcgaaagtcatcttagtaagagaccagcagtgaccctaagccctgggggcggtcacttttatcaggctctgcgacccccgtgctcccccgtgctcggcctcgtcggtggca

SEQ ID NO: 264989 - DNA, 122 bp, Homo sapiens
agatattgttcaaaaaggaagctccgcaggtgtgaccgcggcaaagctgggagtcgaccgcgttctccagcgtgctgttgcaaacagacaagggcaagattcctgccgagagaattatgtgc

SEQ ID NO: 264990 - DNA, 122 bp, Homo sapiens
tggagccaggggtgtgcgaatgacagaggattgggatcctggtgcccccaaggggagaggcgcttcctccagggtgggcctgtcgtgccgtccatcctcactccgggagatgctcagggatg

SEQ ID NO: 264991 - DNA, 122 bp, Homo sapiens
gatgcgcgcgcgggtcttgaaggtggccaggctgccgcggggccgcaggctccactggcgcgtcagcttgtgggcctcctcttcctgcttcatcctctccaggacctcctgcagcaccgagc

SEQ ID NO: 264992 - DNA, 122 bp, Homo sapiens
cactggagcctggtgcataaaattcagagacggcctccattttaagttttctcatagccccgtctttcacagtccttggtggttttgttgctgttaatattcattgctgttggcgcttttgc

SEQ ID NO: 264993 - DNA, 122 bp, Homo sapiens
tccccacggtatccggcattctccctgcttcccctctgggctgggagctcttccagagcccggaccctggtgccagctgggccaaccttgatgagtgattaacagtcagattctccaaatta

SEQ ID NO: 264994 - DNA, 122 bp, Homo sapiens
gccagctcgtagcaggggagcgcccgcggcgtcgggtttgggctggaggtcgccatggggcgaggcagcggcaccttcgagcgtctcctaggtaacgcgtccccacccgacggctcggcctt

SEQ ID NO: 264995 - DNA, 122 bp, Homo sapiens
ttgctctgccgaaactcgccctcatccccggcactgatctcctcataatcatccagcatccgcactcgcatccccggctgcagtgtgtcccgcacatacaaagcataggtattgccacttgc

SEQ ID NO: 264996 - DNA, 122 bp, Homo sapiens
aggaactaaaatcatcagctttcaaatcaaacaggtttcatctgagctactgagacgtcacgggctgtcagtaaaggccatgagggccccctaggggcagcaaaggccgtgggaagatgcag

SEQ ID NO: 264997 - DNA, 122 bp, Homo sapiens
ccgacagcacgtgccacatgcacacccactgggatctgacaccagctggacgagtgctcacggtcccagcttcaatcctcctctgctttcaggaggccgcacctcccttcacctgctccccg

SEQ ID NO: 264998 - DNA, 122 bp, Homo sapiens
gcatttcctggggatggttaatcctgtgccccagccaaacccaggagctgcaatagggtgcgacggccagaagctccaggagagtgagcaggcacctggagtggagactgtgtttccctcag

SEQ ID NO: 264999 - DNA, 122 bp, Homo sapiens
gccagtgccttacaatttgcaaacgtgtatagcctcagtgactcattcgctgaaatccttcgctttaccaaatctagacatacataaggggctttctctcccttttcagccctctctgtgca

SEQ ID NO: 265000 - DNA, 122 bp, Homo sapiens
cgcaccgctcgccaggccctgctcacccagcactaccggtgggctctgcgggccggggcccgcttcctggatgcccatggggcctggctcccagagctgcccaggtgagtgtggccctgggg

SEQ ID NO: 265001 - DNA, 122 bp, Homo sapiens
ggctctaagggccaatccagtctgcagggatgagcatccgggcccgtgctcagagggtcccggggcctcatgagatcctgagctggtggtccccagttgtgaaaccagatttcccactgttc

SEQ ID NO: 265002 - DNA, 122 bp, Homo sapiens
ctgcaactgtttgttgtcctgcagaaaaacaagatattaacacggagcgtgaaggtgccgcgagatcagctgcctgctgagtaagatcagcaggctgtggctgattttgtgccgcagggacg

SEQ ID NO: 265003 - DNA, 122 bp, Homo sapiens
accctcaccctccaagtcagcttggaggcctttaggcttgctggcaaggcgaccctaggccgaagacacgaaaaacaaacatggcatcggaagaaggctgaaccgctacatctccagtagag

SEQ ID NO: 265004 - DNA, 122 bp, Homo sapiens
ccgacctgctctgaggtctggcagcatctacaatggcccccaggcaggcacagccctgcccggcccttagtccaggctgactttcaacataagaaaagcaggtgaccacccacgcctggagg

SEQ ID NO: 265005 - DNA, 122 bp, Homo sapiens
tccaaaaacaccgttacaagcatgttatcatagttcctcacactaccatgtggcgggagacggctcagagagtaatgaattcatattcgtgtattcccacgattaacatactgaaagcttcc

SEQ ID NO: 265006 - DNA, 122 bp, Homo sapiens
acaaaaccctagaacgaacaggtttgggcctcagcaggcttagggccagcacacatcctgcgcctggcaaggttccgcctgagcacactctggcccagtgcatatcctgggcctagcaaggt

SEQ ID NO: 265007 - DNA, 122 bp, Homo sapiens
cagcatacagtgtacgacagcatttggtgtaatatgaagagtaattaactttacccaaggcgtttggctcagagggctacagactatggccagaactcatctgttgattgctagaaaccact

SEQ ID NO: 265008 - DNA, 122 bp, Homo sapiens
tctctggactggattctgcccaggatttcatgacagctcaagcctgtgagctggtggtgacgcgcgccactgcggagggggagggccaggggatcaggatataggtcagagtgagcacgtgt

SEQ ID NO: 265009 - DNA, 122 bp, Homo sapiens
ccgacgggtgccgggccgagctcgctcggcctttgttagtttcggcgccgctgatgtgatcgcctaatccagtggaccctgagaagaacagactgggctgccaatggcccgaccccacgccg

SEQ ID NO: 265010 - DNA, 122 bp, Homo sapiens
gcaattctattttcataaccccctctcatagaatcacagtttctaaatctttacaagtaacgtgacatttgtcagaaggtgccgagcgttatgattaaaaatcattaaggccgaggcggggc

SEQ ID NO: 265011 - DNA, 122 bp, Homo sapiens
cgtctaagcttcgaaactaccggaaggaccttgccaaactccatcgggaggtgagaagcacgcctttgacagccacaccaggagggcgaggagacatgaaatatgacatatatgctgtagag

SEQ ID NO: 265012 - DNA, 122 bp, Homo sapiens
tgagaccagcctggccaacatggcgaaacactgtctctacgaaaaatacaaaaaattacccggatgtggtggctggtgcctgtagtccaagctacttgggaggctgaggcaggagaattgct

SEQ ID NO: 265013 - DNA, 122 bp, Homo sapiens
cagaacagtaccttggaggggagctctgggcacacctggcccgtagtgagtgtgaatttgcgtcagagagctgtcgagacccacggggccaccttgagggtgccggggtcttcccgcaggtg

SEQ ID NO: 265014 - DNA, 122 bp, Homo sapiens
acgcgggccccgctgcagccacgcgcccccggaaccggacctatagagccgggtaagtgccgccagtcggggcgctttcccggtgacccccaacatattccggccttctgggaaatgtagtt

SEQ ID NO: 265015 - DNA, 122 bp, Homo sapiens
gaatagagagagatttaacagtatgaatgaagggaggagtcaagaacagtttaggcttctcgcgtacatgattgggtggccccagatgtcattcacaagtataagccttggaggcggaacat

SEQ ID NO: 265016 - DNA, 122 bp, Homo sapiens
ccttagtccgagatcgcggaccctgaccggaaccggaagttccggacacagcagccctcgcgacaacacccagaatttggagataagggtgagagcgcaccaagccccgcccagcgcaagcg

SEQ ID NO: 265017 - DNA, 122 bp, Homo sapiens
cctataaatagctctttgagcccagtagattcccaggcaaggttgcctcattcaagcccccggcaacagcccgcccctgggccccaggccagcccctctaagctcagccctggcaccagcga

SEQ ID NO: 265018 - DNA, 122 bp, Homo sapiens
gaataggaaacattagagcatacgaaaatgtgagcttgagtaacagatttaacagctctgcgttctacagggttttaggttaccctagggctttctaattacatactgaaccctaagtcctt

SEQ ID NO: 265019 - DNA, 122 bp, Homo sapiens
ggattggggatccgtagggcactaggacccggcggggcggagggggcagcccatgtgctgcgattcgctccctcccaccccactgctcccgctccattgtctgggaattgcagccgcggggc

SEQ ID NO: 265020 - DNA, 122 bp, Homo sapiens
ttcccgcggcccgccccgggccgggccctgccgccccccgcgacccctcgcgacccgcggcgagtcccacggtccccaccgccccccgctggccggcccccgccccgtttcccgggcgtccc

SEQ ID NO: 265021 - DNA, 122 bp, Homo sapiens
agcgggaactcccaggatcaggaaggtcccagagaaactccccaggggggaagccgaggccgtccagagagatccagggtacacacagtgacagtgccagctccacattcccgaccaccggg

SEQ ID NO: 265022 - DNA, 122 bp, Homo sapiens
aaaatgaagactcctacatgtcacacatgggcacggaccagagctgctgagatgataggccgggcgcataacaggcaccccgcacatcgcaccgcggacgcagcgatcctcccatttgtacc

SEQ ID NO: 265023 - DNA, 122 bp, Homo sapiens
gcggttacagttggttctcagggcttcttgccaaagagccatgcactgtagaaggaagctcgagggccctggggtcagaaagtcatggggttgaggcccttagtaagtcacttaaactctct

SEQ ID NO: 265024 - DNA, 122 bp, Homo sapiens
ccagccgcttccctaggggtccagcagcagcgggcgcgaatcggcacattaccgggggaccgcggggcgctcaggactgcgacaactctgtgggttaccgcgccggcctagcggcccagcga

SEQ ID NO: 265025 - DNA, 122 bp, Homo sapiens
gctacgcgggtagttctgccccgggcccggccgcatcatcctgggcacagcgccggccagcgtggtcatcctgggggcagcttcgctcggaaattatatccaggtgaaggcgaaacggaaag

SEQ ID NO: 265026 - DNA, 122 bp, Homo sapiens
gtctctgagaacctgcgggagagcgcccgggcttgctgcttcccggacccgcgcgtctctcgagcaccctcgtcccaccaccttgtgaggccgtagtgttatttttattttttagatcagca

SEQ ID NO: 265027 - DNA, 122 bp, Homo sapiens
ctctctccccgcccccgcccccgcccatgcgtggcagccccgcccccaagagtctgatgacgccatctccccgcccaggcgcggcaggctccgcccaggccccgccccaccccgccgcgcgt

SEQ ID NO: 265028 - DNA, 122 bp, Homo sapiens
ccgcctctccctgctgcctcaactctattcggagtagggctggaaaatggcaaggggcaccgaggcctctgcggggagctgtgtggcggcctgggcggctgctccccttgtaacagactcca

SEQ ID NO: 265029 - DNA, 122 bp, Homo sapiens
cggaggggctgaggggcggagaggcctggcgggccgctgctgcgggccaggggacgggggcggagccggagccggagccgacgggcggtggccgcactgggaccccggaatcccgcgcgctg

SEQ ID NO: 265030 - DNA, 122 bp, Homo sapiens
acattcatgcagaatccatcagccaggcagagtgatgtgatctgttctcagaacaagtcacggtgagaagacatggccagctggtctaagcccctaccccacatgctccccaacacccccac

SEQ ID NO: 265031 - DNA, 122 bp, Homo sapiens
ggatgtaaattacatctcaataaagctgtttgggaaatccagccttcacagttgttgattcgcgtgaggagggaaggagagatggggggacgtgggacagggagaaaacaacataaatcata

SEQ ID NO: 265032 - DNA, 122 bp, Homo sapiens
aaacaaatgaaagaacattcttaatcctcagggcccatcttgagagagacttgcgttgaacgagtggtgagacccagctccaacatgccagctggctgactcagcccatgctagtgaaataa

SEQ ID NO: 265033 - DNA, 122 bp, Homo sapiens
cgcgagtccaggagagggtccattcgtgggaaaaccacccagcattgtgtcacgcgcgtccgtgtgaagagaccaccaaacaggcttcttgtcccatccccagtcactaggagagtccaagt

SEQ ID NO: 265034 - DNA, 122 bp, Homo sapiens
cggccaccaccactggggaaggccacctccacatgcaagggtttaggttctctcaccacacgacgcacagaatgggaacattcactctttgatcacaacttcctacatctccactttgtttc

SEQ ID NO: 265035 - DNA, 122 bp, Homo sapiens
ctccacgcaggtttctctccccagaccccagccttcggcttcctcccttcctgtcacggacgcagccggagaaactggggcccagacgcggagctcactccgccagaaaccctgggtccctt

SEQ ID NO: 265036 - DNA, 122 bp, Homo sapiens
atccattcatccatccaacaacacgtgaggcggcttcaggcttcggagttgctgaagctccgagttcgggatgtgcagctgtggtggagccaggggctgggcacacccctggctcctggcct

SEQ ID NO: 265037 - DNA, 122 bp, Homo sapiens
ctgtcgcccaggggcagctcactgcagtcttaacctccctgggctcccacctcagcctcccgagtagctgaggacaacaggtgtgcaccaccatgccccactaactcacattgtgctttgag

SEQ ID NO: 265038 - DNA, 122 bp, Homo sapiens
cccaaaggctccacctcttaatcctatcacaggggattatgttttaacatatgaatggtgcggggggtgggggtgagggacacagacattcagaccatagcactaacttgccttggttatat

SEQ ID NO: 265039 - DNA, 122 bp, Homo sapiens
tactatcagctccagcccatggtgcgcgagctggagcgctggcagcaggagcaggagcagcggcgccgcagccgggcctgtgactgcctggtggtgcgcgtcacgcccgacttgggcgagcg

SEQ ID NO: 265040 - DNA, 122 bp, Homo sapiens
ctgaccctgattattcagggctacaaacaggaaggattttattcaccgttgatgcggccccgagttgtcccaaagcgaggcagtgcccccaaggtctgtgctgacgagaacgctgctctgcc

SEQ ID NO: 265041 - DNA, 122 bp, Homo sapiens
gggcgcgaggtcccctagatccttaggcggcgaggcgttccgggacgcacgcggcctccccggagaaggctggaggtcaagcagcccaagtctctgccactccagagaagttaactaaagct

SEQ ID NO: 265042 - DNA, 122 bp, Homo sapiens
cccctgcagatgctggcctgggtgctaagcccctcattgctgggggccggcagagcccaccggctgctccaagtgcggggcctacaaagcccacgcccacccggaactccagctggcccgca

SEQ ID NO: 265043 - DNA, 122 bp, Homo sapiens
cactgtccctcagtgactaaaacaatacctggcacagaagagatgctcactaaccacagacggactgactaacatgcctcttgaaagtaagccagaaatataacatagaacatggctggtga

SEQ ID NO: 265044 - DNA, 122 bp, Homo sapiens
tcctgtggccacgatgggggccaggacacctttgccttctttctgggtttctttctttgccgagacagggattttgttcccaggaggcactccctggcccatgggatctcagcattcaaagc

SEQ ID NO: 265045 - DNA, 122 bp, Homo sapiens
tacggctgggtgaaccttgaaaacaagatgcggggtgggagaagccacgtgcgaaaggcacgcaccgtatgattccatggacatgaaacatccagaacaggcaaacagaaagcaggctgggg

SEQ ID NO: 265046 - DNA, 122 bp, Homo sapiens
aacacaaggaaactctaggcccagatacctccctgttgacctctaccaaacctttaaggacgaataacaatcctatacaaaatgttccagaaaatagaaaagagaacactccaaactaattt

SEQ ID NO: 265047 - DNA, 122 bp, Homo sapiens
tgtcgccgctgtcgtagcaggtgccaccgttgctgcaggtgtaggcatcgcactggaactcgcctgttggcacatgggccgctcagcaggcaggccccagaccgccagggccagggtcctgg

SEQ ID NO: 265048 - DNA, 122 bp, Homo sapiens
cgcagcctctctctggccgtcaacgccaacgtgggggacgccgcggttcaagagttggctcggaactgcccagaactccaccaccttgacctcaccggctgcctccgcgtcggaagcgacgg

SEQ ID NO: 265049 - DNA, 122 bp, Homo sapiens
tagggcaatattgtcttagtctagaaattcagctcatggatacaaaaatcctctaggagccgtaacttcctgtcaatcctaaaatttaataaggcaaatgtttggcttcgagccatactggg

SEQ ID NO: 265050 - DNA, 122 bp, Homo sapiens
taaaagacaaatcgcaccctcttggaattagtgtatctgagcagacctggagaatgttaacgccttggtaggaaatgtaacagtttggataaaaatgttctttcaggctcacatgaattaat

SEQ ID NO: 265051 - DNA, 122 bp, Homo sapiens
aagttcgtttgccttatcggccttactgtttgatagtttactgtgtctgatttcttcccccgtactttttcaactagtctctagtgatccctgaaaagttccagcatattttgcgagtactc

SEQ ID NO: 265052 - DNA, 122 bp, Homo sapiens
ctcccaggttcaagcgattctcctgcctcagcctcctgagtagctggaattacaggcatgcgccacaacacctgagtaattttgtctttttagtagagatgggctttctccatgtgagtcag

SEQ ID NO: 265053 - DNA, 122 bp, Homo sapiens
tttttggtgagcccggggtgacatgtgaagaggcgctgagccggggcgggagtcgggggacggagggggtggctgttgtgtccccatcccgcatctctccggcccggtgccccggccgctgg

SEQ ID NO: 265054 - DNA, 122 bp, Homo sapiens
gcctgggatccctgcactttgcaaagttagctgcgcggctgcagaggtccgagatccttccggccttagtacctgacccacggtccggcacccccaacccggtcccggcgggagagtgagag

SEQ ID NO: 265055 - DNA, 122 bp, Homo sapiens
ggccgcggccacacagcacgaccagcaggcctgcactggggctcaaggtcagctgctgcacgcgccggcactcccccacctggaagatgtctgcagggttggcgaggggagagtgtcactgg

SEQ ID NO: 265056 - DNA, 122 bp, Homo sapiens
gtgtctgaaggggagtcttgaggaggaccatgctttgacctctgaagtctgtgctaacttcggatagcactgcagtttaacaaacacttacatggcacttgctacatgccaggtaatactgt

SEQ ID NO: 265057 - DNA, 122 bp, Homo sapiens
tactggaatcaaatatggagacatgcacggttaggagctccggggctgaagaatatcacccgagccagtgtttactgagcacttactggatgccaggcactgtgccaagcactggcaggtat

SEQ ID NO: 265058 - DNA, 122 bp, Homo sapiens
ggtgcaccgtgctttggcaaccgggtcttggcgcctccgagagcggggcgaggggtgccacgcgattcccaggccgctctgtatctctcggtgcgcttgcagggaccctgcagcaaagccct

SEQ ID NO: 265059 - DNA, 122 bp, Homo sapiens
cccatcctggggactgggcggagcggtcacatcttaccacctcagctgtagaggtggccacgggctctggctgtcttctccccggcggcacagacctttctcagcctctgggtgcctcctcc

SEQ ID NO: 265060 - DNA, 122 bp, Homo sapiens
ctacttcttgaagaatctaaactggcagtaggatcatgcccctcactgatagctcaaccacgttttctatctttgggcctccttgtctttacctagcacatgagaagcatttattaggactt

SEQ ID NO: 265061 - DNA, 122 bp, Homo sapiens
agttttgtatttttatttttatttattgttttatgggggctacagcggcaggtggcaaggcgccacgcctgagtggggatggcgagattgttctccaatcgccaacctcaatggtgcaacgg

SEQ ID NO: 265062 - DNA, 122 bp, Homo sapiens
taggatggcgagggcccagtgtgggtgctttggttctctccagaaggttgatgtctggaccgagaaggtacccgagtgttctccaccgcttcctaaaatctgacaccgtgtggccttggggt

SEQ ID NO: 265063 - DNA, 122 bp, Homo sapiens
gggtgcagggatgaggtgcaccagcacagagccgcagcggcctgtcaccttgcaagggaccgtgtggggcttgccgaacttgtttccccagtagcctctgcgcacggggacagtggagacgt

SEQ ID NO: 265064 - DNA, 122 bp, Homo sapiens
gaggaggtgagcaggcccaccggggtggcgtggatggggcacgggaaccaccctcgccctcgcctggggacaccagggctttgcatttagcaggttggaggtgcagtttgccttctggctcc

SEQ ID NO: 265065 - DNA, 122 bp, Homo sapiens
ggctctgacttgcggcgtcacccatcagggtggagtcgaggggaccaccagtggcagcaccggtgctggttgtgctcacttccgtggaggtgttcagtggcacctctgtgggtgtgagtgat

SEQ ID NO: 265066 - DNA, 122 bp, Homo sapiens
aaagatgatccagcaggagcatgagcggcaggtgaagtgggaaagggagggctggggtgacgggtgggtgctggcctggccacgtcctcatagccctgtctgctgcaggagcgggaagacga

SEQ ID NO: 265067 - DNA, 122 bp, Homo sapiens
gcgctgcaacgaaaggcgccgctcaaggtgcatcccagccgcgccagagcggccgccgcccgcccaccgcccacccccaggtcggggctcccgacgccccccgcccccgactccgggccggc

SEQ ID NO: 265068 - DNA, 122 bp, Homo sapiens
aattttaaacttgaaaaactgccagagtacctgatagtgattgatcagagacagagccaccgaattacccgatggcaggccttagagaccatggccttaggacctaggttatgcatagccct

SEQ ID NO: 265069 - DNA, 122 bp, Homo sapiens
agatcaggagtttcttgtgaacttccaaattcagaagttcctaagcatgccatttcagttcgctgagctctgactgtcagctatggggaaaaggaagaaacagatcttcccagggttcttga

SEQ ID NO: 265070 - DNA, 122 bp, Homo sapiens
cttggtcactccatcattcccagcacttcctgggtatgtgattatttgtttgctggacttcgggttctcattggcctgatccaacacccacctgcttatgtttctaaatgtagtcacttcct

SEQ ID NO: 265071 - DNA, 122 bp, Homo sapiens
caccaattaaacacccacaagtacacccagagcgagtcatgcaaatttcagcggagacaccgaatccaggcgagtccttgatccccacaggcgacctccattcattctccacgcccctatac

SEQ ID NO: 265072 - DNA, 122 bp, Homo sapiens
gcctgagttcccagctcaagggggctggagtggcaggggaaacaggccggagagggcccacgagtcctgccaccactcctcactgtggtgtgatcttggcagcctcagccctgatgagggca

SEQ ID NO: 265073 - DNA, 122 bp, Homo sapiens
ggagccgcgctcggggagggcgcagcggagggtgagcggcggcgttaggacccggaggcgcgggcggaggtggcggggctaggacccagcggctccggcagagcggaagcggcggcgggagc

SEQ ID NO: 265074 - DNA, 122 bp, Homo sapiens
tacgtgaaccatcatatttatcacgatactttataattatccatttagcttctctcctgacggatcacaaaccccttgaggatagagactgagtctcactggatgtcccaactatttcctgg

SEQ ID NO: 265075 - DNA, 122 bp, Homo sapiens
gccactgacttgctctgccagcacagtctgtttaagtaagctaaatgtatcttactgccccgaaatgagaggagactggtcttgaagcctctggtgctgtttcaacctccatccccacagga

SEQ ID NO: 265076 - DNA, 122 bp, Homo sapiens
tttcattgtcatttagaaaaatgacttggaaataggctatttcactactaccacatccaacgattttaaaaatggttatgtaaataactaatgatgaatccattttatgtatatagaggact

SEQ ID NO: 265077 - DNA, 122 bp, Homo sapiens
catctcaaacagtaagagttgtagtcttccaggactagaaccttgtgtcctttgaattctcgccctgccagctcctagaaatagtttcaatcttggaatcagatgttatgtcacctgaccca

SEQ ID NO: 265078 - DNA, 122 bp, Homo sapiens
ggttaaagttgcattttcttatttcaggcagtagaagatggtgaaagaaacaacttactacgatgttttgggggtcaaacccaatgctactcaggaagaattgaaaaaggcttataggaaac

SEQ ID NO: 265079 - DNA, 122 bp, Homo sapiens
atgaagttcaaaaacaggcaaaactaatctttagtgtaacatgtgagggcactgtttccccgtgggggcaaacagtgtaaactaaacaggttcaaggaggattctagggtgctggtaacatc

SEQ ID NO: 265080 - DNA, 122 bp, Homo sapiens
gatgcccgttgccaagcggactgtggtctagcggtagcgtaagtgtcaaggaaaaacacccgctacttagcagaccgggaaagggagtctcccttgccccgcgggagtctggagaagactct

SEQ ID NO: 265081 - DNA, 122 bp, Homo sapiens
tgggcgacgcgaagagagcgtggtctcgggcttagccttgctctggccactcggggttcccggggctgcatgcttgtgcggctgaatgtgagatgctcctgtcgaggggtggtgctgggggg

SEQ ID NO: 265082 - DNA, 122 bp, Homo sapiens
ccttagatttgaatacttctgcaatgttaaatttacccaggctctatagtagggtgaaagcggttgtgagggggaagggaagtttcaaactttgctctgaggcacagtgatgggatgacaca

SEQ ID NO: 265083 - DNA, 122 bp, Homo sapiens
ccgccagtgccagccctctccagggctccctggggacccccagcgggcaagggctgcaggcggcccaggctaaacgtgcagtgagtcccgctctcagaggtatctgcgccccgcctgcctcc

SEQ ID NO: 265084 - DNA, 122 bp, Homo sapiens
ctctttcctgagacccccgcttcatgaaggcaagggcctgcgtctgttcttgctttccatcgtaccccgggatctggcatttagctggcaatcaaatatgtggtgaaacgtttaagtgttgc

SEQ ID NO: 265085 - DNA, 122 bp, Homo sapiens
tctgtccctgccagcgcctccattcccaggcgatgccccgctgcctgcccacctaccctccgggccccacacgaacaagctgtgtccccaccgaggtcacagctctgccctctggggatggg

SEQ ID NO: 265086 - DNA, 122 bp, Homo sapiens
atcctgcaacccctcataggacacaccttagaacactctgaatcggatgacccaagggcccgccaagctttgcagtcctggggctctcactcagccgcagggtgagcagcagtgctcacctc

SEQ ID NO: 265087 - DNA, 122 bp, Homo sapiens
tattaatgtctccagcggatggacatggaccggcggagggaagatgcccggaacccgaaacggaagccccgtttaatggaggaggatgagctgccctcctggatcattaaggatgacgctga

SEQ ID NO: 265088 - DNA, 122 bp, Homo sapiens
attcttattgtggagttttgcgtcttttcaggtgtaggttttttgtctcgcgtgtttccacgtctgcttgtagcgctttccgcttcgccgttccctgcggcccttccttccgtgcccggtgt

SEQ ID NO: 265089 - DNA, 122 bp, Homo sapiens
attctcatcttggtaaattctgggttgcacagtacgaggttttactctgaattttcagtacgcatgtgataacagaatgagtaagtcagtgaatgagagtccactccctcttgctcccaact

SEQ ID NO: 265090 - DNA, 122 bp, Homo sapiens
aaaaaatgtgccttgctagggtggggacacttggttgatgcagtctctctctctctttctcggtgtttataacaaaacaaaaccaaaatgaactgaggggtttgtaatggtagtttgtttgt

SEQ ID NO: 265091 - DNA, 122 bp, Homo sapiens
acgttcttcatgtctattttggtttcctttaagttaagcatagatttttctggaaaggaccggagctggctgttctccctgcatggaaaacaacagctcagcgaagcacctggttttctcaa

SEQ ID NO: 265092 - DNA, 122 bp, Homo sapiens
ccagtgcaaaacaatgtctgggcatcactgctataagcatttcatacctaatccatctttcgagatagaaaccttttaatgcttccatccagttgattttctcattttctccaaatatcttc

SEQ ID NO: 265093 - DNA, 122 bp, Homo sapiens
cgccccggtgaactccattgtcggggggcctctataagccgccccggtgaactccattgtcggagggcctctataagccacccctggcaaactccagggctcacctcaggtcggatcgagcc

SEQ ID NO: 265094 - DNA, 122 bp, Homo sapiens
cgtgaatgctgtgcattatgggataaaatatacgtcacagggtggtggctcacactccaccgtcagtgttttggggacgagaattgaagtgtgcaaaagaacactgggtatttctaagtaga

SEQ ID NO: 265095 - DNA, 122 bp, Homo sapiens
ttaggtagaaaaccccccatgtcttctccttgcagacactggcagattatagaaatgtggcgaaagaaacaggtctaggatgacagcaactgagcaagagatggggtctatttggggctggg

SEQ ID NO: 265096 - DNA, 122 bp, Homo sapiens
acagttgattataagttataaaaatgggcattctctttgtgatcttagcttccaaaattacggaaggttatcactatttattattactactttctcagcaaactcaaagaatcagagtgata

SEQ ID NO: 265097 - DNA, 122 bp, Homo sapiens
ggccggggaacagatggcaccgcggcttgcctatttttgctttttggcagaggtgacggacgcctagaattactgactgataatggaatgagtgttaggtggactgacgccggaaaagacgc

SEQ ID NO: 265098 - DNA, 122 bp, Homo sapiens
ttcacagactggagaattttcccaggcaaaaagccacaagcatactaatctcacccaattcggtttctatctttcaagaagagacgtctttctagtttttgcttgctattggttgctctcca

SEQ ID NO: 265099 - DNA, 122 bp, Homo sapiens
attccactacaatggccagaatcttcagttttacacccttgctcatgcccaccgctcacccggagtccagacccaagcaccatgctgcgtagttcctaatacggcaaaactatccagcattt

SEQ ID NO: 265100 - DNA, 122 bp, Homo sapiens
cgttgaggaccctctgtccttatcagaaacgagctctgcctggatcagttgggaataagtcgcttgaattatccgcgttactctttttggaaaaaataaatggccaaattggccctcacaga

SEQ ID NO: 265101 - DNA, 122 bp, Homo sapiens
gctggtcctacgtgtgggctctagggggcgatgcagtgtaaggtctgtcctgggcataggcggagcggcagtcttgctcctcacagagctttgaggagctggatcaaaattgtgctccacag

SEQ ID NO: 265102 - DNA, 122 bp, Homo sapiens
gatcagttctccaatcctaataacacctggcaagagcttctggaaaaatgtggctagaggcggatttgacttcagtccttgatatttccacttctggcaactcaacttcctattatacttcc

SEQ ID NO: 265103 - DNA, 122 bp, Homo sapiens
catgtgtttttatccctgatatcatttccttcttgtgttgtctgtttactgggacagtatcgcctatccaggtaaaattttccattgctttagtgctcttctagtcttaaatgatatttgac

SEQ ID NO: 265104 - DNA, 122 bp, Homo sapiens
tctgagacactccgctccagcccggcttagcgcgccttcatattcatcatcaaaataagacggttagaatcttgcagcagtgaggcggccaatcaaaaggacagaaatgttatccttgaggt

SEQ ID NO: 265105 - DNA, 122 bp, Homo sapiens
ccttcccgctctgtgcccttggcagctcccctcccacccggtcactccgtccagcaagcacgcagacagcaagcccgcgccgctgacgcccgcctaccacacgctgccccacccctcccacc

SEQ ID NO: 265106 - DNA, 122 bp, Homo sapiens
tcttacaggactgttaggattaaatgagctaaatcacagtgtccgaacacttcagtacttcgtacataattacttgctcaagaaatgttagctattattgggtcatgattatttatatgtgt

SEQ ID NO: 265107 - DNA, 122 bp, Homo sapiens
tacacacgttctcacacacatacactgacacattctcacacataaacacagactcacactcgtacacacacccactccctcattcacacagactcacacacccatccactccttctcattct

SEQ ID NO: 265108 - DNA, 122 bp, Homo sapiens
gttttttgtttgtttgtttgttttgagataaggtctcactctgtcccccaggctggagtacggtggtgtcatcatagctccctgaagccttgaccccccaggccttgccctccaggtggtcc

SEQ ID NO: 265109 - DNA, 122 bp, Homo sapiens
cctatccccgcagaccgtattctccgagatgcgccaggagtgcaagtgccacgggatgtccggctcatgcacggtgcgcacgtgctggatgcggctgcccacgctgcgcgccgtgggcgatg

SEQ ID NO: 265110 - DNA, 122 bp, Homo sapiens
cctgcgcaagtgcgaggctgccggcagcgcggcgcacgctccggccgttcccggcttccgcgcaaaacttccatcctgtccacgtgaagttgtcgctgccttagagagggggaaagagctgc

SEQ ID NO: 265111 - DNA, 122 bp, Homo sapiens
aatttccccactaatcttcctagtggtacaacacacaagaggaagggagaaacagagtcacgatgcatgtaaacaagactcagtatccaagggcttccctccagggcctgttctgattggca

SEQ ID NO: 265112 - DNA, 122 bp, Homo sapiens
gggaaggcagaggcggaatggttagaggtctgtgtgtgtgtcgggggaagggaggtaatacgttcttgaacctgggtatgtggggaattcagggtcaagggacaaacatgggagggcttaga

SEQ ID NO: 265113 - DNA, 122 bp, Homo sapiens
ttctgataggcacagcctgttggtcccccacccccttcccaaggaaggatcaggaatgcccgtgaggctttctcacggtaacgtaaggctctgtacagtaagaataacttccagtgtgctca

SEQ ID NO: 265114 - DNA, 122 bp, Homo sapiens
tgggaaagcccaagccccgggagaagatgccggccatcctggtcgcctccaaaatgaagtcgggactgcccaaacccgtgcacagcgccgcgcccatcctgcacgtgcccccggcccgggcg

SEQ ID NO: 265115 - DNA, 122 bp, Homo sapiens
aaggaatataagcatagtcaaagttagactcccagtcttggaatcttagaattacagggtcgcaggatcgcaggatcgcattctttagatttatggaatcacgttaggacaacggtcgtcca

SEQ ID NO: 265116 - DNA, 122 bp, Homo sapiens
tgtagtgaactgctttctgcacggggtgaaacctgccccatccctgccagagacctacagcggggactcctgtgcctgcacacaggaacagaatgactccgtggcatgaagtcagcatctcg

SEQ ID NO: 265117 - DNA, 122 bp, Homo sapiens
tacagaaaggaaaaccaattctgatatacatgaatttaactcagaaaatgactcctccaacggatgtggtcgcctccagtaatacaagcagagaaaggagggagttcaatgaaattaaaatt

SEQ ID NO: 265118 - DNA, 122 bp, Homo sapiens
ccacgtgagccctccctttgcaggtccccacctctgacgcatggcgctgcagacagccctcgccccatcacagggctctcaaaaggatcaaatgaaaggaggaggtctctccaccgcatatg

SEQ ID NO: 265119 - DNA, 122 bp, Homo sapiens
tccggctctgcccctggcctgtgagacctccagctcagggacaggacactgggctgtgcccgcttcggggccttgcccacgcggccccatctttcccaggccagatccgcttcctctgccag

SEQ ID NO: 265120 - DNA, 122 bp, Homo sapiens
aaatgttttccggtctttctcccattagatttgacccactctacctgccttggtcaaatccgaatgagaattccaaattatggggaacaaggactttctgaattacctaaaattcctcacag

SEQ ID NO: 265121 - DNA, 122 bp, Homo sapiens
tcaacaccctggccgagttggttcatcatcattcaacggtggccgacgggctcatcaccacgctccattatccagccccaaagcgcaacaagcccactgtctatggtgtgtcccccaactac

SEQ ID NO: 265122 - DNA, 122 bp, Homo sapiens
ggggaaggaatgatgcactattctaaggtcatgggaatgaaggcaaagatgtgtactaaacgacagcacctaaagcctttctccatggaaagtggtcacccagggaaaaaaactaaggttat

SEQ ID NO: 265123 - DNA, 122 bp, Homo sapiens
ttctacgtagccggccgggactgggacgacttcggcgtcaccgagcggctgccctgtgtccgcctgcatgccttccgggatgcccgggaagtcaagagctcctgccgcctcagcgggggcct

SEQ ID NO: 265124 - DNA, 122 bp, Homo sapiens
tgcgggcggccaggaggacagtgaccagtagcaggatgaagagcagcagcgtggccagcacgtagcccagctgctggaagaagtgggctcggctctcggggacgatgacattgatgacgttg

SEQ ID NO: 265125 - DNA, 122 bp, Homo sapiens
cctggcctgggaccctgccccagcaacccccaggtaggctggctgtggatgtgtgggctccggacaccctgcggggacggctgctgtccacgccagtgtgtggacgtgtgtgcacaccctgt

SEQ ID NO: 265126 - DNA, 122 bp, Homo sapiens
gatgacattgagaaagagacccgggtccagtgaagcatcagacacgctggcgcatggggacgaggagccctggagactcagggcccgtctggtgcggcccgggctttgctccgcgctcgccc

SEQ ID NO: 265127 - DNA, 122 bp, Homo sapiens
cgtctgggtacagagcaaagggtctcgtttttacgtccttccctgagaggctctggagggcggttcaagctccgactccgacccgaaagccccagcgccaacccgggacgcgctgggataga

SEQ ID NO: 265128 - DNA, 122 bp, Homo sapiens
tttacgctcatcacctaaacttgtactttatttttctgatagaaatggtttcctctggatcgttttatgcggttcttacagcacatcacctctttgcccccgacggctgtgacgcagccgga

SEQ ID NO: 265129 - DNA, 122 bp, Homo sapiens
cgggaaggctcttctgtggcatcgcacgatctagtctgtggtgtagactggtcgccatcacgtgtaataaagcacccgggaaaggcagagtgtggacgcgtcctgtcctctgaagggaaagg

SEQ ID NO: 265130 - DNA, 122 bp, Homo sapiens
gagtctggggcgggttacccagctgtgatgaatatctggtaaatgtttacttttagcattcgcgggtctatctgcagtgagtgagagcttgctgtgtattggtgtattgtctcgtattattg

SEQ ID NO: 265131 - DNA, 122 bp, Homo sapiens
ctcgctccagccctcccgtactctacccccggcatcctctgccccgaagcagggagatgccgggagccctccctaccaggctgtaccggagaaaaacaaacctggagccacaccgcgcacat

SEQ ID NO: 265132 - DNA, 122 bp, Homo sapiens
ccccagcagcacagtgggctgggctgggctcagaggtcagagctcactgtggccgcagcccgagcctcgggcttgaccccgcactgggtcccaggtctcaccctctggccccccgcagccca

SEQ ID NO: 265133 - DNA, 122 bp, Homo sapiens
ctgtgtattgcgagcacctgccatggtattgatacagagcagtcggtcagccgacgtgtccgtgaatgagtgtaatcctcatcaacagctcccaagcttgcccctttctcagcccccttggt

SEQ ID NO: 265134 - DNA, 122 bp, Homo sapiens
aagccccttcccccgccctcccctccgtccgctctccctgcccctgtcagccgcgccagacgctctccggctttgcagcattcaataaaaattgagaaacatttgggctgaaatcgctgctt

SEQ ID NO: 265135 - DNA, 122 bp, Homo sapiens
ctgcggtcgcttctcccgccgcgcctcttccccggccggcgtccccttagcctggactcacgctcggagttgcagctgggctgggaactgccacgtcaaaccctttctcggctgcgcgcccc

SEQ ID NO: 265136 - DNA, 122 bp, Homo sapiens
cgtttgccgaatgaatgaaccagcttttccagcgcttcattcattctgcaaagttgatggcgcttcccttccggatgggtcgggccccgtggcggaccctggggaggccgtgatttaacgac

SEQ ID NO: 265137 - DNA, 122 bp, Homo sapiens
tctcccctcttccctggagcccggtccgacgaccagccccgcaccccccttttctgtccccgaagtcccctcccgggttggccctataagctgtcaggctggcaggcaggggttaattgcgc

SEQ ID NO: 265138 - DNA, 122 bp, Homo sapiens
gccgcccactcccacacagctgtctggcaagaacctcctgacagcctggaataccctcgtcgtcgctaccgacggctaccaccttcacctgtacaagcccttccctgtcaaagtaaaggttg

SEQ ID NO: 265139 - DNA, 122 bp, Homo sapiens
cgcacggctctataaatacagctgcgcggcgggccgggcgagagcgtagtggaggaggcgcggttgtgagtagtaccgggagtggggtgatcccgggctaggggagcgcggcggccgcgatc

SEQ ID NO: 265140 - DNA, 122 bp, Homo sapiens
accagcacggggaacctgccactcctgggtccatggtgaacccagcgtgggagctggctccgggcacatagaagggaagtgaggccacattcccactgctctttctctgcccccaaggctgg

SEQ ID NO: 265141 - DNA, 122 bp, Homo sapiens
agcacccagagtcacggcagtggtgggcatggggagggcctagcctggtacctccctgctcggctcccgcggctgggggtcggagaggggtggagagcgtgggccgcacagcctcggccggg

SEQ ID NO: 265142 - DNA, 122 bp, Homo sapiens
ttcctggttttctggttctgcctccctgtgggtttgctgttgttattgatcatctggctacgcttcttacttagccaaggtgagcttcttaccccgtccaggcaggaccctaatcctggagc

SEQ ID NO: 265143 - DNA, 122 bp, Homo sapiens
ctttctagccccgacccctcgtcccatcagctcactgtttccataaaacatttgtcatggcgatgtgcaaggagctccctgccactgccctgaacttcttccctgaaagcagccagccagtg

SEQ ID NO: 265144 - DNA, 122 bp, Homo sapiens
ccgatatgaatccgagctacaaatgcccgatatcatgagactgatcaccaaagatctgtccgaaccctactccatttatacctatagatattttatccacaactggccacagctgtgcttct

SEQ ID NO: 265145 - DNA, 122 bp, Homo sapiens
cccacatctgtccaccttcccgggggtgtcctgtcatctgccagttccttttttcaccctcgagcagcccccacaagagaggacggggaccacccaactgcagaacaaacctggactcagag

SEQ ID NO: 265146 - DNA, 122 bp, Homo sapiens
acacggaattaagctctgcggtaaggccttggaatctgcatttttaggtttgcgaatccccgcctctcccgttactatttctgaactccgagctccagccctggcttgaactgagacgctcc

SEQ ID NO: 265147 - DNA, 122 bp, Homo sapiens
tggacagctgggaactgtgctctagtcctagttcagagtcactaacccactaggtcattgcggaaaacttcttttactactctcagccctactttcctcatctgcagaatgaggatggaatg

SEQ ID NO: 265148 - DNA, 122 bp, Homo sapiens
cgcacctgtttgaactgcgtgtaggtgaccgcgcacctgtttgagctgcctgtagctgaccgggcacctgtttgagctgcctgtaggtgaccgcgcacctgtttgagctgcctgtaggtgac

SEQ ID NO: 265149 - DNA, 122 bp, Homo sapiens
cactgggtgagaacatggaagtcagagcaagtaacagtgctgctttttgtggggggggggcgacctggaacattccacctggctttttcgatgacttgtgcttttagtcatgcctacttcta

SEQ ID NO: 265150 - DNA, 122 bp, Homo sapiens
agcgtggaaatcagatctgagaatctcgggagcagccctggtgcccaattttctccatcacgcacacccttctcgcctctccctgcctcctgcctttccacttgcaccagttttcccacccc

SEQ ID NO: 265151 - DNA, 122 bp, Homo sapiens
gcaccgcctcgtccatcagagggtgggtcttgacaaagttgaggatgtcatccggcaaggcgctggaggcattgtactgcatcccgggggctgcgcagcacccgggcctgggggtgacaagg

SEQ ID NO: 265152 - DNA, 122 bp, Homo sapiens
cagttgcttgccattctgagtggcgtgatgaaatctcacaccgtcttgcttcacccctcccggcctgtgaatcctccggctgttcagtgtatctgaactgtagatgctacttgcccattagt

SEQ ID NO: 265153 - DNA, 122 bp, Homo sapiens
ccagtgctcccccgatgctctgtccctcttcaccccccacctaactgaggctttgtaacccgatgctctataaagagcttttccacaggagcatcaagagatgtccttgctcaatattaaac

SEQ ID NO: 265154 - DNA, 122 bp, Homo sapiens
cagggtcgtcggacggagaccgggccacagggtgggcggccctggccgagaaggctgtggcgcgccgctgggtctgggtcagggcccctggggcccaggcgaacgctgaggcccggaggggc

SEQ ID NO: 265155 - DNA, 122 bp, Homo sapiens
tgcctagaggccaaaaacatgagaagtgacctgtggtgaaagctttactaatcaaatgctcgcagatggggaatggctaggctcatgccttcaaaacagcattccacttttttttttttttt

SEQ ID NO: 265156 - DNA, 122 bp, Homo sapiens
cgcccgcccccggcccgccccggccccgcctatgtccccgccaccgcggaccgcacctctcggcccgtcggatcctccgaccccaccggacacccggccgctgtcaccccgcttctgtctcg

SEQ ID NO: 265157 - DNA, 122 bp, Homo sapiens
cgcttcctcgggttcccgggaaaatggctgtggggctggccgcgccgctaagtttgcttccgcgcggtgaagagcgggctgcttgggggagccgtcccccaactccgcggcgcgtccacctc

SEQ ID NO: 265158 - DNA, 122 bp, Homo sapiens
gagtagctgggattacaggtgcgcaccaccacggccggctaatttttgtattattagagacgaggtttcaccatattggccagtaggtctcgaacttctcacctcgtgatccaccctcctag

SEQ ID NO: 265159 - DNA, 122 bp, Homo sapiens
gcactgaagacaggcagcgcgatagtgtccttgttggccagcagagggcgcaataggaggcgggccgcacccgaagatggctatagcgctgtgcccgagccagcctgggcgccctctgccgg

SEQ ID NO: 265160 - DNA, 122 bp, Homo sapiens
aattctttttggctttaggatcttgttaataacccgcgaaaaactcagatctgagatggacgactgattatagatattgaaatgcagtttgcagaaaggtttagagaacctttttatggagc

SEQ ID NO: 265161 - DNA, 122 bp, Homo sapiens
aggagtcgtggagtgggttcggccacgtggaatccgcgtcctgggaacccgtggaatccgcgtcctgggaacccgtggaatccgcctcctgggaacccgtggaatccgcctcctgggaaccc

SEQ ID NO: 265162 - DNA, 122 bp, Homo sapiens
ggtccctgtgcctaccccatcccagataattcttacttggaactccctgtggagttcttgcgtggtagttgaggggtcttgattagcttccgtggtcccaagttccaggggtcccagcaggt

SEQ ID NO: 265163 - DNA, 122 bp, Homo sapiens
cctcggcgtgggtggtctgccgcgccataggcaggacctgtcagggtcacgtgacggatccgaaaactttacccctttacaataaactcaaggaaagcaaagtaaactcgaggaacgtgcta

SEQ ID NO: 265164 - DNA, 122 bp, Homo sapiens
gctagagcgggcgcagcgttagggtggccgtgcaaggggagccgtggcccgggcccggggcgtgcgagacggcggaagcaggtgagcgcgagcgggcgcgcagaggccggccgggctgcgct

SEQ ID NO: 265165 - DNA, 122 bp, Homo sapiens
tccccagtttggctcttgcgggagttgagagggaaacaaggatggttgtttcagtgcaggcggggctgcagaaactgagagaagggagcaaagacaagaggctgataacagctccagaaact

SEQ ID NO: 265166 - DNA, 122 bp, Homo sapiens
gggagggaaggcttcaatcttctttatgcaagtgagactgctgctcttattgtccccttgcgtgggtcttgtcaccttttttcaccctccttcctcgctacattactgtgtagcaatacaag

SEQ ID NO: 265167 - DNA, 122 bp, Homo sapiens
ggagaaacacactaatgagctctctctgctaaactggttctgcacttggcctccagagggcgatgctgcacacactggagcttttgtttctgttgaagatcaatccactgctcagtttcttc

SEQ ID NO: 265168 - DNA, 122 bp, Homo sapiens
cacctgaggagtatttcaaagtacacgtgcctgggcccccatcacgtttcttttgtgccccgggggattctgatgcacatttctgaatgaccccaaccaatgcagctggcccaggtcagtaa

SEQ ID NO: 265169 - DNA, 122 bp, Homo sapiens
cgggaccgggcggaaaggggctgcctttgtcggcgcccacgttccaggtgtggtggtatccggagggtttggcagtgtcttcattccgggttgacccaagagagatgccggggcgggggctc

SEQ ID NO: 265170 - DNA, 122 bp, Homo sapiens
tgttccacccgcggggtctccttcactcgcagccgccatcgccagccctcagctcggtcccggctacacttgagagttcggaggattaatgggaaaatgtgtgtaaagtgcattggaaatga

SEQ ID NO: 265171 - DNA, 122 bp, Homo sapiens
gactgccccccaccagggccagcaggctgtcaggctcacagaggcccgagggtctcccagcgacttgtcgactctggtgtgagtctggcaggaggtaacccagtcccggggagggcggaggc

SEQ ID NO: 265172 - DNA, 122 bp, Homo sapiens
gggcactttctgggccaacaaccacggccgcaactacacagtcctgctccggatcgcacccgctcccacacccactgatgccgaagggctgccccagcagcagcagctgccgcagctggagc

SEQ ID NO: 265173 - DNA, 122 bp, Homo sapiens
caggtggaagctggcaccgcggccaggggcagcccacgcagcagcgagtggggccgaggtcgtgggcgggtgtccggaccctcatcacaggaacttgctggaacccccagaggccccggcct

SEQ ID NO: 265174 - DNA, 122 bp, Homo sapiens
ctgatatgaggggttgggagagaagggggacgtgggaatgtaaggaagagcgagagtggtcgggctcatggggtttgatggactgtgacccaggctggcgttgctcctctccggatttcact

SEQ ID NO: 265175 - DNA, 122 bp, Homo sapiens
ccctagaggccctggacccgaacgtggacgagcacttgtccacccagattctcgcgccctcggtccactccgacaactctcaggagcgcatccaggcccggcgcctccgcatcgctgcgcgc

SEQ ID NO: 265176 - DNA, 122 bp, Homo sapiens
ggcgaaggtagctcctctccggtagccacggggtgtcggatgtgcgcttttacccaggctcgatatgtgcctctcctggagccggctgggaccccgcatcaggctttggtcaagggtctttc

SEQ ID NO: 265177 - DNA, 122 bp, Homo sapiens
ttagtctggagcatctaggaacccctagaagcattgttctagtcactttccatttcaaatcggaggggtgtgtctcatgttgagccagtataacaattgacttcatctttcctggctcgggt

SEQ ID NO: 265178 - DNA, 122 bp, Homo sapiens
gggggccggccatgcggagaacactctcctctcccagccaggcttcagaactggggggctcggcctccttcctctggccccagcagcccccgagcggagacgctggagttccagtagagtgg

SEQ ID NO: 265179 - DNA, 122 bp, Homo sapiens
gtggcatttgagccgacacctgaaggacatgtgggatcaacgatcccaacgaggtacacacgaggtggagggaacagcaagggcaaggcctgggaggggaacaagcctgggggttcccacgg

SEQ ID NO: 265180 - DNA, 122 bp, Homo sapiens
aaactgcccttatatatactcagaaacattctaattggccttgttgattttcaaaagacccgcgcaacaaaaccattggctgaagagtccaacgatgtgattggtgaattactggaaaatct

SEQ ID NO: 265181 - DNA, 122 bp, Homo sapiens
acgaggtgggggaccttgggactggtttcctccttgtgggggttgtccttctggctttcccggacgaggtgggggaccttgggactggtttcctccttgtgggggtggtccttctggctttc

SEQ ID NO: 265182 - DNA, 122 bp, Homo sapiens
tgatccccagaaggcgagctgagaaatacggctggagcgttcccaggctacaatttgcagcgacgattatggaagtctacgagctggagtggtagacttcaccaataccatttcaccaatac

SEQ ID NO: 265183 - DNA, 122 bp, Homo sapiens
aaagggcctggggtgtgagctgactctcctctggggaggccgggtgcacacgccacagcccgaggaaagtgctggccaccgcccgtgggcatcgatgaggctttggcccccaggggccggac

SEQ ID NO: 265184 - DNA, 122 bp, Homo sapiens
gttggtttaggagttttgaacagattggatacagaactatattgtgttttgtatttagaccgggggaaagactagaatgttaactctagggtccagtttgtcatctaacagaattccgggct

SEQ ID NO: 265185 - DNA, 122 bp, Homo sapiens
ggtgccaggcggcaccgagctgcttctccacagcaaagtgagcccagcaggccctgggagcgggcgccagctgacagcggccaccgtggtccccactgccgacacatccatcgccccgacag

SEQ ID NO: 265186 - DNA, 122 bp, Homo sapiens
gggcctgcaaccgcgcatctccattggtccagagggtgggagggcggctcccgagagcagcgccccgcccatcgctgaccactctggggcccgagcaccgcccctcgggccgggcacctgga

SEQ ID NO: 265187 - DNA, 122 bp, Homo sapiens
tgcagagcgggcgtgagatattcccgctgaatcaagctaaaaataacgcatccaagctgccgagttatgaaagcagctggccctcgctcttgcctgttttaaatacatgctgaggagcacgc

SEQ ID NO: 265188 - DNA, 122 bp, Homo sapiens
gagcctgccctttcccccgccgagggcctgtgcggggcgcggcggccgcgccaactccggcgtcgggaacactcaccgcaggacgctttgccctccttggaatcgcagtagccgcagtggta

SEQ ID NO: 265189 - DNA, 122 bp, Homo sapiens
ctgtttgcacagggaactaagctgtcacctggccccgggctcctgaggcctccttggcttcgcctgcgtccacacctgtagcccccccgccacaccccacccacctccgggcctccggagac

SEQ ID NO: 265190 - DNA, 122 bp, Homo sapiens
tctcaaaacaagatgagctgtaccataggtatacatatcccacacccccagccctgccgacggagttttgctcttgtcagccaggctacagtgcaatgtcacagtatcagctcactgcaacc

SEQ ID NO: 265191 - DNA, 122 bp, Homo sapiens
tttcttcggtgagctctactcccattaattcccttcctatgtgcagcttagtgttctttacgtctccaaaatatacctaggtgttgggaggattttgttcccaatgactttatttgaaataa

SEQ ID NO: 265192 - DNA, 122 bp, Homo sapiens
gctgggatccccctcctccatcctgtggcttcgggttgccgaagagcgatgctcggagggcggccggaagtggcgttggccgccattggcctgccggccagccaccttgctgtcctccgccg

SEQ ID NO: 265193 - DNA, 122 bp, Homo sapiens
tcaggagggctgcatcgctcagcataactaaggccagcattaccccaaagccagctgggacggctttgctaaggctctgtcctcttgaggggaaaatatgagtctgagtcagggccttgtgg

SEQ ID NO: 265194 - DNA, 122 bp, Homo sapiens
agtgggagtccgggcaacgcagattaatctcaggagggccccggggccggcgagtcagaacgcggatgcgcgctaggccctagcttttagagttcagggtaacctctgtgttagatttccct

SEQ ID NO: 265195 - DNA, 122 bp, Homo sapiens
gggcgcagtgtgtcttgggccggaccctggcctgtgctgtcatggtaagtgcgggaggtgcgggaggggcaggaggtgcgggagcgtgggcgggcggggccggctgaagggggcccccactc

SEQ ID NO: 265196 - DNA, 122 bp, Homo sapiens
agcacctactgcctggttccccaagccccatcaagctgtctttccaaaccttgaaggtcgcgctctgtaatcatcttccttaggaatccaccccattttgattgcccctttattctgctctt

SEQ ID NO: 265197 - DNA, 122 bp, Homo sapiens
aaagccgattggcctgcgctcgagcgaggctgccttgtgattggttgacaacaaacccgacgccttgagtcgcgtttaagggcgcacaccgcgcgcaggcgcacttgctccctaagaacccg

SEQ ID NO: 265198 - DNA, 122 bp, Homo sapiens
aaaagtaacacagagtggccttggcctgttgtcttcccctattttctgtcccagctcatccgtgtctctgaagaacaaatatgcttttggaccacgaattcccagtttggtctacacaggct

SEQ ID NO: 265199 - DNA, 122 bp, Homo sapiens
tactatgtttgtgagattcatccattgtgctatgtgtagttgtgtatcatccattttcaccgacacacttacttattcattcttctgtcaatggacatttgtgcaggtgactatcatgacta

SEQ ID NO: 265200 - DNA, 122 bp, Homo sapiens
ggggtcggggccaagtggagtgactgcgctcctctgggggaaggaggctgggatggcccacgggaggacagaggggaactgagggcccacaagtgtcctgctccccaagtctcctggcagca

SEQ ID NO: 265201 - DNA, 122 bp, Homo sapiens
tgggtgttgtagacacaggggcagaggcgtgtttggagaaagggttcagaatttggagtgcgacagacgtaggttcgaacagagctctgctactctgtggctgtgagggctcccgcacacac

SEQ ID NO: 265202 - DNA, 122 bp, Homo sapiens
cactcctggcatctcagatctgttgcattgcagtcccctctagacgctgaagcagcgtcacggtgcagacaagtagggccagtgacgagggcagccacacagaggactgcaatacgtaccta

SEQ ID NO: 265203 - DNA, 122 bp, Homo sapiens
tttccttgcacagaaaacagcctttctcctgggctgacacctgtgccctgggcctgtggacgccctgtccaggcagcatgcctccttggttatccaaacagtaagaagaaatgcaggaactt

SEQ ID NO: 265204 - DNA, 122 bp, Homo sapiens
ggcgggaggcggggagcgcaggggcggcggcaggcgggaggcagcagcgagcatgtgccgcggagcccagtaaccagggacgaccgcggccacaccgcgccggcgccggcgcccagcccagg

SEQ ID NO: 265205 - DNA, 122 bp, Homo sapiens
gttcctgaagaaggcgctgcaggggctgcgcaaggacttcctggagctgcgctccgccggcgtggagcagctcatgttcatcaaggaggacctcatcctgccgcactaccacaccttctacg

SEQ ID NO: 265206 - DNA, 122 bp, Homo sapiens
acacacgagcttctgctgggggtgggagggggggtcgccattcaccagcagcccacggcccgcagagccaactgatagagaccccagccacaggccacaggacctgggagtccctgcgatgg

SEQ ID NO: 265207 - DNA, 122 bp, Homo sapiens
gctaatagtttttccgggtgtttccccaagaggacaggtcgggggaacagggaatatgcacgtggaagcacatgtagaaacatctgctcgtagatgccatctgtttactcagggtgcccgca

SEQ ID NO: 265208 - DNA, 122 bp, Homo sapiens
ttacaaaatgcctaacagttagtattaaaagtatttgccattaaaagtgatggtgaaaaccgcaattacttttgcaccaacctaatagtggtcaactggaaactggatggtgtacaattaaa

SEQ ID NO: 265209 - DNA, 122 bp, Homo sapiens
caatgtctctccttgtaaggatacccgccatattggattagagccccacttgtcagcctccgtttaacttaaacacgtctttgaaggccttgtcttcaaatactgtcaaatggattagggct

SEQ ID NO: 265210 - DNA, 122 bp, Homo sapiens
ttataatcctggtggggtccgataccccgtggcttagtcccaggaaacagtcagtctacgcggctccgtgccccggggtgtaatatgcccgggaggggcagcgcttggctaccccaaccctt

SEQ ID NO: 265211 - DNA, 122 bp, Homo sapiens
actcagcggcgattccagagatcttggatggagggttccaggtcggtccccagtggctggcgtgtgggaccctttgaggatcggcgccgtctccgggccttccctggatcctggcccctaga

SEQ ID NO: 265212 - DNA, 122 bp, Homo sapiens
ggtggtggggacaggtgatgatttgccaccacccaggatggctgcctgacagccagagtgcggggcgggggggctattctgggacccgccagggtgggggtgggggctctcggcctctccgg

SEQ ID NO: 265213 - DNA, 122 bp, Homo sapiens
ccgcgcttacgtggcgcagccgcggggacatggcgtgggtggtgggcgtccgctgggacacgttgagcacgatgacgcaattcatgacaatgagcgtggcgaccaccatgacgaaaataagg

SEQ ID NO: 265214 - DNA, 122 bp, Homo sapiens
gcacaggaatcagcaacgtgtctccctttggccaccagagggcagatgattctcaaggatcgaatttgggttggggagtgaggtgttctctgtcctcctcttctctctttccctcaccttca

SEQ ID NO: 265215 - DNA, 122 bp, Homo sapiens
gcagtaagttgcagagatggccacttgaatgaaacacaaacagggttaatttttttcactcggtcaattgcatttctcatacaaagctgaaaaatgctctcttgtaattctcattttataat

SEQ ID NO: 265216 - DNA, 122 bp, Homo sapiens
tcactgcaaaccattttgtcaggcgtggattcagagtcagcatcccttccccccttcccccgttctccccttccccccttcccccttcccccttcccccttcccccttcccctcccccatct

SEQ ID NO: 265217 - DNA, 122 bp, Homo sapiens
ggtgatccacatgtcttggtctcccaaagtgctgggattacaggcatgagccaccatgcccggtctgccgttttttagaagagttgttctcagatggagcttaaatcctgtgatccctggag

SEQ ID NO: 265218 - DNA, 122 bp, Homo sapiens
cccgtggctccgctggcgtccctcggcctctcggggagccggctttgaagggggtgatgccgtgttctgctgcataagggttttttgttttgtttgagagaagctggtccactcggcattgg

SEQ ID NO: 265219 - DNA, 122 bp, Homo sapiens
cagcgccgggaccccgcgggggacactgcagccggagcccgggaggggccgcgccgccaccgtctgaactaggatgtcccgacatgaaggtgagaggagcccccgcccccacccgcacctcc

SEQ ID NO: 265220 - DNA, 122 bp, Homo sapiens
tgtagagatgaggtgtcgctatgttgccctggctagtcttgaactccaatccttccacctcggccttaaataattttaatagttgacatgcacatggcatttactattggccggcattattt

SEQ ID NO: 265221 - DNA, 122 bp, Homo sapiens
ttcctgcctcacacgttccaaagaagggtccgtatcccctcggccttaaggagcaggacccgcggctccactttgctggcgacccggacaacgtcccgggaactctggaggaactcttgcca

SEQ ID NO: 265222 - DNA, 122 bp, Homo sapiens
tgacagctagagccccagaagacctgcacaagctggggcaatggctacccataacagtgacggctccattctgttttttaaagggattggtgtctctatcatccagctggccattaaacaac

SEQ ID NO: 265223 - DNA, 122 bp, Homo sapiens
ccaggccaggcaggctggggagagccccagctgacagagctgggcttggcatgtgcagagcgaccctgagctggtgcagtggaagaaggagctgcgcgacgcctaccgcgaggcccagcagc

SEQ ID NO: 265224 - DNA, 122 bp, Homo sapiens
caaagggaagaagtattagattggtaagcactttccagccatgatgagaagatggcagagcgagttaggaatgtaggttttcttctacgacagaagaggtcattttaatgagtaaatggagc

SEQ ID NO: 265225 - DNA, 122 bp, Homo sapiens
ccgagaggccgcgtcctcagctggtcctagacatgcgtggcgtcggggctgtggcacggtcgggtccggggtgagtgaccccttcaagtaactacgtttttgttctgcccttttgttttgtt

SEQ ID NO: 265226 - DNA, 122 bp, Homo sapiens
acggctctagccctgaccctcttagctcttgggctgccccgcccccatacgtactcatgccgtcagcacaatgcagacaatcgggacggtccacgccaggtggactgctgtgccccagaggt

SEQ ID NO: 265227 - DNA, 122 bp, Homo sapiens
ggtagaagggactcagggaagtagacgtcgggaaaagatcagactccaacaggtgctctccgaagaactggtcaaagaggcggctgggggagtggaaaggaaagaaggggcggcggatccag

SEQ ID NO: 265228 - DNA, 122 bp, Homo sapiens
tgtgcgtgcgcctcgcgcttttctctttcggtttttggggaagttgttacctgggccggacgcacggagcgctgaagccggataatggggcttggatggcgctctgggtctcgggtggaagg

SEQ ID NO: 265229 - DNA, 122 bp, Homo sapiens
tacttagctttgagttctggatagatctgcgattctgggaactgactttaaacaaaatcacgaagctttgcagtgaagacacatctgactcacaagtaagttgaatgctttccaagggccca

SEQ ID NO: 265230 - DNA, 122 bp, Homo sapiens
ggggtcccttgtgtttggggggcccagctcccgcttcctttgagcccggaaccaatgatccgaagccttctttcctgatgggattctttagcgaggacactaccgaggcgcgacttcctgac

SEQ ID NO: 265231 - DNA, 122 bp, Homo sapiens
gtcatcgggcagcgtttgcccagtgctggagggttagggagagctgcctgggcttgaccgcgcgccggtctcaaagtcctggctttggcccctcctccgttttcccctgtggaccattccgc

SEQ ID NO: 265232 - DNA, 122 bp, Homo sapiens
caagtagctcttggttctgctcgtttgaaaacagggttcgatttttttctttgttaatcccgcaccgtatctccccctatcaccgccaccttcctcaccccacacccccagcctcgctgcgc

SEQ ID NO: 265233 - DNA, 122 bp, Homo sapiens
aggcctccggatgactgcaggccaggcctggagaatatccagcctcccacaagaagctggcggagcagagtgttccctgactcctccaaggaaaggagactccctttcacggtcggctaagt

SEQ ID NO: 265234 - DNA, 122 bp, Homo sapiens
tgtgggttttccacatttgaatcccagagattcggcagccggcccctccccagaagatcgcggggacctactgcccctgcagaatcccttggcctgccccaaagccggcaagcaaaccctca

SEQ ID NO: 265235 - DNA, 122 bp, Homo sapiens
tgggacaccacagaaaagtcacagctgggttcctggggatggtaggatgaaaaacaaacccgggggattgagagagaaagactgagtgccctgcaggaaagaattcagaaggagatgcacag

SEQ ID NO: 265236 - DNA, 122 bp, Homo sapiens
catgccagagtccctgtgagaacgctggaccctcgattactaacatacgtttcaaaacctcggaggtattgaactagcagtgatggaagaacaagcaacagaagcaacaggatcccagctgc

SEQ ID NO: 265237 - DNA, 122 bp, Homo sapiens
acaggctcgggagggcctggccaggccactggaggctggcagggagcaggcatgtccacccgcaagcctgggaggctaactctggcattcctggccggagccgccatgctcattggtgggcc

SEQ ID NO: 265238 - DNA, 122 bp, Homo sapiens
cgcgcggtctccttgggggagggtgcgggtgggccgggcgcgcatgcgcatgggcgccatcgcccgccggaagagcggcagcccaggcgctgctgctggcgccagacggcaccggccgctgg

SEQ ID NO: 265239 - DNA, 122 bp, Homo sapiens
gcgcgagggaaggttgttctccttccccttttcctgaattcagctcgagttccgatttggcgagggaaaaaggcttgtttgccgttttggatgaagctgatgctgaattcggctgcattatt

SEQ ID NO: 265240 - DNA, 122 bp, Homo sapiens
gatgagcaagtaggacaggcagatgaatgccaggggtacaggcagcagcaggatggagcccgccagcaggaagtcttcgctgaccgacgtgttgccgcatgccagcttcagcactgccagga

SEQ ID NO: 265241 - DNA, 122 bp, Homo sapiens
aggttatgacttttgtagtccaaatttgtactaatctgtaaactataattaactcggattcgttatactagaagtattctgcagaagtctttgaagtcccttccagtgtcatgatgctataa

SEQ ID NO: 265242 - DNA, 122 bp, Homo sapiens
acccgggcccgcgcggagctggtggggcgccggcgggccgacgtcagccgagccgagcaccgcctgccccacgcgtggcccccgcccccggcttcgcgccccgccctccccgccctgcggcc

SEQ ID NO: 265243 - DNA, 122 bp, Homo sapiens
gatgaacatgaggtttatctgtgctgtgtaccagcagagtgtattctatgtttttccagccggattttcagtggtttttgcttcatggtaattatggagttctggcttgtaagcaatgtctt

SEQ ID NO: 265244 - DNA, 122 bp, Homo sapiens
aagataattcttcttcttccaacgtggcctagggattccacaagataggacccccctggccgggcgtggtggctcacgcctgcaatcccagcactttgggaggccgaggcgggcagatcaca

SEQ ID NO: 265245 - DNA, 122 bp, Homo sapiens
gctgggctatttttgtctttagcccataacatgcttctaagtccctaccccgggatccagcgccgtcagactgaatatatcccaaacctgcctctgtaccttctcagcgtatctgctcctct

SEQ ID NO: 265246 - DNA, 122 bp, Homo sapiens
atgatgtgaagctgagagaagagctggggccacctcttcgacacgcgtacagaaaagtcccgttttctcgcatcccaggtggaccaggatccagatcaatctgtcgatattgggaacgacgc

SEQ ID NO: 265247 - DNA, 122 bp, Homo sapiens
gtcacctcgcccctcctccttcccccaactcgcgcaggtgcgaccgccacgccccttcggcgcatgcgcagaacgaggcctccaagccccgcccttcctgggccgcttgacctgcccccaac

SEQ ID NO: 265248 - DNA, 122 bp, Homo sapiens
ttttacagatgaagaaaagccaaagagaagttatataactggcaagtttctctggctccccgcctgcaccactgctcaccagattgcatgaagagggaggcagctgtaacacctcatcccgt

SEQ ID NO: 265249 - DNA, 122 bp, Homo sapiens
gaggcacagacagcgtcacaaagccccacgcgtactcacaccgaaggctcagccgtcgcgcgtttccctcccaggccccaggaactagtaactagggacgcttctggtctctaggcgaggag

SEQ ID NO: 265250 - DNA, 122 bp, Homo sapiens
ttaattcagttaaattaaaacattttctctgtaatactatccacatttcaagtgctcagacgtgacaagtggctcgtgggtgctgcgttaggcagcactggcctgcagaatccactggttta

SEQ ID NO: 265251 - DNA, 122 bp, Homo sapiens
agtcaagctgggaattgcttaaagcaaacccacctcccgttctattcaaagtcacccctccgctcactgagattaatgcatatctgcttccctcctttggagaggctaatcatcaactcaaa

SEQ ID NO: 265252 - DNA, 122 bp, Homo sapiens
gcagccgagctggcgagggcagcgcgggtcccccggaacgccccccgaggcgagcgctaacgaggtccggcaccatgtgctaggtcactcccagtgcaaggccacacttgggccatccgagc

SEQ ID NO: 265253 - DNA, 122 bp, Homo sapiens
cctgccattttctgctctagaaagcctctgagtcacgtcagacttcctagcgagggaacccggccgctgttggacaggaaatctcagagggctcagcttccaggctggagaactgattgttc

SEQ ID NO: 265254 - DNA, 122 bp, Homo sapiens
accttatcttgcactagaaggatctgtagcttttccagctgagaatggggttcaggataccgaatcaacactagaaaagagagaaactggggatgaagaaaactcagctaaatttcctatag

SEQ ID NO: 265255 - DNA, 122 bp, Homo sapiens
aaaactacatgccctggaagttaagagaccggctttattccgccactccagagcacgtaacgcggcgccagaactcaagaatacattcagtcgttatttgttgaactgaatggcatagttag

SEQ ID NO: 265256 - DNA, 122 bp, Homo sapiens
agtctgcgcgcccgaccggagcgtccatgcgcagtgggagccactttgtatcctatcaggcgaggagagggtgatgtcacctgcgagttagtaacctacgagcggctgtgaaggaaactgtt

SEQ ID NO: 265257 - DNA, 122 bp, Homo sapiens
agcgggttggagagaggcaagcggctgcctgggaaggcggccccggaggaaggctctgtccggccctgcagggtggtcgccagcctggccgccggggcagagctgcccactcccactgagaa

SEQ ID NO: 265258 - DNA, 122 bp, Homo sapiens
acacgcaccccgggctcacacgcaccccgggctcacacgcaccccctcttacacgcaccccgggcccacatgcactccggctcacacacaccctcactcatgcaccccgggcccacacgcac

SEQ ID NO: 265259 - DNA, 122 bp, Homo sapiens
tttctgcatctattgagataatcatctggtttttgtcattggttctgtttatgtgatggacgatgtttattgatttgtgtatgtttaaccagcctgcatcccagggatgaagctgacttgat

SEQ ID NO: 265260 - DNA, 122 bp, Homo sapiens
tcctccccatggagaaaactccagccttccctccctccctccaagtcccccacttcaccacgcaggttccctgagctgggtcctcttcaccaacctccagctcccactgagcctcgaccctc

SEQ ID NO: 265261 - DNA, 122 bp, Homo sapiens
ggaagaggccccgcgccctccgacagtggaggccccggcagaagatggtttctctccttccgcagaagatgctgtttcttctgtggtggattatcgggatctcattccttctgaagaaggga

SEQ ID NO: 265262 - DNA, 122 bp, Homo sapiens
ctttgccttaaattcatgaatacttggtgttccaagccttagtggaatgtaaattgagaacgtcttttttgggtttagtcctgccaatgcccttggactgtggtcaaacgttcatcagtcag

SEQ ID NO: 265263 - DNA, 122 bp, Homo sapiens
cagacccctgtggtggagcccgactggcttagggcacagaagggggctggctcggggcggcggggcctgttggaagcaaacactgcacagggtagcagcctctgtgggcgcaggaccgggct

SEQ ID NO: 265264 - DNA, 122 bp, Homo sapiens
tagatggccgcctaaggggcaggctggggtgagtcacggagcctgggatggtgcgtcacccggcagtcccaggcgtgggtgtggggacagccatgacaaggctgagcctagacacggacgct

SEQ ID NO: 265265 - DNA, 122 bp, Homo sapiens
cacacttccctcggtccctgcccgtttcctcaaattcgggccgtgcgcgccctctggtgtcgcctctcacactttgcagtcatttaccaggattcccgtagggcgttttgtaaaataaacta

SEQ ID NO: 265266 - DNA, 122 bp, Homo sapiens
attctgtaatccgggggatggccaggctctggaaagtgccccaggtcaggcccaagaacgcgagtgcttgcccagccagcatctggctgtgcagtgagagctcccactggtaagcgtggatg

SEQ ID NO: 265267 - DNA, 122 bp, Homo sapiens
tctgcaaactactccttctcccccagggtcctggctcctcctcgccatcttcagcttcaccgtctctagtcccttaacagccagagcaccaggccccggctgggccgtgtgtccatgcctct

SEQ ID NO: 265268 - DNA, 122 bp, Homo sapiens
cctatgcattgtgcatctttcccctaagtagacctgctccatgtgattgaaatgtgttgccgcaggtaagctggtctttcagattcctgcagcacagagacccatttactgcaaggcatctg

SEQ ID NO: 265269 - DNA, 122 bp, Homo sapiens
agggctccggagagggagggcaacgcggggcggggagctgcctccttcctcataaacaggcgggcgtgggcgccgatggggcccgcggggagcgctggctgcgggcggtgagctgagctcgc

SEQ ID NO: 265270 - DNA, 122 bp, Homo sapiens
tccttagcataatgctttcaggatccatccacattgtaacatggatcagtgcttcattcccggttacggctgaataatattccattgtgcggatgtgccaggcttggcttattcattcatca

SEQ ID NO: 265271 - DNA, 122 bp, Homo sapiens
gctgcatgtgggatgcgccctttgtcccctctgccatgcgcgggggaaaatgtttgagggcggggaagagactgtctgccctcatttgatctaaaacatgaatttgtttgcttggctaaagg

SEQ ID NO: 265272 - DNA, 122 bp, Homo sapiens
tatgctgggctgacagcatacctgacagtctcatgctctattatggttggaattgcctctcgagtaccgcaggaaaactcacttgatgctcttcgaacagcgtgttttgttctgttctgaga

SEQ ID NO: 265273 - DNA, 122 bp, Homo sapiens
aaaaagcggcgcgtgtgcgtgcgcactgacagcggggagagggatgggggtggggaacgccggaggaagggaccacagcatcctccccgccgcagctcccccaatcacacagacaatgagat

SEQ ID NO: 265274 - DNA, 122 bp, Homo sapiens
ggaggagggcggtgggcacgtgtgggtcccacctgacagccgtctgcctgttctacggctcggccatctacacctacctgcagcccgcgcagcgctacaaccaggcacggggcaagttcgta

SEQ ID NO: 265275 - DNA, 122 bp, Homo sapiens
tccactaacctcagggtcagcgcaatccgggggctccaactccaattcggctgagcttcccgcgacggcttcctacggctcccgctggccttctaggccgaggtggagcccaccgccctttc

SEQ ID NO: 265276 - DNA, 122 bp, Homo sapiens
ccccgcccgccgcccattggctgcccgcggagctgcctcccgcctcccctgcccggcccccgccccgcgcgcccgcccgccaccctgcccggccgcccagagctctccattgggcgtcgctc

SEQ ID NO: 265277 - DNA, 122 bp, Homo sapiens
ggcttttcctttcttttggtcccaaacgccaggcgaacctgggagacctgccttccctgccggcgctggttggccaggtcctgctcatggctgacttcaacaaggacaaccgggtgtccctg

SEQ ID NO: 265278 - DNA, 122 bp, Homo sapiens
agcaagcccacgatgtctcaccggattaataaaaatataggcgctcacgcttttgtttaccgatatagtatctcctcctcccctcactccatcaacccccacgcgacacaactttccggaag

SEQ ID NO: 265279 - DNA, 122 bp, Homo sapiens
cgctttgcactctgctcattccagtattcccgccagtgccgcagctgggagtggatgaagcgccacatgagccaggcctgggcggcacacaccagcagcagcacgcagagcctgcagagcag

SEQ ID NO: 265280 - DNA, 122 bp, Homo sapiens
gtgtgtgcaggaaacaagcaggaaataccctaaaatggaatgaagcgccatgttgagggccgcggacgtcgcgagtgctgtgggaatgtgggccaaggtggagagttatggtggcgcgtgtt

SEQ ID NO: 265281 - DNA, 122 bp, Homo sapiens
atctgctgcttccctgggagctgccctcgcgccttgtgtcccccagtgtgacagcaggggcggggccgctgcccacccagtcccaccaaccatgagggctcctgctgtgggttcctctgata

SEQ ID NO: 265282 - DNA, 122 bp, Homo sapiens
aatgtagatggggtgcccccctcggtttgctcacagaggtgggtgtgagatcctacaggacggtctggaagacatcccatggaaggcactttattttgcccagaagctggaggaaaagcaga

SEQ ID NO: 265283 - DNA, 122 bp, Homo sapiens
acctcaagcacaattatatgaatcatggacaaatgttttcactttcaagcaagtttttgccgcagcaaaaatgaccacttatctaagaggctgcatatttatatatatataaacagtttttg

SEQ ID NO: 265284 - DNA, 122 bp, Homo sapiens
ctgtggacagcacatagcacatactattcttcctggtctcttcagttaaatcttgggtttcgttttgtttcgttttttcatgaacaatatacctcagaggctatttcacctcagtgagcaaa

SEQ ID NO: 265285 - DNA, 122 bp, Homo sapiens
tcatcccagagagccttactggagcgctccaggagaggcaccgtatgccctccgctacagcggggagcacagaactggacacaaattctgtggaggaagatcccgcttatcgtcaaggacca

SEQ ID NO: 265286 - DNA, 122 bp, Homo sapiens
ttcttaaagtacctcatcatatattttataatagatgtatttcatatgtatatgtattgtcgcctatcagtgacttacaaatgaactggaatttcaggaatctgatagactctgcccttgag

SEQ ID NO: 265287 - DNA, 122 bp, Homo sapiens
agtgaggcgggtcagggggcggtgccgttaaacggatgctggaaggcgtgtggattcccacgcccgccttggccaacgtcactgtactccttcgtgatgtcacgttccgagttggcgtcccc

SEQ ID NO: 265288 - DNA, 122 bp, Homo sapiens
cgagaccagcctggccaacatagcgagatcccgtctctacccacaaataatttagccaggcgtggtggcgcgtgcctgtagtctcagctactggggttcttattcctcgtggcaacacattt

SEQ ID NO: 265289 - DNA, 122 bp, Homo sapiens
gccccaggagacatttggcaaaatctggagatatttctgatgatctatatgggagtgcatcggcatttagtattatagttagaggccaaagatgttgttaaactttccaggacagcccacca

SEQ ID NO: 265290 - DNA, 122 bp, Homo sapiens
gagccgcgggtctgagaaacgccatagcagcgctcccagcactgactaatcaacaaggtgcgagcaacgcctgcgcagctctgggagacaccgcctccgcctcccaggcgccgcccgctccg

SEQ ID NO: 265291 - DNA, 122 bp, Homo sapiens
cctcacttcccagagggggcggccaggcagaggtgctcttcacttcccattcggggcagccgggcagaggtgctcctcacttcctcccagactgggcggccgggcagaggcgcttctcacgt

SEQ ID NO: 265292 - DNA, 122 bp, Homo sapiens
accctctttggagactccctgagccagggctctgacaccctttttgggggctccctgagccggggccgtgacaccctctttggggactccctgagccggggccgtgacaccctctcggggac

SEQ ID NO: 265293 - DNA, 122 bp, Homo sapiens
cgccgcccctggctcgacttcccgagcgagagccgcgggacgttgcagacgcactggctccgccttcccaccaatctcgaccctcgccgcgttccgttcgtgcgtggagcagtcggggctgg

SEQ ID NO: 265294 - DNA, 122 bp, Homo sapiens
tttatctactgtgaggttcctggggcggagatgtgcagtggagcgagaacttcctgtgaccgtgacattgtctaggtggtgagcaggtgtgggggtgtggagagaggtgaggggctgaggta

SEQ ID NO: 265295 - DNA, 122 bp, Homo sapiens
ctaaggaccgctcccgccttgagcgcagccacaggccctctctggccacaaggatggggtcgccccgcagacactggtgaccagcggaagcatgaccaggaggcgattaccttctaatcaca

SEQ ID NO: 265296 - DNA, 122 bp, Homo sapiens
gcaaaggttaaggtctttcaacctggcaccccattctgcaattcttcttccagtttttttcggtttcctggggttgtgcaagtttgcattaggccacagccgagccacaatccttattttac

SEQ ID NO: 265297 - DNA, 122 bp, Homo sapiens
gacttcaggctagggttttcaaagccccatgtctttgggactgaaccccctatggaaggccggataattggctgctggggtcaccccaagtacaaaaggacgggctctgcactaaggaccaa

SEQ ID NO: 265298 - DNA, 122 bp, Homo sapiens
ttcaggggagttacgggtggagggaggacatcagatctaccctggaagttaaacgtgtttcgagtgcattaaatactatgggccacagacgccttgtctccatatctactcttttataaatg

SEQ ID NO: 265299 - DNA, 122 bp, Homo sapiens
ccgtaagtgaatgaacgagagtactaaggaaaaagaatggagacgtatttcaagttctcacgttgtttgactcgaatcttgtagacggtgtttgctgcaaaaagatgaagaaaacattcaca

SEQ ID NO: 265300 - DNA, 122 bp, Homo sapiens
aaaaaaagaccaaaacaaacaaacaaacaaacaaaaaacagtcccatggctgaaacgtgccgtgacatattcggtgcacacactgtttacacccacaggtagacacgtgagttgctttctgt

SEQ ID NO: 265301 - DNA, 122 bp, Homo sapiens
cctggccctgccccggctcaccggttcttcaggtgctggatgctgcccaggcaccgcaggcgaccgttcaccatgatggccagccgcgtgcacagcgcctcgcactcctccatgctgtggga

SEQ ID NO: 265302 - DNA, 122 bp, Homo sapiens
gagaatcctaaggggcaaggagtgtttgccggctgactcaccctcagtcatgggcaaaaccgaaatgatgtgtggctgctaggacggggatatgtgggaaacttcaggctggagttgggaaa

SEQ ID NO: 265303 - DNA, 122 bp, Homo sapiens
aggttcccctctcaccacgatgtcgggggcagagcaagataaaataagacctaaagctcccgcctggcccgggcgcggtggctcacgcctgtaatcccagcactttgggtggcggaggcggg

SEQ ID NO: 265304 - DNA, 122 bp, Homo sapiens
aaaaggctgaatcagagtcaccaacgatgctttttaaaggaatgcagatttctgtccggacgccctgttggagattctgattcagtgtattctgggcaggactctaagattgcacattttga

SEQ ID NO: 265305 - DNA, 122 bp, Homo sapiens
gggcggaaccgaaggaaggtcgggccctgctgccccgccccgtccttcctccttcccgggcggtcactgtgcgtggctcacttttagagtttacttcaaccacgtggagcttccatggcggc

SEQ ID NO: 265306 - DNA, 122 bp, Homo sapiens
aactcagggggagactcccggcgtcttttgattccctgtcctcctgcagctctctgctggcgggcgtctaaataaagtagcttccccaaaagacccaagatcccaccgtggctgtcatctga

SEQ ID NO: 265307 - DNA, 122 bp, Homo sapiens
gacttctacgggttttgaagggaggaagtgtgtgctgattggtccatgggtggccatcggcggggctggaaaaaacaccaaaagttctcactcccgcggtggactccactgggaaccgacag

SEQ ID NO: 265308 - DNA, 122 bp, Homo sapiens
tgcgtctcccgcaggctgagatgcggctgctcctgctcgtgccgctgctgctggctccagcgcccgggtcctcggtgagtgcggtcctgccccggcccccggaggaacctgcaggggagtcg

SEQ ID NO: 265309 - DNA, 122 bp, Homo sapiens
ggcccggcccgggcccctcgggagcagaacagctttggtgaggtggacaggaggtgacctcgcgagcagacgcgcgcgccagcgacagcagcccgccccggcctctcgggagccgtggggca

SEQ ID NO: 265310 - DNA, 122 bp, Homo sapiens
gttggaatctgattttctgttgcgtgttccttgtagccatagatgtgattatgtccacaccgggctgccttaatctgtcctgcttggagagtgacttgtaagatgctgaattattcatgata

SEQ ID NO: 265311 - DNA, 122 bp, Homo sapiens
gagtctgggtcccaccaagtatacccctgcctccacagtggtaaagctggccctgggcctcgggtgtgtggaataagacaggaaccccttcccaacagggagaggggctgagcaagaggtcc

SEQ ID NO: 265312 - DNA, 122 bp, Homo sapiens
cacccatgtctgagccccagctctctccgccttctgtggggagaagccctccggtctttccgagaaccttcaaactctggacagtttatgtcttgcccgcactctcagctaacagtgcagtg

SEQ ID NO: 265313 - DNA, 122 bp, Homo sapiens
gcgcctcggtgcgcagctgcggaggatcgcttccggggggcgggtcagcggaagtgagggcggttgaggctgggcggcccaaggtggaaggaggggccgtgaggtgagagagtccgggagcc

SEQ ID NO: 265314 - DNA, 122 bp, Homo sapiens
gagtcgtggccacgaggggtgatgaggccgggaagacagataattgaaggttgtccggcgcgtccacagctagagagctataactggctttctgaaaagggcaccatttctggtgtcacaga

SEQ ID NO: 265315 - DNA, 122 bp, Homo sapiens
tctgctggctcgttattcactgcgctggcgcggcttggcagaggcggggcggcgagcggacggtcactatgtctctgcgcaggcgcccgcttccccgctctggactctactgcgcaagcgcc

SEQ ID NO: 265316 - DNA, 122 bp, Homo sapiens
tcaggcatgagtcatgctgcctgctggctcagagcatgtaattagataaagatggcggagcgtctccatgggtggggtggaggggcatgggttggatcttttcatctctttttgttcttggg

SEQ ID NO: 265317 - DNA, 122 bp, Homo sapiens
ccactacacccggcccatgtacagcaagcccagcatcatggctcacaaacgctggatccacgtgaagcccgagcgcttagaacaggcttgcgagggcatggatgtgcacgcgacctacgacg

SEQ ID NO: 265318 - DNA, 122 bp, Homo sapiens
gcatggcggggtgaggcgcggcggggagggtgcgggcctcggcggggaagcggcagggagcgctccggcggggtccgagccgagccgaggggaggggacgggaggggacgggaggggtggag

SEQ ID NO: 265319 - DNA, 122 bp, Homo sapiens
tatactgtcacctcctcctccccctgcccactatgccagataacgggggcgcgtgaggggcggggtgggccctgctccagctggatcaccagccacctccgggcacaggaatccggaccctc

SEQ ID NO: 265320 - DNA, 122 bp, Homo sapiens
cggcttgaaccattctgggccatctccacctggggccctggagtgacgacggccccattgcgcagccaggtgacatcggcatctggtggggagacttcacaccggaacgtggcatcatcgcc

SEQ ID NO: 265321 - DNA, 122 bp, Homo sapiens
ctggtaaggctgttggctgaatgaagagggtagaggtttattggtgcacttactgcgtgccgattgtctaggccactgacacatgcaacttagcctctgtggctggacatgtacatagttaa

SEQ ID NO: 265322 - DNA, 122 bp, Homo sapiens
tctgtggtggatgacacaaaggctggtgcggaagaagggctgaaccccggggaggcctgacgcctgtcagtaatgagatcatgaaaaccagttctgagttgcttccatgtggccccacgaat

SEQ ID NO: 265323 - DNA, 122 bp, Homo sapiens
catgatactcatgtatttccttagatcaagtcagcctagatcaggtgttcttccagaggccgtattgagatcatttttatttgcagcctgtgcattttctcatctcgggtgatggcctcaca

SEQ ID NO: 265324 - DNA, 122 bp, Homo sapiens
gaaagggatcgaagccgcaggggaatccgggcccagccgacggcgccgcctggcgggcaccgaggggacgaaggggaggagtcactctccgcttccgggcggccaggttcgccaggagacct

SEQ ID NO: 265325 - DNA, 122 bp, Homo sapiens
ggcctttctgtgcttccaccccttcgcagtgcccaggcgacaacccactgggcttggaaccgaaaagacttccccagctctgtgtgtgtcgtttagtgtctcctggccctgactacatgtta

SEQ ID NO: 265326 - DNA, 122 bp, Homo sapiens
ggccaaaggttacctattattttaagaacatgaaaaaacatgccccagcgcggtggctcacgcctgtaatcgcagcactttgggaggccgaggtgggcgtttcacgaaatcaggagattgag

SEQ ID NO: 265327 - DNA, 122 bp, Homo sapiens
agaacagcctggtaggggctcaaagacgcccatcctggaagaggccccagcactgacctccgtgggggtggagatgaggaggatggaaagggtgtcttcctccagcatcttcctgaaggtga

SEQ ID NO: 265328 - DNA, 122 bp, Homo sapiens
aagtatctgacacctcagcttcctccagttcctataattccagagcataaaaagtatagacgagacagtgcctcagtcgtagaccagttcttcactgacactgaagggttaccttacagtat

SEQ ID NO: 265329 - DNA, 122 bp, Homo sapiens
aagcacacacctacacacacgcacactcccagctgctctgccgtgccgggagctgccggccggcaccccaaaggctctttgtccaaaagaggagagtgaggcttactcatgaagtcctcgag

SEQ ID NO: 265330 - DNA, 122 bp, Homo sapiens
aacagggtaatactggaaagccagagggcaaatttaaacagtggtggtcagaaaaagattcggtgaggagttggcatctgagctaattcctaaataattgtaaagcctctgggcatagagca

SEQ ID NO: 265331 - DNA, 122 bp, Homo sapiens
agggcactgataatggatgcacaccggccactccaccgcaggccatcccccaacgtgccccggctccgctcgccacccgctgggccacacacacggctccccacgccaccaccccatggggt

SEQ ID NO: 265332 - DNA, 122 bp, Homo sapiens
aaaaaaaggagatggtgcccagcatgaggaagaagacataaccagtgagtaaggagtagccgaagaactctactgtctgtactgccccagacatgttggagcgccgggcataatagaaaact

SEQ ID NO: 265333 - DNA, 122 bp, Homo sapiens
agagcacaacggagttagccaagcaagtatctgtgggagaagcatgtcaaccagatggtgcggctggtgcaagggccctggggtagaagcatgcccagtgtgctgcattgtaggaaggagaa

SEQ ID NO: 265334 - DNA, 122 bp, Homo sapiens
gctgggaggcggcaggctggcaggcacagtgtagggttacagtccatttatgggcgcagccgaaggcagatatcagtgtcgatggcattcgctcccagctattcttaggagcctctcaagag

SEQ ID NO: 265335 - DNA, 122 bp, Homo sapiens
ctcggcctcgggtccccagaggctgagctcccaggttgccctaaaagttccttggttgggcggaaagcgggcgagtggcctggagagagggagcagcagccgccagcccagttcccggtgcc

SEQ ID NO: 265336 - DNA, 122 bp, Homo sapiens
ttaaccttctgtgaagctctaccagttcatctaggtatgcctgaaagagaagaatgtccccgaaaaggacaagcactttaagtagtagttcaaaaataaatgaatatgtaagtaagaacaca

SEQ ID NO: 265337 - DNA, 122 bp, Homo sapiens
gaaagaggcaaaagtgtctgaaaaacactgtgacgcatatttccagcccggcatggaggacgtctgccaaaagcatccggtaaaggtcaactgggctgctgggaaacctgccccagtgcgag

SEQ ID NO: 265338 - DNA, 122 bp, Homo sapiens
tagaaaaatatacaaaagcaaaattttgcaaatcatgggagaagggaatttccaggcgaccgcttctgctttaccagccaatcatctactgtcttggatacttgcagcgttatctagtcttt

SEQ ID NO: 265339 - DNA, 122 bp, Homo sapiens
agagggtgggccccgctcccgcacagccccagctccagggacacggagcgcggccagcggcgggcgcgggtcaagtccttcccaacccgggctctgctcgccacctcctggattccgggcat

SEQ ID NO: 265340 - DNA, 122 bp, Homo sapiens
ccccgaagtcaagctcaagggctgcgtgggagcatgaaggacacagcccatgtctgaggacggactgacgcaggaaccctagcccagcctagccgagcccggcccggggagaggcccaaggg

SEQ ID NO: 265341 - DNA, 122 bp, Homo sapiens
cctcaaagctggagagcaacggggagaccttccaggtagtgggaacggcacgggcaaaggcgcagaggtaggagtctgcgtggacaaatcttgatcaaaacgaaaggttacttagccacagc

SEQ ID NO: 265342 - DNA, 122 bp, Homo sapiens
cgtggtcaggttgatggcaccttaacccattctctcctgatgcgtgagttggaggaggcgcgtgggatcccttggggtctccaggcagcagggccagttggcattactggggatggtattta

SEQ ID NO: 265343 - DNA, 122 bp, Homo sapiens
gccgaggtcggcttcgtgcgcttctttcagggcatgccggagaagccgaccaccacagtgcgccttttcgaccggggcgacttctatacggcgcacggcgaggacgcgctgctggccgcccg

SEQ ID NO: 265344 - DNA, 122 bp, Homo sapiens
gtgcagaggtggtggagctggccacacactcacctggcaggacagaccgatgtagcctggcgggcagcggcactcctccacctcgagggcgcggggtctgtttgagggccccggctgggcga

SEQ ID NO: 265345 - DNA, 122 bp, Homo sapiens
aattctttaaggaagacataatgccatgtagaaaattacctgtccataatctctctctctcgtaaagtgcctggaccatttttatcattattgaaaataattctctgtatatttgaggaaaa

SEQ ID NO: 265346 - DNA, 122 bp, Homo sapiens
ggggccgttaggagtggttaccgtgagagagcccattcccccgacacctactccggcttgcgttctggaaggtatgtgactcacaaagccctaactcgggccggagggctcagtgggcagag

SEQ ID NO: 265347 - DNA, 122 bp, Homo sapiens
tctgtgaaatggggcgaatgagggtggaattagactcagcagggatgaagccgcctgcaccgtggaaggggagggcgggcgctggagtgagatgggattcctgtgtcggggctgggaggcag

SEQ ID NO: 265348 - DNA, 122 bp, Homo sapiens
aatgccgccggctggcatccggttggctgcgcgctgggaacgccagcgaggcagcgccaccggcttgaggagggtgaaagttcaattcttggcccctgaagttagcggaagggaacgggcat

SEQ ID NO: 265349 - DNA, 122 bp, Homo sapiens
gtacctatgagatctaagtagaatcatgctttaaaatttgtttttagtggggagagcaaacggaaaaggccttatagagagagagaagttgatcagagaaagaaggcataattggtacaaca

SEQ ID NO: 265350 - DNA, 122 bp, Homo sapiens
gcttccaggggtctgtgagtataaaagcatcttccttcaggatagtcatctcagtgtcctcgtgtcttcccatacctgattaaaacaagtcccggacacattttaaagcactgcattcatgt

SEQ ID NO: 265351 - DNA, 122 bp, Homo sapiens
tatttcactgaggcctgaagatttaccacaaataattcctttccttgttgtaagctttgccgtgcaatacctttttttttttttttttttttttttgagatggaatctcactctgttgccta

SEQ ID NO: 265352 - DNA, 122 bp, Homo sapiens
ctgtgtggcctctggtcctgtggccctggcttccacggcttcggcaactccgctgcctgccgggatctcctctgcccagctgggggacgcgacctttgcaggctgcctccaggacgtgcgtg

SEQ ID NO: 265353 - DNA, 122 bp, Homo sapiens
tcgggatacagaagtgatgtgagtgtctgcgagcgtggtctcgcgggcgggtgacgtcatcgaggcgagagaggcggagccgtggacagtgggcgggaggctgccaacggttttgagcgtag

SEQ ID NO: 265354 - DNA, 122 bp, Homo sapiens
gagcggcggggcccaaaggcgctcaaggcccggcactagctgtccggagctcgtcggctccgcgtaccagtaggcaggcccggctcttcactcaccctcgcgaacagccacggccacagcag

SEQ ID NO: 265355 - DNA, 122 bp, Homo sapiens
atgaatgaatgggcaaaagaatggtgagaagatggatggatgaatgatggggatgggtggcggtgagatgaagtgaggacagtggactgatgtttatgtatgtggataatataagaatataa

SEQ ID NO: 265356 - DNA, 122 bp, Homo sapiens
cgcggctgacgggctgggggcggagcgtggcctgaacgccaggctggggcgcgtgcgtaacggtgtgtgttgtgggtgcgtgtgcgtgcgttcgcagcaggggcgggcgtaggaccaatggg

SEQ ID NO: 265357 - DNA, 122 bp, Homo sapiens
aaataggatcgtacagtatgagtctttgggatctgacgtcttccctgagcccatgtctttcgggtccccgttgcagcatgcatccgagcttcgctcctttctgtggttgaatcacactccac

SEQ ID NO: 265358 - DNA, 122 bp, Homo sapiens
ccctggggagcgccctgagaactggggggcacccgggctggcctggctcaggcaggggttcgcgcagcccctggggaggggcagggaggcagggaagctgctgccgccagctggatccctcc

SEQ ID NO: 265359 - DNA, 122 bp, Homo sapiens
ctgcgcatgcgcactgggtgtgccccgcccacccggccggccctgcagtcctgcgcctagcggtccagtccagcctcaggtctatgacacagcaaagggcgattccggagccgaaattgaag

SEQ ID NO: 265360 - DNA, 122 bp, Homo sapiens
ccttggcaccatgttcttagtccccacataggcattttagaattcaactttatttcttggcgagtctaaaaaattgaccctgtctgtgtttcatgccaagccatcaattaaagccatggagc

SEQ ID NO: 265361 - DNA, 122 bp, Homo sapiens
aggagcttaattgctgagacattaataatgacctcttagtgcaatgcaagatggtgtcctcggataatgatctgccccggagctagggcagcaacatgaggaccaaaccatgcacataaagc

SEQ ID NO: 265362 - DNA, 122 bp, Homo sapiens
ggaccccaaatgctgacagacacgcacctgtgtggatgagcttgtggcgctccaggttcccgatgctgttgaagatccgcccgcagatctcgcaggggtggatgtacctgaaaccagagaca

SEQ ID NO: 265363 - DNA, 122 bp, Homo sapiens
ctcacggctcagacctatctagtgaagagcttaggaaacagaaaggacaatgtgactgtacgtttgggaaaatgtgctcctcagtcattggaaattcagctcgccggtccctaacgtccccg

SEQ ID NO: 265364 - DNA, 122 bp, Homo sapiens
atcgggaccccgcaccttggatccgggggccctggcgcgcctgctggattgcgctcctcgcggccagttcctgagcccgcgtccgggactgctcgcgctacgccctccctcccgttgccttc

SEQ ID NO: 265365 - DNA, 122 bp, Homo sapiens
gagttgtaatcacctagggatgtctacatctgtctacctagatcagtctgtcagttccatcgaggtctgtatttcaaagtccatacataacacacggttcttcccattttacagaattattt

SEQ ID NO: 265366 - DNA, 122 bp, Homo sapiens
ttccacaggatcatcctcttggcaagatgaggctgaggccgggggttcggggctcagcatcgaaagccggggcctgggtgccacaggccgtgacctcttccaccaaatgagagaaacggcaa

SEQ ID NO: 265367 - DNA, 122 bp, Homo sapiens
tgagcagagtcaaggtttctttgtcctgattacacagtaacggaggacacaaaggctccccgctcttggtcccgggaccacccatggcgcaggctgagcgctggccgcccgtgccctccgac

SEQ ID NO: 265368 - DNA, 122 bp, Homo sapiens
tggaggccgggccagggacgcgcacactagaagagccgcggaagaaggcggtccagcccgcgtggttgccatggcgccctagaggcgttactgctgctcccggctgcctagggcggcgcggg

SEQ ID NO: 265369 - DNA, 122 bp, Homo sapiens
cagggctagtgactttcatttcagatgcacactgtggtctatctctaggccacagtgtagcggagagccacggaaatgccagtcctatggctctctgtgggagtggttttggatataacctc

SEQ ID NO: 265370 - DNA, 122 bp, Homo sapiens
ttggagacaggacggcactcctcctaccacggccactatacaaccgaaggcacctcctcccgcctccctccaggtggcgctgtaggaccggcccaccttccacagcgcagacgcctcagttt

SEQ ID NO: 265371 - DNA, 122 bp, Homo sapiens
tggcagctgcttgccacggcatggcaagtcccgggagcatgggttcacctggccccctgccgtcctgcagataccctcatgatgtggtgaaccacctcagctgtgacgaggcccggaaccac

SEQ ID NO: 265372 - DNA, 122 bp, Homo sapiens
attcactccgtcggaaacactgaaggccgaggtcgccaccgctcctcccaatcgacggaacgagagaagctggcagatggtcgtccacagggggccttgccccaggtctcctactaaaccca

SEQ ID NO: 265373 - DNA, 122 bp, Homo sapiens
gccaacagcctgtctaaagaggttgctacttttatcattctcatctttcaataaagaaaccgaggcaggttgggcgcggtggctcaagcctgtaatcccagcactttgggaggccaaggtag

SEQ ID NO: 265374 - DNA, 122 bp, Homo sapiens
tgactgtgtttcactttttcctcaagactctgaaaggtttcctgactccctcaacgtgggcgaggagctcttttcccctactcccgtcccgctgcctgtccctactcccgttgtagttctga

SEQ ID NO: 265375 - DNA, 122 bp, Homo sapiens
cagggagcgcacccaccgaggaggcgtcttaggccagcggcctctgctcccgccgagtcccgctgctccccgcctggaaacagctgctgccaccccgggcccaggcctggacggcgcccccg

SEQ ID NO: 265376 - DNA, 122 bp, Homo sapiens
ttttctctccaccctgcctgggtcacaaatatgacggcgagccagtcctttcccgcaggacgcctcaggcttccgggatggtaggccaagggcttagcaagaaaaaaggcggcctcggggaa

SEQ ID NO: 265377 - DNA, 122 bp, Homo sapiens
cccttcccttcacgcccaccctgccaccggggcagtcagggcagtactcacacaggcccacgtactcctcagcagagctggaggacagcaaggccaggaccagccccagcatgcagagcgct

SEQ ID NO: 265378 - DNA, 122 bp, Homo sapiens
cacggagggaaagggagccccggcggcgggcattctgactcctccttaagtaggagccagcgggcaggcctcagacttgggaccataaatctccccagcccagccagactgcaggaacgctg

SEQ ID NO: 265379 - DNA, 122 bp, Homo sapiens
tgtatttttagtagagacgggggttttaccattttcgccaggctggtctcgaactcctgacgtgaagtgatccacccacttcagcctcccaaagtgctgggattacaggagtgagccaccgt

SEQ ID NO: 265380 - DNA, 122 bp, Homo sapiens
tgccaggtgatagtctctgtgtcaaaacctcagtttcctagtcgtaggaaatccatagttcgtaggcattcgtagttcctacatcatagggtccttgtgcatgtaagttgaggtgatgcttg

SEQ ID NO: 265381 - DNA, 122 bp, Homo sapiens
cccaccctcatgaccgcgtgccagaagtcatcatcttcacatttgtagacgttgttctagcggaagacaggctttgcagatttcggtgcttttagtgaactggtgttttccgtaaacttttt

SEQ ID NO: 265382 - DNA, 122 bp, Homo sapiens
acagccacgaggccgggtgagatcatccaaggagtgggtgggtgtagaccgcggagccggcgcgggtgagggatagtgcccgcaggtgaccgcgacgaggcaggaatgtctctgtgtctctc

SEQ ID NO: 265383 - DNA, 122 bp, Homo sapiens
gaaatcaggaagtgcgagagagctgagagccaggactcagtgctgagcttggtgtcccaccgccacaaggaggcagggaagaaacccactagtcccagctcctggggtggcacagacattgc

SEQ ID NO: 265384 - DNA, 122 bp, Homo sapiens
ccaagcctgttcctggggtgcagcggtggccattgccaccccgagacaaaatgtagtgaccgttgggggcggtcagggtggagggccccttgccacccatgcagatatagttgcttagctcc

SEQ ID NO: 265385 - DNA, 122 bp, Homo sapiens
aaggcatccagctttggctgggggcaggacagagcttctggtgcccagttccaagcaccccgggaaaagttacagtggagtggagctgcaggctgggtgctggctggcagcagggctgttga

SEQ ID NO: 265386 - DNA, 122 bp, Homo sapiens
gaaacaaaaagctcttctgaggagcagctgacgctagacggaagggaacaaacagaagagcgagcagcacccttctgcagaagtaaacttagcacatttagttctgcagaagaaaggtgctg

SEQ ID NO: 265387 - DNA, 122 bp, Homo sapiens
ctgtctttcttcaacacgtcctcccatccttccctcctttctccactctgcatttgaccccggtgtattccagcctccaggccaacacacgtgaccacgtctgcctggggcagttgaagtaa

SEQ ID NO: 265388 - DNA, 122 bp, Homo sapiens
gcgcctgattgggcagttctcaatccagcgctctgattggataagataccaagctccccacgctcagaatttgagtgacagaacttgccaccacacagtgcacttaatgaggcaagagagac

SEQ ID NO: 265389 - DNA, 122 bp, Homo sapiens
gaactgacgcttgcttggcacctttgggaagactgcgaaccagctcaggtcccaggggagcgtgtccgtgtctttttcggccgcattgatgcacccgcccaagtcatttcctcagtcttctg

SEQ ID NO: 265390 - DNA, 122 bp, Homo sapiens
ttatccattgtgactttggggctttatcgtacctacttttagctgttgatattcctcccccggggaggtgttgggagtagggtgcatcactgaatctattatgcctttttctgacctcctgc

SEQ ID NO: 265391 - DNA, 122 bp, Homo sapiens
gcctagtctggcctggccaacaccttgatttcagccttgtgagacctgaagccaagaacccggttgagcccactcagacttctgatttggacccatttgctaatagctgggtggtttttaat

SEQ ID NO: 265392 - DNA, 122 bp, Homo sapiens
ctgatcagcagatcacaaatttatttaaggccagcaggaaacgaagtaggcgtgaagacccgactaatactgtctgatcagctcagaaggcaggaaggcaatgggatgcagtagatagttct

SEQ ID NO: 265393 - DNA, 122 bp, Homo sapiens
ccgggccgcgaccggatccaggtggcgagggcggtggcagcggtggcggcagcagcggggcgccctccgccccaggccgctcctccgggtccgggctgagcgtgaggccgtcgacggacacc

SEQ ID NO: 265394 - DNA, 122 bp, Homo sapiens
cctgggcttacccaaagaactgtctgatttttctcaacagccctgagaagtcgttctggacgctccatcatcaatgggaactgggcaattgatcgaccaggaaaatacgagggcggagggac

SEQ ID NO: 265395 - DNA, 122 bp, Homo sapiens
ttagattgtgtcttcagttaatatatctctctctctttcccgcgggctgacagagaagcgcggttgctgcaagatgtctgcagaaatgggtctttaaaagtttccacattgtttagctacac

SEQ ID NO: 265396 - DNA, 122 bp, Homo sapiens
gaagcgctaggcgcctggttctgcgcgtactggctgtacggagcaggagcaagaggtcgccgccagcctccgccgccgagcctcgttcgtgtccccgcccctcgctcctgcagctactgctc

SEQ ID NO: 265397 - DNA, 122 bp, Homo sapiens
catagagccttctaatttttggactagattctgtgacctaactttgcctcattttagacccgggataagacatgtttagtacatgcctagacaggacaaaccactctgagaccacacagtgg

SEQ ID NO: 265398 - DNA, 122 bp, Homo sapiens
gtcccctctgggtgagtaccttcaacaagctctggaggctcttgacttgcttctgggcctcggcggccatgcggttggcgtggctgagctggatctccatctcattgaggtctccttccatc

SEQ ID NO: 265399 - DNA, 122 bp, Homo sapiens
gacctgaatatgtgttccgagctaaggaatctggggagtagccaacccgtttcttacctacgatgaatatctgagcccccgtcccgtcccttctggtggaacgctggccatacaggggattg

SEQ ID NO: 265400 - DNA, 122 bp, Homo sapiens
ttgatgttgaaattactttaaagacctgttgattatgtggtattagggccattgtgacctcgctgtagctaagatcagtccactgcagcaggagtttcaagaacagcagcacaaaaataatg

SEQ ID NO: 265401 - DNA, 122 bp, Homo sapiens
ggattacagacatgagccaccatgcctggcctctgaaggtcatactcttaaaagcttagacgaagagtcttagaacatctacggtaataataagaataaccattaatgtttattatgccccg

SEQ ID NO: 265402 - DNA, 122 bp, Homo sapiens
ctcaaaacaattactgggtcatgaggatctgaatgggaatgttgtaatggcattactactcgacaagactggttatctggccagagaaaaccaggttgtgacaggttactcccactgagcaa

SEQ ID NO: 265403 - DNA, 122 bp, Homo sapiens
ataaaaggtgcgaggcagcaagcagaacattcacatgggtactctgggggttcctgcccacgcttaggtctctgatgcactcaagcctcatgattcatccatggctgtgtaccttgacacca

SEQ ID NO: 265404 - DNA, 122 bp, Homo sapiens
gagcatcttaagagctgagcgcagctgacaactaggggccggaccgtcgcaggaggcgtccgctggataccttcccccttccctgacctagagctctacagctgctgcctcggtactgaccg

SEQ ID NO: 265405 - DNA, 122 bp, Homo sapiens
ttgctgcactagagaaggtcactcactgcaaggggtgcaaacaccttggggcccagccagcgtgaagtgagtgggagggagggatgagagggcccacgcccaccctgtggatgtccctgctg

SEQ ID NO: 265406 - DNA, 122 bp, Homo sapiens
ctggcggaagaggcttccggaacggacccggaaggggcaggtcttgtgggcgggtccaatcggctgggagcctcgtggaggctgaggtgagtcctggaggtgcgtggttggggcggagagca

SEQ ID NO: 265407 - DNA, 122 bp, Homo sapiens
ataacatgcatgtttttctgagggtgtgtgcacgcgtgcgtgtgtgcatcgtgcggtgtgcgttaggtgcacacgtgcatgcgtgtgccttatgttgtgcgtgtgagtgtgtgtgtgtgtgc

SEQ ID NO: 265408 - DNA, 122 bp, Homo sapiens
tgatgtgcgcagacccccggcgtggctctcagccccagcaccgagcccctcccagccaagcgggtggctctgcagaaaagctggctcgagccccgcccggccacacaaaggcgcggccccac

SEQ ID NO: 265409 - DNA, 122 bp, Homo sapiens
cccgcttccgggtcatctctagcatctcctcccggtaggtggcggtcctcatctgggcggcggcaccagaagaccagggtcctgcggccttccagcactactgccgggagtcccgggctgtt

SEQ ID NO: 265410 - DNA, 122 bp, Homo sapiens
gcgacagagcgagactccgtctcaaaaaaaaaaaaaaaaaaaaaagcaatttgaggtgcccggggatgctgaagaggtagagtggcatacctgggttgagaaaaattatcgtaatgccaatt

SEQ ID NO: 265411 - DNA, 122 bp, Homo sapiens
tttttaaatataactaaaacaagaaattaaaattaaacatcttaccatagccttcctttccgtatgcaaatgaagggggtataactacttttcgcttttctccagggcacatatctgtcata

SEQ ID NO: 265412 - DNA, 122 bp, Homo sapiens
tctccctaggggctgtagatttcctgccttctgaacaatctcgaggggagcgtggatttccgtcccggcggcaccctcgggttttccctcccctgccccctccgccgcgctctcccccttcg

SEQ ID NO: 265413 - DNA, 122 bp, Homo sapiens
caccttgcttaaatctcccctctaattttacctctaaatttagtgtatgtagtactaaaccgtttcaataacaggttttcagtctagatacagaagtccctgtaaccttgttaccttttttc

SEQ ID NO: 265414 - DNA, 122 bp, Homo sapiens
ggcccgagagcctgttgactctgtgacacactctgaggagctggttgtggtgttttccagcgagggaagaaaagagtaattttttcaaagcatttatagaaacgcagcaaagggaaggtgtg

SEQ ID NO: 265415 - DNA, 122 bp, Homo sapiens
gcagcaagcttagtactcagaggggctccagcccccagctgagccagacagcaggccctccgtctagaatccgctttattatggcacctggtgggtctggtgggatctgagggaggaagagg

SEQ ID NO: 265416 - DNA, 122 bp, Homo sapiens
gccaatttttgtatttttagtagagccggggttttttctcattggccaggctggtctcatcgaactcctgacctcaagtgatccacccgcctcagcctcccacagtactgggattacaggca

SEQ ID NO: 265417 - DNA, 122 bp, Homo sapiens
gtctgcagctctggcccttgtcctcatcggccctcacaactgctttcaacccagaggttccgctgactgcgcaggcacacgcattcctcgcctgcatctggttggctggaacccaactgatc

SEQ ID NO: 265418 - DNA, 122 bp, Homo sapiens
tcggctcaaggcgtacacgtgcaggtgtgccacatgtttattttcggttcaaggcgtacacgtgcaggtgtgttacgtgttcattttcggctcaaggcgtacacgtgcaggtgtgttacgtg

SEQ ID NO: 265419 - DNA, 122 bp, Homo sapiens
cgaggaggactacatggcggacgccaagaccatcgtcaacgtgcagaccatgttccggtgcgtccagtgtccggggctcggctctaaaccaccccacagccacgaccacgggccctcgccct

SEQ ID NO: 265420 - DNA, 122 bp, Homo sapiens
actgaaggagctacaacactgcagctcttaagtattggacacacagtaggtcaacagcatcgatgactagtgagccagtcccttggctgtgtgctggctgggggtgttcccatacctggacc

SEQ ID NO: 265421 - DNA, 122 bp, Homo sapiens
gaggaccaatctgcttgggccggggcggggctgcggcgggtgggtgcagaggggccgcaccgcggacttcgcagccgggagagagcccggcgcgggcggcgcgcacgggactctgctgtgcg

SEQ ID NO: 265422 - DNA, 122 bp, Homo sapiens
aatgatcaaaattttattaagtttattaatattatggaagtgacaattttaggcccctttcggagggtacatctggagccacccaaagaacaacaggctcccggtgaaagcactcagcccat

SEQ ID NO: 265423 - DNA, 122 bp, Homo sapiens
tcccaagctttttcctcgccccttggccttgactccaccccttaggcatgccgctggccccgcccctttccggccaccttgaggcttgggggtccctcagccccgcctctcttcttgacccc

SEQ ID NO: 265424 - DNA, 122 bp, Homo sapiens
ggatggatggatagatgggccagagactgggaacggtaatgccggccagacgggtccgagcgcctcgggagccccagccctcctccggctgcggggccgctgctcctgctcccgggccgtca

SEQ ID NO: 265425 - DNA, 122 bp, Homo sapiens
accaggcagataccgcgcagaatttcttacatggatcacctacaggcactaacatattcccgaggaatataaacaatgctgaattcagggcgtttttcaagatgacacaggtctcaagaaca

SEQ ID NO: 265426 - DNA, 122 bp, Homo sapiens
gcttggaaccggagataatctgtgtctaccgctggtcttcaaggtgcttaatttcgtgcccgctctacaggaaataacgtgcgcggcggaggagccctgtcctggagaataacgcgtgaaga

SEQ ID NO: 265427 - DNA, 122 bp, Homo sapiens
ggttgtactcaccggaaggccaggaggaccaggaagcccgggctggccctgcagaagcaacgagaaaggctcagaggctggggtttccccggctcctacttcctctctacagccactcccaa

SEQ ID NO: 265428 - DNA, 122 bp, Homo sapiens
tgctgcccttgggggagggtcttctgcaagcacagccgcctgcaagcattcaccttagtccgagcatctgagcctctccatggtactcggggagaggttacccgagcaactttgcatctgga

SEQ ID NO: 265429 - DNA, 122 bp, Homo sapiens
cggaaacccgtccaacccgtcggcatttcggaagtttgggagggccgctgggccggcggccgggcctctctgctgctctacacttcacaagggatgcggcccaggtgccccagcaccccaag

SEQ ID NO: 265430 - DNA, 122 bp, Homo sapiens
ttgccaaaaaggccagctcactgcaactgagcagtatccgggctctttaccaagacgagacgggcaccatgaagacaagtgaagaagattccagagctcgagcttgtgccgtggagaggaaa

SEQ ID NO: 265431 - DNA, 122 bp, Homo sapiens
agcgcagggccagtaacgagaaggagtcagcagccccagcctcaccggcaccttcgccggcgccctcgcccaccccagccccgccccagaaggagcagccccccgcggagacccctacaggt

SEQ ID NO: 265432 - DNA, 122 bp, Homo sapiens
tgttggtcaggatgaccataactggaggagtgagttgtatgcccagtctctgaacggttacgggcccatggaaaggaaaaaccccagatcatctgttaccctgggactgggctttacactga

SEQ ID NO: 265433 - DNA, 122 bp, Homo sapiens
ctgtggtatggtggctgcaattttaaatatgggagtcatagtctttgtaaaagtgacttacgggcaaagacttgaaggaggtggagccttaagcctgccaatgttgtgagggaaatagctcc

SEQ ID NO: 265434 - DNA, 122 bp, Homo sapiens
tggcctctaccggttctgcgagaaagtaaactttgggcacgacaagtcatgaagtcggcacgttggggagacaccgtgtcacaatgacaaggtgagatcagctgccccggccaagctgtctc

SEQ ID NO: 265435 - DNA, 122 bp, Homo sapiens
ctggacacaagatactttcagggtgagtgcagacctcacaggtgtgggcacacctgcccccgaccctcctgcctgcatccgggcccctgctgcaggtaacgggtggcagaggttgctgggtg

SEQ ID NO: 265436 - DNA, 122 bp, Homo sapiens
ctgtaagccagtaaccccacttctacagaaacacgtgcacaagaataagtatcagctgggcgcagtggctcacgcctgtaatcccagcactttggaaggccaaggtgggtggatcacctgag

SEQ ID NO: 265437 - DNA, 122 bp, Homo sapiens
cctccgcagccgctggcccgggtgctaagcccctcattgcccggggccggcagggctggccggctgctcagagtgcgggcccaccaagcccctgcccaccgggaactccagctggcccgcaa

SEQ ID NO: 265438 - DNA, 122 bp, Homo sapiens
atgaagatttttttccgctaccagacatttagattcatctggctcaccaagccacctggccggcgcttacacaaagatcaccagctttggacgcctctgactcttgctgactttgaagccat

SEQ ID NO: 265439 - DNA, 122 bp, Homo sapiens
aaccccatggtaaatgatcaggatggtcactattactacaagtgaggtaactaatcagaacgcaactttccccaaaaaacccacctgagttacacaggtctgaacttttttaaaaattaaat

SEQ ID NO: 265440 - DNA, 122 bp, Homo sapiens
tctccgtctgcgtcggcctcccacagtgctggggtgacaggtgtgagccgctgcgccggccgcatgtgtgctcttgagagcacttctctggggagcatcccggatctgaactgctggttgtc

SEQ ID NO: 265441 - DNA, 122 bp, Homo sapiens
gcccagcggtctctgttgcagcccctcaccgaaagccacagacacgggaaaccgagtgggcgtgccaagcgccaatcaaaccgcactgtgttcgctgaaatacgagtttcatgtgattttca

SEQ ID NO: 265442 - DNA, 122 bp, Homo sapiens
ccttccgcttgcagacgatgaccaccttgtcaaacaggaacaagtacctgggccaggcagcgcagcgggggatcagcaccccagcactgtgtgctctgctccgaggaggcggcaggagctga

SEQ ID NO: 265443 - DNA, 122 bp, Homo sapiens
aacccctagggggcggtgtgctcccttgagaaccaccagcttagaaagaagtttgcaagccggtggcctgcagaccaatccatccctcaggtgtgtttgctgtgggcctgcccggtgttttc

SEQ ID NO: 265444 - DNA, 122 bp, Homo sapiens
tagaaaaattaaacctgcacctaagcactgggcaagctggcttatttcaacttgctctgtcggggagcattacagcaccctcctgatgtggtggtggtggcggtgcaagttgaaaaggcttt

SEQ ID NO: 265445 - DNA, 122 bp, Homo sapiens
cccccaccatcctgcaggtgatatctgatcaccctggcctgctttgaaaatcctgatagacgagtttaacaagaatctgcaaactttattctgttccttagctataaatatgcctttggcat

SEQ ID NO: 265446 - DNA, 122 bp, Homo sapiens
cagaaagggactaccggaccagactactcaccttccgtgagccgcgcgccccgcccggcccgtacacccagcgctccagctcttccactcgggcctgtagccgctgcaagtcagtcagaccc

SEQ ID NO: 265447 - DNA, 122 bp, Homo sapiens
cagccttcacccggggcgctcccagcgcctctgctgcggccagcacatccccctgcgaggcggggcccagcaccccctcataggcaaaggtcagcacggcctcccagccccctggggacacc

SEQ ID NO: 265448 - DNA, 122 bp, Homo sapiens
cccagatgaatacacacacttgaagaaggtgacactccttgattgcctgtacttctggggcgagctgctgggacttttggcccagcaggcacagttggaaatttaatactgcctgggacaga

SEQ ID NO: 265449 - DNA, 122 bp, Homo sapiens
tgcgtgaaaacgcttcgagaggggtgcagccgcggacacaaaaaccgtggcttgagtccccgcgcccctcccctcccctcccctccctccctccagtccagcagctcttgcctaaggctccc

SEQ ID NO: 265450 - DNA, 122 bp, Homo sapiens
ggcttcttgcaggaagagagggtaacgagagtctgggggagtgtaggatcaggggagcaccgccctgaacgcagaaaggcttggggagacagtagagagatttgcatggccacagcttgagg

SEQ ID NO: 265451 - DNA, 122 bp, Homo sapiens
gggatgcttcttatggacttaggacacaaagaatctgtggtgtggctctgaaatgggaaccgctaaagacagaagaactgaaagggatatttaatatgttagtaaggacattgctattcatg

SEQ ID NO: 265452 - DNA, 122 bp, Homo sapiens
gcgtcagaatctcttttcgcttttaaggctgagcactcctccactgtgtgcatagaccaccgtttgcttacacttcaattccggacgtgtgagtgcttctaccttctgggtcctgtgaacaa

SEQ ID NO: 265453 - DNA, 122 bp, Homo sapiens
caggtagttatgatgggcaaactctgcctccagctctcgcagctgctccttggtgaaggccgtcctctccttgcgggctttgctgctgccctccggcttccctctgttctcctggttgtctg

SEQ ID NO: 265454 - DNA, 122 bp, Homo sapiens
ctaccgtgcctggcctccacctgtatggttttaaatgtacagataagcaagaatagaacacgaccctggaattccaagttttcagatcacgtgtttgatgtcatgtggactccacacctggg

SEQ ID NO: 265455 - DNA, 122 bp, Homo sapiens
cccaggtggccattacctctcctcctgatcaccagggccagctcccgtgagtgggactcccggctggctttgatgaacatcaccacttggtcatgcgtgtgttctgagatgtcccggccatt

SEQ ID NO: 265456 - DNA, 122 bp, Homo sapiens
ccggcgggaggcagcaccgcccctccggcccggggcggggtcaggccgccccgccccgcccgtcccgacctaccctgcgggtcccggtccccagagcccttgcggggtccccgcgaccccgc

SEQ ID NO: 265457 - DNA, 122 bp, Homo sapiens
aagaaatgggcaaaaatgtcagatccaagggtcctatgtagaactgacagatcttggtgacgggcagttagggaaggtaaaagggagagaatagagttggatgctcggtcctttgtgcatca

SEQ ID NO: 265458 - DNA, 122 bp, Homo sapiens
agaggaagaagaagaaatgtggtggcccagtcatcaagaatcttacaagcctccagctggcgaggcagcatctgtaccaaaacaccagaacaggccgatgcccgtattcatcaacataagac

SEQ ID NO: 265459 - DNA, 122 bp, Homo sapiens
gctgggattacaggcatgagccgccacccctatccctagattagctttgcatttcagtctcgggatcacttttgaacattatgcttgcactttcttaatcaaacatttacagaacacctttt

SEQ ID NO: 265460 - DNA, 122 bp, Homo sapiens
cccgcgttcgcccctctttgttcagtcccctaggtccgtgcgggttacatagtggcaccccgaacagcaacagcatcgggtgctctacagctgggattacagcgtgagggaccacgcccggc

SEQ ID NO: 265461 - DNA, 122 bp, Homo sapiens
aatgaccatgagatttattagtggtctgttcttcttcaaatgagctctcagcccctgttccgcaagggccatgcccaggtttgaactggcctctgctttctcggcagcaggtgggcagagtg

SEQ ID NO: 265462 - DNA, 122 bp, Homo sapiens
agaggcggcgcgtctccgagcccaggcagcctagaagccgacgcacagggtttccagagccgccctgaccgccgggcacccagaggctcccgagtttgtgccacagggctgctgcgggcagt

SEQ ID NO: 265463 - DNA, 122 bp, Homo sapiens
aattgaatgtaaaacatatgttgaaagtataccatatgtagtattttgcatttcactttccgtaaataaaagcaaagtaagttccctaaaaagttagtttagggccgggcgcagtggctcac

SEQ ID NO: 265464 - DNA, 122 bp, Homo sapiens
taactgcccagaggccccttccccacccccgtggtccacctcccacagactcccggctcccgaggctctgtgaggtcctgccccaccccacacagtgtgggaagatccgggccggcccccag

SEQ ID NO: 265465 - DNA, 122 bp, Homo sapiens
ctcgcctgggtctccggttggcggctcggacggagttcatttgccgggctgaggtggcggcgttggcggagggacacacacacgcacacgcacagcgagcttcggggcaggagaaaggggtg

SEQ ID NO: 265466 - DNA, 122 bp, Homo sapiens
tccctcccgcctgaaatctgactccacctgccaagagtctgagcctgcaggcctagatttcgactctgctggccaagattatttctctgcagcccaataattcgactctttctaccaagaat

SEQ ID NO: 265467 - DNA, 122 bp, Homo sapiens
gctcagggcaatagaatggtgaagtcaaagtgatcaaacatggagctgaccagaaccactcgagagccagggggctcaactggggtcttggggcaggaagctctgacctccagtcatccagt

SEQ ID NO: 265468 - DNA, 122 bp, Homo sapiens
cagcttcggtgacaaggtggggcgcctggggccggggagtgggaggcttatttcgctccccgtgggggggatgatggatccggagccttcgtgggcctggggccgcgcccaccctgccgccc

SEQ ID NO: 265469 - DNA, 122 bp, Homo sapiens
tacacttaatgaaagctaagaaaaacttctaattttttcatttatgaaaaacttcacatgcgcaaaagaattttatgtacgacacattaggtaaaaagaaaaataaaccaaaaagcagatta

SEQ ID NO: 265470 - DNA, 122 bp, Homo sapiens
gatttcaattcggtctttgcccgacattctgacgataacttttcggctcgggtccccggccgggcaaccgaggctgcaatagctccagaactggcctccacagtgtcttcctctacgggagt

SEQ ID NO: 265471 - DNA, 122 bp, Homo sapiens
cgcagacaaaactcctcagacaccgggttaaagaaggaaggagctttattcggccgggagcgtcagctgactcacttctcaaaaacggagctccccgagtgagcaattcctgtcccttttaa

SEQ ID NO: 265472 - DNA, 122 bp, Homo sapiens
cttcccctgtggcctgggttgcccagctcttttagggcgtgtgtggcatggcggccatcgcgcttcctctcaggctctgaaaactcaacagttttctacttcacagtgtagggtgctaccca

SEQ ID NO: 265473 - DNA, 122 bp, Homo sapiens
agaagcctaattcacaggaataatttctcctagagtaaggccctttccagccaaatctgtcggtgctattgagctggtatttcaagtatgtccatctgcatttaaacgagttgctccaagac

SEQ ID NO: 265474 - DNA, 122 bp, Homo sapiens
ccccacctccctgcgcaagtgcgaggctgccggcagcgcggcgcacgctccggccgttcccggcttccgcgcaaaacttccatcctgtccacgtgaagttgtcgctgccttagagaggggga

SEQ ID NO: 265475 - DNA, 122 bp, Homo sapiens
ggcgccctgggaagagaagtcccgagtccagtacgtgaccaccccaagtcccccagggcccgctggccagggttcccgggccaggcgggtgaatctccacagacatcctcggtctcctactc

SEQ ID NO: 265476 - DNA, 122 bp, Homo sapiens
gctcagagtcccgggcgacaggcgcttccctcccggcgccgcggccccctcccacttccccgacgggacagcccggccccttcctgtgccaaagccggactcccctggtctcctcccgcact

SEQ ID NO: 265477 - DNA, 122 bp, Homo sapiens
cctgttaacttctgagctatttttgtgacatgaaatgctgcattttggcactttttgtttcgtgaaggcccttgggtagattttttatgaatgtcattattcgccaaagtgaatttagtaga

SEQ ID NO: 265478 - DNA, 122 bp, Homo sapiens
gagtgcaaagcagactcactctgacagggaaggcagtcactgctggagcttttgaaaaatcgtacacactcctggacttcagcccttgagttttgactcatttggtctgggatgaggcctgg

SEQ ID NO: 265479 - DNA, 122 bp, Homo sapiens
gtacccttgtgctgtgcattcggtgggttcggatgaacgtttagtgacatggacccaccacgatagtgtcatgcatctttgccgccctaaaatcaggttcctttgtcactgtgagagagact

SEQ ID NO: 265480 - DNA, 122 bp, Homo sapiens
atagaaccagacgatctccttgtggacacgcaggaaaacgtctgcagtggttacctcacacgcccctccttgggggacaggcagggaaagaaaggtcatggagcccacagtggctcatttac

SEQ ID NO: 265481 - DNA, 122 bp, Homo sapiens
ggaacatctggctgagaccgggcagcctgtttatgttcacaatgagaacattttttccgacgcagcccgcagcgattgtctccctcagaagcagcgctggggacgccctcctgggccgggca

SEQ ID NO: 265482 - DNA, 122 bp, Homo sapiens
ggaaaaaggttcttagggcaaaagaaccaaagctctacagtatagtagaggtggaaggagcgtggatatcaataagaaaaaaatgccacaccaagcaatgcagaaagggcaatggcatgaac

SEQ ID NO: 265483 - DNA, 122 bp, Homo sapiens
tgggataacagcccaggcaccaaatctggcacctcagagtcgtccttgacttccctaaaccgctttcccccatctcagattctgagaatttggtttctgtcaagatgtgcctctccagccag

SEQ ID NO: 265484 - DNA, 122 bp, Homo sapiens
gctggtccgctgggctgccgtccagcgggagagacaaaagtcgcaagggaaggggaaaaacgaactgagtttgtgtcactgtcttggtggacttttcgagctaacctgtatttgagaaaaac

SEQ ID NO: 265485 - DNA, 122 bp, Homo sapiens
ctcgaacccaaaggcattaactgcttaccaaaagaaattcagtctgacaactggcctcagcgttgtcttgtaaggacaaacagctagagcaaagtgctgggaagattgctgctctgccagcg

SEQ ID NO: 265486 - DNA, 122 bp, Homo sapiens
cacctcctcaccgctgtgcccgtctggccagtccctccaagcacccctcggatgaagttgcgccccacactgcagtggggctcactctccacagcgcctgctgcgttgcacggggtgtgaca

SEQ ID NO: 265487 - DNA, 122 bp, Homo sapiens
ttttcataagatgtgtgacttgagcactgaagagaagaaactggagaggaaaaggctgaacgcacaggaaagaaaaaaacaactggaagcgaaatgtaacagatggaagcaaatgagatcaa

SEQ ID NO: 265488 - DNA, 122 bp, Homo sapiens
ccatctctcccagcgagtcctggttatcctttacttacactctggcctcgggggcagtggcgtgtggcctcggtcctccccaggtaactctggagggcgctgtggaatattgctgtgatttg

SEQ ID NO: 265489 - DNA, 122 bp, Homo sapiens
aggactctgaaggggactgtcgccaggagaaagctctctctgagctcagtggaagcgccgcgggcgtccttcgcctggccggttccggcgctcttatctggcgggaaagccagctcctctac

SEQ ID NO: 265490 - DNA, 122 bp, Homo sapiens
gatttggaatatttaggaagcaaaatggatcagagttggtgatgaatcagatgtagcggacgagggagggagagacatcaagagtgactccccggattttatttttgttttagctgacgttt

SEQ ID NO: 265491 - DNA, 122 bp, Homo sapiens
cctgattggctcagagtcgctcgtgatcccttttgggaaatgtagtccttaagggtatcgcgcctgctttttctatacgctctgacgcagagatagccacgggaagtacgtcaccaaatttc

SEQ ID NO: 265492 - DNA, 122 bp, Homo sapiens
cccacatctcagacgatgggcggccgggcagagaggctccgcacctcctagatgggatggcggtcgggcagagacgctcctcactttccagactgggcagccaggcagaggggctcctcaca

SEQ ID NO: 265493 - DNA, 122 bp, Homo sapiens
tgattgtgtttaaattgagtgtacaaatagcacagtgcaaataattgttaggttgataggcgagtcagccttctttgaaacaggtttttcgctttgcaatactattctgatcctaaaagtaa

SEQ ID NO: 265494 - DNA, 122 bp, Homo sapiens
ggccccatgctcagtttgatgctttgatgttgctatcttggaattcttaaaacatttgaacgagaagctcattttcattttgcaatgatgtgcatgtcagtgactcttcttacccagactgg

SEQ ID NO: 265495 - DNA, 122 bp, Homo sapiens
cacgtccctgactcctgaaccggagtggtctcgcgatgtcacatggctgtggcacacacgcggttctatttatttcttctccatcatgggtaggggggcctctttctgacatgagcccagac

SEQ ID NO: 265496 - DNA, 122 bp, Homo sapiens
aaatgtatatttccagtgtaaactggcgttgtttaagttaacaaagttttcccaaagggccggtgggaaagaatgagagtcctgcaaatgcaacctgagaaaatgtgttcctcgcacggaaa

SEQ ID NO: 265497 - DNA, 122 bp, Homo sapiens
attggcgccgggaaaccgatggagccgcggtcgggaggcagttggccgcgtgggtaggaccgctgtcagttcctgggcccacgatttcccttttggagggctggtgtggtgccctggcaacc

SEQ ID NO: 265498 - DNA, 122 bp, Homo sapiens
cggaatctgccgagtgatggcggctccccagggatgcgccgagggagatgggaaacggggcggatggcgcccagcccagccctaactgccagctggctggggttgcgccccactgcgctgct

SEQ ID NO: 265499 - DNA, 122 bp, Homo sapiens
catcagggtggaggcggcgatgtgtcagctggtattcaggctctggttgtgcgctcagatcgctccccctccccatctccccaaatccacccacccaccccggtacccactgcttggggcct

SEQ ID NO: 265500 - DNA, 122 bp, Homo sapiens
tatttttatttgtttgtgcatttggggggaattcatctctctttaatataaagttggatgcggaacccaaattacgtgtactacaatttaaagcaaaggagtagaaagacagagctgggatg

SEQ ID NO: 265501 - DNA, 122 bp, Homo sapiens
cccggtggccgaggagccaggagcggctcccggggctgtgcgcggagaacccggaagaagcggaggagccccgggcggcgctgagctgtgtccctgcctgaggggggccccagccctgagcc

SEQ ID NO: 265502 - DNA, 122 bp, Homo sapiens
cttggcacatctcaccaggagctcccccgagtcacccccaccagggctggagcttgagctcgtcactgtgatactcatgggcaagctagggaatccagttctgcccagctatgtcccccctc

SEQ ID NO: 265503 - DNA, 122 bp, Homo sapiens
aaatggagttgtcccatgttcagtcaaaatggccaggcctttaaagcccactcagtttcacgtggtccatacccaaaaggaagtgaagttgggtagggcagccctcttggcaggcaatccct

SEQ ID NO: 265504 - DNA, 122 bp, Homo sapiens
cggacccagccggccacaggggcaggttcgcggcgctgtgaggcggggctgggcgtgcgccgccgccgccgccagattcgtctactccagtgaatcggcacgggagaaagccccgcccccgg

SEQ ID NO: 265505 - DNA, 122 bp, Homo sapiens
cttgtgcatgctcccgtccttccatggtgcctgctgcactcacagggcagtggggctggacggaaacttgcaaaggcatcagctacatctttgagcggttatagtgagccaaacctaaaatg

SEQ ID NO: 265506 - DNA, 122 bp, Homo sapiens
gcgctgcgcccggctgcacgagacccagcgcgagaacctgctgctgcgaacccggctgggcgaggcccatgcggtaaggtagccagagtgatcccacttgggttgccccgtcaccccatgac

SEQ ID NO: 265507 - DNA, 122 bp, Homo sapiens
ctgggcactgcacagaggcttctcaaagagcgagggatggggtggggtgtagacagcgcccgaggccaggagctaaggtgagaaagaggaaaagcaagagagagaaagcaagtgcatgtact

SEQ ID NO: 265508 - DNA, 122 bp, Homo sapiens
aagaggaaggaagggagaggagagaggggtgaggagggaaggaagggggccagggtgtctcgtactccagtcctggccaggggacggcctgcccatttctgacctacccctgctgtggggac

SEQ ID NO: 265509 - DNA, 122 bp, Homo sapiens
catgcgtgcagccattcctaagtgtacgtgtgcagacagagctttgcacagacaagcagacgcaaagacacatgtctacacagacacaggcacatgcattccccgccctgccaccccctgac

SEQ ID NO: 265510 - DNA, 122 bp, Homo sapiens
tttacggctggacactcacatcatcgtcaagccagaaacagcctgagccgggctgagagtcgggggaggccccccaggtaggatccgccccagactcaggcagtggggccggcgcggggggc

SEQ ID NO: 265511 - DNA, 122 bp, Homo sapiens
gcccctctccaccggccgctgggcccggatcccttcggcgcccctctgcacccacccccacgcgccctccactcggctcagatctacctccgcgcctctccgcgaccccggaaccccgcgcc

SEQ ID NO: 265512 - DNA, 122 bp, Homo sapiens
aagtcggctatgagcacccctggagttcccgggaaagacggtgggctcagggtcaggcctcgagctttaagatgcagcggggacctgccctgtggctttgctctgtcccgggcagtcccatc

SEQ ID NO: 265513 - DNA, 122 bp, Homo sapiens
tctgcagcctaatcttcttctgtccttctaatgctgggattgaggccctcccttatcccccgccagccttgctgctgaggatagcagcacagctggaaaaatagataggtctttctaaccct

SEQ ID NO: 265514 - DNA, 122 bp, Homo sapiens
agagaagattggattgtttaattcagtgtgcaggagtcttctggtgtggggctgccttctcggcactgaggaatgattaacctgttcagtgcctggttcccttgggttggtgttcactaagg

SEQ ID NO: 265515 - DNA, 122 bp, Homo sapiens
gaagcccatctccaccttgtggactctgggtggggaccagacacgtctgctggacgggggcgtggccgcactcgcttcgtcgccgctgcccccgcccactccgggagactctctcttggacg

SEQ ID NO: 265516 - DNA, 122 bp, Homo sapiens
ttcctaatccctgccagtctcttctcagcattcactgaccttggccaaaatatcaagaaacgggaatcagaatcctggccttgagagaggattgcaaagaccatattttgacttacttaggt

SEQ ID NO: 265517 - DNA, 122 bp, Homo sapiens
gtgctcatgtggccccggctcaggcctccctgggggacagggcaggccttggtggggtgacgcctgctggagtctccaggctgttcccacggcactcagtcaccttctactcacgggtgcgc

SEQ ID NO: 265518 - DNA, 122 bp, Homo sapiens
aaagaatcccctacgccactcccaccacacccacacccccttctgcctgttccgggaaagcgggggcatctgccccagaagctattccaggccctcctatgactgatggggaatccgggaat

SEQ ID NO: 265519 - DNA, 122 bp, Homo sapiens
atcctctctgatctgtttccccatctgtaaaatggaggtagtactagtgtctaccccttacggtagttgttgtaattaaatgagataaaacatgtaaaagtacttagaaccataatatagtg

SEQ ID NO: 265520 - DNA, 122 bp, Homo sapiens
ctagaactcctgacctcgtgatccacctgcctcggtctcccaaagtgctgggattacatgcgtgagccaccgcacacggcctcggtgtgttgaatttgacagcctaagggcacacccagtgc

SEQ ID NO: 265521 - DNA, 122 bp, Homo sapiens
gggaggaaggagaaccaggtggatggacaacagcggtgagaacaaggctttcactgtacacgttttcattcttttaaagtttgaaccgtgtgactatattacctattcaaaaataaataatt

SEQ ID NO: 265522 - DNA, 122 bp, Homo sapiens
gaactcttaagataaaggagatgttaattgttactggtttctaaaatagatatctttagacgtaagtcatacatctgtccagtaagggaaacaaaatttcatgtggaaaacctacatgatct

SEQ ID NO: 265523 - DNA, 122 bp, Homo sapiens
ccacctatgaagttccgcaggctttaatgctattgctatggccataagaggccaagctggcgggtgcggttccctaatacggttccctcagaggcagccgactctgcccagggcgagcagcg

SEQ ID NO: 265524 - DNA, 122 bp, Homo sapiens
tgccgccgctcgcccgccctaggatttctttaaacaacaaacagagaagcctggccgctgcgcccccacagtgagcgagcagggcgcgggctgcgggagtggggggcacgcagggcaccccg

SEQ ID NO: 265525 - DNA, 122 bp, Homo sapiens
cggcgggccctgccactagatggcagtcacacgatggtggaaaccgcctcctgggccagccggcctgttgtggggctaaggaggcagtttgtgaaaaaggccaagttagcatggcagctttt

SEQ ID NO: 265526 - DNA, 122 bp, Homo sapiens
tcccctgtgccagtgccacctgggtgcctcctcctgtcctgtccgtctcaacctccctcccgtccagcattgagtgtgtacatgtgtgtgtgacacataaatatactcataaggacacctcc

SEQ ID NO: 265527 - DNA, 122 bp, Homo sapiens
gcagcagcccagggtccactgtcagccccagctactcgcactgtggtccagtcacagacgcgctgagctctaccagctcttcagcagcccacagacaatccgccaacatctgcctgcccggt

SEQ ID NO: 265528 - DNA, 122 bp, Homo sapiens
ccctcccctctcagtttggagcccctccaagggctccagaagaatattcagcttttgtgacgcttcctcaccactcttatttatgtagtcaaggtaccggatgtcttatctatatttacata

SEQ ID NO: 265529 - DNA, 122 bp, Homo sapiens
gggctccccatcccggccagtggctccctaagccttgccaggtggtgacggctccttgggcggcccattcccgccccgcaaaaccagctaagggcccctgaaacgctgcccggaacgccccg

SEQ ID NO: 265530 - DNA, 122 bp, Homo sapiens
agcagctgccgcaccgacagcctccgcgccaaggtcacccaccaccagcaccagcaatgacgaagcacccgcctgctccctgggtggacatgacaccgttaatgcctcactgtgtctaaacc

SEQ ID NO: 265531 - DNA, 122 bp, Homo sapiens
ctcccgccccctccccacccacgctcggcctgggcccgggggcagcggctccagaggcgtcggcggcagaatttaacccccggtctgagtccttggaaacttcaagtgaaaagcagacttgg

SEQ ID NO: 265532 - DNA, 122 bp, Homo sapiens
gtggccatgaaagtactcaacagcatcgcctacaaggtacgtgccgggcgctccccaccgcgctccagctgctggttctcggttacgagtatgcatgccaggaactccaggtgtgcccgggt

SEQ ID NO: 265533 - DNA, 122 bp, Homo sapiens
tcatgccaaaaagggccgcggccacgtgcagcctattcgctgcactaactgtgtccgatgcgtgcccacagacaaggccattaagaaattcgtcattcgaaacatagtggaggccgcagcag

SEQ ID NO: 265534 - DNA, 122 bp, Homo sapiens
agcgaaccagtatcgagaaccgagtgagaggcaacctggagaatttgttcctgcagtgcccgaaacccacactgcagatcagccacatcgcccagcagcttgggctcgagaaggatgtggtc

SEQ ID NO: 265535 - DNA, 122 bp, Homo sapiens
tggcctctaattgggtcggatggactgtgacaagaaatgcaaatctgggtcatccatatgcgtgtgagcagctggagccccagccacctccacccacatccaccaggagcttcggccccact

SEQ ID NO: 265536 - DNA, 122 bp, Homo sapiens
tttcacacagggcctgtttccctgcagggctggcactgaggcgcacagctgagggatacacgggccctcaggtcaggcagctcccagcagcctggcatggctatggccccgagccctgggct

SEQ ID NO: 265537 - DNA, 122 bp, Homo sapiens
tccttcggacggtttcgtgttgccaactctgctgcacatagtacaggaacggaatccaggcgcgcacacctggctttaccagaacgcacgttctgttcatcaagtgagaggctggcacatca

SEQ ID NO: 265538 - DNA, 122 bp, Homo sapiens
tttgtccttactggtatgttccagcaaaattcttttgcctggggtgctcttttctcagatcgtcacagtttcttctcgtccttcagagtttatcttaaacaccaccacctctctaagaggcc

SEQ ID NO: 265539 - DNA, 122 bp, Homo sapiens
ggccaaggtcacccagcagccgggcccatcgggggattcgtttcctgtatctctcgagagcgggcatccagtctcctggaccaaggaagaaaactacattttcaggctttcccagttccgga

SEQ ID NO: 265540 - DNA, 122 bp, Homo sapiens
gttactaatctttactcagctgtatcttgtgcagcatagagatttagagcaatggcttggcgcccaggatagaatctcaattccattacttccttgttgtatgatctgggcatgttgcacag

SEQ ID NO: 265541 - DNA, 122 bp, Homo sapiens
aaatacaaatgtctctcaggcagggccaggcccccagcacagggaggactcgcctgaaaacgctgcaggcaaaaacctgtcacccttgcctcattcagcccagtgtctgattacatcttctg

SEQ ID NO: 265542 - DNA, 122 bp, Homo sapiens
tccaaaataagcttaacacagaaagataatgacactcccacggactggcacagaaggccgcgctccgaatgacatcgcgatcacagaggcacagacagcgtcacaaagccccacgcgtactc

SEQ ID NO: 265543 - DNA, 122 bp, Homo sapiens
gaggctgctaagagagttggagaactgggtttcaatcctgcctgaccctctcaggatcagcgatctcaggcaaagccctctgcttccctgagcctcagtgttctcatctgcagcctgggggc

SEQ ID NO: 265544 - DNA, 122 bp, Homo sapiens
aatctgcccaatgaattcttttttcttgttgaaacaattctagtttctctacttattcctcgcatgacatgatttttgtatcttttctctttctctgactcttttgacatgctccagttttc

SEQ ID NO: 265545 - DNA, 122 bp, Homo sapiens
gtgtcctgcgctgcgtgagccgcggtgggtgtccgcgaaacgctgtgtgtggagtgcgtgcgtgtgtccgccctcgccaggctgttggtctacaccgcccaacttactcagtcatccattca

SEQ ID NO: 265546 - DNA, 122 bp, Homo sapiens
ctggcaaagaggcaggtgggaggacgcgctcgggccagcctgggtccccttgcctcctgccggagcagtgcttgttctaaccctgggctctgcctgcttgtctgccaaatgcctgctccaaa

SEQ ID NO: 265547 - DNA, 122 bp, Homo sapiens
actatgtgccagacactgtcctaagcacctcgcatgcattagctcacttaatccttatgacgaccctctaaggaaggaggtagataagtaatttgtccaagtgacacagcttgtggttaagc

SEQ ID NO: 265548 - DNA, 122 bp, Homo sapiens
atgtcttcatcattctcaaattcttgtaagctctgcgtcgggtgaaaccagacaaagccgcgagcccagggatgggagcacgcgggggacggcctgccggcggggacgacagcattgcgcct

SEQ ID NO: 265549 - DNA, 122 bp, Homo sapiens
caggccttcatcctacaacgtcgggaatcaagacagtttggggctgggcgccctggctcacgcctataatctttgggaccccagggcgggaggatcgtttgaggccatgagttttagaccac

SEQ ID NO: 265550 - DNA, 122 bp, Homo sapiens
aagggcggtcgggatggtgggtttggcatccccaggcactgcctatccctttcccacactcgcttctggtgtggctggtggctggatgcccagagccgggtatcgggttgaagggtccaggt

SEQ ID NO: 265551 - DNA, 122 bp, Homo sapiens
tgtgcacaaacacctgcacaaccaggtaaatacataaccacacacagatgcgtgtgcgcacgcccaggcacacatgcaaatgcctgcgcacgtgggcaggcacccacacataatcacagggc

SEQ ID NO: 265552 - DNA, 122 bp, Homo sapiens
ttctcggggttggcccacccaaccgctctgcgggtaggaccgaggagcaaagcattatcgcgagatcagggccactatttgagcgcatgcgcaagacatgctagtctcttttccggttagcg

SEQ ID NO: 265553 - DNA, 122 bp, Homo sapiens
cctccatgaaaacggatctcaggataaaaacgcagcgacgtcgagaagcccaaaagacgacgccgagaacccccggccccatgttccaatggattttggaacaagttcgggtcccactgata

SEQ ID NO: 265554 - DNA, 122 bp, Homo sapiens
acctgggtaaaaataaagcccaggcaatatgactgcaccttttccattccatgctgcaatcgcatttacatctcgaaattgactctaatgaccaaggcaaggtcaactagaaaaatccactc

SEQ ID NO: 265555 - DNA, 122 bp, Homo sapiens
ccatcccacatgcgctgatgtgcacaccgtcaagggggtttggggttggagtccgagggccgtgggcctggggctcggctgagcttcctgcatctctgggcaggttacttggcctcagattc

SEQ ID NO: 265556 - DNA, 122 bp, Homo sapiens
gagctctagggtgttgctcgcagtaagatgagtactctaaacggaggccccaaaggtaggcggagggctaggttgcaacagtccttaagtgcctggagggattgaggggctcactctcacag

SEQ ID NO: 265557 - DNA, 122 bp, Homo sapiens
ggggccaggggtgcccagcggtttcaaggctcacggcgcactctagtggcagaagctaggcgcctcttctacgtcttccctccgccctcgcctcctgctgggagtgttcatcccttattctg

SEQ ID NO: 265558 - DNA, 122 bp, Homo sapiens
gggctttctgcatcccgcgcagtttctctgctccaggcacaaacgcggcccgagagccggcgccttgcagtcacacacggatccacgcatacagtagagctgtctagatccacattcttgca

SEQ ID NO: 265559 - DNA, 122 bp, Homo sapiens
tgtccttggagacagagttgtccccaggctgtctactaggtgaggcctggcccagttccccgcgtctgtgtgctggctctgcaggcactgcagtgacaccgtcccctcctgggtcccgagtc

SEQ ID NO: 265560 - DNA, 122 bp, Homo sapiens
tgcggactcctccctcagcctgaacctctgtctctcaggcacagctcgacctttgaccttcggcttccccagagaaagactttgaacgcttcactcctctgtagccctgaggacgcgggcgg

SEQ ID NO: 265561 - DNA, 122 bp, Homo sapiens
gccgtagtccgagcccgaggagttcaggtgggacaggctggatacctggccctgcagcgccgcggggctggcggcgtggtgcgccaggtccggagactggcctgcgctgcctggctggtggc

SEQ ID NO: 265562 - DNA, 122 bp, Homo sapiens
tcggttttgcttcgttttgacttccgcaccccgaagctgtagcaccagtttgttttctcacggcacaggggcggcttccggggcgcggcgtgctgggggttgtagtccgcgctctgcctcct

SEQ ID NO: 265563 - DNA, 122 bp, Homo sapiens
gttggctgtcatgatgtaggacctcctgacctagaaccatgcccggcgcagggagaacaacgagcttacggaccgggtgcgggggctgctgtgcgagaaagcctacctgctggcccgggagc

SEQ ID NO: 265564 - DNA, 122 bp, Homo sapiens
acaaagttctgggaagccaaagactgagaggtatccgttttatttagcaactttgggtgtcgctgatcttgtccagagcaatttctgtggaataatggggcaaaagcaaaatgggaatggat

SEQ ID NO: 265565 - DNA, 122 bp, Homo sapiens
cagccaagagagcacttcctccgcgcggcggtcgcggggcttcgcagcgccccctcccgccgccgccccgcaactcaccccggcggccccgaagtctcagcctcggccacccgatccccgcc

SEQ ID NO: 265566 - DNA, 122 bp, Homo sapiens
catgctgggcatcaagaaggagctgtcccgcctgggcctccagctgctgcagaaggatgccgccgccgcccctgccacccctgccacgggcactggtagcaaggcccaggtgaggccccagc

SEQ ID NO: 265567 - DNA, 122 bp, Homo sapiens
cttcgagaggagcgttgcttgtgaagaggggagcaccggtggaactggggagccattccacggattcacctcctcagaggttgcggacactacatgagaaaagcttggactttttggacgtc

SEQ ID NO: 265568 - DNA, 122 bp, Homo sapiens
aggacataaatgtcacgtccagctctgatatgcttcgcactgagcacatcacatttaggacgttgaagatttttttttttttttttttttaatatgcagtttgtaagaacaaaactggatgg

SEQ ID NO: 265569 - DNA, 122 bp, Homo sapiens
gcacagctggctctgcgtgagtaactccttctcctttgcaattcccctgtcttgataaatcggctgtgtctaggcagccggcgaggtgaacacactgggcggttacaccaggattaatgaaa

SEQ ID NO: 265570 - DNA, 122 bp, Homo sapiens
ggcaggaccgcagcatggagcagatcgtgttcccagtgcccggcatctgccagttcctgacggaggaaaccaagcaccggctcttcaccactactgagcaggacgagcagggcagcaaagtg

SEQ ID NO: 265571 - DNA, 122 bp, Homo sapiens
ttctcctagttcccttgtctttatgaataaaaacactcagatgagcagtctgaaagttaacgtcgttgccatctggcccttgattcctgagctttcatgcaaagttatgcaagtcactgact

SEQ ID NO: 265572 - DNA, 122 bp, Homo sapiens
cgccaccagcgcacccatgatgtactcacggagaggggtacgcagaaccgcccgtcccgccggagccgacacccggagcagtgcaaatcaactcccccagcctagcggcgcgtgcgcgaagt

SEQ ID NO: 265573 - DNA, 122 bp, Homo sapiens
gcgtggggcccgcgggcgcccgggctataaaccccgcctcgccgcccctccccaagcctccgcagcacgtgacccgcggcagcacgccctgtcccaagcccgagtgtcaccctcgggcacgt

SEQ ID NO: 265574 - DNA, 122 bp, Homo sapiens
ctgtggttgtatcagatgcccgcaaggaggtgctgcccaccagcctgtcccgtcactgagcgtgacggatagtccgtttgctccagtacctctgacagaatctgccctctgtgttgttactg

SEQ ID NO: 265575 - DNA, 122 bp, Homo sapiens
ctcaggtgagcccccaaaaatctcttccgcagtggacagggtgagatgcaagacccacaccgataatgggaaaatcagaggaggaggcacctgcatggagctgggaatcccgaaatcggaat

SEQ ID NO: 265576 - DNA, 122 bp, Homo sapiens
agtaaaaacttactgataggtttattaaactaagagaaaagacagtttggatataattttcgtaagaagccttttcatttggaaagatcagtgaacccattgaaattctcaggtaaatatag

SEQ ID NO: 265577 - DNA, 122 bp, Homo sapiens
gattacaggcgtgagccaccacgcccggccaaaccaacttttttttaaaaaggaagatttcgtttaaaagaaaccaccctgaagggtggagtgtggaactgagcttccgtgacggtcttgag

SEQ ID NO: 265578 - DNA, 122 bp, Homo sapiens
caggagactctttgggtgactctcagatgcgtcatgggcagcagaaggtgaaggtctgaccgtgaaggcagcgtcttcctagtgctggagactctacagccctcatcctgtctcctttcagc

SEQ ID NO: 265579 - DNA, 122 bp, Homo sapiens
cccgttactggacagagaaattaacatctgtctctgctgcgtcctctcgggtgtctgtgacggtggtttggccctctcgtaagtcttaagttggctactacattaaacacgggaacccatga

SEQ ID NO: 265580 - DNA, 122 bp, Homo sapiens
cccctccctccaacagagttccatgaggtccctgagaatgctgatgatgttagttgtcagcgctctggggttctgtctgtctctctctctctctctatctatctatctctgtgtccaggtag

SEQ ID NO: 265581 - DNA, 122 bp, Homo sapiens
tcgggtcttcctcctcccgctgggcagaggcctcatgggcgagcccggggcctcgcgggccggggtgtgtgctggccgcaccgcgctgcagctcctatgcagccttctctcttcctccgcct

SEQ ID NO: 265582 - DNA, 122 bp, Homo sapiens
agcaaccactatcaactgaacaactccgtggcatttagcacattcccggggctgtgcgtccgccacgcccagctcccaagcagccttcgtccccgcggccgtctcccctgcttcccagcgct

SEQ ID NO: 265583 - DNA, 122 bp, Homo sapiens
ctcgagggcaggcggacaggcggggagctttaagccgatctgtgtcatggggtcgctgggcgggcgcggcggcaggggcgccgggagcggcggactggaggggcggactgaaggcggagagg

SEQ ID NO: 265584 - DNA, 122 bp, Homo sapiens
agcgtgaccactgaagcacagcatcacagggagttggttaggcctccggataactgtgggcgagcctgactaatgttaggctccacaagaagtggaggagtagagtcttctctaaaccgccc

SEQ ID NO: 265585 - DNA, 122 bp, Homo sapiens
agtctgggcgacaagggcaaaactcggtctcaagggaaaaaaaaaaaaaaaaaagaaagtcgttaagggcaacagctaggtttatggactgagagagccgattgcagggttcaggtcttagc

SEQ ID NO: 265586 - DNA, 122 bp, Homo sapiens
cctaaatacttaggtatgtatctactaagatcaaggactacctcttatgtaagcacagcccgattatgaaattaaggaaatttaatcgtgattcaatactagtatacaaattccatctttaa

SEQ ID NO: 265587 - DNA, 122 bp, Homo sapiens
attagttaaaattaacttacaaatcgaacagaaagggatcctaaccaagggctttgagttcgctggtaacaacttggaacaagagcctacatttagcctgtgtcttgagacaaacacggaga

SEQ ID NO: 265588 - DNA, 122 bp, Homo sapiens
cactggaatacagctttattcctacacgattagacccgttaccccgtgggtctggccgaccgtcctgactcggagatccctgagctgcgccgccgcttccttcgtcaacatccagcagctac

SEQ ID NO: 265589 - DNA, 122 bp, Homo sapiens
ggccgagcagcaagcaggatggaggaggaggcagagttccgtggacgccccggccacggccgaccgtctagctgatggccaggcacttggaggggcacgattacaaagttagagatgaaacg

SEQ ID NO: 265590 - DNA, 122 bp, Homo sapiens
gtgtagttctagggccaaaattaagattcttgggggaaataaaggttttgtgttgttttacggattggaatgccgtttgatttttggggctttgcttgcttccaattcaagtaatggatgag

SEQ ID NO: 265591 - DNA, 122 bp, Homo sapiens
gtcagaaatcaattcgggataacatttcactacattagtttagtgaaaagggcttactcacgtaacacaagtctttctttagtttgtcagacatctattaccagctttcttcactctgcagg

SEQ ID NO: 265592 - DNA, 122 bp, Homo sapiens
ggcgcgcgtccgggaagcgcccctcctgccccgcccccggccccggccccggccccgccccgtgcttgcagtttcctataagtagccggctctcggtgccagcctcagcctgacttcagcgc

SEQ ID NO: 265593 - DNA, 122 bp, Homo sapiens
tggctcagccgcccgctgctgcggggctggttctttgaggaatttgtcccaggcgtcaaacgctacctgcgccgaagctgcctgcagcagaaggccgtgctgctggtggcccacccgccctg

SEQ ID NO: 265594 - DNA, 122 bp, Homo sapiens
ttcattctaatgtctggaggaagttgagcccatcatgatagttctgtgggtcagataacacgaggacaggattatagctgtgtctcctactcatctgcctccacagctgcctccatttactt

SEQ ID NO: 265595 - DNA, 122 bp, Homo sapiens
tggagcaagaaccggagccggagccggagccggaaccggagcccgagcccgagcccgagccggagcagctctgacctggagctgaggcagccagcagatctcagcagcccagtccaaataaa

SEQ ID NO: 265596 - DNA, 122 bp, Homo sapiens
actgtaggcatggccgacagagcctcaatggccacctggctggactttgccagagattcccgcacctgcacttccagcaactgtggatacatggacaagagatgtcacacgggttggcaaac

SEQ ID NO: 265597 - DNA, 122 bp, Homo sapiens
cagcaggagcagagcaggagacgcgtagccgccgtcgccgccgccgggggatgtggccggcgcctgcctctagccgcgccgcctcttgagtaccagccgccgctgcagccgccgccgccgcc

SEQ ID NO: 265598 - DNA, 122 bp, Homo sapiens
gcctgagtttccgtgggcagctggcggggacctgtgctgctgctgctgactgtgggtgggcgggcggcgcctgggagtggctcttgctcaggaattgataggaaccctaaaaactaggatac

SEQ ID NO: 265599 - DNA, 122 bp, Homo sapiens
tttggagaggcctacgaaaaactcccggcctgagtccgggaggccgcggaggtttgagggcgggagtgagttagaaacaaggctccagacggccgagtctcccaaactctacttccctgtgc

SEQ ID NO: 265600 - DNA, 122 bp, Homo sapiens
ggctgtcggcactgcctggcattctctggctgatagaagtgtcactctctgctctgttgtcggcacacggcgttctccctgggtgtctgtgtctctgggtccaaatttccatcttcttataa

SEQ ID NO: 265601 - DNA, 122 bp, Homo sapiens
cgagtgactgcccgccggagctgagcgccgagctgcgcggcgctatgggctctgcgggcgcgcatcctggggacaagctaggaggcagtggcttcaagtcatcctcgtccagcacctcgtcg

SEQ ID NO: 265602 - DNA, 122 bp, Homo sapiens
gagccagtgaatcggcctcaggccaggcacagagccggccccagaggctggggtgaaacacgagctgtgagctgcaaatcagaaacagagcgacaggacactattttcatgacgaggttctg

SEQ ID NO: 265603 - DNA, 122 bp, Homo sapiens
caggcaggtgtcaggaccggcctaataaacatgtgtggcctcctcctctcgcttgctgggcgggcctttccgggggcggggttttgaagctgaggcttctgaggcgcccgcgtcgggtccgc

SEQ ID NO: 265604 - DNA, 122 bp, Homo sapiens
gggtggataatttaacagctctgccacctcccaggccccagccttggatgctctggtccccggggactgaaaagtgggctcagctgcctgtgtgtcaccccccagctcctgcccgcttgcat

SEQ ID NO: 265605 - DNA, 122 bp, Homo sapiens
tccgctcccacgtcactccttttctcccattcccacctcttgcacctggcgtgcgacatccgggtctccaaagtctctgctgtctacacaacagaaccgtgggccggaactggctgcctgac

SEQ ID NO: 265606 - DNA, 122 bp, Homo sapiens
ggctgttttctctggtggatgcttattgcccctgctaacttcagctgcggtctctctgctcgccttgccctccccatcctccttagaccttttaagcttcactttcctttccttgctgcccc

SEQ ID NO: 265607 - DNA, 122 bp, Homo sapiens
aataataataataataataataacaacaacaataacatctatcttgagcctggagcgctgcgctgtaaagtgcttttacgcgctggagggggctgtgcacataggtaccactgtaaacagtg

SEQ ID NO: 265608 - DNA, 122 bp, Homo sapiens
ctaagtaatgggtgtcttcgcagacactggcattaccgcttgaccaaggagccctcatgccggcgtgacagagggctcacctcttgccttctaggtcacttctcacaatgtcccttcagcac

SEQ ID NO: 265609 - DNA, 122 bp, Homo sapiens
gcatggacacatcattatcacccaaagtccatagttgacatggaagttcgcccttggtgccgtacattctatgggttttaacaagaatattcaccattacagtattatacaaaagaggctgg

SEQ ID NO: 265610 - DNA, 122 bp, Homo sapiens
atccggccagccgaagcctgccacctcctacgcgcggaccaccatcaacaagaatgctggcgtcacgctcagcagcatcagacacatgatcctcaagaacaagtaccgccccgacctgcgca

SEQ ID NO: 265611 - DNA, 122 bp, Homo sapiens
caaactcctggcctcaagccatcttcctgcctcagcctcccagagtgctgggattactggcgtgagccactgcacggtccacctcagtgtttttaacgcaggaaatgaggggtgttgacatt

SEQ ID NO: 265612 - DNA, 122 bp, Homo sapiens
ccgagggaaagaggaagtaggcggggctgacctccgcaactactgccgggtggcggcgggcgcggccaatggcgccgcagcgggggagccccggctccgcctcatctcccccgcccccgagg

SEQ ID NO: 265613 - DNA, 122 bp, Homo sapiens
aattttccaactgggctccatccatgccaaatagagccaaggcaataccctttatcttaacgtagacagtagcttccctaatgtagtaattattcaggtaagtcttttcttctggtctcaaa

SEQ ID NO: 265614 - DNA, 122 bp, Homo sapiens
aaaagtccacctatatcaactttctgccaatctggagaagatctgttttctttgatctgacgtcatgtgttcacaagcttctaaaatgtttgccaaaattaaagtctgctggatggtttttg

SEQ ID NO: 265615 - DNA, 122 bp, Homo sapiens
tcacaggcctcttcaccatctgctgtctgcggacagcttcatctgcctcccacgctccttcggagctcactgacctctcaggtagaccctgcttttcagcattcactgcctttgccccgctg

SEQ ID NO: 265616 - DNA, 122 bp, Homo sapiens
cccctgcttgggggcttgtgaggtccctgtcgggcgcccctcttggcagccactaggatgcgctcactccccaaaaatgcagcagccccgcccccttaaccctcagctgctcgctaccgcag

SEQ ID NO: 265617 - DNA, 122 bp, Homo sapiens
cttggccctgactggggattccgtgggctgcttcaacgtcagactagaagccagaccagacgtgaggatctgctggaagcccctcaagcagcacggggtgaagtgaggacaacaggcaacca

SEQ ID NO: 265618 - DNA, 122 bp, Homo sapiens
cacaacagtatgcatgtgggtacccagggttctctccacatgagaacccacgagagcccacgtcagctcatgagccacatacacaaggaaacagaccttcttcctctctgtcaagtccgaag

SEQ ID NO: 265619 - DNA, 122 bp, Homo sapiens
ctccttgcccagctcggcttcagtccccttcagccataagatggcgactgtgctgacagccgggccccgggcgtcctgtcttccctccgcagtgactgtgcctgacgtgtagccctgtctgg

SEQ ID NO: 265620 - DNA, 122 bp, Homo sapiens
caggccagattgatttaggtaaaaagaacactcttcatttaaaaatatacagagcccggccgggcgcagtggcccacgcctataaccccagcactttgggaggccgaggcaggcggatcatg

SEQ ID NO: 265621 - DNA, 122 bp, Homo sapiens
ttttatagactatttttaatgattttatacaagaaacaaagttttgactgcaacttgtcacgtgatgtcaggtgtggaatttccacacttacggcatcatgtcagcactcaaagttttggat

SEQ ID NO: 265622 - DNA, 122 bp, Homo sapiens
cccggtgactcagccggtacctctggcggggccatgggggccagaggacagcgcggggggcggcgagcgcggttgctaagctctccaaggcctcggagggacaggatctgggcgcacctcac

SEQ ID NO: 265623 - DNA, 122 bp, Homo sapiens
aagagacacacaccgtcaaacacatgaacgcatccactggtcaaaaatacgcaggcaggccgtgtgcggcggggataaatcaacccagcacataagcatgatagacacaaacacacagagac

SEQ ID NO: 265624 - DNA, 122 bp, Homo sapiens
aaaacccgacagagggacatcagcaccgcacttctcacgccaggccaggcggccacgccccgtccccctgcatccgcaaccccacttaccaggagtaggtggtccccaggtcgatgccgacc

SEQ ID NO: 265625 - DNA, 122 bp, Homo sapiens
cccgcgccgcggggtggtgccgccgctttgtccgccgcccgcagcccccaacaccctggccgcccacccgagctgtcccctcgctgggaccccgcgcagcctgcccagtcccccgcccaaga

SEQ ID NO: 265626 - DNA, 122 bp, Homo sapiens
ctgtcctctttcatagctccagcacatctgtgctggatgtcacctggctccatccagtgacggattcatattctctgtttcgacatcttcagttgctggacaactaaatgccatcttcaata

SEQ ID NO: 265627 - DNA, 122 bp, Homo sapiens
cctcctctccctatctggaactgccatccctaattctgtacatcaccttcagtttttgtccgttgcaaaatcatcagcagtttccatctctgtgaagttacaaaaaaaaaaaggaaagaaaa

SEQ ID NO: 265628 - DNA, 122 bp, Homo sapiens
ctcctggtccgtcacctgcgcgccgccccacgcggccgggctgcgggtctagggggtccgcgtctccctggctttccaagggctaatgccgtgattctagagcggctgggcgtctagggcct

SEQ ID NO: 265629 - DNA, 122 bp, Homo sapiens
aggtcactacttaccaagagttcagaagttcctaatttgtctagttccaaagactgaatgcgagaaatatgaacccccatttccctatggatgccagaacattctatacaggtcaaaatacc

SEQ ID NO: 265630 - DNA, 122 bp, Homo sapiens
gacacacacacacacacacacacaaacacacacacacacacacacacacgtgtagacgcgcgcagcagaaaagttgcccgaaagccctacctgaggatggctgtgtccccctgcctcacggt

SEQ ID NO: 265631 - DNA, 122 bp, Homo sapiens
acgcagctgaatttccagtactttccaacctcgcctaggcgggggcaggcagagaaggggcgggcagcgggcagctaactcgcccgacccccccgccaagaaggactcactaggtgaacccc

SEQ ID NO: 265632 - DNA, 122 bp, Homo sapiens
gaagtaaagcatttggcacgccctgcggccggtgctaggtgctggggaaatgtgtgctctcgtggagctgtcccagttgccaaccattaacagctgctgaacaaagcccacctcctgggagg

SEQ ID NO: 265633 - DNA, 122 bp, Homo sapiens
tattccgggcagtttctgaggcagcacgttcagacgacttcctgctgcattaggaagctccgtcttgtgagccctggggaggccggcaggttggaaccttcagagcctttaatcccccagag

SEQ ID NO: 265634 - DNA, 122 bp, Homo sapiens
cctcccatccagttattcaatgaatatgagctccttgcatgtgcaaagcactagtctaggcgcagggaatcccgcaacaaacaagtcaggcatggagctgacatttgtatcatgttccagag

SEQ ID NO: 265635 - DNA, 122 bp, Homo sapiens
gctccacagtggcacaaagcactgtcaagtgtcacacgcagcctgtggggacgtgtgggccgcagtactgtccccacctaaaggattgtagaggctcaggagacatgagccggggccatttt

SEQ ID NO: 265636 - DNA, 122 bp, Homo sapiens
gttgaccgatccagtttggcctcacacacagttcatctctaccctctcaacgctgggaatcggcttgtccggctcaagctggaggttcagccttccgcccctcccaactcggggacccgacc

SEQ ID NO: 265637 - DNA, 122 bp, Homo sapiens
cggccagcaaggatccgccagcctgcggcgctgagccagcgcaggtcagctccagagacacgcagctgacccaggccagaactacccttgaggcccagtcagatccacctcacctgggccct

SEQ ID NO: 265638 - DNA, 122 bp, Homo sapiens
tccccaccattacaccctccattctcattcaagttcttcgggagaaaggaaaaatatggtcgggttcattgctattcagttttgaagttgagcctgcatttggacacaggcgcttgggagag

SEQ ID NO: 265639 - DNA, 122 bp, Homo sapiens
caggtatctgtctgcaaggggctctgagccccttctcttgggggtgcccgtccagaatcccgaccccacatgctgtcacctccaatcctgctccccaccaaaggtggggctctgtaccccca

SEQ ID NO: 265640 - DNA, 122 bp, Homo sapiens
ggagaactgcgagggagcactagcccctactcccccaggtggggaggcagccttggcagccgccaggccaggccgctagcattgcccccactccccaggcttctacctgatctcaccctcgg

SEQ ID NO: 265641 - DNA, 122 bp, Homo sapiens
ttagaacaactgaaattcactattacccaccagattacttccttataaggataatcttctcggatagagcacagcaatgaccaacaacaacaaatgcaaaatccaatttaaaaaaacaacac

SEQ ID NO: 265642 - DNA, 122 bp, Homo sapiens
agaatgttccacaggctcacgtcagccccaggcccgctggccgccggcaggcagcgacggcggggtggccccatgggtctccctggaacacacccccctggggccgccctgccatgtcactc

SEQ ID NO: 265643 - DNA, 122 bp, Homo sapiens
cccgaatggaggaagtgacaggtatacggggggcaggaaggccgggggtctcatgtgagccgcccagggccaggaggtcaataggaaggaaagaacgtctccaggccccggtgattggtctc

SEQ ID NO: 265644 - DNA, 122 bp, Homo sapiens
agaggtgcatggagtaggcggcaccaaaacccccgcggactcctgctcacatcccagcatcgtggtcaaaacaagacaaatgtcatccttgccaaggccccagaatgcgtgcaacgcccgtg

SEQ ID NO: 265645 - DNA, 122 bp, Homo sapiens
ctgtcccctccatggtggcagtttgtctggctgatggtagtattgctgtcctgcaagtcacggaaacagtgaaagtatgtgcaactcttccttccacggtagcagtaacctctggtgagtaa

SEQ ID NO: 265646 - DNA, 122 bp, Homo sapiens
tttggaaaatgagactaccacttggcaatttggtgtcctcattccactgcatcaaaacaccgagaagcagggccaggcacggtggctcacgcctataatcccaacactttgggaggccaagg

SEQ ID NO: 265647 - DNA, 122 bp, Homo sapiens
ttcaaaactgcagggcgtgacctctcccgcctcgaaaaacgtgaaatccttacaaggtgccgtctgttctaggctctgggacagaggtttctgctttcgaagtttctcttcctttcctctct

SEQ ID NO: 265648 - DNA, 122 bp, Homo sapiens
cgtaaacaaggccgtggactgcaggaggcggggcagacgggctgcaatagggagccggcccgacgcggaccgcttccctgcagtgccccgagtcccgggcccgcgccgccgccgcccggctc

SEQ ID NO: 265649 - DNA, 122 bp, Homo sapiens
agccgctttggccgtgcccgttgcatgccgggaaacgcagttcgcgagccccggatacgtcgacaatagatgacggggctcacgttgtacgttcacatcaggtcccggcccgccggaacctg

SEQ ID NO: 265650 - DNA, 122 bp, Homo sapiens
cccggcgggcctggcagctcagagtccaagacccccacacccaggcttgacctcaggagtcgtgtgtgcaggacgcccccgccacccaacccagggcggcgctgccggtcagaaaggccgtg

SEQ ID NO: 265651 - DNA, 122 bp, Homo sapiens
ttcaagtcatccctctgcttgtgaatcctaacagcgcttccgacttagggctccacagtccgggtatgcgttgcctaggttacctcgcacctccgctagccggctgagagccacgcccatca

SEQ ID NO: 265652 - DNA, 122 bp, Homo sapiens
ctctgtgggtcccgcgaggagactctcgggctttgaggtgagacctgaagttccgctggccggtagtgtagcaggaaagggcaggtcctcccgggtcgtgagccagtagcctcctggggtgg

SEQ ID NO: 265653 - DNA, 122 bp, Homo sapiens
attcaccccaatcctgggacaaactctctctcattgagtcctatgagaatggaatagtctcgcccatcaggtgagagtgtaaacaatcacgtatgacatcacatcacaacaccaccttgggg

SEQ ID NO: 265654 - DNA, 122 bp, Homo sapiens
aaacctcctcacttccaatcccagctatctgggtacaatctggtgttgtggtctggctgtcggcgaggggtagaggtgggtgcaggactggcccccgagtctgcaccgacctcttcagggca

SEQ ID NO: 265655 - DNA, 122 bp, Homo sapiens
ggcaagtacacattaacgcggtagcctgaagcccaagcgaagtctcagcgcaatgagccgcgcagaggctcagaggcgtcagcggcgtgcgcggtttccaaggaaaccgtccgtcctagcca

SEQ ID NO: 265656 - DNA, 122 bp, Homo sapiens
gggcaggagggtttggttgagctgcagctgtttgtctgttcgacacaggcttggggccgacgggggagacggagccccaggtaccgagctgatggagcccaaagggcaggggcggaagcgcc

SEQ ID NO: 265657 - DNA, 122 bp, Homo sapiens
cggcggccacagtggccggcgtacatgtgaagcagcagtgggaccagcaggtcggtgtcacgtgaccgtctcttccgggcccgcgcgcgcggcgtcgacctggggcctctcgtggtctctgc

SEQ ID NO: 265658 - DNA, 122 bp, Homo sapiens
ggacagcaggtatttctgaaagatatctggccgactagagacgagatccaggcagtggagcgtcagtatgtcatcccggggatgtttaaggaagtctatcagaaaatagaggtgaggtccca

SEQ ID NO: 265659 - DNA, 122 bp, Homo sapiens
aactgtggagtcccagggcacattgtctccagcttcgccagctgggccattgctctccaacgccagcacccatgggtacttcctgatgcacctcatcctacccacgttactgtcagagtgag

SEQ ID NO: 265660 - DNA, 122 bp, Homo sapiens
ggatcagagctcagttctccatttaacccaaagcccaggctcttaacctcttacaactggcgcatcccctctgaacctccatttcctccctgtaaaagaataacatcggccgggcgcagtgg

SEQ ID NO: 265661 - DNA, 122 bp, Homo sapiens
gaaaaaatgtaatcagccgagcggtttccatggaagcgctcattgaccagggctcaccagcgcctggcgatgcctacccttccgctttggagactggaaattcggttaactgagtttcaggg

SEQ ID NO: 265662 - DNA, 122 bp, Homo sapiens
aaagttttattcattcattgaatgtctattcattgagaaatctctatgcatttgggaatacgaagactttaaaacatagtctttgccttctagtggcgtaaagtctaatgtatgaaacagaa

SEQ ID NO: 265663 - DNA, 122 bp, Homo sapiens
ttgaaaagtcaggagctaagctgctcggagctcagtgccgcagcatggctgtggtggacgcgggaaacaacgggaaagttcttgacagagtctgtgtccgctcagtccctgcacttttcctt

SEQ ID NO: 265664 - DNA, 122 bp, Homo sapiens
aagtcctgtgattaaaaagtaacttttgcaaagaaaacagtcactcaataatttatccttcgtattatgccattcctttgcttctgttgttcttatctttccaaaccttactcttccataaa

SEQ ID NO: 265665 - DNA, 122 bp, Homo sapiens
gttggccgggtgcagtggctcacacctaggagcgtctgtccattagcttgtatgtctgtccgaatggaagtgcctccctgggccgggtgcggtggcttacgccggtaatcacagcactttgg

SEQ ID NO: 265666 - DNA, 122 bp, Homo sapiens
gcgtgggcgggacgcatgcgcgtagggagcacgtagtgcgcgtgggaggctccgccttttcggtcctgggaacccgcgccccctgccggtgccctccccgcccggccctagctctctcgcct

SEQ ID NO: 265667 - DNA, 122 bp, Homo sapiens
cattcaccaaagtgtgaattactcagtctataaaccactagtgtagcagcaatacagtcacggttaacctttgcccagcctcatcaaattctcttttctctgtgaagattaggcaagcatgt

SEQ ID NO: 265668 - DNA, 122 bp, Homo sapiens
tcagagctgggagggtggcttcccgggagacctggtggtgctggggctgccagtgagtcccgggagcgaggatattggggagagccagagccggcagagggagggaggagcctggaatgcgg

SEQ ID NO: 265669 - DNA, 122 bp, Homo sapiens
cctcaatcccagcaaccactaactgatgcctgtgtcttgcagaactgctggaactgtggccgcaaagccagcgagacatgcagtggctgcaatatcgcgcgatactgtggctctttctgcca

SEQ ID NO: 265670 - DNA, 122 bp, Homo sapiens
gtccaaggggagaggtaaggagtcggaagtccagttcagggacgaggattccaggatgagcgtgaatgggaaggggctgggcccagcctgggggttctctccctagtttccacagacagatc

SEQ ID NO: 265671 - DNA, 122 bp, Homo sapiens
aagtttccattgtggagcatggcttagttgaataaatgaagaaagtaaagggtttcggggcggggggcgcattcttcctggacctggcacagtggcttggacctgtaatcccaatgctttgc

SEQ ID NO: 265672 - DNA, 122 bp, Homo sapiens
cgatagcgccaaccgtgccccccgcctccctccctccaccgggccgggcaagtgatctggcgccctcacacaaaccgtgtttacagtagcctgtggcttggcccctctaactcggacccggg

SEQ ID NO: 265673 - DNA, 122 bp, Homo sapiens
ttcagggatcctttatcaagctgccaaaccttttcaggggcttggaaggacacctaagggcggaagcgggcgcgttgtggcccccgtggggcagtgggaaggcagcagggcctcgcgggcgg

SEQ ID NO: 265674 - DNA, 122 bp, Homo sapiens
taaatgtcagagagcaagttagacacacattccactaagcatcaaaggccctcgtagtctcggtggaaggacaaactccagctccacatcactggtttaagtttcttcctctgaaagacaca

SEQ ID NO: 265675 - DNA, 122 bp, Homo sapiens
atatttttttgagacagagtctcgccctgttgctaggctggagtgtagtgcgcgctatctcggctcactgcaatctctgcctcccgggttcaagcgattctcctgcctcagcctcccaagta

SEQ ID NO: 265676 - DNA, 122 bp, Homo sapiens
ggctccctccagccctgacagcctgcgattctgtgattccgagatcctagaatcatggcacgagattctgagactaacgcccctgcccctgcagccgaccgggaggtcacaggaaggcctcc

SEQ ID NO: 265677 - DNA, 122 bp, Homo sapiens
gaggccccccatcaggaggccttggaaaagccgccctgcatctgggcctgacgtaacgcacgcgggtccagggctgctgagcagacagctgaggacccggctccagccctgcccttgtggct

SEQ ID NO: 265678 - DNA, 122 bp, Homo sapiens
tgatcaggtcctggtccttgtcctcagccgcagggaagatgacacgtgctccagtgctgtcgcgcaccttgcgaattttgccgccccccttgccgatgaggaatttgtggtattctggcttg

SEQ ID NO: 265679 - DNA, 122 bp, Homo sapiens
cagacattttcttgcagctgcaggcatcccccaaccctccctgtataagcttctcgcttccgtatcttagtgggcctaaacggaaaggaatgtacttattaagtctcacagtttttactggg

SEQ ID NO: 265680 - DNA, 122 bp, Homo sapiens
ctctctgagcctcagctgcttcctctgtaaaatgataatctctatatcagagcacagattcgaggacttggagattcaatcagaatttattgagtgccccttgtgtgctaagccctgtcctg

SEQ ID NO: 265681 - DNA, 122 bp, Homo sapiens
cccccagagggaaaaaacacccaacacatcagaatgtcaaggaacaaactccggccatgccgcctttgagggcctgtaacacttaaccgcaagcaccagccacgccgcctttaagaactgta

SEQ ID NO: 265682 - DNA, 122 bp, Homo sapiens
tagaatacattcttcatctaatatatgaatagaaatatactccaaaatctaatatgattacgctattgtttcccattaacgtggatcactggggaaaaactggtgcctcatcgttgttctaa

SEQ ID NO: 265683 - DNA, 122 bp, Homo sapiens
actgagaaaaggaaataagacacaaagtataaaggaagaaaagtgggcccaggggaccggcgctcagcaagtgcggacccacgccagcactggtctctgagtttcctcagtatttattgatc

SEQ ID NO: 265684 - DNA, 122 bp, Homo sapiens
tatttaaagtctagccatcttcctaggcagtagtgaggggtttgacttccccgagtgtcacgctcagctgtgcccagagcgtgaggctggcagcgcctttaatcgcctttgctttttttgca

SEQ ID NO: 265685 - DNA, 122 bp, Homo sapiens
ttcctgctcatgccactaacagcatgctgccaaactgttcagattcaagattattccaagcgcagggcccaaatgttatagccaaagaaagtcttatgataaaagtgaggcaaatttcagcc

SEQ ID NO: 265686 - DNA, 122 bp, Homo sapiens
tttccgaccctcggcctccccactcgccggcccccaggcctggtccccgctcccggcgggcggcaggctgcttttaccgtccggtcgaaactcaaactccaggaactcgtggccgaacttgc

SEQ ID NO: 265687 - DNA, 122 bp, Homo sapiens
aagattaagagtgtcaggtttgtgtcttcaaaccctaactctggctcagatctgcttacccggaagactttgtccagagagagtttgccgagctctgatctcatggttgtttgagctagctg

SEQ ID NO: 265688 - DNA, 122 bp, Homo sapiens
gtcctctctattgttctgactctcgctgaaacccacactgaccccagaccttctgcaaatcggtccttacctggggtccaattcccctaggcttgctggaagatgggcctcaggactgtggc

SEQ ID NO: 265689 - DNA, 122 bp, Homo sapiens
gaattcccttctccaccaactcgcactcttggtctagcacgcggaaaccgaacctttctacgcggcccgaccttgcgattgctccagcatgagtggcattgacttttccaatgtaatgactt

SEQ ID NO: 265690 - DNA, 122 bp, Homo sapiens
agctcgtcggactcagagggcctgtctttgaaggtgttgtcctccctccccggggcatctcgggaaaagaggcggatcaagtgggggcggctccctgggtcagctgggtgggcatcctgcca

SEQ ID NO: 265691 - DNA, 122 bp, Homo sapiens
ggcggacctcaggcggtggacgtcggcgatagccgtgtggacggtgaccggctcactctgcggcgccgtgctcccgctgctcacccaaagaagttgtttccattttaaaccggtcttttggg

SEQ ID NO: 265692 - DNA, 122 bp, Homo sapiens
cggacgagaacagttttctttaggctttgggttgctccttttcctttttgctttcacaaccgaaatgcgtgctcagagtgatccaagatatttgaagaacagtggcagcttggaggtgttta

SEQ ID NO: 265693 - DNA, 122 bp, Homo sapiens
aaccctgttacaggcgacctgactcgggcccagtaactagtgaggttttgcccaagggtgcgtggagtgggggaggcgatggagatcgaaatctgtcataatccgtggctctgctcttgagg

SEQ ID NO: 265694 - DNA, 122 bp, Homo sapiens
ggaagtgggagctgggtgggggacgcctgggccggccaagtgcagtgtgtacggccggatcgcacaggtgtcccgcgggcggggaaggactcaggctcccggagcggagccagccgggcccc

SEQ ID NO: 265695 - DNA, 122 bp, Homo sapiens
tgacaatgaagtcgaactcagatcccgccagcatcagcactcccagcagagtggacacggcgccatccaggacgggtgcaaacatgtgctccagggcaagcacagccctgcggttcttgtcg

SEQ ID NO: 265696 - DNA, 122 bp, Homo sapiens
tgcactctaatgtgctggaaaagcaacctctccaccagttcctggggcctggcagcaccgcgcctgacctgggttggcccacttcttcccaggacacccctggccaattcaaggaggcctct

SEQ ID NO: 265697 - DNA, 122 bp, Homo sapiens
tattataataaccaaacaaacagatatatgcatacataaataagcagaggggaaatagaacgttactttcaattagtgtgccagctgatacaagtgaaaggagtagtaatggggtggcgggg

SEQ ID NO: 265698 - DNA, 122 bp, Homo sapiens
tctctccactactgtcttcgtggcggccttttccttgcttggttttcccatagacttctccgcccctcctgtagtggcgctttgtcagtaagcggtgacagtggtgtgtgtacctggcgtgg

SEQ ID NO: 265699 - DNA, 122 bp, Homo sapiens
ctagagtaagtatggagagttttcttcatatgtccctaaacccaaagcagacatacacatcgacaggctattgaagcagacacacaggaggaataagctgggcccaatcttcataacttttc

SEQ ID NO: 265700 - DNA, 122 bp, Homo sapiens
cgctcagagatatggaatacgttcccggtgggcactgcggtgtgtgtagtcaaggaccaccgcggagtccaacgcttcccgctgaagagtgagattatagacattttcctttggcattggag

SEQ ID NO: 265701 - DNA, 122 bp, Homo sapiens
ccctagagcaggtgggctgactgagggcgaccatgggtcccaagagggctcccgcagcggcgggctcccacctcgaggcgcagcgacaggggccgagaggggccagcagcccccaagccagc

SEQ ID NO: 265702 - DNA, 122 bp, Homo sapiens
acctcgtgatccgcccgcctcggcctcccaaagtgctgggattacaggcgtgagccaccgcgaccagctgaattaatataaatatgaagcagattctggtaagttaagatgtatattataag

SEQ ID NO: 265703 - DNA, 122 bp, Homo sapiens
tgatatgattggccggcgaatcgtggttctcttttcctccttggctgtctgaagatagatcgccatcatggtgagtctccctgggcccgtgcagtcatctgccgcgtatccgagccatccgt

SEQ ID NO: 265704 - DNA, 122 bp, Homo sapiens
cggggactgggaactatatatacccgggcacacgtgtgtgtgcctgtctctgtgtgtgcgcgcgcatgtgacaccgcgcggactgctccgcgctgctacctcccccatgtgcacggccgccc

SEQ ID NO: 265705 - DNA, 122 bp, Homo sapiens
gaaactatggcagtcactttttactctttctaagtcttaaccaaatgctcacaatgggatcggagcctgcctttgttagatccagctccctggcaggccaagctgttagggaatgtggtcct

SEQ ID NO: 265706 - DNA, 122 bp, Homo sapiens
ggctcaatatgaactttcactttgcttcctttttcaggactctgcaactgataactcaagcgctattgtgtaaggataccagatttagatgagactgtcagcagccctctgggtcctcactg

SEQ ID NO: 265707 - DNA, 122 bp, Homo sapiens
aagaagcaacagctcatgaccaagagattttctaaacacttcttcgtttcagccaatcaccgtccagcccgaaactccacttccaaaatctctcccttaaatctactgctgcgaagcaagta

SEQ ID NO: 265708 - DNA, 122 bp, Homo sapiens
gggagaggctgtgaggatgagacaccgcctggcgcacgggaggtgcccaataaaccctggcggggaagagcttgtttcataaagtttccagcatgagatcattctggtccattttattttca

SEQ ID NO: 265709 - DNA, 122 bp, Homo sapiens
aggagcagtgcgctggctgatccgccgggaagtttaaccagcttcctgtggttgctgtgtcgcttttcgcctcctagaacttcccagtgtatcttctgaccatgaccagggtttgcaggaaa

SEQ ID NO: 265710 - DNA, 122 bp, Homo sapiens
gacctagtatttgatagcactacaggtgtatatatccaataataatttagttgtacatttcgaaataacaaagtataaatggattgtaacacagaagataaatgcttgaggggatagatacc

SEQ ID NO: 265711 - DNA, 122 bp, Homo sapiens
acccaaccccacacctccccatggggtgggaagatgggaagaaacattgtttttaaaaggcgtttctcaccaaagtcaaagctgctccaagagtaccgaagcaccactttgcacttcccatc

SEQ ID NO: 265712 - DNA, 122 bp, Homo sapiens
taaattcttgattggttggtgagaccaatagcgatactttttcttgtctaatttggtttccgggaaagcttcgttcaagtcgtcaatggtcatctgatcaaatggtattaagttcctcatct

SEQ ID NO: 265713 - DNA, 122 bp, Homo sapiens
tacttaggaggctgaggcacgagaattgcgtgaacctgggaggtggaggctgcaatgagccgaggtctcaccactgcattccaaactgggtgacgaagtgagattgcgtctcaaaaaaaaaa

SEQ ID NO: 265714 - DNA, 122 bp, Homo sapiens
cggggtcccttcccccgggccccgccccggccgaccccacctttccgcgcggctccgccccgccgcccccttgccagtggcccctccccgcgcaggtcccgactccagccgcacctcctccg

SEQ ID NO: 265715 - DNA, 122 bp, Homo sapiens
tggaggccccgggcgcatgggctcgccattggtgggtgctgggaagatgaacgtaggcggcgccagcagggcaggtgcgggcctccggggcccgggagctgagtgtatctgctctggtggtg

SEQ ID NO: 265716 - DNA, 122 bp, Homo sapiens
ggaagaaagaagagacccttccttgttatgctcagagtcgcactgggatctctgttacggcggccagccccgtgatctaaccaatacggcaacagtgtctgctacgcgtaggtcccaaagca

SEQ ID NO: 265717 - DNA, 122 bp, Homo sapiens
cctaggaaacattcaaatcagttgacaaagaatggctgatgctgaaatgacttgctgtctcggtgtggagtggaaacaatcctgctaaatttcatattgcagtgacaccaaagcaaaggaca

SEQ ID NO: 265718 - DNA, 122 bp, Homo sapiens
agattagttgggcatggtggtatgtggtcccagctactcgggagtctgaggtgggaggatcgcttgagtctgggaggtcaacgcagcagtgagctgatcgcaccactgcactctagcctggg

SEQ ID NO: 265719 - DNA, 122 bp, Homo sapiens
tcctcctcacttacgtgctgacatttttccttaagatgttgaacccctcaccaaacagaccggcaagtaatcaccaaggattctttcaggaacccgtgtttattcatgcaccttcatcttca

SEQ ID NO: 265720 - DNA, 122 bp, Homo sapiens
cgcggcaagagctccaaggcaagattcaaatgccctggggagacggctgcgggacacctgcggcggggcccggcagggagcgcgagactggaagagaggccaggagggaaggagagcgacgc

SEQ ID NO: 265721 - DNA, 122 bp, Homo sapiens
tgaggcaggagaatcactcaaacctggggggcggaggttgcagcgagccgagattgattgcgccactgcactccagccttggcaacagagccagactccgtctcaaaaacaaaaagagcaca

SEQ ID NO: 265722 - DNA, 122 bp, Homo sapiens
cggtttaagaacagctcccgttgtgacctcaatttacccagaagaaacatgcctgccccccgtcacgccgctgctgcagcagaacaagcaggcctggaaaaacattttccatgtcaaatggt

SEQ ID NO: 265723 - DNA, 122 bp, Homo sapiens
tgggctgtgtccagagagtcaccctgagtggcctgtaggcacagcattgctcggagatggcgctcacccaaccttcatgcagcaggcacttcttgagtgcccagcatgtgccaggcctggcg

SEQ ID NO: 265724 - DNA, 122 bp, Homo sapiens
gtgtggaagcctgggcaggtctgtcttggggccgctgcatccccagtgctcagtctagggcgcagcacggagagttcgcaactgtttcaggaagaaggcaggcgggtgggccgacccaagaa

SEQ ID NO: 265725 - DNA, 122 bp, Homo sapiens
ctgcagcttcaggcagagtgcccagttctggccagtcatctctctgagccttgctcactgcgttggctttctgttctttttctggtccatggagatgtttatcttgattttgtacccagcta

SEQ ID NO: 265726 - DNA, 122 bp, Homo sapiens
tactacgtagaggtgcatcagccagcgctaccatggaggcaggaggcattcttttgctctcgtgtcagtactgacggggttgattaaggttgctgtgcttgttggtgtgggtattgggaggg

SEQ ID NO: 265727 - DNA, 122 bp, Homo sapiens
accaaaaacgagaataaggcctcggaacccaccagttcagccctgggcgggagtcggcaacgctgttggggggcgcagcgcccaggagggggcggggcctgcgaggggcccaggagggccca

SEQ ID NO: 265728 - DNA, 122 bp, Homo sapiens
aaccacctgagttagtgcccatctcaaggagtttctctctgttgaggtcaagatatgtaccggtaaccagcagagagatttagtagatgggagtgggggaagctgctgtaataaagagaccc

SEQ ID NO: 265729 - DNA, 122 bp, Homo sapiens
ccagccggcgcgcggaacctggaggaatttacttagcccccggaaaaactgaccaatccacggtccctgaagtctggttgtgtttactaccgactgaatccgtgagctctctgaccaatcac

SEQ ID NO: 265730 - DNA, 122 bp, Homo sapiens
agcacgagaaacacaaccacgaagaggagagtcctccatgcatgccaccgcgtgtggccgcggtcagatgtaaacaggctgctcctgggccgtcagcagcctgtacatcgcggctggcattg

SEQ ID NO: 265731 - DNA, 122 bp, Homo sapiens
taaatttagtgaggaaggcatgttgaaagctgagataggccaaaagctaggtctcttgtacgagttattcaagctgtgaatgcaaaagaaaacttcttgaaggagagtagaagtgctactcc

SEQ ID NO: 265732 - DNA, 122 bp, Homo sapiens
agcagccctcgtcagtacaagatggaccccgtagtcttgagttacatggacagtctactgcggcaatcagatgtctcactattggatccgccaagctggctcaatgaccatattattgggtt

SEQ ID NO: 265733 - DNA, 122 bp, Homo sapiens
agattggcatgaaggacagttcgttctggagggccaggtgggggtaaagtcaggagcagccgaagagcccgtccatagcatcgggcagctccttcagggttcccagctcgaaatagttctgt

SEQ ID NO: 265734 - DNA, 122 bp, Homo sapiens
gttatacaaggcgatttacatatattaaaactggacataaaagatggaaacagtaaacaccggggactactagggagtagccaggaaggggaaaggcttgaaaagctaactgttggatacta

SEQ ID NO: 265735 - DNA, 122 bp, Homo sapiens
tgactaatcaaacaagcttagaataactgacatgatacagtctgtatcatttataaagcacgtttacaacctttgagacctcctaactcctctggagtggggagggcagacaaatcagcagt

SEQ ID NO: 265736 - DNA, 122 bp, Homo sapiens
gcccaaccccctgccctccgagattccctgcccctcccaccacctccccatcgtaaaccacgcacatgttcacgatccctggagccatacagaagtggggaaaggaaaagggaagggaagct

SEQ ID NO: 265737 - DNA, 122 bp, Homo sapiens
cgtcccgcgtccgctcccataacgccgtctgcggggcggggacaggggcggggacaggggcgggccgggcgtctagtttccctacgtcaccagggaagttctcactggacaaaagcgtggtc

SEQ ID NO: 265738 - DNA, 122 bp, Homo sapiens
tttccttgcaagttggatatggatacctagaaaatggggagggggtctttcttctcccagcggatctgaaaacaagggaggataaagagaagaaattttaagaagggaaaagacagctggca

SEQ ID NO: 265739 - DNA, 122 bp, Homo sapiens
agaggtgagcgttgcagaatccttgggagaagcctttcatcttagcggatctgtgggcagcggcctttagtggaacaatcaactgacatccccagatgatcactgtccacgctgaaagtcac

SEQ ID NO: 265740 - DNA, 122 bp, Homo sapiens
gtttattgaacattgtactgaaagtgacaatcagaatggtgtgtgaatattcctcagtaacgtacacagctgaaagcagaactttgagatcagactggcaacatggcaaaacccagtctcta

SEQ ID NO: 265741 - DNA, 122 bp, Homo sapiens
gagaacggaagggctggaacgggacccagccagcagggtttgtgaccgcctctgctgtgacgtcacagcctggtgaggagggggctgcagttcctcaggaaactgccagtggacaaattcat

SEQ ID NO: 265742 - DNA, 122 bp, Homo sapiens
agggggtgttggtatgggaggtggtctctggcagtactctctgagtgctgcctcccgagacggtgagcacggctagcgtctgcagcgggctctgcagtgcggcgccccactttgagagcagg

SEQ ID NO: 265743 - DNA, 122 bp, Homo sapiens
tagagaattgagcttggagagaaggggcgccaggcatttttgcctcctccacaggatactcgagaacagaatgatctagagacctggggattggggaaagcttctcccggggaaggtggggc

SEQ ID NO: 265744 - DNA, 122 bp, Homo sapiens
gatgcacggccgcaacaacggcaagaagctcatgactgtgcgcatcgtcaagcatgccttcgagatcatacacctgctcacaggcgaggtagggctctgtggcctggtgagggcaggctgtg

SEQ ID NO: 265745 - DNA, 122 bp, Homo sapiens
tttccagctcctggtgcggaggctcaaggctggcgtcctgtttgggatgtccgaccgtggcgagcttgagaacgcagatctcgtggtgctctggaccgatggggacactgcctattttgcgg

SEQ ID NO: 265746 - DNA, 122 bp, Homo sapiens
acaccagggcccagcgcgcgctctgcttcccggcgctgccctctgggactccgcaggcggcggctgtcacggggctggagctgtcaggtttccagcccctccgccccgcagggctgggcctc

SEQ ID NO: 265747 - DNA, 122 bp, Homo sapiens
agagtctagtaactttgaacttgacttttgcatgttttgcatattctgaacagctattgccgtgattaaaacaatcaacagcactgcttccccagcccatactttctgtctgagaatagagt

SEQ ID NO: 265748 - DNA, 122 bp, Homo sapiens
gctgtgtttagcgtgttccccaagtgtgggaggccaggagcaggggtgggttgtggaatccgggatgccacggttggaaaggcccctacaagacccaactcagcagcccttaacccctcatt

SEQ ID NO: 265749 - DNA, 122 bp, Homo sapiens
ccttcctgcatgtccttttgtcaccagaacccggggaccagcaggacccaaagctccctgcgggatcagctgggtctgggaatcactgtcctgggcccatttggacttttcggatgaggccg

SEQ ID NO: 265750 - DNA, 122 bp, Homo sapiens
tctctcaatccggtagtctcattgttcagcccaccctccccgcataactggccataactacgatccttgtctcagcaatcgtagttagggaactataagttatagttaagtgcgtgttttgt

SEQ ID NO: 265751 - DNA, 122 bp, Homo sapiens
ttctactgctctcttagtccctctctctgtctcctgatccctttggcccacacgatcacacgagggtttggagtaagacacctgcatctcggagaagcgcattttcccagagctggagctgg

SEQ ID NO: 265752 - DNA, 122 bp, Homo sapiens
cccgccctaggaacctcacctctcgaagccccacctccccgaggccctcccctcttgtcccgtcccactcacctgcctcctggacgtctccccagccggtggcccagcaggcggtgccgtgc

SEQ ID NO: 265753 - DNA, 122 bp, Homo sapiens
aggaagcccacctgtaaccacttagctgacatgtccaactatgggtgaacaggaaataagcgacattcacctaggctgtttattggaatctgactagcattatttgatttggcatactttac

SEQ ID NO: 265754 - DNA, 122 bp, Homo sapiens
gtaccaacccccattagacaatgaaccatccatgatcacgaactgtgtcccttccatcttcgtcagctttaggagcattttttttcccaatggaactccacctatgattactaaccattccc

SEQ ID NO: 265755 - DNA, 122 bp, Homo sapiens
atagccaggggtttgcgtgtagactgagagttggactctgaactgggggtgaggcaggcacgtggacagaccaagctgggtgcgagcatgtaaagagcctcaacgatgggcttgaactccat

SEQ ID NO: 265756 - DNA, 122 bp, Homo sapiens
gcctcaagcgatcctcccgcctcagcctcccagagttctgggattaccggcgtgagccaccgcgcccggtcccaccatcaggatctaaatccaccctgggtgaccagaggtccagtcaggag

SEQ ID NO: 265757 - DNA, 122 bp, Homo sapiens
gtgggaccggtgaggtcttaggaggatgctcagggcctgcagtccaggtgcactgggacacgccggacctggatccgggcctaacacctactccctgggtgctgtggccacccctccggggg

SEQ ID NO: 265758 - DNA, 122 bp, Homo sapiens
aaggctgtgggaagggtgtcagatcctgtgaagaatggcaaaacagcctgacctgagaaacgtgactgagaagcattggaaggaatgtagctttaaaatgatctttctgtccttttcctaga

SEQ ID NO: 265759 - DNA, 122 bp, Homo sapiens
ctattcacacaagagcaaggtgcatgtgtgcacacacgagcccaaatatgtgtttgcctgcgtgtttgtgagcatgcgtgtatggtgcacatgtgcacgcatgggtgggtggagcgtggggg

SEQ ID NO: 265760 - DNA, 122 bp, Homo sapiens
ttttctactatcctagatcctactttactactgttcctaattttcaacatccaaaagccacgcatataatatacacatttaaagaatgaccacattaccaggctgccagaaagtttggggcc

SEQ ID NO: 265761 - DNA, 122 bp, Homo sapiens
ctgctggctcaggtatctctctctctctgagaagaaggaaaagagaagcgaggctgggggcgagaggcaccttcacatctaaattcgtaccctggaaaactggccccagccattagctgggg

SEQ ID NO: 265762 - DNA, 122 bp, Homo sapiens
aggggatcaaagggaggaggaacgcccgccctactgccaggcagagtaacgcccccatcacggcgggagtaacagtcaccatcagagggaccttctgagggccctgcatgtgggacacaact

SEQ ID NO: 265763 - DNA, 122 bp, Homo sapiens
tcttaggcattgccaggaattcagaattggtttataatattgtcgcttaataagaaaatgcgttcattggcaggatataaaatttatgggcttcaaatggatttctgtttgtagttttagcc

SEQ ID NO: 265764 - DNA, 122 bp, Homo sapiens
tgaactcctgaccacaagtgatccacctgcctcagcctcccaaagtgctggtattacaggcgtgagccaccgtggccagctctcaggtggcagttaaccgtcttttgaggcccttggtacag

SEQ ID NO: 265765 - DNA, 122 bp, Homo sapiens
gaacaccgctggagatggcgggggggaggggggcgaatttggaggcgggacccgaactgccggccaaggaccaagggctggcctcgcccttcgctcccactgggcaccgttctcgccgcggg

SEQ ID NO: 265766 - DNA, 122 bp, Homo sapiens
attagctttagaaagtaacagcaccggcttacgtacaggacagcgctgtggattcactatcgccctgaccaagtcacgccgaccaggccaacattcagaattcctgggacatgcatattatt

SEQ ID NO: 265767 - DNA, 122 bp, Homo sapiens
agtgaatgagtgcttcttaatcctaaaaacacaatggctgaattatctttctccatgtggcgctgaatcacccatctggtttggagctagagttgcttcctggtgagagaggaagcaactct

SEQ ID NO: 265768 - DNA, 122 bp, Homo sapiens
aatgactcagagtctccccgctctgaaatactgaagtatttattggtcttagggtattctcgggaaggtgacagtgaggggttcttcaaaggagaacagaggataaaaggctcaatgaaagg

SEQ ID NO: 265769 - DNA, 122 bp, Homo sapiens
ctgcactgaagactcggaggggttgagccgctggagccacgcaaattcagacacctcttccgccccaggtcactctactcgcccacgctgcctgccacacccatccggttgtgcgggacact

SEQ ID NO: 265770 - DNA, 122 bp, Homo sapiens
gcagctccgctccaccccgcctgccagcaacaggaagccctggtgagaccaaaggctcagcggtgccaccagctcatccggagattattctgccttggtctgggctgtagcgacgctggcaa

SEQ ID NO: 265771 - DNA, 122 bp, Homo sapiens
ccagaacgtgtctggacacctgctgcgccaccagagaactaactcaacaagtgtgaagggcgtccacatgggggacttgacgttgagggcgcggcaaccaagtttatccgcatgctctcatt

SEQ ID NO: 265772 - DNA, 122 bp, Homo sapiens
gaataggtaatgaatacaacttttaagaacaattcataagtcaagtacagttcaaggccacgaatcaaattgagcagttcctctgaaatgtgtgtaagtcatgatgctaaagaagactgagg

SEQ ID NO: 265773 - DNA, 122 bp, Homo sapiens
tggcctgctcaggggcccgggaaagagtcagcgctgcacagtcaggcacggggaccctcgcgtgtgagtccacggccttcagaggggtcaggtgggaggacagagtttgcttctgaacgacc

SEQ ID NO: 265774 - DNA, 122 bp, Homo sapiens
caaaagcacttcccaggacaggacggtgaaggcacaaagcaaggtccgcacaaaagcacacgcccctctcagagctccgcgcgtgcgcacaccgactgtgactctcagcagccggcttgcgg

SEQ ID NO: 265775 - DNA, 122 bp, Homo sapiens
gctaggactgtgactcattcatccatttattcagcattgtttttgagccaggtcccatgccgggcacttagggaagtgttggtgaacaagcccagctcctgtgctccaggggctcctattgg

SEQ ID NO: 265776 - DNA, 122 bp, Homo sapiens
aaatgaattggtcatcaaaaattagactttcctctcacctgtgcagctggctctgtcacgcggcctctgctgctcaccaccagcacatacctggcccaggagtggctgccagtcaatgcgca

SEQ ID NO: 265777 - DNA, 122 bp, Homo sapiens
ggaacgcagaagggggcgtggcctgaggagcgcaccaactgcgtgggggggggggaggtgcggtgaccacgtgacctccgctgagctttcgccagtgcctgcggccctcggcggcctagtac

SEQ ID NO: 265778 - DNA, 122 bp, Homo sapiens
cgaggtgggcgactggctccctggcaccaggctgccccaccacaattctttattgcccagcgccagtgcccaattgcatgaatccccagggctgcaggcagcgtgaggggtgcgaatgggac

SEQ ID NO: 265779 - DNA, 122 bp, Homo sapiens
ttaaaattcgcttccttcatttggggtgtactgagccccttccccagaaaggagcgcttgcgggaagtctggcacaggtgactagggctgtgcggtcaagtaagtgcacttctcccacgggg

SEQ ID NO: 265780 - DNA, 122 bp, Homo sapiens
tacgcaggcacaggcagctcagggccgggagcgaggcccgtctcagcaggcggtgtcagccgcggagtgggtaggtcctctgaggacgatcacacctgtgggcaagagcacacccgggctct

SEQ ID NO: 265781 - DNA, 122 bp, Homo sapiens
gactgcgtagacagggtcgacatctgatgacaaattctcatctgccaattagagcaaggtcggggcgtgtcaccaacctcagtgccaggcggagcagaaggaacaacacgactatttcttgg

SEQ ID NO: 265782 - DNA, 122 bp, Homo sapiens
taggtttatgagcaagttctgactctttactctgcataactgattttatttccttttgcacgcagtacatgttttacttagttgtgtccaatcccaaagtcccctcccttttttttaaaaaa

SEQ ID NO: 265783 - DNA, 122 bp, Homo sapiens
cacatagcaaatgagtgacagtctctacttacagacaaagtgagacgtcaggcattgagacgtgagtgtggcttgtatttctggtcctcccctgcttcactgctttcattttactcttatcg

SEQ ID NO: 265784 - DNA, 122 bp, Homo sapiens
aaaatcagagtaatagtgcagaagtgaagtggaggcatccagcctactttattccaaaggcgggatgcacatgcacacaggcaagctggtgttttcaaaaaggactctaaaccaggacagca

SEQ ID NO: 265785 - DNA, 122 bp, Homo sapiens
ggaaggaggcccggcgggctgtcccactgcgaacgatcggaggggggaagccagactggacgagcccaaagataaataaaggggttggctttactttttgaaagtcttgggaagaaaaaaga

SEQ ID NO: 265786 - DNA, 122 bp, Homo sapiens
aaggtggggcatggatttggcagagacagaaaagggttgaaacagccacagagaaagagacgttggcccagttgcagggatgtttaaacagcatgtttagggaacgcaggaggcctcagtct

SEQ ID NO: 265787 - DNA, 122 bp, Homo sapiens
atgttcattgcttccggttttgaggacaggatattgtagggaacttgatatgatcaataacgcttgtctgccttacacagaccttagccagggatcagcctaatcttgaagaatcattcaaa

SEQ ID NO: 265788 - DNA, 122 bp, Homo sapiens
atttgcattttagaagcatatttgaattccacatacattgcatctcacaccaagacatcacgttcattagacagcttcatctctaatcaaagcagaaggccttgaacaaataattagccttg

SEQ ID NO: 265789 - DNA, 122 bp, Homo sapiens
aggaggcgaccacctacaccttctcccgggcgcccagccccaccaagtcgcaggaccagacgggctcaggctggaacttctgctctatcccctggtgcttgttttgggccacggtcctgctg

SEQ ID NO: 265790 - DNA, 122 bp, Homo sapiens
tttatgattcaataacccattcttacagaaattaattgtaagcctgggagcggtggctcacgcctgttatcccagcgctttgggaggctaaggcgggaggatcgcttgaggccaagagttcg

SEQ ID NO: 265791 - DNA, 122 bp, Homo sapiens
ttaaatgatgccatgcctgtgcgctgtcctgcggggacacaccttgcctaggtgtgtctccgctgctggatttgttggtatttttaaatgacgccacacctgcgcactgtcctgaggggacg

SEQ ID NO: 265792 - DNA, 122 bp, Homo sapiens
tgttacgcactgtttgcaatggcgcccggtattcgtagtttctgcgaggggagccgccagcgcgccaaccctcgctgaggaggaagaaaactacatttcccacagaggcacgggggcgaaca

SEQ ID NO: 265793 - DNA, 122 bp, Homo sapiens
cgaaaggcaaggaaggaccggctgcgacacgaggaagaaggcccctcggcctcagcagagcgctatcctccactggttccccgggttccccggcttgctaccgggctgctccgtgcatcttt

SEQ ID NO: 265794 - DNA, 122 bp, Homo sapiens
cacgccccctgctggtcatctggggcagcgcggggccctcggcgctcgctcactgtttagcggtggccgcgtgccccctcctggctgtctggttgaattaattaaattcagatcgttcaatg

SEQ ID NO: 265795 - DNA, 122 bp, Homo sapiens
gcggcaagacggcttgaatggagaggtcgagtcacctgtgtggtgtggaaggaaaaaaaacggcacggcaggggtccccccccatgggcaagagtaccccccaaccgcatttgcgtggggcc

SEQ ID NO: 265796 - DNA, 122 bp, Homo sapiens
ggacctctccggttcacaggcgcgtggctccggcccgcggattttcttagctgggtgacacgatgttgccagcggcagcccgggactcctgccgacatcatatctttagctggttattatgt

SEQ ID NO: 265797 - DNA, 122 bp, Homo sapiens
acagaaagcacatggcagagcccgtgcccgtcagctgcaggaacctcgggaccagaggctcgtaggaacctctccctggacgtgccacgcccgccggcccctgcctcgaccccccgtcaccg

SEQ ID NO: 265798 - DNA, 122 bp, Homo sapiens
gccgagatgatccagaagctggtggacgtcaccacggcacaggtgtaaccgtccatgttccgtgtgagcagagtccctaccaacgggcaggtctgcatccggggagaatgcagctgcttctg

SEQ ID NO: 265799 - DNA, 122 bp, Homo sapiens
ccaggggctgcagcccgcacccggacccaggcccatttaaagccccacagcgtcgggccacgatcaatatatcagcccgaagctagctgcctccttctggaagtctttgggtattggaaata

SEQ ID NO: 265800 - DNA, 122 bp, Homo sapiens
ttcagcaacagtcaactgttgtcatgaggaaatgcaaatcttctcatttttcaagcaaaccggaaatccagtgtttaagtccattctctgctgctataacagaataccacagactgggtagt

SEQ ID NO: 265801 - DNA, 122 bp, Homo sapiens
ttgaatgtattttgtttaagattgtcataaatgatcaaaatacctagtgtggcattgttgcgtcacttattaagagtggtggagtggcctgggttcgatgaggtaagctgggctataatgac

SEQ ID NO: 265802 - DNA, 122 bp, Homo sapiens
aatgaatgacttaagtaagttccttagaatattatttttcctactgaaagttaccacatgcgtcgttgtttatacagtaataggaacaagaaaaaagtcacctaagctcaccctcatcaatt

SEQ ID NO: 265803 - DNA, 122 bp, Homo sapiens
acaaggaaggagacccagacataggcaacaacacggacgaaacttgaggacatggtgctccgtgaaacaagccagtcacatcagaatgggtattgtatgagtccatttatacgaggtcctct

SEQ ID NO: 265804 - DNA, 122 bp, Homo sapiens
acttcctaagtgggtttagaaaggccttccaacctgatgcacgtgacccctgcagactcacgccagccactgccacccccacaacccttgcgccctggccccaccctctgcaggtccccaga

SEQ ID NO: 265805 - DNA, 122 bp, Homo sapiens
ccccccttcccccttcccccttcccccttcccccttcccctcccccatctccagcctggccgctccaggaagtgagcaccgtttatcccccaccccaggcggcccgactcctcccagaagga

SEQ ID NO: 265806 - DNA, 122 bp, Homo sapiens
ggggcacaggacagccgagctgtgcgacagcccgctgggcctgcgccccagggcctccggcgacacttggagtccgcagctgagtcactgactctcacccgggctcccccgcttccgcccgg

SEQ ID NO: 265807 - DNA, 122 bp, Homo sapiens
cgcaatcccttctccccacagccagccctcgccaagcaagcagcaggatgtttgcagtgtcgcgcccagggctctgagactgagcctgccatccactcgcacgcctttctttcagggctttt

SEQ ID NO: 265808 - DNA, 122 bp, Homo sapiens
aggaacagcggcttctcaaagtggcccaggaccctgcaagagccagagggcactgtgggacgcccttccaggggaggaggacggcctctccaagagtctcgagagcacacggtcactgaccc

SEQ ID NO: 265809 - DNA, 122 bp, Homo sapiens
gacttgggaccctggcttcacctggcgggagccgctgcacctccgtttgcccacccgtgacgtggggctgttgaggtcagctcaccgatcagcctctgtcttgggcctgctttgtccgcggt

SEQ ID NO: 265810 - DNA, 122 bp, Homo sapiens
gtgagggcctgccagccagtctttggagtctgcacctgatgctgggtgtagcttattttccgcggcaggtggaataggagtcgactctttgagctttttgtctttaaatggagggtccagcc

SEQ ID NO: 265811 - DNA, 122 bp, Homo sapiens
aggccagctgaagtcagtaaattccattcagcaatataggtagcagctgccccctgaagacgtcaccggccgagttcatcagcaccatggggagtgccctgtggatttccagagcccagcct

SEQ ID NO: 265812 - DNA, 122 bp, Homo sapiens
ttccatggccgaagaggcagcggaccaggttgggcgggcggccctggcctggctctgccccgctgggcggcgccggggattcggcggcgaagtgatgagggccctagttgcttctcgcccag

SEQ ID NO: 265813 - DNA, 122 bp, Homo sapiens
ctcaaaacttcattgtaagtcatgtgtcttgtttgccttttcattggtaactgtccctcacgattgaggctatgagttcaataaagagagatcttgctgtctttgttcagcattatgtgtgt

SEQ ID NO: 265814 - DNA, 122 bp, Homo sapiens
gcggctgaggccaccccggcggcggctggagagcgaggaggagcgggtggccccgcgctgcgcccgccctcgcctcacctggcgcaggtaggtgtggccgcgtcccctacccggccgggact

SEQ ID NO: 265815 - DNA, 122 bp, Homo sapiens
agcgcgctctctgtttctctgcagccccgaagctcgcgaatgtagcaggcgccccaagctcggtcctcaagaagccatggcggaatccaggggccgtctgtacctttggatgtgcttggctg

SEQ ID NO: 265816 - DNA, 122 bp, Homo sapiens
agtgtcctcatgcatctgtgactgtgactccatctccccagcttcccggaaggccctgagcggctccatgccatcaaggagcaactgatccaggagggcctcctagatcgctgcgtgtcctt

SEQ ID NO: 265817 - DNA, 122 bp, Homo sapiens
gaaatacttcagggcgcattctggggccggcgattgcagtgcgagctctagggtgttgctcgcagtaagatgagtactctaaacggaggccccaaaggtaggcggagggctaggttgcaaca

SEQ ID NO: 265818 - DNA, 122 bp, Homo sapiens
aaggaggagtgagggaaagagctgctcagccactgccccagagctggccatctggggaggcgcactcaggaccaaggcagaggccaagatgtgttagggtggggtgagcagctaggagggct

SEQ ID NO: 265819 - DNA, 122 bp, Homo sapiens
aatgtgtgtgggtgtgaaaatgtgtatgtgtgtatatgtgtgcgagtgtgcgtgtgtgcgcgcgctgtacctctccctgcgtggtgaagccatcagattgtgcgctcactgatccctgttgt

SEQ ID NO: 265820 - DNA, 122 bp, Homo sapiens
aggtgttgttgccagaggcgatgccctctcttcagctggcagaagcgccagcggcaggagcgtgtcgagggaggttttgtgtctcttctccccatcctcggcctgcttaccgaggcccgctc

SEQ ID NO: 265821 - DNA, 122 bp, Homo sapiens
gaccgggagcccctacgtcgccgccccacgccactcaccatccaccgcttccccggggggcgaggctccaaaacacatcggctcatggctctactcagccgctgtccggcgcccaaaaagcc

SEQ ID NO: 265822 - DNA, 122 bp, Homo sapiens
gcgactggcctgagcactgccgtgtatcagcgccccctgacgccgcgcactcccgcccgacggaagaggaagacaagtaagcctgaagggatggactctcccgccagccacaggctgggacc

SEQ ID NO: 265823 - DNA, 122 bp, Homo sapiens
caaccaccgtcatacccgcagccggggctccctccgctaaccacgcttggagaccccaatcggggacagaggtgggagtcagaccccccctggcctgcactgccgtttccctcgattcttgc

SEQ ID NO: 265824 - DNA, 122 bp, Homo sapiens
ggagggacggcggagacctggcgcgcttcctccggttgccacgaggaatttatggggtggcggcggccagcgctcagacaccccccgggtcccggtggggaggagctcggggcaggaggact

SEQ ID NO: 265825 - DNA, 122 bp, Homo sapiens
atccacaggccacggctgaaggtagagccggatggccacacggcacaggtgcttgaggggcgggggatagctctccagctgcctcaaggagaagtggagggcctggatcttttccgccaggc

SEQ ID NO: 265826 - DNA, 122 bp, Homo sapiens
ctgtcacacacatatgggcacataacagagtggacacaaacacacacacacacatttgcacgcacgcacacattaacacccagcgaaagtctgggtgcagtggctcatgcctgaaagccagc

SEQ ID NO: 265827 - DNA, 122 bp, Homo sapiens
tagacactcacaggccccatcccaggagggcaggctctgtggggaagtggatcacagtcccgagagcctcgcaatcctgaaatatcaaaacccctcaaatctaaaatcccaaaaaatataat

SEQ ID NO: 265828 - DNA, 122 bp, Homo sapiens
ctagcaccttctgggtggacttcttcacgtccccgtgcggcttcttggagaacatcctgtcgctgccactgccactgccactgccacagccggctcccagccgggtcccggcggcagaaagt

SEQ ID NO: 265829 - DNA, 122 bp, Homo sapiens
cccggtcccctctcccagagtatacggagcctgaacctccccacttcccccaactctgttcgcggatagggtctagttgcctgctctcggacatccgttcagcagacactacctcttcgtca

SEQ ID NO: 265830 - DNA, 122 bp, Homo sapiens
atcacagcctggggtccgtctgtcctgacatggcatcctggggtccgtctgtcctgacgtcgcacccgggggtccgtctgtcctgacgtcgcatcctggggtccgtctgtcctgacgtcgca

SEQ ID NO: 265831 - DNA, 122 bp, Homo sapiens
agcggacgcaccgaactccaggctccaagcacatccacccatggtggctttattcagtcacgtccccacgcccacggctccctccaccaggcagacagaggggaggccaccccactgcaaag

SEQ ID NO: 265832 - DNA, 122 bp, Homo sapiens
aggaaagggaactccctgatcccttgcacttcccgagtaaggcaatgcctcgccctccttcggctcacgcacggtgcgctgcacccactgtcatgcgcccactgtctggcactccctagtga

SEQ ID NO: 265833 - DNA, 122 bp, Homo sapiens
ggccggtgctgtctctaacagacagagtgtggggaggtgaccctcagcctaaccaccaatcgtctgctgtcgcccccctcccagcaccaggtcgaagtctgcacactcacaagactgctcca

SEQ ID NO: 265834 - DNA, 122 bp, Homo sapiens
ctcttggcagccaccagcagaccacattctgctgtgcggatcgggcaggacaatgccgcgcggcctctgaatggacgctgccaccaacggggccccattcacggcgttgggaaccgggcgca

SEQ ID NO: 265835 - DNA, 122 bp, Homo sapiens
taaacttcctgaaaaaaaggatgacaggtaaggattaggcagagattaaatctgagtgatcgatcctattcagttaatgggttggcaagtcctggaatgagatacagccatctaaaaattaa

SEQ ID NO: 265836 - DNA, 122 bp, Homo sapiens
ttgttgcctgatgaggggaatcatacagtttggaagaggggagagtgtccctttttaagacgtcccctagagtggggtggtcattcttcgggtctgagctaacttgtttttctcgaatgttg

SEQ ID NO: 265837 - DNA, 122 bp, Homo sapiens
aggtgggcgggaccccgcctccgggcctggcgcaacgctgagcagctggcgcgtcccgcgcggccccagttctgcgcagcttcccgaggctccgcaccagccgcgcttctgtccgcctgcag

SEQ ID NO: 265838 - DNA, 122 bp, Homo sapiens
ggggagcacgggagaagcttctctgctccgggagcaggagcagcggcgccagtgtcctcccggcctctgagcgcttcttcggttagaccttctctgctggtcagtttggatagggaagtatt

SEQ ID NO: 265839 - DNA, 122 bp, Homo sapiens
ccctggagaggttcaactccctgaactggctcttgctctgagaaccccagcaagtgtctccggggttgaggctcccccttgttcatccgaggagagatgggagctgaaggaggctcactgat

SEQ ID NO: 265840 - DNA, 122 bp, Homo sapiens
ggccttcacctaagacctctgcagcagacctggacagacaggcccctcccgcctgtccatcgctctagctgctaatacagccctggctgtggaatccttcaccgtctcagctggtatcagcc

SEQ ID NO: 265841 - DNA, 122 bp, Homo sapiens
ctgctgcagaaggcggaggatggtgttgttttgcagttgtggcacatactgctgcaattccggttccttttcaggttgttccctaacccaatttagaacctataaaatccattaaattgaaa

SEQ ID NO: 265842 - DNA, 122 bp, Homo sapiens
aggggaggcaagtgcaccaaatgcaacaatggcccatgggccgttccctccaaagcatggcgggagtgctaactggccgaccgcacatcctaacagctttccacactgagcacacagggcaa

SEQ ID NO: 265843 - DNA, 122 bp, Homo sapiens
gtctctgtctacaattccatcctattatgtcaatcagtggacttggctcttaagctccaccgctgcttttctttcagaaacacctgggaagaagcatcatattacctatcttggtttaccgt

SEQ ID NO: 265844 - DNA, 122 bp, Homo sapiens
cagcctgcagacacatctgatgccagcttggatgtcagagactacaaggtcattgtcacacgtgcatggtggtgctaccgcttgagccctttgtttatttttattgttctactgctaccggt

SEQ ID NO: 265845 - DNA, 122 bp, Homo sapiens
gaggccacgcagggcgattcctgcaagtgtcgggagggtggccggggcgcggggaggggacggcttggggggaagtttaagacacgcccacgtaagggacccaaaataaccgacacacagag

SEQ ID NO: 265846 - DNA, 122 bp, Homo sapiens
aggtttaaacggtccactacgaaataaatagagaaggaaaagttatcagctggtaaatatcgtagaaggtagagcggtccagggactcacaggtctcactaaagaaaagtctagcgtaggtt

SEQ ID NO: 265847 - DNA, 122 bp, Homo sapiens
agtttgggggcgtggcttagagtggggtaccgtgggactgggcctgtgggagcctgggggcgtggcttagagtggggcaccctgggactggaccccgcaggtgcttgggggcgtagcctgga

SEQ ID NO: 265848 - DNA, 122 bp, Homo sapiens
ccaagatacggagacaggaacctcccaactctgtcccagctcctcacactgtttgttgcccgctcccctgccgaggtcagggtgtccctcggccagcggctcctcctgcccagccttcccct

SEQ ID NO: 265849 - DNA, 122 bp, Homo sapiens
attggcttattattttagaatgagtttgcataccatcccagtgagaaagtttttcttctccgattagatctttataaacaatttcttcttctttttgcttagaattttgcttccttttagta

SEQ ID NO: 265850 - DNA, 122 bp, Homo sapiens
agcaaagaccttcaatgcaacactccctgtatatgtgcaagtctgcatgagacgtcctcccgcaggtgcaactcccagccaatgaaccagaaacagatgaaagacaaaaggggaaagtcgag

SEQ ID NO: 265851 - DNA, 122 bp, Homo sapiens
gggggtgtgggcttgaacctgacagcgcgcggccctaactgggctcagccccgctgggagcgtagggttggggttgagcagcttttgcccaaagcgctaaagctgaaacccggcgcccggtt

SEQ ID NO: 265852 - DNA, 122 bp, Homo sapiens
ctgctctgccgccgccgccgccgcctgcagcactccactgccgctcccacccaggctccgcgctctgctccagccaaacttctgcagaccatgtgcagccgaggcgaggaaacttctctcca

SEQ ID NO: 265853 - DNA, 122 bp, Homo sapiens
tttataataataataattattttacagacagggtcttgctctgtcacccaggctggagtacggtggcgcaatcaagactcactacagactcactacagcctcaacctcctggacttaagcaa

SEQ ID NO: 265854 - DNA, 122 bp, Homo sapiens
gagagacatccaaaactggctcgacccctaaggtccaaagccgatgatctagtggggaaacgccagctgggaaaagctggaggatcaattcttccaggaagcctccccacctccttccgttc

SEQ ID NO: 265855 - DNA, 122 bp, Homo sapiens
tgtgaaaaaaaggtgaggattttccgtctcaccctaaatgggacaccctaagtggggcatcggtttttcctcctccccagaacttcctggtgttttcaggcaccacaggctccttcctgcca

SEQ ID NO: 265856 - DNA, 122 bp, Homo sapiens
ccgggttgtcgaagctcacgaagcctggcgagacacgagggacgagggcctgggtttccacggggccgcccggggcgctgccggcggggaggggtcgggggacaggggggcggggcgggcct

SEQ ID NO: 265857 - DNA, 122 bp, Homo sapiens
ccggctgcgggtttcccctcccccgccaggcgagctctgcgcggcggcttcgcgggcacacgccttcccataccttacatggacaaatgcgtgcaggcaaagtcaggaattcaggcccctga

SEQ ID NO: 265858 - DNA, 122 bp, Homo sapiens
taacaatggggaagtggttttcaaattgggtaatcggtagaggctgaaagaattttgaggcgcatgatagaaaagcctctattgtcttgaagagccttggtagaagtatgggcattaaaggt

SEQ ID NO: 265859 - DNA, 122 bp, Homo sapiens
ccgctgctcgcccatcgctgggaccaggaacggggacaccagcgacggactcttcctcgccggggtgtctacctcgtgccaaccaactcttcgagccccgccgccctccctcgtgggtctga

SEQ ID NO: 265860 - DNA, 122 bp, Homo sapiens
gctacggcgtcaggccgtgttctcccaggatatctggggaaatggggtcccctgagatatcgcgggcgaagagttgggcatccagggtgattagggggcagtcgaggacctcacggggtgtt

SEQ ID NO: 265861 - DNA, 122 bp, Homo sapiens
cagagggcggcaccctgccctctgattggtccaaggaaggctggggggcaggacgggaggcgaaacccctggaatattcccgacctggcagcctcatcgagcttggtgattggctcagaagg

SEQ ID NO: 265862 - DNA, 122 bp, Homo sapiens
tatgactcgcaaggaagtaaaaggaaagggcagcttgcccgcacccaaaatggcggtcggcgctctgcacgacagcgcctgcgcagggataagcgttctgtgacaccaattcccctggagtg

SEQ ID NO: 265863 - DNA, 122 bp, Homo sapiens
tcctggattctagtagatacagaaagtcgacttctctggggctcagagaatcttgccacccgaccctgggtcaactctcttcatggccacttgacacccacagctccccactcagaggcccc

SEQ ID NO: 265864 - DNA, 122 bp, Homo sapiens
ctcttccttgctgtcgtttcagactgtgatccctgcctacaagagacagtggctgggattcgggaagtactttaagctcacgtgacctacagccctgagggagtggggcgcttgaagacacg

SEQ ID NO: 265865 - DNA, 122 bp, Homo sapiens
gacatgtggttgcttaagttttaatgaactaaaatccaaaatccagctcctcggtagccccggccacatttcaagtgctccacagccacgtgtggccggtggctcccatcctggaaagcaga

SEQ ID NO: 265866 - DNA, 122 bp, Homo sapiens
ttaggaagaccaaaacagggacttctacagtagcagcttaatcagcagatgctgggtggtcgcctctgcacatggcctggggggcggggcgccttaccgcgtcacactgggtggatgggcct

SEQ ID NO: 265867 - DNA, 122 bp, Homo sapiens
tgagtcttaagcatctagggggtaacagctataaaagagcttacaaaagcatcaaagagccgagttacagggtaatgaaaggaaaatgccttattaagttgtgcacatggccaatatttaca

SEQ ID NO: 265868 - DNA, 122 bp, Homo sapiens
atctctgagagccatggagggagccacacccctggtgacttcatggtgctggatgggagacgctagcggcatccttcagggccaagtttgataaataccaccgccatcattctgctcatcct

SEQ ID NO: 265869 - DNA, 122 bp, Homo sapiens
ctgcctcgcgtccgggtctgtttatatagcgtctggaggccgggaggcattgcccacccccgccaggcggcccgccctcccctcctgggctccgggctgccgcacgtggcagacaccagcga

SEQ ID NO: 265870 - DNA, 122 bp, Homo sapiens
ttttgagatcagcatgagagcagaaatgcaggcttctcttggaagtagttcctgatgtgacgattgaaagaacgtaggcaagggtttttccagcatcaagtgttatttttgtagaaagaatt

SEQ ID NO: 265871 - DNA, 122 bp, Homo sapiens
ctcatgaagctgtgcgggcgagtggttttcccgccagtggagtgcgggccagtggttacccgcaagtagaggacagaaagatcaaagagtgggcaacccgaggtctcccgaccctttagaaa

SEQ ID NO: 265872 - DNA, 122 bp, Homo sapiens
attcatgtgcttttcccgcaagctatatcctcagtgcctgttcatgcagcactgtcttcccgtttccacccataacctagaacagttacactttgagtgacagaaacaacaatgaaaaccaa

SEQ ID NO: 265873 - DNA, 122 bp, Homo sapiens
gaatcccggccgtagagggacagtggataggtgcccgaggcctacagctggcctggggctcgtgtctgggcttcggacgttggggcccggtggcccaccctttccgtagttgtcccaaatgg

SEQ ID NO: 265874 - DNA, 122 bp, Homo sapiens
ccgcttaatttaggatagtgattaagatcccagacttctaaaccaagttgtctgtttaaacggtgagtttacctcttgccacctgtgtcatcttggaccaaatggtgcctcggtttacttgc

SEQ ID NO: 265875 - DNA, 122 bp, Homo sapiens
gctcttgaaactgaacgttttgcaaaaggcccctttcgaaatttgaaaccctgtggccaccggccagagctgagtctggcttgtggggttcgcgggggcctcctgaaagaagggaaggaaag

SEQ ID NO: 265876 - DNA, 122 bp, Homo sapiens
ggccctcacccatggagattataaatgtccttagccggcctgtctcacttgttcagaaaccggaaaagtccgtggtctgcagtgtggaaaagggcacccggacctcttacttccagcctcta

SEQ ID NO: 265877 - DNA, 122 bp, Homo sapiens
gggacgcctcccgcagaaccacctgtcagagccaagcaacagtccccgccccggagcctccgagctcctgctcgaaggcaatgacagcaggagaccccgctccctcggggttctcgcggcca

SEQ ID NO: 265878 - DNA, 122 bp, Homo sapiens
gcgcggggactgctgggaaacgtagtcccgtcatgtcccgctttgacgctgcggagaaagcggtgtagggagaggcttgggcttcggttatcatagaaacagaggccggctacacctaaaag

SEQ ID NO: 265879 - DNA, 122 bp, Homo sapiens
ctcggcggctcctccagcctccgcccgccccgccttcttgggaccccgccccgcacaggccgggcccggcttctattgctccgactcgccgtcacgctgaagtctctttcttcaattaggtt

SEQ ID NO: 265880 - DNA, 122 bp, Homo sapiens
ttctcccagtctctcttcccgctgggaacagaagtgtccagtaaacccacctgcattccacgtgtcctgtggccgcctccagtggtgagtctgtgaggccagagaagagaagctatgaccgt

SEQ ID NO: 265881 - DNA, 122 bp, Homo sapiens
cccccacaccctaccgcccgccttctgttggctgctgaccctgggggcagcccagctcaacgtcgtcgcaccaggtaataggagttgaagggctaaggagcctcacagctataaaagaggat

SEQ ID NO: 265882 - DNA, 122 bp, Homo sapiens
cggcaggcagccaccccggtacccgaagtgtgtccgcgtcttcagggccctgtagccccgcggccccacacccgcctccaccgccccggttccagccccaccaaggcccttggggagccccg

SEQ ID NO: 265883 - DNA, 122 bp, Homo sapiens
ggcgcggagggcagcggatctctggagcccgcctcccgggcccgccgccaccggcgcttccgccgcaactttcccagccacctcttggccgccgcgtggctcccgaccccgacttggacccg

SEQ ID NO: 265884 - DNA, 122 bp, Homo sapiens
cccagcgcaccctccacagctgctggccgggtgctaacctcctcactgcccagggctggccgcagcagccggctgttccgagtgtggggcctgctgagcccacatccacccggaactcgcgc

SEQ ID NO: 265885 - DNA, 122 bp, Homo sapiens
ttcctaaaaatggtcgttaaagcagcctaggacttaggtcaattgcggtggtcacttgaccgcctgtgaggaggcggcgcgtggggtggatcggactgggcgtggcgggggctcaggaagga

SEQ ID NO: 265886 - DNA, 122 bp, Homo sapiens
ggcactgtgcccctttcctgggtgtggacaacaggtcatagggaaaggggagggctctagcgggaaattcctttgtaaaccagtctgtgttcctgtcattttagatcgaacaccagggggac

SEQ ID NO: 265887 - DNA, 122 bp, Homo sapiens
tgtctggaagctttgtcatcttaattattctgataaaagcatctcttttcctcgtgagaacgccatgcccaatcctagagcttcaggggatggactggcaaaaaaaaatttatgaatgttgg

SEQ ID NO: 265888 - DNA, 122 bp, Homo sapiens
cccacccctcagaggagcgccgtgcgtgcgtctgtgtggaggattggcagctcctgcagtcggcccttggtcctatttggcgacgcctctgccttccccttaattatacagtcatgagccgc

SEQ ID NO: 265889 - DNA, 122 bp, Homo sapiens
aggcgggtgcccttgggacatagccctggtctttggggttgtgcggctcacacgacagcgcggagtatgaggccgaatctcatcctctagtcccaagcctctccactaccagggctgggtgg

SEQ ID NO: 265890 - DNA, 122 bp, Homo sapiens
taacgttgattaagacacatatcctagatctttcaaattccttgtacactgtattaagctcgtcctaacccgagagagccacgctttaaattcgactctcttgtttactttattatcaatca

SEQ ID NO: 265891 - DNA, 122 bp, Homo sapiens
gggcgcgctttgggacgttgctgagtggctactgcttgtgctttcttgcttccaagctggcggtaaaccttttaaattcagagtgattcaagggcataggcgtcggaattgtgatttcgtgc

SEQ ID NO: 265892 - DNA, 122 bp, Homo sapiens
ctgggggcctgtttgggagatgccacaagaaccttgccattggggggcccctttgggggacgacatagatattgctttggggccctggctgggtgatggatgacacagagcttgtctttggg

SEQ ID NO: 265893 - DNA, 122 bp, Homo sapiens
gcacaggccacggctgctcccccagggagaatggagggaaggaggggctttgctcaaacacgcctctctgctcctagccagcggggttatccaaggctccatggaggaggcggacaggcaac

SEQ ID NO: 265894 - DNA, 122 bp, Homo sapiens
ggagtggtcgagactgaggcggggtgggaggttcaggttcccggggcgccttccccaacccgccccgctttccccgtccctccacgcgcaccctgcctgtggtttccgtgcgcccccggcct

SEQ ID NO: 265895 - DNA, 122 bp, Homo sapiens
catcccgtgtggctctgcgaccgccacctcggtcaccacgcagagccatccccaccgtggcggccacgcagccattgtaaccctggaaaccagtaaatgcgtctccatggctgcaggcctgt

SEQ ID NO: 265896 - DNA, 122 bp, Homo sapiens
ggcatccttccagaggtgttccccattcaacggcagcctcttttcctgactgcccaggatcgaggagtccccaaggccagggcaggaggctggagggaggctgaataatcagctatggggtg

SEQ ID NO: 265897 - DNA, 122 bp, Homo sapiens
gaggccgaggctggcggatcactggcggctaggaggtggagaccagtccggccaacacagcgaaaccccgtccccaccaaaaaaacacgaaaaccagtcaggcgtggcggcgcgcgcctgca

SEQ ID NO: 265898 - DNA, 122 bp, Homo sapiens
ttcctcctgggtgggtgccggacagtgcctggggttggctcagggagcgggatgcagaaacgggttcagagaaaaagatgagtttagaaccggacctctggacggaaccgtgggcgaggggt

SEQ ID NO: 265899 - DNA, 122 bp, Homo sapiens
tctggatatcaaggcatccagtgactatggagcaggaacgaggccttcaagtcctgatggcgaatggccacttctgcacatcccctaaaaaccttatcttctaaagaccttcaacacattaa

SEQ ID NO: 265900 - DNA, 122 bp, Homo sapiens
tatttttagtagagacagggtttcaccatgttggccaggctggtctcaaactcttgacctcgtaatccacttgcctcagcaaaccaaagtgcttggattacaggtgtaagccaccacgcccg

SEQ ID NO: 265901 - DNA, 122 bp, Homo sapiens
ccacaatccaagaacctggattctgggcactgtgtcccggagcccagctcctcaggccagcgcctgtatcctgaggttttctatggcagtgctgggccttccagttctcaggtaggccccgc

SEQ ID NO: 265902 - DNA, 122 bp, Homo sapiens
ggacttaggtgtgaataatggcaacattttaacttaggtagcatctcacaatttccaaagcgcctttatttttattatttaatttgatgcttatattggctttgtgaggtagacctttataa

SEQ ID NO: 265903 - DNA, 122 bp, Homo sapiens
gcaggaatatttggaagcagtcctgaaaccataacttcacttgtgacacaatcccttttccgtaactctggccaaacagtctaactctctaaggaaccaagagtcaagcaacctcttcctct

SEQ ID NO: 265904 - DNA, 122 bp, Homo sapiens
tgcgcaaggccggctgcccagcctggctaatttgtgtcctttcctgaacacacagttcaccgaggatcgccaggcttggcagtctttgaaagaagactttctttccattttggcaactctct

SEQ ID NO: 265905 - DNA, 122 bp, Homo sapiens
acaggtgactgcgtttattacctggattgtaggggtgggggatggcttcacaggtgagtgcgtttattacctggattgtagggagggggacggcttcacaggtgtgtacacatgtttaaacc

SEQ ID NO: 265906 - DNA, 122 bp, Homo sapiens
aaaccctctctccacggttagggggtgggagggagttagagatcgggtgggggcttggcgcggtactgttgagggctctgcacccaactgagcagtaatacactcatccacatggacgcggg

SEQ ID NO: 265907 - DNA, 122 bp, Homo sapiens
gggatataacattttataatgcaacttgggcccataaaggccttaaaatcaccctgcggccgggcgcggtggctcactcctgtaatcctagcacttggggaggccaaggcagacggatcatg

SEQ ID NO: 265908 - DNA, 122 bp, Homo sapiens
ccgcaggggccccctccctgtcttcccggtgcgtgtggtgggtggggggggcatccgcctcgccctttgaaggccccagcagagacctccagctgtcagcccgcagcctgggaagggagggg

SEQ ID NO: 265909 - DNA, 122 bp, Homo sapiens
tgtggactctgggtggggaccagacacgtctgctggacgggggcgtggccgcactcgcttcgtcgccgctgcccccgcccactccgggagactctctcttggacggcaaggatggccccgtg

SEQ ID NO: 265910 - DNA, 122 bp, Homo sapiens
ttgtacctcttgcccttgtagaatttcctgaggttttctttgtgtgagtctggttaattacggtgagaacacgggcaatggaattgtggatgacacggatcttagagagcttggagaccgcg

SEQ ID NO: 265911 - DNA, 122 bp, Homo sapiens
caagaagttgtgcaagggtcggctaggcggtctccgggtgtgcaccccgccgctctcccgcgggccacatctctggttcggtgccccagctctgtgcaccccaggaaagtggagggagggag

SEQ ID NO: 265912 - DNA, 122 bp, Homo sapiens
cgagcagcgcacctcagctccggttgccgcgcggcatggtatttatctgtgggttcagtgcgcacagcgttgtccagtctcgaaaccaccctaaaccggcattaaaccccaaccaaaatccc

SEQ ID NO: 265913 - DNA, 122 bp, Homo sapiens
gtaacttacagcaaaaaaaattattcatgcttcttttcatatcacatgatggtggcaagacgagagaacatgcttgtctaacactgcttggttaagggtaaattctctgaagacaaagcatc

SEQ ID NO: 265914 - DNA, 122 bp, Homo sapiens
cttaggccactcctctagtccaggcctcatccattcattcagcaggtatctactgagccccggtgtaccaggcactcttgttggtccctgatatgcttcagtgaacgaggcaggcaaacccc

SEQ ID NO: 265915 - DNA, 122 bp, Homo sapiens
gggtggcgcggcgggggcggcaggacgctgccgggaatgggtgggcatctccacgaaccccgcaggcctcgccccagacccgggtccaatcccggccccacggcggggccaggtcccacgcg

SEQ ID NO: 265916 - DNA, 122 bp, Homo sapiens
acctcgattctccttcccggcccgatgcacgtcactctagggttctcagctgagttcgcccgcctagttctttggttcgcgtctccgcccgtgttgttttctgggtttccttctcgcccgcc

SEQ ID NO: 265917 - DNA, 122 bp, Homo sapiens
tcatcatgatgccagtggtatggccaggagtgtacttggacagcacggcctggatggccacgtacatggccgaggtgttgaaggtctcaaacatgatctgggtcatcttctttctattggct

SEQ ID NO: 265918 - DNA, 122 bp, Homo sapiens
ctctcgtggcgaactcggattgggccatatcaggccggggcgggtcccatcaaccaatagcggcgcggggctggcgggtggggcggggcctcgccggcgccgtcaagtagcctgggggacag

SEQ ID NO: 265919 - DNA, 122 bp, Homo sapiens
gggagcgccccaacgcggactcccagcctacgcgcgttcaccctggaccttcctcgcgaccgcgcctgagtcgcaccagcggcagagagcgatttcaccaagcatctaagagttctttagat

SEQ ID NO: 265920 - DNA, 122 bp, Homo sapiens
catcacctggccctccagctggtttcagcgggcagaatgaaaggtaatgtgcatctccaccgctgctccactcaagcgttcaggtgctcaagttccgctgtggggtggtggtggcaggcctc

SEQ ID NO: 265921 - DNA, 122 bp, Homo sapiens
gtgacgccccccacccgaatgcctcgctgggattggctcatttcttggttcagacctggacggtggccagaggaggacaagaggcttttacaccgaacggaggtgatgtggacgacaacgga

SEQ ID NO: 265922 - DNA, 122 bp, Homo sapiens
agatagcttggacgggaatcccatcggggagacaagctagatactcagccggagcagcagcggcgtctcaggctcgcgtccctcagctcggatgccacactcacctagcttccgggccgggc

SEQ ID NO: 265923 - DNA, 122 bp, Homo sapiens
aactcttaaagggaaacacaacttttggttctgctcctgctgagccacaggacccagtgccggccttcgctgctgtcaccctgttccagtccaccgtttttctagtctggacggctacaatt

SEQ ID NO: 265924 - DNA, 122 bp, Homo sapiens
cctccaagccaggtgtgggacataaccttgtggtgcgccgttttttaagccggtctgaaacgtgcaatattcgggtgggagtgacccgattttccaggtgcgtccatcacccctttctttga

SEQ ID NO: 265925 - DNA, 122 bp, Homo sapiens
cactgagctaccaccacaaacatgcctgaatagataaaaagaaaaaacagggaacactatcggtgttgtggatgaagagaagggggactctctaccctgctgactgacagccacccactatg

SEQ ID NO: 265926 - DNA, 122 bp, Homo sapiens
tatgccttatttcatgaggagagcaggccgattacctgacccaacaatatagcccaggcccgggggagatgtgaacacaatgaggaagatatctctatgacccacattctttggcctgaggc

SEQ ID NO: 265927 - DNA, 122 bp, Homo sapiens
tttgagccgtgccacactgtgatccccccactgctgttctatgagggctgcgtctttgaccggtgccacatgacggacctggatgtggtgtgctccagcctggagctgtacgcggcactctg

SEQ ID NO: 265928 - DNA, 122 bp, Homo sapiens
agactctcactgcaggactgagctgctggggactggcagctgggggcgggggctaaggggcggaggcttggggacgggggcgggggctgggggcggagaaaagtaggagaggaggagggaag

SEQ ID NO: 265929 - DNA, 122 bp, Homo sapiens
gcacatgtctgaatagagcaggccctgttagaaaacagaaggcttcattgctaataggagcgagcgaccaatctgtccacattaatccagagacatggttcctaaaactgcacccaacactc

SEQ ID NO: 265930 - DNA, 122 bp, Homo sapiens
gggcatgtgaggaggggctctgctaggacctgtgccctgggctccagtcaccccagcatccggtgggcaggtttcccaccacccaacccgagggcttggcatctgtgagcccacatcctgca

SEQ ID NO: 265931 - DNA, 122 bp, Homo sapiens
ggtccgcgcccggggcggcgctggagtctggatactagaagctgcggttgctcccaggctcgggaactgagacgcagaaccgctgggcgccgcgatttaaagcagctccgcccgcctcagcc

SEQ ID NO: 265932 - DNA, 122 bp, Homo sapiens
taaatcaactcggagtgggtacaggcggttccgggacaacccacacttagtctaggagcccggagatccctcatccagctttccccggggcaaggggtgaagcgctaagcaaggctgatcac

SEQ ID NO: 265933 - DNA, 122 bp, Homo sapiens
ttctttcctctaggtctttggcagcggctggggccaaagcccgggcaagaccaacgccttcggcacccggactcaggctccgtcctctctgccagcgtgcggctacaatgactcgacatggc

SEQ ID NO: 265934 - DNA, 122 bp, Homo sapiens
gtatgaccctaatttttaagggatgtgtatatgtaattaacacagagcggaaggactggacgttaagaaatgttaagaattctcaggcacctgtggtcccagctacccaggagattgaggcg

SEQ ID NO: 265935 - DNA, 122 bp, Homo sapiens
ggaacggtattgaggggcgcaaaaccccagccgtggtccctactgttggacggggcgcggcggcagcccccactgcccaccctgctggctgatttctgcagaaggccccgacccccacctat

SEQ ID NO: 265936 - DNA, 122 bp, Homo sapiens
tcgtcagccctgtcgccgctgcttctgctgctgctccgtggcaggaggagccattgacaccgccggagcctccactcgcccagtcggtccctccccgccgcggggctggccgggggcgcggg

SEQ ID NO: 265937 - DNA, 122 bp, Homo sapiens
tggcagaggatgatcccgcccggtctggccacccccagagctggtgcctgcctctgcgaccgctgcctgcccccagagcttggcaaggaaggagcaactgcctttctggtgaccgactcgct

SEQ ID NO: 265938 - DNA, 122 bp, Homo sapiens
accaggggcttcagtgtttgtggttaggaaaagagaaataagaacaacagcagaatgcaccgtcaggtactttggaagtcacagaagggaaaagggcaggaaaatcggaaatatcggcacac

SEQ ID NO: 265939 - DNA, 122 bp, Homo sapiens
ccgcccgccgtcagcctaggttgaggcgccctgcgtgtgtctataactttgtgctgctgccgcggccgccctgctcgtggaagggaggaggaggaatgtggaaggtggcggcgcgcgagctg

SEQ ID NO: 265940 - DNA, 122 bp, Homo sapiens
gacctgccaaacagcgggagcgaaaggagctgtaacacgctggccggctcacagggttgccggtggtcaaacgctccctgactgtgggagtgaagagtggcgaccctccttgggggcccaga

SEQ ID NO: 265941 - DNA, 122 bp, Homo sapiens
ccctgaccttccaagtgacttccttggactttgacccctgtgactgtgcttcccattccccgcccccacaacctgtgactctggctccctttgggggtcttgttagtctgggcctccccagg

SEQ ID NO: 265942 - DNA, 122 bp, Homo sapiens
cgccgccgccgccgagaggaggccggcgcagcgcagccgacaccgacacaaagctccgagcgcccgacggccttccccaggactgacccccgcggcatgacactgcgccgcgctgggccacc

SEQ ID NO: 265943 - DNA, 122 bp, Homo sapiens
gtgccccttagtgtcccagcctcatggcacgacagcccggacctcagtagccaagtttaccgctgagacttagactctaatgctcgcagccgggcgctcaggccccggtatcccagacgccc

SEQ ID NO: 265944 - DNA, 122 bp, Homo sapiens
tagtcattgtccttgatcagctggcagtgtctcacacatagacccatccttcaatcattacgctacagtttctcaggcttggacccttacagccatctttgattcccattaaccttactccc

SEQ ID NO: 265945 - DNA, 122 bp, Homo sapiens
tctgttttgttcatctgttacccttatgctgttgccactttcacatgcagtgtctgtaggcggagagtatgagataacagcatttcacaaatgaaagtgagtggaaaagggctgcttcccct

SEQ ID NO: 265946 - DNA, 122 bp, Homo sapiens
ccgcgcggctgagaccgatccctcaggagccgcgggcgaaagcccacccgacgctggcgacgagcacagacacctcagccgccgcagccatcttggcacatccggctcgggtctccgcggcc

SEQ ID NO: 265947 - DNA, 122 bp, Homo sapiens
attgggtcattctgtggttatcccaggctctacccagccagcggttcccttgggccagctcgaaacgctggccgtaggtcatgggagctgcaggagctgttagccaggctaggtgcctgcag

SEQ ID NO: 265948 - DNA, 122 bp, Homo sapiens
tagctgggattacaggcgtctgtcaccatgcccggctaatttttgtatgtttagtagagacggggtttcaccatgttggccaggctggtctcgaactcttgacctcaggtgatccgcctgcc

SEQ ID NO: 265949 - DNA, 122 bp, Homo sapiens
aagttctgtgccatgaaagcaatctccctccagctctggagacaggtggggcacagcttccgtgacttttctttggtgggaaaaaggtatactttgtagggttaaactgttcccagatgcgc

SEQ ID NO: 265950 - DNA, 122 bp, Homo sapiens
attgcccttgaaccattacatgagtaattctttaaagtcctgctctgtcattgctataaccgtggtatgcatattttctttaagataaaaatgaacaatttatgaaaaagaatttcctccct

SEQ ID NO: 265951 - DNA, 122 bp, Homo sapiens
caacagtatgactgtactcacagccggtgaactctacacttaaaaatggtcaaagtgggccgggcgcggtggctcacgcctgtaatcccagcactttgggaggccgaggcaggcagatcacg

SEQ ID NO: 265952 - DNA, 122 bp, Homo sapiens
ttccaaccccgcggccactgccaaagttgcttctcctccagctcaaagttgacgacggggcgaagcaggctgctggacggcgtgccgccgcagagaaggaaatcgtggggagaagggggaga

SEQ ID NO: 265953 - DNA, 122 bp, Homo sapiens
cagacccagcccaaacctgtaattaagcaaagcccctgatgtgattacgctttgctgactcggctgggtttggagccattccctctaggaaacagggtgaactcttgctcttcccagaggtt

SEQ ID NO: 265954 - DNA, 122 bp, Homo sapiens
cgcgcgcgcatttctctactttaaagcacgtttccttttttgaagccaggagctggagagcgtggaaagggagaggcggtgatcgcacaggcacgcggcgtggtgggggctcttgccggtgc

SEQ ID NO: 265955 - DNA, 122 bp, Homo sapiens
cgagaagtcttttgtgatccgcctgacctgtcccacgactttctgtgccccaattacactcgggtaagtgggctcaatcaagtggaagtaataacataaatccccattgtccactcttaatt

SEQ ID NO: 265956 - DNA, 122 bp, Homo sapiens
ataaaatctttataaacgttagagcaggtcgaaacgtggggacgacagccactctcgcagcgtcagatctaggcaactttcgtcattggctccactatgcgaaactttcaaactgttgttca

SEQ ID NO: 265957 - DNA, 122 bp, Homo sapiens
atggcaaaacctcatctctacaaaacgaaaatagaaaaaaactagctggacatggtggtacgcatgtagagcaggtaaaatggactaagacaagcttgccaaacatcaccaatttccctaca

SEQ ID NO: 265958 - DNA, 122 bp, Homo sapiens
catttcccaagctcccttccggtccttgaggcccctcgggtctcagcagccactaaaatccgcttgtctggggcggcagcctcaggtcttagctcattggctaacaagagatgattgacagg

SEQ ID NO: 265959 - DNA, 122 bp, Homo sapiens
tggcactgggaacatcggcactctggcaggactggccaatgggccgtcagggagcgtctgcggagctgcatgggaacggtggagaagaggtctggggttactgagggtagcttgagttactg

SEQ ID NO: 265960 - DNA, 122 bp, Homo sapiens
ggagggctgcgtaaaagcagctggtggaggagggagagatgccgtgggaccgtctgggttcgcatgcgtgaagtattatctgggcctggagtgtgcaaggcacacatgtgtccttactgcat

SEQ ID NO: 265961 - DNA, 122 bp, Homo sapiens
ggggctcgacctcgggccgctctggacgcccggcagtgccaggcagggcccgggtctgggcggtggaggacaacttctgccagcagcccgccgcgagtcctgtccgcctcccgcgcgctgcg

SEQ ID NO: 265962 - DNA, 122 bp, Homo sapiens
aaagtgacagaggcgctgatggcgcgctgggctggatccaagcgagcacgatctcgagtgcgctggagattttaaatcttctggagtatatttttaaaaaagttttgtggaccaaacgttct

SEQ ID NO: 265963 - DNA, 122 bp, Homo sapiens
agcagcaaactttcctgaatgctccaaacacagccagaggataggcctgcagtgagatgacgatagaacatgatagctatattaggtcatcagagacaacctgtttgttttgcagatgaggc

SEQ ID NO: 265964 - DNA, 122 bp, Homo sapiens
tcaccgatagccggttaattcccccaccccgcccccgccagtgggtcgcacgcggattgccgagggcttgcaggcactcaggcagacgcagacagaaacccacatcgaccccccccctttcc

SEQ ID NO: 265965 - DNA, 122 bp, Homo sapiens
agacaggcaagctaggatgtggctggatggtggtgttaattttccatttggaccctgaaacggccctctttagtacggggattgaataagttcaggacactagccactgagatgactctttt

SEQ ID NO: 265966 - DNA, 122 bp, Homo sapiens
tgggattataggcacctgccgagacacccagctaatttttgtatttcttttttgtagagacggggtttcaccacgttggccaggctggtgttgaactcctgacctcaggtgatccacccgcc

SEQ ID NO: 265967 - DNA, 122 bp, Homo sapiens
tgggagctccaaagaagggagtgcagtagaattttgacaggcagcccctccactccatgccggctcccagctgtggctcccccaagacgtgacccctgccaccaagacccaggccagtgtgt

SEQ ID NO: 265968 - DNA, 122 bp, Homo sapiens
ggctccctcctcccgccattctccagagagtagggggtcgggaaggagagaacggcggggcggggcctgccacccacagtccccaacccaaggacgtcacggtcccaggtgcgagtgcgagc

SEQ ID NO: 265969 - DNA, 122 bp, Homo sapiens
gacgtcaccggtgagcgggtttcctcgccacctccagctccttctcgctgctcaccccctcgcttcctagagactccgcgaggcgcctcggtgcaccatcccaactcccgacacccctgtct

SEQ ID NO: 265970 - DNA, 122 bp, Homo sapiens
aatttcagatatgtcatgtgtgccagaatctccgtgaaggcagacagcacattctccctgcgtacaccgccgagtcccatttctcacctttcacacccccatcctcacacaagtaacccggg

SEQ ID NO: 265971 - DNA, 122 bp, Homo sapiens
gggacaccgtgtccttgccgctctacagtgatttttaaaaagcacatgcctggggagggccggtgccgccagggcctcacatgaggcacgtccgtgcaggccctcgccacgttcctggtgaa

SEQ ID NO: 265972 - DNA, 122 bp, Homo sapiens
cagagccgcggcgcgcgcagggttcgcgctgccggggctggcgccccctccccggcccgacgccagagcagcagttacgtgacctggcctcccccagccccgggcccgacggggtgcgcccg

SEQ ID NO: 265973 - DNA, 122 bp, Homo sapiens
ttcgtattgttttatagagggagaaactgaggcacagaggggcactcggcttgtaagcaacggagtaattcagagcccgtcagccccacgccgagtttattcaccctggcaggggcttccgc

SEQ ID NO: 265974 - DNA, 122 bp, Homo sapiens
ttcaaaacaccaaacgtgtacacgggtgcacatgtatgcgcacacacacagaatgccagacgtgtagagggacccctgagagattaaaagcggattcagatctggggggaaatgggcaaaaa

SEQ ID NO: 265975 - DNA, 122 bp, Homo sapiens
gcaacggggaaagccaagtgggctctatctcagtttttccagtctgtagaataacagggtcgataattcaaactatggggttatttatttgtgtctgtattcacagcaaccttcctttcttc

SEQ ID NO: 265976 - DNA, 122 bp, Homo sapiens
gctcccgggggtgtcccccgccagaaacgttaccatggttgcaagctgaggcgtccgtggcgggccagccaggcgagttagagccgagcatcacatcccccgcagtgcaggctgcatgctcc

SEQ ID NO: 265977 - DNA, 122 bp, Homo sapiens
ggaagaggctagaagctggattcagcgtgtccgcgacctcacctttaggtcctgtgaggtcggtggaatcctggggtcctccaaatctaccaggccatctccccagtttcccagttcttcct

SEQ ID NO: 265978 - DNA, 122 bp, Homo sapiens
acagacactggccactcacgttggggctggatgaacattaaaaattatctgaggccggggcggggcccactccaagttgccacgaacacgaatccgcagcttgtagatgtcagcgtgctgcc

SEQ ID NO: 265979 - DNA, 122 bp, Homo sapiens
attgtttactactttactaatgtctgtgatctgatggtatctctgtttcaggagtggtgacgcctaagctatcactggacatatcaaggacttcactaaattagcaggtaccactggtcttc

SEQ ID NO: 265980 - DNA, 122 bp, Homo sapiens
ctttccggtcccccggcgagttggagactgttctccggcctcggccgcaagggggtgaggcgaggggccggcgcggtctctcccgccgcggctccgtcccgcgcagctgctgccgcagccgc

SEQ ID NO: 265981 - DNA, 122 bp, Homo sapiens
tgagtagcagcgggacctggaggtgtacctgcacgggggcgaggaatgagggcatcatcgcgtgctccctggggcctgggcaggattctggaggcagaaatgaccactgtggacggccactg

SEQ ID NO: 265982 - DNA, 122 bp, Homo sapiens
cagggccagcgaaggtcaggggtacccgaaggcgcttctaacctaacggctgggtacccgcgcgcagccaggccctttgttcctcagagggtgcgaggtggcacagccccgcagcgcccgat

SEQ ID NO: 265983 - DNA, 122 bp, Homo sapiens
tagagggtggagaatctgtccttggtcagccttgatgtcccacccatgacactcggaccccggagcagcagccctaccttcaggcatggtcctcgcactgacgtaggctgccacactgcacc

SEQ ID NO: 265984 - DNA, 122 bp, Homo sapiens
gcggggtctcacccagggagagaatgcgacttcattcctaggaggctgtgctgggggctccgcgctgcgcgcggcagtgagtagggcgcaccccgaatgcaagtgcggttcgctgcgtggcc

SEQ ID NO: 265985 - DNA, 122 bp, Homo sapiens
gtgcagtcacctcctcctggccagacttccctagttgttcccctccactcgcctgtgggccgcctgggctgctctgagcacactgcttccaggcctggcttccaacctggcacaaggctgtc

SEQ ID NO: 265986 - DNA, 122 bp, Homo sapiens
gcctcctctccatggactggccgtgcataccttgtgtggacagagttgggacggtgctcccggctgcatcggccgcctgtgctgggccacatgtccaggcaagtgaagccttcactgggacc

SEQ ID NO: 265987 - DNA, 122 bp, Homo sapiens
tcccgagcagcccctcaccccgggctgtgcctggggtcccaccctcccatggcgcagcttcggggacaggaattccatcaccccctgccccacagtcctgtgggagaagcaattaagtgccc

SEQ ID NO: 265988 - DNA, 122 bp, Homo sapiens
accctttttatctgtgcccttggtttcttactcctcacatttgaatttccaactacttgccgcatttctccatctggaaattctactagtgcctgaaactcacaaaatctaaaggagtcttt

SEQ ID NO: 265989 - DNA, 122 bp, Homo sapiens
atctggccagataaactaacaggctagcaaatccagctggggctggttgtactttgcccacgtctgttgcagcatatggtgcgttcacttgaagtgactgacagagctatttaactttgcag

SEQ ID NO: 265990 - DNA, 122 bp, Homo sapiens
gggacgcaggggcggggactgccgcggggcggggcctgaggcggctataaaggtggccgccgccggacgccgggctctgtggttcgggtccgctttcgtctccgtcctgctgccgttaccgc

SEQ ID NO: 265991 - DNA, 122 bp, Homo sapiens
caaactcttccttgctgacccagagctgttggaaggcctgcagggaggccaggatggaaccgccggtccacacggaggtcttcctctcaggagcggcagccactgcagggctgtccccgggg

SEQ ID NO: 265992 - DNA, 122 bp, Homo sapiens
tgcagcttgttattggaccatgagaacaagcagctggacctggttttgtctgggaagaggcgcaagaaagcctttcccacaggcttctccagctgactcacatattgttggtcagaactggg

SEQ ID NO: 265993 - DNA, 122 bp, Homo sapiens
cctgattctcacgacagtgtctaaacaaatactggaatttggggcacggacaggaagcgccgtggaggctcggagaaggaggaggacgtgggagtgttggaacaatactatctagacagaga

SEQ ID NO: 265994 - DNA, 122 bp, Homo sapiens
cataaatacacctctccttgatcttaatgctcagccccttcatcaagaaaaccctacatgcggaacttcccagttcccaggagccgagaagttgatttgtgagctgtgctcccacttctccc

SEQ ID NO: 265995 - DNA, 122 bp, Homo sapiens
agtagtggccgaggggctgtgtgccctgagtcctgaggaaagttcctctagtccaggttccgctcgtacagctgaggtctgtggccttccctagagccgcgagttgtggccctgtctgccaa

SEQ ID NO: 265996 - DNA, 122 bp, Homo sapiens
acccaggaggctaagtcttaaagacaagggccagtcctatagcattcttgcccatgctcccgaactccatcttctaacaaaaccagagggtccaggctgcccagctggagaggtctgtcttc

SEQ ID NO: 265997 - DNA, 122 bp, Homo sapiens
tttcacatgtttgtgtttgctatgcggtgccagatcctgcactgggtggtggagatacaacggtaaataagacagctaaggtccctgggctctgtagagggcacctgtgggagaatgaaatt

SEQ ID NO: 265998 - DNA, 122 bp, Homo sapiens
ggggggcttcttgcacaggaggcgtgattttcctcacacacttggttcaggtgcgtggcacgtccacacccagtaactggagtctgcgtcctcaccttcaggcaaaccgttgaacccactga

SEQ ID NO: 265999 - DNA, 122 bp, Homo sapiens
cgatccagaccccaagagagggttcttggatctcgcgtaagaaagaattcagggcgagtccgaagtgcaaagtaaaagcaagtttattaagaaagtaaagtggtgaaagaacagctactcca

SEQ ID NO: 266000 - DNA, 122 bp, Homo sapiens
cgggaggcccgggctggctgcccgagagtgactgcgagacggtgacctgctgtctcttttcggagcgggacgccgccggcgcgccccgggacgccagcgaccccctggccggggcggccctg

SEQ ID NO: 266001 - DNA, 122 bp, Homo sapiens
tcacccttgacctctttgacagtgtggtgccgggtgtgtgcagcctgagggaatctgttccgggacgtggttgagctccatctgccctgctaaattcagcctccaagagcccatatggcaac

SEQ ID NO: 266002 - DNA, 122 bp, Homo sapiens
ttctctgcagatctgggggctagccaggcaggcatctggacagctgtagcagcccctggtcgtggtcaatactaaggatttaacataatccttatcaaaattccaatagctttttgtgctga

SEQ ID NO: 266003 - DNA, 122 bp, Homo sapiens
ggaatctgtctctgtgtgttgaagtttgttgcagcaagaagtactaccaatgaatgccgtcgacgtgaagtgggcatcccgagcaaagggaacaacatgactaaggcacagcagtgtgacgg

SEQ ID NO: 266004 - DNA, 122 bp, Homo sapiens
cccccagcgtgtggctcgggagccctggaaggcagcggccagagctcacagcagggacgccgtggctggtcattaactgaaagataaagcaggaggggaaacagccatcagttattgctgca

SEQ ID NO: 266005 - DNA, 122 bp, Homo sapiens
ccatgttgctgtacggaaaaacgtttccagggcgagttgagcgttcagggcactcctcggcgctcaagctgcccacaggtcttccgacctaactttaggggtcgtgccagtcttcgtagaga

SEQ ID NO: 266006 - DNA, 122 bp, Homo sapiens
tggtataggaccttctaggaacattcaactagtaagggaagaacacctcaagtgagcatgcgcacaactccagtaatacactgcgcatgcgccccctcccaagcgctggcaggcctctgcgt

SEQ ID NO: 266007 - DNA, 122 bp, Homo sapiens
agactaggcgagtgcattgtgacatttttatctgtagtgggttttgaattaagaaagtagcgtcttattctccacttggtatgcagtactgctttcgctgagtaacttaagaggttttgggt

SEQ ID NO: 266008 - DNA, 122 bp, Homo sapiens
agaaaagactggggaagcaggtaacagcgagcaagtcatcttgtgaagaaggtcctggagcgagccctggagcgggggctccccaggagggcccgagcagcggagacttctcactccacctc

SEQ ID NO: 266009 - DNA, 122 bp, Homo sapiens
cggccgcccaggcctgtggacgcgactccatctgtagcaaagttcgggggccaaatgggtcgcggctcttcctcgaaggttactgcgagcgggacttgaagggaaaaggaggcgcattagcg

SEQ ID NO: 266010 - DNA, 122 bp, Homo sapiens
aaaattatttccatgcttgaacattgctcataataatttgttagtattcaagaactcctacgaagcagtaagagaaagaccaagagttaattagagaaaggagcaaatgctaacaacagttc

SEQ ID NO: 266011 - DNA, 122 bp, Homo sapiens
aaggaacagctgtcccgatcctcagggtggcctcaaacacaaactcgggtgcgttggctccgctgctggcgccgccaaagctgcgctgcggggctgcgcgcgcgcgaagcaagggggcagtg

SEQ ID NO: 266012 - DNA, 122 bp, Homo sapiens
ctacgtcccccgctgaagcggcttggccggaacggggttaccccgggcacaaacggctcccgggaagctcccgtcaaagctccgcccccaacaaatgccccttgtgataagtcgggccccac

SEQ ID NO: 266013 - DNA, 122 bp, Homo sapiens
ggatgggcatatgaagacggagatagaaagaacatgtgcagacggaggcagagagtggagcgagaagttaccaagtcaaggaatgtggaggatcgccagcaacccgcggagaatcgccagca

SEQ ID NO: 266014 - DNA, 122 bp, Homo sapiens
cggatgccccagccagttcaggctgctggtctcttgtccctaagcctttgccgaggtagtcggcttacttgatgccagcacaccaggccccccaccacccgctggaagcacaggccccagct

SEQ ID NO: 266015 - DNA, 122 bp, Homo sapiens
aaagtatagaagacattaaaatcaattttaaaaagcggcagcctcgggccgtccacatgacgaggggccgcccaagccagtgtggaatcaccagggtgtcggccaccaccaggaccaccggc

SEQ ID NO: 266016 - DNA, 122 bp, Homo sapiens
ccactccaccgtggtggacaccagtgaggacgagcagagcaattacaccaccaactgcttcggggacagcgagtcgagtgtgagcgagggcgagttcgtgggggagagcacaaccaccagcg

SEQ ID NO: 266017 - DNA, 122 bp, Homo sapiens
ctaatatcaacaagacagaaatggcacttgcccgttctgagcacgggctccttggcttcccggaatttcattaacccctggctccgctccggagcttctagttatcgtattctaaacagaca

SEQ ID NO: 266018 - DNA, 122 bp, Homo sapiens
ggaatttctctgagagaaaataatcctactcacggggccccttggaggccattaaccccccgagtcccggcccccaccccgtccccgggcaggccctcccgcccacgcgcggacccgtggga

SEQ ID NO: 266019 - DNA, 122 bp, Homo sapiens
cggccatagaacttaacatatctgggccgcttcccctttttgaccagcttgcagaacacccgggccgaccgaaaacaggggtgggaacggccggaaacggaataggcggggagaaaacccgg

SEQ ID NO: 266020 - DNA, 122 bp, Homo sapiens
agcgaggagggacagagggcggcgcccccggctgcccgggcgcgtagaacaagcagctgccgccagggccgacaaagttgctccccgaggggctgagatccaactttcgcttcccgatttag

SEQ ID NO: 266021 - DNA, 122 bp, Homo sapiens
cgcgcactgtgcggatcgcccagacagccttgacaggtttttgcagatgtttgggtgctacggtgtggggaaacccaggcaggagcgccaggcctaattctcctggactcttggtgagcggc

SEQ ID NO: 266022 - DNA, 122 bp, Homo sapiens
aatgtcttgtttttttaacatggcctggcctagtctctgaccctggcagacaaagtaattcgttcttgaggtgtgaggacccgtcagactttctgccaggaaccacaaagtggctgtgcgtg

SEQ ID NO: 266023 - DNA, 122 bp, Homo sapiens
gcgtctctgccacgactaattggggaaaaaccacaagcggactgcgatgggcctgagcgtcgcaggcatgtgtctaccttaccctgcacgaagtgagagtggtagggttgatgggcggtgag

SEQ ID NO: 266024 - DNA, 122 bp, Homo sapiens
aggaagctccacaactcctgatagccatttcacagaactccccagcctagacaaaatggccgcccctgctggcctgctgccttgggtctactttgtcctcactgtaggcctctgggtacctt

SEQ ID NO: 266025 - DNA, 122 bp, Homo sapiens
ggttctggaaccacacctgcgatgagaaagaatgtgaagggcacaggggcacagcgcgcacgggacgcgagaacagccatcctgcttttacagctaaacaaatggctcaacaacggagtgac

SEQ ID NO: 266026 - DNA, 122 bp, Homo sapiens
gtgtagtgcaggaggaagcagatggcggtgtagtgcatggggaagcagatggccacatagcggtcataggccatggccacaaggaggaagctctctagatccgaaaaatacaagaagaagta

SEQ ID NO: 266027 - DNA, 122 bp, Homo sapiens
ctgaggagccccagaatcctcgtgggtaccccttgcagccccagcccatcctacctgtaccggtggaccccacgtcccatggcaggctgcaggcatctcttagagaaggagatgggccctgg

SEQ ID NO: 266028 - DNA, 122 bp, Homo sapiens
agaaaaaacacattttgctactcttataacccaagtggctagcttgtcattttccctgttcgatcttctaagaatagagctcttcatatgtgaaggaaaaatgaaagggaaattccagtttt

SEQ ID NO: 266029 - DNA, 122 bp, Homo sapiens
tggaccatggacccccaagagatggtcgtcaagaacccatatgcccacatcagcatcccccgggctcacctgcggcctgacctggggcagcagttagaggtggcttccacctgttcctcatc

SEQ ID NO: 266030 - DNA, 122 bp, Homo sapiens
aagagagttaaattaacttgcctaaggacatgcagttagcaagtggatttgggaataactcgcatcttctctgcacggcctagattacctaaatcatctgtagcacactgactcgagcatca

SEQ ID NO: 266031 - DNA, 122 bp, Homo sapiens
gagcggggctccccggtgtagtccgggaaggtgcagttcccaggtgtgaccgcggggtggcgcggtgcgccggcgccggcgcttgcagacttcccgggagagaaacctccgtgcagccctgg

SEQ ID NO: 266032 - DNA, 122 bp, Homo sapiens
gacgccgcaaagtcctgcagagcccccaaaagacacaagcgcggacagaaaagcatcccccgagagacagcgaagccacacaccctctccgggccagctaccagggcgggcaacttcacccc

SEQ ID NO: 266033 - DNA, 122 bp, Homo sapiens
agcccgggtggctggttactctttcctctgccatctacgggttgcagcctaacctggtcccggaattcaggtagggagggccggggggcaggggggaaggcaaaagcgaagctttccttccg

SEQ ID NO: 266034 - DNA, 122 bp, Homo sapiens
ttcattctgtttttctaacactttcttgtactggtactagtggggtcctgactacctctccgcttactcattgtgttccagcctttctgcccgtgagttccaggctcagggtctctgcttgg

SEQ ID NO: 266035 - DNA, 122 bp, Homo sapiens
ggatatagagaagtaaacagagctgagatgtattcagaggctgatcaaaatttttagaggcgaagggaaagagaatgcatcagaagtcaaagatcaggttcaagattcaggcttgagcaact

SEQ ID NO: 266036 - DNA, 122 bp, Homo sapiens
tgttggtgttgagtactcgcaaaatatgctggaacttttcagggatcactagcgacatggcggcagcacaagcggcggcgtgtaggcctcctgtggaggagcaatttttgtatttttagtag

SEQ ID NO: 266037 - DNA, 122 bp, Homo sapiens
tgtgcgtttgggaagatgagacggttgtggagatggatggtggggatggttacacaacaacgtgaatatgcttaaagccacgttcacggaacacgtacaaatgactaaaatggtaactttct

SEQ ID NO: 266038 - DNA, 122 bp, Homo sapiens
tcctgggtggtatttttaagatatctttacctataaaaaatgtttaaggttcataggactcgacaagagctatctggtgattttctcattagtaacatgcaacgttgtactgcaaaatttca

SEQ ID NO: 266039 - DNA, 122 bp, Homo sapiens
accgaccttcctcgccggaactcctcgcgcatcgccggcccctcagcggcgactagcgcgcgaacatcctggaagacgcgttgccggccccacgtgagccgacgccccaaagcgcggctgct

SEQ ID NO: 266040 - DNA, 122 bp, Homo sapiens
ggcacaggcctgcctcctaggtgttcgggtcgagatttacagcggagtctcatcccgggacgtgtgagtgcacttcagcgcaggactgccctggactggggagaccggagccgcgattttag

SEQ ID NO: 266041 - DNA, 122 bp, Homo sapiens
cccgccaggaaaaaaaggcacttaggggatctgctcattagcatgaaatgcaaatgagcccgcccggcctcatttacacaactctgtgcatggattcggcgaaagggcaaccagggagacga

SEQ ID NO: 266042 - DNA, 122 bp, Homo sapiens
gcagggacgccgggggacttcggtgcgagggtcaccgccgggttaactggcgaggcaaggcgggggcagcgcgcacgtggccgtggagcccggcctggtcccgcgcgcgcctgcgggtgccc

SEQ ID NO: 266043 - DNA, 122 bp, Homo sapiens
caccagaccccactcagattttctcactccgggttcccacccctggggccccgagtccaccgagagctcacagactggggattgtcaccggggctgattttcgtgcaaaccccgtgccttcc

SEQ ID NO: 266044 - DNA, 122 bp, Homo sapiens
ttttcacaatattttggtttggaggatgtttttgcacttcactgcatcagaacagatgaacgaaattatggaatatcacatgtaggccctgaagaagaagaattttggaagtttagcaatta

SEQ ID NO: 266045 - DNA, 122 bp, Homo sapiens
caaacatagacagtcatttcaaaataaatcaaacttcagacgtggtacagcagcaagttgcgaagatcctcctcccctccccgcaccccaggcggcacctgctgcagccggctgtgggcact

SEQ ID NO: 266046 - DNA, 122 bp, Homo sapiens
gagaagtagacttaaggggaaaccagcaaggggaaggagaggcccgggaacgcagcagggcgagttgttttgctccactcgtccaggaagccctagatgccgggggttcagggtcgaggctg

SEQ ID NO: 266047 - DNA, 122 bp, Homo sapiens
cccagcgggcagaggggctcccaaatccactcccaaatctgctcccaaacccactcccggcgttgttgtgaggctctctgaacccgaggagtgaccagaaatcctggcgagatctctgggaa

SEQ ID NO: 266048 - DNA, 122 bp, Homo sapiens
ttcccctctccttgttcttggatggcagctgtggttccgggattactcttgggatgctgacgctggccatgtgcgtaggcttcgtcctcagtggctcccaccctagcgcctcagcccaggac

SEQ ID NO: 266049 - DNA, 122 bp, Homo sapiens
tgcgcagtcgcagtgcggctcgtggccgcagctgcctgaaagggcaaagggacgagtatacgcatgcgtctattcctaggctgctggctctcagacccgcagtgaggtctgacgtcatttcc

SEQ ID NO: 266050 - DNA, 122 bp, Homo sapiens
tctggaactctgaggccgggaggcgtcatgcaaattccatgtgatccccaatacctttgccgtcttctgtaccaaggcagccaaaaacgcaggcccgttatctaagccgatccgtaacggca

SEQ ID NO: 266051 - DNA, 122 bp, Homo sapiens
aagcaccacagggggaaacagatttaacaacattctttcccctttattcagcactgtgatcgaatcttaagagtaggtctggctgccatacctcacaagtttctattgctccctattccata

SEQ ID NO: 266052 - DNA, 122 bp, Homo sapiens
ctctggcttgaagaccccctaaccaagcagcctccacagtggttgtgctctgaaggagatcgttgcccctgttcggatgccactttgggttaatcttgaaaatgcaagctcaaagagccctc

SEQ ID NO: 266053 - DNA, 122 bp, Homo sapiens
aaaaaccaacacttagcagctcttcaggtcaactacagttcacaattccctggaggaaaacgcagcccatagtacaagtctgacaacacctctagatctgcggaatcacctattctacataa

SEQ ID NO: 266054 - DNA, 122 bp, Homo sapiens
ccaaattttggtcaaattttggaacagcggaggctattcccaagcaaaaggcagccaggacgagcgaaagattcatgtttcaaaacctagaaagagaaaagaaatgagtatctgattagacc

SEQ ID NO: 266055 - DNA, 122 bp, Homo sapiens
tgggtgcgcgcccgagcagaggagtttcagttgtgagttgtgtgtgtgtcggggaccaagcgcgtgccaccacgtgtttgtgtcaggtatgtctgtgtgtttgtgcctgcacagcggaaccc

SEQ ID NO: 266056 - DNA, 122 bp, Homo sapiens
aaaggtgcggccacagtgtgtgacgggcaccctgtgaagatgaggcaggcagcagagctgcgggtggagacatggacaagaacgtgtgtggatgacaggaatcgggttgggggccacaagct

SEQ ID NO: 266057 - DNA, 122 bp, Homo sapiens
tagaggtggcaggggagagactacactgttgctggaggccaaagcaaactcccgaagatgcggggctggcgacagagatcaacccagagggcgcagggctctgtagcttggaaggcccaagt

SEQ ID NO: 266058 - DNA, 122 bp, Homo sapiens
gattgtccttggcccagcaggctgttggtggcgttggtggtgctgctgggactggggcaccggccttggccgcaggtgtgctgtgcccgacagaggccgcctggaccgcgcccggaacgccc

SEQ ID NO: 266059 - DNA, 122 bp, Homo sapiens
ccacttcccgagtggggacgacgggcggaggagtgtgccgggcgccgcagggagtacgtgcgggtctcagggagtgtgtgtgtgcacgtgtgtgcattccaaagtgatttgtgtgcaagcac

SEQ ID NO: 266060 - DNA, 122 bp, Homo sapiens
actggagagattcaagtgcctggtttgacctttggattggggttttatatgctggcattccgcatgcgcagtggtctgccagcactagggaggggctgcatgcacagtgtgcttactggagt

SEQ ID NO: 266061 - DNA, 122 bp, Homo sapiens
gtaccgcggctcactgggcaggggggatccccttcggtgcagacggacttttacattcgccgaagcaggggaggggggtccgggtagtggggcgcgggactgcaggctttgttgtccgcgac

SEQ ID NO: 266062 - DNA, 122 bp, Homo sapiens
agggcttattaaatttatgggtcacattttccagttttaggtataaatcgtttggggcagcgggaggtggccagatgccataatattttggcaaatattgtcgtagctctagaagaacacca

SEQ ID NO: 266063 - DNA, 122 bp, Homo sapiens
cagaaaccggataatcagcgttaccaatgggcccatcgcattactggcaagcgtttcagtcgcctcgtttctaaaatggtttttccgttttgctgttctgagtctcgggtgctgtgcgtctc

SEQ ID NO: 266064 - DNA, 122 bp, Homo sapiens
gattttctcctcccctttgtgtacccgacgggtgttgctgtgagctcaggaccatcccggcgggctgcggatgggatcatcgtgtgtgtatggccacagccctccgcctcgctcgctcggtg

SEQ ID NO: 266065 - DNA, 122 bp, Homo sapiens
atctggggacggggggcgggggagaggataacattccctcaaatttggcaggtggtttgacgccccttgtggaattgtttttaatatccagcggggaagacagtaataccattttggatagt

SEQ ID NO: 266066 - DNA, 122 bp, Homo sapiens
cacaaagatgttcactacatcatttataacaagagaactttggaaacaacctgaagattccgttataagtaaatgtagaacataaacatgatgtaataattcatagcaactaaaatgatttc

SEQ ID NO: 266067 - DNA, 122 bp, Homo sapiens
aatcgactgtagaaatccatattggttctcaatgtggcatatcacatattccaggagaaacgggttgtcaaggttcaaagcatagctttccatgcagacctcagctccagctggagccatgg

SEQ ID NO: 266068 - DNA, 122 bp, Homo sapiens
cctgtggtatgtccatcacacccagaatctggggccttcaccagttgtcctcagcaggggcggccaagggcagggtcgtggggtcgcagacctggtctcacttcccggccccaccatgcacc

SEQ ID NO: 266069 - DNA, 122 bp, Homo sapiens
agaatgggaggagaatcgatgccatcttctcctgggtgcggtgagtgtccaaaaaatgggcggggtggggattttaggcaggggagccccctccctcgcgcagccagaggcctcgggctggc

SEQ ID NO: 266070 - DNA, 122 bp, Homo sapiens
gtggaatagagagggaggagttcccagccctggaggagggagcgcagaggaaggctaggccgattcgcagctgcctcctatctcaaaaacgtggaaggggctataactctagggctgggagg

SEQ ID NO: 266071 - DNA, 122 bp, Homo sapiens
acgggcccacatggtgtgtgacatcccagtgccccgcgtgcaggcaaggcacacctgaagcgtgccatcctggggcaggaggaggcgctgcggctgcacgccctgtgccgcgtcctgcgcga

SEQ ID NO: 266072 - DNA, 122 bp, Homo sapiens
ctctctaccagtcaagctcatcctcccgggaacgtctccaccagcttcccttccagccgacgccggacgagctgcacttcctgtccaagcacttccgcagctcagagaatgtgcttgatgag

SEQ ID NO: 266073 - DNA, 122 bp, Homo sapiens
tggtttctttgcattttcttccattttacattgcaggtgtggctaccaagagctggataacgagtccctcaaacaaagtttggaattgcgagatatattggggtaccttgattcttgagaca

SEQ ID NO: 266074 - DNA, 122 bp, Homo sapiens
acatggtccaggggcctgctgagtccaggcagccgcgagcgcagacccccgaagcccgcgcgtaggcgcccatggctcagcagcttcctcctggggttccccggccctggaaaggccgggca

SEQ ID NO: 266075 - DNA, 122 bp, Homo sapiens
aaaactgcctagcaaagtttctgtaaggattagaagtggttggtgtaaggggcccagctacgtaataaatattcagtaaatagtagctattactatattaagtggttctcatttctaaggtt

SEQ ID NO: 266076 - DNA, 122 bp, Homo sapiens
aggcagaggtgggagtcggggctgcactgggcgctcgctggcaggcaagggttcgggctccgtggccccgcactgggcgcagccggctgatgcctgctgggcttgaaaagggacgagctccc

SEQ ID NO: 266077 - DNA, 122 bp, Homo sapiens
cctgacgccactgtgctgttgcgtcttgcgcagcgcagacacctccactctggattgaaacgaaaaagctcgcggtaagagcagaaaattggtctattgatacattcgctccgagtgttgat

SEQ ID NO: 266078 - DNA, 122 bp, Homo sapiens
ccttgtacaataaagatacctataaaaatatatacatagagaacaacaaaatgggccaggcgccttggctcattcctgtaatcccagcactttgagaagctgaggcaggtggatcacttgag

SEQ ID NO: 266079 - DNA, 122 bp, Homo sapiens
gggtcagtgcgcacctgcggaggtgtgggggccgccgggggtcagcgagcagctgaggagcgggcgaggccgggggtcagtgagcacctgcggaggaggcgctgggagtggggagaggggac

SEQ ID NO: 266080 - DNA, 122 bp, Homo sapiens
ttttcaagagtttctttttgttttccaatggtaacgggagagaaaataagctgtcattatcggaatgatcaaacacagagagaaaagaggcagaggtaagtaaaacaccaattacagtgttg

SEQ ID NO: 266081 - DNA, 122 bp, Homo sapiens
ggtgaggggcgtctctgcctggctgccccgcctgggaagtgaggagcgcctctgcccggccgctcttcgtctgggaggtggggagcacctctgcccagccgccccatctgggaagtgggcgc

SEQ ID NO: 266082 - DNA, 122 bp, Homo sapiens
agagtggcagtggagtggcatcttgattgatttaacctcttctcaggggacctgggtctgcgagggaggatatggctgcggggttggaataggatctgtctgagctgccagggtcagggtgg

SEQ ID NO: 266083 - DNA, 122 bp, Homo sapiens
ccgcgcgacgttcctcagcgagcccggccttctcacacacacgccgctggggagcttggccgtcggcgtccccgccggtcacagcgaggtcctcctcacatactcactccttcctcggagaa

SEQ ID NO: 266084 - DNA, 122 bp, Homo sapiens
ctgcctgtccaacatcaaggaatgatcaagaactcccatcccggttccacgctgcgcgtccgccatccgaaccggcctcgcccctccaggccgggtcccgacgccagctccgtccgaccccc

SEQ ID NO: 266085 - DNA, 122 bp, Homo sapiens
gctgcagcagcactccttccaagggtgttagcggcttcctgctgttgctaaaatctgggccgcttcaccgtcccctgattggtttttccgctatgtaaccaactcccttcgatacatcccct

SEQ ID NO: 266086 - DNA, 122 bp, Homo sapiens
cgagcagtttccagcctcctgggtaaaggagcagtctcctcccttgcttgggactctggacgcatctcattccggtgaaagtaagggacagcttaggaccagaagcctttcgcggagaaaag

SEQ ID NO: 266087 - DNA, 122 bp, Homo sapiens
tgcaaggatctgcaatgcagccctttatgtaagaggcaagacagacatccagcctagcaccgctcacacgtgcctacctgatggacacaccacatctgtggacacacatgctcacactcaca

SEQ ID NO: 266088 - DNA, 122 bp, Homo sapiens
catcggagatgtccagcttgtgggcgtcgaagagcaggatgatgcggtccacacgctccgcgaaccactccaggacggctgcaaagtcatagcctggggggaagagaagggagagctcaggg

SEQ ID NO: 266089 - DNA, 122 bp, Homo sapiens
cagctcctacagtgatcagttggccacctctagatctgtgtttgccggtctagacgttatcggtgcacttccttgaagtgccaggttgcagcgatcccagagcgttgataacgtgatctgat

SEQ ID NO: 266090 - DNA, 122 bp, Homo sapiens
tagttccacacatcagctatgtctgtccctattgtaggcatcatccagcccccatttggccgtgattatatgcagcctagatatgattcatcctagcgtataagaatggcaccaaatggggt

SEQ ID NO: 266091 - DNA, 122 bp, Homo sapiens
gtttcaacccctgagagcaggtgcagtggacaaagggcacagccccttcccagagacccacgctgcatcagactctcggtcttaccgacgtcgctagtcctgaggctgctcgccccaaccca

SEQ ID NO: 266092 - DNA, 122 bp, Homo sapiens
agcttcaaagttaagtggtggcagagagaaactctaaagtccgcgagatctgtcccctcacgcaggacccttttgtagttctagaaatccagtatccctgagagttctagaacaccaccaag

SEQ ID NO: 266093 - DNA, 122 bp, Homo sapiens
tggcacttcactcttgagggaggcctaggagaagctagtggaaagttacttccacataaacggtcagacagacggatgatgaaaccacaggaaaccacagctcctcccctgccggggcacca

SEQ ID NO: 266094 - DNA, 122 bp, Homo sapiens
gttgccggagtctgaatgaaggctggcggctccacggtctcacgtagttcggaaatcctccgggttcccgggtttcccgtatttccgtctccgcacctcgtccgcaccccggggctccggag

SEQ ID NO: 266095 - DNA, 122 bp, Homo sapiens
agtgggtttttaggtgagtggtgtccattgtcggggtatgtgtgcaatagaaggggtgtgcggcctggacactcacgagctaggtgagtggcttaaggtctctagggcttcagtgtgctcat

SEQ ID NO: 266096 - DNA, 122 bp, Homo sapiens
cctacgccggcaaaggtctcgagatgtgagtagtgagagcgcctaccccatacgtgctgccgctccccttcttttacccagtgatctagacctagtctaggacctcgggaactaggaccagc

SEQ ID NO: 266097 - DNA, 122 bp, Homo sapiens
gtggcacctaggttcctggagaagctgaggaacccctccactgagggcccacaactgacccgtggtgcatcacctctaccgccccagtgcacagcacccatccaggcatggctcaagtgtcc

SEQ ID NO: 266098 - DNA, 122 bp, Homo sapiens
ctccagcagagggctctcggctgtgccgactcaggacagctgctgcgacggggccggctacgcttgtcagagcagcagctggtgattttggacttgcctttgctggcaggggagcgctatcg

SEQ ID NO: 266099 - DNA, 122 bp, Homo sapiens
gttgaggggcgagtcgtggcccagggcccggagggtgttgccctgcaccccgaacaccagcgcgttgatgaaggtgagccccatgagcggcgagcccaggcccttgtacaggcccagcacct

SEQ ID NO: 266100 - DNA, 122 bp, Homo sapiens
tgttcccaaagaattttcccttgcgcagccgcagcctggaggaagcagggcgtgtgccctcgtctgctggcggcagcagtgaggggtgtagccaagtgcccacttctctcattcagctgctt

SEQ ID NO: 266101 - DNA, 122 bp, Homo sapiens
gtaggaaaaaagaaaggattaaaaatacccagtaaatgtaaacggaagatactctgtagtcgccatttgtttgtgggtttattcatctgtttattttacattggcttgaatgtattttcagg

SEQ ID NO: 266102 - DNA, 122 bp, Homo sapiens
gtcaccctaacatctgatctagattaattatcatcatgtgcgaggttttggcatgaagcacgccaggctcaccgtttcatgatcttagactatttacagcaaactcaaacagctcacttgct

SEQ ID NO: 266103 - DNA, 122 bp, Homo sapiens
accgcggtcctggcgcaggaattcctgaggctgcaggcgtcgctgctgcagtggtacctgcggctcaagtcctggtgggcgtccaattatgtgagtcccgccaccgccaccaacgccccacc

SEQ ID NO: 266104 - DNA, 122 bp, Homo sapiens
ggggagaagactggaggtttgggtgaatgaggcgagaagtcacagttacccatttaaacccgcacagagaaggctgcctcaatctggggctgactgagcgggaagatgcagggcaactcgag

SEQ ID NO: 266105 - DNA, 122 bp, Homo sapiens
tggcgcggtgtctacccgggcgggttgagggcggtgccagggtcagtcaaaagtccgccccgccccctgcctggcccggcttcggggttggggaacagcgcagggaggtgggtagccgggct

SEQ ID NO: 266106 - DNA, 122 bp, Homo sapiens
aggggccatatattagaaactgtataatcaggcatgcagctggagagaacaggacgcctccgtaattttaccgggccttttgtgtttctctgcgtccagagctccagttcttctcttcactg

SEQ ID NO: 266107 - DNA, 122 bp, Homo sapiens
ttggctctcacccagttaacaagcgtttatccagcgcacgtgttgcggtcggaccccatgcgaaggagctaaggacacaaaggtgagcagcagagacgcggttccagctctcccccggctcc

SEQ ID NO: 266108 - DNA, 122 bp, Homo sapiens
acttgccatgtgagctccacctcttaaaaaatccagtcccctacaagggattggtccctccgacgacctcggcgaccaggggcgctgagcactcacctaggagcgggaggcgtttcattggc

SEQ ID NO: 266109 - DNA, 122 bp, Homo sapiens
ctgtgtgagctgaattaggaagtggggcagccagctgcaacttacgacaatatttgtgatcggaagagggcagccacatggatctttccctcctctcccttcctttctggttaaacgtaaaa

SEQ ID NO: 266110 - DNA, 122 bp, Homo sapiens
cacagcttgatgagatatgtatttagagagtgtacccggtcaacaggatggacatcagaccggtgggcagacgagcaagacaggagacagacaggctggccaggaggatgctacagttcggc

SEQ ID NO: 266111 - DNA, 122 bp, Homo sapiens
cctctctgggcctatttgcaggagcaccctcctgacctctcctgcctctttttctgtgcccgctcggctggctcctttgcttcctgccactcctgaggtaaatgtgggcatttctgtaggat

SEQ ID NO: 266112 - DNA, 122 bp, Homo sapiens
caggagcgcgaagagtattgctgtttgttaaactccagcgtgtctgttggctccctgcggcgctggggaggcacgtttgggggtgggtatatttccttttttttttttttttttttaaaccc

SEQ ID NO: 266113 - DNA, 122 bp, Homo sapiens
taatcagattcctaaatttagaagcagcctagggcccagccagggatccctgcccccacccgctgcctgcggccgagtggccggggtgttgcggtcgggccacgacccggctggggccgctt

SEQ ID NO: 266114 - DNA, 122 bp, Homo sapiens
ctccctgaaaccacaatttactgcatagccaccacctcagggtgcggccacccctgacttcggggctccgcgtccctgcactcatgaccaggcccctaacaactgcggctgcatgttcccga

SEQ ID NO: 266115 - DNA, 122 bp, Homo sapiens
tagaaagatcaagtgtcttgtccacgctggcacagactgttactggtagaactggggggtcggggtgggggagagaagagaaaatgaaagaaaacaaaacaagccttgttatctgccaggtc

SEQ ID NO: 266116 - DNA, 122 bp, Homo sapiens
cagcagcccacggcaggcggggggcctgacccgagcagcggcgttagggctggcctggggcgcagcgtgcgcacgggagcgcgtgtctgctggactccagcgaggtgctgtagccagctagc

SEQ ID NO: 266117 - DNA, 122 bp, Homo sapiens
ggttaatgacggatccgtggggttgagcttgtcggtacagacgccagacagcccgatttacgggaacagccgattagaggattcgggagagcggtcggtgaacttctggatgtctttcggga

SEQ ID NO: 266118 - DNA, 122 bp, Homo sapiens
cgcgcgcccccattggctggtcttcacgagggcccgccctcgccgtcccagctggcctttcgggctgctacgatccagctccgtggcctaatgggagttgtggtcccaccgcggtgcccgac

SEQ ID NO: 266119 - DNA, 122 bp, Homo sapiens
aagaatggatcctgcaggttcttcttcctcccggtctccggtgccggaaggaggacaccgcgagtgttgcttgtttgcttacagagagtgtgcagcagcagcagcagcagcccggggccagc

SEQ ID NO: 266120 - DNA, 122 bp, Homo sapiens
tcatctcactagggagtgccagacagtcggcgcaggacagtgggtgcagtgcactgtgtgcgagccgaagcagggcgaggcattgcctcactcgggaagcgcaaggggtcagggagttccct

SEQ ID NO: 266121 - DNA, 122 bp, Homo sapiens
gggattgagggcacctgagccagggaaacccaggcccaagggacccacactgggtcctttcggctgggaccatccgggaggcctcaggagtgtcagacccacgtttccggagtccagccttg

SEQ ID NO: 266122 - DNA, 122 bp, Homo sapiens
ataaagcacacacacctaagacactgatcctttatcaggttgtcttttttgccacaaggccgtgttctctttaggccttttgtttttttgttttgtgcaaatcagtttcttattggtaaaga

SEQ ID NO: 266123 - DNA, 122 bp, Homo sapiens
cctggagtgaacctttctcagggtgctccactatggcacgtggcagcagaatccaggccacgaatccaggccaccgttgccatcacccctcgcctggctgccttgaacaggcaagcttaaaa

SEQ ID NO: 266124 - DNA, 122 bp, Homo sapiens
ctccaaattcatatattgaaacataatctagaatgcaatagtatgaagagttggggacttcgggaggtgtattagtcggtttttacactgctataatgaactgcccgagaccgggtaattta

SEQ ID NO: 266125 - DNA, 122 bp, Homo sapiens
ggttcactttgctgccccttgcaggtgatgctgtgattgttgcctgcggactgggaagcacgatggctccaaaaggccagcggggccgagaagcagggacagagaccagcatttaagggatc

SEQ ID NO: 266126 - DNA, 122 bp, Homo sapiens
gtaagggcgcgggatgggatcggctctggatatgggtgccccccgagccgcgccccaccccgcgagcgctcccatttgcacctccacttgagcacggagcttcaagaacgagctattctggg

SEQ ID NO: 266127 - DNA, 122 bp, Homo sapiens
gtcgaggcccgggcgggtggcggggctgccctgcccaggtggggagggcgctgcagttcccgggacgggcccgcaatcgacggtccgggcgccacccactccccgctgccagctcgcgcccc

SEQ ID NO: 266128 - DNA, 122 bp, Homo sapiens
gaagcaaaacactctcttcagagagcaacagcaggcaccctggggctgagaaggtgttggcggtgggcacacttgtggcccatctctttcctagcataactcccaagcctgggcctgcccct

SEQ ID NO: 266129 - DNA, 122 bp, Homo sapiens
gcagcccgtttgaaaaccataccctttccatttaagcccaccagagggcgatatgccccacgtgttggtcctgccccggtccaagagacctaatcactgggttaagtgccttagaagaggaa

SEQ ID NO: 266130 - DNA, 122 bp, Homo sapiens
gtgactgaatttgaccaatgggatgtcaactgaagggtcgcgtacaacttccaggaagggcgtgaccttaaaggggcttgtgcctttctttgccccttccgccttccggatggatgaaagca

SEQ ID NO: 266131 - DNA, 122 bp, Homo sapiens
aaacttctatttttatgtttaacgttttcattaaaattttttttgtaactggagccacgacgtaacaaatatggggaaaaaactgtgccttgtttcaacagtttttgctaatttttaggctg

SEQ ID NO: 266132 - DNA, 122 bp, Homo sapiens
agagctagccagaaaacaccggggacatcagagcattctgcagctgtgagcagaaatgtacgtggagatgcacatggacatatggcagagctaacctggacttggttttctttcctgaagga

SEQ ID NO: 266133 - DNA, 122 bp, Homo sapiens
aaagggaagcaagcctggggagctggaaacctgaataagacctgcggggccacatggaggcgaggggaagtcagaagcagtgagggtggagccccgcggagcctgtaagtccctgtgagggc

SEQ ID NO: 266134 - DNA, 122 bp, Homo sapiens
cctccagctgccgcacgctacgcagctgctccaaggacaccgcctcctcggcctcggacacggggctccgtgggggcatctccacagccacgtactcccctgaaacacggggtgcccgaggc

SEQ ID NO: 266135 - DNA, 122 bp, Homo sapiens
caaactttctccagtctcggttccggcgtcagcaaggtgtgaccaatcagagcccagagacgggaataaattatgcaaatcaccatctggcgatgggtcagatgactcccatacttttaaaa

SEQ ID NO: 266136 - DNA, 122 bp, Homo sapiens
acaccagcagagcgagttgagtccaggcgggagcagagggcgcacaccagcagagcgagtcgagttcaggtgggagcagagggcgcccaccagcagagcgagtcgagtccaggcgggagcag

SEQ ID NO: 266137 - DNA, 122 bp, Homo sapiens
gaccctcgcccacgataagcccttaataagtagttatttttcagtggtggtgattaccatcgtcattattgttttgtatttgtaatcatcactgccacgaccatcaccgacctcttttacgc

SEQ ID NO: 266138 - DNA, 122 bp, Homo sapiens
gtgctggacacagagacatgaagctctgtctgtgggagacagggattctgacacagacaccggacaaaccattgtcttggggagcccagaagagaaagtgggcagggtggggtcattgggga

SEQ ID NO: 266139 - DNA, 122 bp, Homo sapiens
ttcctcaacagcctaaacgcctctattttttacatccaaacttaggccatatttctgcggcgccaagaaaacgcagtaaaagcaaaggcaagatgtccttaaaaaaaaaaaaggtcacattc

SEQ ID NO: 266140 - DNA, 122 bp, Homo sapiens
tccctgctgaaggcgtcctgtaggaaaatgtcacttaagaagttgaagcacaagcaataccgacgtttgccagacttcccactcagcttccaactgcaagcaattgaccattcgcgtgaaca

SEQ ID NO: 266141 - DNA, 122 bp, Homo sapiens
actgttatgagggagagcccagccttatagaatgttgtcactactaaactaaggctggtacgtttgatgctgggtctgatacaatttcagatggaagctgctcgagtggaaaactaaggtca

SEQ ID NO: 266142 - DNA, 122 bp, Homo sapiens
cggcggcggcggcgggttctccgccatgggcgcctcgaagccccggatcatcgcccggcccgacccccagctccggcggccccgggccgcactcctgagcaccgctctgcccctcactcgct

SEQ ID NO: 266143 - DNA, 122 bp, Homo sapiens
cgcagcgcgggctgaagggctcctccagcacggccagagcggatggtgaggccgaggaggcgcccagagcgagcaagagctgctagcacgttgtcacctctcaccagcatcactagctcgag

SEQ ID NO: 266144 - DNA, 122 bp, Homo sapiens
gggattagaaataggaaagagagcagagataaagaaggggagaaagaaggggaaagggagcgagttagaaaactatcttgcatcgtgctgagaattaagacaattggaatgtagttcaattg

SEQ ID NO: 266145 - DNA, 122 bp, Homo sapiens
ttggggtttccttccttttgaggctgaacgcacttacctgtgtggacagaccacgttgttcgcctatcatctgccgtggacatgtggctgcttccaccttgtggctctcaggagtggcgcgc

SEQ ID NO: 266146 - DNA, 122 bp, Homo sapiens
acaaagtaactcaaggaccagagtaagccagaatatcaggagataccaaatgactatactcggaagcaagaaatacttaatttgactgacctagataattcttaattattcatgaatcatgt

SEQ ID NO: 266147 - DNA, 122 bp, Homo sapiens
ctcacacagcagatgttcgatgccaagaacatgatggccatgtgcaacccgcgacatggccgctacctgaccatggccaccgtgttccgggccgcatgtccatgaaggaggtggacaagcag

SEQ ID NO: 266148 - DNA, 122 bp, Homo sapiens
tgtgttggaaatgattctgaggccatatccaggcacattgggaagatacgctgtgaccaacgtgcagtttctgttgcagtgcagcttgcatgctatgtatctgccatttgatttgtctaaac

SEQ ID NO: 266149 - DNA, 122 bp, Homo sapiens
tgcccagagacagacaggagtgggtagtgagggtcagaaggattaaggagcttgcctagccgatgaggaagggaacaagataagatgcaaacctcagtctctgactctcagccaagtgctca

SEQ ID NO: 266150 - DNA, 122 bp, Homo sapiens
tcgccgtaaacactccagtgtccccagacgcccccccctttccgatcccataacaccccacgctctcctgacgccccacagccccggccgggccctcagtcaagccgcgacccaggccccca

SEQ ID NO: 266151 - DNA, 122 bp, Homo sapiens
tgtgctgaggcagtgacatggcctggggtccacacagatgccaccaggcagctcgggcctcgcctgggcggctcctcggccttccctggccggcgcactgcagctttgtccacccagcgcca

SEQ ID NO: 266152 - DNA, 122 bp, Homo sapiens
gtttatacctccactagcagtgagtaagaattagcatttccctaaattcttacccggactcgatattaaccaatcattttaatattttgccaatataatgggtgaaaaatgtctcattattt

SEQ ID NO: 266153 - DNA, 122 bp, Homo sapiens
tgccatcattgctcagtataggtaacattttcctggatgtgcattcatctacattaacaacgataattccccccaattaattattataattattaattataattgttaacaattaataaacc

SEQ ID NO: 266154 - DNA, 122 bp, Homo sapiens
gttaacgtagaggagtaagttgaggctcggaaagtaatttccctaaagtcacatttgacgcggggctgaaagccagcatcatttaagacctttgctctcccagtacttctgtaaggtgatac

SEQ ID NO: 266155 - DNA, 122 bp, Homo sapiens
tggtagagaaatcagtgggaagacctagaatcctctctctgtgacctctagataagtgttcgccttctctgaacctcaatgtcctcgtctgaaaacaaaggctgctcagtgagatgacttgg

SEQ ID NO: 266156 - DNA, 122 bp, Homo sapiens
ccacccgtccctttggtagcggcagtcacgtgacagactccggggtaaggcagatgcccacgtgatcctggcctgcagttgggtggctgcggtgagatacctgggttcctgaagggcgggtg

SEQ ID NO: 266157 - DNA, 122 bp, Homo sapiens
tctgtttaccctcatattttcaacaagatgagatttttgcctttaccttcattcagcgaccgctcctcctaaagatctgtgaacagtgcttgattctcaaaaagctgttatgtttaggcttc

SEQ ID NO: 266158 - DNA, 122 bp, Homo sapiens
agggcaccggcggggagacgcgaggacgcggggccgggaacacggacgccggagtagaagcgcggggggcgcgggctggagcgggggcggggacgccggggtcgggggcggtgcgggtttga

SEQ ID NO: 266159 - DNA, 122 bp, Homo sapiens
caagcgaatggatcaagctggaaaaggctgagttagtgattggttgggccccctgcctcccggcctcatcccactgggccctaccgtgcccctcatgcccctgtcaccagctccaagagggc

SEQ ID NO: 266160 - DNA, 122 bp, Homo sapiens
tcggcaggtcacgccggatcagagctacagaataggtgtcagaagctggccgggccgcagcggccacgtgtctccagcactgtgaacctaggacgagggagcccacatattcctgattcttt

SEQ ID NO: 266161 - DNA, 122 bp, Homo sapiens
tacccagcgagcagacctgcctagggcattcatttgcatgcaggccctgtttctgggcctcgtagctttcaaggtgcttagagtcagagagtttattccttgaccccaggtcccgaagaaac

SEQ ID NO: 266162 - DNA, 122 bp, Homo sapiens
catggtcaacacacccacaacccctgcacatttaccaatctacacaactgagcactggagcgaatgaggtgagtgagggcccagaaagttgaagcaggaacgatccgagccttcagttaatc

SEQ ID NO: 266163 - DNA, 122 bp, Homo sapiens
gggggtgagtgtgcagaatatgttctcacctctcaattcattgtgactttagctggaggtcggtcctgttgctgttgttgctctgcatcccagcaagtagaagcagcatgtgagatggagtg

SEQ ID NO: 266164 - DNA, 122 bp, Homo sapiens
gcgggtggcgtgctgtggccattagagtgtggtgcatgcaggatgtagtgtctatggtgacgtgtatgttccgtgtgtgtatgtgtgcacttagtgagtcctgggtttgaaatgcatgtgtt

SEQ ID NO: 266165 - DNA, 122 bp, Homo sapiens
ggcctgttaggtcggagggcaggcccccgtccatcccttcccgaggctgaacctcaggtccgactataggaggatttagggtccgttttctggttgagcaactgtggccagggcaggcctag

SEQ ID NO: 266166 - DNA, 122 bp, Homo sapiens
agaggtggagggtgtcatttagcgccgtctctgaacatagtcattcagctctaaatgggtcgcctgtaacaagcgagaagtgagcttgggggagacttgccaccctcccacctcctccctaa

SEQ ID NO: 266167 - DNA, 122 bp, Homo sapiens
ttcgtacgggttgctcctattcagtgggagaggtaggggtgaagtgacctgtgtccaaagcgtcatcatcatgggcccagcagaccctggtgctggacttctagtttgaactttcacagcag

SEQ ID NO: 266168 - DNA, 122 bp, Homo sapiens
cacacacacacctgccgtgatggcgcgcacacacacctgccgtgacggcacacacacacacgttaggcaccaaggagtaaatgcatcacacgttgtgcaaaaccttttggggaaaagctata

SEQ ID NO: 266169 - DNA, 122 bp, Homo sapiens
gtttgctaaggcggattgcccctgctatgcatgctgcccatagatggagtggacttctttcgagaagcccagctccctgactctgacgtgtccaaggaggctgccaagtgacaaaacacctg

SEQ ID NO: 266170 - DNA, 122 bp, Homo sapiens
tttttaacattcatactgtgcctggaattggtgggttgttggtctcactgacttcaagaacgaagccgcggacccgcgcagtgagtgttacagatcttaaagatggtgtgtctggagtttgt

SEQ ID NO: 266171 - DNA, 122 bp, Homo sapiens
accttgcaatgaagataacagcaatgaacacacaactatgatatctatatatactaaacacggtagcgtatattgccatttaccacattacatccaattaacagagccaaaaacatttttaa

SEQ ID NO: 266172 - DNA, 122 bp, Homo sapiens
ggctgtgaagacatgttaggtgggcaatgatcatcggcagtgccagggaagcaggcaggtcgtgggggcctgccttgcccactgctggtgctgatcttgcaagtagacagacagcatagaga

SEQ ID NO: 266173 - DNA, 122 bp, Homo sapiens
cggccagagctcttggacgctgctggtggcctgagaaacgcacaaccagtgtggggcccgcgcggggccgcccaggacagacggaaaccagtgtggaaaccagtgtggagccaccgtggtgc

SEQ ID NO: 266174 - DNA, 122 bp, Homo sapiens
tgggccaatgtccctgcacgcaataaaagggtgtggactaattgcaggagcagagattcccgccccaactcccccccgccacccctcgccattttgcttcactttgattggtggattggcac

SEQ ID NO: 266175 - DNA, 122 bp, Homo sapiens
gtttatgctgaacactgccttccttctgggagtctggaattttgttacatagtaggcagacggtgtcgacatatccatcctccgactaaaaaccctgggcgtgtcatctctaatgtgcttcc

SEQ ID NO: 266176 - DNA, 122 bp, Homo sapiens
cgcgccccctcggtgcgcgggcacagcagccaggctgccggagagctgatctcggggattcgggtgcggagcccttggcctggaggcgatatgggtggtccgtggcccggttcagtcgcttg

SEQ ID NO: 266177 - DNA, 122 bp, Homo sapiens
cgcaacagatgttatggccgcagtcgagcatcatgggctctgcgaagtactgcaggcacacggggcaggtggtctcctgctgcaggcactcggccacactcccggaggccatggcgccggcc

SEQ ID NO: 266178 - DNA, 122 bp, Homo sapiens
tcggtctggacagagcagctggagggcttcctggtctttacctgaacagtttaaaccttgcgtgcttacaaagtctagcccacttttgaagagctataatggtttacagattcttcatgttg

SEQ ID NO: 266179 - DNA, 122 bp, Homo sapiens
tgcttacctagtcctccatgcccatgcagcaatatggagagaaagggaattcctaacttccgagggaacacctatcaaatctcaggaagccattaggagattacaattggctgtacagaaac

SEQ ID NO: 266180 - DNA, 122 bp, Homo sapiens
agataacactaaaatgaaaagaggtggcagagaacaggaagagaaagaaaccagaggagccgatatccttaaatgctgtggctcctaaggactgccagcaggttgtggggctagccagaaaa

SEQ ID NO: 266181 - DNA, 122 bp, Homo sapiens
gaggccatctacaaacaccagatggactgttgagcttcccaggctcagaacctaagaacccgcaactggaaggaaaaggcagcagaagatgagaaaaacggtcagggaggaaagaaaacact

SEQ ID NO: 266182 - DNA, 122 bp, Homo sapiens
ttttcaaactttccagaccctgaataaaggtttttttttttttcccaccgacctcaccttcgggtccccagccgcatcgccccctgccctgtcagaagcgacttcgggagtcctcgcagccc

SEQ ID NO: 266183 - DNA, 122 bp, Homo sapiens
tcatgtcggctgcgattgcagctctggccgcttcctatggttcgggttcagggtccgaatcggactcggacagtgagagcagtcggtgtccgctgccagccgccgactccctcatgcacttg

SEQ ID NO: 266184 - DNA, 122 bp, Homo sapiens
ggtgcgggggccctcgccgccaccctgcttatctggggacagtcccggaacccggtgacccggctccgccccaacccgcgccctcgtccacccgcagcagccaaggcctcttccccggcccc

SEQ ID NO: 266185 - DNA, 122 bp, Homo sapiens
gaaagcctacatttttaggttgggcaccttcaacatgactccaggtctcattctcccaaccgtagttgaataaaacccacagcctcctagaactcaaaggcacctgagcttggagccacatt

SEQ ID NO: 266186 - DNA, 122 bp, Homo sapiens
acctagactcaggctagcggcccggattaagaacagcggggctacgagtcgggacactgccgggccggggctcacaacaaggaagtcactgaatctccagcgagctgcagctggactgtcgg

SEQ ID NO: 266187 - DNA, 122 bp, Homo sapiens
ctctgggacatgagatatgggtcaagtgagtgtgtacctggcccgcccaggtacaggtgacggtaaacaggccaagtctgggtgtacctgtggacaggagagtccaggctaggtgattagag

SEQ ID NO: 266188 - DNA, 122 bp, Homo sapiens
agaatcacactgaacaataagtggcaatgccaggatttgaacagagatccctcaggttttcgtagttttcttatctttcctccagtgtatgtgttgagctacatgtgaacatcacatatgac

SEQ ID NO: 266189 - DNA, 122 bp, Homo sapiens
ctttgaagagcacagaccccaccactaaagacacactgccaagagtcgtgaagagcccagcggggatgtatatggaagctgtctgtaacctgcccactaattgaaggaatgggtgttatgtg

SEQ ID NO: 266190 - DNA, 122 bp, Homo sapiens
ggcgatctccagctccccaagcccatttacatctccccatttccccacacaactggactgcgctgggccccaagtcgcccaggagagaacatcccagagcaacaactttgtttctggtgtaa

SEQ ID NO: 266191 - DNA, 122 bp, Homo sapiens
cccgcctcacccatctctctctctcacacacacacacacacacacacacgaacacacacacgaggcagggggtgtcaagagcaagagagctacatagtccctctcaggacattacagccccc

SEQ ID NO: 266192 - DNA, 122 bp, Homo sapiens
gtctatgtattctctgcttctgtctcacagcaagctctaattggctcagaaacagcagggcgtgtttaacaactgggaggttggggaaggaagaatataggtttggtttcagtttcatttct

SEQ ID NO: 266193 - DNA, 122 bp, Homo sapiens
ctgcatctcgtgggcgttgatattttcttttccacacttagtcttcaaggaggcttgtggcgcgcggcatccgccccgcgtgagctcggcagccctgtgaggaggctcctgccactgggacg

SEQ ID NO: 266194 - DNA, 122 bp, Homo sapiens
tgacccagatcccctgggtgttgctaaatcaacctcggcaactgtagagtttgctgaaggcgggaaggtagtccgagggttccgccccagccggctccagggtcaggcgcacgcccgtggcc

SEQ ID NO: 266195 - DNA, 122 bp, Homo sapiens
tctgcacgggttccggggaactcctctgcccctccccgctccccttcaccagcctcccaccgacctggcgtccccaactcagcccaaggagctgtcagggattggaggcggctgggtcctcc

SEQ ID NO: 266196 - DNA, 122 bp, Homo sapiens
acaatgtctgacattttatctgctcaaccccgccgctggtagacggtgtttcacacactgcgactttaaatgggccacattatgaataaagatgaattacagatacaagggcagggtagagg

SEQ ID NO: 266197 - DNA, 122 bp, Homo sapiens
gaatggttaaaaccattcatattttataaagataatttcttcaaaagttcttaaaatctgcgctgacctcattatcaacaccaattcactcctcacagtatctgggctgtctaatatggcag

SEQ ID NO: 266198 - DNA, 122 bp, Homo sapiens
ccagggaaaagtgccttcagtgcagacctgcgtgggcctccgcaaacaattcccaggcagcgctgcggggctctgggacttgggaagggcccaagcgcgattatttctagaattttccacat

SEQ ID NO: 266199 - DNA, 122 bp, Homo sapiens
actggacccgctctagaggcccggacacacccaggaggcccctcacagactgcagacccccggctcgcccaccagccctgggagagctcagatgccgcatcctccccagaccgcgccttcct

SEQ ID NO: 266200 - DNA, 122 bp, Homo sapiens
ctctgcttctaaagcctgtgctacagcgaaaagcgctacagcgtgggaggtgctctcttccgcgaaggtccatcctggggctgcgctgccgcccaggctggggacaagtggcgcggggttgg

SEQ ID NO: 266201 - DNA, 122 bp, Homo sapiens
aaaacaagctccttcaaaatgcactgccctctgccaagcaggggagtgccacattatctgcggtgggcaccagcattaaggaggaaatgattttctttcatctgtccaagtaaatctttccc

SEQ ID NO: 266202 - DNA, 122 bp, Homo sapiens
taaatccttctgtctagtaggaatcttattcatgggagtgtctggaaaagggacaaagagcggctattgagatttttttaaagcctggatttgggatgtctgaacagtgaataactccaaag

SEQ ID NO: 266203 - DNA, 122 bp, Homo sapiens
ggctcccgccctgagtggagcctgtgacctgcccgggccccagcgccccgtgacccctgccgcctgatccttgcctggctgagatggggcttctgaaggctgccggcaccagggcaggcagc

SEQ ID NO: 266204 - DNA, 122 bp, Homo sapiens
gcacgcggcaaccaaccggagcggaccactgcggagccggctgcggggggagctggggaacgcgggcacccacaggcttcacaggcccatactgcatccccaaccctccctggcccccttgt

SEQ ID NO: 266205 - DNA, 122 bp, Homo sapiens
tattcttctggggaatatgaagggttcagtctttttaggaaattggatgatatctcttcccgaccactagcagcctctttcagtcactggaaaatgcttacaggcagtagccaccatcatgt

SEQ ID NO: 266206 - DNA, 122 bp, Homo sapiens
gcttgagtttacccacacctgaggatacctgcacctgacctcccttcacctgtgcttacccgcatctgagcttacctgccacagcagtggaatggagagggcacagctcaggctctttcagc

SEQ ID NO: 266207 - DNA, 122 bp, Homo sapiens
tgaaccatggcgcccggcctaaattctttaaagaggttcaagtcattagaagccttctctcgattttttggtaatgcagatggcaaagggtgaaggaggtatagggtggaagaaaagtaaac

SEQ ID NO: 266208 - DNA, 122 bp, Homo sapiens
tctgaaggacacagagtgctctaagaaagggacgatggggcagatccatgttcacaaacacgcccatgtgaattcactctcagatgtctcctcgtgtcagcacgctgggtgccagcacgctc

SEQ ID NO: 266209 - DNA, 122 bp, Homo sapiens
tgacctcgtgatctgcccaccttggcctcccaaagtgctgggattacaggcgtaagacaccgcgcctggccaggtggtattatggattcttaggtttaataatggtattgatgttatgtaga

SEQ ID NO: 266210 - DNA, 122 bp, Homo sapiens
aagcgtgccgctccctcacagggtctgcctcggctctgctcgcagggaaaagtctgaagacgcttatgtccaaggggatcctgcaggtgcatcctccgatctgcgactgcccgggctgccga

SEQ ID NO: 266211 - DNA, 122 bp, Homo sapiens
aacaggcaggaaacgcgcggccagccaaggtcctgcgggagggggtgcggccccggcagacgcaggtcccctcaacacacacccgcatccacagcacacagccggaccaggggtttaacgaa

SEQ ID NO: 266212 - DNA, 122 bp, Homo sapiens
tcgggactgggcgtgtgcccggcgcccaagttcgaaacgcccgccagagccgcagaggcccgctcgggaacgtttgcagaccgttccatgcttccgcctccaaaggctcttgggtagtgacc

SEQ ID NO: 266213 - DNA, 122 bp, Homo sapiens
ccaaccttaacaagtttctaaacttgacccaagcgtatgtttttatatacttcacttaatcggcattcttttattgaactcccacctgtgtgccaggctaatgctggcagtataatagataa

SEQ ID NO: 266214 - DNA, 122 bp, Homo sapiens
ccctcaaaaaaaatcaaagcctgcaagtgaggttgtggacttagagggagaaacatactacgtgatatgagactcaggtcactatcatgtttcagtcatttgctgagcagcatctggtatgt

SEQ ID NO: 266215 - DNA, 122 bp, Homo sapiens
acccgtccttagacctgaggacacgctcgggagcgggctgacgtggaccccgtttcagggcgccccgggcccctgcggggaacaatagccgccgcctcctgggcggtctggcgggcgcgcgg

SEQ ID NO: 266216 - DNA, 122 bp, Homo sapiens
ctgaaaggatagttcaaaattccatcaagtagttctgacttcctgctacagaaatgcaatcgcattgacaataagaggacgcttttttttttcccctaagccttatctgcacataaactggg

SEQ ID NO: 266217 - DNA, 122 bp, Homo sapiens
agaaccaggtgggaagtggaggaaagcaatgaaaagacatcacaaggaccccggggagctcgcagtccaaagaggagacaggcacaccacccaacactgaccggcgatggagggtggagggc

SEQ ID NO: 266218 - DNA, 122 bp, Homo sapiens
ctgtgaggccctgcaggcctggcccagccacacccatcatccacccccccctccccgccccgctgctgccgcccccactgagggtccaggcatgagaaccgcacccaacactcccactgtcc

SEQ ID NO: 266219 - DNA, 122 bp, Homo sapiens
tttctgggatgggtgacctagtaaagtccaggcttgaatctcgggtctttacttgggcaacgggcaccatgataccctatgttctggggattagcagtgaggaatggaaagtgcccagctca

SEQ ID NO: 266220 - DNA, 122 bp, Homo sapiens
gcgccccctcgcggcagtcctggggagtctctgaaaatcagcgttcggatgactgcaggccgtgatttcggaaatgtcaactgaaatcgaggccaccatcccgtgccttgatcggaacggat

SEQ ID NO: 266221 - DNA, 122 bp, Homo sapiens
atgagaggcctagatgggatcttccgtggggcatttggagggccaggctggtggacattgcgattcagagtcacccacaaacagaatgagaagaggggtgatgggcaggatatgaggactgt

SEQ ID NO: 266222 - DNA, 122 bp, Homo sapiens
gagtggagaggcctgacagtgtatgggcgtgattatctctggtagcccattctggactaacgattctgtgaacctataatttagagagtccataatgtcatatgttcaccttacttatctcc

SEQ ID NO: 266223 - DNA, 122 bp, Homo sapiens
taggacagcctcatgtgcaaaatggttcctgccctcaagatggttggaaggataagaggacgcaccctgggtcagcagaatgtctggcgttgcctgctcagtaagtgctggctggtaggaat

SEQ ID NO: 266224 - DNA, 122 bp, Homo sapiens
gtctagagcggttcccccatgcggaggaggtcctggctgttccgaaatctcgcctgcctgcggggagcaagcatggcctgggcagcagatctcaacctgtgattgtgacatcatcgccccta

SEQ ID NO: 266225 - DNA, 122 bp, Homo sapiens
catattcatcaagctctgtattcaaaaacaggctttgcctctattgctcatccatgccaccgtggctggtgaaggacggtgctgggcctggaagctgccccgtggcccttgcctgcctttgc

SEQ ID NO: 266226 - DNA, 122 bp, Homo sapiens
tctgcagggaccctccctagccagcccggccgcgtcccacatccgccgacacgccccttccggcctaatccccgcccctcaagcaccggccccgccccataggccccgtccgtggccccgcc

SEQ ID NO: 266227 - DNA, 122 bp, Homo sapiens
tccactggctaaagatcaaaagcatctttttctctttaatggggccacagttgggcaaaacgcccatcactttaaaaccacctctcggctggaagtacgtaatttttagcgagtcacagaaa

SEQ ID NO: 266228 - DNA, 122 bp, Homo sapiens
gtgaccggccctctgcccctggcagccccgcgctgtgtactgtaaggacgtgctggacatcgagcagttctccactgtgaagggcgtcaatctggaccacacagacgacgacttctactcca

SEQ ID NO: 266229 - DNA, 122 bp, Homo sapiens
cgcccaggtggaaatgcggctcggaaaggtagtggggcctgctcaaagtcacacagctcacgcgggagccgcgccgctgcccacctgttcttttaactcaccgcatgtggtacaggagccca

SEQ ID NO: 266230 - DNA, 122 bp, Homo sapiens
catgacatgaaatttggcatgagggaggataccagtggcagccacttactgtaagcaagccgtcactgagtagccctctcacacacccctattttaccataacttccagaagctctttgtgt

SEQ ID NO: 266231 - DNA, 122 bp, Homo sapiens
tagaagaggaatacagtaggttttttgagtagatctgtctaatcaggggtaagtctttaacgctaggtaataccagtatttggatacaagaaagattaaataactgttctaaggtaaaccat

SEQ ID NO: 266232 - DNA, 122 bp, Homo sapiens
ggctgtggttggtcggtggctgtggttggtcggtcacgctggggaaatactcttacgggccgctagggggccgagcatctgtgccgctctagggcctggcttccagtatcaagttcttgtcc

SEQ ID NO: 266233 - DNA, 122 bp, Homo sapiens
ggccacagaccccgcccagcggccagcacccggcgcaggcccggcagccgagctgcgcggcggcaccatgcaggtcaccctgaagaccctccagcagcagaccttcaagatagacattgacc

SEQ ID NO: 266234 - DNA, 122 bp, Homo sapiens
ctgcgctcccccttcaggtaggcccgcttgcctgtgccctaggggcagcagggcccaggacgtcccggggttggaatgtagaccctatccttcactttctgcccctcctaggagttcagagt

SEQ ID NO: 266235 - DNA, 122 bp, Homo sapiens
gtgtccagctcgcgctggctgtactggaagtcggcgagctccgtcaggtgcagcttccagcgcccgaggaggcccgcagggtccccaagggggcggccccggccccaccaggccccggcccc

SEQ ID NO: 266236 - DNA, 122 bp, Homo sapiens
ctgtttgcctggggtcagaacaagatacagcaactagaggccacgcccacccggcagccacgccccctcgggaagaaagcacgcccaccaagcgctaccacgccccccgcagaggccacgcc

SEQ ID NO: 266237 - DNA, 122 bp, Homo sapiens
gggacccagcttaagaactgcagggcgggcacctcttttgctttcccgagtttttatcttcgtaagggggaggggaaataagggaaaagaggaaatctgattaatcgttcacttcccaccgc

SEQ ID NO: 266238 - DNA, 122 bp, Homo sapiens
ccggtgaccatcttcatgggcaacgtggtcagctacctgctgttcctgctgcttttctcgcgggtgctgctcgtggatttccagccggcgccgcccggctccctggagctgctgctctattt

SEQ ID NO: 266239 - DNA, 122 bp, Homo sapiens
tgtgcgttcaatagtttgaatgtttatgattcttgaatgtaaagctccctgtgtacacctcgttgtacaatgttaagtacatactgaacattgaggaagggtggcttctctattgtcctcag

SEQ ID NO: 266240 - DNA, 122 bp, Homo sapiens
gactccaagatcttcaaagcacctcccaaacctcccccaaatctttctcgcccctgtgatcgctcaggttgaaggctggcccggactgccagcctgggctcccctggtgaaatcctggagca

SEQ ID NO: 266241 - DNA, 122 bp, Homo sapiens
gcatggccggtggttctccaaggcttcctcagggcacgcggtgggctgtgtggggtgtcacgtgagaaacggcactgagattagtaggcgtgacaaagctgaattcctcacaaccgctcccc

SEQ ID NO: 266242 - DNA, 122 bp, Homo sapiens
cttcagctattccatggtgtatttatcatctcctcacataacagattaggaacttgagctcggaggaacttccggagtttggctccaggctccttcactcactccccgaatgaccttgagta

SEQ ID NO: 266243 - DNA, 122 bp, Homo sapiens
agcgtgtttctgggctttgggccctctccaagactgctgcattcctcaagcagctctgctcgcaggttgccgccgcgagttttggaaaactctgagtcagggccccaccgtccaagtttgtg

SEQ ID NO: 266244 - DNA, 122 bp, Homo sapiens
ataccctgaccctctgtctacgcacctgggtcccggcggagtggctggaccaggcctccccggaaggggcaccagccttgagtaaacggatgcccacagtgtctgggtgctcccagggcagg

SEQ ID NO: 266245 - DNA, 122 bp, Homo sapiens
cagacggagggtggccgggtgtcctgtgctctttctccttgggggcagacggagggtggccgggtgtgctggctctttttcctttggtggcaaacagagggtggtccagagcaacagtattt

SEQ ID NO: 266246 - DNA, 122 bp, Homo sapiens
tctgtacgtcagcacacccaggagcgtatgtaataggagtctcactcgtttttgtttgcccgtctctcacatagacttacgttcttacctacgtgtgcgtttcgtgttctggacgatggtgc

SEQ ID NO: 266247 - DNA, 122 bp, Homo sapiens
tttaggtatcccgttagccaacaaggaaaacctatagaggcgcttgtgttcagcagatggcgctcttttacctagttcacaagaatgatcttgaaggtcattctctcttgcctctcctgtgc

SEQ ID NO: 266248 - DNA, 122 bp, Homo sapiens
cgccagctcccccaggcgccgcacgccgcacgcccggaacacgtcctcctgcgtgcgcgccgcgtctagcaccgcaccgaagcggaacgccacttctggacccccgcctggaggactcacct

SEQ ID NO: 266249 - DNA, 122 bp, Homo sapiens
gagtcccgcggcgggttggctcgcgcttcgttgtcagatctgaggcgaggctaggtgagccgtgggaagaaaagagggagcagctagggcgcgggtctccctcctcccggagtttggaacgg

SEQ ID NO: 266250 - DNA, 122 bp, Homo sapiens
ggagcctccgccagcagttgaactctgaagacacccaggcagcttatgtcctgggcactccgaccatgctgccctcattccctgaaaacattctttcccaggaagagtgctccagcactaac

SEQ ID NO: 266251 - DNA, 122 bp, Homo sapiens
tggagtggagcaaagcagttgacgaggaattgaggcaggcgctcctaagatggagggaggcggagagcagggctgtggaaaagaattttccatctgacctgctactttccatagctaattta

SEQ ID NO: 266252 - DNA, 122 bp, Homo sapiens
gatttctcctcatgactgcagcacgtagtacagttggttccctgtacagaacacaaaaaccgccatggtaattagtgctgggtggtggaaaacacctcctttgagctattcacccaatcttt

SEQ ID NO: 266253 - DNA, 122 bp, Homo sapiens
actgttcgttgtacatccagggctgaagttccaggctggggtacttgccaaagggtggcacgatcaggctgaacacaagggcaatgcagacaaacacagctggcaagacaatctttacccag

SEQ ID NO: 266254 - DNA, 122 bp, Homo sapiens
caatcctctaggtccaaggacatgggggtcacagaggtgggggccttgggcccacacattcgaggagagttcccaaaagtttccagtggctgtcccaggcaggtatcaggttcggcccacac

SEQ ID NO: 266255 - DNA, 122 bp, Homo sapiens
actacccatccccctccccggaaagcagcaacccatccgctgccgccggcggcagcagcgcgaagccatccacagacttccacaacctggccagggagctggaaaactcccggggaggcagc

SEQ ID NO: 266256 - DNA, 122 bp, Homo sapiens
tgcagcctgatcatgccacttcctttcttaagccttcaatgccttccattgtccaaactccgaagcttgggtcttaatcccccgagacctggctctccttccaccttcatcctcacctccca

SEQ ID NO: 266257 - DNA, 122 bp, Homo sapiens
gtgctgcagcgcgcatgctgcccgcccgtcctgcttcccgggggtcgtgcttgcttctcacgtgctgggctcctccggatggggaaggagttctggtcccaccgtccactgggccattaggt

SEQ ID NO: 266258 - DNA, 122 bp, Homo sapiens
accggctctttggcacacactgcgaagtcagcccctctgcccagtctggaaaagcaacggcgtaagtcaatgtgatgaagaggtccagcctctcgtcgggaacttggccgcaaaatgggtaa

SEQ ID NO: 266259 - DNA, 122 bp, Homo sapiens
ccgtctaaactctggtttttgcagacctgtctcctgcgtccccttacacgtgttcctttccggagcttccaggggacccggagcataagaattcaaaccgagaccctcagtcccagcccccg

SEQ ID NO: 266260 - DNA, 122 bp, Homo sapiens
ggcacacagatcatttagttaagaactttggtgtcatttaatagaagacaaaacaaaccacgagaggcatgagaggaatgatctatgcaatgactaagatacctgctagcagatgtttagct

SEQ ID NO: 266261 - DNA, 122 bp, Homo sapiens
agctgcagcagctagaaacaagaagcaagagtacgaggtctttaggctgcgtccccctcccgcagtcagggctgccagtgagggaaagagaagaaagggtggacggttgaaatggtgatcac

SEQ ID NO: 266262 - DNA, 122 bp, Homo sapiens
aatcgtatcatacggaactatggataaagctccctgcttatttccttaaataccacaatccgttttgcattagaagtaagagctaaagataatccagagacactagatactactgtagaaag

SEQ ID NO: 266263 - DNA, 122 bp, Homo sapiens
gcagttagaaggggaggagagggaaggtgtggcaggcgccgagcaaatgggtgggtggcgcgtggcagggacttccctatgggttggagctggatttgcagccgtgttcatacggctggtag

SEQ ID NO: 266264 - DNA, 122 bp, Homo sapiens
ccgtagggaggcctccgcaggcaggtcttctgtccaggtttctgaacgcatttccacaaacgtggtcggtaggtaagttaagcccttaaccaatccacttgagagatactacctatcctctt

SEQ ID NO: 266265 - DNA, 122 bp, Homo sapiens
gaccagaaaaaggagtgatgggaattcgaggctctccccggccttggaaaaccctggaagcgctgcacctccctcctgccgcacggatttgagcgcggccccgacgtcctggcgtccgatcg

SEQ ID NO: 266266 - DNA, 122 bp, Homo sapiens
ttccttgcagagaggcatgcggtcagaacgtcactggcagatctcgcctgagagttttgacgcttgtaactctgccctggaaaggtgaatcaacttttattttgattcatgtgtttttccag

SEQ ID NO: 266267 - DNA, 122 bp, Homo sapiens
taaagcatactttgaaggagaaaaggtaggtatttatgctaggtggagaggtaggatatacgtattctgtagcatacaggagaagcctatgaaaattcatggaggaaactcgttagagacac

SEQ ID NO: 266268 - DNA, 122 bp, Homo sapiens
cctaggtcctgcaggtcccgcgtgctgcgaaacattttctttgtccctttctgcccagggcggctgccggtctctccaggaaccgcgagtaggtgctcccgccaggtggtatcggtgaaagc

SEQ ID NO: 266269 - DNA, 122 bp, Homo sapiens
ttaaaaacaaaaagtgatttcctggtcctcttccccggatggcgtgtgcgatttccctcacgcccatgggaagtccttcagatccttcttatctggaaacctctccaccaagtggacagact

SEQ ID NO: 266270 - DNA, 122 bp, Homo sapiens
gcagggatgcattgaatcattactcttaatgagaacaagacagtttttttaagaaagttgcgaagggcgtaacatgaagtggatacttgggaaaaataattgtgcagatttcgaaggagtgc

SEQ ID NO: 266271 - DNA, 122 bp, Homo sapiens
agtaggttagtgcataagatatggtctttgcttcctaggtgaggaaaacgtaagttccgacgtttgagtccctgcccttgttaaggtgtatatttcaacacatcacttaatcttagcaatcc

SEQ ID NO: 266272 - DNA, 122 bp, Homo sapiens
ccgaatccgcccctaactcacctagtgtccatataagcctgctgcacctccaacacagtgcgacttccccggccctcccctgcggaccagtgaacctcgtccaagagcttaataaaggaact

SEQ ID NO: 266273 - DNA, 122 bp, Homo sapiens
ctcccagctggcccagctggagcataaaatcccctgtcagcacatgccaggcgcgttcctcggtgcctccccagcctccgtgaccccagggcctggcttaggctgggaagatgggagaagtc

SEQ ID NO: 266274 - DNA, 122 bp, Homo sapiens
gcctgctctcaggccacagaagtcactcccctgactgtaatgggtgttaagcttctgatacggagccctagagaggagacagtgagtcagcggcagaggaggaaccagaacccagggctgca

SEQ ID NO: 266275 - DNA, 122 bp, Homo sapiens
ggcacattctctccttcccattcatggggcaaatatttaccgagccaggactctgcatagcgttgcatgtagctcggtaatggcttcacaggacccagagttttaggactatggaggctccc

SEQ ID NO: 266276 - DNA, 122 bp, Homo sapiens
aaaatgtagccaagaataatgtgcaagtgtctagttaggccaatagatatccttaacatacgtgagctgggaacacaaatgagcatgaagggcaaggaagagcaccaccccctgcttctttt

SEQ ID NO: 266277 - DNA, 122 bp, Homo sapiens
agagaagagagctggaggagtagaaggggtgtttggggtggtgggtggggacaaagactacgagtccacccatgttgaagcagtggtgtcagaaatggaggcgagaggagaagggacctggt

SEQ ID NO: 266278 - DNA, 122 bp, Homo sapiens
cagcttgattggcttaagcagaagacacagatctttccatgttagactgaaaggtggcatcgaggatggaaattcacccccttatttttcactatcctcaaatgtttagctaacggattcat

SEQ ID NO: 266279 - DNA, 122 bp, Homo sapiens
cctccgagcggctgaggaccccggtgcagaggagcctggctcgcagaattgcagagtcgtcgcccctttttacaacctggtcccgttttattctgccgtacccagtttttggatttttgtct

SEQ ID NO: 266280 - DNA, 122 bp, Homo sapiens
ttaattgagtttgtcatttaaaacctgagacatgtcactgacactaatatgcacaaatagcggtacggtaatgatgatgctgtgctttctttcaaattaggatttatgttgcagtcatcatt

SEQ ID NO: 266281 - DNA, 122 bp, Homo sapiens
cgacattctaggtaacctgattccccagacgggataggcggcggcctgctgctgcgaaggcgcgaccacgtgacctttcctgcctgcaccggggaaatgcataccttgttcagaaaactagg

SEQ ID NO: 266282 - DNA, 122 bp, Homo sapiens
cccctaataatgcacggcagcttcagggagtcctaaggccacaagatggagaggctgtggcgccccaaccacgaggggtcagcctgcagctgaggatgcggcctcggctcaggctcagagag

SEQ ID NO: 266283 - DNA, 122 bp, Homo sapiens
atacccagagtccatctgcaggaaaagcccgccatcaggtcaggggttctccttaaaaagcgcacccttctggccgggcgcagtggctcaagcctgtaatctcagcactttggaaggcggag

SEQ ID NO: 266284 - DNA, 122 bp, Homo sapiens
ttcgggtgcaccaaggaagacactcaaggtcactttgtaacaactttattggcaactagccgggaaggacaacgacaaccacctggtgatggggcaagagggagacaaaaagaaaaactgta

SEQ ID NO: 266285 - DNA, 122 bp, Homo sapiens
ggcactgacttctccgtctcagcccagagccacttatatgggcggccacgcagccctgggcggggctctgacagaggtgcccagggagccaagccggtctgatcgaccctctccccacactg

SEQ ID NO: 266286 - DNA, 122 bp, Homo sapiens
agggatatgcggtgggcctgaaaaagccatttcgggaggaatctggtctcggctggggtccggccggcaccgtgaacaccacgtgaacaccacgtcggaaatctgctgggcagggagatttc

SEQ ID NO: 266287 - DNA, 122 bp, Homo sapiens
tcacctccccaggggtgtagaaagacctgggcctgtatatatgtctatacccatggcttccggagaaatcaacactagatctaagatgagctgaataataagaaaattaccccctccacaac

SEQ ID NO: 266288 - DNA, 122 bp, Homo sapiens
cgcccgcatcccctgctctccacgacctcaaagggcctgtaagtggtcgacaaaaaggggcggggatgcggtggttccgggcggggtcttcagcccttccggtgcggcccctttaagaggcg

SEQ ID NO: 266289 - DNA, 122 bp, Homo sapiens
aagaaaaacagctaatttaaagaaaagtgatgtaaactattgggacatctttctaaacctcgcttcagattttggggtttgaagatgcaaaggaaatggctcctcgtcattcttcaatttga

SEQ ID NO: 266290 - DNA, 122 bp, Homo sapiens
gaagctgccagggagggcgggagggggctcctgaccctgcccactgccacccctgcccaccgccgcccctgcccaccaccgcctctgtagttccagggggaatggttcgtcctgggcctggc

SEQ ID NO: 266291 - DNA, 122 bp, Homo sapiens
aacgaagaccagtggccgcctccccagaaggtcgcgatggcgcgcgcgggcgtgcggtgccggtgtgatcgggggctccttgtggcccctcgtcgccaacccactcctacccccgggagcgg

SEQ ID NO: 266292 - DNA, 122 bp, Homo sapiens
tatacagtttttgaagcttccctggtgagtctgacaagcaccttagacaaagagctccttcgtcgggaaatgggtggctctgttcacattattacaagacaacctctgtcgttaacatacag

SEQ ID NO: 266293 - DNA, 122 bp, Homo sapiens
agtcctggaagagctcccagggcggagtggtgcgatgcagacgactgtccgcagggcgggcggtggcggggcgcaagctgcggggagggaggtgaggcgggagcgtctctaccgccagggcg

SEQ ID NO: 266294 - DNA, 122 bp, Homo sapiens
cgagttccgatggaggctgtggctgcgcgtcgatgctccaccaggacgctggagaggcggcgcgggtcccacaagcccgaaagcccgggaggtggggcgggtcctgcagcggaaatgcctct

SEQ ID NO: 266295 - DNA, 122 bp, Homo sapiens
ttaagcaccctgaagaaaagcggcaaaatgcacgggttaaatgaaaatgacgcccccatccgacagagcgtcactgggaacaggcaagtgcacggttagctgctcactctactgacccagca

SEQ ID NO: 266296 - DNA, 122 bp, Homo sapiens
agtgtgggagaggagtgaaagggcacgtgagtctccggaggccgggtctgggcacacgtgcgcaacagccagcccctcgtgcgcggggagacgtctctcagaagcaccagggacacgggcgt

SEQ ID NO: 266297 - DNA, 122 bp, Homo sapiens
tctgcccacacactatgttttggtcttggtaactggccctctttctctttcctgtgatcacgtccccactgacgctcctgtttgtaggactaggacctcgctttccttgctgtgaacattct

SEQ ID NO: 266298 - DNA, 122 bp, Homo sapiens
accagcccggcttccctgccgcctcttgctatttataaagaggtttccattcctgatgaccgcctgccggcctgccagccttcagggcgagcggttccccacacttgccgctaggtggcgcc

SEQ ID NO: 266299 - DNA, 122 bp, Homo sapiens
agagattgctcttatcctcacatgacagatgaggaaactgaggatcaaagaagtgaagtccgctgcccaaggcacagaaaggacaagtaggacctatggaagcccagccaaggcccagcagg

SEQ ID NO: 266300 - DNA, 122 bp, Homo sapiens
tgtgggtggggtgggctgagcaagtggtccaggcccctcaccggcctcactgttctccagcgactgatcctcctccgacaccttgaggaacacttcctccagggtcgtgtccatcagcccga

SEQ ID NO: 266301 - DNA, 122 bp, Homo sapiens
gcccctgctcctttgcacttaacgctctagtcctctttctgagactttgctgagggattccggattggcaagatggcatgttcatattctaatgtcagagaaaaaaatcctgtgattcaaaa

SEQ ID NO: 266302 - DNA, 122 bp, Homo sapiens
gtgcgtaacccaacatgagaagcgcacgatttagttcagtgttctccgtcctccacggttcgcagttgtcacctccaaggcctctgaggatgaaggactgggacaggcagaggcagagcccc

SEQ ID NO: 266303 - DNA, 122 bp, Homo sapiens
atgaagcgttcaaggaggcggaggaaggagtgggtatgtgcggaatgaaaccacgtggggcggccctgcccagtttaaaacgaacttgaactccaggtattacagaagaaggaccatgggaa

SEQ ID NO: 266304 - DNA, 122 bp, Homo sapiens
cccgggcgccaggggcaggaggagctggctcctgaccgctggggaaatcgaggcacgggccgccagcagggtgcgcggcagacccgaaaccagcggcccccgccgccgggcccccaaccgcc

SEQ ID NO: 266305 - DNA, 122 bp, Homo sapiens
gagttcttgaacgtagggacctctagtcactacctctatccccaaagcccagcacaatgccgctgcacaatttgctaaactcgcagcctgggtcaacgggagaatcggaggactccagcagt

SEQ ID NO: 266306 - DNA, 122 bp, Homo sapiens
ctccagatagggagcccaggaatctaaattttaaaccctgcaggagattcccttgactgacgagtgtgggaagcactgccttctcagcctttaatgtgtataggaatcacctggggatcttg

SEQ ID NO: 266307 - DNA, 122 bp, Homo sapiens
tcattgctaatgtgattacactggtaaagtctgtgttcattgcaccaaggacagagccgtcggctcaagaagcatctgtccctgcaaaccacttttagaaaaatagaaggacccgcgccgga

SEQ ID NO: 266308 - DNA, 122 bp, Homo sapiens
agcgtcaactacgatgactactaaccatgacttgccacacgctgtacaagaagcaaatagcgattctcttcatgtatctcctaatgccttacactacttggtttctgatttgctctatttca

SEQ ID NO: 266309 - DNA, 122 bp, Homo sapiens
tggacgccgcggcattggcgaatgcctctgctacacactacatgcgcggaagcaacaggccggagcagatggagagaggagggggaggctcggggcttcggaatgcatggcagggaagccgc

SEQ ID NO: 266310 - DNA, 122 bp, Homo sapiens
tcagaaagactccaatttttcactttgtttttcattttgttcgggttttgtgtccacacacgaagtgtgtccacatagttgttgccatgctattttctaaaggtcttatgagtgctgactaa

SEQ ID NO: 266311 - DNA, 122 bp, Homo sapiens
ttccttttgggaaacgcagtgtgctaaaaaagtgcatgcagcccaggctgtggcctaggccgtcggttcccggccatgcctagctcctctgaggtcgcccttagtgaggacacgaggtgccc

SEQ ID NO: 266312 - DNA, 122 bp, Homo sapiens
tggagaagcgggagcgaaggaaaggaggcaaaaggcaaagtgaaggaaagctggatagctcggcctctccaaactgattgattagtcatgatccccgcagttttaacagggactcattcaat

SEQ ID NO: 266313 - DNA, 122 bp, Homo sapiens
gcgaagcaaagtggacacggggatccagggaagacaaaccagcccaagcgaggtgtgcgccgacctcatccctcccgtcagaagcgcgggatgctaatgacctcattaagattccgataacg

SEQ ID NO: 266314 - DNA, 122 bp, Homo sapiens
aggaattggagaaaaaagtgagtagttcacataaataaaacagttggtgttagtttcatccggttgagccaagcatttcagggacagctgagaagagcagaaactgaagaaaggaagagatt

SEQ ID NO: 266315 - DNA, 122 bp, Homo sapiens
cccagtccatgatgcctgcagggggtcactctgtgtcctcctgtgactctgccctgtggccgtctctcctgttgggctgcctctgggctctgtgtgtcccggctcccccaggaaggatgagg

SEQ ID NO: 266316 - DNA, 122 bp, Homo sapiens
cctgagggtgagagggggccctgtttgggagccgcccccactgcgcttttgctccctactcgcctgagtgaccacggagctgaagcccgcttcacagtaacgcttgtcccagcctgcaggag

SEQ ID NO: 266317 - DNA, 122 bp, Homo sapiens
aaccaaagtgagaaaagcggcatgcagtgaaatgagcagtgagcagccctttagcaaaatcgccctccagtccttcctggagatgccttcagccagcatcccagactccacagttatttatg

SEQ ID NO: 266318 - DNA, 122 bp, Homo sapiens
ctgacgccccgatgcctcccacctccgcagaactgcatgtttgacacctgcaactgtgagcggagcgaggactgcctgtgcgccgcgctgtcctcctatgtgcacgcctgtgccgccaaggg

SEQ ID NO: 266319 - DNA, 122 bp, Homo sapiens
cggcgacaccggaggggggtgggtcaggaagtgggggcgcggcggccaggagcgggcccccggaggccgaggggttcggcgacgcggagggagggagagtctgggccgcgcgggagccgcag

SEQ ID NO: 266320 - DNA, 122 bp, Homo sapiens
aaagctgttagtgactgaacgcaagaattttccggttagcagacgacgggatgcagcgggcgcggcgcctgcaccacgctgggggtcccggtgtccgggctgggccgctccgactccgcccg

SEQ ID NO: 266321 - DNA, 122 bp, Homo sapiens
ctagggtttagaaacagtggcaaagatgcaaagtgttccactgagaacaattgacagtttcgaatatgagataggctgccacttgaaggagagggaagctgagacctacctggcagtttaga

SEQ ID NO: 266322 - DNA, 122 bp, Homo sapiens
cggaacttaagtgtctttgagcctagcacaggccatccgccctagatatggctcctaactcgagaggccaccctttgcggcagggaccaggtggcaagtgctgtgcattaatgaaaagctgt

SEQ ID NO: 266323 - DNA, 122 bp, Homo sapiens
aatagtgcctcaaccttactggccggtctcgactccaaaaccctaaaacaggcgctggagcgagggtgacggactcacaggtcccaccccggccccgccctctgcgccttccaaagggcaaa

SEQ ID NO: 266324 - DNA, 122 bp, Homo sapiens
atcgtggcggccgcctccccggggctccacggcggacccgccgcctgccgcggccatccccggcccgctcctgccaggcccccgaccagacacccagaggcacctgctctgcgcagccacgc

SEQ ID NO: 266325 - DNA, 122 bp, Homo sapiens
ggcagaggcgtccgctgacaaatcactcccatgatgagaccctggaggactccaaatcctcgctgtgaacaggactggacggctgcacacaaacaaacgctgccaccctccacttcccaacc

SEQ ID NO: 266326 - DNA, 122 bp, Homo sapiens
taccctggagatggcaaagcaaacaagaggaagtgcaaggtgagtctgcaatacaggcagcggctgtaactcgagctcaaccagctcaacaacgtttaaggaaacatgaaactggggcaatc

SEQ ID NO: 266327 - DNA, 122 bp, Homo sapiens
tacttggctagaggttgttcccgggtgtttccaccccgggcctgttatttacacaccgtgcggtaatgtagtcacggccttgggtgcgcagtatttatggtgtttgatcggcttccagccca

SEQ ID NO: 266328 - DNA, 122 bp, Homo sapiens
gtgtccggagattttcaggacttggtgcatttcagatgaaggcttttccagaagcttccccgtagaagaggatcaggcatccaactggttaaggtcagcagcgtttggcacgtctccttcca

SEQ ID NO: 266329 - DNA, 122 bp, Homo sapiens
tcggcgccgcggggaggcggctctgtctccctgcagctctgcgggccccgctgctgtcagcggtgacaccctgggtctcggttccccggccccagcacctaatccccttccctctcctctgc

SEQ ID NO: 266330 - DNA, 122 bp, Homo sapiens
tctcctgagtccgactgagaggacccatctcttgagtgccacttgggccgcggggggctccggcttcgcatccctgagcgctgccaccgctcttcctctgaatctgacctgcggagaggacc

SEQ ID NO: 266331 - DNA, 122 bp, Homo sapiens
cagcgcgccgccgcccgtaggctccattgaaccgctcacgcgccgctcacgcgcaagtcccgcctcccagcgctgccccgccccccgagcccacgcaggcgctggactgctggcggcggcga

SEQ ID NO: 266332 - DNA, 122 bp, Homo sapiens
ctctgtcccttgttctggaagctgaggcgagaatgtctcagttctgttcccttcaggcttcgagaccaccgccttgctgtgtcccgtagtggactgagggcctgcaagagggagtgagggct

SEQ ID NO: 266333 - DNA, 122 bp, Homo sapiens
ttacgtacccgcgcctctctgtgcctgcgaagagggttccggtggtgccctggcggccatcgctggaggccgcggttgctatgggagacctggcgcccggcctgggagcgacaggaaggcga

SEQ ID NO: 266334 - DNA, 122 bp, Homo sapiens
ggttgagaaccactgctctgatgtgatatgcttggtggcagctgaaagcctaattctttgcgatttatcctagagccaaagcttgcttctgaggaggatacagcagaaggtctctctctttc

SEQ ID NO: 266335 - DNA, 122 bp, Homo sapiens
tcactctcagctttcaaaagcagaatactgttctattaggtgtttctctctgcatgttgtcggcagtgttctgaataggaggagatccctgcctttaaagggggcgagattggggtggaggg

SEQ ID NO: 266336 - DNA, 122 bp, Homo sapiens
agacccaggagtcccgaccttttcaaaattcaggtcccgtttccgaggcacgtccagagccgggaagaggtccccgatcagtcccatgaatacgggcaggtcgtctgtcacaatcttgggga

SEQ ID NO: 266337 - DNA, 122 bp, Homo sapiens
tgggaaagaaaggcaattggccagagcgcggggagccagctgggagcctggtgccgtgtgcgctccacgagtggcatgaatgggagagtggctgaaggaaccaacgagcaggaggagagtgg

SEQ ID NO: 266338 - DNA, 122 bp, Homo sapiens
aggaagtaggtgcaaaatgctggattttattgattctccaaatgaagtgttcccacaaggcgaagaggtggagctccggaaatgctcaccgtgtctgtcttctccctggcatggtggggctg

SEQ ID NO: 266339 - DNA, 122 bp, Homo sapiens
aggagaatgtgggtctccatgtgccctgcgggtacttggtgcctgtaccctgcggctatgcggtgccctccaacctgcccctcctgctgcccgcctactccagcccggtcatcatctgcgcc

SEQ ID NO: 266340 - DNA, 122 bp, Homo sapiens
acaaatatggaaccacaggatgctgacacgcaaagcaagccgcctggaaaatgactcagacgctcccgccggctgagcgcagcccgcagacaccgcagtgcaggccccggggtgcgggacaa

SEQ ID NO: 266341 - DNA, 122 bp, Homo sapiens
ccataactctgttcattcagagtgctgagcaagccctggtagcagtaagcacacctagtacgcatttgtggatttctgaataccactctccaataaaaagaatcagagcaccttggagaaat

SEQ ID NO: 266342 - DNA, 122 bp, Homo sapiens
cctctcttctcctgaccccacttttggcatctcttaaggccgaagctggttctcagagctcgtctgcctacagctactaagttctctgagagcaataaagatacgacgggatccatctggac

SEQ ID NO: 266343 - DNA, 122 bp, Homo sapiens
cttgagtgaagcaacgcgtctgcaggttgcatcggtctgctctgctgcttctctagcagtcgacaccatttgctcttatgagcaaagtgtcaaatgagtgttttatcatgagagctgtcagt

SEQ ID NO: 266344 - DNA, 122 bp, Homo sapiens
aaaaaaaaaaaaaagctacaacttcacatatacgttcaaaaacacactacaggccgggcgcggtggctcacacctctaatcccagcactttgggaagctgaggcgggtggatcacctgaggt

SEQ ID NO: 266345 - DNA, 122 bp, Homo sapiens
tgggtctggttttgcgttgagaatgcccctcacgcgcttgctggaagggaattctggctgcgccccctcccctagatgccgccgctcgcccgccctaggatttctttaaacaacaaacagag

SEQ ID NO: 266346 - DNA, 122 bp, Homo sapiens
caggggtggagacccgccgaggtccccggggttcccgagggctgcacccttccccgcgctcgccagccctggcccctactccgcgctggtccgggcgcaccactccccccgcgccactgcac

SEQ ID NO: 266347 - DNA, 122 bp, Homo sapiens
tgtctgccttaacagaaaagccacaaagaaacatggtaagagcgtggcagataacatccacggtgctatcgggaggtgacaggtgactgacctcagccttggtgttcaagaagattccagaa

SEQ ID NO: 266348 - DNA, 122 bp, Homo sapiens
tttgtatttttttttcttgagacggagtttcactcttgtcatccagggagtgcagtggcgcgatcttgggtcactataatctttacctcccggtttcaagcaattctctgcctcagcctccc

SEQ ID NO: 266349 - DNA, 122 bp, Homo sapiens
actccagcatcgctgacctggcccaatgtaattgaagatttttctaagcatcttctgagccggtcaccgtccaagtgcacatagcctgcctctgtcacagatgcccctgcaggaccacagtc

SEQ ID NO: 266350 - DNA, 122 bp, Homo sapiens
catctgcgggccgcacggggcagagccgctgcgcccctctccaccgcctgcacaggttcccgagtcccacgaccccctccgcgctcaacacgccacccgcggccacattcggcctctacctt

SEQ ID NO: 266351 - DNA, 122 bp, Homo sapiens
ggacttggtcctcctcggggctgtatctgagagcatgcacctcattgcctatttcgccttcgtagaaaaccgcttatcaggccagaacactgaataccaaaagcattgtgttacatgaaagc

SEQ ID NO: 266352 - DNA, 122 bp, Homo sapiens
aagcctctcagggtcgcgcgccttcagtgaggatcctaatttacaccccgagtgtggccccgtcaaagactagagcgaaggtcactgaaatgacacaagatcagcgaggcccagggcgctgc

SEQ ID NO: 266353 - DNA, 122 bp, Homo sapiens
gttcctccgcggttcctgtcacaaaggcgacgacaagtcccgggtccccggagccgcctccgcgacatacacgagtcgccctccgttatcctgggccctcctggcgaagtccccggtttccg

SEQ ID NO: 266354 - DNA, 122 bp, Homo sapiens
gctctaattccaaaaacaattccacaccctaggtttctgtgtccagcaggtgtcgcccttcgtgggacaacaaaccaccagccagcatcctctcttccttagggtggagtccattcccccaa

SEQ ID NO: 266355 - DNA, 122 bp, Homo sapiens
cggccggagtgtgaacagaagtttgctcatctgacacctggggctgggcagagcccctcccgggggcagctctgggcagcctgtggagagactgatgcaagacaggcaagttcagagaacga

SEQ ID NO: 266356 - DNA, 122 bp, Homo sapiens
aagcgggaggtccaggagcaggaagatctcagctctgaaaggtgaggctctgctgccccccgggactccccagaggtaactgagctttgcctgtccctgaggaagtcatttgcagaggcctg

SEQ ID NO: 266357 - DNA, 122 bp, Homo sapiens
caaggcgagcggcccgagcccaccaccagccgcctcccatgattcgcactacggccgccgcgcgccgtaccgccccaccggcctccggtaggttgcaacccatgtcactcaggatgaatggc

SEQ ID NO: 266358 - DNA, 122 bp, Homo sapiens
tttttttctttctttctttcttttttttttttttttagaagagggtcagggagcatctgacggacgtttttaaaggaaggggacagctacttccatgggactgcattttagttgtgctaaaa

SEQ ID NO: 266359 - DNA, 122 bp, Homo sapiens
tctccacattgggattgtcttccccccggaagaactggttgttccgatctgtccggaccacgtctttgtccacagtgaactgcacattacgccagaacgctctgtgctcctcgggagtcatg

SEQ ID NO: 266360 - DNA, 122 bp, Homo sapiens
ctcatgcctgaactggcctccctgatgatatgccaaggttactcccaccccaccagggggcggcactcacttagaacaagaaagtttagattaggtggcttagggagcaattagcagtcacc

SEQ ID NO: 266361 - DNA, 122 bp, Homo sapiens
ctacagagactcagggactcgagggagctcgaaaggccgctcacaacccggcgtcgcccacgacgtcactgtcgaccgggcttctccatcatattccgacaccctttcattcgttagcccct

SEQ ID NO: 266362 - DNA, 122 bp, Homo sapiens
gtggtggtgcgcacctgtagtctcaggtagtgttggtgtgcacctgtagtctcaggtactcgggaggctgaggcacgagaatgtcttgaacccaggaagcagaggttgcagtaagccaagat

SEQ ID NO: 266363 - DNA, 122 bp, Homo sapiens
ctagagtggctctcagcggaccaagcagagaaacaatgccaggaggcacagtcacagcagcgagaagggactgaggaggaggcctggggaagccaagtgtggacagcctgcaggggagatct

SEQ ID NO: 266364 - DNA, 122 bp, Homo sapiens
tcctgattgcttctcccaagtaccccggacaggcactgttgttggcaccagggaacaccccggggaacagagcagatccaacaccaggcccaggagagtcggctcccggtgacgcctgagat

SEQ ID NO: 266365 - DNA, 122 bp, Homo sapiens
atcagaagcaagggggtgggtcctgggagccagaaaggctgcctccgcgaggattaggggcgctttcgggattcaaatgactggaagcagctggaaacaatgtccaaagctccaaaagtaaa

SEQ ID NO: 266366 - DNA, 122 bp, Homo sapiens
gcctggaggaggatggagcggcgggcgcgggttgggtacgcggaggggcggcgcgggacacgccggacgccaccttcctcctgcgcctcttcggcccgggcttcgccaacagctcttggtcc

SEQ ID NO: 266367 - DNA, 122 bp, Homo sapiens
aaaattaagctcacatgtatgtgatgatgtaggtagggatttccgcaaggagtgagtgcacgagataatccctggggaccaaggattccttcaatttaatgggcagttcttgaggctttgca

SEQ ID NO: 266368 - DNA, 122 bp, Homo sapiens
gcaattggaagcatttagtcgagctcagagcactgtaggaattgaggtactccttgtcctcgacatctactacctgaactccctcaacatactaagtgctaagtaccatcgttggggagagg

SEQ ID NO: 266369 - DNA, 122 bp, Homo sapiens
tggggaggcagcagataggccaattgaaggactggcccaaggtccctcctggggaggagccgggctcctcctgcatccatagtagggggagtattttgtctttggtctgggcgtaacttgct

SEQ ID NO: 266370 - DNA, 122 bp, Homo sapiens
gctggaggtgatttcccgggggtgggctctcttcaaggccagctgggagtgacagtgccccgccccctccgtcctgggctccgcctgggtttgtaaagcacccactgtgtgtcaggcgttac

SEQ ID NO: 266371 - DNA, 122 bp, Homo sapiens
ttttgtgggctggttcctgggagaagaagcaagaggaattctagtttctgtggcctacatcgggagagacaggggagagggaatttcagtttctatggcccacttcaggagagagtgggctg

SEQ ID NO: 266372 - DNA, 122 bp, Homo sapiens
tcaacaactcgaccttcttcagctgcatgaaaataattccagatttgaaaagggctttggcgagattcattgttggggcggggtgggggagctgtgactttgccaaaccatcttttgtcatt

SEQ ID NO: 266373 - DNA, 122 bp, Homo sapiens
agattatgctgtttcctaatgggcagatatgtaagtaggtaagtgggatcctcaggtaagcgggatccagaactaaagactgtgctatttcctgatgggcagatgtgttgtttctacctcat

SEQ ID NO: 266374 - DNA, 122 bp, Homo sapiens
gggtgggggtcagcctgcaggctgggctgtttctcaccccaggaagatgcctggcatacacgggacatcagcggctcctctgctggagggaatcatgtctttttttttttgagacagagtct

SEQ ID NO: 266375 - DNA, 122 bp, Homo sapiens
ttcctctcctttacccagacagggatgtgtctaccccagtcagaacaataattttaaactcggggctaagggacctttattgggctgggggaaggagatgggaggagggagctacagagggc

SEQ ID NO: 266376 - DNA, 122 bp, Homo sapiens
gttgtgagttagcgagaaagccacgcctcgtgggctccccgggggcttcagaaaccatgacgcctttcaccatggtgttctacaggcattgtcttgtgactccagcagcgcagccagaagca

SEQ ID NO: 266377 - DNA, 122 bp, Homo sapiens
cctgcaagaaaggcgtggcagtaagaatacttgaacagtaagaataacgaacaccagctacgagcaccagagccttacacacaagatcccatttactcctcttaaccctgggaggcatatta

SEQ ID NO: 266378 - DNA, 122 bp, Homo sapiens
aagttcttccggacaacctcagccccagccaaagcagcacgcaggccctcagcctcagctcggccggccttctccgcccgtgccagagcctctagctccatggcctgggcctctagcctcat

SEQ ID NO: 266379 - DNA, 122 bp, Homo sapiens
aagatggggtcttgctatgttgcccaggctgcacatgaactcttgggcctgagcaaacatcgtgccttggcctcccaagtagctgggaatacaggcatgcaccaaccactccctgtgctggt

SEQ ID NO: 266380 - DNA, 122 bp, Homo sapiens
tagacgggaaggggcatcagccaatcagagaggctcctggagccggacggcggcttccagcgttactgagcaggcgcaccctctagtttaggtagcgcttatctgcatacgagggcggggtc

SEQ ID NO: 266381 - DNA, 122 bp, Homo sapiens
ccggcgtcggagctttccgcctattaccgggcagcgattgggtcgctataccgcatgtcacgccaaggacgcactctcattggccaatcgagtttctgccatttgttcattgcctcctgagc

SEQ ID NO: 266382 - DNA, 122 bp, Homo sapiens
gactggtcggcgagggactgagtcggtggccaccgggcgcagggacacacgtggtggcgccgaaggggcgggggaccggccctttgtgatgtcacccgggaggaggccgggctctttgtgcg

SEQ ID NO: 266383 - DNA, 122 bp, Homo sapiens
tttactcaggctcagagacacacaaaaacctttcacgttttcctttcagcttcgcagccccgtccttctccacctgcacgggcacccactgaagcacaggacccttctgccaagccatgagc

SEQ ID NO: 266384 - DNA, 122 bp, Homo sapiens
caatggggattaggagaccagcaaccaatggcaggaggcactgggatcagtagggccaatcggaaggcagctcggcgctcccggcggggtttggcgagtgtggcccccctccctaggagaat

SEQ ID NO: 266385 - DNA, 122 bp, Homo sapiens
ctcaagtgatcaacccacctcagcctcccaaagtgctgggattacaggcatgagccacctcgcccagcctgtaatttactctcaaatggttcaggaaaacaatgtatattttcatatagaga

SEQ ID NO: 266386 - DNA, 122 bp, Homo sapiens
gcaggcgcagtgcggggctgcgagggggcgtggtgcagcagggggcgtggcggggcggggcgtggcggctgagcccgggagaatgtgagttgttccctctctaattacctgtctgtccctcc

SEQ ID NO: 266387 - DNA, 122 bp, Homo sapiens
cccgcaccaggcgacaggcgcctcggggcggggttctgaggaggtcgctaaggactgcaccggggcttccggcccgtctgggaagcttgcttggctgggccgggacggactcgacagggcgc

SEQ ID NO: 266388 - DNA, 122 bp, Homo sapiens
gaaagtcaacgagctcatcaccaacagccagagcgagatctcccggcgcacgatcctgatcgagaggaagcaagggctcatcaacttcctcaacaagcagctggagcggatggtctccgagc

SEQ ID NO: 266389 - DNA, 122 bp, Homo sapiens
agagctgccataccaaaatttcagactgggcagcttaaaaaacagagatttacttctcaccgttctggaggttggaagtccaagatcgaggtgtcagcagggttggtgtcttctgaggcctc

SEQ ID NO: 266390 - DNA, 122 bp, Homo sapiens
tcaccattatcattattcccttctgaggctcagagagtttaactgacttgcccatgagcacgaagctaggaagcgacacagctggggctcatctgactccagaatccagtggtactttgggg

SEQ ID NO: 266391 - DNA, 122 bp, Homo sapiens
tcctcctgtgcattgcatttgagcagagcaatgcccttgtcccaattgtatccccagatacgttagtgtggggggacactctgaatttcccctaggccgtcacatgtgggctggacttccca

SEQ ID NO: 266392 - DNA, 122 bp, Homo sapiens
ccacaaataaatactgtttacatggctcttatgaagcatgggggccaatgctaaatacttcgtatatattatgtcattaactttcacatgtcaccctatgaggaaaatattattcttatttt

SEQ ID NO: 266393 - DNA, 122 bp, Homo sapiens
gcacatagttccagaagtcagaggtggagaaaggccagtagggcatggccggcagctccgcgtaagggtctgaaagacacaagacacctgccttgggggctgtccccatggtcctgcctgga

SEQ ID NO: 266394 - DNA, 122 bp, Homo sapiens
acagtgctcctgctccagcatctttaatgaagtcccataaactcccataaaatcctcgatcgttgacaaatcatacacacacgcttagggcaaggctcactggatcacgatgctctcttcct

SEQ ID NO: 266395 - DNA, 122 bp, Homo sapiens
catgagttataaatattaacaatttcttgctgtaaattgaaagcatccttcgcgtctttgcgtttcattaccaccctctgttctctcaagagaaattctaactttatttcagcactcagtcc

SEQ ID NO: 266396 - DNA, 122 bp, Homo sapiens
ggaacgtgccataattcggctatgctctattttcttgtctaatagattgtaagctccttgcgggcagcatctatgccttcttaaatctgtttctagtttctaccagcaagcttgccccgaag

SEQ ID NO: 266397 - DNA, 122 bp, Homo sapiens
ggcagaggcgctcctcatttcccagacggtgaggaggctgggcagaggcactcctcgcttcgcagacggggcggcggcggggcagaggcgctcctcatttcccacacggtgaggaggccggg

SEQ ID NO: 266398 - DNA, 122 bp, Homo sapiens
acaggagagcagtggacacgtgggaaggctgttattgtcacggcattctgcacatctgtccggactcaattagccacctaaggagagagtagggcggggcttccaccggccgtgggatatgt

SEQ ID NO: 266399 - DNA, 122 bp, Homo sapiens
gcccgttttctcgcctccagctctaaccagccaagctttgttctagttttgctttgcacacgcccagggagagtacaaccgaaagaggcaggagactcgggttcagaaatgtttctctttct

SEQ ID NO: 266400 - DNA, 122 bp, Homo sapiens
ttagtactttcaaaagaattaaaaaaaaggaatcatccagttctttggaatgagttgtagcggaattgaaccgtatgtctgtggtcaaggaacacacagtttgttcttcactaaatattttg

SEQ ID NO: 266401 - DNA, 122 bp, Homo sapiens
taactttaatgaaactttaagtacataaataaccactctttcctgccctggttgaggccgcgctgggtccgggaaatatctgctttccaacggggcacctgggtgggagccttccaagaact

SEQ ID NO: 266402 - DNA, 122 bp, Homo sapiens
cctgccccagcctcctgtgaggaacagcctgagcagtgtggttggccctcacttcctcatcggcttcaccacccctggctgtggtctctgctgaaggatctgacacaggcttgctctgtgaa

SEQ ID NO: 266403 - DNA, 122 bp, Homo sapiens
ttcccgtgcgggaggttgcgtagtgaccacccgggcctcagtggtgcttgctgccgccaccgtgctccttgtttctgggcctcttggtgttgagaaatgagagagaacacagcgtgagtctg

SEQ ID NO: 266404 - DNA, 122 bp, Homo sapiens
accccatcctcctgaacctttatgggctctgtcgaggctgaagcagccaggggctaaagccgtccttagcccctggaagggcactgtgaaagtggatctgatttgagaagccgtttcctgat

SEQ ID NO: 266405 - DNA, 122 bp, Homo sapiens
tgcctgcctcccactctgtgcactgctcccacactggaaatttctaccctctgaataatccgattaacttgtatccagccagccattgccaaagtgaaagcatattgcctgggaggaagtga

SEQ ID NO: 266406 - DNA, 122 bp, Homo sapiens
gtccactactgccgtttgccgccgtcacagacccgcctctgacttccacccctctggatccgtcaggttgtccactgtgcttctgatccagcgagacgcccattgccgctcccaatcgggct

SEQ ID NO: 266407 - DNA, 122 bp, Homo sapiens
aaggagtggatggatggacaggtcaggatggatggtcacagggcctgactgtggggctcccggggaccgggcagggggacacactcctcatccccatcttcccaaagcatctgcagagacca

SEQ ID NO: 266408 - DNA, 122 bp, Homo sapiens
gagcacgtgtcccgatgtttattttggaaaacagattcttgctgttactggccgagatcccgcccgctgccctctggattccgaggcctccgaggcccccccattggaaactgcgcccaccg

SEQ ID NO: 266409 - DNA, 122 bp, Homo sapiens
ggagactcaccctgtgcctacaagttacagcccccaatgcagctattattgggttgcctccgggaagggggtcgtaattaggatttggcttaagttaagacagcagcattccctgggcaatc

SEQ ID NO: 266410 - DNA, 122 bp, Homo sapiens
ttccttgttcaatggttccttgagggaccattcccatgtgattatcgaccattcggcaggcgttcaaagtcaaaggccccacactgagtcctggcccagcgccctgtgcccgttggctgctg

SEQ ID NO: 266411 - DNA, 122 bp, Homo sapiens
tttcccatgttgttttgttttcttaggtgaataataattaaacaaggtattatgcctgaacgtgctaggaaattgtaaagagctatgtaaacactattgccaaagaggaacaagagtgtgcc

SEQ ID NO: 266412 - DNA, 122 bp, Homo sapiens
tggtctcctgacctcaggtgatccacccgcctcggcctcccaaagtgctaggattacaggcgtgagccactgcacccggcctgaatcacgtttaatagtagtgagcatatcaatctggttat

SEQ ID NO: 266413 - DNA, 122 bp, Homo sapiens
gacctccaccaaatggctcgtggggggagcccacaaggagctggaaacctagtgttttctcgggtcggtctgtgccacgctgccggctgggaggttgctgtagctcggggttcatcacagct

SEQ ID NO: 266414 - DNA, 122 bp, Homo sapiens
tcattcaaaccacagcagccaccatcaccacaagccaggtgcccggtgtctccatcacctcgaaggccccacaagccaggtgcccggcatctccatcaccccgaagggcccccgccggcgtg

SEQ ID NO: 266415 - DNA, 122 bp, Homo sapiens
cacaaatggggcttgagcaactggccatccgcacccacacgtggcaccaaaaccaccctccgtctcagcctcgcaccctacacaaaaactgcagaaggtctttatgagcttaggttaagcta

SEQ ID NO: 266416 - DNA, 122 bp, Homo sapiens
ttccctatttgtccttctaaggggaaggagattcttgttctctggataattcccaggttccgctttattgtggagaatctccttgatgaatgaagaagaaagaaaactaatgaagtcaggag

SEQ ID NO: 266417 - DNA, 122 bp, Homo sapiens
agatgccttcacacacctctgggtggctccccaacttgagtgtggacatcccaacagctccggggccatacttggcctggttaggtggcagactgctgtgaccctccgagggatccaacatc

SEQ ID NO: 266418 - DNA, 122 bp, Homo sapiens
cggctggcggcggtgcgggactcctgaaaactgcttttcctccctagtaggcggtgagaccgcaaattccatcagaatcctactctgacccactagggcttggcccgctcagagtcgcattc

SEQ ID NO: 266419 - DNA, 122 bp, Homo sapiens
tgggaggccaaggcgggctgattgcctgagtgcaggagtttgcgaccagcctgggcaacacggtgaaaacctgtctctactaaaatacgaaaaattagacgggcgaggtggcatgtgcctgt

SEQ ID NO: 266420 - DNA, 122 bp, Homo sapiens
gacctcctgctggggatgggcgagacctgagcctggtgcggaggaggcccgcaaagctggcggaggacctagttccagggacgggatctagggctcctggtttgcccggtctggacaccctg

SEQ ID NO: 266421 - DNA, 122 bp, Homo sapiens
aagaaaaatttctgctggaggacgggtgccctgtgagccgtggccacggctatgagcccacggacccacgagaaagccagtgtggctgggcagcaggtcctgctccccccggcccgtggcca

SEQ ID NO: 266422 - DNA, 122 bp, Homo sapiens
ggatggttagctttctgatgggtttaggttaatctaaccaccgtgggcagcaggacagaacgtctcagctccatgtgcagttgggagttctcattgaccagcttctctgtctgcatgggttg

SEQ ID NO: 266423 - DNA, 122 bp, Homo sapiens
aactgctagaagagaataagctcgaaatctaaagagcaggttttgcgttgctgctatgctcgggccccgggcttatataagccggcgctgccctgtgattggtggagcgtccaatccaccgc

SEQ ID NO: 266424 - DNA, 122 bp, Homo sapiens
tcccacaggcgccgcagagcagcgtgggtgcaggctgcagtggctggcgccgtcctcgcccggccaggccatgaaggtagagtttgcaccgctcaacatccagctggcgcggcggctgcaga

SEQ ID NO: 266425 - DNA, 122 bp, Homo sapiens
gtcgtggggagctgggcttgccctctggtgggtgtccctggctaggcctctccctcctaacggctccccacccggccttctcctgaccccagaccaacctcgtgacccaggcttctttgaga

SEQ ID NO: 266426 - DNA, 122 bp, Homo sapiens
ctctgcttaggggctttcccttcccagcaggcactcattccaggatccacaggcaccttgcggtccccagcactgggcggcactgagggggtatcactgtggcaccataccgtaaggcatga

SEQ ID NO: 266427 - DNA, 122 bp, Homo sapiens
aacggtagaaggggctctcggatgtgggctcacaggtcccctggttgtagcaggggttgccgcccaggcaggggctgctggccgggaactggcattcggggcccgtgaaggggcccaggcac

SEQ ID NO: 266428 - DNA, 122 bp, Homo sapiens
gaatttgaggccagccagcttggatttgcatcctatcttcaccacttcctaactatgacccgggacaagttatataacctctctaaagcatcagtgcttttatctataagacagggatatac

SEQ ID NO: 266429 - DNA, 122 bp, Homo sapiens
aagggagagcctctgctggagggcgggaagggtgagtctctcggcgtcctgctggcccgccgtgccctggaaagcacagccaggatgctcgggtggaaggacccatcaccaccaccccacac

SEQ ID NO: 266430 - DNA, 122 bp, Homo sapiens
tttctctctctcataaagaagtttcacacgcctcccgctcctcctgttgtgtgaccgctacgcgcgccgctaccgtgctctcccggctccaagcgcagaccaagagttccgctgccagcaag

SEQ ID NO: 266431 - DNA, 122 bp, Homo sapiens
cagatcttggctcccttgtggtagacgttcagcttcctctctatctcctctgtgggagagcgggtgtgagtgctgcggcccccaccccagccccaggggcacccccacctgtgtctgcccct

SEQ ID NO: 266432 - DNA, 122 bp, Homo sapiens
ggaaaacagctaattctttctaagccgcccaaagcggggttgcgccggggcctccggggccgaggtgggcctgctcattggaagatcgcatcgcagccatgagcagtaaggatttcttcgcg

SEQ ID NO: 266433 - DNA, 122 bp, Homo sapiens
tcccagtgcagggagaaggcagcccacagcctccatcacccaaaggagtcgactttcgcacgcgcagggctgtcaggctgactgtgcacccagaacaatgcagcctcatcgctaccgggtcc

SEQ ID NO: 266434 - DNA, 122 bp, Homo sapiens
caagaattgcttgaaccttgacagaggttgcagtgagccgagatcatgtcagggcactctcgcctgggcaacaagagcggctgtctcagaaaaaaaacaaacaaacaaacaaaaaaaaaccc

SEQ ID NO: 266435 - DNA, 122 bp, Homo sapiens
tgcctgtttactcctctgacttctccgtgtggctgatgccctgtgcctgcagggcccagacgccctcctcctttggtgtgtcctgcatgcctagcccagtgccaggaccacaggactcagta

SEQ ID NO: 266436 - DNA, 122 bp, Homo sapiens
accaagaaggagccaccagggaggcaggagggacagcaggagagtggcatcaggggagaccggggcagcaagaaggaaggctcaccagtgcctgtgcagacaaagaccaggcttgagggtgg

SEQ ID NO: 266437 - DNA, 122 bp, Homo sapiens
ctgagataggctgaggacatgaggtcatacgtggagctcaccaagggcaggttgaccacccgagtcaccacactctgcaatcaaagtagggagggtatgcttattaatctctcaaaacacaa

SEQ ID NO: 266438 - DNA, 122 bp, Homo sapiens
accctcagcctccttaatacaggctcacctggggcctcagtgcccagtcctcccagcgcccgccccagctgcacttgagtcctggatctatcatcagcccttgctgtgggaagtggctttaa

SEQ ID NO: 266439 - DNA, 122 bp, Homo sapiens
gagcacactaattatcagattattgcaaggggaatggttactgaggctggagaagggaggcgagtcttagtgagttccctttaagctctgagacaacagaggccgcctctctcacggccttc

SEQ ID NO: 266440 - DNA, 122 bp, Homo sapiens
gccgcctcagtcatggctcctcgccgtggccgatgtttttgtacctccatctgcggaggccgcggcgcccggccccagctgccccggacgtgcggcgacggcacgcagcactgcggcagggg

SEQ ID NO: 266441 - DNA, 122 bp, Homo sapiens
aggagaatcgagagggcgaacgggcgagtggcagcgaggcggggcgggctgaggccagcgcggaagtctcgcgaggccgggcccgagcagagtgtggcggcggcggcgagatctgggctcgg

SEQ ID NO: 266442 - DNA, 122 bp, Homo sapiens
ttcctcccctgcattcctcagcagctgccctcactgggcagggcaaattataccgtggcccgaccataaaagccactttccaaaaaaagaagctttaaggcccccgagagacgcagctgagc

SEQ ID NO: 266443 - DNA, 122 bp, Homo sapiens
ggtttaacgcgggccctggagatatttgcagaacctgcactcaaatgccagcttcttgctcgcgatgtcaccgcccatcccggttcacgggggcaggtgacgacgtctcacactccccagca

SEQ ID NO: 266444 - DNA, 122 bp, Homo sapiens
atgaagaggaggaagttcactcggcagaggaccagtgaaggctctgcactctgggaagaacgaggtcgtggctcagccccacctcgggcttacctgggcaggtgacttcggctgcccgcctg

SEQ ID NO: 266445 - DNA, 122 bp, Homo sapiens
ggctcccgctggccggagtttgcagacttggcgctcaggccgattctcccggagttgggccgcgcgcgccgggccaatgagcgcgccccgcggagggctccgctccccccgcgcgcgctgat

SEQ ID NO: 266446 - DNA, 122 bp, Homo sapiens
cagacttactagtaaaagcaagctggttttgtgtggaaagcgaaagacagctgccatgaacgaacgaggcaactgcaaatgaagaatctcaggaaaaaatactcccagatatagaccaatcc

SEQ ID NO: 266447 - DNA, 122 bp, Homo sapiens
aatagaatattataattactcagagtttaatatatgctacaactgtttttgccggcttggcgtttaaagatgcaaatgttccaatcgcttctagaaacatgacattataaaagggactaccg

SEQ ID NO: 266448 - DNA, 122 bp, Homo sapiens
atttctttgaaaactatttcctcactctgagaatgctcatggctcttaattccccatgcacgataaagatcatctttcttgcactctgtgctttcaaagctatcttccagctttgcaggaga

SEQ ID NO: 266449 - DNA, 122 bp, Homo sapiens
gctagtgtcatcccctaaattgccgtgcagctctcatcactcacctcggatggatcccaccggctgcccccgcagttcctcagccatccctgcatgccagctgtaccaggcacttgtatgcc

SEQ ID NO: 266450 - DNA, 122 bp, Homo sapiens
ttttttttttttggcttattaggtatacattcacattcctggtgctaaaaaattgatgctcgaactgccattagtgatcggtacaattccatataatggttttggcagcagaaactccagca

SEQ ID NO: 266451 - DNA, 122 bp, Homo sapiens
gggcgcccctgagcccagggtggggacggaggggtcgctgcatagcagttttcccatcggcgtctcctcaggtctagcgagttagacccttctggacttcactgagacaggttggctgatgc

SEQ ID NO: 266452 - DNA, 122 bp, Homo sapiens
ctctggctgcggtggctgctgctgctgctggttttcatccagttgggaaacccaggaagccggcggctgctccgtggcgctagtccagcacgcccagggttaaaagcctcgcgcccttccgc

SEQ ID NO: 266453 - DNA, 122 bp, Homo sapiens
attacaggtgtgagcaccatgaagttttcagatctgttacacagcactaagtaactgtaacggtgtgaaacttttttaccatttccccacaaatcaacattcaaatactatctccacctttt

SEQ ID NO: 266454 - DNA, 122 bp, Homo sapiens
aaccggctgcacttttcagggagtcaactctgacctgtgaaccctaaacccggaaccgctcggcgggcccgcaaaggggcctcagcagctcggtggccccgcggagtgtggggactcagggt

SEQ ID NO: 266455 - DNA, 122 bp, Homo sapiens
tggcctcccctttaaggaatgttgtgacctgacgtcaccgggcgagttacctcccgcagccgcagccgccgtgctcagcgcgagccccggagcccttgagcgcgaggcgcggagcccccgga

SEQ ID NO: 266456 - DNA, 122 bp, Homo sapiens
gtgggggaagctgagatgctgcctggcggaagggggccgggccgggcctctccacacccccgcccacaagggccccttctggcgtccccggggttgctccttcgcctcagacctggtcgccc

SEQ ID NO: 266457 - DNA, 122 bp, Homo sapiens
agctctatttttactcaaaggtggtaggaacaccacacgttcaaagcaggacaggcaagtcgtctgactccacgcggctgcaaggctgagcttttctgtgagcagggacgggggcaggctgc

SEQ ID NO: 266458 - DNA, 122 bp, Homo sapiens
ctacgccttcgtggactgcccggacgagcactgggcgatgaaggccatcgaaactttctccggtaagaacacagccacctcccggaaaagccacaacgagagccccgaacaacggagacccg

SEQ ID NO: 266459 - DNA, 122 bp, Homo sapiens
cagagcaagtgcgaaaagattaaaaagtgcttttctcatcatttctgctcatatgaccagcgctgcagtgctgcgcgccgggcgcacgcccgccgggcctggcatggcgccaggggcccgga

SEQ ID NO: 266460 - DNA, 122 bp, Homo sapiens
ggcgggactttctttgcctggccgctggccctgcacgcacccccttcctcgcgcctctgccgcccttgccgtttctgtcctcagtgtcctgctggggcttaccccgagtcccgcccaaggtg

SEQ ID NO: 266461 - DNA, 122 bp, Homo sapiens
cggccggcttgtagggggggtgccacctgaaaaaaaattttcaggtccccaaaaggtgaccgtcttccagaggagagcggatcgactaccgtgtgggtgcgcacaaaaattccacctctgag

SEQ ID NO: 266462 - DNA, 122 bp, Homo sapiens
tgccagacagaatttggtatgtgaaactgggatgctgacataacaaaaacctaaaagatgcgacactggtttcaagactgggtggtggaccgaagctggaccctggcttgaagagcctggta

SEQ ID NO: 266463 - DNA, 122 bp, Homo sapiens
gagaactcactatcacaaggttagtaccaggaggatgctactaaactattcatgagaaatcggcctccatgatccagtcacctcctcccgccaggcccctccttcaacattgaggattacaa

SEQ ID NO: 266464 - DNA, 122 bp, Homo sapiens
tcccaaaacggcagcccacagtgactggtcgcaagtgccatcagaaatgtgcgccgcttacgaggctgtcaaccaggctggttcttccaaagtcgtccattaccagataagtgaaggtaaaa

SEQ ID NO: 266465 - DNA, 122 bp, Homo sapiens
gaggcctggcgacgagggcacgggccatccagatccttctcgcgagcccgtgccctctcgcggggctccagggacccctgaccgtccagggcgagtggtcactacacaacccgacgcgcggc

SEQ ID NO: 266466 - DNA, 122 bp, Homo sapiens
gggtccgagggagaatacatcaaagtgatgtcattcatgactccgaaatggttaccatggcgactatcagacatattaagctgtcagggaaagagcctgtttaatccagtcttcaatcacgg

SEQ ID NO: 266467 - DNA, 122 bp, Homo sapiens
attacaggcgtgagccactacgcctggccacgatcataccttttcatggcatgtttggaccgtaatttatgcagtcacctatggtgtactggtagatggttgtgatttgaggctactataaa

SEQ ID NO: 266468 - DNA, 122 bp, Homo sapiens
gtggacctaaaaggaaaaagctagggtaaaagtaatctatgtagaaggttatttgggtcacgtgtgaggcctgcagcccaggagcctggattcaggctgccctgaacgcacactgatgagca

SEQ ID NO: 266469 - DNA, 122 bp, Homo sapiens
ccaccgtttgggatggttgattaggacttgttgctgtggcggtagctcaccaatccaatgcgtgcacccgctcctttattaggctatagggccagtggctgcgacagggacctgatacaaca

SEQ ID NO: 266470 - DNA, 122 bp, Homo sapiens
cactgctctgacagataccaggagctggtgccaacccgcagacacacctgggcagccccacgtgggtatcgcacgcgcaggggcacatctgccctgccgggtttggagagcagttgcaagtc

SEQ ID NO: 266471 - DNA, 122 bp, Homo sapiens
aataagaaagggttaccaaaaaaatatttaaaaattaggcaggccaggtgcggtggctcacgcctgtaatcccagcactttgggaggccgaggcgggcagatcacctgaggtcggcagttcg

SEQ ID NO: 266472 - DNA, 122 bp, Homo sapiens
ggagagttcttccagctgctggcgcggacgagccccgcacatgctaacgctccagcccctcggtcaggcctgactcccagacacagggacggattaaggaatctatttcaccgctttttgca

SEQ ID NO: 266473 - DNA, 122 bp, Homo sapiens
gcgcctggcgacggcgccggggatcgccgagcggggctgggggcgggggcgcgggaggagcggcttaccgtaaagtctcatgcaaaggcgcagagacccaggggcaggagcccaggctcccg

SEQ ID NO: 266474 - DNA, 122 bp, Homo sapiens
agcttccctgcaaagggatcgccttccaaatttattcataattagctcaattcatgaaagcggtttctaaagtgctctacagagctctagatagaaaatatgaggctaacgatcatggcagc

SEQ ID NO: 266475 - DNA, 122 bp, Homo sapiens
ctcgacaaactccaatacaagtaaggtacacattattttagcagtcttccttggggaggacgtggggcaagcacaagcgtagcgttaggcctgagactccaccccagccgtctctgagccca

SEQ ID NO: 266476 - DNA, 122 bp, Homo sapiens
tgtgattgggctcaaagtctagtccctcacacctccatggaggcagagatggagggggcccgatgggctaaaagttctgaccccgtaatcgtacagtgcagagggattccatgtgactaaca

SEQ ID NO: 266477 - DNA, 122 bp, Homo sapiens
tcctgacctctccttaccgatgcagagtggttctgctggggaaccaccgcgcctgcagttcgtgcacctcttcccggagctgcgccagggaattacagacgaactggaaggggccgagaagg

SEQ ID NO: 266478 - DNA, 122 bp, Homo sapiens
aatgagtaagacagggttttgttgggtgaaaaaggaagaaaaaggggaaacagggactctcgctaagccagagtccctgctagggtgcttcccaccagccatcctcatcccattttggggct

SEQ ID NO: 266479 - DNA, 122 bp, Homo sapiens
ctccgcgctcccctccaggccctgaatgtcagagttaattctgcatttgtggggtgggggcggccgtggagtgtgtggagcgcggtgcagccggaggggcggcgagtcggggtgattcgggt

SEQ ID NO: 266480 - DNA, 122 bp, Homo sapiens
cctccgagccctgccccgcagggaggcagctgaggcctggggagaatctgagtgtagcgccggcaggccggcactgctgggggacccggtgcaccctccacagctgctggcccagttactaa

SEQ ID NO: 266481 - DNA, 122 bp, Homo sapiens
gccggcgcccagggggccgccgcggctgtgaggtgggggcggcagcgggaggcggcggggcgggccgccggggccggggctgggggcgcagcgcggccggcgtaggtctatgtcgcgggcgg

SEQ ID NO: 266482 - DNA, 122 bp, Homo sapiens
cggtgtgagatgcgacagacaggtcagggcaaacactagtgaatccgtttcagtacctcccgcctaagggctggaacaggcagcaacagagagaaaaccatttcacaatgagaagaggaaac

SEQ ID NO: 266483 - DNA, 122 bp, Homo sapiens
acagcccctggcctcgcaggaggggtctgacctggcgccggcagctgacaggaaaacgtccggcccactgtcagaccgcagcccggggtggggaggggacatttctgcaacacttccccagc

SEQ ID NO: 266484 - DNA, 122 bp, Homo sapiens
cgagcgacgcggcgcggagagggcaggcgggctgtgggagcgccggtctctatatggcggcggctctgtcgcgcctggctgtccggctctagcgctcagccgccgcccgctcctgtggagtc

SEQ ID NO: 266485 - DNA, 122 bp, Homo sapiens
ccttcccacattctgccacctccacttccaggatctcatcactgctcaccagggttagggcgcctgctttctgaccagttttcctgctcttctctggtcctgttcctttttgatcacttgcc

SEQ ID NO: 266486 - DNA, 122 bp, Homo sapiens
gggtgagcactttgccctaggacacacagcgcgtcagggacaggtctggacccaaaacaccgcggcgtgcctgcagcccagcgccgccggcggtccgggactcgaaatcccgacccacgacc

SEQ ID NO: 266487 - DNA, 122 bp, Homo sapiens
cctcctcagtattctgcttggttctatttttctgaagttgattaattggtgactgcctcacgaagactagccacatatttcatctccatcaagaagaaagatttattccaatgactttgctg

SEQ ID NO: 266488 - DNA, 122 bp, Homo sapiens
tctcccgagaggactttctcgagcgctcgggcggcggccgggtggggcgagcgcacgaggcgggagctgcagcaggtcagccttgcttagccttccgtgccctgcccaggaaccgcggtgat

SEQ ID NO: 266489 - DNA, 122 bp, Homo sapiens
agatcgaccgtggagaggctttttctgcagcagtcccggttcctgccgccagatggcgctcgaggatcacaaatgggtctagggttctcataatggccccgcctaagaaattttggattctc

SEQ ID NO: 266490 - DNA, 122 bp, Homo sapiens
gctgccctgtactatttagtggtccaaggcaagaagggggaagatgttcttggttcagtgcggagagccctgactcacattgaccacagcttgagtcgtcagaactgtcctttcctggctgg

SEQ ID NO: 266491 - DNA, 122 bp, Homo sapiens
tctttggggcccatggtgcttcatttattcccaaaggtgccttctcctccctattctgatcgagactaaaaggcctcctgatcccattgctttgccaggacaatattgcttcccagggaaga

SEQ ID NO: 266492 - DNA, 122 bp, Homo sapiens
agcctacgttctgcactcaggtcactgggggacctgggctttcaataggtccctactcctcgtcttgttcatcttcccaaacctttctccagaaagcaatatagagaaggcttaaacacacc

SEQ ID NO: 266493 - DNA, 122 bp, Homo sapiens
ctgggtatgattgggctctctcagcgcttgctgtccgtgttgtcctttggcaagagaggacggtcctaggattgcatcagtctggtggtctggtggagcgggtggggtgctggactgggtag

SEQ ID NO: 266494 - DNA, 122 bp, Homo sapiens
ggggggcggggctcaggcatggcaggctgcaggtccgggcgggaggcggctgaggcctggcgagaattccagcgtggcaggtgtggaccggcagtgctgggggacccagcgcaccctccaca

SEQ ID NO: 266495 - DNA, 122 bp, Homo sapiens
tacccactccctccagctcttggagggctgagatttgttttctgtgtcacagcggtatcccgggagcttagaacagtgtctgttacatagtaggcattgaatacacgtttcttggatgaata

SEQ ID NO: 266496 - DNA, 122 bp, Homo sapiens
atctcagtgaaaatagcaactgggaattaaactaagatctgaaactgggaaatggcaacgcgggcacaggtgtcacctttccaactgttgttgagatgatgtggacaacggttattcagaaa

SEQ ID NO: 266497 - DNA, 122 bp, Homo sapiens
gggcggccctgcggcgggggctgcgctgggactgggtgccttgagacaggccagtggttccgcgacccccgctttcgaagttttccagcaagattatcctgaggaaaaacaaggtgagttgg

SEQ ID NO: 266498 - DNA, 122 bp, Homo sapiens
ccgcccccgaaccccgccgtgtccttcccgccgccccggggtcaccctgcccgccggccccgacatcctgcggacctactcgggcgccttcgtctgcctggagattgtaagtggggccgccg

SEQ ID NO: 266499 - DNA, 122 bp, Homo sapiens
ccagctggtctgtatgatcaatagcatatggtatgacagaggtgatactatgtcaccttccgaggttagattataaagaaccatggcctccatcttgcatcacttacttgggagaaacaggt

SEQ ID NO: 266500 - DNA, 122 bp, Homo sapiens
tataattggacaagggctgctctcacggtgttaattccatggcactactggcctattattcggcagccaagctggttccaagagccagtgaaagccctgaggcaaatgaatgcaggtgctgg

SEQ ID NO: 266501 - DNA, 122 bp, Homo sapiens
ctactcttgctgatgctctgcccctccagctccggaggggagcgaggagggggcggggcgcgcctcgagagtgacaggcccggctgccctatcaaagagccccttgggagctgcgagccgca

SEQ ID NO: 266502 - DNA, 122 bp, Homo sapiens
cctccagcatcccaatataagcaaccacttttcctgccacacacggggtttctcgtcgttcgaatcccccctccctttgtctctgtaccggggagctgttttcttccttgcttctctcttgc

SEQ ID NO: 266503 - DNA, 122 bp, Homo sapiens
tagataattaagtaaaagtggaggggcgaagtggaagaaagaggggatggaggagagaagcgtatgaggaatggatgaaacacagaggcagggaactcacattcaggcaaagcgatgcctcc

SEQ ID NO: 266504 - DNA, 122 bp, Homo sapiens
ggtacacctcccagaccgggtggtggccgggcagaggagctccccacatcccagtaggggcggccgggcagaggcgcccctcacctcccggatggggcggctggtcgggcggggggctgacc

SEQ ID NO: 266505 - DNA, 122 bp, Homo sapiens
attctgtgaagtattattagtcagattttagcaataaggaaactgactcacagagaagatcgattatttgctcaagatcaaacagctggaacagagtggagcctgggcttaaacccaggtag

SEQ ID NO: 266506 - DNA, 122 bp, Homo sapiens
ctcgcaggaactagaacagtttgctgtaacaggagcacagatatcagacaggcagggccacgctgtctgcacggctccaccgagaggccgtccatcgacactgatgacgaatctcgtctgtg

SEQ ID NO: 266507 - DNA, 122 bp, Homo sapiens
gtgtaacgaattgacctcgtgggtccctggcatgatgcgccgagaagggtacatcgctttcggagtattcttgccccaaaggcagaatctgaatttaatcaacaggaaatatcagacaattc

SEQ ID NO: 266508 - DNA, 122 bp, Homo sapiens
gaaaagtgcggacagttctcacaggagtttccactggggctgcattcccagggcgctggccgggaaagctcagtccactgagcacaatatgctttctccatagcgtgagggctgccaccatc

SEQ ID NO: 266509 - DNA, 122 bp, Homo sapiens
cggctgccagcagtgcttatgctttaagtgcggagcgggtggctgcggagccaggcgcggcgcaggatggtggacagcgtgtaccggacccgctccctgggggtggcggccgaagggctccc

SEQ ID NO: 266510 - DNA, 122 bp, Homo sapiens
tgtaaaatggagcagctgggcgctggcaagccgtaagtccaagagctttggctccaccagcgtgtacgacgctcatttcctttctctctccccacaccctttccaaaaactgtaagccagaa

SEQ ID NO: 266511 - DNA, 122 bp, Homo sapiens
ctgccacagttgcaactaggtgaaggcccaaacaagtagtagggcagccactaaaacagccgagattatcttgactaaagctatgctcaactactggctcaatgggatccaatatttttggc

SEQ ID NO: 266512 - DNA, 122 bp, Homo sapiens
caatcccgcccaaccccgggtccggaaagagcactgtctctggagtccacggacagaaagcgcaagctcgctgggggccggtgggcaacttaggtcacctttgtaagcctcggctttctcat

SEQ ID NO: 266513 - DNA, 122 bp, Homo sapiens
gtcctctgatggctcccttaggtgaagttgggaactatttcggtgtgcaggatgcggtaccgtttgggaatgtgcccgtgttgccggtggacagcccggttttgttaagtgaccacctgggt

SEQ ID NO: 266514 - DNA, 122 bp, Homo sapiens
atgaatgaaagtgtgagtggcgagagccctgccggccgcgtggaggtgcgaggctgcggacgtcgcgggcccggaggcacctgcgcgcccttggccgactcggaggaggtggagatggacgc

SEQ ID NO: 266515 - DNA, 122 bp, Homo sapiens
ggaaggactcaaggttccaaggggcacgatggtgaagccgatgtcaacaacgcagccaaacgtggctacacaggaacctaagtagaaagggaggttgcccccaagagtctctcaagggacct

SEQ ID NO: 266516 - DNA, 122 bp, Homo sapiens
cctccacagctgctggcccgggtgctaagcccctcaccgcccgtggcgggcggcgccgaccggcttttccgagagcgaggccagctgagcccccgcccacccggaactctcgctggcccgca

SEQ ID NO: 266517 - DNA, 122 bp, Homo sapiens
ccacctcatccattgatgaaacgtaaagtaagaagaggccccatgccagagatggtaggacggtatcattcgaagaggacttgttaatgaatgagtcatggaagccaatgggctaaggaaga

SEQ ID NO: 266518 - DNA, 122 bp, Homo sapiens
tacagtcagataataacaggggccagataacacagggttttgtaggccactgttatattccgcggagtgagatggggagctattggaaggtattgaacaagtatgatgtgacataaactcgc

SEQ ID NO: 266519 - DNA, 122 bp, Homo sapiens
tagagcccacgaggccgagaggcgtggtcgcccatgaacttggggagtggagggaaaagtcggaaactgatcgtggacactagaaacagaaaaaatggaatttagatggagaaacgagacac

SEQ ID NO: 266520 - DNA, 122 bp, Homo sapiens
ccctggtgctagtcctagtcttggttcggaccggccccaaggagcaggggcgaacgtgggcgcctcgtgccctgattggccgacggggcgcgcgcggcctggaggggcggggcggacgcaga

SEQ ID NO: 266521 - DNA, 122 bp, Homo sapiens
gtggctcctgggtggtctgtgcctgtccctgcctaatgcagcatcagctggctgccttcacgggcccttgtgtggcacagctgctttgcagatggagacgccgaggctcagggcagcctgct

SEQ ID NO: 266522 - DNA, 122 bp, Homo sapiens
tggatttaaagaacctagcatatttgatctccgtccataattctccaattagtcctgctgcgaagacagccaggtaggatactagtcagtgccggcctctccagggtaagtgaggaagagaa

SEQ ID NO: 266523 - DNA, 122 bp, Homo sapiens
aggcttgcctcctggacaatttccctggcaaccatccctggacatcttacctgcaacctccgaaaactcaactcacttgtccactcccactccgtcagcagggggacctctggcacagagcc

SEQ ID NO: 266524 - DNA, 122 bp, Homo sapiens
cagtagtttaatctttttcattgctgtatggaattctatcgtaggactattgtgttagttcgttcaggctgctataacaaaatacatcagactgggtgatttgtaagccaaagaaatttact

SEQ ID NO: 266525 - DNA, 122 bp, Homo sapiens
actctaccgggttggggtttatgcattaattactggagaacttgcttgtaaagtgctttacgagctctgggttgttcactcaaacgtggcacacacttagagatggttattttacccttatt

SEQ ID NO: 266526 - DNA, 122 bp, Homo sapiens
aaagagaaactgctttgcaggtctgcttaaagatctcattgtgttccgcataagcagtttcgttctgaggtgaccgagattttgtaaggcacagttcttttcagtcattagtctgcagcacc

SEQ ID NO: 266527 - DNA, 122 bp, Homo sapiens
cgcgcgcccccgccgcgtccccgccccttccggcccgggagatttgattcccttggcgggcggaagcggccacaacccggcgatcgaaaagattcttaggaacgccgtaccagccgcgtctc

SEQ ID NO: 266528 - DNA, 122 bp, Homo sapiens
cctcccctccttcccattgacctagtttggccagagcctcccgatttggagaatgccttccgcccttcccccctcctctccagccagagaggctacagaggctgttggattattggtaatct

SEQ ID NO: 266529 - DNA, 122 bp, Homo sapiens
gggaataaacagcagggatgctgggggctggaatgcactctgcctcactccaaaaaggggcgtgggggagcccagcgcagcacatgattagactttccaatctgctgaatgcctgtgaggcc

SEQ ID NO: 266530 - DNA, 122 bp, Homo sapiens
cccgacctcgccagcccaggcgccgcgtttaatcttgggctctttgtgccagccaccccccgaggctggcaatgagaatgccccagtgtttctgccgaagtgctgaaatacccgggagactt

SEQ ID NO: 266531 - DNA, 122 bp, Homo sapiens
agaggccaggcctgggacacctgagcctctattatcaatgattcatgaacaccctccctccgactcaagtgagcctcacattacaggtccctttcctgcctactctgcggtcagcagatcca

SEQ ID NO: 266532 - DNA, 122 bp, Homo sapiens
ctgccggccctggggcattgagcctcaggaggccctcgggctcaaggggccctcctggtgcgctcttcttcccaggggagcgggactacggcccccccattgacctgtggggtgctgggtgc

SEQ ID NO: 266533 - DNA, 122 bp, Homo sapiens
tcaacaaacattcactaaaatcctatcatatacagaatgctgaattgagcacaacaaaagcgttagaagacacattctctgtcttcaaaggggcttttaaatgtagctggagggcccagaag

SEQ ID NO: 266534 - DNA, 122 bp, Homo sapiens
gttgtgttgggatgagtggccgaggcgtctggggacgtcctggagcctgcagcccttggccgtgtcacgccatgtgctcatgtgaccgaggacgcttccgaggatgtggaagccaccagtcg

SEQ ID NO: 266535 - DNA, 122 bp, Homo sapiens
ctgtgttcagcccatgctccgtagcccttactgtatggaattcctcacatgagcctctctcgcagcctgttgcaggctactgaaggaaagacaccgtccctggcatagaatgggttcggtaa

SEQ ID NO: 266536 - DNA, 122 bp, Homo sapiens
cagccccgtgcgcctggggcccagcccccagggacgcgggttcgaggctctaagtactcccgagaaaggcagcggttggcgggccctgggttcacacctcccaggcttcagaaggtgggctg

SEQ ID NO: 266537 - DNA, 122 bp, Homo sapiens
tgttccctccagcccgcacaccggagcgcggtgggcccagcctacctgtggtgagggcctcggcggttgcgatgtgcatgatggtgttgtcactcacgggccattctcctggcgagagtacg

SEQ ID NO: 266538 - DNA, 122 bp, Homo sapiens
ttcctcatccatacagtggggaaaatattttctgtttcccagggaaattgcaatggctgacgtgtatccagttccctgtggccaagtaccaaggcctttgcccactcctgggactggtgttg

SEQ ID NO: 266539 - DNA, 122 bp, Homo sapiens
cccacggggcgagcatgaaatctgggagctcagccatttccctggaggtggctgggtgggcggtgggagtggacggggctgggcagtgactgctgccaaggcagggggctggcgcgagggac

SEQ ID NO: 266540 - DNA, 122 bp, Homo sapiens
gggctcgtgtccaaaagcagccgcaggggccgcgggagcatggccgagtgaaggaatcagcggggtcgggccatgggggcgcctggggagagacggggtggggtgggggtggagagtcaggc

SEQ ID NO: 266541 - DNA, 122 bp, Homo sapiens
accccaccccgttctgttcccccacagtttagacaagatcctcatgctccactggccacacgagtgccctcaggaggagtagacacaggtggagggagctccttttgaccagcagagaaaac

SEQ ID NO: 266542 - DNA, 122 bp, Homo sapiens
tttctgttagatactatttcctctgggtgtgagcaacacatttctaactgcatctgtgaccgggtagaggttaattaaagatccaaagcccagaaatggttttatcatcctcctttcttctg

SEQ ID NO: 266543 - DNA, 122 bp, Homo sapiens
ggctgttgctgtgcttgtttccatgttaacgccgaggctggctccctggggaccccatgccgcagcacctctcaggagtgggatgccaggaggtatgcgtctccatgaagcctgacggtcct

SEQ ID NO: 266544 - DNA, 122 bp, Homo sapiens
tttggcgaaatactgacaggatgcgacgtcaacgggagcgcagggccaaggtacaggccccgcccagtccggtcacatcccccggaattctcgcagctccccttagctccgcccccagtgac

SEQ ID NO: 266545 - DNA, 122 bp, Homo sapiens
gctggggcggggcggggcgggtccctggctagctgtggggtggagagctgcctcacctgccgggtcttggccgaggtctcgatgtaggggatgccgtagcttcgggcgaggtcctgagcctg

SEQ ID NO: 266546 - DNA, 122 bp, Homo sapiens
ggggaacgcggtcccccaggtgagagtggtgctgccggtcctactggtcctattggaagccgaggtccttctggacccccagggcctgatggaaacaaggtaaaatcttatgttttctatat

SEQ ID NO: 266547 - DNA, 122 bp, Homo sapiens
gataaccctgtagttttgagacttcctgtaagatcaagcttctcaacagctccccagagtcgtttgtccctttcagtcaccaaccacaccctaaaaccagaaatgatgaccagataagtgaa

SEQ ID NO: 266548 - DNA, 122 bp, Homo sapiens
cacagtgcgcagagttggaccttcagtcaggctccacgttgttggctaagacagaactcccggcatgagcgtgcgcgaaggaagttacacgtcaagtcaaagtgggtactggaggccgggtg

SEQ ID NO: 266549 - DNA, 122 bp, Homo sapiens
ccaggctggtctacaacccctgagctcaggcaatccgcccgcttgggccacccaaagtgccgggattacaggcgtcagccacagctgtaacttatttaatggggcactcaaggccttttgct

SEQ ID NO: 266550 - DNA, 122 bp, Homo sapiens
actgggggctaaggaggcaaccatgccagcctgggccctatagtgagtctctgtttccagcgaccttagtgagggaagaggctgacttgcaggcagctggctaaaatatgaccacacaaaag

SEQ ID NO: 266551 - DNA, 122 bp, Homo sapiens
ttccctagggaggagcgacccctttcctcaggcgtggagaccccagtcctctaacaagggcgcactcgcctccatcccccccaccacatacacacacactcgagcccttttcttctcttcca

SEQ ID NO: 266552 - DNA, 122 bp, Homo sapiens
tcacacacaccccaagggcctgggagggcacacacagggtcctctgcaaatccgaggttccggcgggtccccgcaccggccccagctcctcccccgcacctgcctggccggcgggtcccacc

SEQ ID NO: 266553 - DNA, 122 bp, Homo sapiens
accagacccagctgcaaatgttctgtaacaaccattctcagctcatgggctaacaagaggcggccagatgtggtctatactcaaatattgcctcctcaatgaggccttcctaggacaccctc

SEQ ID NO: 266554 - DNA, 122 bp, Homo sapiens
atgtgcagatggcctgctttggggttcagtgtgcgtgtactgcgttggtgtccacgtgcacgtgcagcatgtgtgtacccctaggcacacacgtggtgtgttgcattcatgtgaatccatgt

SEQ ID NO: 266555 - DNA, 122 bp, Homo sapiens
ccgccaccccggctggagagcgctgggcgcaagctgcgcgcgcagaccgggccactcggtcgccagaaaagatttttttaaaaatggaacagaatattgaagaactgtaggagaaatacaaa

SEQ ID NO: 266556 - DNA, 122 bp, Homo sapiens
tatgtaggagaggaggatcagggagaagcaactggcaaccaccaccccaatgtctacaaacgtcaccagctcgttgactgttgtgtcagcacaggccagtctcaacactgcagggatgtcac

SEQ ID NO: 266557 - DNA, 122 bp, Homo sapiens
gggccgctgagcgggcccagtggagaggcacaaatcacctgcaagagggcccaggcaccccgccgcataaatcctggtgtttgtgcagctttcggcgcctctggggggccgttctggcctgt

SEQ ID NO: 266558 - DNA, 122 bp, Homo sapiens
tgtcccaccagccaagagttgtgccacttgggccacctcaaagcctctctgggcgaccaccgttagcagcttcctggctgcatcagggcccatgtcacgggggtcagggaaagggctgcttg

SEQ ID NO: 266559 - DNA, 122 bp, Homo sapiens
cccaattaaaggtcaacatggctgctcaaaaatatttatttaaaaaggcagtcagctcagcgggctcccaagtgtgattacactaccacttcatagaattcaattaaacccgggacggggca

SEQ ID NO: 266560 - DNA, 122 bp, Homo sapiens
tgattggaggaagcactaggtgcctagaagattggattacctaactcagccctgagctggcgatctgcaaggttttccctgacggtagaggtctgatctaaggttttactttgaagttgatt

SEQ ID NO: 266561 - DNA, 122 bp, Homo sapiens
ctcttccggttccatacaatactcaattggttggttgtcggctaagagcccgcctcattgcgctcatctagtacaataggaattagaagaagatagctgctaactgagtggctgacggtcct

SEQ ID NO: 266562 - DNA, 122 bp, Homo sapiens
aggacggccggagccacatcgctgagcaggcaatcagcaaatgaatgaatgtgtgtgaagcggtgataagagaagcagagcaaatggtggtgcctattagggacttaggggatctgggcagg

SEQ ID NO: 266563 - DNA, 122 bp, Homo sapiens
tactgtaaaaagtaaataaataaaacctgaatttttaaaatgactggaaacggtgatcagcgtctacacctccctgcaaacagtgtgtccggaattggttccttctgatgttcagatacgtc

SEQ ID NO: 266564 - DNA, 122 bp, Homo sapiens
ggttttgccattgaaaggggctttcagtgaggaaggcacaaaatcaagaaaatagagccccgacccctggccacgtggttcccctgcctgcctgcacctccccatggcccagccagcttgtg

SEQ ID NO: 266565 - DNA, 122 bp, Homo sapiens
tggcagctactctacagctgaaaacgggagaaaagagagcgttagaaagcggtcatctgtcgcttcctgtttatctgacaattgaagctctccacgtgctgggagggcgcgagcacgttagt

SEQ ID NO: 266566 - DNA, 122 bp, Homo sapiens
tgattcctgttaaaaataaacatgtgtgcataacactgctgagcacgagaccgcacctgccgtccctccttagagctcccagcagctgttggtctttggcgtatccgggagaggagcgaggc

SEQ ID NO: 266567 - DNA, 122 bp, Homo sapiens
tacagatgaaacaagctcaggcagactgacttgctcaaaatcatacaggtagcgaggtgccggggaggatgggtgggtccccgggaaaaactgtgccaggccccaaagctcatattaatccc

SEQ ID NO: 266568 - DNA, 122 bp, Homo sapiens
aaaaagtgcagctcatggtagccttctagaaaatggttttaatgggtatcccagcatacacgcttttttaaaagccccctctgaacaccagaggtggtgaaaatgaattgtgttcttggatt

SEQ ID NO: 266569 - DNA, 122 bp, Homo sapiens
ttatgagtggtaaattttgaatttcagcctagtcttactttaaagctcatactttttccacgaagcattttggggagtatgctgaattatcctatttatgtggcacatgcccagccaatcct

SEQ ID NO: 266570 - DNA, 122 bp, Homo sapiens
tttgctcccttcattgtctctccagttcccagaggtccacttgggccagtggtactttatcgcaggggcagctcccaccaaggaggagttggcaacttttgaccctgtggacaacattgtct

SEQ ID NO: 266571 - DNA, 122 bp, Homo sapiens
gccggaccggggacgcgtgatgggtagggcgcggggcggggtctgtggtgggaagcggcccgcaggccgggagagagggtgcggccgggccctcgggccactggggatcagtggtgggcggg

SEQ ID NO: 266572 - DNA, 122 bp, Homo sapiens
cctgctgtccccctcaggccacattaggatctcagacctgggcttggctgtgaagatccccgagggagacctgatccgcggccgggtgggcactgttggctacatgggtgagtgctgggctg

SEQ ID NO: 266573 - DNA, 122 bp, Homo sapiens
ttctatagctaattcagttgatttcatctcagcacacatacactgagcgcttcctaagagcgaggttgaccgacatttttattagcaataatctctgccttcttctgattacctagagattt

SEQ ID NO: 266574 - DNA, 122 bp, Homo sapiens
aaacagtgacgttgtcctggtaggcctggttgagggtgtagttgacaatgctctcctcgtcgtggaagcccttgaagatgtccacgctcacctagcgggaggggcatcgctggagcccgccg

SEQ ID NO: 266575 - DNA, 122 bp, Homo sapiens
cttctgtccctaaagttttttcttcctcttgcctcccccagcccttttgaaagctccccgcgtcgtcctcctgctgccccggctccttagcagcttctgggacgcacgggagggaaaagccg

SEQ ID NO: 266576 - DNA, 122 bp, Homo sapiens
ttttataagccagccgactgaggcgtgtgacgcaagtcctgagagccctgttgaggagtgcgcaccccacccattcccggaaagagcagaccctagcgagcgcttcctgcgagccgtgcgct

SEQ ID NO: 266577 - DNA, 122 bp, Homo sapiens
ggggctgctgctgctgctggtgttgctgctgctgctgccaacggcgacccgggctcgtcgcggtccccgccgcacagtgagtaacacatcgcgcaccgagtgactgaactaagaagagcaaa

SEQ ID NO: 266578 - DNA, 122 bp, Homo sapiens
tgtcttggaagggcaggaggtgcggctggactgtgaggccgatgggcagccgccgccggacgtggcctggctgaaggacggcagcccgctgggccaggacatgggcccccacctccggtaag

SEQ ID NO: 266579 - DNA, 122 bp, Homo sapiens
ggcccactgcgcgcaggctactatgacctcctcatcagcatccacctcgaaagtgcctgccgcagccgccgctccatgctctctgaatacatcgtgcccctcacgcctgagacccgcgccat

SEQ ID NO: 266580 - DNA, 122 bp, Homo sapiens
ccaaggcggtgccgaagagcagcacatactcggacagcgaggcgtgcagaaggcacatggcgcccatccagccacccgcattcacgaacacccactgcagctcctcgtcgggcagcacgtgg

SEQ ID NO: 266581 - DNA, 122 bp, Homo sapiens
acacggatggaggacaggagaccaagaatggcataaaatttctccgagcagaaggaacgccgcagagtgtgagcgtgagattgctagcgctcacaaattcaggcaaggcaggtgaggagaga

SEQ ID NO: 266582 - DNA, 122 bp, Homo sapiens
gcctccgacaggcccaaggtacccccaggccgaatgaccggggcccggtgcccacgcttgcgccccaagttggcacggctccgatacatggcactgtcgaggatctcggtgtcctgcttggg

SEQ ID NO: 266583 - DNA, 122 bp, Homo sapiens
cttgcttgcaactttagaaactgtgtgtccaccactagtgcagcagacagttatgggtgacgctgacctacaaacagatgagatgaccctactttagatgagctcatgtttccacatgcatt

SEQ ID NO: 266584 - DNA, 122 bp, Homo sapiens
agtcagacactggcttaatacagaacatcgccccgcttacagggtctcttgcaactgcgtcggccttaggctggaaaatgcaggttcctgtttctgcgctttttaaactagccgataccgag

SEQ ID NO: 266585 - DNA, 122 bp, Homo sapiens
tgaggcagtggcagggctgaatgaagacccttggaggcctcatcactgagacaggaatggcgcccacaatacgaaataaaaacagcactgactcggaaaataagtgtcaggaggacaacaaa

SEQ ID NO: 266586 - DNA, 122 bp, Homo sapiens
tagtgggcctgccaagggaggcggtcatgattcatgcctgggaagtgctcgaggccagaacggaggttggaggaggctccggggcctggggcgtggtggccgtggtagaccggcggacgctg

SEQ ID NO: 266587 - DNA, 122 bp, Homo sapiens
ggggacagggtggggtgaaggcccggaaacgccgacggggcgtacctgcgcgcgcacccgcgacctctgaccccgtggcctcagccctgaccccttacgacctgactacatcttttttaaac

SEQ ID NO: 266588 - DNA, 122 bp, Homo sapiens
aatagaaagtgagttcatggcaaacgcccacgacttaagttgcagctcagaggaagcaggcgtaagccgaatggaaggggaagaatccacaccgtatcagaaccaccaggagggctggacgg

SEQ ID NO: 266589 - DNA, 122 bp, Homo sapiens
acaggccgcctgagatggttctagtccctttgagtatacagacccttcctgtgcattgaccgacacagctcggcccggatcccgaaatgaacgtttctaccttcggaacgctgcgtctcgga

SEQ ID NO: 266590 - DNA, 122 bp, Homo sapiens
ctcctcctgaaaggcatcctgggggacaggaaagaggaccctcagacgccacacggggctcggtggcaggtccctcccgaggccctgcttccaagggaatcgcagagatacacaggtgccac

SEQ ID NO: 266591 - DNA, 122 bp, Homo sapiens
tcttttctgtgaaattcagtcccacagctatttgagcaagggcccaagacgatggagaggcggcaaagctgctgggagggcctgtccgcaggcaggaatgcactggctgtgcctcgccccgc

SEQ ID NO: 266592 - DNA, 122 bp, Homo sapiens
gggagaaaaggctgccagcaatgggagcagtgcctgcagagcacgcctccgaccagaggccggatccagaataaagaaggagcctcagactctgccgcaaagacggccgggttcacaggagc

SEQ ID NO: 266593 - DNA, 122 bp, Homo sapiens
tgttcatgtctcccagaggaggcggagtcgaaacgtcatcttacggggtgaggccaggggcggggtcggttgattaagatgcgggcaaaggaccctcttttataggtgtcaggtcaggtttt

SEQ ID NO: 266594 - DNA, 122 bp, Homo sapiens
cccgtgctccgtgcacctctgtgacacctggttactgtactctgaagcttcgcacacccccgcagtctccatcgtaaccccagaaaaccaaggctcagaaggcgacgggccccagggcaccc

SEQ ID NO: 266595 - DNA, 122 bp, Homo sapiens
gagaaaagcgagggctgcctgtcacaggatgacagcagttaagacgctgcgtggaagtcacgtaacagcagcatttacaggcggcctgcctcatccgcccacactcttatcaatttgactct

SEQ ID NO: 266596 - DNA, 122 bp, Homo sapiens
ccctgggagaaggagcatcaccgcctctctgtccggatgggctcacatgcccacccattacggcgatcaaggcgggaggctgccttccggagcccctactcctcaacagagcccctctgctc

SEQ ID NO: 266597 - DNA, 122 bp, Homo sapiens
agggcacgtgcgaatcctgccgcatccagcttcaaagcgaagaaggctgcgggaccccagcggaacaaagagtttggaagttgcaatgttgtctgtttgtaactcagctcagccacctgcta

SEQ ID NO: 266598 - DNA, 122 bp, Homo sapiens
caaagggagagcgtagggagcctgatccgctttccgcgtgggggtcgtttcactgtttcacgttaggatgtgattcggcccagaacaacagggagaaaaccgatgcttctgcaatgagtatc

SEQ ID NO: 266599 - DNA, 122 bp, Homo sapiens
cagtgacctaggccctctgggatctgggatggagtgggactgcctcaaagctgtcattgtcgctccctcacccgcctgactgtctgggacttaaaatagcaggagcacagcggatctcctga

SEQ ID NO: 266600 - DNA, 122 bp, Homo sapiens
ttggcagcgttctttttgtccattgctgatgcaggtagcgcaggaggatgtttgtcttttcggtcacgatgatctgttcagacgggtactctcgggtgggcaggtagactgagggccgttgg

SEQ ID NO: 266601 - DNA, 122 bp, Homo sapiens
ataatgtatcgcacttattgtcactatttgttttggcacatttgatgtgccctgcagagacgttttatgatatattttcctagatatataaattaattccattcatagtgagtgactacaga

SEQ ID NO: 266602 - DNA, 122 bp, Homo sapiens
cagggggcccgcagtggcctgcacaggggaactgggtagcgagagagttccaggcaattccgggggctgccccacagaagcaggtggggatcgacagtggctctccggcccagggaggagag

SEQ ID NO: 266603 - DNA, 122 bp, Homo sapiens
tagacagcggcttctgttggctcctaggggtgtgaatcaccacatcacctgcagggggcgcggctgtctttcttccccctcttctccctaatcctgagtgcacggagacagctctcagcagt

SEQ ID NO: 266604 - DNA, 122 bp, Homo sapiens
agaatcatttcagcaagttaggaaaggtagaagccaacagatagaaaattaggaagtgaacgatgaagtggaagcagtgggtgtgtaagccaggctttcaagtaattcaacagcgaggctga

SEQ ID NO: 266605 - DNA, 122 bp, Homo sapiens
cctctcccacggtgatgctctttcctctgtgcctggcagctacttgtcctctgtgcactccggcatgcctgcctctagcagggcagcccggaactgcgtcaggacaccccggatgctcttga

SEQ ID NO: 266606 - DNA, 122 bp, Homo sapiens
gctggatgttctccttatttggtgtttctgctttctttattcttttccaatgcccaccggcgaggggttattcctcacataaccagaacctttaacaaagagccggtgcataagaaagttca

SEQ ID NO: 266607 - DNA, 122 bp, Homo sapiens
tggtcctttttggccatcctgacctacggattaagtgcatgtcgaaattttaacaagtggcggcttgcaggattagccaactcgggcaggtcattaaagcctcgttaattcttgcggtcatt

SEQ ID NO: 266608 - DNA, 122 bp, Homo sapiens
tgtttaccctttgtttagagtctttctcttgccctactccctggccccaatctctgctaccgtggtaacgtgagctccgcaagggcaaggattttttcctattttgttcatggacttccaaa

SEQ ID NO: 266609 - DNA, 122 bp, Homo sapiens
cttgcagtcggcgaggaactccttggcgcaagcagcgtgcggatctcctcatgcttctgccgtgcctacgtgcactgacgtcgtcacaggtgggggataagattccgtcgcggtcggagttt

SEQ ID NO: 266610 - DNA, 122 bp, Homo sapiens
catacaaagaccttatttacaatgcagattcctgaaccccatcaagaagctgactaggaccgtggtggggccagagaatctgtgtttcaatcagtctcttccatgcggttctacagattatg

SEQ ID NO: 266611 - DNA, 122 bp, Homo sapiens
gaccacctgcgggcaggtggcgggcagtggtcaccaggcagccccggtcccacctgaggccgctcccccctccgcttccgcttacccatagagcaggaagagggagaggacggcagggaagt

SEQ ID NO: 266612 - DNA, 122 bp, Homo sapiens
gctgttaacccagaatgaggtgtcctattaatgcacaatcaattcctagtagtaagttcccggtgacgtcaggtacaggagcgctccgcagccagtgtttcctccccgtgcctaggttgcac

SEQ ID NO: 266613 - DNA, 122 bp, Homo sapiens
acaatgggaggagggagatggggctagagagctatttccacaccagaccacagatactcacgttccagtcaggtttgcctgagtaggtctataagccttcctcatcaaaactgcaagtaata

SEQ ID NO: 266614 - DNA, 122 bp, Homo sapiens
cgaaggcagggaagcggctgctggagcccctgtgacttcaggaccctgcctcaccttgctcgccgcgtcctggcgtcccgccgcttgtccgccgggtgctgcgctccgagggccaaagaggg

SEQ ID NO: 266615 - DNA, 122 bp, Homo sapiens
agaagaggcccaaagtagagacgcaaacaaaccctgagaacagcgtgttcttcccagtaacgtgaccgggaaaatgtgagccagaggaaacttgagagctccgtggtgcggctgagctggtg

SEQ ID NO: 266616 - DNA, 122 bp, Homo sapiens
ccctccatactccagtcagagtgactcagaaagcatgtgactgaccatgaccctcgcctgcgtcaagcccttcctgtgctctccacacagctctcagccgagctcctgagtgtcacatggaa

SEQ ID NO: 266617 - DNA, 122 bp, Homo sapiens
ttctgggggccaattcgtctggacactgtgcggtcagcttcctttttaaagtgccagtatcggtggggcaggaagggactctcagggctgagcagagccttctccagcgcgagcgaacactc

SEQ ID NO: 266618 - DNA, 122 bp, Homo sapiens
ccccgcgcccgggaggggatcacgccggcgccgggggcgggccgaaacccgagccgcgcgcgccagcccgccagcccctcccggccactcggggccccggccgccgctcccggcgcgggtct

SEQ ID NO: 266619 - DNA, 122 bp, Homo sapiens
ctcttgaattgcttttgaactttgcatgtgtgtatgttccatgtctccaacagaaatgcacgctctttgagggagtacctaagtactctatatgtcttttctcctttgataccttgcatagt

SEQ ID NO: 266620 - DNA, 122 bp, Homo sapiens
tccgcccgatctcctggcaacgctgcggccccgcccacatcatgacgcccgaggagaacgcgggtaccaaactcttgctgcagggttttgagagccgcttcctagtggcgcgcacactgcgc

SEQ ID NO: 266621 - DNA, 122 bp, Homo sapiens
gggtccccagggcgcctgcgcgccgcgcgcccagctcactccgcaaccagtggcctgccccgccccgttccgtctagcagcacgtgataggctatccccgcccgggtcatgctattattcgc

SEQ ID NO: 266622 - DNA, 122 bp, Homo sapiens
acatagcttagacgtgtctaatggagatttgaactcaagaagcctcctgattctagagtacgctctcctaaccttatgttaagtcaaaagtgtacttagaggacaagatgatatttcatcca

SEQ ID NO: 266623 - DNA, 122 bp, Homo sapiens
cccagtgaaagcccaccatcgaaaatgctcttcctttcaagcttggccagtcctggggcccgacccaacaatttattctgcagcatcaccgaacggcagcccattccagcggccaccggggc

SEQ ID NO: 266624 - DNA, 122 bp, Homo sapiens
aaaaggcgcagtgcatgcccgcccgcgtcactccgcgggcggaggacgcacgtcggggcgcggctctctggctagcgcgcagctccagctctgtcactcgcgcccttccaaggacctggagc

SEQ ID NO: 266625 - DNA, 122 bp, Homo sapiens
ctcaggaagagtctgtatctgcatttctgaagccccagccttggggttagaggccacacccggtcgccacgtcccgcacctgtccatgttggtgccagccacctcctttcttagtgacaccc

SEQ ID NO: 266626 - DNA, 122 bp, Homo sapiens
gtggccgggagggaaatggggctggattccagagcatcggacctggccgccagaaccggccgtttctatcccaggcaatcggactctgggtgccggagccacgccacgtgtggccgagggct

SEQ ID NO: 266627 - DNA, 122 bp, Homo sapiens
cgccgccgcctccacgctgcgccccgggccccgccgcggccgcgccggcgggggcagcgccggccgccgattagttttatctcggaacgtcaattgacttagactgattggcttcctgccgc

SEQ ID NO: 266628 - DNA, 122 bp, Homo sapiens
gcggcgcctgcagacccgctccagagacgcccggtgcccgcgcccgggaccctgtccacgcggcctccgcgctgcgccgcacctccccccgcaacccacccggcgtcagcttctccagaacc

SEQ ID NO: 266629 - DNA, 122 bp, Homo sapiens
gaatgtttacaaactggaatggtcagaggatggggaagacacttgagaaaagtcaagtgacggatgaaggcaaatgtggatatttatctgggagaaaactaagaggagttataatagctgtc

SEQ ID NO: 266630 - DNA, 122 bp, Homo sapiens
acggaggaccaaccaaggacttgagcagtcatggatttggtatcccaggagtcctggaaccggtccccggcagatagagggtctgctgcttgtgtttatgcatatgtgtgtatgtacagaca

SEQ ID NO: 266631 - DNA, 122 bp, Homo sapiens
gtttttggctaattgtactctcatctccttttttggactaatgccatttctacagggtctcgcaaattggctctctacctaagatgaattgtctccttataaaagtgaaatacaataggctc

SEQ ID NO: 266632 - DNA, 122 bp, Homo sapiens
gtctttctggtttcatgggactgtgcagtgcagttggagggtgactgggccctgtttccacggcactctgtaggtgcagggaccattgaaccatgtctgctattcctgtcttagctctgtac

SEQ ID NO: 266633 - DNA, 122 bp, Homo sapiens
cagacgtggaagatggctctgccgggacagctgtaaactctttaaccttgtgtggggcttcgtccttcagcagcccggtgagggatcagtggcaggtgtgatggcgggggaggtggaggtgg

SEQ ID NO: 266634 - DNA, 122 bp, Homo sapiens
gtcactcacccccctgttttctctctgccttggtgttctggtttcagactcccgactccccgttcagaccagagtgccccggcccctccccagcctgagtcttctccttgctctgcggggtg

SEQ ID NO: 266635 - DNA, 122 bp, Homo sapiens
gcggaggggggtcactcgccggacggaacgctgcgcgcagccatcgctcgctgtcagccgcgtcccaacccgctaggacgctgggccctgccggcgggatcctccccttactcggaaagggg

SEQ ID NO: 266636 - DNA, 122 bp, Homo sapiens
gatatccgtctttgccttcgctggccttcctctgcggagctacgcccgcgcccagggtggcggagccgcgcatcaacaccctctcgcctcgggacagtcttccgactcagccttctagagca

SEQ ID NO: 266637 - DNA, 122 bp, Homo sapiens
attctattagttaagtcttttctgtcctacagaagctcacacatccttctgtgtgttcttcgatgcggattcgaatctcctcgtatcctcccacagcgtgcttggaatggattctcccgtac

SEQ ID NO: 266638 - DNA, 122 bp, Homo sapiens
cgagcccgcccgcagcccggggcgcacacccgcacgcgcactcctctccactcactcccgcgcccgcccccactcccgcagccgagccccgccacgcgcgccttgcccgcccgccggccgcc

SEQ ID NO: 266639 - DNA, 122 bp, Homo sapiens
cagaggccgcgtggttttgggggacgtcttgactctgagtcctgcagccagggccccatccgcgggctcagaccagcagccccaagcccccctctgcccagggagcctcaggagcaggatga

SEQ ID NO: 266640 - DNA, 122 bp, Homo sapiens
tcctttggggccctcattttctagcctaacttaaccttttcctctcatgttcctaccatgcgtcatgttaaataaattacctgtccttgcatggtgaccatatggtttgcacattgcttgta

SEQ ID NO: 266641 - DNA, 122 bp, Homo sapiens
catagagtgctttgcatctggacactttcacagaagttccttggtgaaattttatatttacgtgaactgttgtttctttgtgccaaacctgctttttcctccctccactcccacctctgtac

SEQ ID NO: 266642 - DNA, 122 bp, Homo sapiens
agtgagtgttacagctctcaaggctgcgcgtctggagttgttcgttcctcccggtgggctcgtggtcccgccggcttcaggagtgaagctgcagactttcgcagtgagtgttacagctcata

SEQ ID NO: 266643 - DNA, 122 bp, Homo sapiens
cggcgacggcagtggccggggtggcgacggcgagcacagaaacgatggagttgagccagtcgaccctggttggaagcaagtgagaagagaccaggcgcacccctaaatttctgtgcggagcg

SEQ ID NO: 266644 - DNA, 122 bp, Homo sapiens
tgctctctcgcctctggccgccggcgtagtacccgggcgagtggtcgctgggtaggtaatcgctctgtgaatattcctcgcatggagggaacttggggtcgacatagtttgagttgatcaaa

SEQ ID NO: 266645 - DNA, 122 bp, Homo sapiens
cggagcctttggcgtgtgccacctagtggtgaaacctggctactacaggctgcgtctaggcgagaactcggagcgtggttgatttcattcaattttgttcacggcagggctgaggaagggaa

SEQ ID NO: 266646 - DNA, 122 bp, Homo sapiens
gaaggagccgccattctctccgccctgaccgcgggattctctgcagcagatgagaaacggcgctgactcagcagggtccctcccaggccccgagcggtcatctggtgacccccgcgcttccc

SEQ ID NO: 266647 - DNA, 122 bp, Homo sapiens
aaaatgatatgaaatttacatttcagtgttcattactgaagttttgttggagtgcagccacgctcttctgtcggcacgtcatctgcatagctgcattcgcactgcaaaggcagagccgagcc

SEQ ID NO: 266648 - DNA, 122 bp, Homo sapiens
cttacagagaccacagcctatggagtgtctagcttcagagaatatgtactccactggcagcgtgagaaacaaatacccaagaaaatacaatatagcacaaaccaggagctgagggtgaatga

SEQ ID NO: 266649 - DNA, 122 bp, Homo sapiens
ctccaccttcacccggctacaccaacacactcgatgaccttctctgtcttcctcgccgtgcgctcccgatagcgggggaaatacttttctgagacgcctctctgggcacgcaagatgaggca

SEQ ID NO: 266650 - DNA, 122 bp, Homo sapiens
gcagacacgcgttcccgggcagcgactccggaaggcccgagggagtaaatctggccctcccggttcagcacaaagctcccctggccgcctttcaaaaccgaccgcctcccaactctccgcgg

SEQ ID NO: 266651 - DNA, 122 bp, Homo sapiens
tcagggcaacggaaacaatactgatttcaaaactcctcagagaacgtgagcacacatctacgctacagagataattccctcatcacaactccctcttgctgctgtctacacctgcttcctct

SEQ ID NO: 266652 - DNA, 122 bp, Homo sapiens
ttggatgacctggtaagtagaacttccctccagcgttcagttaagttttaaatgactctccgctgttccaaagggcgaggacgtctggagctctgcaaacggaaaaaagattttgaagagga

SEQ ID NO: 266653 - DNA, 122 bp, Homo sapiens
ggactcccacaacgacaggtagtactggtggtcagctgtgacccaggccgggctcagcaccgcccccaggtccagacacagcgccaggaagatgcacaccagcccgaccagcttcaaggggg

SEQ ID NO: 266654 - DNA, 122 bp, Homo sapiens
tctggtttatgcaactcaactgaaggtagcctcatttactgaagttagggactttagagacgagccaggcctggcagcaggcatgtgtgatgaccaccgccctggtgtcagacagtttgaat

SEQ ID NO: 266655 - DNA, 122 bp, Homo sapiens
ggcgggagcagaggtacccagggctgcggggcgctcaggtgaggccgggagatcttcctacgggaggctgagacgggagctggctttgccctctctgactgcacgcggggagcctgattaaa

SEQ ID NO: 266656 - DNA, 122 bp, Homo sapiens
gcgggccgtctccaaccccgcgccagccacccgagggggcgttctcagcctccaccctagcggaccccgcgccagcacttgttaacccgttaccacctgttgacttggcctccttgcacttc

SEQ ID NO: 266657 - DNA, 122 bp, Homo sapiens
tttcatcctttttgctatttttttttctcttttaaagcttgtgtttgctttcatgttacacgttatttatttagttgcttgtcaattagtgtctattctccaagcgacaagcacattagcag

SEQ ID NO: 266658 - DNA, 122 bp, Homo sapiens
gaacagaggaaatttcttccatgaattgccctcctttcggtacccgccatgttttagttacgttgtattattccacttagcttaaaatataaagtcttgtagaaacacatttttaggatgtt

SEQ ID NO: 266659 - DNA, 122 bp, Homo sapiens
gcggcaccgggaggtgtaaaaagctgcggcgggcaaataatcgcggcaccaggcgggggccgcggcggcgggggtgaaaaagccgtggcgatggggggggggcaaaaagccgcggcgacaaa

SEQ ID NO: 266660 - DNA, 122 bp, Homo sapiens
gttgtcatttcagtagcccttctccatttacttaaccctgacaaatagtattgtcatttacgttttacagatgagacggaagtcctgagagtttgaccgatttaaggtcacgtgcctaggaa

SEQ ID NO: 266661 - DNA, 122 bp, Homo sapiens
taattttaggcaaatacttagcaccaaccactctggcttcctcaatattttgtcctgatccgtcttgaaactacctttcttgaaacttcaagtgtgctgcctatttaaagaattccaacgga

SEQ ID NO: 266662 - DNA, 122 bp, Homo sapiens
ccgccggcccaagtcccggagcgataaaacttctgctttctccgctccaagggtagaggccggttcgctctacccgggacacctggccagtttgggaaagggatcatttctccgtgtgatgt

SEQ ID NO: 266663 - DNA, 122 bp, Homo sapiens
ccattggctacctgccagacaatgtactaggagtacatattaaattagttgtatgtatggcgcttagcataatgcctgccacaaagtaaatgctgtatgtttgttgctgctggtgccgttac

SEQ ID NO: 266664 - DNA, 122 bp, Homo sapiens
gtctcatcaatgttttattccatagtgaagacggtctgaataatttaactaaggagtgttcgtttgtctcccgcctttgggagctgcttgctggctacattcagcggaggatttggcccagc

SEQ ID NO: 266665 - DNA, 122 bp, Homo sapiens
ctctccctccccgggccaggtgtgtcctggagggcagggaagcgtcttggcacgcgggtgcgcgccgccccctcggcctcctgggctccctgaacctcgcaggaccccggcaacttcgagcc

SEQ ID NO: 266666 - DNA, 122 bp, Homo sapiens
acttcacgccgctgctctgcgacttctatacggcgctggtggccgaggcgcggcggcccgcgcccttcgaagtggtcttcgtgtcagccgacggcagctcccaggagatgctggacttcatg

SEQ ID NO: 266667 - DNA, 122 bp, Homo sapiens
aatctgtgtggagagcttcaataatcagagagaaggtgccctgggagagaggggagaagacgttagacaacccagaaaggtaacgaaaagaaaacggcaaaaagcagtcattcctaacagcc

SEQ ID NO: 266668 - DNA, 122 bp, Homo sapiens
aattaaggagaactaggcatcgtttctggccctgcaaacccaaagatggcgtaaggtcaacgctgaggggcttgggtgggacaggagtggcgtggacttactgaggactaagcactgctcac

SEQ ID NO: 266669 - DNA, 122 bp, Homo sapiens
ctcagctcacagaaagaaaaatgcagggatcagtcttacttcagcacctggcaaccaaaacgtgtgtctgactagacattcctcctttctttcgacaaagcccaggaatctgaagcccaacg

SEQ ID NO: 266670 - DNA, 122 bp, Homo sapiens
cctggtgcgcctttttttttaagcccgttggaaaagcgcagtattcgggttggagtgacccgattttccaggttccgtctgtcacccctttctttgactaggaaagggaactccctgacccc

SEQ ID NO: 266671 - DNA, 122 bp, Homo sapiens
tatccccgcagagatcggggtaagacgcagttgagtcttgcacacgccgcatcacgaggccgcgcgagtacaatttcaaaacttaagctgcaggtttcatttaaatttttaaaaaatttttg

SEQ ID NO: 266672 - DNA, 122 bp, Homo sapiens
tgaggcatagagattaaataatatggctaaagtttgcataactaatacatggcagagattcgaatccaggtttcaggccagtgctcttaaatcctgaggtttaggaagaaagaaagtggcta

SEQ ID NO: 266673 - DNA, 122 bp, Homo sapiens
ttcctatgtaaacgcctgctttcactccctgactccagcatatttaggagacaaacctcccgccccgtttaagaagcctccattcagcatgacctgcaatcagagactggaaacaggcagag

SEQ ID NO: 266674 - DNA, 122 bp, Homo sapiens
ctccgccggggccgagccgctgttcggctgacagttgaggatggccggagccgagggcgccgctgggcggcagtcggagctggagcccgtggtatcgttggtcgacgtccttgaggaggacg

SEQ ID NO: 266675 - DNA, 122 bp, Homo sapiens
cccgtttgctcggcccgaagagaggcacagttagggtgccaagtgactggcagtcactgtcgggaggagccgattagggctcgggaaagcaagggaggcagctggcgtgggtgccctagtga

SEQ ID NO: 266676 - DNA, 122 bp, Homo sapiens
caatatcgcaggggtgtctacaccccctgcaatatggggagtaacatcatcctctgttcccgccgtgatattatgaacaatatcgcaggggcggtgtaaattccttgcgatataaagagtaa

SEQ ID NO: 266677 - DNA, 122 bp, Homo sapiens
ttcagagacatgaccaacagccacacagagacattctacactactgaagaccaaccacaccgcacccattccccttggaacggagcctgtcaggaagaacaactggagagtgaccaggaggc

SEQ ID NO: 266678 - DNA, 122 bp, Homo sapiens
gtccacagatctttgctgtgcacttgccacatcccagcactgtccaggaactggggtgcacgacaggcagggtctctgcccttccggagcagacatgctggtgggagagatgggcagctccc

SEQ ID NO: 266679 - DNA, 122 bp, Homo sapiens
tttccagcgaacagcccggggatgggcctgggcctggcgaggggtgggcctgcgggaggccgggcgaggggcggccccggcgcgtggaagcagggtacggcgcctgcggatcccctggacgt

SEQ ID NO: 266680 - DNA, 122 bp, Homo sapiens
caggccaccgctctttcaaaggaggagggaggcagagggctcacggatcagtgaattttccgctgacagcaggccttgagggccatgggatcattctgtgctgcagcgaggccctgcctgcc

SEQ ID NO: 266681 - DNA, 122 bp, Homo sapiens
aggcgcacctggagaagctgcatgtgcaggaccagccaacgggagcgaacgcagcatctccgaggaaaggcactggcacacacttccctcctcatggccacatcaggcaggtgttggtgtgg

SEQ ID NO: 266682 - DNA, 122 bp, Homo sapiens
cactccagcctgagcaacagagaccccgtctcaaaaaaatttaaaaaaaaagagctaaagcgacactttagatgggccttcaggacacagtagtagcctcctttgcccagcaaaggctgcgg

SEQ ID NO: 266683 - DNA, 122 bp, Homo sapiens
gaaagggcgagtatttaaagaggacagacttgcccaggatccttaacaccgcgccttcaccggatgcgcgctcctcaatgcaaaggaatccagcaacatccccaattcagacgcggacaaaa

SEQ ID NO: 266684 - DNA, 122 bp, Homo sapiens
gatacaaaaatattttgtgtagctgaggaatagtgtatatgccagtgattaccaaagtatcgggacaatcagatgacttggtagctataagtctatgaagagcctggtcttgaggcttcaga

SEQ ID NO: 266685 - DNA, 122 bp, Homo sapiens
ggtccggctgcgccagcccggctagcatggagcgaaagagctcggctgccatctcgtagtcgcccgcgcggaaggcctcgtcgccctcctctaagcgctgggcgatcggctccgcgcggtcg

SEQ ID NO: 266686 - DNA, 122 bp, Homo sapiens
gggtgagaggatcccttgaacctgggggatagaggttgcactgagttgagatcgtgccaccgcaaaaaaatcatagacagagccagaccctgtctcaaaataaaaaaaaaaaaaagtgggca

SEQ ID NO: 266687 - DNA, 122 bp, Homo sapiens
ctgtgcgcggtccctggggagcctgagtgtcccgagactggcctaagcctgtgtgcagtgcgagagagtaagactggagtccgcagccgagcaggaagagcgagccgggggattgagactgt

SEQ ID NO: 266688 - DNA, 122 bp, Homo sapiens
taacatttctcccaactttgggttagtagggttctttaggcgtctgatcattgtgggaagcggtgcggcatcaagtctgaaaagtgaatataatatggtttatttggaactcgaccaggaaa

SEQ ID NO: 266689 - DNA, 122 bp, Homo sapiens
ggccgaaccccggttcccgcaccattggtggtgcgctgaggtggggaccagcccgcctctcgtgccggcgcggggcgggaggagggccgaaggagtagctggccctggatccttcccgggag

SEQ ID NO: 266690 - DNA, 122 bp, Homo sapiens
tccccgcacgcctctgacctgactgcacgactgtcacaagtcgcgagctggtgcaaactgcgagggccgggaaaggagacggggcacgcatgcaccaaaaagtggggaggcagagctgcagg

SEQ ID NO: 266691 - DNA, 122 bp, Homo sapiens
accaaggagaagcagagctcagaggaagaagaaaaggaaacaagaggggttcagaagaggcgaggagggagcacagtacccaaagatgggccagtgagacctcagaacgctgaagaagaaaa

SEQ ID NO: 266692 - DNA, 122 bp, Homo sapiens
ccctccctccacaccctggccccaagcgcaataaacaccctgaatgcctgtggcgctgtgcgtttcttgggggcagggaggggtggcgggggggcggccaggtacatgggcgccctggggga

SEQ ID NO: 266693 - DNA, 122 bp, Homo sapiens
ccgcgcctccagagctccgccctaccccgccccgccctttcgggcgctccccaggccgcgcgcgcccgcggccccccacccagccacccctcgatgcccggtgcctttccaggcgccgcgga

SEQ ID NO: 266694 - DNA, 122 bp, Homo sapiens
gcgagaggcaccggggtgatttccgcgggaatcgataaccaatcggattcccaggccgaacggagcacacccgcccgccctcgctctttccccgccctttgccccgccccgctccttcccct

SEQ ID NO: 266695 - DNA, 122 bp, Homo sapiens
tctgctggagctgggtcagtaagtccctccccatatgctgcacatctgttccgaggagaccgcaggggaagctcgggcagcgcctccacacacgggcagacctggcaggggcaggggcggtt

SEQ ID NO: 266696 - DNA, 122 bp, Homo sapiens
tgcagtaattttcacggaaaacatgaacacaatcagcttggcttatgaactattttttgccgtggaaatacgtacaaagcctgctttgttctgtagactagtatcacatgacattggttaga

SEQ ID NO: 266697 - DNA, 122 bp, Homo sapiens
tgtcggtttgtgtgtgtgttccccttgtgcgtgtgtgtccttggctgaatgtgccctatgcgccacaaagctgcttctcacatggcggactgtctttggtgagcctgtttctgcctctctgc

SEQ ID NO: 266698 - DNA, 122 bp, Homo sapiens
aagccgggagggaacgagggcggaagcggaccagggccaggcttgtgttcgcagccttgccggggctggggttccgatgtggtccccggagcgggaggccgaggccccagccgggggagacc

SEQ ID NO: 266699 - DNA, 122 bp, Homo sapiens
gggccctgaaggactactaccacttctaccatagcaggacgattaaaaggtcagttatctcgagcagagggacccacagtttcatttcaatggaaccaaaggtaagaagaaccagttgcgtg

SEQ ID NO: 266700 - DNA, 122 bp, Homo sapiens
gtcaaaaaaaaaaaattgagacggagttctgctctcgttgctcaggccgcagcgcaatggcgcgatctcggctcactgcaacctctgcctcccgggttcaaacgatcttctgcctcagcttc

SEQ ID NO: 266701 - DNA, 122 bp, Homo sapiens
ctgactcatggaaagcacctggaacaaagcctggcacagagcggacgccgtgagaggatccgccgctgctgctgcggttaaatgagtgtttctgaaaagcttcctgggccaagccagtgcta

SEQ ID NO: 266702 - DNA, 122 bp, Homo sapiens
ccccaggtaactggcctgtgcctttggccccatttagcattgtgctctaactagcaagctcgccagcccagaacacctgagcttatatttgaaacccaaagcactttatgggtgctgttttt

SEQ ID NO: 266703 - DNA, 122 bp, Homo sapiens
tcagacggttctggtaaccaacattttctccacctcattacttgcaagtcttcacagttccgccatttggctatggctaaagttcatccctcaggccccaaacaagaagagttgacaattag

SEQ ID NO: 266704 - DNA, 122 bp, Homo sapiens
gaaataaataaaatggaacataatgggtctgcttcaaatgctgataaaatccaccagaatcgcctgtcgagtgttacagaagatgaagaccaagacgctgctcttaccattgtgactgtgct

SEQ ID NO: 266705 - DNA, 122 bp, Homo sapiens
ttgggcaacgtgtggcgcttcccctacctgtgctacaagaacggcggaggtgagttcccccgcccgccgcggcctcctcccccagcaggccgccggcccccgcccgacccccggagccgccg

SEQ ID NO: 266706 - DNA, 122 bp, Homo sapiens
ttactttaaaattttagttacattgattcacttcttgcaaatgttatgttccttattgagcgtcagccaggtaaaaataggcacaaatgatgggtttgatgtcctaaatttatgaaggcagg

SEQ ID NO: 266707 - DNA, 122 bp, Homo sapiens
tgacagcgtttcctcctggcacctcaaacgctggaccaaggtggacacaattgcagcagacgagagctttccctcctcctcctcctcctcctcctcttcttcctctgcagcgtgggctgtgg

SEQ ID NO: 266708 - DNA, 122 bp, Homo sapiens
ggcgagagccaccctcgccaggggtgtaggcaggcgagaggagggcctggagctgtgggtcggccacactgcgccctcatttgtgtgcagccccggaggaccagagtggggaagcaccccac

SEQ ID NO: 266709 - DNA, 122 bp, Homo sapiens
gcccgtgcgctaccagggtagcccattaacgcattaactccaggctcgttgggcagaagccgggaggaaacaccctggggaccgcactcctggttaaatgcccagcacgagtcaaatccggc

SEQ ID NO: 266710 - DNA, 122 bp, Homo sapiens
ggagcgtggacaccaccggcggtctgaagatttggcagccagcagtctccagaggggggtcggaggcgcgcaagtgggtaaggcggtaggctggctagcctcctccggtgggttaagggggc

SEQ ID NO: 266711 - DNA, 122 bp, Homo sapiens
cggagaccacccgcccggttttcatgtcccggtttggctgggtgtctaaactccgcctctcgggatgggacagagccccaccccacctcgcagtggacaccccaggacagtggcttggtctt

SEQ ID NO: 266712 - DNA, 122 bp, Homo sapiens
aaaagagtggtttggagcatgtgaagtgagtcttccaggagatgaaggggattgccaggccgtttgtgatgatgctgagatctggtgccgtgcagcctgcttctgcgactctcctcatcagg

SEQ ID NO: 266713 - DNA, 122 bp, Homo sapiens
ccaccgcgtcccccaccaatcagcgccgacctcgccttcgcaggcctaaccaatcagtgccggcgctgcaaggaagtttccagagctttcgaggaaggtttcttcaactcaaattcatccgc

SEQ ID NO: 266714 - DNA, 122 bp, Homo sapiens
ctaccatgtataaaacacacagatgcagctcaaagaaactttggtcatcgctccatggctcggttccctcatatgtaaaatgcaaataataatgtatcttcctttgaggaaaactgtgaaga

SEQ ID NO: 266715 - DNA, 122 bp, Homo sapiens
accggggacaatcaggagggcgcagagcgggctggggcggtgcagggggcggggctgccgcggcattgcggatcggcgggcactagggcagcgcggagctccggcggtgggcggggcgtggc

SEQ ID NO: 266716 - DNA, 122 bp, Homo sapiens
gtggcagcccctgccctcttggcatccaggttcttgtctggcatccaggaagaattgagtcgcacgatctctttgaaagatgataaatgcggaagactttattgacccatgggtggctgtca

SEQ ID NO: 266717 - DNA, 122 bp, Homo sapiens
tctccccaaaactcgtatgtgaaatctaatttccaatgtgttcgtatttagaggtggggccgttaggaggtgatttggtcatgagggctacgacttcttgaatgggactagtgaccttacaa

SEQ ID NO: 266718 - DNA, 122 bp, Homo sapiens
tgaagacaaagggaggcgatggacggtagcgacggttgcagacaaagtgaatgtatttaacgccgctgaactatacatttaaaaatggttgcagtaggccaagcgcggtggctcatgcctgt

SEQ ID NO: 266719 - DNA, 122 bp, Homo sapiens
cccgagtaatttccggagcccgccttcttgatgcgcctgtgcaggacactgacgaagtcccgagacactgcatccaacaggggcaaaaagttcttggtggcctctggagccatcacctcctg

SEQ ID NO: 266720 - DNA, 122 bp, Homo sapiens
aggcctcccgggccggtgttcgctgccagccaaacctaagcccgctcctcgcggggcccgcggggcacccccaggttctgtgcagctgaagcttgtaccattttgtgactgtgacacaggaa

SEQ ID NO: 266721 - DNA, 122 bp, Homo sapiens
agcccggctgcagactcgttagcagcgaggctttaaatacaaaagtgggccgggagcccccgcgtggtgccgcggtgccccctcattatgcatgcatggaaaagcaaacaaacaaaaacatt

SEQ ID NO: 266722 - DNA, 122 bp, Homo sapiens
taagcagtcaggcggaaacggcccctttcctgcctccttcccgcccggcgctgggccttgcgcagggcccggacgcccccaagcggccacctctctgcagctgacgcttccggctacaggct

SEQ ID NO: 266723 - DNA, 122 bp, Homo sapiens
aaactcaaagctgatactgtgtgtgtatgttgtcgttccagtgcctcatggcgtgggagtcgattattccactactgcaggagaaacaagaggccaagtaaagttctttcttgggacggaga

SEQ ID NO: 266724 - DNA, 122 bp, Homo sapiens
cctgaccttgtgatccacccgcctcggcctcccaaagtgctggggttacaggcatggccacgaaggtcatgctttctaaatcatttatagtccatcaggaggcttggccctttcttggaaaa

SEQ ID NO: 266725 - DNA, 122 bp, Homo sapiens
gctgtgcgaggaggtctagggtggcggagggaggggccctaccctgaggccttttcatgacgagctgtcactggagttggcctgaggcttcaggggaagcccttccctgtatccagcccagt

SEQ ID NO: 266726 - DNA, 122 bp, Homo sapiens
tcccgctccagggctgcccaggcccgcgggccaagcagctagccgtgcgggccgtcgtcacgcccgcgatcagatcagctccccgccacgtggcactgggaaggcgtccaccaagctccagg

SEQ ID NO: 266727 - DNA, 122 bp, Homo sapiens
cacactccgttcaggctgccacggcgtctccagacccagctccggccgggctcccgctaccgcttttgctccggcagcactgcccagccctgcccagacccctgcggccgcttctgccgcca

SEQ ID NO: 266728 - DNA, 122 bp, Homo sapiens
gaatatatttttttaatcaccatcaaaagaataaagcccctgaatcgctatctgggttgccgccggaccgagactcgcgcggcgtgcgctgcccccgcgggtttcgttttcggcacctacag

SEQ ID NO: 266729 - DNA, 122 bp, Homo sapiens
ccacgcggggctaccgggacggcggcatccccgacatagactactcctacacatgatgcccgcccacccgggctgccccgcctcagccccagctgccctggcgtggccatgtggctttgccc

SEQ ID NO: 266730 - DNA, 122 bp, Homo sapiens
tctgggggtctgcggggctagctttggctgcggtgaccccactccctccccagagcatcccgagggccccgtcttcggacgaggagtgcttctttgacctgttgaccaagttccagagcagc

SEQ ID NO: 266731 - DNA, 122 bp, Homo sapiens
tctcgccagaggtgagctccactgaccctgagagcagctttgctgtcggtggttggggcacggcggccccgtcactcgcccccactcgccaagcatgtgctgggcacccagccgagcactca

SEQ ID NO: 266732 - DNA, 122 bp, Homo sapiens
gtggcggttcccggggctcaacgaatagctaaagtgagattcgtcgtggacgttggtttccgagtggcttaggttcagcttggggcttgctgttccgggcttgggggagccttgggtccaga

SEQ ID NO: 266733 - DNA, 122 bp, Homo sapiens
cccacacgccatcttgaagcctgtcatctcgttggtcagtcagtcagccacaccacctctcggggccaggtctggggccctgggagcccagcgtggccccatcctggactcctcagctgccg

SEQ ID NO: 266734 - DNA, 122 bp, Homo sapiens
gcatcgtttcaggggaggtctctagccgccccagcctgcaccatgtgggccccaaggtgtcgccggttctggtctcgctgggagcaggtggcagcgctgctgctgctgctgctactgctcgg

SEQ ID NO: 266735 - DNA, 122 bp, Homo sapiens
ttgttccctgcgcagccgggtcctttctggactccttgtcggatccggcttcctctgtgtcgtgaagcccccacatggagacctggggagtccggagcgtgtgggggggctcccgattctct

SEQ ID NO: 266736 - DNA, 122 bp, Homo sapiens
ccgcggcaaggcacgcacagggcagtgcgcgggtgggtgggtcctagcagcgcggcctgacgggaccaaggcggcgggagtctgcggtcgttccctcggctgtggaccgggcggcacgcacg

SEQ ID NO: 266737 - DNA, 122 bp, Homo sapiens
gggaattaaagaaaagtaaggcagcttatttccggctcagtatcatcatctactggcgagcgggcaccgcagccccatgacgcacccgcttctccttggcggtgatgatggcgtccttattc

SEQ ID NO: 266738 - DNA, 122 bp, Homo sapiens
ttggagcgccctgcccctgccccccgagtcgtttctgcccttcgcttgcgtggcgccctccgagggtctctctgtgggcggcctcagagcagcgatcctgtttcccaaggagctgctggggc

SEQ ID NO: 266739 - DNA, 122 bp, Homo sapiens
cttgctgggacctcactgacaaacccgctggccccagaactacttgtgacatcaggatgacgcttgtgaggttcctgttggtatcttctgctgagctacagggcccagtggacaaacactga

SEQ ID NO: 266740 - DNA, 122 bp, Homo sapiens
ggcttggggcctggcccagagcacacgggaggctattctgtcagtgaggtgatggcggcccggcctggcactgtctgcctccctcctggaggcgcctgttgttaaggagacgggaggttgtg

SEQ ID NO: 266741 - DNA, 122 bp, Homo sapiens
gtgaaagtagtttgaaaagtgaataaggaatcagtgatgaatactgacttgtgctttatacgcaaaggtgtgcctttgggagtgaaaaccacgtaaataatatcagtccaatcatagttttg

SEQ ID NO: 266742 - DNA, 122 bp, Homo sapiens
ctccagcgcaattggacaatccaactccagacggacccaagcagagggcgcgattcttcccgttcccccaccacccactaaaatgaaagccaaatggatcccttcacagccagcagacaccg

SEQ ID NO: 266743 - DNA, 122 bp, Homo sapiens
cagcagccactgcagaatgccagaacccagaagacaaagaactctactctgccagacagccgcgaacactggtaactagaaaacggaacttcgataaagaatgacacgtttgatgctatgcc

SEQ ID NO: 266744 - DNA, 122 bp, Homo sapiens
gggagtgactccttttactcataaaacatcacagcttggtgcccgggttaagctacgctacgtgatatgatttcatatttgagccatggcatctctaatgcattaggcttttgctagcttaa

SEQ ID NO: 266745 - DNA, 122 bp, Homo sapiens
cagcctcctaaagtgctgggattgcaggcatgaacaaggtaaaagtttcaagtttacaggcgtaagcaacagcacctagccttggatacactacagattgtttaaccatttgcctgttggtg

SEQ ID NO: 266746 - DNA, 122 bp, Homo sapiens
aagtgtatcatttagagttctttctgtgtaaggaatagaaaactcaactcaaactgatttcggaaaagtaatgtattgggttacatactgataagcctagaacagctggctttaggagtagc

SEQ ID NO: 266747 - DNA, 122 bp, Homo sapiens
gcccgttccatcaccttgtggctccctacacactgtgggggtaggtgatgcatagccttccgtgggcagcgtttcagcaactcaacccggcattcgtgtcttactttcgtcgtcacttgtca

SEQ ID NO: 266748 - DNA, 122 bp, Homo sapiens
agcaattattagcataaaccaaggtctactcagcaagcccaaggaccaatcctaaaagaccggagcaagggaaatagcttttactttatttagccccactgataaggctcaattgtatatgg

SEQ ID NO: 266749 - DNA, 122 bp, Homo sapiens
gccttctcccagctttcttactttccacagctgagagtgtaggatgtttacagtatctgtcgctcagtgctctctaggatggggttggcagtcagcagcacaagcctcaggaaacccagtac

SEQ ID NO: 266750 - DNA, 122 bp, Homo sapiens
ttccctctcactcacacatccacacacggcaaagcaagtttatactaggctgcaaatacacgtgatgcaaaaagactttgccaagaggaacaatatttttctttttcgtctataaatcaagc

SEQ ID NO: 266751 - DNA, 122 bp, Homo sapiens
gtcaggagcttacccaatccagggaagcgtgtcaccgtcgtggaaagcacgctcccagcccgaacgcaaagtgtccccggagcccagcagctacctgctccctggacggtggctctagactt

SEQ ID NO: 266752 - DNA, 122 bp, Homo sapiens
agtcgggctctgagggtacttagtggtggaggcgtttgacgtcaccgccactggggcagccggctggtccagttcctgcagggagttgtcctcactgatgtcatacaggttgcctgctttct

SEQ ID NO: 266753 - DNA, 122 bp, Homo sapiens
gggctgagctcacgatgcttagtcccagctgctgtagcataaaggagcgctgcatgcgggcgctctgctcctgaacgcgctcactggggggagacatgggcagcgtccttgtcgttaagtaa

SEQ ID NO: 266754 - DNA, 122 bp, Homo sapiens
ggccggcggggccagcgggtattgattgttggttcttatttatagagcaccgggggtggacgcggcgctttgcaaaaccaaaaagacacagtgctgccgcgacgcgctattgagagggagga

SEQ ID NO: 266755 - DNA, 122 bp, Homo sapiens
cgggaagggttggttttcgtggtggtttgatgttgggaggggaaatggaaattaaattcccggcagactgggttgcgatctcacatcttgatcctactgcgggtgcgtaaagaaaacggaga

SEQ ID NO: 266756 - DNA, 122 bp, Homo sapiens
aaacacaagtgaattttaaaaggggagacttaagaggtggcatggttgtttgaacatgttcgtttttgtctcctggagaaaagtcagcacaatgctcattcagctacataagtgtttctgtt

SEQ ID NO: 266757 - DNA, 122 bp, Homo sapiens
tggctaccaagaccaggtctgtccagtgtgacttcttagcacttcttaattgtgcagtctcgccacttctgatcttccttctagactctttctagccgaagatgcattcctgcccagcgcgc

SEQ ID NO: 266758 - DNA, 122 bp, Homo sapiens
ctcctctccttccaggccctggtgaagtacggaatgccggaagggccgggctcaaagctccgcctctggcgcgaccgacgactggagcgcagggcaggggtagaggctcgtagatggaactg

SEQ ID NO: 266759 - DNA, 122 bp, Homo sapiens
gcagtgcagctcccaggcttgtcttcagggagccacaggttgtgacaggtagaaacgcatcgcttatgtggacacgaggcagtcaggccaacttcagaccctttcaggtttgtcccgatgac

SEQ ID NO: 266760 - DNA, 122 bp, Homo sapiens
tacagcttccataactgtggcacatttgtcaaaactaagaaattcacattgggccaggtgcggtggctcacgccttggtaatctcagcattttgagaggccaaggcaggcgggaggatcgct

SEQ ID NO: 266761 - DNA, 122 bp, Homo sapiens
tctccagcacccgccccaccctgagggccatttgtcactgtccagggcctgtgggtgggacgtttatgggagacgtcagcccgtgattccaccccgctgccaccgccccagtcccgcgatag

SEQ ID NO: 266762 - DNA, 122 bp, Homo sapiens
tctcgctgactttaggagtgaagccgcagaccttgttacagctcgttaaggtggcacgtccggagttgtttgttcctcctggtgggttcgtggtctcgtggtctcgctggcttcaggagtga

SEQ ID NO: 266763 - DNA, 122 bp, Homo sapiens
cctaatgagcacagcttacaatggtggacagcaaccaagagaaggtgaccactgccccctcgaacagagccagtgatggcccgatgctggcctgcaactgttcacataaacaaaatgtgtgt

SEQ ID NO: 266764 - DNA, 122 bp, Homo sapiens
tgacgcccagccccatcccctgacagccatttctcacgggctcctggtctcagagcgagacgtgccgtgacagcaaccccaggcctgaatctgtctgctggctttcaaaggctttccagaac

SEQ ID NO: 266765 - DNA, 122 bp, Homo sapiens
ccggccggacaaccgcgcaggtgctgaggagctgcaggcgctgctggagcgggtgctgagcgccgagcggccgctggccgcggctgccggcggcgaggacgcggcggcggccggaggcgggg

SEQ ID NO: 266766 - DNA, 122 bp, Homo sapiens
gtagcacgggatgctaatgtctcctcccaggttctgctctacaattcctcgaggatctggcgggccctgcgtggatctagctagagtcggggctcttagcagtgctctagatacttttcagg

SEQ ID NO: 266767 - DNA, 122 bp, Homo sapiens
cgaggcgggtggatcacgaggtcaggagatcgagaccatcccggctaacatgttgaaacccggtctctactaaaagtacaaacaattagccgggcatggtggcaggcgcctgtagtctcagc

SEQ ID NO: 266768 - DNA, 122 bp, Homo sapiens
gattgatgtgatcgactggaacaccttcgaatacctggggaactccggggagccccagatcggcggtttcgactggaggctggtgttcacgtggcacacagttcctgagagggagaggatac

SEQ ID NO: 266769 - DNA, 122 bp, Homo sapiens
cagcgcgccaaggaggcagaggcccatgtgccgggttccatccctgccgcccccccgctccgtgcctggcacagagaacgtgacaggcaaattctgatccattgaaattatggatttccagc

SEQ ID NO: 266770 - DNA, 122 bp, Homo sapiens
gacatagcactaatggttccagcttcatacccatcatgtgtcctacattaaaacctggcccgagaccttgaagagtctgtaatcttaatttcctctttagtattcctataacccactctcca

SEQ ID NO: 266771 - DNA, 122 bp, Homo sapiens
ctcgccctgcagagaagagaaccatgccaggggagaaggcacccagccatcctgacccagcgaggagccaactatcccaaatatacctggggtgaaatataccaaattctgcatctccagag

SEQ ID NO: 266772 - DNA, 122 bp, Homo sapiens
gttctctccaagggaccatctcgcccctcagccaagtcgcccggaaaacgagcgctcgaccgcctctgccccgctctcgctctgcacacagcaacggtctggtcgctcagccacttcctcct

SEQ ID NO: 266773 - DNA, 122 bp, Homo sapiens
gaggggcgcgagggtgcacgcgcggggtgggggcgcgggagccgccccctgcccgccccgcgcgcatgctcccgccgcacctgcctcgctcagtgttccacaccccggggagccgggtggcg

SEQ ID NO: 266774 - DNA, 122 bp, Homo sapiens
gtagaaatgatgataaaggctcatgcccatggtttcctcttgcttcttctgcctcctgaccgacactggtgcttccccgtgtggccctgtgtggcttgttgtgccccttccctcttgggaac

SEQ ID NO: 266775 - DNA, 122 bp, Homo sapiens
tgtgcagtgtagtcatttcacgagtttgagaacgcctagcacgatgccttaacggagcgtcgggcacagagtcatttgggaggatttctttttcggatttttgagacaggaacctgatttga

SEQ ID NO: 266776 - DNA, 122 bp, Homo sapiens
gcttggacagcttggtgtcgggcggcacggacggcagcgtgcgctgcagctccaggaaagcgtgccgcagggtctgcacccggctgcgctcccgcgccgcattcgccgccgccggccgcccg

SEQ ID NO: 266777 - DNA, 122 bp, Homo sapiens
gcgtagataaaccaattcctggtcctgtgaaggcagctctccttttccattggggagcgacgcacaaacgtcaactgtcacatgacctgccagatgctgctgggcttgcaaaacctgcacgt

SEQ ID NO: 266778 - DNA, 122 bp, Homo sapiens
ctctctattggtccgtgtctctatcactcgcggcaggcagccgccacaccaattctttggcgtggctaaggcaagaacctttggcattacaacaacagcgatagtagttgtcttagtccatt

SEQ ID NO: 266779 - DNA, 122 bp, Homo sapiens
gttgaaactatacaagcaccctccctctgggcccagggactgttgtggaagaggtgggcacgtgacattgtaagggcagggtttgagggatattgttagctcagatcctccaaatcaaggat

SEQ ID NO: 266780 - DNA, 122 bp, Homo sapiens
gcctcccggccctgatgcgtgtacactctgcgggctgcaccgggtggctctggttgggggcgaagctgtgttgactgggagagcgttggaaattgagacatggagagatgacgggagtgcgt

SEQ ID NO: 266781 - DNA, 122 bp, Homo sapiens
tccctcagcttgcagggaggtgccgacgaagaggcgcaggcgggaatcgggggctgcgcccggcgcttgcgggccagcgcgagttccgggtgggcgtggccttggcgggccccgcactggga

SEQ ID NO: 266782 - DNA, 122 bp, Homo sapiens
gcgagcaggcactagacgagcaggaggctggacctaggagcgcgggtcacgcccccatgccgcccattggctgcttttgaacgttctgagcccgcccctccgggggccgtggcgtgtttata

SEQ ID NO: 266783 - DNA, 122 bp, Homo sapiens
tgagaggtcaacaggagacgtccaaggtcgcacagatgggacaggactaaaagccaggcacgacacttccgcatagctttccctgcaccctcggaatctctcgagtggactctctccgggca

SEQ ID NO: 266784 - DNA, 122 bp, Homo sapiens
ggaattcaagtaagtgttggcctcactagcaatagttcctgaatattcccgagaaagaaccgaacccttgacatctcctttggtagatgactcaatggaaaagtaagaggtgaggctttcca

SEQ ID NO: 266785 - DNA, 122 bp, Homo sapiens
tcaggaaaacgctggagcaaacagatggggcctccgttgtgccccgaaggcagacagtcccggccctgctggacccgggcggagcgcattccagagtcctgcgtgcctccttgacaatgccc

SEQ ID NO: 266786 - DNA, 122 bp, Homo sapiens
agtgggtagagcgacggtgcgtgtggcaagatttcacaggcgcatcggctgaagatgcggcgtgcgctctgctattctcgcaactttcctgaaagtttaaaatgttctttttgctgttgttt

SEQ ID NO: 266787 - DNA, 122 bp, Homo sapiens
ttcagctgctgcgctgtgttgagcaaggagttgaccatctcttctaggtacagccagctccgcggctctgacagctccagcccattgaccaacgcgggaggtgccgctttggtgggagtcgg

SEQ ID NO: 266788 - DNA, 122 bp, Homo sapiens
gaacactttcaactgccgagttgaaactgtattttccacttgaaagtggctgtagaacttcgccttacccaggagctgtcagaatggtcatgggcttgtccaaattatcatctaggggcatg

SEQ ID NO: 266789 - DNA, 122 bp, Homo sapiens
gggggattttgcctagagagcccaagcagtcttgagaactggtgccgttatctgagtcttcgcttgctcatctataaaatgaagatactactatttgcctctcagagctgctgtaggttata

SEQ ID NO: 266790 - DNA, 122 bp, Homo sapiens
agggtatagggttggaggccgccgagttggcccggggatgaggagcaaacctgtggcttccgtggtctcagtggagtcccaactgtgacctggcctactggcccagacaaacctggcttgct

SEQ ID NO: 266791 - DNA, 122 bp, Homo sapiens
cagtcggccaccatcaccgtgcggacggtgctggcattgaggttctggatcttgaacagccgcttcaccacgttgacgttctctgactccacatcctgggggcgggggcacgtgccaggtgg

SEQ ID NO: 266792 - DNA, 122 bp, Homo sapiens
ctcagaggtcgtctcagaggaaggtccagccatggcggaggcagtggccattagatggcacgaccagacaatggcggttgtggaccggggaagccggggcacttcggtacgcagcatggctc

SEQ ID NO: 266793 - DNA, 122 bp, Homo sapiens
aagtcacaaaatggtggttaaaagtccttttcttccattcagtggtcgagactcttgctacgactggagtatctcccccgggaacactccctcttccctgctttgcctcccagcctctccct

SEQ ID NO: 266794 - DNA, 122 bp, Homo sapiens
aaacacttgccatccgactaagggtgtggggcagcccttctttccttagtcctggcatgtcgggtgggtcagcttggtggacagctggccctgctgacccgggatccgccctgggttcccca

SEQ ID NO: 266795 - DNA, 122 bp, Homo sapiens
tcccactgcctacaggggaaagctcccgaaaagcacacaaaaacagctccctgaggaatccgggagtaaaacaaaagcagcagaatgtggaggagtcgacacatggaatgagctcgcccacg

SEQ ID NO: 266796 - DNA, 122 bp, Homo sapiens
cggcacccctgggtcgaggccgtggccccccccggggaaatggggcttgcagcaccggctcggagagcaccacgggcttcctctggcctcgggaaaacatgactttcaaaaattgagtctcc

SEQ ID NO: 266797 - DNA, 122 bp, Homo sapiens
aagtcttgagctcttaaaaaatttatccccaactgtagcacctctgttcccattaccattcgagaggcttctaaccatccaggcctacttcctctatttgcttttctccccatcaccactca

SEQ ID NO: 266798 - DNA, 122 bp, Homo sapiens
tcaaaaccccacgttagaaatgattcagtcaaagagtttagggtaggaggacgtcacccacggtgggagccccacaaaaccaggccccaggtgtctccggcaagggaaggaggtggcccccc

SEQ ID NO: 266799 - DNA, 122 bp, Homo sapiens
taaaagcaggtcattggtcccggaggctgtgccggggctcgtcaaaggctacaaacaaaccggacgggtgggaagcacgtttcagcggcgactggatttttaaaaatctgctggtagagtga

SEQ ID NO: 266800 - DNA, 122 bp, Homo sapiens
ggccacaaaagccaagagcaagaagaactgaggagtggtggaccaggctcgaacactggccgaggaggagctctctgcctgccagaagagtctagtcctgctcccacagtttggagggacaa

SEQ ID NO: 266801 - DNA, 122 bp, Homo sapiens
gagagacgctgcacgtggatcccgcgccgctgcggttctcagccggctctggagtgcgggcggaggcgacagggccgattctggagtgggactgagcctttgaaatactccagccacgacta

SEQ ID NO: 266802 - DNA, 122 bp, Homo sapiens
gcgtgggggccgtaggtgttgcttctgcggaatggaaatactttctgtgagtggtgcgcacgtgtttccactttatttggttgtcaactggggcccagtgcacttaaacccagcgttattcg

SEQ ID NO: 266803 - DNA, 122 bp, Homo sapiens
gcccagctcctgtagccgggactccgcgcccaggagcgcggcccgcccaaaggacgtctgcgcgacacggagcagagacccaggggacgaccaggaactgtcctaggcacttccctgccaag

SEQ ID NO: 266804 - DNA, 122 bp, Homo sapiens
tcctgcacacgtgcacattcatgtgtacaccacaaatgagttcccagacgtgtaaacacacgtgcacacatcgtacacatgtgagctcccacacgtacacacagatgcacatggacacaccc

SEQ ID NO: 266805 - DNA, 122 bp, Homo sapiens
actctcttgggaccattcataagcaggagacatcaacaccgtgacacatgccagtgccaccgccacccccacctcctctgcctccacctcccccgcctctgggggctcctccccctccccca

SEQ ID NO: 266806 - DNA, 122 bp, Homo sapiens
gtgagtttcccatcctgggatggcttcaaggagaggcaccttgtcggggacctcgagggacgacacacgcaagggcaaggcaaatctaccccgaccgctctgtggggtccaggctgcatttg

SEQ ID NO: 266807 - DNA, 122 bp, Homo sapiens
agcctcggcattaacttggagcggagtgcaggggggcagtgaagcgcccgccatctggcccgcgccgcgccggggggatgccccggctccccgacgagacgccgcgaagcccacccgggccg

SEQ ID NO: 266808 - DNA, 122 bp, Homo sapiens
ggtccatggggggcaatacgtggttcttggggtcatagagatgcctcctcgtgctgtacgcggtcatgcgggactggctggtgcatttgtgggtgcccatctgcagcccgatgacgcactgg

SEQ ID NO: 266809 - DNA, 122 bp, Homo sapiens
ctggaggaccagtggggacagtgtctgctgcggtgtgatgtctggcagtgaggctggggacggcgtctgctgcggggtattgtctggcagtgaggctggggacggcgtctgctgcggggtat

SEQ ID NO: 266810 - DNA, 122 bp, Homo sapiens
ccgccctgagccctcgggggtgtggggggctccagcctcagtccaaatcaccgggtggcccgggtgtgtccctcctcacctccatggtcctctgtgagacgggagggctgctgagatcacat

SEQ ID NO: 266811 - DNA, 122 bp, Homo sapiens
gagggatattcacttttatgaaatgcaatgttgggatcttgctaataccctaaaacatagcgggatggacacagggtacttcagggtctgataactccctaagcaaactgctgggcagcagg

SEQ ID NO: 266812 - DNA, 122 bp, Homo sapiens
aagaatttatcagatgctctgctttcagcagcctgaaactttcagcaggaacacgatagccgaaatcccatgccacttcttctattgaggcttccgtttaaatcaggtgagattaatcatcc

SEQ ID NO: 266813 - DNA, 122 bp, Homo sapiens
cccccaggctttatgacgcaggcgtggccgactgactcctattgttagagccgagggagacgcgttgtgggagggtgcgcagcaagccagagaggacgcgaggggcagggcctcaagcaggg

SEQ ID NO: 266814 - DNA, 122 bp, Homo sapiens
tgcggtgtgatgtgttttctgaatctttctggacttttcgggatctttccggaatcttcccggaatcttccccccaccctcaaaacaagtttcctggtttcaggatccacattgccttttct

SEQ ID NO: 266815 - DNA, 122 bp, Homo sapiens
tggctgttcaggaggctgtccaggctctggctgccgaggcctccacataggccatggccacggggcagaaagcaggggtaggattgagaaaacctggaggcaatgccagcagactcgggaga

SEQ ID NO: 266816 - DNA, 122 bp, Homo sapiens
tcatcctgcttgccctgtggatggggacttctggaccggtagcggagtcgggcagtgtggcgtgctcggtggtcagacgacatgggacacatcccatcccgctcccagggcgtgccctgttt

SEQ ID NO: 266817 - DNA, 122 bp, Homo sapiens
ggaatgaattattgaatgaacttaaaactccaatcacactaaatcttttatatgaaagatcgtgcacgttcgtcctggtatagtgggaaggggacctgcacgagggaaaacggctgcctcga

SEQ ID NO: 266818 - DNA, 122 bp, Homo sapiens
catggccacagatggcccggaacagtcactagctagtttgtcctcaaaagaagtgagacccgcagagagtcaaagtcatcaaacctggcctgcaggagacctcagcagcacctgggagcctc

SEQ ID NO: 266819 - DNA, 122 bp, Homo sapiens
gcctgctcaggcttggggcgatgtgaacgtcggggtttgcccctcgaccccccaccagaacgcagatacttctcagcaaagaggagcttggggcagcccactccccacagaggaagggaggg

SEQ ID NO: 266820 - DNA, 122 bp, Homo sapiens
acctgggcctccctctacatcccctcccctgctcatcagggcccaccccgagccacacggcggagccctgaattgggccaaagaggtgccctatggtgaggcctgcaggacattgggcgaga

SEQ ID NO: 266821 - DNA, 122 bp, Homo sapiens
gtctgtgggctccttggggccttttcttccccacgagtgtgagtttcctccggtgaagggcgatgggtattgccccaggtggttgttggccttttcctttttttttggaccaaagttttaat

SEQ ID NO: 266822 - DNA, 122 bp, Homo sapiens
aaagctctgcgatgagacgtggcatccctgtcaaagcccggaggtgtgattccctgagagcgagcagctcttgagcattccctgggctcagagcactgctgccctctgggtagacccctggg

SEQ ID NO: 266823 - DNA, 122 bp, Homo sapiens
gggccgtcttactctctgggcctcagtttcctcattggtagcatggagcactgaaagctacgaacaggagctgtgagggtgaatggaggattcatgccagagcctggtgggatgcccctgca

SEQ ID NO: 266824 - DNA, 122 bp, Homo sapiens
ggtgatccgcccgcttcggcctcccgaagtgctgggattacaggcgtgagccactgctcccggccgagaaactgttacattattagcatcagaggaaggcccttaccacactccagtcacta

SEQ ID NO: 266825 - DNA, 122 bp, Homo sapiens
tatctagtacaatttcacaatgtgtggcactcatagagacacagatatatatcagagagacgtagcttttgtgaaagggaacatatagtacttctatgccatgtgtcctgatgaagtcagag

SEQ ID NO: 266826 - DNA, 122 bp, Homo sapiens
aagataaattataacacagcaagacaagtgatataacacaggtttattcctctcaaggaacgcagaggaaagaaaaatcaagcctgaaggattcagtgagtcttagcagagtttctcgtaca

SEQ ID NO: 266827 - DNA, 122 bp, Homo sapiens
aaaagatccctggcctggaccttggcccttcttccccgccctcccctgtcccagagaggccgcactcctgttccagcgtgcagggagtgtcttgtttccttcgaacagtgctttgggctgct

SEQ ID NO: 266828 - DNA, 122 bp, Homo sapiens
tccaccagggcgcgcccgcagcccagaaacccgcgggcgctccccacgtgcgcgctcacacgtgcatccgcggctaccccagtgcctcgcggctcgggctttttttaatttttattttattt

SEQ ID NO: 266829 - DNA, 122 bp, Homo sapiens
ggagaaaaacgctgttactcgaaagaggaagagtcacaggaggatgctgagtgaacgcagcgcccaggcagggtcatctggggacctggtgcgtgtgagaacatatttcttctcctggcgcc

SEQ ID NO: 266830 - DNA, 122 bp, Homo sapiens
tttggcagtttcccctccctttaaattttgcaatttatgtttttaagaaatcaggtcattcgtttttcagtggaatatatttcttggccactagtagttaggtctctacagagtttactgat

SEQ ID NO: 266831 - DNA, 122 bp, Homo sapiens
attgttttctttgtggaagagaagagcagtcaacattctaagtagtgaatggccagagtgcgtctggagggaacacagcatatatcattttgtgttaatagtctatagtaactcggagttgt

SEQ ID NO: 266832 - DNA, 122 bp, Homo sapiens
gtgggtgcagctgtggtgggagaggagagaggagagctcaggggctcccccggggggtgacgcagtctgaggtcggcctcgggtcctccccgctctgggctgtcatcccctcacctctgaaa

SEQ ID NO: 266833 - DNA, 122 bp, Homo sapiens
cggataaacttttattgacataccaaagagaaaccaatattcactgaaggctgccgaatccgtatttctaagagtaaaggtgtttaattgactctccacacttaaagcactttgtatgaaat

SEQ ID NO: 266834 - DNA, 122 bp, Homo sapiens
tgggcggggccaagggggtggggccaagcccagcacatgcgcctagagccctggaagctccgccctgcagcgccgctggcgcccagcagagggtggcagcccccttctcatctaccctcccg

SEQ ID NO: 266835 - DNA, 122 bp, Homo sapiens
caagggggtggagcagagggatttgtttcgaagacgatcaaaacttctgcgaggggcccgcggggcggccgggccggggagccggggcctgagctcggggccaggcgcggcgcggggcgcgg

SEQ ID NO: 266836 - DNA, 122 bp, Homo sapiens
agcgtacagcggccacccgcggaaccgcggcccggggccagtgagtcgtctgcagctccccgggttaggggattccccagaactccgggaaagtcacccgaagtccatccgggatgcggcct

SEQ ID NO: 266837 - DNA, 122 bp, Homo sapiens
cggctgttgctggatgctgactgtggagctgctggtctagggcgaggctgcacattcccccgggacctggccaagcccatccccatgcactgaccctagcagccagtggcagaggccattct

SEQ ID NO: 266838 - DNA, 122 bp, Homo sapiens
ttgaccaatcctacatagtggactcttttgaaagcattaaatctagccttaaagcaccctcgggtggtgccgagtttaggaactagaactggtgtctgaatgcctgaacgcacggcgaagct

SEQ ID NO: 266839 - DNA, 122 bp, Homo sapiens
agacaggccaaggggaatcagacatcacctgggggatggtggaagatgaagaaccccatgcgatagcaagtatgatcagatattgaggatggagggttcatgccacattgacttagcagggc

SEQ ID NO: 266840 - DNA, 122 bp, Homo sapiens
ctcgcggtgccaccggcccgcccgcccgggtctgtgctgaggagaacattgctctgccttcgctgtatctccgaagtctgtgcaaaggagaactcagctccgccctcgcaaaggcacacagc

SEQ ID NO: 266841 - DNA, 122 bp, Homo sapiens
aaaagaaagcaaggggctctgatggccatgtccagttttctttttaatataaatattaaacgccagaaaatgcaaggatggggatggaagctgagctctgactttcacatattgtgaaatga

SEQ ID NO: 266842 - DNA, 122 bp, Homo sapiens
tgggtgcttagtgaatccaccttgagtaacattgtttaatggatcactactggctggtcacgggacatacaatgctgtaggcaaaaagcatattttctggatcttaatcatgtaaagggtcc

SEQ ID NO: 266843 - DNA, 122 bp, Homo sapiens
tctgaaaatgaggctatttcactattgggcatgctggcttcttggcaggccagctgagtccgcgatgtgaactgctaattgctgatttccaagacttggactgtctttctgttatgcaatgg

SEQ ID NO: 266844 - DNA, 122 bp, Homo sapiens
gaaacaatcaggacagaatgctagtgattgtcctttctgtgtggcgggcgcacagctgtgcgcgctttgttcagcggactgttccgaaatgaaataaaacgaaacgcagagccgccctcccc

SEQ ID NO: 266845 - DNA, 122 bp, Homo sapiens
cccacaggcacagaaggccgcgccacggctgcacgtaagctgggcacatggagatggggccggaggccacccacaggcacagaaggccgcgccacggctgcacataagctgggcacatggag

SEQ ID NO: 266846 - DNA, 122 bp, Homo sapiens
aatgcacagcatttcctgactgccaaagcagctcctgtaacttgcacttttttgaatatgcgtcattgactggaagccaatttagtcatcagagcacagccacaccctcctcactctgacac

SEQ ID NO: 266847 - DNA, 122 bp, Homo sapiens
aagggcaccaagccaactcagaaaaggagcgtttggtgacatgataaaggcgaatcgcgtcggcctaaagatgcagaggcaggagagcagccagtgagatgagcttgtgtggcttcgttacc

SEQ ID NO: 266848 - DNA, 122 bp, Homo sapiens
ccaggagcgccaggcagatccagaggctgccgggggctggggatggggtggtccccactgcggagggatggacgcttagcatgtcggatgcggcctgcggccaaccctaccctaaccctacg

SEQ ID NO: 266849 - DNA, 122 bp, Homo sapiens
tatcagtgggtacttgtttccaggcactaggctggttacttgtgctgtgattttagtatacgtatgcgagggaaataacatttaagcccacagatgttaagagtaagtgctttgctccgttc

SEQ ID NO: 266850 - DNA, 122 bp, Homo sapiens
tgcactcaacagactgtttcagccctggccgtggctctctgtgtatgcctcctgggaccacgctgctctggagacctccagatcttcttccaggagtcactggacgtgttccatcaagtcag

SEQ ID NO: 266851 - DNA, 122 bp, Homo sapiens
ggacagtaaaccccgtgagcatccaggactggggcaactagaacctccccactgtcactacgtggctcccttgcaaggcagcagtgacatgaaccagagctgggtcttcacccgtgtgatag

SEQ ID NO: 266852 - DNA, 122 bp, Homo sapiens
cggaagctcttaggagcagcctgaacggccccgactcagcctcacgctctctgacttccccgctcgcccctgaccccgacttcacttagggcggtcgcgtagatatgaactctacagcagcc

SEQ ID NO: 266853 - DNA, 122 bp, Homo sapiens
ggcagagagccctaagctggagtgtccaggctctgaggatcactgaggattcagtgctcacgaagaatgcctcttattccccagggtggagcaggagcccacatcccttggacaattaagga

SEQ ID NO: 266854 - DNA, 122 bp, Homo sapiens
ggcttgtgctgctgggtgtgggtggcgcgctacgggccttgtgctgctgggcctgggtggcgcgctacgggccgtgtgctgctgggcctgggtggcgcactacgggccttgtgctgctgggc

SEQ ID NO: 266855 - DNA, 122 bp, Homo sapiens
ggtgtttgagaaattctgagttggagctagaggcgcccacctccctaagggtttttacttcgtaagaaatttgacggctggttttctgcttgggaggtcagaaaccaaagtatcttcccggt

SEQ ID NO: 266856 - DNA, 122 bp, Homo sapiens
gagttagagatatgtggataaatatccacatatttactgttttcctttctattctacccccggacaatcagagacaggatttataacccaggttctttcattaccttttgggaaacctgtgc

SEQ ID NO: 266857 - DNA, 122 bp, Homo sapiens
ccccccacccccaaaaaaagacaaacaggggagaacaaagttttggcatgcctgcaggaacggtggcttttttagaaactacctaggaggcagaagctaagtgatttgctcatgcctcttac

SEQ ID NO: 266858 - DNA, 122 bp, Homo sapiens
tcgtcacgcttctttgtaaaacgtttctcagtttgggctgaggaccctgagccaaagtggcggcatgcagggtctttctcagccatcccacctgcccagagtagggttaagaattcctgaga

SEQ ID NO: 266859 - DNA, 122 bp, Homo sapiens
tggccgtgagcagcagctcctgctcctggggactgaagaccactgagttgaccacatcctcgtgccgcagcctggccagacagatgttgtagtggcggtcccagatgtagccgtgccggtcc

SEQ ID NO: 266860 - DNA, 122 bp, Homo sapiens
ggctcctggttgcaatatacggtaacacattgtgctttgtattgagatgtcctggactcgcgcacacaaactcagggctataagataaagataatttaaaaatacaacagaccagagtcaca

SEQ ID NO: 266861 - DNA, 122 bp, Homo sapiens
atgttatgtaaagggagtcataaagtatgtaaccttttgggattggctattttcactcagcgtaattccctgtaaattcatccagttgttgtatgtatcaatggttcttttctttttattgc

SEQ ID NO: 266862 - DNA, 122 bp, Homo sapiens
cagtaaaccctcctgcgatcgctggagagacaatgggaggagtgtcagtctctctcccctcgggcgatgctacctataagcacggggacctggtaagtttcttaaatttccaatgcccccaa

SEQ ID NO: 266863 - DNA, 122 bp, Homo sapiens
ggaggccacttccttctctctaccccaccctcgccctattccccaggcgctgggcctgcacggtgctagcttctgaagggttgccgggcaaggctgagcattttcagagcagccattagatg

SEQ ID NO: 266864 - DNA, 122 bp, Homo sapiens
ccacacccccagcccctgcctgcaatgggggctcttgtttttgtatcttgcagtttggctcgcactccacagatgtctagggtcgcccgcctcttcccctgcccctcttcctctccgcatgg

SEQ ID NO: 266865 - DNA, 122 bp, Homo sapiens
ctgtcgagagagcggcgggaggcactacagcgcccctggaggcccggagggagaacggcccggtcccagttgtgcagggtagccggatccatccatcttgctggaagggaggggggagagca

SEQ ID NO: 266866 - DNA, 122 bp, Homo sapiens
tgccacaatggctgtcagaaacatgcaagtcaaaacacaatctagagggaacaaagcattcgtggagcccaaggtctcggcagccctaaataatatcccacctgtcattatgtcaaacaatt

SEQ ID NO: 266867 - DNA, 122 bp, Homo sapiens
tttctgtttttgagttttgcacatacagaatgtctcctcctggtggtgatgtcctatgatcggtacgtggccatctgccaccctctccgatattctaccatcatgacctggaaagtctgcat

SEQ ID NO: 266868 - DNA, 122 bp, Homo sapiens
cgcggcggccaccgcaggtgcgcacctggcccgcccctcctttcccagccaccctccgcccggctttcctggcccctccgcccggcccagcctagcttggcttcgtccccagcccacgcctt

SEQ ID NO: 266869 - DNA, 122 bp, Homo sapiens
cactctggccccggtagccctcctcacaggccagacaagtgtaggagccaggggaattgacgcatctcccatcagggcaggtaccggggtgacggcattcgttgatatctgcaaaacagcag

SEQ ID NO: 266870 - DNA, 122 bp, Homo sapiens
aaaggcagcgtcggagactggacccaaaactcttcctgttctgcctgcagagttgagccccgtccgggtcctggacccgcgtagtactgaccctggatccctgttcactgcgttctcgctcc

SEQ ID NO: 266871 - DNA, 122 bp, Homo sapiens
agtgttcgcctcagcacagacccgggcgggcgggccgtgggtaccgcgagggcggagctgcgttctgctcagcacacacccaggggacaccgcgaaggcagagcagcgttctcctcagcaca

SEQ ID NO: 266872 - DNA, 122 bp, Homo sapiens
aaaagggtcatgtttcattcagcattgaatcacccttaacaaataatcgacgaggaagcccgctgttgcctgcctcagtggacggggctaccaggaagcatacaaaggctcatcacagcaga

SEQ ID NO: 266873 - DNA, 122 bp, Homo sapiens
gcgtcacagcttaggtcccgcctcgatttggcttcttccaggccctgccccagcccagcacgtcacttcagccaggcgcaggccccgcctccagctggctctgcctccgccagccccgcccc

SEQ ID NO: 266874 - DNA, 122 bp, Homo sapiens
cagtgggcctgaagatcctccaagtttctgatctagataattaaacatgatcatattgtacgggtgttgtttactagtgttgtggcattcatcaaatatcatcaaagtaaagatggatagtg

SEQ ID NO: 266875 - DNA, 122 bp, Homo sapiens
gagcagcaggaagtctgactcggactccaattagcagaggaagtggctgactccgggaggcggaggggcgcacggggcagaggggggagggatgaacagagttgttggggggcacagagaaa

SEQ ID NO: 266876 - DNA, 122 bp, Homo sapiens
aaacccaggtcatccctgatgtccccattagcaaactatctaaataggcaccaggccccacggactcctgccggaagacacctggaacctggcgatttcctcaccccaccgctggactcccc

SEQ ID NO: 266877 - DNA, 122 bp, Homo sapiens
gtaggggacccggagctgaccgaggcctgaccccctaagccggccacggccccgagcccacgctggacactggaggagacgcctttcccaccggacttccgaatccatttctgtcccgggca

SEQ ID NO: 266878 - DNA, 122 bp, Homo sapiens
agcgaggaagtcgagcccgcatcccgcatcccgcatcccgcatccagagcccccgagggacgaattcagatccaacccctgccccgcggccacccaccctagtcgttggagcctggcgcccg

SEQ ID NO: 266879 - DNA, 122 bp, Homo sapiens
ggcgggggtgtaggaaacggcgagtacagaggccatagaaaaagctaagactcagtttgacgtcgtcagccggcttggtcttctacccagtgactcaaagcactaaaagtcagcataatcgg

SEQ ID NO: 266880 - DNA, 122 bp, Homo sapiens
ggcgggttggcgtcatctgtgggctgcaggcgcgggcgtggccgggcgataggccaagtgcggggacgccgggggggccttcacgggaggcccgggctcttccgggcgtcgcggagccggag

SEQ ID NO: 266881 - DNA, 122 bp, Homo sapiens
ccagcacgtggctgctgacgtgtttgtgtggcaggtggcgagctcttcacgcatctggagcgagagggcatcttcctggaagatacggcctggtgggtgttaatcctccgctttcctgaggc

SEQ ID NO: 266882 - DNA, 122 bp, Homo sapiens
cgcaacccagtcaggcttcgtgtccttcaggggttctaggctaacaggcgaaaggaagggcgttgggaccgaggggcatcctggtttttatgtacgccactgagaggccaccagacacattt

SEQ ID NO: 266883 - DNA, 122 bp, Homo sapiens
taaggccaggcccagtaccagattctgaggagctccagtatttagcccatggaaagccatcgttccatgttaggtagagaaaatgaaagtacagccaacaaaaagcactgagaaagaggagg

SEQ ID NO: 266884 - DNA, 122 bp, Homo sapiens
gtggctcctggcgctacattcgggagggcgggctggccagttcgtagaagagcaggtaggcgtcgctggtgcgcacttggctggaggacatgggagtgacgctgcggagagagcggggagtc

SEQ ID NO: 266885 - DNA, 122 bp, Homo sapiens
cacattggtaaaacggtctcgctaaaatgttccatgagaaaaatgtctcgggggaggcggcggtagagctctccctctgtagtcagagccgtgaaaggcggcgtttactcgctgctcacgag

SEQ ID NO: 266886 - DNA, 122 bp, Homo sapiens
cgggggcgggcgctcggctccggccgcggactggcgggcgactcagccactcgtggaccgcgcgccccggcctggcatcgcccttttaaaaagtcttccgcaggcggccgccgccgcagcag

SEQ ID NO: 266887 - DNA, 122 bp, Homo sapiens
gcgagtcatctgcactgcggtttcccatccatactggaattcgcaacacccatttctcagcggaatacagaggaaccgcgcagacactaaccgcagacacatgccacacagatgccgcagcc

SEQ ID NO: 266888 - DNA, 122 bp, Homo sapiens
tattttcagtggccttggttccagacaggatgtcagggtaaccctggcaggcaaggtgcccgccagcctcttgccgcccgcacagatgcggcgtaagctccaggaccaccctctgtcccccg

SEQ ID NO: 266889 - DNA, 122 bp, Homo sapiens
ccaggcaagcacggagcagggtgacttcccagaggctgtgtcctcccaggagtccctgtccggggtgccaggagtagagaggctgagtgcgcccactgcagccccgggaccaggatggcacc

SEQ ID NO: 266890 - DNA, 122 bp, Homo sapiens
ccacctcagatcatcaggttagattctcctaagtagagcgcacgttggatccctcgcatgcgcagttcacaataggttcacgctcctgtgataatctgctccctcgcctgcccacccacccg

SEQ ID NO: 266891 - DNA, 122 bp, Homo sapiens
gggggaaggccttctgagctattcctggccaaatacagccccacactgtaggtcttaagtcgcctggaagaacacctgtgtctacaaaactgcaaatagagtttccacccttgaggtgggat

SEQ ID NO: 266892 - DNA, 122 bp, Homo sapiens
agcttcactcctgaaaccagcaagaccacgaacctactgggaggaacgagcaactccagacgggcagccttaagagctgtaacactcactgcgaaggtccacagcttcactcatgcgccagt

SEQ ID NO: 266893 - DNA, 122 bp, Homo sapiens
cactccccaataactgcgctcagccactcttaggatttggcgggtggacaggcgaaactgcggatcccaggatgcagttccccccttcatcacctgtgtagcccggtcgctaccctcactgc

SEQ ID NO: 266894 - DNA, 122 bp, Homo sapiens
cgggccgggctcaaatccagccaggctgggcaggcggtggccgcgcgactggggaccgggcgccccgccctcctcgctcccctcctccttcctctccctccctccagccccttggccttttt

SEQ ID NO: 266895 - DNA, 122 bp, Homo sapiens
cagtgtgaaataggatataaaactggcatgcgttttcaactgagtgtgtgcacaacatggcgggtaggtactgtcccaaagggtgggtagattcaggactgcaggaaccaaagtgggaagcg

SEQ ID NO: 266896 - DNA, 122 bp, Homo sapiens
tgccatcttcatggagaaccgcaatgagttcgtgggcctatggctgggcatggccaagctcggtgtggaggcagccctcatcaacaccaacctgcggcgggatgctctgctccactgcctca

SEQ ID NO: 266897 - DNA, 122 bp, Homo sapiens
gtaggcgacctggcagtcacccttccgctccaaccctcatttcctcgtctctgaaacaggcgcctcagggttgctgcagtagacccaggcaccacctgcctgctggagccgcccgagctccc

SEQ ID NO: 266898 - DNA, 122 bp, Homo sapiens
tgcccagcagatgccaggaaaatctgtgcccgggaagggcggtctggcacctgagggccccgcctgaccagtccttctcagcagcaggagctgggtgggagtcaccttatgccagagacgcc

SEQ ID NO: 266899 - DNA, 122 bp, Homo sapiens
gagccagccagggcagcgggcggggccggcaggcatggaagggcagccggggcacagcatcggggcagagggacagctcctgtgtgccaggactcacccggccatctcaggacctggagcag

SEQ ID NO: 266900 - DNA, 122 bp, Homo sapiens
tgggctcctccccgcctccgccccggaccaccagggggcgctgtgaagcctgagactggccgggcttcaccttggacccgccaggagtccctgcaggagttgggagccccgccagccacagc

SEQ ID NO: 266901 - DNA, 122 bp, Homo sapiens
gaaacgtatccgacagcaaagaacttaccaaggactatgaacgtcttgctaacatagaagcgaaactgaagcggttctcattgccaaaaaagaagatttgagcatgaataagaacaggaatt

SEQ ID NO: 266902 - DNA, 122 bp, Homo sapiens
gctttttctgacacaaaagatccagtgcttcctccccatggagagaacagctgtgccattcgtccccctcccagcagccacactgcaccatggaaacctgttctccacagtaattctcaaaa

SEQ ID NO: 266903 - DNA, 122 bp, Homo sapiens
actagagggctccttagtctagtggtaatggcagcacctgggaagacgcccattacctagcggaccttggtctagcggtagcgtcagtgcctaggaaaagcacccactacttagcagaccag

SEQ ID NO: 266904 - DNA, 122 bp, Homo sapiens
ctgaaccttctccatcgtaggagtttgtcctcgcaggcgttacgtagctgcttcctcagacgtaaacatcttaggttgtgactggcctggactgtgcctaattttttgttttttgagatgga

SEQ ID NO: 266905 - DNA, 122 bp, Homo sapiens
ccagcacttgcggaaaaaccacccaggcgttgctgaagtcaggagtcgcattgagtcccccgagagaacagatgtgtacgtggaacagaaactagaaaatgacgcatcggcctcagagatgg

SEQ ID NO: 266906 - DNA, 122 bp, Homo sapiens
gcgatcgggaggctctggaaagagcaggcatctgagcttggccggaaggcctggccccggcggctgctgcccctgggactcccacatgaagaggctgggcaggggcgtgcctggaggcctcc

SEQ ID NO: 266907 - DNA, 122 bp, Homo sapiens
tccttgtcaaggggagtgctaaccttctctcctttcatacaacacgcctcggcttccctgcgcactttatttaaggacgaaagctccactcgcctttcggtgagggtgacttcttgttcgct

SEQ ID NO: 266908 - DNA, 122 bp, Homo sapiens
cccttccagcagagatttcaaaggcagctcacttcctctggggagactgggaggcttccccgctgcccccttccaacaccccacccccccacatcaggaactcccctcaggtgagtctggac

SEQ ID NO: 266909 - DNA, 122 bp, Homo sapiens
tctggtttgagtggcgctggacctaactcccctctgcagtaacgctgtcaaataaacaaacggagtttatgtggagatagttggccagcgacacccaaaaacacttctgagcgtcttgcacc

SEQ ID NO: 266910 - DNA, 122 bp, Homo sapiens
ctaattgtctctacaggataaataaccacctcccccctcctccgcagtctcccccgcccacgagttcccctctggtggcagagcgcctactagcaacagtaagccctaggaaagaaagaaat

SEQ ID NO: 266911 - DNA, 122 bp, Homo sapiens
gcgagatttgaaggagcggcggaggccagagggaggagaggtttgtaaactaggaggctccgggtttccgggcacttttattaggtcgtcttctgggccaccagtgccccttccatctccac

SEQ ID NO: 266912 - DNA, 122 bp, Homo sapiens
ataatcttggttatttttgtgttatctcagactctgtggtggctggagggggcagtccaacgacagcaggaccagctgtcctcacagcctcagatggctgagtctgaggagaggagaggaga

SEQ ID NO: 266913 - DNA, 122 bp, Homo sapiens
ttgctagcacatgccctgtggaatattagcatgtgtgaatttacaaaataatctctataacggaccttggaaaatgggttcatggtgtttgcctttcacctgcaaaccatggcggtgattta

SEQ ID NO: 266914 - DNA, 122 bp, Homo sapiens
aaaaaacagcgttgggttggactgagtgcaggagcccagaggcttctgccagtctccgctcgcagattcaaccccaaccctactgtctccaacgaggagcgcgacaggacccttccgcaggc

SEQ ID NO: 266915 - DNA, 122 bp, Homo sapiens
ctgaggctgttgtggccgttcgtctgggtcctcccagccttgctttcttcgcggagcctgcggagaagccccgtcactcccgtgaggctcgacttcctagtctgtaaaacgaggatcatgcc

SEQ ID NO: 266916 - DNA, 122 bp, Homo sapiens
agccatggcaggagccacgggcacctaccagcatccctgggggtgggcagggcttggtgccgtgctagcatctaacccagccgcgagcttccttctgcaggtcctggagccctggcgtgggg

SEQ ID NO: 266917 - DNA, 122 bp, Homo sapiens
tctctactccctcagccattgctcctttagtgctgacaagagttgttctatgttctcaagcgccccacattcctttgtcttttctggatgcacctgtggttgggtttgtgaggcgaggccag

SEQ ID NO: 266918 - DNA, 122 bp, Homo sapiens
caatctcttgacctcgtgatcactcatattttttaataaagtgtgtaacgtcctgggagccgagaaacggtcatgtcagtaacccccggcataactgcagaggagagaactagaagaacaag

SEQ ID NO: 266919 - DNA, 122 bp, Homo sapiens
ggaattcactcaagcttgggagaggagagatcataactttaagagtataagaggtttaaacggtccactacgaaataaatagagaaggaaaagttatcagctggtaaatatcgtagaaggta

SEQ ID NO: 266920 - DNA, 122 bp, Homo sapiens
tcctgccctcaccgcggtctctgccaggaccccgacgcccagccggaccctgccctccagcggggctgcggctccacagcctgcgacagcagccccacctggcattcggcgtgctcctgggg

SEQ ID NO: 266921 - DNA, 122 bp, Homo sapiens
cgtccccgtcacgacgccctccacacgacgcgctcccctcacgatgcccccgttaccacgcgccctcctcacgacatccccctcacgacgcccccgtcacgacgcgcccccttcgtcacgtc

SEQ ID NO: 266922 - DNA, 122 bp, Homo sapiens
gctgctgggaggtggccgggcgtggccgggctgtgctgtgggaaccgctgggtgggggcgcgctgggttgcccacgctcctggcgcgctgccggcctggagacgccgccgccgccctcttgc

SEQ ID NO: 266923 - DNA, 122 bp, Homo sapiens
ccggctctactcccctcccgctcagtgattaaacaggtgatggctgagcacctgccagggcgccggcggtgtgcagggccccgggctccaggccttgctaagcgggctggcccgctcccggg

SEQ ID NO: 266924 - DNA, 122 bp, Homo sapiens
catgttgagaacttctgaaggactgagatactttaccaccagcatacttagctatcacatcgtgatgcttagggaagatatagcatgatattgtaaaccaaaaggtgtctgagacagatctg

SEQ ID NO: 266925 - DNA, 122 bp, Homo sapiens
ttctgcttggggtatgtgacccggtccactaaccctcagcatctaattcatccccaggaccgcgccttgaagacgtaccaagtccacccaaggcagtggctttcttttccgtgctaaccttt

SEQ ID NO: 266926 - DNA, 122 bp, Homo sapiens
aaagaagttcgccaattccagagcagagatgggtccccctcggtcagcatccagctcaaacgatcaccattctcaggggggcacgggccccaatctctcctttggacaaaatggggacccaa

SEQ ID NO: 266927 - DNA, 122 bp, Homo sapiens
tcggaacgcgcggccccccggctaagtcatgtttaacagcctcagaaattatcttgtctccgcgttctttcttctgccggcgagccaggtaatggtaacagagcgaaactccccagtcggaa

SEQ ID NO: 266928 - DNA, 122 bp, Homo sapiens
gtcttgccactacagaggcgcgtatgaaccacggtttaacactacgtctacgccgaagttcgggttagtcagaggccacgcccaccgcaggcccgaaaacaccagcctgcactggcgcgccg

SEQ ID NO: 266929 - DNA, 122 bp, Homo sapiens
gttttctcagccttgacaaacagctctgacaacggagcgcttgagcctgggcactggcctcggagggctgggagaggaggtagaggctggggctccgttgccggctccaccccaggggtacc

SEQ ID NO: 266930 - DNA, 122 bp, Homo sapiens
tcaccttcccacctcctggaggacgctcctccacgaagtgctgacacaacctcctgtaaacgcaggatgccaggacgggctgaatggcccgccatagactaggcagtgaccagcacacctcc

SEQ ID NO: 266931 - DNA, 122 bp, Homo sapiens
gggctcagaagtgctagggggaccatgggccaccagggccaccaggagggaggcaggtaacgatgcgagggcttggatgcagaacaccagctggtttgattctgttttccctgtacctgggt

SEQ ID NO: 266932 - DNA, 122 bp, Homo sapiens
tacctgggggacagagtcagatcacatctgtggttactaatgatctccatttcaaaataccgtttaaaatgttaatcactgcatagctgctgcctccagatgtgggcctttgaaagctccat

SEQ ID NO: 266933 - DNA, 122 bp, Homo sapiens
gctaaggtaagaatgattttgattggaggcaatattgttctcagtgtgggctgactttcacgtattgtagtgattaccagtacataactgagaaaacccatttgttgaagtgctgtaaacag

SEQ ID NO: 266934 - DNA, 122 bp, Homo sapiens
tgccacaggactctgcctcctttccaggagggctcctggcgcctggccgtctcctgtggtcgtctgagtggatcatttgccaagagagattctgggcccaggagtgaggcttcccttccccg

SEQ ID NO: 266935 - DNA, 122 bp, Homo sapiens
gcaacccgcggacgtactttaaggccttctcgtattcctgcgctcggggaaacgcgcacgcgtcatacacaccgcagtgtttttttgtttgtttgttttttaataagagacggggtcttgct

SEQ ID NO: 266936 - DNA, 122 bp, Homo sapiens
ggtttagtgctagagctggacccagaacccagaacacacaggcggattctttcgcctcctcgctctgctaggggcatgaagacagaagacagcccccacagtcattctaacatttgttggct

SEQ ID NO: 266937 - DNA, 122 bp, Homo sapiens
agcaataagagttctcatttaaccttggaaaatgacttgagaatcacttgtactttgaaacgaatctaaattgcaaactaatttcccagtgggatatgttgatggcctactgtacacagcat

SEQ ID NO: 266938 - DNA, 122 bp, Homo sapiens
cactgcactcacagcagcagattgttaataattgggtatatcagcttctgaagcagcaagcgaggttgatcagattaaaacacgaacaagactgaaaacaagagagcagtggaattaaaaat

SEQ ID NO: 266939 - DNA, 122 bp, Homo sapiens
cccatgccacagcatccagcagaggggctcaggaccgaggacggcctccgagctcccccacgccacagcatccagcagagggactcaggacccaggacggcctccgagctcccccacgccac

SEQ ID NO: 266940 - DNA, 122 bp, Homo sapiens
ccaacccacccctccgtccaaccccgcgcccaccgctccgtccgtggaggggcgggcgcgcgagcctccagccagcccgctgggccgcccgcgccacccctccctacgtccgtccccacctc

SEQ ID NO: 266941 - DNA, 122 bp, Homo sapiens
atgctagtgccaacagtggaagcagcttgcgatatgcctagtccacctacagcctcttaccgagctggcacctgtatcagcgcctggagctgccggctccgccggaggcagccggtgcactg

SEQ ID NO: 266942 - DNA, 122 bp, Homo sapiens
gtggagatgcagcgaatgtgaaatcccacgtatatgccatttccctctacgctcgctgaccgttctggaagatcttgaaccctcttctggaaaggggtacctattattactttatggggcag

SEQ ID NO: 266943 - DNA, 122 bp, Homo sapiens
ccctccgcagccgctggcccgggtgctaagcccctcattcccccgggcggcagagccagccggctgctctgagtttggggcccgccatgcccacgcccacccggaactccagctggcccaca

SEQ ID NO: 266944 - DNA, 122 bp, Homo sapiens
caggggctcccttgccctccccgagtctctagtaggctgacaccaaccttggcacccatacgctccacctccacctctgcggctttgtcctgcagggatcgctgcaggatggcctgctcctg

SEQ ID NO: 266945 - DNA, 122 bp, Homo sapiens
gggagaaggacgggcagcgcgtgggcggaactgcaggggctggcagggaggtctgagttacgcggatgggccacgctccgaccgcacccccgagtccgcctgtccgtgtgtctgtgccgccc

SEQ ID NO: 266946 - DNA, 122 bp, Homo sapiens
caatgaattggcagtgtgtcattatgagaggagaaaaatagttcagagcagtctaagttacgttaaaggtatgcaaaaataatttttttaaaaattaaagatatggggtctctcatccaggc

SEQ ID NO: 266947 - DNA, 122 bp, Homo sapiens
aggacacgcacgccggcgccggctggctgcaccggctggtgagtccaggcaccgggcaagcgggtctctgcctccttgcctgctggctgcatcctgagacggctctgcccccttcctaccac

SEQ ID NO: 266948 - DNA, 122 bp, Homo sapiens
gcggcagcccctccggccccggccggacccccagccctcccaccccggccggcgcggggacgtcggggcctcaggtgcccacccccatcccgccccacaggcttctcggaaggcgcgggcgc

SEQ ID NO: 266949 - DNA, 122 bp, Homo sapiens
ggctggctgacatgcccagggctccactctcatctaatgtcacagccctcagaactaaagcggactttctttccctgccttcttatttagtcagcttgccatccctcctcttcactagcagt

SEQ ID NO: 266950 - DNA, 122 bp, Homo sapiens
gggaagaggggcagggccggtcggctggtttctcacttcccttccaggctctacgcagtgcgtgcaggtcgccctgatctcctctcccgggagggaaatgctcgcagccctctccgagttgc

SEQ ID NO: 266951 - DNA, 122 bp, Homo sapiens
taaggtctttgcggatggtgcgtttgaagaagcccttgcaaccctcacagctgtaaaccccgtagtgtttgcctacagggaaaggggaggagcaataagaaggttgcatggagacaccttca

SEQ ID NO: 266952 - DNA, 122 bp, Homo sapiens
cctagtcccccaaagggcctcctcacccaccctgtggctcacagtggggccagcatactccgtgaggctgctgccatccatgtgctagtcactggcagcctgcacctggtgggtggtgtcct

SEQ ID NO: 266953 - DNA, 122 bp, Homo sapiens
ccctgggaccacgtcctagccccgcagtcccctgggatgagaccctcgtctcgccgggatcggacatttgcccccacgtctaccccggctgcgcttcttgagctcatcgccccatcatccta

SEQ ID NO: 266954 - DNA, 122 bp, Homo sapiens
tgagattttatcacggaaacagtgttctcaaatatcaatcacagagctgtaccttgggggcgtgaatttgaaaggataaggcaaaaaacctcctaaaatcgttcacctccgctctcatgaaa

SEQ ID NO: 266955 - DNA, 122 bp, Homo sapiens
acttccagactgtggcgttagctcagcgactgcactgagccgccgggaagatcctggtcccgtcagccagctgacccacatgcgttgcggaggcgctgaccaccccgcttcgctggctggtg

SEQ ID NO: 266956 - DNA, 122 bp, Homo sapiens
ttcttccacgctcaccctgccccacacctgtagttccgtgggtcccgttgcacttggggacgtggtagtggttggggcagttactgagcagccctagctgtagcctccgcctgcaaacctcg

SEQ ID NO: 266957 - DNA, 122 bp, Homo sapiens
gtaattttggacaagttcatttgtaaagcctgcatcaagcaagactctattaatcaaatccgcgttacctaacacagaaaaagatcatcagttacactcacatttctaaaattatgatcata

SEQ ID NO: 266958 - DNA, 122 bp, Homo sapiens
ttcctgtacatttggggatgtcagaaccgtctgtttcctcatctacacgtggttagatgccgacaacaatctcttctcttaaaattgcttactattagaccagcagagtgtttggtattaat

SEQ ID NO: 266959 - DNA, 122 bp, Homo sapiens
gagcgcgatgcagttctctgcgagagcctaggtctgactctaactctgccctggattctccgctttctaggagcgcgtgacatcggcggccagttccgtcatctgggcatcccacccatacc

SEQ ID NO: 266960 - DNA, 122 bp, Homo sapiens
agaaccgcggcgtccacgtcccgtcccacccgcgccgcgaatggtgggtgacgtctccgccggcggggggagcgggtgtagcggaggagcaggcggaagtgacgtagggccccagcgcccgg

SEQ ID NO: 266961 - DNA, 122 bp, Homo sapiens
ccctgaatgcctacagccggctggcaatgccgccccagagcagagcggcgggtgccgcctcgccttcttataggctcgcagcacttccagtcgcgcgcgaggcctcctgggaagtgaagtcc

SEQ ID NO: 266962 - DNA, 122 bp, Homo sapiens
cttgtcctgttcttttatcttaagacccgctctggaggagcgttggcgcaatagcgtgtgcgaaccttaataggggaggctgctggatctggagaaagtgaagacgatttcgtggttttgaa

SEQ ID NO: 266963 - DNA, 122 bp, Homo sapiens
gggggcgctgccaattaccccggaacggcggggcggggaggaccagggtgggcgtggccgcggctgtttgcaggagccgcgcacctgctgctctgcccctcccgtacacacgtcgcacaggc

SEQ ID NO: 266964 - DNA, 122 bp, Homo sapiens
ttgattttattttttataactctttgaatatcctttcagtgattattagtagaggttgtgcgagaactgtgtgcttaacccactttctgggactgaaggactcgatgctcctttcaggaaat

SEQ ID NO: 266965 - DNA, 122 bp, Homo sapiens
cgacttcccggccccctcagtgcccattttacatctgaggctggcagaccagaagggccacgggattttgaggtcagagtttgcagatgccaggacagaaaccagactcaataattacccca

SEQ ID NO: 266966 - DNA, 122 bp, Homo sapiens
ggcttatgaacgaagcgggaggccgaggtgcggcgggccctcagggagaagcctaaggcccgtctccccggcgcggaggaaagggctcgacgcccgagttctcctgcgaagcaggcgagctc

SEQ ID NO: 266967 - DNA, 122 bp, Homo sapiens
caccatcgcacagggtggcgtcctgcccaacatccaggccgtgctactgcccaagaagaccgagagccaccacaaggcgaagggcaagtagaagcctggattagtttgcagcaactcaatcc

SEQ ID NO: 266968 - DNA, 122 bp, Homo sapiens
cccagggtggcctggaggctgcagacgggcagagcagccaggagctgcccaccaaggaggcgtctggcactgtctggggtcccgagctgggagcggggatccccagacacggagctggtgcg

SEQ ID NO: 266969 - DNA, 122 bp, Homo sapiens
ctgggcgcaggggctggcgtgggctacgcgctcctcgttatcgtgaccccgggagagcggcggaagcaggaaatgctaaaggtagaagcaactggtagtcccgaggaagggtgggcgggtgg

SEQ ID NO: 266970 - DNA, 122 bp, Homo sapiens
caggtttcctccctaaggctactgcttcaattgtggagcagaaagcaggcacttttaaagcgaaggaagcaagcagttgtcgggggaggggtctgcatgccttatctactgggtggtcaagc

SEQ ID NO: 266971 - DNA, 122 bp, Homo sapiens
gcttatgtgcccccactctcccggtgtgctagaccccacctcagactcctctgtgtcccccgttacgtagggggtgtgccggctcacaccctccagtgtgcctcactaaggacacagggcac

SEQ ID NO: 266972 - DNA, 122 bp, Homo sapiens
cccacatagcccacaatacggacatatcagacaagctaaacgagcagcacaccaagacagcgggaagtcgcctctgggatggccctggttcttccaaacccaggcccacagcttagaaggac

SEQ ID NO: 266973 - DNA, 122 bp, Homo sapiens
gggcacccacctcgcgtgccgcccgcgcaacgacagcgtttaccgccaccccacacggtccgccaaaaagggcgatttgcaaacagccatttcccatccacaatgcagcgaactcaatgctg

SEQ ID NO: 266974 - DNA, 122 bp, Homo sapiens
tgagtccaggaagcaagggtgggaggagggacgagccagtggcaatgacccagacccggacgacccccattgctgagccagcggagctgcttggtgagtggcctccaggcggcatctcttgc

SEQ ID NO: 266975 - DNA, 122 bp, Homo sapiens
ccctgccagggacactccctggagacccaggcatccaaatccctaaatccattcttgccacgagctcaccggcaagctgagccctaggtctgcaggcaccgagcggcagcctctaaaccctg

SEQ ID NO: 266976 - DNA, 122 bp, Homo sapiens
tggcgaggccaggccggcatccagtgtggcccggtggccagaacgcgcccaggccatggccgccgctccgtaggcctccgtttcacgggtgctaagtaagtcgaaaagcaagggcatctgat

SEQ ID NO: 266977 - DNA, 122 bp, Homo sapiens
ggaagggggcggagctagccggagccgcgagtccattttggggctgtgcttggcgcgtaccgtgcggtccctgtagttggaggacgggcggtcgcgcggcctttcccactagccggaggtcg

SEQ ID NO: 266978 - DNA, 122 bp, Homo sapiens
aactgcccgatggacggttggccacctccagcagagtgtagttcagcttcaaacttggggcgcccggacagctgtattaataatgattgacagggaatcgggaatccaaaatcttgccccag

SEQ ID NO: 266979 - DNA, 122 bp, Homo sapiens
tcaaaggaccacgagaggcacggggtctttggtgatgaaagtgctaacctcggcggggtgcggtagctcacacctgtaatctcagcactttgggaggctgaggcgggcggatcacctgaggt

SEQ ID NO: 266980 - DNA, 122 bp, Homo sapiens
aatgatctttgaggtttcttttaacttggagatttgtatccaaccagatttcacctgagacggaagttatttcctactgtcagccataatggaagcactacagacgtggcatcaagtattac

SEQ ID NO: 266981 - DNA, 122 bp, Homo sapiens
aagaccctgtctcttaaagaataaagaagaagaagaaagaaattaatgcatatgtggacacggaggtatatgaagaagattcattatagcattgtttgtaatagagagaagttggaaacgaa

SEQ ID NO: 266982 - DNA, 122 bp, Homo sapiens
tttccttcacattatcctagcatattttcattctggtcttagctcttaaacttctccaagcggtgactgttatgctttacagagtggggaagagggtctgggttatttgaggcaagaaggga

SEQ ID NO: 266983 - DNA, 122 bp, Homo sapiens
tccccagcccccagggcccctactcaccgtgggtcatcgctgtactgcactgtggcaaagcgcacaccctgtgcactggctgctccagagaaaggcagcaccagcccttcgagaaagctgcg

SEQ ID NO: 266984 - DNA, 122 bp, Homo sapiens
tccccaggccccagggggtaaagcaatgaggtgtgaagtctgccagggtctggccggggccgctgagcgtgggaaggaagggagcgccgcatgcagcccatctgccaagctgggggaacaca

SEQ ID NO: 266985 - DNA, 122 bp, Homo sapiens
tgtggctttgagaaaatttcttgacttctccgtagtctggttccctcttcaggcttgttgcgttcatgtgagatcacacacctctggtgtcgagtgcgttgtcaagcccctgatgcaccatt

SEQ ID NO: 266986 - DNA, 122 bp, Homo sapiens
tccggggctgggacaccgagggaaaacttcagagctccgggccaccgagcctggaagttacgcgtcccccagcccacgcgtccccaatcccggggtatttcctgctccctcatccagcgaag

SEQ ID NO: 266987 - DNA, 122 bp, Homo sapiens
ctccctcactctccaaacttcttttttccaccctctctaaacttcagtcattctagtgcccgcctcctccactcgcaccgaccaaccagtggtccccattctcgttggcggtccgcctcctg

SEQ ID NO: 266988 - DNA, 122 bp, Homo sapiens
atcacaaagcggccctggagggctggtctttattttgatgaggctgagaagggaaggctgcgggcatgtttaatccgcacgctttagactccccggctgtgatttttgacaatggctcgggg

SEQ ID NO: 266989 - DNA, 122 bp, Homo sapiens
atgtccaaaacttgttcatgctcccagagtgaaactccacgcacctcaggtgtgtgtccccgttctctcctcctgcggtccttggtaaccactaagctgcttcctgtctctatggccctgcc

SEQ ID NO: 266990 - DNA, 122 bp, Homo sapiens
tgaggaccctgcctgggggagcttattgcggttcttttgcaaatacccgctgcgcttggacggaggaagcgcccacgcgtcgaccccggaaacgaaggcctccctgatgggaacgcatgcgt

SEQ ID NO: 266991 - DNA, 122 bp, Homo sapiens
gtctgaccccgcgcggcacttgcccaggcgagcttccctcgtcgcggcccgacccgcgcgcggactcggcttccccaggtcaggacccactaggtgggccgctcggccccaagcctggcagg

SEQ ID NO: 266992 - DNA, 122 bp, Homo sapiens
cttgtgagaacaggagtgaaccattcctgtaatgacagggcaccgggcagtggagaagtccggagcgacttccagccccatgcggagccgtttctatcagctgccaacctcagcagaaacca

SEQ ID NO: 266993 - DNA, 122 bp, Homo sapiens
agaagctcagtgaagtcggatggtcactaacccgatttgacaggtgaagagggtgaggctcggcaagttagcaagtggggaaccacgaggtggccccagctctgagcccccacctgccacac

SEQ ID NO: 266994 - DNA, 122 bp, Homo sapiens
cactggccatgacctgtgaccttcaaaaccttcccatcttgatttccccaagggattccacggtcctcacctcactagatcaccatgactcactgggtagatgggctattgttttcattacc

SEQ ID NO: 266995 - DNA, 122 bp, Homo sapiens
cccaaagttacaggactagtcgatgtctggggttccaaaccaggccttctgactccgaggcgcctgcttaatggtccactttaaggaccagggatgcacttggcattttcgttacttcattc

SEQ ID NO: 266996 - DNA, 122 bp, Homo sapiens
gccgaagtgagggcgctgaggtcagcctgagctgagagggccggcagatcacgccgcagccgaagtgaacgaactcgagtgaggtgtgttaagaaaatcaaaatgtataaatttggaaaagg

SEQ ID NO: 266997 - DNA, 122 bp, Homo sapiens
ctgcgacggcgtcggggccgcaggtggataacacgggtggggagccggcctgggactccccgctgcggcgcgtcttggccgagctgaaccgcatccccagcagccggcggcgagcggcccgc

SEQ ID NO: 266998 - DNA, 122 bp, Homo sapiens
agcaggccgagctccaggagctggaggagcggctgcagctgcaattcgaggcggaaatggcgcgcctgcaggaggagcacggtgaccagctgctgagcatccggtgtcaacaccaggagcag

SEQ ID NO: 266999 - DNA, 122 bp, Homo sapiens
caccagatccaccgtccaaatgcgtggcccagactgagagacctccctcctctccactcccgaaagctccgttgtcaaccagcttgcacccgtggatatatggcattgacccgcttgctttg

SEQ ID NO: 267000 - DNA, 122 bp, Homo sapiens
ccaaagtgctgggattacaggcgtgagccatggcacctcactgcttgctagacttttcatcggagcttcttgttatccattcactgtctcctgtttcattgctgatgctgagaatttgtgtt

SEQ ID NO: 267001 - DNA, 122 bp, Homo sapiens
cccttccatctcaaagctggtttaaaggagcgttcaccatcggttggcatgaagtgagaccgagctgtcagcttttcataaaagttctcccagcacagaatcggctgactcctaaactaaat

SEQ ID NO: 267002 - DNA, 122 bp, Homo sapiens
gcccggcccctccctactggagagtgggtccgccaggcacaggtgggtggagaacattcacgaaagagtgaggtggggtcggggatggggcgacagggaccagcagggccaaggacaaggtg

SEQ ID NO: 267003 - DNA, 122 bp, Homo sapiens
gcccagtgagctcacaggccccaaaccctggggatcagagctgtctgctgtccaggcatccggctcctgggacaagaccatccacatctggaagcccacaaccagcagcctgcttatccaac

SEQ ID NO: 267004 - DNA, 122 bp, Homo sapiens
ggcctgggataccaaatatatatcttcctaagtggcagtttctcctcctttaaaagctgacgaggatggaggaactgctggtccttaaaacataaatgtataccaacatcaaattgaggagt

SEQ ID NO: 267005 - DNA, 122 bp, Homo sapiens
gcgttccagccaactcattactgacagcagaataaaacaggtaggaatgtgaaatactggcgttactcaagggtgtctgcttttgtcttgaacaaaatgaaagtctaaaggaaagaacaatg

SEQ ID NO: 267006 - DNA, 122 bp, Homo sapiens
gaaaaccagcttaggacttcactaatctgcctaaaccttgacctgaggggcctctaagggcggggggcagggctctctgtgtggcccttctcaggagagagccgcaaacgcattaagaaaac

SEQ ID NO: 267007 - DNA, 122 bp, Homo sapiens
ggtgtcacgaccgactgttgaatgggagcaaagtgccaggacagcggagggcggagcgcgcgccaggcatcccggggctcccccagctggcgctccggtggtccgaggttaatgtagtccgt

SEQ ID NO: 267008 - DNA, 122 bp, Homo sapiens
cctgggaagaggggaatggtgaaaccagaccctggatggggggagcagggatcatggaaacgaggcctcttgaagggaggccacaagacatttcctaattttggctaccaaaccaaccaggg

SEQ ID NO: 267009 - DNA, 122 bp, Homo sapiens
cggactccaccagggccttgaccgcgcccgcatctgctgtgtctcccaggactacagcaacggcctcgctgaggtcctctgagcctcccctgctttgttaaagccccctgaagctttgcatc

SEQ ID NO: 267010 - DNA, 122 bp, Homo sapiens
gcacaaggatggttgccatgaaccggaagtaactggttgttttgctggctccagtttttccgcggggcggaaaaggcgtgtctgcgtgtgtcccaaccatttctagtcccctttcctcgcag

SEQ ID NO: 267011 - DNA, 122 bp, Homo sapiens
ccttctaactctaaaattaaactggtaattagaacactgccttccacatagctgtttcaacgactagataaacaatcattttgaactattaaataaagagatttcaaagaatactgggtatg

SEQ ID NO: 267012 - DNA, 122 bp, Homo sapiens
tatttattatttccctcccaccagcgtagcctggtctcccagcgccgtgcccgccgcccccgccccatcctgcgccccagatgcgcgccccgcttggaccagtccgagcagaggggggttcc

SEQ ID NO: 267013 - DNA, 122 bp, Homo sapiens
ttctctgctctgccacctccagacagcagctctaaccagctgcccagcagcaagaggatgcgcacggctttcaccagcacgcagctgctagagctggagcgcgagttcgcttctaatatgta

SEQ ID NO: 267014 - DNA, 122 bp, Homo sapiens
cagggtaaacggcttcatctaataaactgggtcaacatataatgtatttgttcaggttcgcgctttcattgattctcatttgatttaagaagagatatttcagctcatgtttgaacattttt

SEQ ID NO: 267015 - DNA, 122 bp, Homo sapiens
ggagggggcgccaggcagggcctgtcccgcctggggagactgcgcccgggataataggagcgcttggcctctgagactacccggcagaagggacgtccccaaatgacactcggaggccgcct

SEQ ID NO: 267016 - DNA, 122 bp, Homo sapiens
ctggtcccacagaggccggggagtgggcccaaagagcaccagcattccacctggtgtgtgcggcccccgcggcctcgacaattggggatccgggcccccgagcaccccttgcacaggggagg

SEQ ID NO: 267017 - DNA, 122 bp, Homo sapiens
ctttgctgtctggcaatctcttaatggtggcgtctagcaaactgcaaatcaagctccagccggagtccgcagggcagggagcgccgggtgcggcccagtccccgcgcccagcgcgttggcgc

SEQ ID NO: 267018 - DNA, 122 bp, Homo sapiens
catgatctacccgcctcggcctcccaaagtgctgggattacaggcgtgagccaccgcgcccggccaagttattcttttaagtggcagcttaaccctagcacagcagatttattttctgaggt

SEQ ID NO: 267019 - DNA, 122 bp, Homo sapiens
tttctaaacgtaggtttggcgaggtgtttactttggattccggcgttcggcgcgggactccgcccccctctccacggagccccctcaccggcgaacgctggcgcttaggctggtgtcaacct

SEQ ID NO: 267020 - DNA, 122 bp, Homo sapiens
ccagtttcacaaagaggctgcaggaagctgcttccagcagtctgagtcctgaggaggagacgataacagtgggagaagcacctggtaacagcggcacttcatccaggaagaaaacaggatct

SEQ ID NO: 267021 - DNA, 122 bp, Homo sapiens
catggctttagggggagcagaccatgcaccagttctcacatgttggcatcacatgcctgtcgctctcccaggcaggaattgcacactggtatctctagtggcctacagtcttggtggtggct

SEQ ID NO: 267022 - DNA, 122 bp, Homo sapiens
cagagcaacagagaggcaggcatgcgggcagacagacgcccaacacagagacctcccacacgctcgtctgtgtcaccgccgccccttcctggttggccctgcagacgaggaagccctccaac

SEQ ID NO: 267023 - DNA, 122 bp, Homo sapiens
gggctgttgcggccccctcgctcttccccgtgaggtttctgatggtggctctaacctggccggggagaaagacctagaaaatgcaagtgttccagggaagcaaactgcccagggtggctgct

SEQ ID NO: 267024 - DNA, 122 bp, Homo sapiens
cttaaaactgccatccacccccgcgcggggcgccgcaggggctgctccgggcggtgccagcggctcaagcacaaagtagccagacagataagaaaggagggactgtcacaaggatccgagtt

SEQ ID NO: 267025 - DNA, 122 bp, Homo sapiens
cgaggctggtagacagctagtcacctcatctcgggttcagagcaagggctgacatctcagcggatctggcttcagctcctcacgggtcctgtgccctgtcagttgcctaccctttcggggcg

SEQ ID NO: 267026 - DNA, 122 bp, Homo sapiens
ccgggcgctgcgtcccgaggggccacagtctccatttcagcgtcttgcatggcctggcaccgggtggggtggtatgccccaggacccttgtttgtgtcaaaaatgactttccctgcccttgc

SEQ ID NO: 267027 - DNA, 122 bp, Homo sapiens
agagtagagatttatcatccattctaagcagaatgaatggaacacgtaagtgaatccagccggctaaaggcagccatttgggcaggctcctgtttgtcaacagcccttaaaatgtggagccc

SEQ ID NO: 267028 - DNA, 122 bp, Homo sapiens
tctggctcgggccagaagcgcggggcactggccatcttatgcatggactcgatgagccgccggcaattgtccttgaccacggacggccgcttcatgaggagcaggcgtggcacgatgtccag

SEQ ID NO: 267029 - DNA, 122 bp, Homo sapiens
ggtttcactgtgttggccaggctgatcttaaactcctgaccttaagtgattcacccgcttcggcctccgaaagagctggggtcacactcatgagccactgcgcctggctagatattcttaat

SEQ ID NO: 267030 - DNA, 122 bp, Homo sapiens
aatcctttggtttctttttcttgcctttgtttttcaccttggtagaactaaacggtgcttcgccactgtcttgtttccttaacacagtacagcggctgtccattatatcaaagaattcatct

SEQ ID NO: 267031 - DNA, 122 bp, Homo sapiens
gccggctagagatgctgcatactaagagcctcctgtgagcagccatgtacacagtgaacacgatggctaaggccccatccagccgccctcaaagagcacatagtccactaaggaataagcat

SEQ ID NO: 267032 - DNA, 122 bp, Homo sapiens
cacgatctgattttgagccgtcagtcccctcaatacactggcacattggtaaaacggtctcgctaaaatgttccatgagaaaaatgtctcgggggaggcggcggtagagctctccctctgta

SEQ ID NO: 267033 - DNA, 122 bp, Homo sapiens
ggtccctgagcaaacacacagacagcccccatggtgatggcaagtgcgcactctgagcgccgggtgtttaagtcaaatattgattccgccgcgtattaacatgaatgccgctttgagtacct

SEQ ID NO: 267034 - DNA, 122 bp, Homo sapiens
tcatgtgaatggacaagaaggagatggctttagatcttatatgctctaaacgaagagttacgctgagagggaaactgacttgtcatgaagtcagctttgttccgttgctatgtgtcatccct

SEQ ID NO: 267035 - DNA, 122 bp, Homo sapiens
tgtgtattccatgtgccctccgtgtgctgtgctctgtgcacgctgggaacagcgctagagcgtctgtgcttctggacaggaaaacaagcccctcgtctaccttcaccgtcttccagctgaac

SEQ ID NO: 267036 - DNA, 122 bp, Homo sapiens
tgtggaggtgcagtcgcgggaagggaaatcgaaactcccagagcaggtggccccagccgacgaggtgagtgggctgcggaactgcgcttagaaatcattcttcgttccgcttcctgcttgtc

SEQ ID NO: 267037 - DNA, 122 bp, Homo sapiens
tgacctccaactgtgttcctaaagttcgtctttcgcttggctcaggacaaagcggtgtaacgagtcaaggtctctgcctccactgtgctcactgactttcttccctcctcggaaaagcaata

SEQ ID NO: 267038 - DNA, 122 bp, Homo sapiens
ctcatatttcatgactcagctcaaatgtcacttcctatgcaatgctttccctgcctcccacgccaaatgagttgttctccttcctttagtcttcattcgacatacactaatcactttgcatt

SEQ ID NO: 267039 - DNA, 122 bp, Homo sapiens
gggcattgactttgacctggtcctcctcatctccagccctggaggaggggcaggcaagcacgtgcagattgctgtcctctgaccagctgcccagggctgggccatctgctgcttgtgacagc

SEQ ID NO: 267040 - DNA, 122 bp, Homo sapiens
ttaatattaaaacaattaagacacataaaaagtgcagcatctatagcctgtaaattcttccggcatattatgatcctagctttcagtaagtaaatgttatacttatggaagctgcatttatt

SEQ ID NO: 267041 - DNA, 122 bp, Homo sapiens
ctctcgagcggggtcaaaccacttagtttatttcacccgctggcactttcttccctgtcacgaattcagcctggcttcctttggcctgagacagcgtcttcaggcgggtcggctcggacctg

SEQ ID NO: 267042 - DNA, 122 bp, Homo sapiens
tcggcaggtggctgcggagcggctcgagcaggcgggtcgtgccgccaccgatgtcgtcaccgcatgtgctcccagagaaaggcattagtacagggtcacttatggcagcggggcgagccagc

SEQ ID NO: 267043 - DNA, 122 bp, Homo sapiens
gggattacagccgtgagccaccacacccgtcctccccaaagatttaaaaacaggggctcacgcagatgtttgtagatgaattttcagagaagtacttatttacaacggccagaggtggagat

SEQ ID NO: 267044 - DNA, 122 bp, Homo sapiens
cgcagcggggcggggcgggcctggagctgcacccgcttctgggtggacgcacttggcgagcggcgcgggatgcagacggctgcgaggcgctgggcacaggtcagacgtcagtacccgcaggg

SEQ ID NO: 267045 - DNA, 122 bp, Homo sapiens
ggcgtgaagcccggtcgtagagttcaaattgaggtgtgctgtgagcataaacgcacacaccggaaagtctttgcggggacaaaaaaaaaaaaccaatgtaaaataccccattcatactgttg

SEQ ID NO: 267046 - DNA, 122 bp, Homo sapiens
gcccccatagaaccccaagaccaaagacaggtctctcaatgggaaaatttcaggaagcgacgccaggtgtcctaatcctctgaagcccagaatgtgtgtgcaccggggcggggctgccccgg

SEQ ID NO: 267047 - DNA, 122 bp, Homo sapiens
tgcggcttctgtcccgacccagtcgccgctcccgggggctcccgcccggagagcaccctccggccccagcccgacccctgagctccccctgcccgcttagaaaggaactctgaccgccaccg

SEQ ID NO: 267048 - DNA, 122 bp, Homo sapiens
actcctgccccctgggccttccgctccccgggcagaataactctgcttcctctaacctttcggctgggtcccgtgctccagggctttcatcatgtccttcatacctctgaagccactccagg

SEQ ID NO: 267049 - DNA, 122 bp, Homo sapiens
ccatggcggccctgggggtgtggagtggagagcaggccgctgcctcccgagggccccgggcggtgagtacgcacccacggagccctcgggggcaatcaccgcagcctcctccttgtcctctc

SEQ ID NO: 267050 - DNA, 122 bp, Homo sapiens
tctcaccaaagcaacttttccctcagggggctcccatcttattcagagaggcagctgaggcgggacagtggggctaactgtagagcaggtgagggctcgggctgctggggtggccccccttc

SEQ ID NO: 267051 - DNA, 122 bp, Homo sapiens
agttgcctggagccaaaggcccccgagagcgtggccgtggggctgggtcgctggagtggccgcttcggcccagacactcgcacccccggcggtgcggcggttttcacgcgcgcactcactca

SEQ ID NO: 267052 - DNA, 122 bp, Homo sapiens
ccgtcctctgcaggggctctgagggtccagagctcccttcgggtggcgggaagccagtggcgctccctggcggccaggccgggctggagccacatgcgtcgggggagcgggggtcagtccca

SEQ ID NO: 267053 - DNA, 122 bp, Homo sapiens
ctgcactccagcctgggtgacaagagcgaaactctgtctcagaaaaaaaaaaaaaaaaagcggatgaaggattctggcatacaatccaagtgactaaaaatccccttcaggcgttgtttcac

SEQ ID NO: 267054 - DNA, 122 bp, Homo sapiens
gagggcacgccttctctccactcagaggactcatgcaccttcctttcctttttagggcttcgagaacacagcagttcagtccaacagggaaatacaaagcagatggagtcttagaaacagta

SEQ ID NO: 267055 - DNA, 122 bp, Homo sapiens
gcaccttgcctcctgccacgtagaatggctcccaggggtcctgccaaggtaccacgtaggcgggccgcagcaagctctcttccggcaggttgacccagcgggaatagttggtgggtgcctgg

SEQ ID NO: 267056 - DNA, 122 bp, Homo sapiens
gccccgcccaggcccgggcggtcccgccccactgagctgtggctcggggagccgtgggtccgactcctgcgtgtgatgtgtcaccaagttgactttggggtcccccattcttccttagttct

SEQ ID NO: 267057 - DNA, 122 bp, Homo sapiens
cacccacacacgtacacacactgtccctgcctgggttctttctctccttctacagaggagcgctctctcagaggcagagagagcccagccagccatggtcaccattaagtcacctccatcat

SEQ ID NO: 267058 - DNA, 122 bp, Homo sapiens
taaccggaacacaaacgtgtgctcttgctcacgtcccttaaagaggaagcacaagggcctcgagtgggcgtttgcaaccccaacacaggattttcacagcaagggggaagaaatgggagcca

SEQ ID NO: 267059 - DNA, 122 bp, Homo sapiens
caagccttagcccacaggttgaacctagttctgcccctccaggcttgggctctgccctctcggccccgcccatatcggaccctggcccctcctctttctggctcccccggatgctcctggca

SEQ ID NO: 267060 - DNA, 122 bp, Homo sapiens
gacgagcaagcggggcccgcgcagcttcaggggccgcaagggccggggcgccaagggcatcggcttcctcacctcgggctggaggttcgtgcagatcaaggagatggtcccggagttcgtcg

SEQ ID NO: 267061 - DNA, 122 bp, Homo sapiens
gtgtattaagggtaaaataaattatgtttaaatatgaagtttctttctggcctggtcccccgaggttgaatgagaattgaactggactcaatttgttttctaaattcattcagtgctttctc

SEQ ID NO: 267062 - DNA, 122 bp, Homo sapiens
acacagagatgttcaaaatccccaaaccaaaatctcccccactctgtaaaaataaacctccgaacgtttttcagcagaatctctgcagctgtagttctgcggcactgtcagttgcctggggg

SEQ ID NO: 267063 - DNA, 122 bp, Homo sapiens
ggacgggacccaaggctggcgacgggacccaaggctggcgacgcgacctaaggcagtgggcgggcccttggcgatgaacgcagtcggggactaaagctggacgcggggcagaggagggtcct

SEQ ID NO: 267064 - DNA, 122 bp, Homo sapiens
tggaggggaggaagctaggggggcgttgcagcggaccccgtctgggagctccccgctgggcgtccggcccgcggaggcgcgagtttgctgactcggagggagccgctggggcgggggcgagt

SEQ ID NO: 267065 - DNA, 122 bp, Homo sapiens
aaagaagggtaagtggaaggaagtgatgaggctgaaaaataccatttgcttcaattcagccgcgaaggatccgctaccttttggttcctattaagtgaatttagctttagctttcatgatag

SEQ ID NO: 267066 - DNA, 122 bp, Homo sapiens
tgatgggccggaacaggtgatcaggggcaggcggcggggccggggcgggcgacggggcgacggcagcccccgggggccctggttccacagccccgctggccgccatggccaccacgcgcaat

SEQ ID NO: 267067 - DNA, 122 bp, Homo sapiens
tgtcagagcctggcttttccatgatcactttctacaaaaagatgcacttggaggcattcccgacaccccaagaaatgcatgaaaactttagctgcaatcctggaagaaatggtgtttcaagc

SEQ ID NO: 267068 - DNA, 122 bp, Homo sapiens
cctgggacatgcgtcctccgcagggcccatgtcactgccgctagcccgggaggcccctgccgactgcacctatcctgtgctgtctttaattttgatagattgtgcttaggttcatgctttcc

SEQ ID NO: 267069 - DNA, 122 bp, Homo sapiens
ctctctgctcctggctggggacgctctgctccagccttgcctgctccctttcctgggatacgccttggagccatggcttaaaagtaaggacatcttcatgcatttgagatacctgaatagta

SEQ ID NO: 267070 - DNA, 122 bp, Homo sapiens
aaaagaaatgtgaatgccggatctccaacttcttgatttaaaaatgtaatccaggcccggcgcgctggctcacgcctgtaatcccagcactttgggaggcaaggtgggtggatccctcgagg

SEQ ID NO: 267071 - DNA, 122 bp, Homo sapiens
ccagaattatttagtcacatctgcccacattcctcctgaaaattcattatttagtgctgacgagcatccgttctattacttaatgaaaactataccatcttctagagttattttttcaatca

SEQ ID NO: 267072 - DNA, 122 bp, Homo sapiens
ggtgtcctggcccagaaataccctctagagggcgctgtcacgctgagacccgggacaggacgcaccggcgcgaatcagggcccctcgccacaggggagtgttgacaaatggaaaatgagtta

SEQ ID NO: 267073 - DNA, 122 bp, Homo sapiens
gcgcaatcctgcgagaagccttagacaggttctggctcagagaaccggagagaggcacaacgcctggcccccaggacttggccacagcgtccctgaccttgtctgctccatgacctctcact

SEQ ID NO: 267074 - DNA, 122 bp, Homo sapiens
cccctggaagagccattcccatttgctttccaccatgctcatgaggagtcaggggattttcgtcatccctgtaaattagcctccagttaccaaactttagctgcctcttgctatagcaggcc

SEQ ID NO: 267075 - DNA, 122 bp, Homo sapiens
aaaatgtttcaattaagaagtagggtgtacgtgtgaggggaagaggacgctgggctccaacgtttcagtagaagcgcttaagacttgcaaacacccttggtggggacctggaaccccgggag

SEQ ID NO: 267076 - DNA, 122 bp, Homo sapiens
aattgccacagacatccaaaccttcagcaactatgaccctgatcagtcagcagccaccaacgtcaaggcaagaccccccctacatcagcaaaaagatcacaactcactgaaggctcaggtga

SEQ ID NO: 267077 - DNA, 122 bp, Homo sapiens
ggcggcggccccattagcggagcctccgcctatgattggcttcgcccgggaagctggagacgggcgatgaataattgatgtgtgcggtgcggtagccggacggcggcggcggtggcgggcag

SEQ ID NO: 267078 - DNA, 122 bp, Homo sapiens
gcttccaggatttgtcgtctgtataacgggggtagtgatgacacctacttcttagggtttcgtgaacgttgaatggtgtaactcacgcagccatagcgtttagcagagtgcctggctcatcg

SEQ ID NO: 267079 - DNA, 122 bp, Homo sapiens
agagagaaacatgctccccatagaaagacgagggcatccatcattgaggatcctgtcccccgagcacccctggtctgcaacagaaacctggcaggttccagagagcgggagcttaactcggg

SEQ ID NO: 267080 - DNA, 122 bp, Homo sapiens
ctccaggcaagggctggagccagggctgcagagcattcctcggctcagctggggcagcgccgccccatcccccagtggtcctcatgtggaggctggcactaggcggggttttcctggcagcc

SEQ ID NO: 267081 - DNA, 122 bp, Homo sapiens
gagagggacaaagaggaggtggcctgccccagggctgatgcctcggcattcccgcctggacggaggggtctgcggggtggtgctgcttgctccttctatgccttggtgagcacggggtaggt

SEQ ID NO: 267082 - DNA, 122 bp, Homo sapiens
gagaaggagatccagagttccaatctggagacggtaaggttggccaagagcatgtcggggcgggctgagagcagaggggggctctgaggctgtagctggaagccagcgctccaagacggggt

SEQ ID NO: 267083 - DNA, 122 bp, Homo sapiens
tagacagaagaattctcagtaacttctttgtgctgtgtgtattcaactcacagagtggaacgtccctttacacagagcagatttgaaacactctttttgtggaatttgcaagtggagatttc

SEQ ID NO: 267084 - DNA, 122 bp, Homo sapiens
gggaaatgtgtccagcaggtgaatgggttatggttgttgcctaggaactctgggctcctgcgtgcaggggccagcaggcaagaagaggcatgatcatggtggctgtagcgttgatcctgatt

SEQ ID NO: 267085 - DNA, 122 bp, Homo sapiens
gaggagccgggctgggctgttgagtccaggctgaggtaggagtgcagtgttttacaggtccgttctgttttgtgggtggacatgggtagattacctgttgggaaagaaatacttaatattat

SEQ ID NO: 267086 - DNA, 122 bp, Homo sapiens
gagtggaccgcgtggggacaggtgcagggggcgatgggctgagctgacacctgagggagccggagggaggcctcgctgtggaaaggccgaggaggaccctcactcgggctggcaggtgcagg

SEQ ID NO: 267087 - DNA, 122 bp, Homo sapiens
tgtacttgccacatgagttggaagtgtactggtagggagctttagtttgcattttaaatgcgtgatagtgatttgttttgcttccttgctgatcagacaatgatgatcttcccttttcacag

SEQ ID NO: 267088 - DNA, 122 bp, Homo sapiens
cccgcaggtagccggcaccaggagccttagagaagctgtagggcctgctggccgctcgtccgcctcgcgcccgggggctccgcgcctggagctgcgccggcggcagccatggacctgggccc

SEQ ID NO: 267089 - DNA, 122 bp, Homo sapiens
ctgcatgctccttggacccaagctgaaccctttcttcctctctccatctacaattacaaacgcaaattctcagccaaggatgaaagaagtaaattgtaggctcgcacaatatcaataattcc

SEQ ID NO: 267090 - DNA, 122 bp, Homo sapiens
gcatctccagagagtcaggctggatgagggagggctcgtccccaaaggctgtaccctggacgagcccatttatagaacacttttgacatgacaaaattgcagagatggcgcaccaattggtg

SEQ ID NO: 267091 - DNA, 122 bp, Homo sapiens
cccgcaccgggcgcagcagctgattcatctgcagccaggtccgggaaggaactgtgctcccggcagttgcagggcagcgtccgggcgggtggcttgtccccaggaccgcgctccccccgagc

SEQ ID NO: 267092 - DNA, 122 bp, Homo sapiens
gtatttttcttaaggtggttacaaaattaatctgcagcccaccacccaaagctacagtgccgaaggccgtgtgatgagcagagaaactgagccttctactgttaaccaatatggaagagagt

SEQ ID NO: 267093 - DNA, 122 bp, Homo sapiens
tcagagccccaaaccccaaaccccagccacctccgctattgggctgtcatactcccctagcggtaccagaccactaggggcagcccccatggctgcggaaatgattcagactagccaacctt

SEQ ID NO: 267094 - DNA, 122 bp, Homo sapiens
cgccccggcctctcaaagtgctgggattacaggcgtgagccaccacgcccagcctgcttacggtcacttgtaaatcagatgactttctgcttggtattttgctgtcttcttcaaagtttgga

SEQ ID NO: 267095 - DNA, 122 bp, Homo sapiens
cagaaataagtgtactgaataggataacttaccttggatagctcctgtccaggaccacaccgttggcaggtgacacaccgtccccattggtcccagtactcattttcttggcaatccatggt

SEQ ID NO: 267096 - DNA, 122 bp, Homo sapiens
ccggcattttgtgcagggaacgcggaagcaagatggcggcagaaagagcgcgagcgagagcgtgacccacgcttgttgcagcgggaagcaaaaagagagcatttaaaaagacatttgtcagc

SEQ ID NO: 267097 - DNA, 122 bp, Homo sapiens
cagtcattttctttggtgtacaaagcacgggctcgtcttcctgtgtccatcccggggtttcggggcagcagagctccgtctccacaagtgttcaggatctattcagatggttcagcctcagg

SEQ ID NO: 267098 - DNA, 122 bp, Homo sapiens
atccctttcagagtctcgcaggttgaggtgatgtgagagaggaagcagaagcgaaggttacgcgaggaaagcccctcgttaaacttgggattttcacggggactcagtccagaggaagttga

SEQ ID NO: 267099 - DNA, 122 bp, Homo sapiens
tggttagaatacatattcttaaaattatgacactgacaggaatgccaaacctgaaaaaggcgaagcagtccttgatttaatttacagggtcctattccaaatatgccattacaaagctagtt

SEQ ID NO: 267100 - DNA, 122 bp, Homo sapiens
ggaagagttggaagaggacgaaagtgccaccaagtcatggccctggaccacggacctgatcgtgcagctgggaagcccctcagaattccgacaccaccacaagcatcctcgggaggaagctg

SEQ ID NO: 267101 - DNA, 122 bp, Homo sapiens
ccgggcctggctcgctgcgctgcctcccgggggagctcattaggtcttgtaagcaaggggcggagggagggagcgcgcggcgaccgtcccggtggtagaggggaggggcttacttagcctgg

SEQ ID NO: 267102 - DNA, 122 bp, Homo sapiens
ggagaggataggcgtgttcctgccagcagcaccagctgaaggacccatccaccccctgcacgggtcacctacaagtgagtgaggaagccttccagatggctctggccccggccaccattgga

SEQ ID NO: 267103 - DNA, 122 bp, Homo sapiens
gcttccaggatcgactgcctgatgaagacggctcgggcggagggcttcttcggcatgtaccgaggtgggcttctcaggtcccctgggaggctgggcagcaggtgtgagcgtatgggacatgg

SEQ ID NO: 267104 - DNA, 122 bp, Homo sapiens
tgagtgatatttagtaactcagctcaaaatcatgagcccagagagatgtaatgatatgcacgttccactaaatccttccttatctctgttcaccaacagttcaaccatgactaaggagtatt

SEQ ID NO: 267105 - DNA, 122 bp, Homo sapiens
ctcgccgagtctcctggggcggtccggaggctcgtgccctgttgtggggcccccatttgccgccgccatgcccacggccgccgcccccatcatcagctcggtccagaagctggttctgtatg

SEQ ID NO: 267106 - DNA, 122 bp, Homo sapiens
tggtttgcccccaattgcaaactttaaagtttgcacttatgcactccacaggccagctcacgactatcttggccccctcttcccaaaatcaccatcaacatcccaccagtcccttctgaaaa

SEQ ID NO: 267107 - DNA, 122 bp, Homo sapiens
ggggacagagttgcggggcaagggggtgggggcacaagcgctgacttccgtcggaaatcccggccacttggcgctgaatgtttcaagaccatcttttaaaaataactgctctaggccgggca

SEQ ID NO: 267108 - DNA, 122 bp, Homo sapiens
ggcccagcccagtgtgcagtgggtggcaccttctggatttgtgtcagtcactgtggagttcgcacaatgacagactcacctgggaggccttccgtgcgcttctgtttctttctctcatttga

SEQ ID NO: 267109 - DNA, 122 bp, Homo sapiens
tgcacaggatgtctgcagtcctcacccctggcctgttcctccccctcccagggcccctcccggcctctctacataaagccgggggtactgggcctcaggtcaggcctatggccatggccttc

SEQ ID NO: 267110 - DNA, 122 bp, Homo sapiens
cctgaggccatggtaagcaaatcacaggagacggctggtaatgaggacacgaaatatgctcggcctcaccaataaacagagcagcctgatgcatgtgaaaccacatgccgctgatggagtgg

SEQ ID NO: 267111 - DNA, 122 bp, Homo sapiens
acatcactgttacgctacgaaggtgagactccttttggagaaacatacaatgacaccaatcgtatcgtaaacacttggaaggcactccaaattaagttgggcaagtcaaggtgagaaaaatc

SEQ ID NO: 267112 - DNA, 122 bp, Homo sapiens
catgagggcagctttcctcagcctgtgtgtaaattgcattttaaatgtctgatgagcaggcgtgccaaattgcctggagctcctttttatgaagccaagattaaaattttggcactgcccta

SEQ ID NO: 267113 - DNA, 122 bp, Homo sapiens
ggaccggagcgctgtatgacatgtgttccacagcccgccatgccgtgtgcgtagggcccccgtgtgcatagggccgccgggcagctcccgccgagaggctgattagttttatccttcttcca

SEQ ID NO: 267114 - DNA, 122 bp, Homo sapiens
acaggccacccttcccggttccagggtgccatccatccttaaataaacagtcagaagggccgccagctcactcggcaggcgggggacattcaggagctgtaggggaggtctctgccagtgcg

SEQ ID NO: 267115 - DNA, 122 bp, Homo sapiens
gtgctcatggccgacgtcaggagctgccacagcgcccgggtcctggggggatgaggaacccggcaaggcgtggggaacctgcaaagctccccctgcccaacatcaggccaccagccaaggag

SEQ ID NO: 267116 - DNA, 122 bp, Homo sapiens
tagcttttaaaaatagacaagaagccaacagttcttgggtggacgtgtcagacctgttcccgacaggacagatggcagcacagccagacccgctcagtgtcccaagagcagccccggcaaag

SEQ ID NO: 267117 - DNA, 122 bp, Homo sapiens
tggcatttgtaccctgtgttccatctgtgctgttatttactcagtatttttaagttgactcgcttctctaactgaaatttatttagaaaggttacaagtggaaaattagcatgacttcgtac

SEQ ID NO: 267118 - DNA, 122 bp, Homo sapiens
aaggatgacccccaaccccaacaggagaattcaaaaatcagagagcgatgaaggtgaacgcgctcccctcccccgctgtcgctgggaagccccactctgcccaggtctggttcctggagcat

SEQ ID NO: 267119 - DNA, 122 bp, Homo sapiens
tgggaggagggaagcgagggggggccgaggaggaggtggagggaggaccggcggccgcagcggctaacgctgctcgaggcgctcgcctgtcgtcgcctcacgcctccacaggccgcaggttg

SEQ ID NO: 267120 - DNA, 122 bp, Homo sapiens
gcttccaccctttcctcaacctagcaaagaagtaactgaaactaacccaagggttacaaccgaaaagccccttccagcttcagaagcagaactggaagctcggatagacttctccgcctcta

SEQ ID NO: 267121 - DNA, 122 bp, Homo sapiens
gggcggggaagaggggttcgggcctggggggcgggaggcagcctgaaccgacgtctcagccgggccgggccgttccgtggagttcctacagccgggaggagccggggggataaggcgccact

SEQ ID NO: 267122 - DNA, 122 bp, Homo sapiens
ccactgctcagagatactgactttgacattgctaaatgtttttcgtgaagcatggagcaacgaataactacaaaatagagagaatacagatgaatgaatagcaaagagaaacagcattcaat

SEQ ID NO: 267123 - DNA, 122 bp, Homo sapiens
ggatctgctgcccttgccacccagtgcctccttccctgttaatgcactgattctctatcccgagagaaaaaggacttctttacagctatggacacttttgctataattcaaacagctgcctt

SEQ ID NO: 267124 - DNA, 122 bp, Homo sapiens
ccctggctatacctaagaatagcttcttttcctattttttttcaagtcatgtagctaacacgtaggaaatggcagctgccttattttcccaagtttcttttttctgattcttctgcctagat

SEQ ID NO: 267125 - DNA, 122 bp, Homo sapiens
cttcaggacaggaggcactcaaagccctttctggggaattagggaattctcataggcacacgtttgcagttacactgtctttacagatacatactttcagtgtggaaatgacagggacagaa

SEQ ID NO: 267126 - DNA, 122 bp, Homo sapiens
cttgtggtgtgtcattgtttaagccggtccgaaaagcgcaatattcgggtgggagtgacccgattttccaggtgcgtcagtctcccctttctttgactcagatagggaactccctgacccct

SEQ ID NO: 267127 - DNA, 122 bp, Homo sapiens
ccagggctcccaggatggaccggggctctggaaaaagatcccactccattccactcccaacgttgtacccagcctgagagcagcccccatcatgacatttccttattgattaaacctactga

SEQ ID NO: 267128 - DNA, 122 bp, Homo sapiens
tggaggaacattgtcagacacaagaaagagcatcaagcaagtcagctgaattctttgggccgccacctcactgtgtataaaataaaggtattgaactaaatgatctccaaggtaattcctag

SEQ ID NO: 267129 - DNA, 122 bp, Homo sapiens
ctggtggaggtgacactaaacctgggtctgtccttcccagaggcacagtctgattctgcccggagtaagacattgacgggagctgggggcttcgtgctggggctcatcatctgtggagtggg

SEQ ID NO: 267130 - DNA, 122 bp, Homo sapiens
ttcaggcacagaacaaactttattcagaatgcacaatggatttagtatcatcagtgacaacgaggtcataagaaggtagggatgttcatagagacagcccagcagcaaagcaagggaagata

SEQ ID NO: 267131 - DNA, 122 bp, Homo sapiens
gctgctgtccaatcaggggggaccgggtgagctcctcttcctggagccgggctccaccagcgccgcaggctcacaggccgggggtgggggctctggaccgaggggcggcgcggggcggcgcg

SEQ ID NO: 267132 - DNA, 122 bp, Homo sapiens
agagccccacactgcaggaatggcccctcttacagggaaggggcatggcctgggtggccccgccccgcaggccctctggctaccaaacctcccagcgcccccgcgcccctttggagttctga

SEQ ID NO: 267133 - DNA, 122 bp, Homo sapiens
ctggctccattgtgaggtctcaatggagacagctgccgctgtctgatgggctctgcttgccgtccctgggccaggcctgctctgggacactgatgggctggcagctgctccatctgcagatg

SEQ ID NO: 267134 - DNA, 122 bp, Homo sapiens
ttcagcacagagagacaggaagtccagcctctcccgatgccgaggccgaggccagctccacggccccttactgcctccccagagaacagactagaagagaaaggagaaaagaatattagaaa

SEQ ID NO: 267135 - DNA, 122 bp, Homo sapiens
tggaggcagcttagagagaaacaagagtgggctctgaagccaaacaggcgtcccgtcccccgggtcactgtgtgtgctgggcaagcttccgtgttttcacctgtacaatgggcaccgcacaa

SEQ ID NO: 267136 - DNA, 122 bp, Homo sapiens
gagagttgcatatataacagtacggatttttcctgaattgacccctaacttactaagcttcggaacaagcaatctatttttcatgacttaattttataaaatttacacatatatacatacac

SEQ ID NO: 267137 - DNA, 122 bp, Homo sapiens
ctctgcccctgcctactgaggctgacagctgggcctgtgtgctccctccacggctgctgccgtctctagcgccctggcctccagcacatccagcagtggaggggatgccccttattccagcc

SEQ ID NO: 267138 - DNA, 122 bp, Homo sapiens
cttctcattcgtcagcctgtgactgtggagtttgaattgggtggcggttgactgtagagccgctctctctcactggcacagcgaggttttgctcagcccttgtctcgggaccgcaggtacgt

SEQ ID NO: 267139 - DNA, 122 bp, Homo sapiens
ggggaggtggaggagcccagatgttttggcggaaggaccacagaggaagtccttgtcctgcgggcgggcacctgagcccgggctccgccttgcgtcacgtcttcctgactgtccccagcctc

SEQ ID NO: 267140 - DNA, 122 bp, Homo sapiens
ggcagtgctttgcttgggtactgcattgattaggagattatatggagctgcgggagctgccgcctgggggaagagaggtgcagcttctgctaggtttgtgctctcctcccagggtctccttg

SEQ ID NO: 267141 - DNA, 122 bp, Homo sapiens
ctgtcttgtggactggctggctcttttagaactctgtcaaaaaagtgcatggaggctgggcgcggtggctcacacctgtaatctcagcactttgagaggccaaggcaggtggatcacgaggt

SEQ ID NO: 267142 - DNA, 122 bp, Homo sapiens
gacaccagagccggcaggcctggacagcgaagaatgcagagcacgccgcctcagtagcaacgggcgcagggccaccgtagcgggtgtggggccccggagctcggtgcaggctctggcgcagg

SEQ ID NO: 267143 - DNA, 122 bp, Homo sapiens
tatgagagaggcagggagagttcggagtaaaattaacccgaatggacagcgcttccgccgcgttcgctgccacaaatgctgcagacccgacggagtggaggcagaaaaggccctggcgtcca

SEQ ID NO: 267144 - DNA, 122 bp, Homo sapiens
aggttagagcccagaagcgcgctgggacctgggtctggcttttgggtctgtgtccttcctcgtttggccccaattgtccgcattcaagatcataataaaaaggcttaggaagtaaacttctt

SEQ ID NO: 267145 - DNA, 122 bp, Homo sapiens
aaacgggcaactctcccgtcaaacaatatttttatgaaacgcgatgtaaggaagccaggccggtcaaaaacggttgcaggggtattgatgataaacactggaactctcagtgcaaaacatcc

SEQ ID NO: 267146 - DNA, 122 bp, Homo sapiens
cacaacgagttcctgtctcaaaaaaataaagaacactgggaggtaaagagaattggggttcgtggtctagggacaggacaatggctacacggttccgcaccagagcactgataagccagggg

SEQ ID NO: 267147 - DNA, 122 bp, Homo sapiens
cgcaggtgagcccctcctttgggaacgaatggagggccccacttccctccctttctcctccgcaggctgcgagctcagtcaggagaggcggacttggaccttcagaccccagctggagggga

SEQ ID NO: 267148 - DNA, 122 bp, Homo sapiens
agggcagttgcaattgtttatgcgatgagcacagtcacagcgcttgcagaacaaaagcatcgaagagaggcgagcgccggtccacctcctgcaatcacaggcatcatttcaatggaaggcaa

SEQ ID NO: 267149 - DNA, 122 bp, Homo sapiens
agcagtcttttctcagggtttgagaaaacactgtgtcttagtgagaagacacagtctgtgcgagttagtaaagtgaacagaactgagtagtcagctccctagtcaagaaattgaacagtcgg

SEQ ID NO: 267150 - DNA, 122 bp, Homo sapiens
ctcctgccaccccccagctctggcctacccagaggtccctgggaaataaggattgggtcccgtcccacatatcttcactcccataagcagctgctcaggctggaaggccctggcggccggag

SEQ ID NO: 267151 - DNA, 122 bp, Homo sapiens
agatatgatgtacattgagtatatttgcctctttctgagtctgtgctctaagcacagaaccgcctggcttccttagggaattactgcttcacataaagtcttagtctttttatactggacct

SEQ ID NO: 267152 - DNA, 122 bp, Homo sapiens
agggagtcacttacagggggtccaggaataccaggtgggcctttggggccaaggagacctcgaggtccctgcattcacggtgaggggaggagacggcatgaatggataaaactgtgtccctt

SEQ ID NO: 267153 - DNA, 122 bp, Homo sapiens
tccacacggtcggacatcctgtactcctcatagtacttgtcctgcagggtttcgaagatgcgggcacactcgtccagggtgagggggttgctgcagtcgggctgcatccgccgctcgcactc

SEQ ID NO: 267154 - DNA, 122 bp, Homo sapiens
gggcagggagggccacttactgggcagagatatgaaggaaacacatttatgcagtggctccgtatttggtaccatggaggataccaattcaaagacatggcccaagggatatgatgcacatc

SEQ ID NO: 267155 - DNA, 122 bp, Homo sapiens
aaacagaagggtgtaagaaaatcggagtcaagaaaatgtcctgagctccgcctgcagtagcgggaagcctaggagtaaaataacacgttttttaaaaataaagaaagaaattattttaaaaa

SEQ ID NO: 267156 - DNA, 122 bp, Homo sapiens
gatgaagtttcctgggaccttccggaagcacttgctgtcccgtcaacagccctgtacctgcgatgcatgcaattctaatgaaaatgcccttctcgtctggagggcttgcttgagcacatcct

SEQ ID NO: 267157 - DNA, 122 bp, Homo sapiens
catagtaaatggaagtaaatgaggaagaaataaggaacagagaattcagcaacgctttggcgtacacaaaaataaaatgtcaggaatcagtaacaattgtggccaggctaactaaagtgact

SEQ ID NO: 267158 - DNA, 122 bp, Homo sapiens
atttctgggggacttccaactctctctgtagttttataaccatccatcccccttctctggcgcagagaaggtgcttcatgagtatttgccgtatcaatgaagcccaacatctcattttacaa

SEQ ID NO: 267159 - DNA, 122 bp, Homo sapiens
ttcctgctgatgaaccatataattcaacatacagaagtgatattcagaagtaaaactgaccggccatccaaaaactcaaattgttattgtcagtttaaggaggcagggacagataatgggat

SEQ ID NO: 267160 - DNA, 122 bp, Homo sapiens
agacacagatacatggaaacacgaacacagacatgcgcacacacgacacacatggagacacgcatgcatgcacatgaagacacacggacacacagagaagatacacggaaacacaaacacac

SEQ ID NO: 267161 - DNA, 122 bp, Homo sapiens
gggaaggggacaatttgccaagtaggtgccttggtctactcccatttgaagtgtatctaacgggtaaacactcagtcaccacatgaatagggacatttctcccttccctacccgcttgtctc

SEQ ID NO: 267162 - DNA, 122 bp, Homo sapiens
ccagcactactgccgggagtcccgggctgttgttatcatgttggccaccagagggcgcaacggctccaagcccaactggaattctcacttaactcccacaagtatcctagctagttaatagc

SEQ ID NO: 267163 - DNA, 122 bp, Homo sapiens
tctcaaaaaaatatataaaaaataaaagaaaagaaaaaaaacaaaaacaaagaaggcttacgtgagacccttggggccctctactgttaaccagttcaggagaggtgtaaaagtttgtaaag

SEQ ID NO: 267164 - DNA, 122 bp, Homo sapiens
cttcgctctcggacagaacagattggtgccgtgttgcacatccagaactccactcccacccgcgcctttggtataatgcctgctgcccaaactcaggatttgctgtgggtctggggatcaat

SEQ ID NO: 267165 - DNA, 122 bp, Homo sapiens
atatttgttagtgaaatattaaggggataaaagggaattatataattctgacaaaaacagcggagattcttttgggactttcagggcataactcctactaaaacatttatttattatactaa

SEQ ID NO: 267166 - DNA, 122 bp, Homo sapiens
ccgccttgcggccaaggccgcggaggactttagagacaagctggacaaaagtggcagcaacgcctcatcggactctgagtataaaggtaagaaagcaggaggtgaaaacttggggggatgct

SEQ ID NO: 267167 - DNA, 122 bp, Homo sapiens
tggggacgttctgcttgatgtgcagaatgacagaggtgacgtaggggctctggtcaccaacgtgctccacgttctgccactgcatctgaaagggagaaaggatgaggcgttgaatccctcgc

SEQ ID NO: 267168 - DNA, 122 bp, Homo sapiens
ccgccgcacccaccccgttggcctcaccctggctcgggcccctttatcatcctgcagctacgctccgaccaggaggcacagccagtccccacagccggctctaccgctctgctcgcaggttt

SEQ ID NO: 267169 - DNA, 122 bp, Homo sapiens
cggccattgcagagtcatgaagtcatcgcagctgcgcctgcagccaggcgggaacgggaacgggaactggctggccgcggtcccttctgtcccccgccagccggaaatgtccgcgcgctgaa

SEQ ID NO: 267170 - DNA, 122 bp, Homo sapiens
agaggctggaaggccaccaggggcagttagctgtcagtaaggcagcagaagggctggggtcgctacataaggaaaatcagtactagggctgtaaactcaaatgactacagggccagcaaata

SEQ ID NO: 267171 - DNA, 122 bp, Homo sapiens
aaaaggtggtggggttatgttactcattaactggaatcgctcttagatttgatcaagacgcggtggcccctggcgctttgtttcatgtttgtcctttgtttcattgacacgctttgcctcgg

SEQ ID NO: 267172 - DNA, 122 bp, Homo sapiens
ccgcgcgcccctgggcccaagccgcggctccagatgtggatttgtttccagtggggagaacgcgagcttcccccgggccttggcacattctcccactctgaggtcattccgtaggtggtcag

SEQ ID NO: 267173 - DNA, 122 bp, Homo sapiens
ctccctcaccttctggagcttccccgagttctcacagtgaataatggagaaaaatcccctcgtgcctcctgcagtgggaagaagaaaaaggaccattttgaaagagactgccgcactctgct

SEQ ID NO: 267174 - DNA, 122 bp, Homo sapiens
ggcggagctcggctgggagccggcagtggcttgggagggagggagggagaaggagaggggcgggaaggctcctcgcgttttccacgcccccgcccagctctgggctggtggtaaatctcgga

SEQ ID NO: 267175 - DNA, 122 bp, Homo sapiens
gcgacgacggctcctgggaggtcatcgaaggctaccgggcccagcacagccagcaccgcacgccctgcaagggaggtatccgttacagcactgatgtgagtgtagatgaagtaaaagctttg

SEQ ID NO: 267176 - DNA, 122 bp, Homo sapiens
ttctgtaagtcccaccgcgggtgcatattgaaaagaaagggatcattagcacgcgaccctcgcctaggagtatataaaccgcagcacgactttcggatcacaaaggcagagaaaagaacaca

SEQ ID NO: 267177 - DNA, 122 bp, Homo sapiens
gcgggtagcctccctgttcagcggacccggcgaagggtggagggacactcaccaatggcccgctcgattttgccaagcacctggttattgggtatggcccgtccgctctcatagtccgcgat

SEQ ID NO: 267178 - DNA, 122 bp, Homo sapiens
tctctcaggccccgcccccagatcacgtctcccaggtcccgccccctccgcctgctgccgcgcggacccgccctcaggcgccgtctcctaggccccgccccctccgcctgttccagcgcggg

SEQ ID NO: 267179 - DNA, 122 bp, Homo sapiens
gccgctctgaaactcaggccttaaaatacaggcaggatcagcctttggagccctccctgccggccgggcctgcccggcgcccagtcagcgtgctgccgggcctgtgcccctgacggacctgg

SEQ ID NO: 267180 - DNA, 122 bp, Homo sapiens
gctttgcaaagccagctacagttctctagggaggcaaggctccaaagctcaggctagtcccgggcactgcttcaggaccccacagatggaaggactgatccagcccatcgcacggaagggga

SEQ ID NO: 267181 - DNA, 122 bp, Homo sapiens
agcgagaaatgaattaatctataattgcccaagaaggcttctaaaagtgacttaatctttcgctttcattcatggctgaagagaagcagttaaggtgattagaatctgtataaaatcaggaa

SEQ ID NO: 267182 - DNA, 122 bp, Homo sapiens
atcgacagcatctacagatgaaactcctctagaaacggaaacactgaacgggatgctttgcgtgcacaaaaccttgctcagctcttaagaaaagcaacattcccctctccctcaaaaacccc

SEQ ID NO: 267183 - DNA, 122 bp, Homo sapiens
gacaatgatctgatgagagttacacatcgtgagcccaagaacaggaggtgttatggcaagcggcattgccttctgttccgaagccactcatcagctccaccccaccccatccccagtgtctt

SEQ ID NO: 267184 - DNA, 122 bp, Homo sapiens
cgcctaggtaaccagattaatctcctttttctctcccttcctctcttgtagtgcggtaatcggtgggctcttttcacaaaaaagccagcctcaaagctggggctctaactaggttcctaatt

SEQ ID NO: 267185 - DNA, 122 bp, Homo sapiens
tcgcaatagtaaatttgggtgcttttcatctccacggggccgtcgggtcagcgccccgggcgactccaccgcccgagactcagtgcagcccggggctgtcttgcaggagtcggctgtggagc

SEQ ID NO: 267186 - DNA, 122 bp, Homo sapiens
gggagactccctttcccagtctgctaagtagcaggtgtttttcctggacagcgacgctaccgctagaccatggtctgcttggcaacgggcgtcttccgagacgctggtgttaccgctagacc

SEQ ID NO: 267187 - DNA, 122 bp, Homo sapiens
gcctgaaagatccgtgaagggacatcaccaaaaacggcgccttagaaggcattcccacagcgaagcagccaaggacgtgaggctctgcttctatttctggtgagacgcgctacgtgtgcgag

SEQ ID NO: 267188 - DNA, 122 bp, Homo sapiens
agagggccctttcctgcttctctgaaagcacaggtcacccagcctcagaatcacacctcccggctgctgctgagagcaccactgaacttagacctctcaacacagtatgccaagtggattcc

SEQ ID NO: 267189 - DNA, 122 bp, Homo sapiens
tttttttgactgcctccatgtaagatgtgacttttctcctcatttgccttctgccacgatcgtgaggcctccccagccatgtggaattgtgagtcaattaaacctctttcctttataaatta

SEQ ID NO: 267190 - DNA, 122 bp, Homo sapiens
aaagccttgcccacgtagccctggaccaaccgtccttctgggttcctacagcatttccttcgtgtattgtagtctcttgaggcagcctccctaggcagcctgtgagcccctgctgggctcag

SEQ ID NO: 267191 - DNA, 122 bp, Homo sapiens
caaattcctggcctcaagtgatccacctgcctcagcctcccaaagtgctgggattataggcgtgagccaccgcgcctggcctcctaattgttttatgttaatattaaaaatatatttgaatt

SEQ ID NO: 267192 - DNA, 122 bp, Homo sapiens
actgcgaggttcaaacatccgctttaggaagttctgttcttggggaagggccccttctcccgcaccccctgccagggaatgttgggtagtggacgccctctggcggctttcagaagtggaag

SEQ ID NO: 267193 - DNA, 122 bp, Homo sapiens
cccagcgaggggagtgagccctgttgccagcttggcctggctgtggcttctgagtaaacacgtgtgtttgttaactgttaagaacctggtaatgaatactccctggaagatgccatggaccc

SEQ ID NO: 267194 - DNA, 122 bp, Homo sapiens
tgcgcgcctggcctggtggtccgatgggaagcccggggcggggcagccgcggggcgggggcggggcgtcgcggagataggccacgcccctgcccgcccgcgcaggcgcgctgcgggtcgtta

SEQ ID NO: 267195 - DNA, 122 bp, Homo sapiens
gaagtggagcttgcatttccatacaaggctaccttggaatctcatctattgttagggagccgaagtgtgtcgctgtgacaaccctaatagaaccttaggagtactggctactcctgctctca

SEQ ID NO: 267196 - DNA, 122 bp, Homo sapiens
ggcagggagatttgcacatcctcaggtggtcaggcttcagagctggggttggtgggtaggcgggtagaggggctggtgtggctgaagcccaggggagtgctggggaggtggttggcaagctc

SEQ ID NO: 267197 - DNA, 122 bp, Homo sapiens
gtcccactctttagaatcttttcatctagaagagtcccccagtcttgtttttcatgacatcgacatttttgaagaagatgggccagttgctttgcagaattaccttcgatttggatttttct

SEQ ID NO: 267198 - DNA, 122 bp, Homo sapiens
actgcagataaaaagtacggccagtggcgagtttcaggcgcagctgctgtttctcatgatcgtggatggagatcttcacaaatttcaagggaagcagtctcgtgagctctagagtcttgacg

SEQ ID NO: 267199 - DNA, 122 bp, Homo sapiens
cgaggcaccagccacgggtggagcccgagttccctcagctttcagttgggggcaagtctgcggcctggggtcgcttcggcggccttggaaggtgcgcggtttgggggagagcggccatgtcc

SEQ ID NO: 267200 - DNA, 122 bp, Homo sapiens
aaagctgcctccccccacagatccaaagagcctcttggaatgggcactcgactgttctgacgttgtgattctctcgggagtttgaagacagaaaggaaaggggagaaacctgcagagagcat

SEQ ID NO: 267201 - DNA, 122 bp, Homo sapiens
gcaagtccacgctggcacgggtcatcgtggacaagtaccgtgatggcaccaagatggtgtcggctgacgcttacaagatcacccccggcgctcgaggagccttctccgaggagtacaagcgg

SEQ ID NO: 267202 - DNA, 122 bp, Homo sapiens
gctgtgactacaggcccgagctgccatgcctggctaatgtttgtatttttcgcatagacacggtttcaccatgttgcccaggctggccttgaactcctgaggtcaagcaatcagcccgcctt

SEQ ID NO: 267203 - DNA, 122 bp, Homo sapiens
agtagaaaacactgaagtcaaatgagggtggagcaaagcactcataccctctggtggatacgttgattttataaatattttggatgacagtttagcaaccagtgtatcaaaagcttttaaaa

SEQ ID NO: 267204 - DNA, 122 bp, Homo sapiens
cacttggaaatagagtgctccaagcagcaacaggcaggaaggggccgctgacccagactgcgggagtccaggaagacgtcctagaggaagggatgtggagctaagacccaaagaataaatga

SEQ ID NO: 267205 - DNA, 122 bp, Homo sapiens
ccaatcttccgggcccacccctcgaggccccacctccgcagcggctgacccccccctccccgagtcccgcccccgaggccccacccccgcggctgacactccaggcccgcccctcgaggccc

SEQ ID NO: 267206 - DNA, 122 bp, Homo sapiens
acatatcaagacacccccacaccaaccccatatctacaaaaaattgggggcatagtggcacgtgcctatagttcagagctttgggaggatgaagcaggaggatcacttaagcccaagacttt

SEQ ID NO: 267207 - DNA, 122 bp, Homo sapiens
atcgcctttccgggttggcggcccgcctgattgggaacagccggccggttgccgggggaacgcgggagtcgggcccgacctgagccacgcgggcttggtgcccacctgtgcgcgccgcctgc

SEQ ID NO: 267208 - DNA, 122 bp, Homo sapiens
gtttgcaggttcctgggggcctcctctgggccggcacacaagatgggctctcggcctccacgctcctgcaccttccacagaccagcgcttgttcctcgcccagggagctgccagccccaaag

SEQ ID NO: 267209 - DNA, 122 bp, Homo sapiens
tgaccaggcaccaggtggcattgcatgcaaaagcatcgggcacttccttcgagccggaatcgaaccagcgacctaaggatgtccgcaaatgtctgtacaatctacagtcctccgctctacca

SEQ ID NO: 267210 - DNA, 122 bp, Homo sapiens
gggcgcgagccgtcctgcggggtggctgcgaggctcgcaccggcgagggcagtgtgggggcgagggagccagcgagagcgaggagctgtggggagtcggcagcaaacagccagcaggctgcc

SEQ ID NO: 267211 - DNA, 122 bp, Homo sapiens
ttttggcgcgcggcagtgacgtcagcatcctgtcagccgcagcccccgccgtagccggatcgacctcgcgttttcaactccgccccgcccgccgcaccgttaacgggccccggctgccccac

SEQ ID NO: 267212 - DNA, 122 bp, Homo sapiens
tccagctctgcaatgagttgtgcctaagaaggtcacaggggaccagcccctgctgtgtagcgcagggaggagggctctgtcatttctggccatcatggccctttgcagtcagcctcagcctg

SEQ ID NO: 267213 - DNA, 122 bp, Homo sapiens
tggcctgggccactgaagttttcccgcacagaccacctggccagctgcctgcagcggggccgggatctgggcctgccctcttacaccaaggccagggcagcactgggcttgtctcccattac

SEQ ID NO: 267214 - DNA, 122 bp, Homo sapiens
tcactcccgcgcataactgacatggggccctcttggtcggcgtttccgggcgggtccttccgacggccgccgcggtgattccatcactcggctttcttcccggcctgcctcgcgcccgtagc

SEQ ID NO: 267215 - DNA, 122 bp, Homo sapiens
atcatccagaggtttcccattggttacttgtttacaccctatgtaaatgaagtagtggtccgacattggtttgattggtctgattgtttacagtctgattggttacaggaggcaaccaatca

SEQ ID NO: 267216 - DNA, 122 bp, Homo sapiens
ccgaggcgccgtagccccgcccctccggcgcgtggcgcccatgacgctaggcgcgcgggccgctctccttacagaggtcgctcttgtccgaacggtcggcctctgctgcgcctgcgtggtcg

SEQ ID NO: 267217 - DNA, 122 bp, Homo sapiens
cagaaactagggttgcagcagccatagaaaggacagaatgagctcatatcctttgcacaccgtggatggagctggaggccgtgatcctaagtgaaccaacccagaaacagaaaatgaaatgc

SEQ ID NO: 267218 - DNA, 122 bp, Homo sapiens
cttcggccacaagggaggttgttatcctcggcagatctcccgttctcactcttggaggatcgctttttctttctagcctcacgctcagccgcacgacccagccaggcctaacgccagcagcc

SEQ ID NO: 267219 - DNA, 122 bp, Homo sapiens
ccacagcctcccctcctacaaagggagcagaagccccatggggtctccccagaaggaacgcggcggtgctcccccacactccgccctccagatgccccaaccctggtgcctttctgcagttc

SEQ ID NO: 267220 - DNA, 122 bp, Homo sapiens
cagccgggacttctcctcctcgttgttgttggtcgatgaccctgtcttcatggtgtcctgcgcctccgactgccattcccctcgggtgatcagcctgcgcatctgggggcaaatgtttgggc

SEQ ID NO: 267221 - DNA, 122 bp, Homo sapiens
cggggcggagcctgaggggtggctgattcatgcacggggactgtcaccccgccgcccccgcgctgcaaactgtgtaagagggagaggaattccccgccaagttgaaaagttgaacctgcctc

SEQ ID NO: 267222 - DNA, 122 bp, Homo sapiens
catgtaatgagaacaggatgactcaagcggccggaggcgggcagaccaggagctttgggccggaggctcagggatggtccctgacggcggccggtgggtctttggatttctttgtgtttccc

SEQ ID NO: 267223 - DNA, 122 bp, Homo sapiens
tccccgggtgtcaggcgagagcggtcctggggggcgctgggtgcccacccggtgaatggccgcctgagccggggaagatgcttcatctgcccctgcccagatccggaagaacggtgaatttc

SEQ ID NO: 267224 - DNA, 122 bp, Homo sapiens
gtctatattcagaggaggaactgctgggtcatagatgatatttcataggtattgccaaaccgttctctggagaagtggtatgggtttaccctgggattcttctatggagggaatagttgagc

SEQ ID NO: 267225 - DNA, 122 bp, Homo sapiens
ggacgcgtttgtggtcagctgtgagacccagatctgcaacacacactgccctgtggtgagcgctcccaccctgccccgaccctgccctggctcttggggggcagcggtcgcctggattccag

SEQ ID NO: 267226 - DNA, 122 bp, Homo sapiens
ccatgccctccggggtgccaagctgctctggttcctggtgtggagaaccaagtggtcctgcgtggggctgaggaatggggaggaccagaagttcagggtgtcggggcagcaggaagttgaaa

SEQ ID NO: 267227 - DNA, 122 bp, Homo sapiens
aaagggctttcccatgctcagtttacacttgtgttatggggaaaggggagggaaagaaaacgcagcatgaaagcagtgtgaggcatgttcaaatccattgctcacagcagggaaaaacaatt

SEQ ID NO: 267228 - DNA, 122 bp, Homo sapiens
gtccttcatcgaggagcgccgggcaagggagaaccggctcaaccagcagaagaagctgatcgacaagatccacacgaaggagaccagcgagaagtaccgccgggtaagccccaggccagggc

SEQ ID NO: 267229 - DNA, 122 bp, Homo sapiens
ctgcagcacagtcacaggcctgaaaactgaaactgagtctatttctgccacccctactcacgctgctgagaaatcttcctggcaggggttcagagaaagaaataaagccagagggcagggcc

SEQ ID NO: 267230 - DNA, 122 bp, Homo sapiens
tctcagactccgctgacctctttccttgctgcctgtgcccggggcccctctccctggtgtcgcatctccttcggcccctgcgctggagccccctacgtcagtcatttcccttcattgccccg

SEQ ID NO: 267231 - DNA, 122 bp, Homo sapiens
atgtgctaagtccttggcgcccagaaataacctcctggagactatgggccttatatttaccgcaaagcagtgggtaaataactagttggtgttttagtgttttgtggtcacttaatctgttg

SEQ ID NO: 267232 - DNA, 122 bp, Homo sapiens
cagcagcttccttggttgggagtgtggagggtgggtggaccagctcctgtgcacctccagcggcagccacgcagaatacgaattggctgcagttaccgtcctcatcagcccgcagtctggat

SEQ ID NO: 267233 - DNA, 122 bp, Homo sapiens
ttctcctgagggtgtctcccaacaccacggtcttgttttttggcgagtaaaaggctgtttcgtcagaaaccctcctggccctggccgactgcaggcgtcaggtggcctcttcaccagccttg

SEQ ID NO: 267234 - DNA, 122 bp, Homo sapiens
tgaattccattgctcaaggttgggaagaaacccaaactacagagacagtgatctgagttacgctccttggagtaaaaagtggcaccagctgttggcaagaagtttgtaaaaccagctgctgc

SEQ ID NO: 267235 - DNA, 122 bp, Homo sapiens
ggggtcgcagcaaggccccgcctgtcccctcctgggcctctcaaagtctgagccccgctccgctgatgcctgtctgcagaatccgcaccaaccagcaccatgcccatgactctggggtactg

SEQ ID NO: 267236 - DNA, 122 bp, Homo sapiens
agaccgggacacgggcctcgcggggcctgtgcggccacagcgctgtggggcgtgggaggccgctgtctgtgtagggcaaaagccataaacacaaacagcccaactggaaaaatatttgaaac

SEQ ID NO: 267237 - DNA, 122 bp, Homo sapiens
aaagctaaagtctgtcaatatcaagaaccatgacaaagcgtttgatgtctatgtagtaagcggatacttccgggccttgtcttgattgtgatttctacctgatcaaagttccctaagagtcc

SEQ ID NO: 267238 - DNA, 122 bp, Homo sapiens
catctcaaaaaaaaaaaatcacaagaacaatctcaagtctcatttcttgccctgactccccgtccaccccctcagcatatctcaaagtcctgaacatttctgagtgtccccagagggttttt

SEQ ID NO: 267239 - DNA, 122 bp, Homo sapiens
tggattctactcacagggtttgtaatctcccagatcattcagcatctgaatgaattcagccgccaaggggaagatcactggcagatcccagtgggggtacttaccccttccagactcttcct

SEQ ID NO: 267240 - DNA, 122 bp, Homo sapiens
atgtaggttcatagaaggagaagcctctgtgggtccctgtaaagacttagcactcaatttcgctgtttcaaggatcttggcgagtgtctctcacaactaagccaggaaaagaggaagttcat

SEQ ID NO: 267241 - DNA, 122 bp, Homo sapiens
tttccgtctctgcacttctgttcaccccgctgttacatttccaggagggagtggggcaggcgaccaacttccagttgagaacatgggtgactctcggccagcctgatactccccactgctgc

SEQ ID NO: 267242 - DNA, 122 bp, Homo sapiens
gccttgcttggctggaagcacaaacgttgtctgcagagccctgctggggcagcaaccaggcggagtgagcatcgggccgggacagcgagtggccccagagtgaggcacaatccagcctttgt

SEQ ID NO: 267243 - DNA, 122 bp, Homo sapiens
tgccagtgcgagttccaggtgggcgtgggctcgacgggccctgtgctcagagctgcctgccggtgccgccggaccgggcagtgaggggcttagcacccaggccagcggctgcggagggtaca

SEQ ID NO: 267244 - DNA, 122 bp, Homo sapiens
tgtcaccactcaggctccccaggactcacctgagggaatcccagccacagaaagcactcacggaagagcagagaagctggagaaacaacagtagcagagatagcatttactgtactcaactt

SEQ ID NO: 267245 - DNA, 122 bp, Homo sapiens
ccgaacagcgaacagcacaggtaaatcaaatcaaacgtcagagccagcacagcctgagagcgccttgaaactcagactccacaatctatggggaaagtgtcctgctgtggcatgaaataaat

SEQ ID NO: 267246 - DNA, 122 bp, Homo sapiens
ggcttagtgtctctctccccctgccagaatgtaagttccatgagtccatggatgtttgtccgatttgttcacggatgttttttcagcaccagaatggagcctggcacactgtaggcactcag

SEQ ID NO: 267247 - DNA, 122 bp, Homo sapiens
gagggaggagactgcacgttcggctccggcctcctccgcgccgggctcggcaccgatccgcgaagttggccgaggcgtgagccccgcccacccctttaacagggacactcccctttaaggcg

SEQ ID NO: 267248 - DNA, 122 bp, Homo sapiens
ctcctcctctgtgccggtgtctctgtcggtccccttctgataaggatatttctcagtccacgataatttcatctcaagattcttaactaattatatctacaatgaccctatttccaaagaag

SEQ ID NO: 267249 - DNA, 122 bp, Homo sapiens
ccacacgctcccggaagtgggaggtggccgctggagtttgtgtggccgccgccgcgggaacgcgagcccggtaatttttcaacggagaaaggcgaggctttcgggctctgcagagtgagagt

SEQ ID NO: 267250 - DNA, 122 bp, Homo sapiens
ctcacaacctcaggaaaatgaacttttttttggagcaggagaatgggaacaaaattaacacgcagtcacacaacaaagcatttactgaacacctactttgtgcagtcctatgaatgaagctt

SEQ ID NO: 267251 - DNA, 122 bp, Homo sapiens
gcgcagggaccggcaacagccatacataccggctgctgcagtggggctggcagctccaggcgccagcacagttgtggctctgcgtgaggctggaccagatggacggcatgtggattctgctg

SEQ ID NO: 267252 - DNA, 122 bp, Homo sapiens
ccctggccctgctggactctgcccgtcagcacccactgatcactgcatggggtatgcacacggtgtgctgagctcctgccggccggtgctgcaccaggctccaggggggactcagcacccag

SEQ ID NO: 267253 - DNA, 122 bp, Homo sapiens
tggccaaatgcattctccaaatttgcaatcaaggagcttaattcacaattgtggatggggcggggggaaccgccaagtgcaagaacacggaacggttgcaagacgcagttcagcaagaacaa

SEQ ID NO: 267254 - DNA, 122 bp, Homo sapiens
tgatggcttgctgtctctgtagtatttgacaatattgacagaactttccttcttgaaacccggaatcttagttcctatgaaacccactctcctgatgtttctcttagctttctgatgacttt

SEQ ID NO: 267255 - DNA, 122 bp, Homo sapiens
gctgaagaagccgctggcgatgacataggcccccaggatggaggtctggaagacatgacccgttggggttattgggttcctctggggagttgggggtggagcagcagagaggggagtcactc

SEQ ID NO: 267256 - DNA, 122 bp, Homo sapiens
attcaagctgcgtgggcttcagtatttctcgccctagctctccatcacacaggtttccaacgcgtgctgggcctcgttcctgggcttgctcaggctgaagctcctccggaagggttttccag

SEQ ID NO: 267257 - DNA, 122 bp, Homo sapiens
attctgcagtgaaaaataataagtgattcacactcagacacaaggtggcttaggaagctgcggctgttttaaaaagatgaaacaatctagaaggtcaggattccgtgagcgtattccttact

SEQ ID NO: 267258 - DNA, 122 bp, Homo sapiens
gaactcgactcacccaggagctggaatggggggcagtgactgccgttggcgtctcagggacgctggccggggccctttcagagtccctctcccggtagattttgtagagccgggggcctagg

SEQ ID NO: 267259 - DNA, 122 bp, Homo sapiens
gcagggtgctcaacagccctcacataagtgtcacaacagtcctggaaggtccctcacaagcgaggaaactgaggcaggagccacgagatcactggcctgtctgtggctgagccagacttgaa

SEQ ID NO: 267260 - DNA, 122 bp, Homo sapiens
gttataaatggctgtcgcgtcatttactgtgttcctgttctgcaaccattgagatggtcacgtgggttttgctcctttaatctattgatatgaattacactcttgattctctggcattgaaa

SEQ ID NO: 267261 - DNA, 122 bp, Homo sapiens
catccagaacaaacacgggctcccagtcagccgggcttgggtgggaacagcgtctcccagcgcccatgggggtcggcccacttggcctcagtgccctgctctgacccatcggccagggttgg

SEQ ID NO: 267262 - DNA, 122 bp, Homo sapiens
agacagatgtgggcttgtttttctagttgctgaaactgtatgaaggctttaaagggagaacgttttcttgatgtgctttaggaggggaggaggaacaaatgcctgccagatctcacagctac

SEQ ID NO: 267263 - DNA, 122 bp, Homo sapiens
actggaaccacatacggatgccgtcctccaggaaggtgctgatcagacagaggcgcgccacgtggggcaggtactgctttgtgacacggaggaactgcagggccacagaaacccaagggtga

SEQ ID NO: 267264 - DNA, 122 bp, Homo sapiens
gtcattacacttttgtattactgtgggtagcagtaagaatggcctctgcacctacccccgcgccccagtggaactaatcttgcacagctttggcagggtagacggccacatcttcagggagg

SEQ ID NO: 267265 - DNA, 122 bp, Homo sapiens
tggtccctcccgtctttgacggggccaaactcggggtgtaaattaggatcctcactgaagcggcgggaccctgagaggctttttcctggccccttagttgtgggttttcctgcgggcggtgg

SEQ ID NO: 267266 - DNA, 122 bp, Homo sapiens
ggcaccacagcgaacccaatcgacctccggctgggttgcgggtgattccccgctccctggcggtagcacttgggcattttccgcggagaccccagagcctggactttgcctgctgggggagc

SEQ ID NO: 267267 - DNA, 122 bp, Homo sapiens
taggcacattaaaaacaggcctatgaagtattgggcctgagaaggaactcagggtttgaacgcaaccacttggttttaccaatcgtgaaactgagacccagagggaaagataaggcagctgt

SEQ ID NO: 267268 - DNA, 122 bp, Homo sapiens
ctcagaggccccggggtgagggtggggccccagtctccgagggacgcagcggacacctgtcgcaggtggccggccaccggggtcgccacccccagtgtcccccagcagcgggaccgcggggt

SEQ ID NO: 267269 - DNA, 122 bp, Homo sapiens
aggagttcaagccaataaagatagcatggtggggaaaattcaggagggttctgatagctacgaacaagcgatgtcctacgttgagtcgcaaatcaagaaattagccagcaattcagatgtat

SEQ ID NO: 267270 - DNA, 122 bp, Homo sapiens
gacaggctggcgagagggaaagcattgcgttctgggagttgtagtgttctccctcctttccggatgtttttgcagggtttttcaagctgcagaacttttgacccgatgcaacgaccaaattc

SEQ ID NO: 267271 - DNA, 122 bp, Homo sapiens
catgggtgagccctaaggagcatggcaacaggcagccacacagaggattctcatagttttcgttctcaggcacaggagaacctcataaaggcacacttgttgtttatcctaataggcattta

SEQ ID NO: 267272 - DNA, 122 bp, Homo sapiens
gtgactgtggcagtcctgctgcggctacctcacctggcgcagtggcccggctacactccccgactgctgtagcccccaaccgtcccggcagagcttctctttggaggcactgccgtccccca

SEQ ID NO: 267273 - DNA, 122 bp, Homo sapiens
tccaacacagaacagtgcagatctagaatccctagagaaggagcccctcagggtggaagacggtagaccacatccccctgttgacccacttctggctaattggtgaggtcatggctaacttc

SEQ ID NO: 267274 - DNA, 122 bp, Homo sapiens
ccagggcgcggtgaagaggtgacggagggctggctatgggcggctggccggggtaggggacgagggctgggttccatccaagcactgttgaagcaggaaaccccaacgactctcggcgaaga

SEQ ID NO: 267275 - DNA, 122 bp, Homo sapiens
cgggcgcagtggctcacgcctgtaatcccagctctctgggaggccgaggcaggcggatcacgatgtcaggagatcaagaccatcccaacacagtgaaaccccgtctctactaaaaatacaaa

SEQ ID NO: 267276 - DNA, 122 bp, Homo sapiens
caggctagaggtcagagatgtgatcgtggatcactgccacctccgccttctggcttcaagcgattcccctgtctcagcctccccagtagctgggattacaggcatgggccatcacgcccagc

SEQ ID NO: 267277 - DNA, 122 bp, Homo sapiens
atatatgtgcccatcactcacccatctatttgcagcgtccatggagcgcctcggggaacacgcatggacaattaaacacacccacttacggcgggatgatgaggctttctgttaaccacatg

SEQ ID NO: 267278 - DNA, 122 bp, Homo sapiens
ttccatttaaaagctcctctttgttgcctcgacaagcaaggggtactcgatagcacttttcggttagattctaatagaaagaaagctttaaatttctctctcggaagcactttgtcagccag

SEQ ID NO: 267279 - DNA, 122 bp, Homo sapiens
tcttagcctccatcttggcccaactccatccccaatttgaacctaaccaagtaaatattacgtggtgttatcatttgtgagccttgcctcaaatgcataagcataaaagaatgtgtgattgg

SEQ ID NO: 267280 - DNA, 122 bp, Homo sapiens
ggtcccggctgcgcctcttgcaccaggctggggcagggattaccagccgcacgcaggctgcgggaaccccctttgtctggctttcggcggagtcggcagagttccttccttctgggctaatg

SEQ ID NO: 267281 - DNA, 122 bp, Homo sapiens
catcccacgcacatcccacgcaggagatgcaagagccaatgggcgggtctgctaagcccgcgaactctgccgcgttaaattgcctagaagctcccacccttctgactgttgccacgtagttc

SEQ ID NO: 267282 - DNA, 122 bp, Homo sapiens
aggggtgggtgctatgtggggctgggaggccctggtgcggccggtggctctgggaccgggcggcacagcctctggtgtgtccagcgtttgcctcccagggtccttggaggcaacttcacctt

SEQ ID NO: 267283 - DNA, 122 bp, Homo sapiens
atgctctacagagcatgtccctgtgccccatcctccacagcaaaagctgccaagatggaccgctcactgtctgtatggctggagctaactttttttttttttttttttttttttgagacaga

SEQ ID NO: 267284 - DNA, 122 bp, Homo sapiens
ttctgctgtggattcatcatcttggagacatctttatactgtgaatcatattacaaaaaccgaattaagaagtgtcactatcatccccagcaaaagaaggaatttctctgtgtagctaatgt

SEQ ID NO: 267285 - DNA, 122 bp, Homo sapiens
actcacaagtgggctttgtgactttgggccacagctcaacctaccttagtctcagttttccgggctagcattcgtgctatgaagtatggttgttttaattaaatatattgtaaaagtaaagc

SEQ ID NO: 267286 - DNA, 122 bp, Homo sapiens
aggggaacttggcatttatggacagatcctcatccttcttgctgtagtcaattacacgcacgttaaccgtgcagccgccctgctgtattttaggcggttgttggcactcctagttgggccct

SEQ ID NO: 267287 - DNA, 122 bp, Homo sapiens
ttcctgggacactgatgtgccctgtatcttgctggtgacagctgacaacatccccacccccgccacccaaggctggctcctgacctacatcatagggcatgagggctgcggtgatctccacc

SEQ ID NO: 267288 - DNA, 122 bp, Homo sapiens
tacttaatgcagtgagatttaatccagttgtttacatagcctgtgtctgtaggctctgtccgccagcggtgactggaacagttaccttcatcctcaggtatatttgcagtttatggaatgta

SEQ ID NO: 267289 - DNA, 122 bp, Homo sapiens
tttcacacctctcatctgacactgtggcctgtgcacgactccaagcactggggaagccttcgacatcagaatatgaatggcacctgttcttccgggggcggcaagggggatcccgatgttta

SEQ ID NO: 267290 - DNA, 122 bp, Homo sapiens
caactgcccagccagggatgtctggcactgcacagcctccctggttgaggggacaatgtgcgggaagggggtgctatagtagcagagcctgtgggctgggaagagggtggatgggggtgcaa

SEQ ID NO: 267291 - DNA, 122 bp, Homo sapiens
gcgctctcgcctccccgatccccggctcccccgcttccccgcgcgcgccgccgacttccacgcccctgcacgccccgcacggccgactccactcgcgcagcttttgaagatcccgggatctc

SEQ ID NO: 267292 - DNA, 122 bp, Homo sapiens
tcctgtggctctgtggtctggcctccgaaatggaaacaaagccactgccattgtggggaacgtccctcttccacccgtcctggggacctgcaggttttcctgggcctcacatccaggtggag

SEQ ID NO: 267293 - DNA, 122 bp, Homo sapiens
tctttacatattataactatggaattacatgtaaaagacaggtagaaaagacaagactggcgatcaggaagctctgattctttctgtggccttgagcaagtctctgaacctgtacaggccat

SEQ ID NO: 267294 - DNA, 122 bp, Homo sapiens
tcaggagcctattgcaagaggagagctaccggaggtgagcggcgctgcccagggctggtccgggtactagggccctgaaggtctgtgtgaagctgagccccacagtcgctgtgcagatgaag

SEQ ID NO: 267295 - DNA, 122 bp, Homo sapiens
gaagagctcccacaaatcaatgggaaaaacaccttggtagaaaatgcgcacggccttcgccggtgaggaaacccagcgggcagcaaaccagggcagcccaccccaacaacgctggagggaca

SEQ ID NO: 267296 - DNA, 122 bp, Homo sapiens
ccaataggttgtctaaacaaggttgcttgactcatcaacctgtttaagggccattttaggcgttttatccctttctttctgccatgtggcaagaattgaaacaaggagactccaggacacat

SEQ ID NO: 267297 - DNA, 122 bp, Homo sapiens
agccttgggcttaccagagtttgggagggggcaggcatttcactatcccactcctaaccacgtgtcctcatgcccagcagcatcagccatgtgggtcccatcgcagatagcagcccagccag

SEQ ID NO: 267298 - DNA, 122 bp, Homo sapiens
gaaagagctagtttacaaaaggattacaaaatgctgtttcgtcaataagactacagctttcgtaaacaggactcagaacagttctggttattggggtatccgaagcagtttcctttaatact

SEQ ID NO: 267299 - DNA, 122 bp, Homo sapiens
aactgcgtctggctcatttgagggtggagtgttcctccctggcctggtggctgccttgtacgtctgtccccaggagcatggaagcctcggctccccgtggaaacactggttgatagtctcag

SEQ ID NO: 267300 - DNA, 122 bp, Homo sapiens
cagagtgtctccgatggggaggctggacacagcgtccctgaaccaagggggcagtgctctcgtcacagagcagagggccgcaccgcccgtgtttgtctttcccattgcagcttctcaggccc

SEQ ID NO: 267301 - DNA, 122 bp, Homo sapiens
ccccagcgatccccggccgtgacccctgcctcgtgcacggcggctcccggcccggccgcccgctccccacacccgccccccgcggccgccgtccccgcgccccgagtacccaccggcgtggc

SEQ ID NO: 267302 - DNA, 122 bp, Homo sapiens
tgcagcagccagcaccgggtgggagaagtggccgcccaccagcagagggcgctgcaggcccggccccaacccacgcggaggccacgtgcacagctccaccatccacacccagttccctcccg

SEQ ID NO: 267303 - DNA, 122 bp, Homo sapiens
aataaaaatgtaaatgagcaactcaaatgtccgtcaacagatgaatgggcaaacaaattgcggtggagccactatggactatcacgccgacgtgaaaaggagagaagctctgattctcaccg

SEQ ID NO: 267304 - DNA, 122 bp, Homo sapiens
ggggctcaccggcccggggcgggcggggcgggcgccgctgacccctcgctggcttcagggcggccccgctccctctgctggccatggcccccccgcccgcgtgccggtccccgatgtcaccg

SEQ ID NO: 267305 - DNA, 122 bp, Homo sapiens
ccccagcccagccctctccggcccttccttaccctctctgacatgagggtggcagcagcccggccaagctgggtgtaatcgatgtggggggcctcaggtcccagcaacacaaagaggaagcg

SEQ ID NO: 267306 - DNA, 122 bp, Homo sapiens
atcccagattcaccttctgttaagtgcggacagtgaggtctgcctcataaggtgactcatcgagatggtgcatgtgaaacagcacagtgcctggcacattaagtgtgtgcaacgcacggggc

SEQ ID NO: 267307 - DNA, 122 bp, Homo sapiens
agggcagctttggatgcctcaggtcccacaggagcaaataaaccctggacttcttgatgccgtcacagcctggcagcacctgcttgtccagcagaccagccaccgctccccgattcaccatg

SEQ ID NO: 267308 - DNA, 122 bp, Homo sapiens
catcctgtttgctacctcctaaagccaaaggcactggcgggccgggccagcttctaaagtcgcgcaaggttagaaggttccggacaggaacggcgtgaggccaatggaaggaggtacttcag

SEQ ID NO: 267309 - DNA, 122 bp, Homo sapiens
cgtcgcccgtggccagctgccgcttgcacacgacgcaggcaaagcagtgcaggtggtacacgaagtcctgggcgcggcgcaccacctgcgtgggcgggatgcccagctggcacgcggcgcac

SEQ ID NO: 267310 - DNA, 122 bp, Homo sapiens
aacccaaccagggctccgaaagccagccggccgcccaaaatgagaaatcgtccaactcctcgagtgactgtgtcaaaggacaggcaaagttttggacccatcatggtgtaccagaccaagtc

SEQ ID NO: 267311 - DNA, 122 bp, Homo sapiens
caggtagaaatacacaacggggtatccttcaacagactgaagggtataaatctgaaggggcgagatcagaattggagatataaatctgggagttatgtgcttatgggtgatagccgctattt

SEQ ID NO: 267312 - DNA, 122 bp, Homo sapiens
agggttccaagccccactgttcttttccttcctggaaaagtgcagacggtgcacgttccccggaggccaccaggcagctctccagttgccctctgggtgaacgtgacccaggtcggtaactt

SEQ ID NO: 267313 - DNA, 122 bp, Homo sapiens
ggcctttagttaacatccgagtgacgaagccgggttccccagtacagtgtcttttgggtgcggtcattgtgaggaaggggatgagtgagtgtgggtgtggctggaggaggagctagatgccg

SEQ ID NO: 267314 - DNA, 122 bp, Homo sapiens
tgccccctgtggttgaaagggcgacagcgctgaaaggggtgtgaccccgaggggaggcgacgcgctcccgcgccctagtccacaggcatgcacgaccccacccagcacagggcctagggcat

SEQ ID NO: 267315 - DNA, 122 bp, Homo sapiens
gctgagatgcggagagcccgcggaaaccaaatgacttcatttgctctggcacttaagaaccgaattcacttccgtggtggtgaaataaaaggagccaagtgttttaaatagccactccccga

SEQ ID NO: 267316 - DNA, 122 bp, Homo sapiens
gcccaactccacggagcgagcggtgaccatctcggggaccccagatgccatcatccagtgcgtcaagcagatctgtgtggtcatgctggaggtaccgtctgcgcgccagggccagcccacgt

SEQ ID NO: 267317 - DNA, 122 bp, Homo sapiens
tcatggggttgttttgctgtttggggttgggccttgtttccctttcctttctccagtccacgtgtagactttgcgcttgatgaagaagcagatcggaagtaactgctccctcctcaaggttg

SEQ ID NO: 267318 - DNA, 122 bp, Homo sapiens
ggagcaaggggagtcccggacctagagcctgggcacgcgaggcggcggcggctccgcaagcgttgccgaattattcattattaaaggaatggacgtgtctcttttactaagtttttatctcc

SEQ ID NO: 267319 - DNA, 122 bp, Homo sapiens
gtcgtgatatccttaaccggctgggtggatctaaagttcagggatgagttttaaagccaacgcgtttgtggcagactccgcagtttgcatttgaggatagcgaggggggattgcttacgggg

SEQ ID NO: 267320 - DNA, 122 bp, Homo sapiens
cctagactttcacatggattcatgcagcctggagaaggcttcctatcagtgcttagggaccgggctcactctttcccgcagctgcgtggtccccctgggggatgtgcaccagtgcactggga

SEQ ID NO: 267321 - DNA, 122 bp, Homo sapiens
gagcctgggccatgtgactgagtcctgacagcaagggatgctgggaaagttagtatctaccgtttttcaatttatacagaaagatgagtcctgctttgcaaactggagattaactttaggtg

SEQ ID NO: 267322 - DNA, 122 bp, Homo sapiens
caccctcctgcgggtggacaatgagcgcttggaggccgttgtccttggttggggagcggtcgtctggatctaggctagcaaagaggctgctccgggtggggagggaatgaaaacccctgcgg

SEQ ID NO: 267323 - DNA, 122 bp, Homo sapiens
ggtgtatcatcgcttcccaaaaaaatgggacttgcccaggggaggggaatctctagcagccgaatggataataggcactgggccagctgatgacatagccttttcccaaaccccacaatcag

SEQ ID NO: 267324 - DNA, 122 bp, Homo sapiens
ttaataacgttggataaaggcagagcactgaaaataaggaaaaaagcaaaagctgttttgcgaccttggacttaatgtgtttaaagcattctccaaatgctagacatgtacgtatgttagct

SEQ ID NO: 267325 - DNA, 122 bp, Homo sapiens
ttccaagtggagccctcacagcacaggttttctcactaaaatcctcatgtgggaggtgcacgtcagtcataaagtgcttgctgttaggttggtcatattgggtcccgggtccctaacacagc

SEQ ID NO: 267326 - DNA, 122 bp, Homo sapiens
caccccggctcccctcccccacccgggcggccgcgcaggccccaggtgcagccatgttctcgctcccaccaccctcgcctccattgacagcccttgctggagagggccgggcgccgcgcttg

SEQ ID NO: 267327 - DNA, 122 bp, Homo sapiens
ggatgtggctctgagcttcggggtagtccgcgaggctgggttccgtgctgaggggcgtcgcgtctggccgtgcgctgcgggagcgcgcgggcctggcccgctgtcctggccgctgcgaggcg

SEQ ID NO: 267328 - DNA, 122 bp, Homo sapiens
cccagcaaattttatatttttaatagagatggggtttctccatgttggtcaggctgctctcgaactcccgaccttgccaaggaaagaactcttgccaaggaaaatgggattgagaaatgctg

SEQ ID NO: 267329 - DNA, 122 bp, Homo sapiens
cctctcccgctttccagggtctccctctgttgctgaggctggactgtactgctgcgatctcggctcactgcaacctccctgcctgattctcctgcctcagcctgccgagtgcctgggattgc

SEQ ID NO: 267330 - DNA, 122 bp, Homo sapiens
gctccacccccaacactcccaccaaggtcaccaatgctgacccaatgtgacaaagccatgcgtcctgtggcctcagctgccggcatctgtcccagatgtacacacagatgctgttggtgatt

SEQ ID NO: 267331 - DNA, 122 bp, Homo sapiens
acacctgttcaccctctccgggcctgggacgctggggtcccagccgcgcacatgcggagacgctgcagaaatcggagactgactgccccagactcgatcgtatcctgggactcactaaggcc

SEQ ID NO: 267332 - DNA, 122 bp, Homo sapiens
attgtagctagctccctatgcatcttagtctctgtttctctgctttgtcctcagactctacggcaaacgtactaagcttccatgaatcccttatcattacgtttaaatgaggggaaagcatc

SEQ ID NO: 267333 - DNA, 122 bp, Homo sapiens
atcacttttgacactagatgtgtgtgtgtgtgtgtgggtgggtgggggttccccatacaccgagcaatcacttctacagtggacaccagctaggtgtcctccaatccaactctgacactgtc

SEQ ID NO: 267334 - DNA, 122 bp, Homo sapiens
agtgcccagttttgctgcccccgcttcctgaagatcgcagctggagccacctgggcgcagcgtttgatgtggcacctgcagtggccaaagtgacacccaaccgtgaggacgctgcagggagt

SEQ ID NO: 267335 - DNA, 122 bp, Homo sapiens
ccggtagcttgcagcagttgcggctcctagccactaggtgtcagcctgccctcactgtggcgcgggctccccctcccgcctccgagcgaggcagctgctttcggggagagtttaggtataaa

SEQ ID NO: 267336 - DNA, 122 bp, Homo sapiens
ggcgcatgcgcaccggggtggggcgtacgtagagatgcgcgggaaggagcgccgtggaagcgctccagtctggagccctccagcgcaggcgcacagcggcgcgctgctctcctccctgcccc

SEQ ID NO: 267337 - DNA, 122 bp, Homo sapiens
attgatgcatgtatgtcatttcagatccttgctagctgtcctaaaggagcaacagaagagcgacttaatctgtctaattctctgataactcctccattctgatatatccacttttatcctac

SEQ ID NO: 267338 - DNA, 122 bp, Homo sapiens
tctcatgggactggaacataggcttgtgtcacccagagcccgctagatcagccctggcatcgcttgggaatggcaagaaatccacattcttgggccccacacaatactccattaggatggtt

SEQ ID NO: 267339 - DNA, 122 bp, Homo sapiens
gcccagccatgttttcttttctcgttacgactataatcagctgcacataaaggggcagttcgatcgattttgataggtgtccacccttaaaatcttccccagtcaggacggtgggctccagc

SEQ ID NO: 267340 - DNA, 122 bp, Homo sapiens
tgaacacactgagtcccttatataaacacacaggccctaacttgcagacccccggaaggacgccagcgtgaacattcagaaacagagaaaaacacagacaaactcacagatatttggactga

SEQ ID NO: 267341 - DNA, 122 bp, Homo sapiens
cggcccgctccgaggtaaggggccgcgcctaggggcgcgggggacccagggtgggtagtacgtgcgcgcggggtcgcaggactcggtcacctgctcgccagcgtggaggacgcgcgggggcg

SEQ ID NO: 267342 - DNA, 122 bp, Homo sapiens
aaacctgggtgacttgcagcgggggtggggtcgggcgcatttatgggccctcgccggctccggacagtaagagctgagctgatggatcgcctgccaggggagccagcacaggaggccttcag

SEQ ID NO: 267343 - DNA, 122 bp, Homo sapiens
cgacagggtctctgaggcggagcctgggtcttcgcgtaggatctgccagcctgggttccccggcaggtcagagaagctttggggcggggccaaggttggcccctgcttgggaggagccggga

SEQ ID NO: 267344 - DNA, 122 bp, Homo sapiens
gggggccatacatcatttctgatacttccctaaatgggggccgtatttgtgttttcacagcgatctgccatttcatttgcctggagcgttctcctctcactcccccacctggcttcctgact

SEQ ID NO: 267345 - DNA, 122 bp, Homo sapiens
ccccagacctgcggccagggccggggcagagaggagcccctgccgttcgtcccatcctttcgtgcccgccgtttaaggcactcaggcacggactggctttctcccgtaacagcggctttgcc

SEQ ID NO: 267346 - DNA, 122 bp, Homo sapiens
tgcctgggagatggcttccccgagccccccgccggagtcgaaggtaagtaagcacccccccggggatcccggttgtctcgccgctaccccagctaggccgcaccactgctttctcccccagg

SEQ ID NO: 267347 - DNA, 122 bp, Homo sapiens
ccctcctgctctgcccctcctactcacccagcagacttgcttagtctgggcttgggtagccgagacaggttgttttcaggcctcaaaggatttgggccacagcccagcctttctcagtgttt

SEQ ID NO: 267348 - DNA, 122 bp, Homo sapiens
ctgagagaacagcccagctccttagtggctctggtgtattgatcccgtgctgtgggcgggcgtgggtctgcggcttcctgtctgagggaatgcagtgccacggacagacttgatttgtttaa

SEQ ID NO: 267349 - DNA, 122 bp, Homo sapiens
ggacctgtccccctcggatctcccactcgggacccgggaggaagagggcaccttgggcaccggctcatccacaggtgcagaattcccagaatctccggcaaacccgctcttctgtcctgtcc

SEQ ID NO: 267350 - DNA, 122 bp, Homo sapiens
aatgttaaaagctgaaatattaacaatatttctcagattcttctggtagcctcactcttccgtcaacctgttttcacaaaagaggcagaaggtaaagtttctgatgcatttctgcacagggg

SEQ ID NO: 267351 - DNA, 122 bp, Homo sapiens
ctacctccctaaaataagggaagtgagccagaagctctgggcccagcccatgatctcaatcggggcgaatatccccgcctcctgacctcaattttcctaagctagaaaggacctttcgaccc

SEQ ID NO: 267352 - DNA, 122 bp, Homo sapiens
agtgctcaggttgggccctgacgagctgtgtggagcgtagtgagcaggttctggcggcagcgccgggtctgctgcaggtctcccgcattcaccggctgtggcacccagcgccaggccgcgca

SEQ ID NO: 267353 - DNA, 122 bp, Homo sapiens
tcgctctggcgaggaggcggccggctccctttgcgccgggaagccggagccgcgattgggcgacggtccctgagcctccagttctgcgtcggtttcaaggctcctccctcctggtgaaagac

SEQ ID NO: 267354 - DNA, 122 bp, Homo sapiens
gaagaatataccttaagtctttctctttctatgtctggtttgaggagctttctcaggaaccggttttccggtgactttcttttttcccgtccagtctttggacaaagtatggagttacaaac

SEQ ID NO: 267355 - DNA, 122 bp, Homo sapiens
gattttggttggacccctggtaaacatgggtttcagtgtagcagctttaatgtgttaccacgtgtgctaaagcatagctgttggcatgcagaacggcattaccagcagtaagtgccacttac

SEQ ID NO: 267356 - DNA, 122 bp, Homo sapiens
gaaatgctcagcctcgggaaacctgtgcgcgcgaaagctcagcctcgggaaacctgtgcgcggaaatgctcagcctcgggaaacctgtgcgcggaaatgctcagcctcgggaaacctgtgtg

SEQ ID NO: 267357 - DNA, 122 bp, Homo sapiens
gcattaccaagagctcattttcatctggctggccagcactacaaagtggctgtgtattctcgtgtaacactccttgtcacctacaccaatgtatgtgcactgcctagagaagccagactgaa

SEQ ID NO: 267358 - DNA, 122 bp, Homo sapiens
gaaagcataaagaccatgttctataaccagacagccctgcttgggctcataaagccaaaccgctgtgaactgtgggatggaaaaggtccagagtgggcctcctgcccagtcacataacctac

SEQ ID NO: 267359 - DNA, 122 bp, Homo sapiens
gcagctagcagcaagcaaagccccaaccagccaagcgcaacgccgcccccccacccccgccgcacggggtcttactctgggccttcaccctccggctgccgaccatgcgcaggtgtttgcgg

SEQ ID NO: 267360 - DNA, 122 bp, Homo sapiens
ggcgctggcgggtgtctggtggggtggaggagactgcgggcagtgcgatcctggcgctggcgggtgtttgctgtgcagctgctgtcatcacctgcgtcagaaagtggaggcagtggcggact

SEQ ID NO: 267361 - DNA, 122 bp, Homo sapiens
gtaagtgtggccaaccccttgcacagggcttggagatggaggcccctccccaggtgagaccggcctttggccccctgccccactcacacagggacaccctttgtgtttttccacatctgaga

SEQ ID NO: 267362 - DNA, 122 bp, Homo sapiens
gagtgggcaaggggatctccacagagggagactgtcccacagtggcccggggtagaacagcgcttccctccccacccagcgcctgactgctggccccgggcccatcccagggcagtgcccca

SEQ ID NO: 267363 - DNA, 122 bp, Homo sapiens
gggcagctagcaagttaagtggagccacggctgacgtgagtcaacaaaggtcacgtgaggcgtgcgggccgcgccgattggtggcgccagccgggcggggagggggggtcacggcggcggcg

SEQ ID NO: 267364 - DNA, 122 bp, Homo sapiens
tcgctcactccttcggcctctgaccgcccggggttccccggcctactgtgcggtgtgctacgcctcctcctgggaacggtgggccacgaactgtcttctgaaggccagtgttctgctccgtt

SEQ ID NO: 267365 - DNA, 122 bp, Homo sapiens
gagagccaggggcttccccaagtaggggctccacccagtcactctgaggccctgggcaggcgagtcaaaactctggcctctggcctctgtgtgaaatgggcacagcaggtacccagggcgct

SEQ ID NO: 267366 - DNA, 122 bp, Homo sapiens
acctgatccctgaggacctgacccctccaggtggaggcgggtgacctgggtggagagggccggtttccaccgttaggaaggggtggtcacacggcgtgagacgggctcgctccccggccttg

SEQ ID NO: 267367 - DNA, 122 bp, Homo sapiens
cgcaggccatgtccgacttgtcagccagacacagaaactaacttgcacctcatccggcagcgctgtgtggggcaccctccagtctgttttcggccctgaaacccgttagtcatccctgcatt

SEQ ID NO: 267368 - DNA, 122 bp, Homo sapiens
tggccaggaccaccctgcccgaagccacggctatgtcgaagctaattgtgcgatttctgccggccacgtggttttgatccaaaagcatttgaaagctgctctgaagatgcagaaaagctgag

SEQ ID NO: 267369 - DNA, 122 bp, Homo sapiens
tgccggagcgcacagacaccccagagaagcacccagagccggggaccgggaccgcagacgcgcagtccttggtctgaatgacactcatttccgtaatctagagtctggggctctggtcttgg

SEQ ID NO: 267370 - DNA, 122 bp, Homo sapiens
cacgggctgagtgtgagaccacgggagagagttccacgtacacacagcacacggccaacacgctcacacgggctgagtgtgacaccacgggacagagttccacgtacacacagcacacggcc

SEQ ID NO: 267371 - DNA, 122 bp, Homo sapiens
gtcgcgccttcctcacggctggaagcctcccaggtgacgggaggaatgatggggacggggcggggtacttggagaccttcctctgtcagatggctctgatgtttccactgttgctgtgagca

SEQ ID NO: 267372 - DNA, 122 bp, Homo sapiens
ggcggggcacccttcccctcccccgctgctctccccggggatgaagacacacacacggggcgggggggcccccagtcccagggattccactgcaagggacaaagggcccgcataatacaggt

SEQ ID NO: 267373 - DNA, 122 bp, Homo sapiens
acggatgtccatccctcccacaggcagtggagagagaaaagagagggagcgagaagtcagcgagaattgctgctgctggcagaccaggccaggccagaccacagcttgaacaactgaaggag

SEQ ID NO: 267374 - DNA, 122 bp, Homo sapiens
gatctcagaagctctcattttaggtgattttgttgcattatttagacaaagcaaatattccgtagacaggatttgactttaaagagatgagagagccagatgaccagaaatcacacatgtca

SEQ ID NO: 267375 - DNA, 122 bp, Homo sapiens
tttgtaggccactggtgttgctgaaacctctgccgccacctgcagggcaccccctgatagcgcccctaacccgccgccagctattggacccgggatggcgcccctaacaccctcccctcgcc

SEQ ID NO: 267376 - DNA, 122 bp, Homo sapiens
ttcaggctgaagtggcgtgaggaagtaaaagggcacagctggcactgaaaggtctctccccgatcctggtgctgatgaacctgacggagaagcaagaagaatgagctagccaccgtgcattt

SEQ ID NO: 267377 - DNA, 122 bp, Homo sapiens
ctcaggcccaactaaaccgcgacagcccccggtgacaggcaggaccccgccgttgcgatgcgcacagctcagaatcccggcccgactgcagtcgggagagcagccgccccctggcagccgag

SEQ ID NO: 267378 - DNA, 122 bp, Homo sapiens
ccgataacttgcagactgtggcgcaactggtcttggtagcggaggcacccgaatgctgcccgggtgaggtaagtttcctgtgcgtccccggccccttcccactagacccttctgaggggctt

SEQ ID NO: 267379 - DNA, 122 bp, Homo sapiens
gccgcccacaatcctcgggcgggcgcgcagccgagccggctcggctggctggcgcaatctcgcgcgctccttgcattgatcaaaaatgggggttgaaacagtaaacgcgaggaggagcaact

SEQ ID NO: 267380 - DNA, 122 bp, Homo sapiens
ccccatctaacagtgacacgtgggctcttccagactggagcggggcggggcacagcatcccgctgcgcggctcctcaatcccaaccaaattcggaaggcgctgggcgaccgcacccccggca

SEQ ID NO: 267381 - DNA, 122 bp, Homo sapiens
ccgccgggcttgaaggcacttgttggtaaaagacacagacgtgtcggtgtttgcctctcccggggaagggcgaaacgctctgaagttctctggcgctcttctcaggagatgattcggcctcc

SEQ ID NO: 267382 - DNA, 122 bp, Homo sapiens
ggagcccgggaattgccgagcgagctcaggtatcgctccctgagtcgtggtgtcgggcaccgtccgcctccactcccatcctggcaatgcggtggctaaatacaaggcacaaaagatacctt

SEQ ID NO: 267383 - DNA, 122 bp, Homo sapiens
tgcagcaggcagtgtctgggactttgtctccccctgctgagccaagaggtatgaatggtccgccacggggaaagggttttcacaggccaagaactgcttctttgggaaggaaaacataacca

SEQ ID NO: 267384 - DNA, 122 bp, Homo sapiens
ggggacgctgttcttcaggcaccccactccgtacctttctgtcaggtagctgatgaagtccggatgtagcagcttgaatttactggcagaggcttctggtccaaaataggcgtgcggcctag

SEQ ID NO: 267385 - DNA, 122 bp, Homo sapiens
cctccgaggagaggcagccccgcgagcagtgtgtgtacagttcgcattgccaacaacacgcgcgcgcggccgggtgcgcgcgcctgccagcgcacattcacacacacagacacacagacaca

SEQ ID NO: 267386 - DNA, 122 bp, Homo sapiens
acactggtctaatcgggtggtgctgccatcagattccagtccctggtaagcagggggctccgtggcggctgtgacaagttccattcactttggaggtggcagccggagctatttttagagca

SEQ ID NO: 267387 - DNA, 122 bp, Homo sapiens
tctcgtttttttttttttttctttaaaatggaagcggcatcgtgaaaggatgatttaactcgaagcctcctttgagggaagtgttggcttttacgttttggaagagaattggatctctctct

SEQ ID NO: 267388 - DNA, 122 bp, Homo sapiens
tcagctcgctccaaggatgcaacaccggatccgcctcggggactgggaaagttccctccacggctcccacaggcgccccgcctcctgggctcccaacggctgctttcgacgttgtgctccac

SEQ ID NO: 267389 - DNA, 122 bp, Homo sapiens
gttttggcttgctggaggcaaaggcaaagacagtcggtgaccttgccccagggctgacaacgggtgccctactgccatctagtggcaacaaggaaaaaagcctgcacctctgcccttccatc

SEQ ID NO: 267390 - DNA, 122 bp, Homo sapiens
tactaaaaatacaaaaaagaaaaaagaagaagaagaagaaaaattagccaggcgtgttggcgcatgccagtagtcccagctactcagaaggctgaagtagaagaatcaaggtggaggttgta

SEQ ID NO: 267391 - DNA, 122 bp, Homo sapiens
tgagggagggcatgtcaaatgtgtgtcatggccgagacacctccaaaaagccactgctgccgcctgagcagagcatgctgaaggctgtggtttactgacttcatcacaagccctagaggaaa

SEQ ID NO: 267392 - DNA, 122 bp, Homo sapiens
gaagatggagctaatctttcctctgctcgtggcattttgtcgcttatccagtcttctactcgtagggcataccagcagatcttggatgtgctggatgaaaatcgcaggtgattggccatccg

SEQ ID NO: 267393 - DNA, 122 bp, Homo sapiens
tggctccaatgaccaatccgaggaggcggcgcctggttgtcaggcagttttgtaggagttcgggccaattggaggcgcaggcaccgctcgacccgggcgcagcgcgcaggcggtggcgaaga

SEQ ID NO: 267394 - DNA, 122 bp, Homo sapiens
cgaggcggctggaagtcgagggcatcgccagggggccgagttgggcccgggtgtggagaacgaagccgaacgctgggctctggattctcctccagagcgctccgccggcctaagcacggccg

SEQ ID NO: 267395 - DNA, 122 bp, Homo sapiens
aagctaaatgccagctcttcagtgagcaacaattcaggtacagaagttggcacagggaggcgccagcaaagagtggctggcccactggaacagagacccagaaaccaaactagacagtgaaa

SEQ ID NO: 267396 - DNA, 122 bp, Homo sapiens
cacgtgttctcagcagggcggccacacgtgaactgtgtgtgtctctgacccttggggacacgtttgccaactgaccaaactccagtcaccagccactgccagggccagaggctgcgctcgag

SEQ ID NO: 267397 - DNA, 122 bp, Homo sapiens
ctggctcagctgtggattccccaggctgtgtgtgaggcattgattgggtgtccctgttcccgggacagggattcaaaggagtttatagggctcagggtcttccatgatcaggtcaaagcata

SEQ ID NO: 267398 - DNA, 122 bp, Homo sapiens
gcctggccccggaggtgttcccaggtacccgagcctcgcggcgttttcaagtgctggctgcgaagcttgaaaaggacccgccgctgggccgggcgttttgtgtttgccaaacaaagcatgaa

SEQ ID NO: 267399 - DNA, 122 bp, Homo sapiens
ctcagacagtgctacaaggaggacggcagctccaagagccctgactgccctgtgtgcagccgctccctgaacaagctggcgcagcccctgcccatggcccactgtgccaactcccgcctggt

SEQ ID NO: 267400 - DNA, 122 bp, Homo sapiens
tccctcaactcatcttctgcggcttatccacaggtggcagccaagagcctcctggcacagcggcaccaggcaggtgacgcctattggaccccagaggtcatcccagctccagacgtggacac

SEQ ID NO: 267401 - DNA, 122 bp, Homo sapiens
ctagcggtctccgggaaaggcgcgtcttcctcccgggataattagggcaaggaatcctgacgacgctggcgaggactggggttcccgggaggcggaagggagatcagccccagctcagccgg

SEQ ID NO: 267402 - DNA, 122 bp, Homo sapiens
caacatggtcaaaccccgtctctactaaaaatacaaaaacttgccagccgtaatggcagacgcctatgcctgtgatcccagctactcgagagtctaaggcaggagaatcgcttgagcccagg

SEQ ID NO: 267403 - DNA, 122 bp, Homo sapiens
ctgagcatttgtgaagattctggggtcaaggttgggttaaacttttgtggtgggtccatccgcggtctagtcaacagtactaagctcttcctgcatctttgggacccagcgggaagtgatgc

SEQ ID NO: 267404 - DNA, 122 bp, Homo sapiens
atattcagagatttctataattatttctataatcagaaatgtgccacatcacaaaatccacgctacttttcacactgatccatctcactttgcataacatgtagcaagattgactcctcctt

SEQ ID NO: 267405 - DNA, 122 bp, Homo sapiens
tttcccatctttttttctcagtgaaacaaggcccagtcaccagcataacaatccagtgagcgacctccggacactttgttaaattgagtgaactagtcagtaacattctagactgcaattaa

SEQ ID NO: 267406 - DNA, 122 bp, Homo sapiens
caaaattcaaaatcatccataatgaaccacccttatctaatgtgtatgggtgtgtgctcacgaatgtggaatgtacccctatgggcgcacacatctatgcgtgtatatatgacatacacaca

SEQ ID NO: 267407 - DNA, 122 bp, Homo sapiens
actggtcctgctttgtctgtgggcttctataggttgttgtgacttgaacagatctgtttacgctacatttgctatggcaacgtttatctgatatggacaaaagattcttgaattaataacac

SEQ ID NO: 267408 - DNA, 122 bp, Homo sapiens
acccgtgacagagcagatgatgctccaattccagggagtagggggagctcagccctctcacgcttctcacgggtgcgagctccctgccaggtgaggtatatcagggctttccctcctggccg

SEQ ID NO: 267409 - DNA, 122 bp, Homo sapiens
gggtaaaatggctaaaggatgtctgtttggaggcaaggaaggtcgcccagaggtcaggcacgctccccttggcggacacagctgggcttctcagagactcctaaatcctgcctcgcatctca

SEQ ID NO: 267410 - DNA, 122 bp, Homo sapiens
ctttgtgagtagtaacagcattcttctaatacttagaccaaaatcacaggagttattccacggacctctcccattcaattaatggttaataaatccatttaattatatttatttaaccttcc

SEQ ID NO: 267411 - DNA, 122 bp, Homo sapiens
gaccccatgtggcctcttcctgcagagacctccccctgctcccttctcagccaaggaccacgcagtggggacaccagcagccttgtccagtgctgtttattgagtccatcatcagaggcagg

SEQ ID NO: 267412 - DNA, 122 bp, Homo sapiens
ccccgttacgaaagtcacacgggtgaagccaagtgcaactatgcagagccgagagagtcccggcaagcccagcgcagccccctccaggacagccgggtaccttgaacctggtgcgctggccg

SEQ ID NO: 267413 - DNA, 122 bp, Homo sapiens
cggtgacgagggaggcgccgagttccccggaggccagggccagagctggcgaggctggggcgcacctgtcttccggccccgctgcggcagtcactccgcaggagcaggcggggtgagcgagg

SEQ ID NO: 267414 - DNA, 122 bp, Homo sapiens
caaagaactaatggatcttcctctcgatttccgggagcatggagtgagtgtgggtgggcgcgcggggggagctggccccacgctcagaaggaaagccaggtcgctaaagctgccgagagaga

SEQ ID NO: 267415 - DNA, 122 bp, Homo sapiens
gcggggcagagagtgggggctggggcttccatgaggggccgtctcaccaagccctaggctcgggcaccagaatcacactctgtactgggctccctgttttgaggcactccagggcttcccag

SEQ ID NO: 267416 - DNA, 122 bp, Homo sapiens
tgcccaccagggcccttgcctcccggcccccactgtctcaacaccctggttgtcaggcaccggctcttctgcaccccctcgggaagctgtcccttgtccgtattttgggtcaggaaccactg

SEQ ID NO: 267417 - DNA, 122 bp, Homo sapiens
aagctctaatctcagatttgaagaggtatttttctcttctgtgtgtcctacaaccaaatgcgcagtgcctctgggattggttgactcacttttgggtcctacctcctgatcccccagcactc

SEQ ID NO: 267418 - DNA, 122 bp, Homo sapiens
cctagtgggactagactgatataattgctctctgtattttttaaccccaatgactgcattcgctgcaatgtctgttcctgtcgtggagctgggctgtggctttctcacagacattgcctgtc

SEQ ID NO: 267419 - DNA, 122 bp, Homo sapiens
atgtaccttagtagcctcaacctgtaccggagaaaacgcaggctgcgcggcggcttagagcggtcaagtggaaccccgcctcgacctctctgattgggtaatgcgcacaagaaaatcaagag

SEQ ID NO: 267420 - DNA, 122 bp, Homo sapiens
ccatggacccagcacacagctgggaactcgaggcacacctaagccttcccttgtgctgtgcggagtccacacttccttccccactggagtctcaaaacctcccctcactcaacagggtggtg

SEQ ID NO: 267421 - DNA, 122 bp, Homo sapiens
aaagctaccccggagctctgcgccgccggtcggggctcgggaaagttagcgggcagagagcgagaggagggggagggagggagcggagggggaggcgcgctcgcccgctgctgggagccggc

SEQ ID NO: 267422 - DNA, 122 bp, Homo sapiens
ttttcttagatgtttaatacagcaacagcatgccaccatgaatcagcaatatcagatgcccgcccactttgataggttggtatgttctcctaaccttaaaacagtggctctcaaactgtgac

SEQ ID NO: 267423 - DNA, 122 bp, Homo sapiens
attgcgatcacatcgttgtgattacacaaaagcctctgtcatgtaatagggctcagtaaacgtcaatttccatagcatttcgagcctggatactgaaatatggggcaaaaagcaggaacatg

SEQ ID NO: 267424 - DNA, 122 bp, Homo sapiens
aaccgagagacagacggaagaaactgccaatggaaggacgcaaagcgtcaactttgtgttcgcccgccactctcggccaatgtgcgctcgtgtctccggagtcccgccttccgtgtcgggcg

SEQ ID NO: 267425 - DNA, 122 bp, Homo sapiens
cgttctcgccatgctcacagcccgccacgacccacggtcccgtttcccttttacggagcgcggcgctgacgccgcaaggccacttctatcgctcccgaccacggtctgtttccccctcgccc

SEQ ID NO: 267426 - DNA, 122 bp, Homo sapiens
ggcatcaggtgcagctgcatccggatctcctgccttggagcgtactccttgtctctaagtcgggaggcaggacgtggtcaggccggggctgtggaggtgcgctgtgtcccctgaggcctaga

SEQ ID NO: 267427 - DNA, 122 bp, Homo sapiens
gagctgccaatcactgtgtccccagttagcacagtggttctcagctcagccaaaaccctgcggctggtagggggcctgtggggctgggggctgatgtggctgcggtctccagggcgggtcgg

SEQ ID NO: 267428 - DNA, 122 bp, Homo sapiens
ccggccttggcggctgcttgcctttctccgtactgtccctgtgaaggccaagatctgtaacgctgacagtccccagacatacgatgggagagttgcagtaagtgctctttaaatcccctttc

SEQ ID NO: 267429 - DNA, 122 bp, Homo sapiens
ctcgcggcatcgggacccagcttatgaccacttccgggacacagccagtcggggaggggacggggcgggagcggcgagggaagagagggggaggcctgcgcggaggagcaccgcttcctccc

SEQ ID NO: 267430 - DNA, 122 bp, Homo sapiens
gagcactctacttacatatttgtatggccatttctatttgaaaagcccttgttctccatccgtctaagttccagctccccctagagtcctcccaaatccactccagtcctaagtgatatttc

SEQ ID NO: 267431 - DNA, 122 bp, Homo sapiens
cagggttaggaagcgggttggggggcgagcagagctaccactgaggcctggagtaaaggtcggagggtctgggtggaggagtcaggtagccctggggaccaggggcgaggtggccctgcccc

SEQ ID NO: 267432 - DNA, 122 bp, Homo sapiens
ccggtaggactgactgcctctgcatcggcctgtggagcttaagtagttaggatttgcagtcggggttgggagacctggattccgggtctggtccctgctagttacttgctgatgcccctgag

SEQ ID NO: 267433 - DNA, 122 bp, Homo sapiens
gaggaaggcccagcagattaaaggcctctgttcaacaaatatttgctcgcccactccaggcggagtaacagtttcttacatgctgcatgcccacagtgacacttagagacttcaggaagctt

SEQ ID NO: 267434 - DNA, 122 bp, Homo sapiens
actcgatggcagcccttgacaaacagcctcaatcaatcaggccggggaaaagcaactcagcgcacacaccagaaaattgctcaggtttttaaatagcagtcgccaaggctggctgtgagctc

SEQ ID NO: 267435 - DNA, 122 bp, Homo sapiens
cctgggcctttcctgcctctctgcctctgttcaaggtgtcctctagaacatcctccctggcgcctcagaagattccggttaccactgaaggctccttcttcccactgcaccttgtcctctgc

SEQ ID NO: 267436 - DNA, 122 bp, Homo sapiens
tgggcgtggaggtgggctcccggggtgggtgggctggtgggtgtccaaggccctgagccccgactggctggccagcgctgggagggggtcggtgcccgtgggggttgagagcatgggggccc

SEQ ID NO: 267437 - DNA, 122 bp, Homo sapiens
gcgcagcggccggagtcctgctcgcacggggagccgtggcagttgcagcggaagctgcagcggcgcccccaccagcccggcttgcacacgcaggcgcccgtggcctgctcgcagcgcgccgc

SEQ ID NO: 267438 - DNA, 122 bp, Homo sapiens
tgtttcctgggatggggaggggtctcctgtgctggagcaactgtggcttcccattcccgccgtcctctcccctaactccgatcttccctcctccaaccgcgtccgcggaatgggggtggggc

SEQ ID NO: 267439 - DNA, 122 bp, Homo sapiens
ttatatagtagttattaagaaataggaggtgaatataaccatctgaagccaccacagggacgtcattatttttaatggtagtataactgaatggtcaggcacaggggcacagaagtcagaaa

SEQ ID NO: 267440 - DNA, 122 bp, Homo sapiens
ggctctcggggactcgggaagagtttcctccaggcgccagaaatgcgtgtgggtaggaggcgacccaggtcagggaaccgtgtcccgctcgcactcccggtgagggctgcatggaggcgccg

SEQ ID NO: 267441 - DNA, 122 bp, Homo sapiens
tacagggacctaggcaaaaggtgaagggaagagctggtcttgcttaaagggtaggcacatcgcagcaggacaagtatcatttgcagtaacagggtaagaatctatttcagatcatgctattt

SEQ ID NO: 267442 - DNA, 122 bp, Homo sapiens
ataataagtgttgccttgagggtaaccactgttatctggtggataattagcgttgcctggcggataagcactgttacccggtggataataagtgttgccttgtgggtaaccagtgttaaccg

SEQ ID NO: 267443 - DNA, 122 bp, Homo sapiens
gcgagggagcagaagcccacggggcaacagcgtgcgccgccgacctcaggctctagctcccggagcgtgttttcaaatagcctcgtcctcacgcggccgcgtctccttccgccgcccggaaa

SEQ ID NO: 267444 - DNA, 122 bp, Homo sapiens
gttgtggcagctgaaggcggacgttgtttcctaaccataggtggaacgaggagacgggagcgagtgggctctccaccagcacatcactatgcatctgttccaggaaagaagaaaagcgagcg

SEQ ID NO: 267445 - DNA, 122 bp, Homo sapiens
tcttcttccctcccagcttggccagttcagcatcagcatcccgcaccccctcggtaatcccgtactccctctagcggcgggccactgcagcgtggccaccgcccccacccccatcccccatc

SEQ ID NO: 267446 - DNA, 122 bp, Homo sapiens
gcagacacatcatgctggcaggtagctcacagagatgagaatgcacagttaatctaaacacgctgttgcctggaagaccaagagggagagtcatagaaaataaacacaggcagccacttgag

SEQ ID NO: 267447 - DNA, 122 bp, Homo sapiens
gctctgagtgcgggccgccaagcccacgcccacctggaactctagctggcccgcaagcgacgcacgcagccgcagttgccacccgtgcctctgccaccacacctaccacaagctgagggaac

SEQ ID NO: 267448 - DNA, 122 bp, Homo sapiens
agtcgccagcagcgagagtttaacctctgtgggcgcagagggttgcggggattcagcgcccgggaccgtggatctgtgcagggagtcataggtgtgtgtgacatcagtggtggaacattttg

SEQ ID NO: 267449 - DNA, 122 bp, Homo sapiens
aaaacaaggccactgcataattgtaactgaacatagacaaagcacgaacattgtccaaatcgcaacaatgaccaggtaccaccctattcttgccaatatgagtgactgctgcttctttacca

SEQ ID NO: 267450 - DNA, 122 bp, Homo sapiens
cccctgtagaagaagttgctcagtaagataactgcctgcttgctctatttccagcacagacgctgcttggcaaaagggcttcctttccactccttgtcactgttaagaacaaagagaaaaac

SEQ ID NO: 267451 - DNA, 122 bp, Homo sapiens
gagttagcgtgaagaccccagcttgaccagagatggtgacacctggggatttatggtcagcgacctgagtgaagcaacatcctccttgccactggctggtctgttcattttaacatgaacat

SEQ ID NO: 267452 - DNA, 122 bp, Homo sapiens
ctcactgactctccaaggacttgcttgtaacttctcccacatttgaaccttgtatattgtcgtatttctacttggcatcaaataaataattatagacttaactctacgcttacacccaaact

SEQ ID NO: 267453 - DNA, 122 bp, Homo sapiens
cactccctggccctgccggcgctctcctctcccacctctcgctggggtctatcctgtgttcgtgggtccctccgaacatcaaccccagggggggtcgtgtcccgctccctcctccccgccga

SEQ ID NO: 267454 - DNA, 122 bp, Homo sapiens
aaactgaagctggttatggctgacaaggagctgtatcgagcctgcgccgtggaggtgaagcggcagatctggcaagacaaccaggccctcttcggggacgaggtttccccactcctgaagca

SEQ ID NO: 267455 - DNA, 122 bp, Homo sapiens
gatgggcgcaaagctgcttcaggacgttcgccaggaccttgcagatgtcgtccaggtgtgcgaaggaaagaagaagcagaccaactacttgcgcacgctgatcaacgagctagtgaaaggtg

SEQ ID NO: 267456 - DNA, 122 bp, Homo sapiens
tgcccctgtggaatgacaccatgggaaggcagaccagactctgcgcttcctatgggcagccgacttgcagcagaagaaggtgctgagctacctttgtccagttcttcatcacacactcaatc

SEQ ID NO: 267457 - DNA, 122 bp, Homo sapiens
ggtatgttctataaggctggtaccaaaagcagacaaaacaatcacaaaaaaactacagatcgctattcatgaatatagatgtgaaaatcttcaagaaaatactagcaaacaacccagcaatg

SEQ ID NO: 267458 - DNA, 122 bp, Homo sapiens
ctgccggatggacaagcctgtgcctcgctgccttatgtaaccagtttatgcaagggcagccggcccgcttacataaggggaggccgggccagcgcccagctggggagggggaggctcttaaa

SEQ ID NO: 267459 - DNA, 122 bp, Homo sapiens
cctcttcagccatagaaccaaggttgtcatcggcggaggggtcctccatgtccagctcttcggcttgagtgatccagtccaggtagccccgcaggtcttcctccatctgctgcttctcccgc

SEQ ID NO: 267460 - DNA, 122 bp, Homo sapiens
aggtaaatgacagttttgtgtatatatatatttgtgtatatatagttgtatatatgtatacggcagtagacacaaagggagagcaatcacagatcagtggttttgtgtttgttttgttgtgt

SEQ ID NO: 267461 - DNA, 122 bp, Homo sapiens
ccacctgcttaggcccctgcatctcgggagctttctgaggctcgtgacctggggcacggtcgtcccggaagttcagcctttccctccgtacaacggagccatcagacgggacacctcataca

SEQ ID NO: 267462 - DNA, 122 bp, Homo sapiens
agcgtgagtcaccaggaggcggaggaggtggaggaaaaggagaaggaggagtgcactggccgggatcggtgcagcgctcacactcactcacagtcactctctctgagcgcgtctcgctcgct

SEQ ID NO: 267463 - DNA, 122 bp, Homo sapiens
gcggggcgctgtcctccccaaaacgcagaggacaggcagcaccagttgcagaaggtaccgcgggcccatttcccactcgccaccagagttcagttcggcagaattctaaccccacttccaag

SEQ ID NO: 267464 - DNA, 122 bp, Homo sapiens
ttagtggacaggctgcatcagaatcaccaggaaattttctagaattcttggttctattagcgattctgatataatagaataacagtggagattaagaatgcagaaattgtttaagtttctca

SEQ ID NO: 267465 - DNA, 122 bp, Homo sapiens
agataaggttagagacccctgatattcaattctcatcttgtttcgcagcattttgtgtatcgccaccacgtctgtaaccggagcgcctagtacagtatctgaccctcaataagagctcggta

SEQ ID NO: 267466 - DNA, 122 bp, Homo sapiens
aaggcggcagcaggctggaagaggagcggcgccaagcgtctgttgcgggacacaaagccccggacctgaagtggaagcttgcccaccagcttcaccaccacgcacacccggatttcctagac

SEQ ID NO: 267467 - DNA, 122 bp, Homo sapiens
ggcagcctacagtctacacagcagcgagcgctctgctgcctggctcaggctctcatctcacgaggacgtttccccatcttagtgtcctgttaaataatcttgtgtagagtccgaagcaaagg

SEQ ID NO: 267468 - DNA, 122 bp, Homo sapiens
cagcctgggagtcctcgtggccctgccggtcccacgtctgcaagggattcccaaagtgaccggtgagtggcacctgcagtctgagtggctgcatcctgtcttgcaggctcgtggagcatagc

SEQ ID NO: 267469 - DNA, 122 bp, Homo sapiens
gcctggccttgaagtgaagggggaggtttaacaatgcagtgggaaccccaaagtttgtctcggccgtgctgctcacattccaaacaatgcaaaaggttgaggaaaacctcagcagttgaaac

SEQ ID NO: 267470 - DNA, 122 bp, Homo sapiens
cggacgccccccgttcaagcagcagctcagccacctcgaagtggccacagttgagggcatcgtggaggggggtgatgccttcgcagccctggccacctgggtcgtccactgcggccccgtgg

SEQ ID NO: 267471 - DNA, 122 bp, Homo sapiens
gttcaagatgggattcgggtggggacacgaccaaattgtaccaagctctgacggtgctgccggtctcttccaggacctctacctggagcgcctgctgctgtgtgtgcaggctctggtgtctg

SEQ ID NO: 267472 - DNA, 122 bp, Homo sapiens
ggtgacctcgtggtggctctggctgccaaagacggtggcccagaggggctcggcctccagcgccggcaggagggaccggccagtgaggtggatggtcttcgagccaaagatggcgtagctgg

SEQ ID NO: 267473 - DNA, 122 bp, Homo sapiens
attaagcggaagggaaaggagaacaggaccgggatcttttgcatcccgtctggatgatcacgcttgggggattgattcatggatggattgattcataggatcgtttatgtattcaggggtgg

SEQ ID NO: 267474 - DNA, 122 bp, Homo sapiens
gcatgcacagggaggggatttatgagttctgacccaaagtcggggcagtgaatgcgacctcgtacacagagattcattagaaagtctccaatgtcaacatatggcatttttttactcagtac

SEQ ID NO: 267475 - DNA, 122 bp, Homo sapiens
cgcggtcccagcccggaccccgcccaccccacggacccagcccggaccccgcccaccccacggacccagcccggaccccgcccaccctgcggtcccctcctggactccgcccaccccacgga

SEQ ID NO: 267476 - DNA, 122 bp, Homo sapiens
acagtatcaaacgcttatttgctacttaacatttcatgagtgtttcaggattgtctgctgcgctgttggacttggcttcattcagttcaacagatattctcattctagaccccaggttgaag

SEQ ID NO: 267477 - DNA, 122 bp, Homo sapiens
ctgatgccttactgggggatttagtgccactgaagcctgcgtcagcagcccgagcggggccggcatctgctccccgccgtctgctccctctccactctcttctcaaatggctgacttctggt

SEQ ID NO: 267478 - DNA, 122 bp, Homo sapiens
ggtgagacaaagacagacgtggccagggggacagcacacgtgaggtgaggccacgtggtgcgagctccagggctggtgaggcagctggtttgcgcaggcaccccagccacgaggtggcgccc

SEQ ID NO: 267479 - DNA, 122 bp, Homo sapiens
gtctgtactccagctcactatagagggggaacccagtaagcttgacctccggggctcaggcgcctgagaacactgggctgcaggtggaccgctcccttctggccttgctggcgagaaagccc

SEQ ID NO: 267480 - DNA, 122 bp, Homo sapiens
catggcttaccccttactcctctgcctcctgcttgctcagctgggattgggagctgttggcgccagccgcgacccccaaggacggccggattcccctcgagagaggaccccgaaggggaagc

SEQ ID NO: 267481 - DNA, 122 bp, Homo sapiens
gggggacagattacctgaagtcagaagttcaagaccagcctgggcaacatagggagactccgtctctacaaaaaaatgttttaattagctgggcatggtggtgctcgcctgtattcccagct

SEQ ID NO: 267482 - DNA, 122 bp, Homo sapiens
tatcccatatcattagccattagggaaatgcaaatcaaaactacaatgaaggcccaggcgcggtggctcacgcctgtaatcccagcactttgggagggtgaggtgggtggatcacttgaggt

SEQ ID NO: 267483 - DNA, 122 bp, Homo sapiens
ggcgtaggaccctccgagccacgtgaggtatataatctcctgatgtgctgttttttaagccggtcggaaaagcccagtattctggtgggagtgacccgattttccaggtgagtccgtcaccc

SEQ ID NO: 267484 - DNA, 122 bp, Homo sapiens
tgccaaagtgatcttagaatggaagtcagataatgtcactccgaagtcttagtaacatcccgtctcccctggaggaggcaaagtcactgtggtggactgtgaggccctgcgaccggcccctc

SEQ ID NO: 267485 - DNA, 122 bp, Homo sapiens
cccgtgattacagacacgcgtcgccacgcctgactggttttcgtacttttttggtggagacggggtttcgctgtgttggccgggctggtctccagctcctaaccgcgagtgatctgccagcc

SEQ ID NO: 267486 - DNA, 122 bp, Homo sapiens
caccacgattgcgcgacctccctttccctggggccttttgtgccccgagttccgcccacccgcaccctctgcgcagagcgccctccccacgccagtcgaccccacaccccacactccccacg

SEQ ID NO: 267487 - DNA, 122 bp, Homo sapiens
tcagaccttatggggtctctggggacacagaaagaaatcagatgtagtccctgccctgagcgcctcagtctgaggggagacagagcatgcatagaccaggctgatgcagagtgactcacact

SEQ ID NO: 267488 - DNA, 122 bp, Homo sapiens
tctttaattgtgaggctgcatgagccataatgcatttaaaaagatcctctcaagcacacacggcttccttgtaaaaggtgatatcctcaggcacctctaatcaggcttacagcagcattcca

SEQ ID NO: 267489 - DNA, 122 bp, Homo sapiens
gcgagtagaatgtgcagagagggctaaaccttgagtgagaagatggtgaggcagtgaaggcggctctaatactgctactgctacttgtagtagtgcagctagtactgctagtgaacagttac

SEQ ID NO: 267490 - DNA, 122 bp, Homo sapiens
aagtggaacccaaggccatgccaagaaggcctggtagacaggagcatgtggaggtattgtcggctaagctaggtccacacacctggggcgctaaccaactctctcgctttgaagaagtcact

SEQ ID NO: 267491 - DNA, 122 bp, Homo sapiens
cgggaaggtccctgagggaaggatctggcgaaacatcgctgcccagccgggtggagcaggcgtccactgctggtaggccctgccgaggccgggggctgcagctctgggtgtccctgtggacg

SEQ ID NO: 267492 - DNA, 122 bp, Homo sapiens
atggcaaagtaaaaagctggagtcagtacacagtgttggggtgggggcagcgtttgggggcgacgagttttgtgcaccgcgctggagtaccctgcacataaggtccgctcatgggcttctca

SEQ ID NO: 267493 - DNA, 122 bp, Homo sapiens
ctgctgctggttggctgctcctgctggtgactggcgtcccacaggaggcctggggcctggcgatgatgcttgccggagcctgagggcccgtcccctgcggggctggggcccaggcccctctc

SEQ ID NO: 267494 - DNA, 122 bp, Homo sapiens
cataaagctaaaggggatcagtgaccagcagctccccagtggcgtgtgcctggcaggacacgggcctgcacgcactgtgcctcagtgttagtcgtggtcccacccagccacagcccagtgag

SEQ ID NO: 267495 - DNA, 122 bp, Homo sapiens
tcggaggcgagctgccacccacccacggagtcggacccccgggcagtaactgggggagggcggcagtgtcccgctggttgccgttccccgccccccgctgggaggctccatggggaggagag

SEQ ID NO: 267496 - DNA, 122 bp, Homo sapiens
aggggactagggacaggagcctaccctgtgcggctctgaggagtggctgtgagcactgcacgcaggactgagaaagcccgggataagcccggagtgcagggaaacccgcagccccctgggca

SEQ ID NO: 267497 - DNA, 122 bp, Homo sapiens
ttcttatattacagacattcctctggctcccggcatttccaagtggcaaatggcacttctcggcactctctactgaagctcatcattgtgttttattcatcaccacacatacatgtgcaagg

SEQ ID NO: 267498 - DNA, 122 bp, Homo sapiens
gcggtgggaaggaggaggggttgggggagggcggcggaggtgttgggtccggccggctcacgagggagctgcagaagagctggctcagaccttaatcagagctgtcgccggctccttgcagc

SEQ ID NO: 267499 - DNA, 122 bp, Homo sapiens
cccctcgccactgctgcacaaagacagcgcgtccctggaggtggtgaagaaggaccacgtcgccctgcaggtgccccgtggcaaggaggacagcaccctgcagctcctccgggaggagaatc

SEQ ID NO: 267500 - DNA, 122 bp, Homo sapiens
acggcctcctgcagcctcaccagctactcacattgcacacgtgggcgggaagtggttaagcggcctcagtccccacaggccccagccatgctctgggggcacctttggctctgtggtcagtt

SEQ ID NO: 267501 - DNA, 122 bp, Homo sapiens
ctgtgatggacggggcacccagtgggccagaatcagacggagaacagctataagctgccacgccgactgctgtgggagctcctgggcctggaggagcctccctgggacacggtgcctgcagg

SEQ ID NO: 267502 - DNA, 122 bp, Homo sapiens
atcaaatatttatgggaaacagtccagtccattcctgaactcgggttcagaaaaggatagcgacctgtccaaaatcacacaggttagcggcagacttgatcccgagtctcctaactggcaac

SEQ ID NO: 267503 - DNA, 122 bp, Homo sapiens
tgctatgaaaaacagagcccacattcctgggagaggttgctggcaccacaggaagcaatgcgaactttattctcagaactgtgatagtgtgttttgacctacttggtagcttcagctcaagt

SEQ ID NO: 267504 - DNA, 122 bp, Homo sapiens
cttccttctccaggggcaacacaagcacaaccgccgcacatttacgaatctacacaactgcgcatcggagcgaatgaggtcagggcccagaaaggtggggcaggaacgatcccagccttcag

SEQ ID NO: 267505 - DNA, 122 bp, Homo sapiens
agcttctctggccggcgccagccgggctcccagggctcccagcgctcccgcgtctgcccgcgtccgcccgcccctcgctccgggctccctggcgcctcacccggcaagtcgggccggaagtc

SEQ ID NO: 267506 - DNA, 122 bp, Homo sapiens
ggcgctcctcacatcccagacggggtggtggccgggcagaggcactcctcagttcgcagacggggtggcagccgggcagaggcgctcctcacctcctaaacggggtggcggccgggcggagg

SEQ ID NO: 267507 - DNA, 122 bp, Homo sapiens
aggcagggggcagtggtgtggtcaccttaataatgcttcgtggccgggtgcggtggctcacgcctgtaatcccagcactttgggaggctaaggctggtggatcgcttgaggtcaggagtttg

SEQ ID NO: 267508 - DNA, 122 bp, Homo sapiens
cctatttacagaagcacaaactgagacacagagagctcagggcctcgcccagcatggggccgtgcggcacggagctcagggcctcgcccagtgtggggcagtgcggcacagagcgggcgtct

SEQ ID NO: 267509 - DNA, 122 bp, Homo sapiens
gagaaagcatttttgcatgattgtaacatacatgtatatacactgaattttcctggatgccggtatcatgcaaatccagaagaaattgtgcttgtttgttcagatagctactgtttcagaaa

SEQ ID NO: 267510 - DNA, 122 bp, Homo sapiens
tcagtagggatgtgtgcctggctgtgtacgtgggtgtgcagtgcacgtgagagcacgtggcggcttctgggggccatgtttggggagggaggtgtgccagcagcctggagagcctcagtccc

SEQ ID NO: 267511 - DNA, 122 bp, Homo sapiens
agccgagacataacaactgacgtcgcgatgaggcggggccggggcggggcctgcagggtgcgcccgcaggggccgagggcggggaattcggggagccgcggggctaccggactaccgaacga

SEQ ID NO: 267512 - DNA, 122 bp, Homo sapiens
tccccagcccccaaaggacttatctgctctctctctagtggcttcttctattcaattttccggggccgtgcgggagtcggggtggacgtgctctctctgcccgggggtcccgaagcgagagg

SEQ ID NO: 267513 - DNA, 122 bp, Homo sapiens
atgatccaaaaatggtagccactcacccttcacaaactgaagtccatggaccacggaagtcgagaattaatgtacacctgtatcatgtgtaggaaaccagaaatgtgttccttatttcttgt

SEQ ID NO: 267514 - DNA, 122 bp, Homo sapiens
tcacagcccctcggagctccgggccccacaggagaaagcgccagcgctgcctgggaaactcgaggccgtcaaacgcagcccggcccacaggtgtgatgccccaaagccagccgctcgttaaa

SEQ ID NO: 267515 - DNA, 122 bp, Homo sapiens
cacgtccacagctcgggtgtcttctgcagcacacaggcctcactgacagggagcacatgacggccccaagcaccaaggtctgcctttgcacatccccgcctgttcgggagctcttccttctg

SEQ ID NO: 267516 - DNA, 122 bp, Homo sapiens
cctcccagagtgctgggattacagatgtgagccactgcacctgacctatttattttgagacggatttgtgagactggctaatttttgtgtttttggtagaggtggagtttcgccaagttgcc

SEQ ID NO: 267517 - DNA, 122 bp, Homo sapiens
gcgctgaggggcgccctggcaggatcttgctgaggagctccctggaggtccgtgctgaggcgacgcggcgaccgttctgcctggagactgcggcagcgctccgactgcccccgccgctgccg

SEQ ID NO: 267518 - DNA, 122 bp, Homo sapiens
aacatcagcatctgggagagtttgtggtttcattcccagtccctgcctctctccaccccacggcacctctgtgaccctttgtttcccgctgatgagcaaacaggagcttgagcatatccacc

SEQ ID NO: 267519 - DNA, 122 bp, Homo sapiens
gaggtgcctctggctgcacctgggagctcacagtgactgggtttcacctgcatgaagtgacgtggtgtttagctgatggaggcacaggatgtgggggctgggtgtgctcctgcgtgttgggg

SEQ ID NO: 267520 - DNA, 122 bp, Homo sapiens
acggaacgccggtaggggagtagttgcttgtctcttgtttattcttctcctcttttccagcggcccagataggctgaaggcaaaactctcagcaagggggaagcgaccatcctgcgtggacc

SEQ ID NO: 267521 - DNA, 122 bp, Homo sapiens
tacccaggtagatgtcttctgggaaccaaagaggctgtcagctttaagggtccacctgcccggacctgtttaagagaagcaagtatgtgtttcttcattggttctccctaagcccctcctct

SEQ ID NO: 267522 - DNA, 122 bp, Homo sapiens
gacttcaaagtgagaccaggaacaccatcttcctggtcgtgaggagcaggttttgctgggcggtgaggggccctggcccttagacacgcagtaaggcggactcagctgccctttctctcaga

SEQ ID NO: 267523 - DNA, 122 bp, Homo sapiens
tttccggcagccggccgcgccgcgtttccgagaaaggaagctgtcactgtgcgtcttctgcgcaggcgcccgagccctcatgggaggtgtagtccaagtttgtgggaaatgtagttctgaga

SEQ ID NO: 267524 - DNA, 122 bp, Homo sapiens
ataacaggcgaaatgtcaagaccaatgttgatataaacccccaaggaaaacaaacatctccgtaccttctccgccgcctccccacctcaccctgctcggctagtttaaacagatccagcggt

SEQ ID NO: 267525 - DNA, 122 bp, Homo sapiens
gagtgagaaattgcagagctgtcaagacagacatggctgatgctctggaactagaaagatcgccaagggaatcaaagggtaacacctgctcgtctggtcaagccaatggatgagatgacaaa

SEQ ID NO: 267526 - DNA, 122 bp, Homo sapiens
gtggcctctcttcatagcatgacccctagctcggcagcggctgggctgagagaccggagacgggcctccctgatgaggggaagggtggctctgaggggccggtcctggctgtgtcctactgt

SEQ ID NO: 267527 - DNA, 122 bp, Homo sapiens
cagtctgggctctggatgctgaaattatcctgtgatgattcatcatctttaacagaaagccgaggttacagagcccagagtgatttttgacgttccacaatattccacgaacattttctgat

SEQ ID NO: 267528 - DNA, 122 bp, Homo sapiens
agtacagcgtgactgagaattcatataaaccttccaaaaatcttctctcagaaaatgaaccggatctctcctgggcctcatacacctcacagataacaaatcttcatccaaaaaaacgttta

SEQ ID NO: 267529 - DNA, 122 bp, Homo sapiens
agcctctcatgaggtcaggctgtctgcggggctgcagttctcccagggcttctcagctgtcgggggagctcctccagtctcaccttctgtcggcaggaggcttcagtccatcctgctccact

SEQ ID NO: 267530 - DNA, 122 bp, Homo sapiens
agaggttggcaaacttcagcccacaggccaggcctggccacctccagagcattctaacgacgaacgctttttacgctttggggcaggacagggagatgacagggttttgactggaaaaccag

SEQ ID NO: 267531 - DNA, 122 bp, Homo sapiens
ttctgagtttgttttgcggccaggtgagcgtatacataaatctacaacatgcagatgctgcgacgtgaccccgaaggggtaggcacggtttggggcccagttcgcccacggggcacagaggg

SEQ ID NO: 267532 - DNA, 122 bp, Homo sapiens
tgctctccagagcttggctggtcgagataaatagcctggcactctcaagactaagaagtccgaaaatgctggagtctctcagacacctatgttttgggggtagatgttgaaatttggaaata

SEQ ID NO: 267533 - DNA, 122 bp, Homo sapiens
caggggagccaggcggatactcagccgctcgcggtagaagggcgcgcaaagctgcggagccgcgtgtgtggagctccccagtgcactcactgctggctccccctcggtgctctgggcccttc

SEQ ID NO: 267534 - DNA, 122 bp, Homo sapiens
gattgtgatccttactccgtgagcgctgggcgggccgggttgtgttcatgttggtgaacccgcttcgttcttgcccgcgtggatggtccgtggactccgggaaaaccttctcgtggctcaaa

SEQ ID NO: 267535 - DNA, 122 bp, Homo sapiens
agacactgggagacccggtcctctgcgtgcttcagagtcaggcacacctggctttgttcccgcagccatttgctctgtgacttccggcacctgtctaacctctcggagtcctagtttcttcc

SEQ ID NO: 267536 - DNA, 122 bp, Homo sapiens
ctcctatgtcccctttgtgtgatgcttccgcaaagctcttgaacctctgagccaaagggccggcacccaaaatgcagagagaagatttattcctgtacctcggggtgtcgggcagcttaagc

SEQ ID NO: 267537 - DNA, 122 bp, Homo sapiens
gctgctgtccctgctgtcgctcctggttggtgcgtggctcaagctaggtcactgaaccgccggccacgccggaggcgctgggaaaggggatggggccctccgccctggcgggagagagcctg

SEQ ID NO: 267538 - DNA, 122 bp, Homo sapiens
ctgtttccctaatactgtcacttcaccctctgtgattctgatgctacaaatgatagatatcgttttagcattttcttacgggtcctagcgattctattcatttttctttcagtctctttctc

SEQ ID NO: 267539 - DNA, 122 bp, Homo sapiens
ggttgccaaacctgtgcagtatgctacagatgcccatcagatattctatctcatataaaacgtaagtttaacagaaatactcttaaacacacaaaaatggaaaataaacgaccacccaaaga

SEQ ID NO: 267540 - DNA, 122 bp, Homo sapiens
caagccgcaggaactgcacagacatctccaggaccgaggccatgtcctcccgccggccatcgaactggggcagcagggcccgcagacgctcacagctcaacgacatccgcttcctggttccg

SEQ ID NO: 267541 - DNA, 122 bp, Homo sapiens
atgaaactatgcagcccttgaaatcctcatctctgcctttttctgttgagacaaagtaggcgcagctctgctaccttgaatggggtatctgtatcctgtggacttggtgacagaatgccccg

SEQ ID NO: 267542 - DNA, 122 bp, Homo sapiens
cgtcaatgtccatttccattccctcagacccggtttttctacgttggcatgactggcatccggaggcccgataatttcttgttgctgggagctctcctgagaatcgcgggatattttagcag

SEQ ID NO: 267543 - DNA, 122 bp, Homo sapiens
tatttctccgcccatcctatcttcatttgatgcggatcaaaagataacattggggccaggcgcagtggctcacgcctgtaatcccagcactttgggaggccaaggcgggtgggtcacctgag

SEQ ID NO: 267544 - DNA, 122 bp, Homo sapiens
gtctcgaactcctggcctcaagtgatctgctcaccttggccttttaaagcactgggattacgggcctgagccactgtgcccagccaacccaaatatttcttgatagatgccagtaagaggac

SEQ ID NO: 267545 - DNA, 122 bp, Homo sapiens
tgggcgcggccgcacctgggaggtggccgttccgaggagtggctggctcgggagctgggccgctcgggctcgggatagcggtagttctgggcgtaagcagacgcagcaccatcatagggcct

SEQ ID NO: 267546 - DNA, 122 bp, Homo sapiens
tcagagtgagttgaggcgagcctgcaggactgtgttccctctgcaggctgtaggggaggacgtgtttccttgccttctccactggtaaaggccacccacatttctcagctcatgccccttcg

SEQ ID NO: 267547 - DNA, 122 bp, Homo sapiens
atgaacagcctgatttgggggctgtgtgtgggtgagccactccagtgaagtcgtcctcaacgctccctcagaaggagattatgaatttaatgagcagaagaattctgacaagccttaaagcc

SEQ ID NO: 267548 - DNA, 122 bp, Homo sapiens
aaatgaggccaagaacgacctttccctggccaccaggcaaactgcatgaaagcgagcgggcgttgccgctggcgcccacgctgggtttttcccaggcggggttcgccctgggaaccgcagat

SEQ ID NO: 267549 - DNA, 122 bp, Homo sapiens
aaggggcttaaaaaatgcaaggctttgctgcaggcctagaaaactcagagtaggccttaccgaagaagtgagaaaaaagccaagctttattccaaatccacatttcaagcactaaaagaatt

SEQ ID NO: 267550 - DNA, 122 bp, Homo sapiens
atcgacctgcctggacctcccaaaatgttgggattacagttgtgagccactgggcctggccggcaaacacattttcaaagcaggatcatgaagttgtcaagagattatgaattgtaaacgag

SEQ ID NO: 267551 - DNA, 122 bp, Homo sapiens
atctcagagagcggggagccgtgcagcgtgacgcaggctcctgcgtgggcagccacgggccgggacacgctgaccttcctgaaaccttcacagatgctggaagccacagctgcaactcccca

SEQ ID NO: 267552 - DNA, 122 bp, Homo sapiens
tgttgaagagagatttacctattatgttagggtgtggaaaacataactgtctgcaactcacgtatgcagaggaaatttatctaactgatatttgaccttcttctggagcccaccaccagtgg

SEQ ID NO: 267553 - DNA, 122 bp, Homo sapiens
tcaggaggcctcaaaacaagggcaagccttcctcaaagatgtccctgcagccaccctgcgcgttcacaccatttcaccaggccccatctcaggcctcaaagcctcccaaccccagtctgacc

SEQ ID NO: 267554 - DNA, 122 bp, Homo sapiens
gagcggtgtcttgctaggccggttggggtacttgcggggccggatgggcttgagggtgagcggcggctggggcaggctgccaaagcccgggtggatctgcttgtctttgaatgccttgatgg

SEQ ID NO: 267555 - DNA, 122 bp, Homo sapiens
taaaaaagagagggcgaaggtaggctggcagatacgttcgtcagcttgctcctttctgcccgtggacgccgccgaagaagcatcgttaaagtctctcttcaccctgccgtcatgtctaagtc

SEQ ID NO: 267556 - DNA, 122 bp, Homo sapiens
ggtccccacattccatgtagcaaggctctgcccctggggtctgtgtggagggggtggcggcgaagctggggacaggcccgggggcccgcagatgctctgcacagtaccagctccctacagct

SEQ ID NO: 267557 - DNA, 122 bp, Homo sapiens
gccgcctgagccgcgcgttgcgcccactgtccgcctcgcagccctcgctgccccacggaacgcccgtcccagcggcctccacacgcccggccagcagctccacaccgcttctgggacccacg

SEQ ID NO: 267558 - DNA, 122 bp, Homo sapiens
aaaagatatgttgggaggacttcatggtgttaggcaaaaatccagaactccattatacctcgcttggagaaaaagggctgtcttaaacgggttatctcatggaaacctgaggggaggaccag

SEQ ID NO: 267559 - DNA, 122 bp, Homo sapiens
caaggggccctgggcatgacatttagggaggtgcttgctttccagtacccactgcactcacgggtctctgagcacaggtgtgaaggagggaagagtaatgagaagagaaggtggtgagaggt

SEQ ID NO: 267560 - DNA, 122 bp, Homo sapiens
gccgccccacacacatgcccatgaaaccactcctggtgggaaaacggcctctacctcctccggtgggaaaatatcatgacacaaaaaccatggacacaaactccaaatgcagagagggagag

SEQ ID NO: 267561 - DNA, 122 bp, Homo sapiens
aaattcaccttctacagccagctagcaggcaccgggcatgggtccacacacgagtgtacacgtatacataaccccagcccaccacgactgctgtgcagcctcctcctgaaaaatgtaagcca

SEQ ID NO: 267562 - DNA, 122 bp, Homo sapiens
gactgacttcctccttccaccccaccccagcttataagtgctggagccaaggtgtgagcccgtcatctgctggctatacagtactgcctgtttcccagacaatctctgataatatcggttct

SEQ ID NO: 267563 - DNA, 122 bp, Homo sapiens
tacccactttgtccttcccgttcatgtgtccggccacctgatacgagaggggcacttagccgttgaggaggcggagtctgccgcccgccggctgcccggtgccctcagggatggcctcgatc

SEQ ID NO: 267564 - DNA, 122 bp, Homo sapiens
tttgttaagggcttgcttgtcaattcaagttaaaggttaacaaatactcttcagcatgcacgtgttgcctctaatgatggcccattgagaccatagttaagaattgctggcagcttatcttc

SEQ ID NO: 267565 - DNA, 122 bp, Homo sapiens
caccacccaggagctggccgacgcctgcgacatgaccatagaggagatggagagcgcggccgacaacatcctcagcgggggcgccccacagagccccaatggcgccctcttaccctttgtga

SEQ ID NO: 267566 - DNA, 122 bp, Homo sapiens
ccggggaggcgcagggaggggaccctggagctgggccgggctgtggcccttgctggcgctcgtggtggcacccaggagcttttgggtcctgagatgcgactgcttggaccgtgctggggata

SEQ ID NO: 267567 - DNA, 122 bp, Homo sapiens
acagcagtcactctcccggcccttctttggaagccctgctctgactgtgtctctgtgggtcgccgcgtgggccggcgtgaccccccgggggcacagggctggcagtggctggctccagcggc

SEQ ID NO: 267568 - DNA, 122 bp, Homo sapiens
ctcgagcgaggtggaggcggcggcgccgcgggcctcggggaggggcggggcgaggcggggcgccggctcctcaggccccgccctggccccgcccccacctgcgcctagagccggggcgggag

SEQ ID NO: 267569 - DNA, 122 bp, Homo sapiens
aacactagtactctgcatgtgtaaagccactctcgtctcctgaaaaaaggccatgtccaacgtcagtaaaacaagaataggaggaaaaggcacaggggaaaggtacaaggaaatctctgaga

SEQ ID NO: 267570 - DNA, 122 bp, Homo sapiens
tgcaaaaaacctacttttttatatcgtgtataaaggtgctatgtaaaaacgacatcacaccgtgtgactggctggcttcacttttttttttttttaacatgctcccaagaaaagtatccact

SEQ ID NO: 267571 - DNA, 122 bp, Homo sapiens
gcgtcctcccccaggcaggcagcacctctcggccgtcagcagtgcagccaggcgcccatccggcagccgcttggtctggcccagccccacctgcacagaatgctgctgcaccagagagtcct

SEQ ID NO: 267572 - DNA, 122 bp, Homo sapiens
gcgatctggttgtttaaacgtgtgtggccccttccccctctcttttcctcctcctcctgccgtgggagacacttgctccagcttcgccttccgccgcgagttgaagctccccgaggcctcct

SEQ ID NO: 267573 - DNA, 122 bp, Homo sapiens
ggaggcggtggccgagtccgatttgagtcccatgtcctctggactgcaagttgagactcccggtcccaggagggacagcaaggccttctccaccttcacaggccatctgactacctgcgcag

SEQ ID NO: 267574 - DNA, 122 bp, Homo sapiens
cgacttggcctttggcgacatcttcctccacctgctcacgggcaaccttgcgctgctggccgacgaatttgcccttgaggacttctgcagcagcctcttcgatggcttcttcctcaccgcct

SEQ ID NO: 267575 - DNA, 122 bp, Homo sapiens
tccgttgctaatgtttttgtgagggcttcttcagggcctcttgttagagtgtgacataaacgacttcatttgggtaccagcaagtgtcacagggggcagagaccagcagaaacctaaagatg

SEQ ID NO: 267576 - DNA, 122 bp, Homo sapiens
gaacgcggtcccccaccactcacaggccggctgctcctcacccatccggtctcactgggacgccacgttcctcagggaagccagtcgggaacgttttttttgtttgtttgtttgtttttgag

SEQ ID NO: 267577 - DNA, 122 bp, Homo sapiens
gcaacccaaataaccccaccctagagctaaggaaatttacaacataatcgggtgggggctcgtttaatctaaaatatcccttctgggtaaatttaaacccacactgaagaactagaaaaata

SEQ ID NO: 267578 - DNA, 122 bp, Homo sapiens
tgcaactattctgtaaatgtgaaattatatcaaaattaaagttacaaaagcctctctcaccgtgtttaatcaggaagtcccaccctgcccctccgaacgtcctccagccccgtgccggcggc

SEQ ID NO: 267579 - DNA, 122 bp, Homo sapiens
tgtaaatgttaggaatgagtcaagtttactccgcgctgcagccttcccgttagcgggtggcgccgccgatgcccgggggagcgcagggcgggagctgctgagcaggcggagggagggcgggg

SEQ ID NO: 267580 - DNA, 122 bp, Homo sapiens
ttagctgagtccaactgagatttcattactcctcctttcaaagcctgtaactaaatcttacgactgaataattaagcaaataatccttcggagtggaggaggggaggctgggcccagtggtt

SEQ ID NO: 267581 - DNA, 122 bp, Homo sapiens
cacacacacacacacacacacacacacacacaccccttcttctaagaaagaacaggatgccgctacacaaggaacccagagagaaattcggcaaacagttgcgcctaagccaccgcggcaga

SEQ ID NO: 267582 - DNA, 122 bp, Homo sapiens
gtgttttgacagaaagcaaggacttggccctaagcagcctctgatccttccaataaataacgctgctgatcttcacgcctcctcttctgtctgcccagcttcaactccagtccttctgtgta

SEQ ID NO: 267583 - DNA, 122 bp, Homo sapiens
ggaggctcaggggaggcgcttggcgacaggagcaggaagtgatgaggtggggagctcagccgagggctgcacaaagaccttcctggcctgccccagacagagctgaggacccctggccgtgg

SEQ ID NO: 267584 - DNA, 122 bp, Homo sapiens
gcccgagataacttcttccgctgtggtgtgctgtatgaggactccctgtcctcccaggtccggactcagatggagctggaagaggatgtgaaaatctacctcgacgagaactacgagcgcat

SEQ ID NO: 267585 - DNA, 122 bp, Homo sapiens
aaccaccagagcacatgtgctctgaccctctcctgggcattggttcctgctggtaccgggcggttcagaccttcaaataggttgctttcaaaagagctttcaggcacttattgagaattaat

SEQ ID NO: 267586 - DNA, 122 bp, Homo sapiens
gaagccactaaacttgtagtacatgacgcccagagtccggcttcccgcatccgctgccaacgcgaccgccccagagaaggaccccgcctccccggctgtggtcccgagactcagcgcaagga

SEQ ID NO: 267587 - DNA, 122 bp, Homo sapiens
cgcccgagagggtttgctggggcagggtggcccctgggacgggttccagacagttctaggcgctcaggtccgcagctgtgctacccccgccgcccgggacgcccggtccccgccagggccct

SEQ ID NO: 267588 - DNA, 122 bp, Homo sapiens
tccgactggcagtgggactcagcgggcgtggaggtcgcggctgagcgagcgagccctgggcgagtgaattgtggctgtgggttgacggtggagacaccccccggagggaggcggagggaagg

SEQ ID NO: 267589 - DNA, 122 bp, Homo sapiens
ctgcggagaagcttcgtggcaggaatgaaaattggccgcagcatccaagaaatcctcgaacggcaaagggatttctaggacaacacacctctaggaacagaggatgtcggtggtgagagctg

SEQ ID NO: 267590 - DNA, 122 bp, Homo sapiens
aagagagaggaagatctctctccctcctaaggttccagggaaaggaagactcagggccaacgtcggcttttactctgggactgttccaatttccagagataccaggagtggaagggagtgag

SEQ ID NO: 267591 - DNA, 122 bp, Homo sapiens
ggtctcatccttgaggtgactgataacctctagttttcagaggactatttattctctcaccgagtcctccacgcagtctgctggactattattacaaacattgcattgatgtgggaattgcc

SEQ ID NO: 267592 - DNA, 122 bp, Homo sapiens
atcatagtgtccacaggcgagggcgtactcagggttttgcctccttccaggctcggaccccgtcccctgggaagtcatagtctcccagcttatgagcaggggatggctctgtcacctgattt

SEQ ID NO: 267593 - DNA, 122 bp, Homo sapiens
gcagtgctgaggccaaccctgggctggggtctgaggaccagtgtggacactcctggagcccggcaccctcctggccattagccgtgaagcccaggctgtccctcttgggtgggcaccctggt

SEQ ID NO: 267594 - DNA, 122 bp, Homo sapiens
tgcctttggaagttcagggtttttctctccaccggactcgtctgccctcggggccaaatccgcgaagcgaggaggagctcccaccacacagcctgctgtccctatgggccactttataaaag

SEQ ID NO: 267595 - DNA, 122 bp, Homo sapiens
ccatagtgtagggcatggcgggacagggatcctgccctgcgatagtccagtgcctgagtccgcagtaaggcagtggtcctccaatgctggagttcacggcgtggtggggtcacggtccttca

SEQ ID NO: 267596 - DNA, 122 bp, Homo sapiens
tgcgacacgcagcctggctgtggctgggagtccctggccccggccagctccagctcctcccgcctgggatccctgggcagcgcctgttctgccaggccccgtcgttgccatgtgacatgcag

SEQ ID NO: 267597 - DNA, 122 bp, Homo sapiens
ctgggaacccgatcagaccagcaaacctgggatccagcagcacgttacgtaaaacaggatcgcccaaaacttgtcccaatcccagccctccccccgaagcccccgggctgccctgccaggca

SEQ ID NO: 267598 - DNA, 122 bp, Homo sapiens
gtctgttaataatcaggccgagaccaccagcataaacggtggcggtccagactctcaggacgcatggttatcccactgtccctgctaggtctttcctaattagttttgtgtaggctttgcca

SEQ ID NO: 267599 - DNA, 122 bp, Homo sapiens
ggaggctggagctcctgggccaaagggcattctggagtttggaaccaaatcagcagttcacggaatggcctgagcctggtggtgacctcacagtttcagagagaaactgggaggaactgtgc

SEQ ID NO: 267600 - DNA, 122 bp, Homo sapiens
gggggcggggcttgtgtttttacttccggatcccacagctatgacaccggaagccggaagcgtggtagggaagggcgaccgcgaaactgggactttctcggagcgccggggccctaccagcg

SEQ ID NO: 267601 - DNA, 122 bp, Homo sapiens
tagaaagaacaaaaggaatagcagtttttaaatctcaagttgatcagtccaaactccacccgtttttttttttagctgaaaatatcacctccctctgtaacctctacccatatggcaaagtt

SEQ ID NO: 267602 - DNA, 122 bp, Homo sapiens
gaggaggcaccacctcttcacctattcgctggactttgcctagttcgggccgggcaggtccgggcatctcggccccacaggcttctagggaggaggaggggcacacttctttgtgacgttta

SEQ ID NO: 267603 - DNA, 122 bp, Homo sapiens
ccgggcggtggccggggcctcggccatgttcgcggggctgcaggacctgggcgtggccaacggcgaggacctgaaggagaccctgaccaactgcacggagccgctcaaggccatcgagcagt

SEQ ID NO: 267604 - DNA, 122 bp, Homo sapiens
atctgtgtgtgttgaaaaacaaaaaggctccaaatattattctcttgtttagcacttaaacggcatctttgatttcacaaccagctaaggcatgtgtctgtacacatgtttacggttctggt

SEQ ID NO: 267605 - DNA, 122 bp, Homo sapiens
cagaggaggcgtaaccagggccacactagaatgcagaataggggtgtggccttaatgctccgatcccattggtcaatgagaaagatgaaaaggaaaggaggcgtggccaggcagcagtgtgt

SEQ ID NO: 267606 - DNA, 122 bp, Homo sapiens
gaccggccgactgggaggggccgtgggacgccattcccataatgctctggggcgtgccgccgccgtcgctgccacctcccctaccgctagtggaagaagatggcggaaggcggagcggcgga

SEQ ID NO: 267607 - DNA, 122 bp, Homo sapiens
gactcaatgctgagtggggacaaagctggtcatctcggcggtcacacagagttcacttaccgtagtccataaggcaccccgtcccgaaaagcgccaagtgcacgaccatcggctttaccgcc

SEQ ID NO: 267608 - DNA, 122 bp, Homo sapiens
gtgggaaagtgcattctgcattccaagtcaccaagttccagacaggcacagtagcacacacgtgtgaacagaatccatcagtacagtctggggcccaggcctttgcacaccaacaacttaag

SEQ ID NO: 267609 - DNA, 122 bp, Homo sapiens
aggctgtttcaaaaccacctcctccctccgtgcttgagtcaagagctgcagtctttctatcgcccatagccatgctgcagcacttcctcaatcaccctcttctcgctgcacgcattgacttt

SEQ ID NO: 267610 - DNA, 122 bp, Homo sapiens
tcccatgagcctctggggcaggctccaaggcgagcgacggaagcagccgctcttagtttccggcaacacgacagcggctgccgagcgacccggaagtattcccattttgcgttgtctgggct

SEQ ID NO: 267611 - DNA, 122 bp, Homo sapiens
caaaccccagagaggggttgtagattgggtccagctttgcttcagtgtgtggaaatgtctcgtggggtggcatcggggctgcggggtggggaccccaaggctttctggggcagacccttgtc

SEQ ID NO: 267612 - DNA, 122 bp, Homo sapiens
cttcctctggctcgaagagaaatgaaaaatacttggtggcattttaaaaattatttaagtcgatgtgaagtgtgtggattaacaaaaaacataaagaacaagtaaaaggagtgtacagtcaa

SEQ ID NO: 267613 - DNA, 122 bp, Homo sapiens
taaaggggcacacagcaaaaaaattggaccagagatggtgaaaggaggaggggaggggcacgtagaagatgaactgactcagagaccttgaagagggaggggaatggcacacagcagagaaa

SEQ ID NO: 267614 - DNA, 122 bp, Homo sapiens
cggccgggccgaggctcattcctcagccagccacctcggcttccctatctggagacagcgcgggtcccctgccttcctgtggattaatcatgccttcggggccctcacagccggccgcccac

SEQ ID NO: 267615 - DNA, 122 bp, Homo sapiens
cattgctaaatggattgcaaaataaatccacagagcttttctttctccttccttcctggacggacgctataaagtctgcagctttgctgtgctctacgtcctttctgtcaaggtggcctaga

SEQ ID NO: 267616 - DNA, 122 bp, Homo sapiens
agccgacgctctggacactctagaaatcactcctcagtgtgacctcccaggcctcttccccgtgtacgtcaacacctcacccagcctaaaggctgagtttacatgatcagagttaggggatc

SEQ ID NO: 267617 - DNA, 122 bp, Homo sapiens
gtgaagctgagaaggacacagctctctgaccatgaccacaggaagtggtaagtgcaaacacgttcctctgatggtttcacgtcgttgcctattctgtccagccctgatgggtctgagcaaac

SEQ ID NO: 267618 - DNA, 122 bp, Homo sapiens
gtaaagatctcaccacttctctttggaatttccaactttgcttgtgattgaatgtcacttcgtgaatttgtattatgtcagatcacttggcattgctcttccatatgcatcaagttgccagg

SEQ ID NO: 267619 - DNA, 122 bp, Homo sapiens
taagttgcctgcctaagtcaacaaaaagggttgttgactggaatctcatccctggaaagtcgttgagtaaggtctagatcatggccttgcaatttgtattttagtttttcattttcagacag

SEQ ID NO: 267620 - DNA, 122 bp, Homo sapiens
gtcacttgactgcagggccaggccaggatttccatgactctagccactgagctgtgtctccgagggctactgcctatgtgaaggtgatgcagaactttagagaaggccatttgtatcataga

SEQ ID NO: 267621 - DNA, 122 bp, Homo sapiens
cgccgtgccccgcccccacttcctcccgcccctcgctgggcggctattaaaagctgctgacgtcaaaacggacggccatctttgatgagggcagagctcacgttgcattgaagacgaaacct

SEQ ID NO: 267622 - DNA, 122 bp, Homo sapiens
tggcgagggctacagcaacacccataagtctaagcagatgtactgcgtgttcaaccacaacgaggatgcctgccgctatggcagtgccatcggggtgctggccttcctggcctcggccttct

SEQ ID NO: 267623 - DNA, 122 bp, Homo sapiens
gttcaaatttcaatcagtatggctctttcttgaaagtatgcttttttcttcaaagttgcccgaggccgggcacagtggctcaggcttgtaatcccagcactttgggaggccaaggcaggtgg

SEQ ID NO: 267624 - DNA, 122 bp, Homo sapiens
ggtcggaggtgaagagcaggtactcagagacattgtggccggtgatgtcggtcaggatgtcgcctgtgaccacccgcatctggggcgggtgcccgcccacactgctggggcaggagaagccg

SEQ ID NO: 267625 - DNA, 122 bp, Homo sapiens
tccactcttctctccaatcctataatgactccatgtttttctgtttgatgaaatgcctaccgtgtgcagtctctcatattgcaatgggtcaaagcctgactatgtcggattacaaatttgtc

SEQ ID NO: 267626 - DNA, 122 bp, Homo sapiens
cccacgttttcaatttgtaacatagaaatggaggggggagggactcacaaccgctagtagcgtttgtgaaaagtacctggtaacaggctgtgctggaggggaattcagcccccataaaagat

SEQ ID NO: 267627 - DNA, 122 bp, Homo sapiens
aataaattaaaggaaaaaaatatccaaagtagggttagtacaggaaatttgggccattcacgagtaactccatattgagtgtgtgccaggcacagtcctaggcagtggggtccaggggacct

SEQ ID NO: 267628 - DNA, 122 bp, Homo sapiens
ctgcggggagtggggacaccaaggtctggaccgggaagccccgggttccactcccaccatcgcttcccccaacgaagtcaggcagagtccgtgtgccctctgaccctcagtctccaaagctt

SEQ ID NO: 267629 - DNA, 122 bp, Homo sapiens
agctgtctgccctgtaagatgccagctacaaccaactgtatgcaaagcagtgttgaaccacggggtgggggtgacggagctgtctgccctgtaagatgccagctacaaccaactgtatgcaa

SEQ ID NO: 267630 - DNA, 122 bp, Homo sapiens
ggggtgggtggatgacttgccgagatcccacaaggcagtgggatttggggaaagagcgaccgcttcctgttgctcgactgcctcgccactgtacggactgatttggcggcctacgccggaag

SEQ ID NO: 267631 - DNA, 122 bp, Homo sapiens
tctttgttccgagcagagctcagactgcagagtggctgggtaaatagtcgccgcagtaatcgcaggctgattccaactaattaaatcctgcgccaagagcccactccagccggtatcccgag

SEQ ID NO: 267632 - DNA, 122 bp, Homo sapiens
ggccctgcaccctaaaaaattataagcctctcccgtgggggcggggcgtggagtactgggcggacgggggctctcccgccacatccaggcccctggcccaggcctcagtcccgcaagccctt

SEQ ID NO: 267633 - DNA, 122 bp, Homo sapiens
caggtacatggagtatctcttcatggtgtccggtgcactccactcacccccgaagctgttcgtgtagttgttcacatagcgatggtcaccacctaggaagcagagggtcgggtcagcagagg

SEQ ID NO: 267634 - DNA, 122 bp, Homo sapiens
caccgtggtaatcggaaatgttaacgggcgcactcgtctggtggaatttatcgtggccagcgagggcgattaagcggctggtatgtggcgtgtttaccctcgtgtcagcatgactggtgttc

SEQ ID NO: 267635 - DNA, 122 bp, Homo sapiens
gcagcatgatcgagacgggccagggggctgagggtggcctctcactgcgtgtgcagaactcgctgcggcgccggacgcacagcgagggcagcctgctgcaggagccccgagggccctgcttt

SEQ ID NO: 267636 - DNA, 122 bp, Homo sapiens
atcacatccagcctcgcgatgtgagacccgatatgttttcagcagttacccagcgtcctgcgggtctctccgccactcccgttacatgtgtttttgggtaatcgccagtcttttcacagatg

SEQ ID NO: 267637 - DNA, 122 bp, Homo sapiens
aatactgactacaggtgtgcacctgccaccaggtacagatactactctcatgattccacacggtggaggtaaaataatgttatctttggtgatgttgatcagctctttcacctgcaacctta

SEQ ID NO: 267638 - DNA, 122 bp, Homo sapiens
aacggtcccagccccggcttcccctcaggcggtgcccagtgccaggacctaggagtccctcgggccacggggagagagcctcaccggcccagccacgccctccatgtgaccccgacccatcc

SEQ ID NO: 267639 - DNA, 122 bp, Homo sapiens
ccctattttttcttagcattccagagaaggagctttgttgatctccagttcaacctgtttcggggatcgataaccataattaattctggccagagtttcgtttgagcctcagaggtcaaagc

SEQ ID NO: 267640 - DNA, 122 bp, Homo sapiens
attcccatcgttgcagaaggttctatcagctagcactgggttggacgacacttgccaagacgagctggctagaggatggttctccggacctggtcccacgtggttcccaggtaagcccccgc

SEQ ID NO: 267641 - DNA, 122 bp, Homo sapiens
atgtcgggacaagttgaaaaacaaatgttccagaaaatccgccaactaaagatctcattgcgaatgctgtgcaacagctttttagaacagaacaatcctgcttgaggaatctgaagggggcc

SEQ ID NO: 267642 - DNA, 122 bp, Homo sapiens
agatcttatgacagttttatttgggagctcagaatttctaataacttcaataattatctccggtagtctccatgcacatgagttaattataacaagaaaataaaatacttatttcagcttct

SEQ ID NO: 267643 - DNA, 122 bp, Homo sapiens
gtacctcactctgggtgggacccagaggttgtaacgttgtctatatataccctgtagaaccgaatttgtgtggtatccgtatagtcacagattcgattctaggggaatatatggtcgatgca

SEQ ID NO: 267644 - DNA, 122 bp, Homo sapiens
ccctggcgctctccgagtgtggccgaccatgaggattcccagtcttgcaaatcgtgggagcgtgtcaaccgccccgtttctttccaaagccgggcatggcccggaagcagctgatcagatct

SEQ ID NO: 267645 - DNA, 122 bp, Homo sapiens
ctgggccgggctccaggccatcgcttgcgtccccagggttggaagcgaagaggcagggtacgtggtgtgtatttttagtgttcacacactgagaagggaggtggtgagcaaacgcgtttgca

SEQ ID NO: 267646 - DNA, 122 bp, Homo sapiens
aaaaggtctctaggtaattctggtatgcactcctggttgagaaacactagctagacctgacgggaactaagcctttccacatctgtgaataagagaatgagaaagaaatctgtgctgaagat

SEQ ID NO: 267647 - DNA, 122 bp, Homo sapiens
ggttttaattgtgttgaggagaagaaccatttccggaactgtgtgtgcctgtgatgcctgcggagttggcttggcacagctatttccagactaatcctgagtcctatttataggctgagatg

SEQ ID NO: 267648 - DNA, 122 bp, Homo sapiens
atgaacacacagcctcttggtaacttaagtttccctatttataagaaaataagactagaacgcttcttggggaagttgaagaactggtgagatacagttaaatccacagaaactcttttctc

SEQ ID NO: 267649 - DNA, 122 bp, Homo sapiens
ggcggccgtggggtcttgggcgcgcgcggtgtttctggcggtgggtcaggacttgcgggtcgcctccgccggtgttgaagcctcttgtgtgcacactttctcctcagcacttgggacgacct

SEQ ID NO: 267650 - DNA, 122 bp, Homo sapiens
actcctacacaaatgcatgtcgtgcttatttcgtaccaaactggtctggcggcggttcttcgtccagacgctggcgggccagggtggaggtagtaacacagctcccattccccatgtagccg

SEQ ID NO: 267651 - DNA, 122 bp, Homo sapiens
gtagttggtgtctggggagttgaaaattagttgttggtgtggaaaaacccacacacttggcgtcagaagtgttgtgagtataaacagattgtagtaacatggtacagccagactaaaaccca

SEQ ID NO: 267652 - DNA, 122 bp, Homo sapiens
tcctcggtgccaaagcttctgtggtcctcctgctttccttttccccctgtgggaggaggtcgcgggctggaggtgtttcctcctggtcctgagcagggccaacctggaggtaaaatggcccc

SEQ ID NO: 267653 - DNA, 122 bp, Homo sapiens
cccatcaagccaggcccctgcagacagacagcacgccatgtgggtgtaggaacatgcttacgtgcatgtgcgtgtctctgctgccgtgccctcctctgctgcaggctgaactgctcacacat

SEQ ID NO: 267654 - DNA, 122 bp, Homo sapiens
atcaacaactgctgcaagaggggccgtttgttcgactcactagtcttctgtggctctatgcggtactaaagagcagaagacagaagatacaaaaaccacaaaaattagccgggcgtggtgct

SEQ ID NO: 267655 - DNA, 122 bp, Homo sapiens
cattacaagattttctttgaaagttaataagtgtgttttcataaaagaatgttaattactcggctctggattttaaagaaccatttgtagagcactcgattctgtggctagtcagggtgcca

SEQ ID NO: 267656 - DNA, 122 bp, Homo sapiens
gtagcgaaccactagtatggtcgaggactcagatgtttttagttttttcggagcaggttgcgggtctgagtacccactcgaggtctccggcatctgttaagaaaacagggagaggccaggag

SEQ ID NO: 267657 - DNA, 122 bp, Homo sapiens
caatgatgacagtgagctttcttgtttctttgaggcttccgaatgctcctccccagtctgcgtcctgctttgactggacgttgcaaacaaaagattcttgctttgtctgtctccatcctttc

SEQ ID NO: 267658 - DNA, 122 bp, Homo sapiens
tccggggtggggcgtgcagggctagcccgggcgggggacgctgcccaacaagcaggtttgcggagactcacaccttagattctgagtttttaagcttgtttcctcagagcagggaactcacg

SEQ ID NO: 267659 - DNA, 122 bp, Homo sapiens
cggaggacctggatgaggacgctcagggcagcctgtgtgccctccatggcctgggcctggcgctcctgggcacaggcctgcacttcctgggagcggcggatcatctgcagtaggtcgttctg

SEQ ID NO: 267660 - DNA, 122 bp, Homo sapiens
caggcatcctcagctacggggtgggcttcttcctgttcatcctggtggtggcggctgtgacgctctgccgcctgcgcagcccccccaagaaaggcctgggctcccccaccgtgcacaagatc

SEQ ID NO: 267661 - DNA, 122 bp, Homo sapiens
ggggttcgaggcaggtgagagcatcctgcacgtcgccggggagcccgcgggcacttggcgcgctctcctgggaccgtctgcactggaaacccgaaagtttttttttaatatatatttttatg

SEQ ID NO: 267662 - DNA, 122 bp, Homo sapiens
cgtggccggccaagtttacacgaatgttgaaacttctcctcacggggtgaggatcgagggcgcccgaggccgggtccggctgagctggagcgagctgtgcggggcagcgcgggctggcgggg

SEQ ID NO: 267663 - DNA, 122 bp, Homo sapiens
ccctttgaggttgaattcctgacacttggcacccaggacccgcagagggtgctggggaaccgcatacagatcctgaatcaagttcatagcagggcatcactttacagaatctggagcgagcc

SEQ ID NO: 267664 - DNA, 122 bp, Homo sapiens
aaggagtgcaacaattaaatttagaacacaaaggacggggcagggtaactcttgaccctgcgtggcaaagtctgtgacaccaacaagcacgaaatacggtctagggcagggcggcgttgcgg

SEQ ID NO: 267665 - DNA, 122 bp, Homo sapiens
aggcgagagggtcacactcccgtaggctccggagctgcagccctacccaccaggcgtccccgcggcctctagaatattgtagaatcttcccaagagcccccgcgggaaggaggcccgccccc

SEQ ID NO: 267666 - DNA, 122 bp, Homo sapiens
ctgctctcacggcagcaggaggctgttctgccatcaagaagcagactccgtggaggccatcgggaagaacatccaaggaaatgtgagtccagcagcaagcagggacagagggttgcgcagtg

SEQ ID NO: 267667 - DNA, 122 bp, Homo sapiens
tcataggacgtcgcttggatttcaaatccacggtcacctgctgccctttgcctcccccgacgccccagcctgtgccccggagaggcaggatcgcagtggtcagaatccacgtgctttcctat

SEQ ID NO: 267668 - DNA, 122 bp, Homo sapiens
cgtacctgtggaaggagacggcgcgcttctcgccctttccctgccggttggagcagttcacggccgcacagcagatcaccatcgcgggccttggcccagccgcgcagccaggccccggccct

SEQ ID NO: 267669 - DNA, 122 bp, Homo sapiens
gatgtgggcatggccgatccagcctgaagaaacgtcaagcggagccccagggatacagcccgaaattcctgaggatcccaaaggatccgcaggatgcttcaggcctgcctagacggtgtggg

SEQ ID NO: 267670 - DNA, 122 bp, Homo sapiens
gcggtggctggaggctgcgcatctggggctttaaacatacaaagggattgccaggacctgcggcggcggcggcggcggcgggggctggggcgcgggggccggaccatgagccgctgagccgg

SEQ ID NO: 267671 - DNA, 122 bp, Homo sapiens
agtctcccaagaagctgggactacagggccagcacacctggctcacagatatcttttgagcgctgtgtgctataggctatgctggctgctgaggatacagtatctgccccacaaggagtggc

SEQ ID NO: 267672 - DNA, 122 bp, Homo sapiens
cggctaattttttgtatttttagtacagacaggatctcaccatgttgtccagcctgatctcgagctcctaacctcaagtgatccacccacctcagcctcccaaagtgctgggattacaggca

SEQ ID NO: 267673 - DNA, 122 bp, Homo sapiens
tgcagaagtcacacttgaagtttcagtccttacagtggactccgctgtgtatgcacagggcggctgcgctggagcaggagttgcactcaggacacttctctgggtggtcggcctggtgcagc

SEQ ID NO: 267674 - DNA, 122 bp, Homo sapiens
gctcctgaaggatccgatccagttcaaagcgcaggccgtggaacaggacggcagctcctccggcttcggcgccgctgctctccgctggactccacgtggctgttttaatcccataacagcat

SEQ ID NO: 267675 - DNA, 122 bp, Homo sapiens
aggggagggagagcaggctctgaggtttaatcagtagcatccagcttaaattcccccaaacggcggttccataaatgaaacttctttttaagtcagaggccagagcatatgcgtcccattag

SEQ ID NO: 267676 - DNA, 122 bp, Homo sapiens
cagaagggtttaaggcgaggaccccccagcacccaaaggacaaccccgctctgcccgcctcgcagtgcctccgcgaaactgacaactcctccgggcggtgaccggctccattcattctctgt

SEQ ID NO: 267677 - DNA, 122 bp, Homo sapiens
ccgtgcctcttgtgtgtgttctagtgtggaagtggaggcgattgctttccagcacaagcccgtttgactgtcggggtttggacaagtggctgcgacgacactaaggtggagaccgggatgta

SEQ ID NO: 267678 - DNA, 122 bp, Homo sapiens
tccggcgccgcggggcagctttctgccgccttccccgctcgctgtacttcttttggggttcgttggcttggcgaagcggagagggggaggcggaggaggagagaaggcgggggtcgcggcgg

SEQ ID NO: 267679 - DNA, 122 bp, Homo sapiens
gtcctgggcagaagctattggtgactctgcttcacaaatggggaaactggggcttagagccgggaaggagctagactaagttcaccaaactgaggccccaaacctactctgttcggtgctct

SEQ ID NO: 267680 - DNA, 122 bp, Homo sapiens
taggaacagcaatgaatctgatgttaggaaaggcaggggctgtcagaggccatggcaggacggcctgacaagggctataaatctaagcgaggagagggaaaaaataggcgtcctttcaggct

SEQ ID NO: 267681 - DNA, 122 bp, Homo sapiens
actgtccagtgccgccgaagaaaaagtgcctgtgatccgaccccggaggaggtccagctgcgtgtcgttaggagaaactgcagccagttactatggcagttgcaaaatattcaggagaccgt

SEQ ID NO: 267682 - DNA, 122 bp, Homo sapiens
aacaaagggtgactttcacactagtttagcatcccccacgtgcagagtgctgagatgggccgactggagagaggagactacaactcttaaccctcctggcctcaggttctgcctgttctgtg

SEQ ID NO: 267683 - DNA, 122 bp, Homo sapiens
gtgtgtatcagaagactcaacagtgtcttaattgcagtttatttctctgtcttgtaaaaacggtctagaagtaggtgttccagagcagacatcgtcctccttggtgttagagatcctgattc

SEQ ID NO: 267684 - DNA, 122 bp, Homo sapiens
gcacgaagcgcttctaattctgtgcggatgaagtacagggagatgcttgctgcagctcttcgaacaggagatgactgcattgaaatgggagctgatgaggaagaattaggatctcgaattga

SEQ ID NO: 267685 - DNA, 122 bp, Homo sapiens
ttttagtcatcctagtaggtgtgtggtgacaccacattgttgttctcattctcagtgccccgatgacatatcatgctgagcattgtttcatatgcttacttgccatctgtatatcgtccttg

SEQ ID NO: 267686 - DNA, 122 bp, Homo sapiens
tctgtcgcccaggctggagtgcagtggcacaatcttggcttactgcaacctctgcctccccggttcaagcaattcttctgcctcgggctcctgggtagctgagatgacaggcatgtgccacc

SEQ ID NO: 267687 - DNA, 122 bp, Homo sapiens
tagacgctgcaacaggcactttgcaaacagtgtttcatcgaattcaccccaacagggttacgtccacgcagctgagacttagaaaagtcccgcgacttgccttaagtcgccacacgcggcta

SEQ ID NO: 267688 - DNA, 122 bp, Homo sapiens
cgtgtcctaacaccaccttccccgggcacctgtcctaacgccaccttcccaggcacctgtcgtaacgccaccttccccgggcgcctgtcctaacgccaccttcccgggcatacagagaatcc

SEQ ID NO: 267689 - DNA, 122 bp, Homo sapiens
ctcctgggcgattggttggcagaatgagggcgctgcgcaaaaacggagaagccgagcgctcggagctcagaaactgccagcccagaccacaggctcagaggctgaagcaggaggaaggaagg

SEQ ID NO: 267690 - DNA, 122 bp, Homo sapiens
acaaacccaggcggagaagggtgtcttttctggcagctaagtcaacggggactcttgcctcgctttccaatatatcaaaaggaggaaaattttgcaagaaactctattgttcagctgtagac

SEQ ID NO: 267691 - DNA, 122 bp, Homo sapiens
gaggctcactatagtgatgtcctgccttagacgaggtcacacaggggaaggttactgtgccgcagagttttctttccgagcactcaatgctcacctcctgggagggagtggggccgcagcca

SEQ ID NO: 267692 - DNA, 122 bp, Homo sapiens
aggacgcgcttccactaaggctttcgcctcgcgccgtaatgtgtggaatagccgcgcccacggcagcctcctcggacaaacttgcaccgttgactcttcccaaaattttgctactcagtatc

SEQ ID NO: 267693 - DNA, 122 bp, Homo sapiens
tggtctgaatgtttatgttgtccacagattcatatattaaaatcctaactcccggctggacgcagtgggtcacacctgtaatcccagcactttgggaggctgaggcaggtggatcacttgag

SEQ ID NO: 267694 - DNA, 122 bp, Homo sapiens
gcagccaagcactggacatgctcgcgagagccagggcaggctcgggtcgtccgcaggactcgaaggcttgctgtgctctcctgtttgcagagacctgggtgtagctgtggtgcatagatgtg

SEQ ID NO: 267695 - DNA, 122 bp, Homo sapiens
ctgattcactgaactaagcgaacacgccggggcactctccggcgcacccccgcccgccagcgcctagtccagccctcccgtcccagggccccgcagcacgctgggaattgtagttcttggcc

SEQ ID NO: 267696 - DNA, 122 bp, Homo sapiens
ggtgatccatccgcctcggcctcccaaagtgctgggatgacaggcgtgagccaccgcgcccggtcatttttttaaatttgtttttggagatgaggtcatgctgtattgcccaggctggagcg

SEQ ID NO: 267697 - DNA, 122 bp, Homo sapiens
ccgggaacgtcttcttagcttttctttttacctttgtctttattcaacttcaaatcaaaacgcagctggaataaatttttttttatgggaaaggtgtcttcccttgtcggtgtttctttctt

SEQ ID NO: 267698 - DNA, 122 bp, Homo sapiens
tcaaacccctgcccagcccaggcgatccttcaggctctgtggatgcccagcatcccagcacggaggcctgcgccatgggagcagcttgccattcccctatgtcccaggcaaccctaagatgg

SEQ ID NO: 267699 - DNA, 122 bp, Homo sapiens
gtggcgaggaggtggggctgctgacctcagtctcctctgtcctcaagtcgcctacgtgcgcgcccgggagctgcacactcttgaagtgaccggcctggagacggttgcccagagcaaggtaa

SEQ ID NO: 267700 - DNA, 122 bp, Homo sapiens
ttgccaagcggcctcactgaacgagacctccatgggaaacggcagtccccggaggaatcccgaggcctgtaattgcttttgacgggggaaggtttcctggccacattagactcgcgttactg

SEQ ID NO: 267701 - DNA, 122 bp, Homo sapiens
tgccccagcaaatttgtaagacaaatgcaatatccctgtcctcaccagcctcagtgagaacgggggataacattactgaatgccagatagtcacaagcattaatcatcatcttagactgcta

SEQ ID NO: 267702 - DNA, 122 bp, Homo sapiens
tgtgaacacctagatagaactaagggtgtgaaatacaaacgtactatttgcctacacttacggaaataagagcacatgacacagtagatggcaaggtgaggctttaagtcagaaagcaacct

SEQ ID NO: 267703 - DNA, 122 bp, Homo sapiens
tgggcaggcatgtgtactctgtctcttttgccattgatgggcacattgtttgagaactggcgcatgtggccatttgttttctatctgttccttcatatcttaggggtcctaattagtctcct

SEQ ID NO: 267704 - DNA, 122 bp, Homo sapiens
tcacccgagacttttaaactgagactccctcaaaagctactaagacgatcaccagccgggcgcagtggctcacgcctgtaatcgcagcactttgagaggctgaggcggatggatcacttgag

SEQ ID NO: 267705 - DNA, 122 bp, Homo sapiens
cccacgtgccaacaatagaccctggatcctccctcccaacctcctctgccaagccttccccggagcagtggtggcaactgcaccgggccagaaggctcagcttccccgtctcccagtcggcc

SEQ ID NO: 267706 - DNA, 122 bp, Homo sapiens
cacacacacagcggacgggacacacacgcctactgctgaacgtccgtttatccccgaacacgtgtgcgtctgtccctgaacacccgtgttcatccctgaacatacagccttcccatggcctc

SEQ ID NO: 267707 - DNA, 122 bp, Homo sapiens
cccggggccaggctcgcgctagcgccgcccgccggagaggagggccaaccgccgctgccccgccaggatcccccgctccactgaggggaatgaatgcagaccgctgcagccagagggaggcg

SEQ ID NO: 267708 - DNA, 122 bp, Homo sapiens
tccatccaggggactgtgactggcaggtgacacacgctggctgtcatctccatggtccagcgggcagcccacacttggcccaggggacagcaggccatgtgggctctatccagcagaagacc

SEQ ID NO: 267709 - DNA, 122 bp, Homo sapiens
gggggcaccctgaagctcccgtgccagggagagctgcctcctggtgccagggtaggcatccggcgctggtgctcagggagccccattccagaacctgcccgactacgggggccagagggaca

SEQ ID NO: 267710 - DNA, 122 bp, Homo sapiens
cctcgggaccactgtcctcagggtcccgggcagggggactacctcgctgtccaggtcagacgtggccggcgctctgcccacctctaaaaccgtgccttggccccggcctccgatcatatccc

SEQ ID NO: 267711 - DNA, 122 bp, Homo sapiens
aacgcggccccatttctcactcccattgggcgtcgcgtttctagagaagccaatcagtgtcgccgcagttcccaggttctaaagtcccacgcaccccgcgggactcatatttttcccagacg

SEQ ID NO: 267712 - DNA, 122 bp, Homo sapiens
ctaaatcaaagatggtagcaagattcagaattcatgacataaaatcttaccagtttctcacgggcatactataaaagattgggagacatctgcttgtgaatccattcaataaatacttgtta

SEQ ID NO: 267713 - DNA, 122 bp, Homo sapiens
ataaaatccttacccttggggcaagatttaaatcttcattggtgccagcttggtggttcacgcctgtaatcccagcactttgggaggccgaggcaggcagatcacttaggccaggggttcga

SEQ ID NO: 267714 - DNA, 122 bp, Homo sapiens
aggatgtgggtgcaagaggacagtgcggggagccggaagccatgtggtgacctcgggctgcggtgcttccagttcaccatgaattcttagcacagcactggactccccaacccagacacaag

SEQ ID NO: 267715 - DNA, 122 bp, Homo sapiens
cccgggtagggggagggcgagctggttgtgcttccttgtggcggagggggccccccactccgcgggtgggtcgcgggggggacttgagcacccactcggagttgccccgggccccggcgttc

SEQ ID NO: 267716 - DNA, 122 bp, Homo sapiens
cggtggcgcgacagggaccagggcctggcgaaggccttgaggcagatggagcactggtgtcgcttggggcgtggcgggggccccccttccccttcctgttcgccctcggggcgcagacacgg

SEQ ID NO: 267717 - DNA, 122 bp, Homo sapiens
tccccgccatcctgaacccttaagtgacttgtttcctccaaggcctctgcattggacttccgtggatgtctcatgttctaaaccaggggtccccaatcccgggctgtggagtggtacttgtc

SEQ ID NO: 267718 - DNA, 122 bp, Homo sapiens
ttctggcccaggctggatgcatcacactgtgaattcctggatgaggaagaacaaatcttgcggagtgttctggaattacagaggagagccataatgggaaaatgtgacaaagcaattccctt

SEQ ID NO: 267719 - DNA, 122 bp, Homo sapiens
ggtttgaaaaatcagagacactcttcttccttatcgaattgcaagattaacgttgtactacgcagacaaaggtgtgttcaagatttggatcgtaagcgagttcactgaaaactagcggaggg

SEQ ID NO: 267720 - DNA, 122 bp, Homo sapiens
gaggggactggggggagcagagtgggcaggggggctttgccttgcctggcctcctctttccgtctcgcgggctcttcctgcaaaggggaatgagcagaggggggaaaggcagaaagagcgtc

SEQ ID NO: 267721 - DNA, 122 bp, Homo sapiens
atctcaagggtattccctaatcctaataaactttctgacagctaagttccatgtcagagtcggcttcccaacaatgaactcaaaaaatagaaaatgaagatccctgactggtgatgaataca

SEQ ID NO: 267722 - DNA, 122 bp, Homo sapiens
gtggacggaggcttggaggcggaggctttggggacccccaagcctgggctagagcagcctcggcgggctctagagggagggtggagggaggggcccgggctgcaggaggcggggaggcctga

SEQ ID NO: 267723 - DNA, 122 bp, Homo sapiens
gaaacgcgaccatgctgttaaggggcgtcctcctggcgttgcaaggtaaggcctggaccccgggacaaccccgggggcgctctgacgactcgcccccgctcctgctgcccccgggggtccgg

SEQ ID NO: 267724 - DNA, 122 bp, Homo sapiens
ttttttttttttttttttttttttttagctagctggaataatagaattatgttcccaaagcgttgagaggaaatggagagtttgtttatggcctatcttctgctaataccagtctgtagctt

SEQ ID NO: 267725 - DNA, 122 bp, Homo sapiens
gtgtagtaagctataccatccaggtatgtgtgagtacattctatgatgttgacacaacaacgaaatcgcctaaaggcatttctcagaccatatcccagttgttaagtgatgcatgactgtta

SEQ ID NO: 267726 - DNA, 122 bp, Homo sapiens
atgtggaagggggcagggtccctctccctgactggcagtcataccttgtttggggacccacgagtggcccatgagagaccaagcagatgctggagcttgggtctctggggtatggatgggcc

SEQ ID NO: 267727 - DNA, 122 bp, Homo sapiens
gggagggggacccagctcaggactgggaggccctgctcgcaggtccctgggtcccggtggcggccggagcgcttgctccgcaggcagcgggcgggtggtcgcccctcccgcccccaccccgc

SEQ ID NO: 267728 - DNA, 122 bp, Homo sapiens
gagcacgatgcgcttttttaaaaccccagagcaacccatatggatctctagcgtgagcaccgggaagcagcaacctggcagcgagctcacacccaccagagcgacgtctccaaggctcttat

SEQ ID NO: 267729 - DNA, 122 bp, Homo sapiens
gcatggaggggagactcacgtcggcctccactttgggtgcagacacatccaccgaggcctcgatggacttgcctggggctgacgccccgaacgatggcatcttgaacttgggcattttgaac

SEQ ID NO: 267730 - DNA, 122 bp, Homo sapiens
accctcagccacttcaccgctagatgtatgtgcaagcaggatcgtggcatcgatgtttttcggcaaggaaactaggagcgcccgcgggcgtgggggcacgtgcctgtggtctcagctgctct

SEQ ID NO: 267731 - DNA, 122 bp, Homo sapiens
ctctccataggctgagcagagatgtggtcagagtgaactcacattggaacagtacactcacggcaccctggagaggagcggtcactggttgctgagtgaattaaccgaatgtttgctgcttt

SEQ ID NO: 267732 - DNA, 122 bp, Homo sapiens
actctcttactgtatctgccacagggtcaggggcagcccagaaacctgcactcccggacacgcgctctcctgagagttgggcatgcccctcgtatgggccaccctcaggggaagtctgggga

SEQ ID NO: 267733 - DNA, 122 bp, Homo sapiens
aatgcaatggtattgctgttgcctagtgagttcctataaatgcatttgtttgtatccttgcgaatcttgttcctgcagagacagtgtgtggcagcctgttcattccagccctttctataaaa

SEQ ID NO: 267734 - DNA, 122 bp, Homo sapiens
gatctccacaagaactgcacatttgtgttttaacttgccgtagatgcacccacccttccgcggtgaagtcgtagtcctgaaaaataaaagcatttctgtcacaaaaaggagcagaatggagt

SEQ ID NO: 267735 - DNA, 122 bp, Homo sapiens
gggcacctccttgggcgcgggcaggtgcgggatgctgaacgagctccggacggactgcagcgagcggctgggctcgggcgacgagggctggaagtcgatccgggtattttggaggtcgaggt

SEQ ID NO: 267736 - DNA, 122 bp, Homo sapiens
acctggctttagggtttgattgtatcctaaacctctcaggctggagttgttcattttagccgagaagtaggcgtcagggtcgatctgatacttggctgctattccgaagctagtgttactgt

SEQ ID NO: 267737 - DNA, 122 bp, Homo sapiens
ggtgtgggatatagtctcctggtgcgccgtttttcaagccggtctgaaaagcgcaatattcgggtgggagtgacccgattttccaggtgccgtctgtcacccctttctttgactcggaaagg

SEQ ID NO: 267738 - DNA, 122 bp, Homo sapiens
ccgcctcccctctttctgttatctgacattttgctctgcttccctctgcccactccccagcgggattccctccctggcagacgcgcgcgccccagcccgccctcgcacaacctccaatagca

SEQ ID NO: 267739 - DNA, 122 bp, Homo sapiens
tgcctcacgccgtatctcaggacatccacaaagcattgcttttgccacattctgcttggccgcgaagccactttctgcagcccgagctccacccccggccataacccaggctgggaagaagt

SEQ ID NO: 267740 - DNA, 122 bp, Homo sapiens
atcaactctcctcaaccttagaattcggtctgaaactgggccaaatccaatgaactgaaccgtgtcccctagtttttaatggatgaaccattatttcacattcattcttacctcattcatta

SEQ ID NO: 267741 - DNA, 122 bp, Homo sapiens
aagaaatgaatgtgacactcaagcagtacctgaaccactggaagataatactttaaatcacggatgaaaaactgaacaaaagggagtatacagtgttaaatttttcaaaagttctcaaaata

SEQ ID NO: 267742 - DNA, 122 bp, Homo sapiens
tgggagccggggagggcagagggcaaggcttgggacaggcaggaagcaacaggcaagtcccggccatgtgggaggatagcaggcagtgttcagctcttgccactgatggaggttcaaagtag

SEQ ID NO: 267743 - DNA, 122 bp, Homo sapiens
ttggtgtaggtgggagatgattaatctctccgtgcacgataaaaagacagagctgccacccggaattagtctgtttatgtagaatgaggacagccccaagagtagatgggatttaaaaatag

SEQ ID NO: 267744 - DNA, 122 bp, Homo sapiens
acgggcgtgagccactgggcccagcccagaaaatttgttattaaaaaacaccactcgggccgggcccagcactttgggaagctgaggcgggcggatcatgaggtcaggatatcgagaccatc

SEQ ID NO: 267745 - DNA, 122 bp, Homo sapiens
accctgcagcactgagctggggtcttggggcaattcctcctcagaggaaacagcatcagacggaacgatccctgaggtcccctgcagctctcccttcctataacttgtatacaatccactgc

SEQ ID NO: 267746 - DNA, 122 bp, Homo sapiens
tggctccaggacagggcgcccagggaaggcagctagccgaagcgctggctgcaggaggaccggggcggcaggctccgcggcaggagcagaggcgaggcctgggccaggcctgagctgcaggt

SEQ ID NO: 267747 - DNA, 122 bp, Homo sapiens
atctaggacgcctccggtgagcaggtgtgatcccagggcccctgatcagcagcggaggagcgctcgggccacctgcccgggctgtggaggagcgctcgcgctgaccaggcgctggggcgtcc

SEQ ID NO: 267748 - DNA, 122 bp, Homo sapiens
cgtcccagctgccccctcgcatccctggaccgcccacaacccgccagcccccgcgcgtcccggaccacctgcatctcagctgcccccgcgcctctccagaccgcccacgtcccagctgcccc

SEQ ID NO: 267749 - DNA, 122 bp, Homo sapiens
cagggtcctgtgaccgggaaggccccgcatctgctgcacccggagtggtggaggccagaacgctcgccagcaaacccgcccgttcacagaggcaccggagcgggcgggcgggggcggcctgc

SEQ ID NO: 267750 - DNA, 122 bp, Homo sapiens
ctaacacatcaaacacgacacttcaaagagaagaagagccacaaggatggagcagtggagcgttccagtccccaaatgctgggaaacaaaggctgctgctccgtgcccagggctcgcgccgc

SEQ ID NO: 267751 - DNA, 122 bp, Homo sapiens
aatttttggttgtcacaatgatgggaaggctgttactggcatttagtggatgggtggtggcggagatgctgggcatcctgtagtgcacaggactgtcccacataacaacttccaaatgaccc

SEQ ID NO: 267752 - DNA, 122 bp, Homo sapiens
atggggtcagggaccccacttcggctgtcaggcaagggccctttctcttcctccttctaacggggcctctggctggccagcctcagagccacaccccaagagggaacagcagcttctgccta

SEQ ID NO: 267753 - DNA, 122 bp, Homo sapiens
aaacggcctcacccaaaagaaagaggagaggctgttcgcgcgaggctgttcatcgtggcacgtctgtgacaggaaaagcctggaaacaagcccaagccagcacttgggcccgagtgcacgcc

SEQ ID NO: 267754 - DNA, 122 bp, Homo sapiens
gcaaggaatagatggggtattgcatatcccatggtcagcacagtcgcctggcacagtcagcgctccatacacctgagggaatgccttattacctttatttcttctcttctcttccctgataa

SEQ ID NO: 267755 - DNA, 122 bp, Homo sapiens
agccatccccaatccatgccccacaggaagcctgtgccacatccaaaccccacttgccggcgtcaggtcagcctggtgtgtccagccgtcccaaccagtgctaaaagccctgtgtttagtga

SEQ ID NO: 267756 - DNA, 122 bp, Homo sapiens
cacccagcccttgtaagggctccatcctgggatttgagatctgtctgtgggtgcaggtggcgggaggcgtgtggggtggtgggggtcattgaccggccacctagaaagtaacagaggggcaa

SEQ ID NO: 267757 - DNA, 122 bp, Homo sapiens
atcactgagcctcagttttctcatctgtaaaatggggatcttagcgacttcctctcccctcgtttgtgaggagatactgtgtctgtagtaggtgctcagcgaagaagcactgcaatgccagt

SEQ ID NO: 267758 - DNA, 122 bp, Homo sapiens
gtccgtgtgtggaagccctttgtgaatgaaaaagccttgtcctccatgcattgctattaacgtcggggtcatgtggctttggacacagatgggtggggcccagggtctaattccccatggtc

SEQ ID NO: 267759 - DNA, 122 bp, Homo sapiens
ttctgaagtgcaggctctcagcccggcctccaccagttgttcccagcgttctttcaagggcgtgtttgttcatcggctctgtggcagccgtccacgccgttgctgcagaggctttattggag

SEQ ID NO: 267760 - DNA, 122 bp, Homo sapiens
gcccaggatcctgcagcacaggttctgcagcagaacgttcggcgacttctggtccggggtcgccatcctcgcccggagccgtgcacggtggtccgggcagagccgccactgccgccgcacgc

SEQ ID NO: 267761 - DNA, 122 bp, Homo sapiens
ttgagcgctctttgggacccagaaggagtccttgcacagggaaggcttgaggtgagaagccgcttcccagactgtcagggccaggcctgggtctagaattcttgctgctgctttgcagagtc

SEQ ID NO: 267762 - DNA, 122 bp, Homo sapiens
ccgtttaactcagctatgtaaacaagcagagctagactatgctcaaaccctaaatattagcgttaccactcgcctgccacatactacagcatcattagttatgaaagtgttttaatacaaga

SEQ ID NO: 267763 - DNA, 122 bp, Homo sapiens
tccccgtggggctctgagaacagatccggggaagccctctgcagcagtgaccgccacccccgccacctgcacctgaccactgacatcctgcgggaagaggcgctggctcccagggaggcctc

SEQ ID NO: 267764 - DNA, 122 bp, Homo sapiens
gaagcacacacacaaacaccacagctgaccaggaacttagtgcaaagtctccaacgcagtcggcggtcccggcccctccctcccccggggccgccggggatccaggtgaaggaattgacttc

SEQ ID NO: 267765 - DNA, 122 bp, Homo sapiens
aagtggcccccgccgccctgcgtcggacctgtccaccgcgagcgccgatccccctcttcgcggagacagtcatgggccgggaggctccagcagtagaaagtcagccaaacggggctttccgc

SEQ ID NO: 267766 - DNA, 122 bp, Homo sapiens
tacataggaatatctcctgtttcacaactttgttgtaaattttgactcatattttccctccgatgctggggatgtaaaaaaaagtcagcctgactataaatagaagcactgacagtctgaca

SEQ ID NO: 267767 - DNA, 122 bp, Homo sapiens
aatggccagctggtgcgcgcgatgggcttggagcatagcgtggtcaaaaagcctggataacggaacggtttggacggcaccagcctcttgaagccagggcaggcagagcagggcaaaagcca

SEQ ID NO: 267768 - DNA, 122 bp, Homo sapiens
ctgcctccccttcctttctctttttgtgaagaggtgctcaggcccttgatggggtcttctcgcccctgcaccaccctttgttattcatccttgagaggtttcctttttttttttttgccatc

SEQ ID NO: 267769 - DNA, 122 bp, Homo sapiens
ccatcttctcatgggagtttcagttttgtttcttgtgacctctatctccactgcactgttcggcaccaccccaaacacacccccaggctggttccacagagcagggtcttgctttccatccc

SEQ ID NO: 267770 - DNA, 122 bp, Homo sapiens
tgctgtgatccgaattctcattggttgggaggggatctcatggccccactgctgtaattacgtgctgtgatctgaattctcattaggaaagggatctcactgcttaagcactctgctgcctc

SEQ ID NO: 267771 - DNA, 122 bp, Homo sapiens
ttttacacaaaatcacaggcagcccggaggcctattagaaatcaccagactggctgggcacggtgactcacacctgtaatcccagcactttgggagggtgaggcagacagatcacttgaggc

SEQ ID NO: 267772 - DNA, 122 bp, Homo sapiens
gccgcgctccccgcccctgctcacttagggctgttcgggcgctacgcagctgcctgtgagcgcgagcctctttcggctttccagtttgtctcggtcctttggaacgtggcaaacgtggaagc

SEQ ID NO: 267773 - DNA, 122 bp, Homo sapiens
ctgggaccgggtccgattcccggaggggtcgggggatttccccggagtgctggccagactcggggttcgtaggggaagctcctggcaactgttacccaacgactcccaggcttgcagcaagc

SEQ ID NO: 267774 - DNA, 122 bp, Homo sapiens
gccccgcaggagtgccggggccccagggcgcccgagcccgcgcggccacgtgctcctcgccggatgatatttggaaagaaagtgctaatggccaatctggtgtttattttgaaactgctaac

SEQ ID NO: 267775 - DNA, 122 bp, Homo sapiens
tcccgaggggacaacgggacgaggggataacagcagccaggacccttcagcagggctgggcgcgctccaggcccggggcagggcggcgggagctggtgcaccgccgtcgccggcccgcaggg

SEQ ID NO: 267776 - DNA, 122 bp, Homo sapiens
tcaggagtctgcttggggcacacaacactagaagatgtccttctgcacattgtttcatatcgagtgtgtattttgtggtgatctgggatgctgatagaaataattggatgttagtgccctaa

SEQ ID NO: 267777 - DNA, 122 bp, Homo sapiens
agccttctacaccagcaggtacggctacaagatgtgtctgcgtatctacctgaacggcgacggcaccgggcgaggaacacacctgtccctcttctttgtggtgatgaagggcccgaatgacg

SEQ ID NO: 267778 - DNA, 122 bp, Homo sapiens
ctccatcacagggtgatcgtggcatgatgggacccccaggcgtgcctggacccaaggggtcgatggtaaggagtaagtctgcatcctcttgccctctcctgttgcagccttgagtgacagct

SEQ ID NO: 267779 - DNA, 122 bp, Homo sapiens
ttttaggcaggacaagttttacgcctggccaaataagggtcagactaagcaaggcgcctccgtgcgcctagccagagcggtgccggctgcggaacctgccccgccgggagcctagtgccatg

SEQ ID NO: 267780 - DNA, 122 bp, Homo sapiens
ggcgtgcgtatgggcgggtcaggtggacaggcatgtgtatgggcaggtcaggtggccaggcgtgcgtatgggcgagtgaggtgggcaggcaagtgaggtgggcaggcgtgcatgtgggcgag

SEQ ID NO: 267781 - DNA, 122 bp, Homo sapiens
ttcttgggcagtggctgtgggagctggaatggcgcagctggaaggttactatttctcggccgccttgagctgtacctttttagtatcctgcctcctcttctccgccttcagccgggcgttgc

SEQ ID NO: 267782 - DNA, 122 bp, Homo sapiens
taatgtctgttgtggcctgaaaagcgtgtgttccttggctccttcctaggctcattcattcgctcatcaagctttgagtgagctcctgccctgtgcccacatgtaggaactcccctctctct

SEQ ID NO: 267783 - DNA, 122 bp, Homo sapiens
ttttccctctgtctggagcagagctgggtgcgaatttgaccaacgggtggcaggaacagccggagcaggatattaaggagcgggcgagcttgccaagcatgcgcagtagcggcgggttggtt

SEQ ID NO: 267784 - DNA, 122 bp, Homo sapiens
acctcgtgatctgcccgcttcggcctcccaaagtgctgggattacaggcgtgagccacggcgcccggcctttcacttggttctctatgaaaaaattaaagagaaaatctgattgacactgtg

SEQ ID NO: 267785 - DNA, 122 bp, Homo sapiens
ttttaaactggcgagtggtctgtgctttgtcttcaagaacgcgcccaggctcagaggacccggaagcctatatctttccaaagtccaatttagccagagccagcgtaaacgtcgctctcaaa

SEQ ID NO: 267786 - DNA, 122 bp, Homo sapiens
aaggaaaaagccttgtgttcccaacatgtggactttttgtaaaaacagggcttcctgtcccgggatcacgcaatatgcaaaagaggcaggtgacattgtaagtcaggataggaaggcagaga

SEQ ID NO: 267787 - DNA, 122 bp, Homo sapiens
cacaaaacagggccaaccttttccatttgatcttacagctcaaatgtcaactatgccatacgttttatgtgacttgaaagaacaaaaatggaaacaaagattttaaacattccattcttcct

SEQ ID NO: 267788 - DNA, 122 bp, Homo sapiens
cagattacttcttgacctttcagctaaaatcaagtgtagtatctgttcttatcagtttgacgtgtcccttatctgaggatgtaataaaaataaaaataaataaatggaatcatgcagtgtgt

SEQ ID NO: 267789 - DNA, 122 bp, Homo sapiens
catggccacctccagggagtcagctgtgagagcagtcatttcccagcagccatctgaagccgtgggaaaagccttcccaagctgtcagaggaagagccggcctgcccggggcaagcccgccg

SEQ ID NO: 267790 - DNA, 122 bp, Homo sapiens
cacactgctgctggaaaagatagtgcaaaagttgagcgcgccgagggctctcttttctcccggaaacaatttttccctagacccggaagcagttgttgtttcaagggaggtgggactgggcg

SEQ ID NO: 267791 - DNA, 122 bp, Homo sapiens
taatggttagaccataactgaaattcattttcgcaggctcatttgggttggccctgaaatcgcactggtgagccaggatggagatgaagagaaaaagctgcatcttagaaagttcttcgcca

SEQ ID NO: 267792 - DNA, 122 bp, Homo sapiens
gcaggtccacgctgcaccccccgccctccgggttacactgcaggtccacgctgcaccccccgccctccgggttacactgcaggtccacgctgcaccccccgccctccaggttacacagcagt

SEQ ID NO: 267793 - DNA, 122 bp, Homo sapiens
ggaggtggaggttgcagtgagctgagatagcgccagtgtactgcagcctgggcaacagagcgagactccatctcaaaaaaaaaaaagaataatccaatgtgccacacatatagatgtacaca

SEQ ID NO: 267794 - DNA, 122 bp, Homo sapiens
ggcggggcggagaaggttggggtgaagcagagcgccccgacctgtttgccgtgccgcgcccgctaccctggacacccaaatccggagcagaggggagcaaaccctcgctcctcgcagacttg

SEQ ID NO: 267795 - DNA, 122 bp, Homo sapiens
gtgatgctgggctaggctgagagaagctacaagagagcaggcgtgcaagggctccgacggcggctccctgcccgggctgccgctttaaatagccctcgcatcacatgaggagacgtggccca

SEQ ID NO: 267796 - DNA, 122 bp, Homo sapiens
ttgtgtatgtgtgagtgtatgtgtgtctcagcgagagggagccaggcactcacacccacacgcacacacaaacacactcccccgtactccccgcatgcacactgccccccacgcgcgcgcgc

SEQ ID NO: 267797 - DNA, 122 bp, Homo sapiens
cctcccatgctagggcagggctttccttcattggaggaggagctgggaagggcttgacagcgggccgggcagcccattggtcttaaggccagagtccccacgttggccacgtttgccataca

SEQ ID NO: 267798 - DNA, 122 bp, Homo sapiens
ctgcccccggggccgccttggaaaacccggcgcggacataaaattaaagcggacgggctgcggaggcgactgcagattgacctgtgaacttcagacaggccacctacctacgctgagctcct

SEQ ID NO: 267799 - DNA, 122 bp, Homo sapiens
ctaaggcaccaatgtcctttttcctccttgtaagtaaccccggtgggagtaacatggtgacgtgggaggttgcattgtgaagatggtagctagttactcaagcctcggttcctaaatgtcag

SEQ ID NO: 267800 - DNA, 122 bp, Homo sapiens
gagttggattctatcctgcaagggcacggggacccacaacgacggctgtccctaaagaaccgttgcgactggtaactgaagtggaagagagtccagatttcttgtgtgtggtcaaggagacg

SEQ ID NO: 267801 - DNA, 122 bp, Homo sapiens
cgcctgctgctcaggctggaacccggcggcttccgggattctcgctttcctccactcccccgctttctcctgagcgcctactgtgtgccaggatctgtcctaggctccgggtagacagcagt

SEQ ID NO: 267802 - DNA, 122 bp, Homo sapiens
ctatgtactgcagactctgggggtgctgtggggatggaacacttctgtttttgtgctgcccggaatgcagacacaatgtctggtggtgctgcagccatcttgcatcccaaggacaacaccca

SEQ ID NO: 267803 - DNA, 122 bp, Homo sapiens
cacatggcctctgaggaatgtcagcagcaaggtcacgtgggcctctgctgcacccacccgcgagctgggacgtggcttccctgagcatacaggcaccttgccacctgggcacccccttgggc

SEQ ID NO: 267804 - DNA, 122 bp, Homo sapiens
ggtgtggagggagaggtgtgggtgggaaccgaggttgcatgtggcccttgcaggccagcgcgagttccgggtgggcgcaggctcggcgggccctgcacttcgagcggccggccagtgccact

SEQ ID NO: 267805 - DNA, 122 bp, Homo sapiens
gattacatttaatgctcacagcaactctgtgaggtggatattttattgtctctgttttgccgattcagaacttaaggctctaaaagttaaactcactctgcagatcacagggctaggaagtg

SEQ ID NO: 267806 - DNA, 122 bp, Homo sapiens
gtcaggacaccctcactcccgacaaagatgcctttattgggcgacagacgcggggtggggcgctagcgggggtgcacggcgggccggtaggccgccaggatctcggcgctgtgcggacacgt

SEQ ID NO: 267807 - DNA, 122 bp, Homo sapiens
gagtctgggctctcctcctgggccctgcatttgctcggagttgctagtggtcccggtagacgtgtgggacacccactggttttagaataaaaactcgaatgagacattggaccataatggat

SEQ ID NO: 267808 - DNA, 122 bp, Homo sapiens
gctgcccatgacatttctttccagacaggggagccattctggccccgctcacctgggctgcgtccaaggcctccttttctttcctttcctaccacacagatacgcacctgccagacacccag

SEQ ID NO: 267809 - DNA, 122 bp, Homo sapiens
gcggtgcggaatcgtgtgtccgcgtgtggacggcaggccgttctgcaggctgcagcgcgccgggggcttgtagggctgagcgcatgctcctctgggtttgctgcccaccttacccagctctg

SEQ ID NO: 267810 - DNA, 122 bp, Homo sapiens
acaagtatgatgcacttagggaacacaaaataatttttattaccttaatccagacaattacgagaagataaatctgctacaaaatgccataattcactcgctccctcacacatgcgtaacac

SEQ ID NO: 267811 - DNA, 122 bp, Homo sapiens
cccacccacctggtcggcgatgtgctgggtctcggcggtggccggctgcgtggcggagggcgccccgcacatcatcttggcggcgacggagggaatctggcgaggggactcggcgaggggac

SEQ ID NO: 267812 - DNA, 122 bp, Homo sapiens
atgcttgacttaccccacagaatatatttacagtagcaacacaggcaatgccttagtcttcgttataactttgtcttctgatcgactctgttcagtagcagggacttactatcctctttggt

SEQ ID NO: 267813 - DNA, 122 bp, Homo sapiens
gttgctctgattatcaagaaaaccaaacgttcacataaaatgtttgtcttccagccgccccgctgttttccactttttccaaaaagcactgaagcgtggtgaagaaacaaacatatcctcaa

SEQ ID NO: 267814 - DNA, 122 bp, Homo sapiens
tggattccagcaggcagtgccccctccccgcaggcttggctggcagagttttccaccccgcggccaggctgcaggtgccccacctgttaggagcctccccacactgaaaggctgcctccctc

SEQ ID NO: 267815 - DNA, 122 bp, Homo sapiens
acaccgacaccgtggcatgcaaggagccaaaccattattaaatcaaagactgctggagctcggattccccgcggggataaatcaagtgcaaagccgctcgttcgcacgagtgcgttgctgcc

SEQ ID NO: 267816 - DNA, 122 bp, Homo sapiens
cgggcggagctgtgggcggctgggcctgcgattggcagggctgggcaggccgggtggccgcgggagcccgggagccgtagagcggcggcgccgggggaggcgcggagccggccgtagcgcgc

SEQ ID NO: 267817 - DNA, 122 bp, Homo sapiens
ctcgtgcacgtaggggggccggaagacgaggggcttccctcctgtccccaaagtcccccacgctctccgtgccccggggctgcagagaagacagctctcaccccgcgtgtgccaaggtgggg

SEQ ID NO: 267818 - DNA, 122 bp, Homo sapiens
ctccgtgagtcttctgtcagtcattggctccctgcggtttccttggggacgtggcgccgccgccggccgggccctccttccggctgggcaaggggccgcggggagcagctcgggactgaacc

SEQ ID NO: 267819 - DNA, 122 bp, Homo sapiens
aacagctctgtctggcctcccaggaggagcctgcctttccttttcttcatgggaaaagtgcgatcagtttgtgaaggaatgtccgcccccacttgatgccagaggctccacatggtgactgt

SEQ ID NO: 267820 - DNA, 122 bp, Homo sapiens
gtgacggcggcgctagccaatcagaggcctgatcggggtcgtgatcggcggactaaagggcgggcggagaaggaagcggcatgaagaaggcgaaaacggcggcctgacttcctgtgactgac

SEQ ID NO: 267821 - DNA, 122 bp, Homo sapiens
gcacacatgtgggcagacacacatacagcctcagtcttccctggctggttcccagcttgtcgtcttggaagaggaggaggtggggtacacccaagctgtgaattgggagacaggtcatgaca

SEQ ID NO: 267822 - DNA, 122 bp, Homo sapiens
ggctctagaaaagggatgtctcgtgatccaactgtggcttcggttccatatcttgatcaccgcagggcgggaacccaggggtccttgtgggcccacgggaggggcactccgctactcagacc

SEQ ID NO: 267823 - DNA, 122 bp, Homo sapiens
cttttctctagcatggttgatcacaattttattattgacaatttaggaaaatcccaccctcgcatttattactgataataacatttacacttttaatatgttttcaaattttggaagacctc

SEQ ID NO: 267824 - DNA, 122 bp, Homo sapiens
tggcttttgtctgccagagcccgtttttagcataaaggtaaagtcacctatgagcgcaggcgtgtagaccagtgcggagggtcagaagatctaccccgtgacagcagaggtcattattgagt

SEQ ID NO: 267825 - DNA, 122 bp, Homo sapiens
actgacaatgctatagcatcctggccatatccagttttgaaaacactacggtgtcagccacgcaccatttaggacggggagaatggaaagccagtttggagaacagacgctttcttaagagt

SEQ ID NO: 267826 - DNA, 122 bp, Homo sapiens
aagacaagcaggacggagaatggctttttcatgggagcacgaatggtggttcaacccaagcggtgtttactgagcatctactatatgccaggcactgtgactgggggagggaagccttgcct

SEQ ID NO: 267827 - DNA, 122 bp, Homo sapiens
ggggcagccttggccgggcttctcccttctctccatggcagtcacacccccaccctgctccggagtgctcagtgcttccccagcaacaaggagccctgggtcaccagccttccagcccctcc

SEQ ID NO: 267828 - DNA, 122 bp, Homo sapiens
aggcgggtggccccttcctcccgcacctctccatgtgcgtccctcccgaagctgcatattcggtcgaaaaggaggagcatcccccatagaagaggacaagtcaaggatataggagtagctgc

SEQ ID NO: 267829 - DNA, 122 bp, Homo sapiens
taatgtgcaagcgccagggccggctgtggtcaggcgggctattttctggcaagtgtggcgcggggctggacgcccctgccggcgggtcgccgggtctcgagctgcgccgccccgctggaggc

SEQ ID NO: 267830 - DNA, 122 bp, Homo sapiens
tgcaaggacacatgctcacagtcactatgtaaatggtgtctatagccaggtttttgtaatcgaactgcagaaacctggagttttatacctgtatggcagaggaaaaaaaaaaacaacaacct

SEQ ID NO: 267831 - DNA, 122 bp, Homo sapiens
cgcaaatggagtggaaaacatttaaatagctaacatctattgattcctttttatatgtaacgcacgggctgaggggctttacatgcgttttctcatttaatcctcctgataattccatgaag

SEQ ID NO: 267832 - DNA, 122 bp, Homo sapiens
gaggcactctgtctgaaaaaaaaaaaaaaaaaaaaagaaagaaagaaatatttgtggaatcgccaaatgtgcatgtgggcctccctggccaggctggcctgggatggctccccgggctcccg

SEQ ID NO: 267833 - DNA, 122 bp, Homo sapiens
accccagtacaccagcagaggaaacttataacctcgggaggcaggtccttcccctcagtgcggtcacatacttccagaagagcggaccagggctgctgccagcacctgccactcagagcgcc

SEQ ID NO: 267834 - DNA, 122 bp, Homo sapiens
gaggctgcactccccactccagggcagaggtggggccagcaccatgggtaggagtgtgcacggggctgctgaaatgctggctggatcactagttttcactactaatcacatcctgctagtgc

SEQ ID NO: 267835 - DNA, 122 bp, Homo sapiens
tcttccctggaactgcctctgtccccatctccacacccactcccgtccccgtcatgttcccgagatcgctgctggcctttctgtccatgaaccttgcagtcttggggcctttgcacaagcgg

SEQ ID NO: 267836 - DNA, 122 bp, Homo sapiens
tttttgctgggacgtcgggacctcaagtcagttccaaagtgggagtctctcagccggtgccgttcccttgcgagattgttaacgccaagagccacagtccagcttccccttttagagatcag

SEQ ID NO: 267837 - DNA, 122 bp, Homo sapiens
gatgagcagaagtcaagtgtaagaggctgatctgtgtcagtcattcacaagagaccactgcgctttgttgtggattttgtatgggggaggggtggagaaccagtttttttcaacaggtactg

SEQ ID NO: 267838 - DNA, 122 bp, Homo sapiens
tattcagagccaggcagcaggagggagctttgccccagaggaagctcagccatgctgttacggagagggcgcgctcccctcgatgcaccagccgttgtcagaggaggcccacggcagcgggc

SEQ ID NO: 267839 - DNA, 122 bp, Homo sapiens
agttgtcactgggcgaggcgtagctgcgctctacgccgcggaggggcggcctcttggaggcggggaccgggtactcccgctgcagcccccgaagctccatctcctccggatcactcaccgag

SEQ ID NO: 267840 - DNA, 122 bp, Homo sapiens
catgttccacccgcctcggcctcccaaagtgctgggattacaggcgtgagccaccgcgcccggccaaagatgtttttaaaaagtaaatccagggtgaggaggacagtcgtggtataccatat

SEQ ID NO: 267841 - DNA, 122 bp, Homo sapiens
gggagcagtttgagaaacacttccttagatggatgagtgcttctcaaatttcaggtgctccgcctcccgggttcaggccattctcttgcctcagcctcctgagtagctgagactggttaaag

SEQ ID NO: 267842 - DNA, 122 bp, Homo sapiens
aactccgtggccagttgaagcgctggatgtttcctagaacaagaaccaccaaagcctgttcgcacagaagggcgaccttgcagggactcgccgccgcgacctcagtgtggcttttacaggac

SEQ ID NO: 267843 - DNA, 122 bp, Homo sapiens
aaggcccgcggccgtttatgggaagacccgagagatttgcatcggggccctgcggaggggcggaggggcggaggggcggaggggtcgcttgccggtctgaggggcgaggccgcgaccaggcc

SEQ ID NO: 267844 - DNA, 122 bp, Homo sapiens
gaaagcccaaagatgtccggggtcggggaggaggaaagtgtctctcatctgtcccatcaacgaaaattagtgaaatctgcctcagatgaagtgcaaaggccagtctgcagggatagtttcaa

SEQ ID NO: 267845 - DNA, 122 bp, Homo sapiens
gggccccgccctgccttctggggcaaagcggagagtggtcggttctgccccacagtaacgcgaggaaagaaatctcgcgaggctggagttctccgggagcgccggtcggaggcggtcggcgg

SEQ ID NO: 267846 - DNA, 122 bp, Homo sapiens
cactgtcttcgacctccaatcaggactcggggtctcggagctgtaccaatcggagatgaccgtggcctcaacagggccaatcgggggactcgagcccgacaacagggcaagccgccaacagc

SEQ ID NO: 267847 - DNA, 122 bp, Homo sapiens
ttagcggccctcacctccgcggggcgcaaaccctgcagctccggggcaggctgcggggcgcgcgggccgcactttaaaggaatctcaccagattttctccttggaaggggacgctctcttcg

SEQ ID NO: 267848 - DNA, 122 bp, Homo sapiens
cctcccactctctgtcccaggtgcctgcgtgaccccatttgtgcgccctgagagaccctgcgcagccaacagcctctgtggtcttggtctgcttccccgggggagtcccttgagggtgagtg

SEQ ID NO: 267849 - DNA, 122 bp, Homo sapiens
caaggtcacacattcagaaagggcagcagctgttagactccaaagcccaattcctaatctcgacgctgcacatcctctgacagccgggtcctgcaccaggcacagggacgtgtgggtgggtg

SEQ ID NO: 267850 - DNA, 122 bp, Homo sapiens
gcccgaggactgggaggggtggaacagggtccctccgatctccggggattccctgcggggcgccccaaccaatccttagggcccaaggctacgcgctcggcagccggctcctccggagcgtc

SEQ ID NO: 267851 - DNA, 122 bp, Homo sapiens
tccctagtatcacattctcagctacttctgcctccttgaaagtttctcatgatgaaatttcgcaaaattgtaactaacataaaagataacattattttccccatgctgtggttcaagtttag

SEQ ID NO: 267852 - DNA, 122 bp, Homo sapiens
agcatcatcggagaagacgaagcaccctggccgccactgtccgtgctgcgccaactcgcccggccgcccgcccttccgagggcaggcagaagcccctctgtgtcctccaccgccgcgccccg

SEQ ID NO: 267853 - DNA, 122 bp, Homo sapiens
ggcaatccgccccccacagcctcccaaagtgctgggattacaggcatgagccactgcacccggcctgggttctttattaaagcaatgaattctggatgtcctggcttaactagattaagagg

SEQ ID NO: 267854 - DNA, 122 bp, Homo sapiens
gaagtccaaagtcaagtcccttcttgctggtggggactttgcagagtattgaggcggcaccgggcgtcatatggtaaggggctgagtgtgctacctcaggtgtctttttcttttcttataaa

SEQ ID NO: 267855 - DNA, 122 bp, Homo sapiens
ccctcctctccactcttaaggagatgctactaactcgctagcggggattcaacccggaggcgcccgagggcttttccgattctaggcggggctggggagatgccaggatccccagggctccc

SEQ ID NO: 267856 - DNA, 122 bp, Homo sapiens
aggggccccacacgccactgacctgggtgtcggggcacgtcgcgggccacctggtagtagcggtagaactgctccctccacaggaactcgtcccgcgacacggcctgccattggcggcacac

SEQ ID NO: 267857 - DNA, 122 bp, Homo sapiens
taattgattgcctactgatttcttggtttccttgactatttcgttgaaaggatctcaagccgctgtaaaacttgcattttaacatctagcgtgacattctccctctgtttagtgtcattttt

SEQ ID NO: 267858 - DNA, 122 bp, Homo sapiens
aaagagatggcgcccctggggccagatgcaggaggtgggtgcacagaaagagtggctcagcgaggccaggggagataccctgtgcacagttgttagcagcgctgagttctgagaggttgggc

SEQ ID NO: 267859 - DNA, 122 bp, Homo sapiens
cgcagctgtgaggtggagcagtgggactcggatgagcccatccctgccaaggagctagagcgaggtgtggcgggggcccacggcctgctctgcctcctctccgaccacgtggacaagaggat

SEQ ID NO: 267860 - DNA, 122 bp, Homo sapiens
tgttcaccatgtgcctgcttccaatgccaaatccagcctcagaaagctttctggaagtgacgccaacttcaggggcaaggccctggttctggggtcagcaccattccgtggttcctgaagag

SEQ ID NO: 267861 - DNA, 122 bp, Homo sapiens
ggcttgggaagaaaacagcagaaaagaaactgctcattacacttacagagaggcaagtaacggtggagatgaggacagagggaaccaagactctgaaagacaaaaaatacaaatagagcgaa

SEQ ID NO: 267862 - DNA, 122 bp, Homo sapiens
ggcctgcctcctccgtctggctgcgggcggggagtgcgcctggctcccgagcccctgacacggatttggggcctgcaatgacgatctaccccacaccatccacattcctgggaccctcgggg

SEQ ID NO: 267863 - DNA, 122 bp, Homo sapiens
gtccagttagacggggcgatctgatctgcgggaaaggtgaccggagactcccacccaacccgccaatgctgcagaaattacaggggcgtgggaaaccttggaaccatctactactggcagct

SEQ ID NO: 267864 - DNA, 122 bp, Homo sapiens
aaggagcctggagctctgacggcgggaagcaggacagcactggggagtccttcctggtaccggagaactcagcgctgaggggacttccggtgggccggccgctccccagcagggaaaccatg

SEQ ID NO: 267865 - DNA, 122 bp, Homo sapiens
ggttctgctacattttatttaatatgatgtaacacttggtaatctagtaaactgtgatgccgggcaattaatcaaagggaggaagagacaaaggtccctatcaatgcactttttgttggtga

SEQ ID NO: 267866 - DNA, 122 bp, Homo sapiens
taaactcctgacctctggtgatatgcccacttcagccccacaaagtgctgggatgacaggcgtgagccactgcacgcctgcccattgctgctctacagatgaggacatagagtggttcaggg

SEQ ID NO: 267867 - DNA, 122 bp, Homo sapiens
cctcctctgagaagcctcttctgatgagcactacccgggctgtcttccccaggcctcactcgtgcagcatgggtaccagccagccttgtgcaaggcactgctcttggccttgccccaaccag

SEQ ID NO: 267868 - DNA, 122 bp, Homo sapiens
ccttgagggggggatcttttctatctctaattacctgtatgtgtaaagaactcaagaagacgtcagaacagggtctcctatcaactgctacctattgctgtctcgcaaacatccccctaaac

SEQ ID NO: 267869 - DNA, 122 bp, Homo sapiens
ggcagctgggaggatttttgtcttgttcctcacacagcagccagtcacaaggtgctcaaacggaatttaaagggtgctggctgcgctgtggaacaaatgctcacagctagaatcagcagcag

SEQ ID NO: 267870 - DNA, 122 bp, Homo sapiens
gattttccaaagggagtaaaagccgatcggggcctacttttaacattccacaattagtaacgtctgattcgtttgtttccacagtgggtacgctgcgaagactaggcttatgttacccagag

SEQ ID NO: 267871 - DNA, 122 bp, Homo sapiens
aggccgcgccccaatccccgcgtcgcccccgaacgcgatggaccgcggctgccggcccggcgccccccgcgtccccaaggaggggccctcaggtctggcccgggccccacgcgcctcggcgg

SEQ ID NO: 267872 - DNA, 122 bp, Homo sapiens
tcccacagccgccatgactccgtagccaactcaaaagaaggcgcaacaattcgcggcagtcgcccagccacgaggacggcagctggggctgtcaggagccctgggggacacttcatggcccc

SEQ ID NO: 267873 - DNA, 122 bp, Homo sapiens
cagaaatgggtctttaaaagtttccacattgtttagctacacaaacgtgtttgcggttcccgaggccctccccctcccccacccgcctccgaatctcatttcactttacgactccaattgtt

SEQ ID NO: 267874 - DNA, 122 bp, Homo sapiens
gtcacctccctccttgtacaaggtttgcgtccggaagccgggtgccatagtgaggaccctcgtcctccagactggctggcaggagtcaggccccagcagccctcctgcccccaaagctttcc

SEQ ID NO: 267875 - DNA, 122 bp, Homo sapiens
ttgctagctgatgtgttcatgactttcaagggttattaaaaaataaataacttccagtttcggcaagcagagctggggtacctgcgggactctgaaacagcatatggaattatggaatagcc

SEQ ID NO: 267876 - DNA, 122 bp, Homo sapiens
tctgtttttgatgtttagcctagaagtagcaagaaggatgaactgaagcagattagagatcgagctggtaatccagatgagaaataatgaaagtcttctctagggtaatagtggtgaggtaa

SEQ ID NO: 267877 - DNA, 122 bp, Homo sapiens
gcagctttttcgatttcctgccggctctcggccccgcagtgcgttgtggccgcgcgctagcgctgtctctcgcacccagcccatcgatgacacgcgcacacaggcgctgcaacttttctttt

SEQ ID NO: 267878 - DNA, 122 bp, Homo sapiens
cttttttggcacctccaggttcaaccaccagtctgtctctgctgtgcccagggtagagcccgggggctgtgagtatgtgtggctcccctgcccgtcatcgctctggctcaagctcatgctgg

SEQ ID NO: 267879 - DNA, 122 bp, Homo sapiens
tcacaagcccggggactaaggttcagtcacttagaaataagactctccatttgaaagtgccgcaacaatacaaaatatgcctgtgttcatgcctacaggaaaaacaggttgagaaaaatagg

SEQ ID NO: 267880 - DNA, 122 bp, Homo sapiens
agggtctagactttcctcagggtccaggggcgcacctcagggtgaactggaaaactcgaccgcactttagtgccaggtgggcagggatccccatgtcagggtgggagtggggcggctgattg

SEQ ID NO: 267881 - DNA, 122 bp, Homo sapiens
tctctctggctggtgactgggaggaatcagaggagggagagctttcttcattaaaaccatcgattagtgtttttttaattggttccctttgtgatcagttgctgtactgtgagaacagctat

SEQ ID NO: 267882 - DNA, 122 bp, Homo sapiens
gagacaggcctggaaacggaggcctgcgctgaatgggcaaagccgggttgatgatccagacgaggccctggagtctgggccttgggcccctccccttctgcctgctccggcagcctgtgggt

SEQ ID NO: 267883 - DNA, 122 bp, Homo sapiens
cactgtttagtttaactttaggcagtgtggtctggccttagtaatattagttctattgtgcgttacaaagctgggcctacaattacctttgttagtactgtttattttgtggatttggtctg

SEQ ID NO: 267884 - DNA, 122 bp, Homo sapiens
ccccgctgttcctgcgcgcagcgggggcagtgcccccacacccacgcgtgatgggaaggccggcctgggggtgggaaggcccaccgaaatagatggtccccacacctcactgcttccttgga

SEQ ID NO: 267885 - DNA, 122 bp, Homo sapiens
tagtgaatacacaaaccagcgacatagtcacgtatcatcatcatggtcaagcactatgcacggttcataaccacacgtgctgctcctctgtaggaccgcagtgcagcaggtctgtctacgcc

SEQ ID NO: 267886 - DNA, 122 bp, Homo sapiens
atcacctcccaggagatgaagtgtattcttcactggtttgccaattggtcaggtccccagcgtgaacgtttcctagaggacctggtagctaaggcagtgccagaaaaattacaaccactgct

SEQ ID NO: 267887 - DNA, 122 bp, Homo sapiens
cccgagggtctgcacagcctggggcaccacccggcctggtgaggatgatcgctgtgcgcgcgatgcacatgcgccctcaacacctctgcacattcatgcacgtgtccatacatgggtgcaca

SEQ ID NO: 267888 - DNA, 122 bp, Homo sapiens
aagccccctgaccccttctttaaaacagatttattttgcctttgttttcatttctgcattcgttccccttcgttcagtcccatagtaactgtgacaggaatatggagcagaaatggatgaag

SEQ ID NO: 267889 - DNA, 122 bp, Homo sapiens
cacagaaacccagagcctgtggaaccccagatcgccccaaagcactcaaaggacctagcccggagcaccacaaacccttgtgcaagggcagccccgaacagcaaaggcacccgcatccaggg

SEQ ID NO: 267890 - DNA, 122 bp, Homo sapiens
tgtctgtattcggacgcccacccccaccggccagccagagcaactcatttctcagccctccgatgtctgtgtccatctcagcccccactgtcctccgggcagggagagcaggacaccaccca

SEQ ID NO: 267891 - DNA, 122 bp, Homo sapiens
gcagcggtaatcacagtgagcaaagttgaagactataaaagagccaggctaacgtgctgccgagcaggtgtcctggattttattgtagttgcaaatatgcttctggtgataagtatcgaaat

SEQ ID NO: 267892 - DNA, 122 bp, Homo sapiens
ctgggggcaggagggggaggggttcaaaatggctgccaagatggctgtctcgctgtctcgcgctctctctctcgctgtctctctctcgctctctgtctttctctatatctctctctctctct

SEQ ID NO: 267893 - DNA, 122 bp, Homo sapiens
agccactgagcccggcccagtctttttcttaaaaaatctgctcacaattccaattatttgcgcaatgctgtactaagtacaagagaaaggtgtttcctctcagccaggacagaaggtaggaa

SEQ ID NO: 267894 - DNA, 122 bp, Homo sapiens
tgtgtcagggagatgggggtagtctttctccctgctaatcaagacccactagagcaccgccgtatactgcacacatacttctgaatgacaggagctttgtgtgagatgagaaagctgtgtca

SEQ ID NO: 267895 - DNA, 122 bp, Homo sapiens
cagttgcagtaattacaggctgttgttgttcattgtgactaagcctctcccccaaaggaacgtgagtgataaaaggagaaagagttgctgggcagacaaaatggcaggtgtttaatgccctc

SEQ ID NO: 267896 - DNA, 122 bp, Homo sapiens
ccttcagtctgcctgtcttctgagttatggtttgccttttatggtcatttgtctgattcacgcgtaggaggggaattcacagttctggccctcctgccaccccacagcctttcctgtgtcta

SEQ ID NO: 267897 - DNA, 122 bp, Homo sapiens
gaggcagagagagcctgaatggaagggactgagtaaatccccactatggggattgctcttcgtgaagactgttttagtgggctaaaacagtctttagcccactttagtgaagtttgttttta

SEQ ID NO: 267898 - DNA, 122 bp, Homo sapiens
gaactagcacctctcctggattacaggagggggtggtcttgtgcacctgggaaaggccttcgccagcactcagtgtcaggcatcttgatcagaaatgcactttcgagcctgccagggaacca

SEQ ID NO: 267899 - DNA, 122 bp, Homo sapiens
ccccgcccccggcggcagggccccgcccccggacgcgcgtccgccctcaggccacgcccccggccagccccgctcgccccggccacgccccccgcccgcccggctcccttccctccccactc

SEQ ID NO: 267900 - DNA, 122 bp, Homo sapiens
cctggctctcaacccactggagccaaagtaaactgtacttcaagggaccctggccctaggcggaacgagcctgcggctgatgggccgcccgcgtctccttgcacctgccctggcgccgcagc

SEQ ID NO: 267901 - DNA, 122 bp, Homo sapiens
cctgtccccccgacacacaggtggacccagggtcagctcgtgcacctgggaaatggctcccgccgggtagcaggggcggaggggcggggctgggcggaggggcgggggggcggggcctgccc

SEQ ID NO: 267902 - DNA, 122 bp, Homo sapiens
aaggctgcaatacaaaaggagagcaaagggaggagacagaaggcaggaggaaggaggtgacggacagcgtcgcatcacaccccaatgctcaggaggatcagggtgcagaaaggagactagtt

SEQ ID NO: 267903 - DNA, 122 bp, Homo sapiens
tttcttgggccaagaaattggcccaggactgaccttggctaagcccccactgatgacagacggattttttttaaagattattttctttagacattcttgctctgtcgcccaggctggagtga

SEQ ID NO: 267904 - DNA, 122 bp, Homo sapiens
tttggctattccaaaaaagcatatcgtggggtatatcagaattcttcggactttcttgcacgtattaaatgatttggtattgtttgtatcttgcctgtcattttctcattgcctgggcctct

SEQ ID NO: 267905 - DNA, 122 bp, Homo sapiens
agagctgccaatcgaaggcacccagtgggaaagacggcctacaatgggattttcgcatagcgaaagcttgtctgagaagatagagtggattcatagggggaggaaaaagctttctaggctgg

SEQ ID NO: 267906 - DNA, 122 bp, Homo sapiens
gtcctttaaggccttgtgagtgatgtgtgcatacacagggacccgtgacacattgtgtctcgcatcacttttggtcaaaacatcatctgtcacctcccagagtcccatagaaccatcacgtg

SEQ ID NO: 267907 - DNA, 122 bp, Homo sapiens
ccctcctccccccacagccccgcctccgcctcaaataccggcgcatccggattttgaagccgcagtggttttggcccgccaaggcttccatccaaccctaccgcaccccgcacgcccctccc

SEQ ID NO: 267908 - DNA, 122 bp, Homo sapiens
acctcatgatccgcccgcctcggcctcccaaagtgctgggattacaggcgtgagctgctgcgcccggccaaaacatttttaaaaaaggacttttgtgattacattggtcccaccctgatagt

SEQ ID NO: 267909 - DNA, 122 bp, Homo sapiens
ctgccatcatattgttcatttccaggaatttttaaattcttttctccaaatatttatgtacgtatttatttacctcccctccccttctctcccctctcctcccctcctctcctcaccccaca

SEQ ID NO: 267910 - DNA, 122 bp, Homo sapiens
tacttctaagactggctgtgtacacatagaaggaaaaagaacattaaaaaaaatgttttgcgattctaaggcagagtagtttaatagagtatggagttgggaggctgaagaactaaactcta

SEQ ID NO: 267911 - DNA, 122 bp, Homo sapiens
tctacagcgagatattgaacaacacagcgcaggggtggagtccgtgtttaacatctgtgacgtcctactgcacgactccgatgcctgtgcaaatgagaccgagtgtgactcgatccagcaga

SEQ ID NO: 267912 - DNA, 122 bp, Homo sapiens
ttgtttgaaaatcattttctccagcaattagcaccatgccaggcaccctagtagacgatccgccaaagttaaatgaatgaaaattcattctggcaaattcaccagtttcacaaggtagcttg

SEQ ID NO: 267913 - DNA, 122 bp, Homo sapiens
ccgtttccattagattcccatctttagagatgttagataaggccacacggattccttttccgacgtcatgggaagcggggtgcagggcaggtacttcctcccttgccttttcatggggctgg

SEQ ID NO: 267914 - DNA, 122 bp, Homo sapiens
aaagcccaagaccgtcgctaggcacagacggaagtgactggatgtggagaggagtgtatccgcgaaggaacgcacaagtggcctgacctgcagaagaacgctagctaggcactaggcatgcc

SEQ ID NO: 267915 - DNA, 122 bp, Homo sapiens
gggtgacgaggcgcgactgggtgatgaggcgcgactgggtgatgaggcgcgaatgggtgacgaggtgcgactgggtgacgaggcgcgactgggtgacgaggcgcatgctgggtgacgaggcg

SEQ ID NO: 267916 - DNA, 122 bp, Homo sapiens
tttcaggtcactcagccaaaggagctcagaagtagagtatattaacaaatacagacagctcgaagcacaagagcttgatgtgtgtcgcagtgtccaaccaaccagtgggccaggtaaacagg

SEQ ID NO: 267917 - DNA, 122 bp, Homo sapiens
agcctggagaggccagaggccagagacggctgtttttccttccttcctcctgagggccaccgtgaaccactccccccaccgcatggccttaaatgctacccctaccctcaggcagcctggac

SEQ ID NO: 267918 - DNA, 122 bp, Homo sapiens
taggagcccagtgccaagcaggtcccccagagcagtcaagtatgggatggagaagttgtccgggtccaggccccggccccacatccagtgcaccatccagtctgcgatgtacaggagaatca

SEQ ID NO: 267919 - DNA, 122 bp, Homo sapiens
ggcaaaattagccctggaaatgggccgcaggtcctaaaatagcctggtgtccttggaggccggagaggagctgagaggctctcacttcctcaggacagtcctgaccgagcctctgtttgggg

SEQ ID NO: 267920 - DNA, 122 bp, Homo sapiens
attaagcccctggcccacctaagttcagccccgagcccgccctaactccaccatgagggacggagtttgaagtgaaacctgtggccagcatgtcctgtggaaggggaaaccagggcacaggt

SEQ ID NO: 267921 - DNA, 122 bp, Homo sapiens
gcccccctacctgctgttcagcggccgcactcgcacgcagacggccacggctccttcctccgccatcctatcaggctgaactggtcccaggaaaatggccaggaccctccgcggccggcact

SEQ ID NO: 267922 - DNA, 122 bp, Homo sapiens
ggtgtgagccactgcgcccagcctgttatttcttataattatataggtcatctggtctcacgtgttcctgctcaaatggtataggctggggtcacaacagtgactacattctgccagaccac

SEQ ID NO: 267923 - DNA, 122 bp, Homo sapiens
agacacagccgagcgtcaggcggaagcggcagaggacggggggcagccaaggacctgacacgatgcccctgcggccctgccctctggggacagaggggctgctgcacacgggagcccgtggg

SEQ ID NO: 267924 - DNA, 122 bp, Homo sapiens
tacctctctggtccttgacttcctcatctgtaagatgagaatacaaaatcccaacctgctcgcctaacagggctgttggaaggagcagctgtgacatcacatggcttctttttccttgcctc

SEQ ID NO: 267925 - DNA, 122 bp, Homo sapiens
agttaacaccagcacctttagggttggtctgagaatgaaatccgatgatgtttcgaggcccggcacaccataagtacttaataaatgctcgcctttgttactatttatttcccttctctgag

SEQ ID NO: 267926 - DNA, 122 bp, Homo sapiens
agctgagccaatcacaggcacaaatgaaaattgcctatctctagaaacaaatcccttggccgtcctggttgattagtcattacacatttacatagcacagaaaaggttgcccaggtaatcat

SEQ ID NO: 267927 - DNA, 122 bp, Homo sapiens
tcccacccacccctttttaattcatgaaacaaaaccgcagcctgagctaaagcgaaccctcgcccccgcccagcctccaccccgcccggaggctggcggtgggtccctttcctttgtgagga

SEQ ID NO: 267928 - DNA, 122 bp, Homo sapiens
gagactttaaaaaagactcatccgtgtgccgtgttcactgcctggtatcttagtgtggaccgaagcctaaggaccctgaaaacagctgcagatgaagatggcaagcacccgctgcaagctgg

SEQ ID NO: 267929 - DNA, 122 bp, Homo sapiens
gactccattcctgtgacttcagtcacagcactaaaactgagttttcttattcacagaatacgtctgataatagcatttcctcctaccttcatgatggtgttaaaatactcaaatgagaactt

SEQ ID NO: 267930 - DNA, 122 bp, Homo sapiens
ccaaattcagaaagctccggcgccaggtgtttgctcacctccccgctgaactccaggagccgccctgcgctgggcttgagtcccccagtacatacttttggggggatgacggagggaagggg

SEQ ID NO: 267931 - DNA, 122 bp, Homo sapiens
ttccaaaagttaccagttaggaagttgggagcttttgatcttccctaacagcttctttgacgtttcaactaggattaccaagaggataaacactttgccagccctttctctgagagttcctc

SEQ ID NO: 267932 - DNA, 122 bp, Homo sapiens
ttcaaaatccaccatgtattttacacttagagcatgtcaggtttcagactagccactgtgcggtgcccgagagccgtgtgtggctaccggattggacagcacggatctgaacaagacaggga

SEQ ID NO: 267933 - DNA, 122 bp, Homo sapiens
cagataccacaacagggattagatttacaaagatgaaaaaaaaaatgcatccactgccctcgaggagccaacagtttaggagggcaggcaattaaacataatgaaatatggaatgtactaca

SEQ ID NO: 267934 - DNA, 122 bp, Homo sapiens
tttaaaaacctctcatcttccccattttaactatcttctttcgtaagatactgtgagtctcgcaaggttcaagctaaatctctattgcatgtttcttcaacatgtagccacacaaaataaac

SEQ ID NO: 267935 - DNA, 122 bp, Homo sapiens
agtctcgctgaagagaggcggaactttgagtagcaggtggatccatagccaatgaagacgcgggtcgctttgagtgcggggcagagaagccaatggacgtgcggcattgagagggcgggtct

SEQ ID NO: 267936 - DNA, 122 bp, Homo sapiens
cgccatgggacccccaggcgactgctctactgccagcgttccctgctggacaaggtctgacgcccaccgccggcccgcccactcctaccacaaggactttgcctctgaaggccagtggcagc

SEQ ID NO: 267937 - DNA, 122 bp, Homo sapiens
aatccggtgtgtatcttacattcacagcacacctcagttacaccagccacatttcaagtgcgcagtgtgactcggggctactgtgttggacagcgcagcccggaggctgatccgggtagccc

SEQ ID NO: 267938 - DNA, 122 bp, Homo sapiens
gctgacggagcaaatccggggtcctcctctgagatagttcgtagatatggttttaaaatgcgggctccaaacatacgctttttaaacgaggactccagaacacagactgaaaacctccctcc

SEQ ID NO: 267939 - DNA, 122 bp, Homo sapiens
atttctttcccatccgggcttcatcttagcctcccaagagtccactgaggtcatgagccccgggaaaatgactagccctgccttacagatgtagacccaaggttcagagagtttaagtaatt

SEQ ID NO: 267940 - DNA, 122 bp, Homo sapiens
ggaatgggagaaaaaggaaagtgtgaaaggctcttctgtaattgattacctgtggaggaacgtcattccaggaaaaggcctaggtttctggcttggacaatttgatgagggctcacaccgtg

SEQ ID NO: 267941 - DNA, 122 bp, Homo sapiens
cgcagggcaggcggccaggggctcggaggctctgcctctttgagttccagaaaagtcaaccgggacagggcggtggagagacgcgcagtcttcgcggggcgggctcgggcacactggccctc

SEQ ID NO: 267942 - DNA, 122 bp, Homo sapiens
cggcggggctgaggctccctccgctgagtgtccgggtgggtcctgaactggagagtcctgcgccggcccccgattcggggtgagcgccctgccctccccagctgtgggcagccttgtccgtg

SEQ ID NO: 267943 - DNA, 122 bp, Homo sapiens
ccggaggatcagtgactggctgtcgtggacatgctcgctacacctcccggggcttcgcttcgtttactattaactgtcgttactcctctgtatctcgtcagcaggggctgcctgcggtgtta

SEQ ID NO: 267944 - DNA, 122 bp, Homo sapiens
gtattactcagcacagaaattcaggagacacagacaagttcttccacgatgtcgtacagacgagaactagagaaataccgtgacctggatgaagatgaaatccttggagccctaacagagga

SEQ ID NO: 267945 - DNA, 122 bp, Homo sapiens
agaccctgatcagaaagggttcacaagagaactagaggagaggacagcgggtagagacaacgagtttacaaaacttacttgaagagtttttgcttcaaaggaaagcaaataaatacgatgct

SEQ ID NO: 267946 - DNA, 122 bp, Homo sapiens
gttgtaaaagttacatagaaataggctatagaagagtagaatcgtgtcgcggctcgagagcgagactcccgtcttggagccagcccagcccaacccagcccaacccagcttgacctagccct

SEQ ID NO: 267947 - DNA, 122 bp, Homo sapiens
ggcgtccctcggcttctatctcagcaccttcctaccctgggaactgcggggaggagggggcgacgcacagcaaaatcctgacattacagcattagtctgttgaagtttctccaaagctatgt

SEQ ID NO: 267948 - DNA, 122 bp, Homo sapiens
tgaccggcggcggggaagcggcctgggttggccctcagattgcggggtctgggggcatctcgccgggcaaacccttggcccgcctacaaggacttcccccggccagagcaatggccgctgag

SEQ ID NO: 267949 - DNA, 122 bp, Homo sapiens
ctctcctttgtccaccctcggcggaactccatgttgtaccaccggtcgatggcctggtggcgtctgcttgtgtctgcccgtgtgtccttccgcggtgtgtgccactgaacatccagacgctt

SEQ ID NO: 267950 - DNA, 122 bp, Homo sapiens
acggtgaagtctcccctttcctggcagagctgggactggggctggggagtgctaagctcgcgctctgctcacacattttggactggaacgtggccacttttcagcaaacctgccggttgggt

SEQ ID NO: 267951 - DNA, 122 bp, Homo sapiens
gtgggcagaagtgaggtattcttggcacttcctgctcttccagtttaggctcaggctccacggctggctttaggcttggttttgtctccagggcccagaatctactctctctctctgtgtgt

SEQ ID NO: 267952 - DNA, 122 bp, Homo sapiens
aatacctactggatccactgtccagtttgcctaaattgtagctgtttcttaagttaaattcgtctggatatttggttccttctggagtagttttcctttgactaacacttgaagaataattt

SEQ ID NO: 267953 - DNA, 122 bp, Homo sapiens
atgccttgcctctttcaagcaggagggctcctcatttaacacaaacaggctaatataattcgcagaggcattagcccagctgctgtacagcaaaggccccgggcctagacagccttctctcc

SEQ ID NO: 267954 - DNA, 122 bp, Homo sapiens
ctgtgacgcgtcatccaaggggaagctctgcttccgggcctcccgcctctggaaggaggccgtgcacagccctcccgcctctggaaggaggcccagcgcagcatcctccgtgatggccaccg

SEQ ID NO: 267955 - DNA, 122 bp, Homo sapiens
cggggctgccataacacagtaccacagacttggtgactcagtagtttaaaacaacagaaacgtattctcgcacagtgaaggaggccaaaagtctgaaatcaaggtgttggcagagtctgttt

SEQ ID NO: 267956 - DNA, 122 bp, Homo sapiens
gagctaagacaggaaagaggccaagctttcttagtctcttggtgtatgagcgttgtattgcgagtcacatctttcttgggctctgctgtggttatattttacaacttttggagagccccaca

SEQ ID NO: 267957 - DNA, 122 bp, Homo sapiens
aatggagcggatagaagttcagaaccatcggtccctcttcttcctgggtcatcctgagctcggcagtgagagcacctacgactagggagcggccgagcagagggaacaaggccgtgcccgct

SEQ ID NO: 267958 - DNA, 122 bp, Homo sapiens
ggcggcggctcctccgcgcccggcggacccctcggagctagcgcggcgggctcgggactgcgtgagcgccggacgcgaatttcccccgttgacaacttcttctcgcccggctcgtccccggc

SEQ ID NO: 267959 - DNA, 122 bp, Homo sapiens
cgctcccgctgctctgcctttccccaaaacgcgccccaccaatccgcagcggcttcgtcacggcgctcttcgtcgcactccaacccgccgcgtcggcggcatctctcgcgtgctcttgcttg

SEQ ID NO: 267960 - DNA, 122 bp, Homo sapiens
aaagagtctgccctgggtccatcacaactatgccgtttccccatcctaacacggaggccacggggccccagctccctggaaaggaaagccagaaccaggccccgccttgagtgaggtagggg

SEQ ID NO: 267961 - DNA, 122 bp, Homo sapiens
ggcaggtggcgcggggcaggcagctgtgccagcctagcatttccacctgccgggaggaggcggtcccctggggcccggccggcatctccctggcctgaaaatgagccggtcaccccaaacgc

SEQ ID NO: 267962 - DNA, 122 bp, Homo sapiens
cacgttcgcggagggcattctctttgtgctgctggcaccgggtgggtgtggcctggccatcggggaccttcccctgccagcttcatgtcagtgaaatcaccagggtgaaaatgtttgtgatt

SEQ ID NO: 267963 - DNA, 122 bp, Homo sapiens
cttgtgccctaaggacctaccttgggggcattgtgtcccacagggacatgaggtccccttcgagatttcattgcaaagcgcatgatttgcctcttcacaaaaataaatagcagtacaaacac

SEQ ID NO: 267964 - DNA, 122 bp, Homo sapiens
tctaggcttcacggtttgcaagcacccttgcaaataactcctagcccacccacaccgtctcgtccgcactttccgagagccaggcacggatatattgcaactcactctagggcagggggcag

SEQ ID NO: 267965 - DNA, 122 bp, Homo sapiens
gcagcggaagtcgatctccttgtggtcggtggtgacgatggtgaagtacacgtacttgcccgtgcgctccacgcagtccaccttgaggatggagtggaagcgcagctccttggggcgcgcgc

SEQ ID NO: 267966 - DNA, 122 bp, Homo sapiens
aattcacccgccttggccacccagagtgctgggattacaggcgtgagccaccgcgcccggcgagaagttcttaatgtaatgatgaaaactttggattttggagtcatacatatctggctctg

SEQ ID NO: 267967 - DNA, 122 bp, Homo sapiens
gtacggggggcgggtctccgaagcccaggctggaggtcccaccctgccgctgggaaggaacgagcccattggtccgtgcccagtgggaccgttcacctagaactgggtaggcaagtgtgggc

SEQ ID NO: 267968 - DNA, 122 bp, Homo sapiens
gggaaggatggcatcaagagccacaagcactagggaactgggaaccaaaaagggacacctcgtctaccgaccccaaaggtgagaagctgaacataaagaaagagttgataaatttgaaggag

SEQ ID NO: 267969 - DNA, 122 bp, Homo sapiens
ctgctgcgaagcgggaaaggggggtgctggctgcttgctgtggtggggagggaggtggggcggccaccgtgcaggtgcctgcttctgcagggatgtccagggctctccagctacggggtccc

SEQ ID NO: 267970 - DNA, 122 bp, Homo sapiens
taagaaaatttaacagttgtgtcatgttgtttctgtctgattttaattgctgtctaatgacggggaaagcacgatgaaaagatgtacaatcctgcatccttgcttatttcacaactaaagct

SEQ ID NO: 267971 - DNA, 122 bp, Homo sapiens
gggttggcgcggaagacaggaccctcagcctcgaggggtaagtgtgggcgcttgggggtgcgcttggggtgcgcggcgcggttctcgtcgcccgccaaccctgccccctcacctctccgggg

SEQ ID NO: 267972 - DNA, 122 bp, Homo sapiens
ccaaagtctttgcagctgtgcactgattaatcagaaagggatgaaagaaatttcctttcacgtcataaactgtgtgattgtgatacttgttagttatgaaagggtttttgtttttgtttttg

SEQ ID NO: 267973 - DNA, 122 bp, Homo sapiens
ggtcgcacctcggggtcgccccacccgcaacacctgccgccgcccggggctcctagcgggcgcggcctccgcgcccaggccccgcccccgcgcccccattggtcagtcccgggggtgggcgg

SEQ ID NO: 267974 - DNA, 122 bp, Homo sapiens
cgccgccgccgctctcgcagcaccgaccgccgccgccggagccggacaataccccgtgcccgcctcgcgctgctgtggccaatgcccgcttgtcttgctggttcgaaccccagcggctgttc

SEQ ID NO: 267975 - DNA, 122 bp, Homo sapiens
gacacagcgcccacgagttctggcactttggtcaacgtttataaacgggctctcctctgccgccgcgggcatgcgctttccccaaggttcgcactgaacacctgttcctaaagggggcgcag

SEQ ID NO: 267976 - DNA, 122 bp, Homo sapiens
agtttggacccctccgggttagaaaggatgggctcagcacatctggtgaggcaggcaggtcgtcgctgcagcacagaatgatcccatagccctcaaggcgtggtgtcagctgaaggttcact

SEQ ID NO: 267977 - DNA, 122 bp, Homo sapiens
ccttaacaaacttaaacgcatgtctgcagagtttgtggccaagtattttcgagcggcccacgcagggacatagggtctccctacatcccaaacctgcagtggccctgctggggggcttttag

SEQ ID NO: 267978 - DNA, 122 bp, Homo sapiens
ctcagcacccagctgcttcagagacggcagcccctgggcaggcactgcagggcctgcagccgccctacctgtcagaacagccctcctggaccccgatgacatacaggtcctgggcatagtcg

SEQ ID NO: 267979 - DNA, 122 bp, Homo sapiens
ccgaggtcgcccgcagctgccgcccgctctgggcttggggacctcggccctgcgcctttccgcactcctggcaggtgcagccccaggtacagtcaagaggccccgcaaacccccgctcctca

SEQ ID NO: 267980 - DNA, 122 bp, Homo sapiens
ggtcgctgacggtttgggagatgccctgcgagctgcagatggaggcctggctggtggaggcggaggcgctgatgctcatggcgggggtcaggctgctggacgtgctgacctccatgctgtct

SEQ ID NO: 267981 - DNA, 122 bp, Homo sapiens
gggagagactgaggcccgggccaaagcgcagcgccagtcgtcccctggatgctcctgggccgactttaacccctggcttcccggtttccccatgggttactccaagagggaggtaggacagt

SEQ ID NO: 267982 - DNA, 122 bp, Homo sapiens
ggctcacctcccctgctggctgcactggtctggggtcagtgggtatggcatggattcagacgctgatagatctgagtgagctccattagattctcctccagctcctgagcctgccgcctcag

SEQ ID NO: 267983 - DNA, 122 bp, Homo sapiens
gctacggcaccatcctgcctgggctaaggggtacccagagggcaggtaggacattacctccggagtggctgggcagcatttccagaggagaccagcatctgagtcggcagccgagtatagca

SEQ ID NO: 267984 - DNA, 122 bp, Homo sapiens
aagtccctgtgcttccggccgggggaaactcccgcgtcagggaactaattgtgacttggacggtgaattggaatgtttggaggcataggtcatggactagataggatgtaggcagatccaca

SEQ ID NO: 267985 - DNA, 122 bp, Homo sapiens
accttgtgatccgcccacctcggcctcccaaattgttggtattacaggagtgagccacggcgcccggcctgatttaattcttgacgcttgtggaaggtaggtactgttagtcccattttaca

SEQ ID NO: 267986 - DNA, 122 bp, Homo sapiens
gctccttagcgattaaaggacttcgagcaaaagggctctgccccaggccagggacagacccgagggtgatggcagccggggcaggggcctcctggcgcctcccccgccgcactcctgctgcc

SEQ ID NO: 267987 - DNA, 122 bp, Homo sapiens
gcacgtcacatggcaagagaggggcagagaggtgccacacccttttaaacaaccagatctcgtgggaactcagcgcgagagctcactcatcgccaaggtgatggtactaagccattcatgag

SEQ ID NO: 267988 - DNA, 122 bp, Homo sapiens
tgcggggctgggtgttgaggtctgagcacaagtgtagctggagaggtgagcttgatgtggcgacgggtatgagcaggttttcttcagacttctgtgagtttacctagttccaggatttaaag

SEQ ID NO: 267989 - DNA, 122 bp, Homo sapiens
gccccatttttccatctctgctgctgttattaggggagcccttagactctcttgcagcgccggaataggcgctcaagacgtgtgttaatattgcaacagcaaatataatgaatctgcagttg

SEQ ID NO: 267990 - DNA, 122 bp, Homo sapiens
tcggcagttctgaaaccattctcgccccggcccgccccggcaccgccccttccaccgccccgtctaggcccgccccgccccggacccagccttggccctgcctgccccacccccgccagact

SEQ ID NO: 267991 - DNA, 122 bp, Homo sapiens
atggggtgaccacaggaaagggcaaagccgcctggacacatggactcagccagcacctggcggggctgatttgtgtggttgcccgcgtcgtgctccctggcacattcttcttttgtactgtg

SEQ ID NO: 267992 - DNA, 122 bp, Homo sapiens
cttacgatggcccttagggtgaggcaggaggaggcttcgtgggattagacattgccacagcgtctgcataagttgagggtggcgctgtcactgttcagggccccccgaccctgcccctgaag

SEQ ID NO: 267993 - DNA, 122 bp, Homo sapiens
agactgaggccgagtctctcctggaagccgggctgcccaggaggggcggtgccgcaggagcgcccccgctcgcgactccacaagcccagctgagcacggccgggaatacggggcctgcggaa

SEQ ID NO: 267994 - DNA, 122 bp, Homo sapiens
gcgggacgccgtcgtcgtcgtccagcggctgctcaccacccgcgcccccggtgcgctgctcgtcatcgtagtcctcatcgtagtagtcgtccaggcccccgtccgagccgctgctgccgggg

SEQ ID NO: 267995 - DNA, 122 bp, Homo sapiens
ggtgaaataaataacgatgagtgacacccccgcaggttttccgggactccgtgggatccgcggcttacacggcttgccaggcaccaagggctttccaggatccccaggtactctgtgccgtc

SEQ ID NO: 267996 - DNA, 122 bp, Homo sapiens
cccagagggcagacagacctggccagcttggcaaatcataaatccctctccctggaccctcggcctaaacctacccccagggtgtgcagcggaggcgcacaggggttggctgacgggctggg

SEQ ID NO: 267997 - DNA, 122 bp, Homo sapiens
gagacacgagtccaggggcgcggaggggcgggcagcgcgcggagtggtgagactgagccgcgatggaacgcgctggggagacccagcctgttcggctccagggttcggagacatcctgggct

SEQ ID NO: 267998 - DNA, 122 bp, Homo sapiens
caccggagaatttgagaatgaacacaatgaacagtgcacacctttattgagtgggcaactcgttactttctcccaagaaacaaaacagaattaaagactttttttttctttttgagatggga

SEQ ID NO: 267999 - DNA, 122 bp, Homo sapiens
ggccagcggctgggcgatgggagggacgcatcaacactggcatgcacggacaggtggagacgcaggtcgccaacctcgctctccacctgggcagtgataactgccaccttcccactccagct

SEQ ID NO: 268000 - DNA, 122 bp, Homo sapiens
tgagcacgcccagcctcctacatttcactcccgtctctcccaaacagacctagcgcaaaacgagcactgacacagcgggggcccacatcccggaggttctttagggagaggtcggggagtgc

SEQ ID NO: 268001 - DNA, 122 bp, Homo sapiens
acctcatgatccgcctgccttggcctcccaaagtgctgggattacaggcgtgagccaccgcgcccggccattgctcagtgcttctaagcatcatgtctcatgaaagctcaccacagtcttag

SEQ ID NO: 268002 - DNA, 122 bp, Homo sapiens
ttaaggctcccatggcaggccagtcagacgtgtgggcaggaggacagctgaagagtgactcgcatttgcttgccaagcctgactctctgaagcttcccttttgtcttcttctgtaaatatga

SEQ ID NO: 268003 - DNA, 122 bp, Homo sapiens
ctctcactactgcagccaacccatctcctggaagggcgctcccgcccacccccgctactgcgcagccgcactgaactctggtcccacttagcgggagaaactcgggccacgtgactgtctga

SEQ ID NO: 268004 - DNA, 122 bp, Homo sapiens
cccgctcagccgaacccctcccctgcacgccggcagccccttggggcttcactccgcctccgcccgctactcgcgaagcccagcccggccccgcccccaacaagtgacgcaaaactgggagg

SEQ ID NO: 268005 - DNA, 122 bp, Homo sapiens
aggtgcctgacacagtctgcagcttagtaggagctcagtagttgtttgctaaaacagtggcgcaggctgcaactgccaaggactgacctggggtctgtgatgccttagggtggaggatgcga

SEQ ID NO: 268006 - DNA, 122 bp, Homo sapiens
tccagacttcttcctctcacttcttaaaaccttagctcaccagtgtcttcttgatcagtgcggagctccctgttcttagaagagtttctattcattttcgattatgtctgttcatgaagccc

SEQ ID NO: 268007 - DNA, 122 bp, Homo sapiens
tcccccacgcaccttctcaaggagaggatggatgtccagcagcaccattcacggtggcaacgtttattacagggcagggaggacctggaggagcctatctgtccaatgacaagggcttcatt

SEQ ID NO: 268008 - DNA, 122 bp, Homo sapiens
tattgcagtatatgtacctgaaacattttgtacacaaattgtgattaagtaattttccaccggtaggttatcatagtaggcacttggctgtggcagaaatttgtaatcaatcaggctcttaa

SEQ ID NO: 268009 - DNA, 122 bp, Homo sapiens
ttatcaagcccccttcagaagtactgtggtctcggcccctcctttgaacagatgtccgctcgccacagtccaatcaggtttaaagcaagagtatttgtactgaaaacaagcttaaagtggga

SEQ ID NO: 268010 - DNA, 122 bp, Homo sapiens
acagaaagagaaggaaaattatgcatcgaggaaggccctgaatgcaagactaaacaaacacgcgacaaccaaaactggggtcagaggcctgctttccaaactaggtcttgggggtgggtgga

SEQ ID NO: 268011 - DNA, 122 bp, Homo sapiens
cgagaggggcggggcaggggcgcagggctggagtcggtggctttgtagggccccgcagggcgcggagccacctggggaaacggaagttcagggagggcgaggccgtgccccacatccaggca

SEQ ID NO: 268012 - DNA, 122 bp, Homo sapiens
ggctccgcgcggcggagctcaggggcgcaggctcttagagctgcggtggggcgggggccgcgggacgtccgtttgttctccgcggaggaggcgacgcgccgccaacgaccgcagctccacgt

SEQ ID NO: 268013 - DNA, 122 bp, Homo sapiens
acccaggtgagagaagaacgtctccagcaccgcctgttccaccgggaccggggcggccagcgggatagactcccccatgcgagctgcgccccagctcgacccacgtggctctcctcggcctc

SEQ ID NO: 268014 - DNA, 122 bp, Homo sapiens
ggcccgggtctcgggtgacacccccacgccttgagcgggactgtggttgcgagggagggacgagaaaacacgcctacgccctgcgtgcgctgtgctgactacctctccagcatggaggcttc

SEQ ID NO: 268015 - DNA, 122 bp, Homo sapiens
ggagcgcctctgccccaccgccgtgtctgggaggtgaggagcgtctctgcccggccgccccgtctgagaagtgaagagcccctccgcccagcagccgccccgtccgggaagtgaggagcatc

SEQ ID NO: 268016 - DNA, 122 bp, Homo sapiens
ctgcactcgcacttgccgtcgcggcaggtcccatgctcggcacagcgcgggtggcaggcccgctggtcgcaggctgcccccatccagccatcctcgcagcggcaggtgccccctacgcacac

SEQ ID NO: 268017 - DNA, 122 bp, Homo sapiens
tgccctaccaccttcccgtgaggggcaatgtacacgactgcgctgaagggaagttctgctcgctgggcgtgtctcttgggccttccagaaaaggactagggtaaaggaggacaaagtcctcg

SEQ ID NO: 268018 - DNA, 122 bp, Homo sapiens
ctgacctgctaagcttccagcagcaggcgggcaaagcagggaggctgtaatgcaaaagtccgcagtccctacacaaacactatctgctcctgcggagaaactcaagtcacagccccagaagt

SEQ ID NO: 268019 - DNA, 122 bp, Homo sapiens
cggtgtccgggtgaccgcggcttcccgggagcagacctctgtgggcactgtgaggcggaacggagcggcggggcaggagctgttctgggcaggtgaaggcaggctggtggctgaaggacctc

SEQ ID NO: 268020 - DNA, 122 bp, Homo sapiens
gaatgcgttcccagcgggtagcctgggactggtgcagagttccaagcccacggccccggtcgcggcctcgccgccctcccgcgccccgcgccgggagcgggcctagagcgctcgcctcgccc

SEQ ID NO: 268021 - DNA, 122 bp, Homo sapiens
gaggcgcggggggtagatgggtggtaagactgggatgtggagaggagccagaggccccagcggctgttctcccgcacctcgcctccacccctggccgctcctgcctggggccttgggaggag

SEQ ID NO: 268022 - DNA, 122 bp, Homo sapiens
tccagctgtgcattctcatgtggccgctccgggaaggcctgtgccgccaatgcagccagccgctctcgcatgtgcttgcgcaccagcaacacctccggggccgagcccaggcgcagtgcctg

SEQ ID NO: 268023 - DNA, 122 bp, Homo sapiens
tttgccactgcggcttgttgtcaagaaatggaacttcagaaaacccccagatatacactgcgttaggtaaggatttcattctaatcgagtccaatgtgaccctggctttccctcccgtagtt

SEQ ID NO: 268024 - DNA, 122 bp, Homo sapiens
gactgccgtcctcacaacccgactagccccggtctcacagcccaactccaacatcagctccggccctgccccagcgcccagtggctagcttcctgcccagcccctcgccgaaaccctcccag

SEQ ID NO: 268025 - DNA, 122 bp, Homo sapiens
ttgcatttgaatttgttcccgcagaacaagtggtccttgtccttccgcagcgggaagcggcgtgagtgatctggacagacacggcttgtggccttgaatcggtgttaaacatgcatggccag

SEQ ID NO: 268026 - DNA, 122 bp, Homo sapiens
agcccgggcttctcccatacagcttcgccgtaggtgggccacacccgtgtggacttttggcgtgaccgtccacttggactcggggattactcagctttcctgggtttcttgtcggttggacg

SEQ ID NO: 268027 - DNA, 122 bp, Homo sapiens
accaggaaagaacaggcttcttctggtgtatggtaacatcagcctccctcccatgacccccgggcaggactggagagttatcctgtcaccccggcatccctatgccgctggcctctggtcct

SEQ ID NO: 268028 - DNA, 122 bp, Homo sapiens
tgatcttgggttttcttttcttgctgtggagttgcgttgttgtttattttgttccagccacgctttctttattctcagtaatactcttagcccaatttcctgctgaatgattttgcagaaga

SEQ ID NO: 268029 - DNA, 122 bp, Homo sapiens
cacacacttcctggggttccttccagcgtgggcatctgtggttaggagtggacagtgggacgggagctcactgggacaagcagtgcctaagggcccgggccctaggtgcttagcacggcgcc

SEQ ID NO: 268030 - DNA, 122 bp, Homo sapiens
tagtggtggcaccagggagacctccaggtcagcgtccattagctgggactccacgtaaaccgggtgcaggtccatgagatcttcctggaccccaaaattctccaccaacctgcatgacgggc

SEQ ID NO: 268031 - DNA, 122 bp, Homo sapiens
tgggcggcggtggaggggcctggagggcgattgtccagatcaagcccctcgagtaaggcccgagaggctgtggcttcagaaatgaaggtcatgggcgactcgggccaatgccgcgtccttga

SEQ ID NO: 268032 - DNA, 122 bp, Homo sapiens
agggctttcccggtgtcacctcctgccctggcctgggaagtgtcgtggggacagctgctccggagactcctggctgccaggcttgacttgggcttgattgatttagcctgttacctggaaag

SEQ ID NO: 268033 - DNA, 122 bp, Homo sapiens
tccccatggacagtcataagagatgagtgaacacaatgtagcacttaatttctgtcttcacgattacttcacgataaatctggattccaaagggactataagctctcacatggaaggaagca

SEQ ID NO: 268034 - DNA, 122 bp, Homo sapiens
caggtgaggggaaggagcctgccgggtgggcagccgtttctcgggctgtgctgtggcctgcgccgggcctggcttcgaggccgagttccgatccagtggcgagctagcaggggtcggtccgc

SEQ ID NO: 268035 - DNA, 122 bp, Homo sapiens
tgtgtgcacaaactatttcacttggaatcactttggtctgaacaccagtgattcttttgccggactgcctttgtccaccttcctataaattagttttacatatacaaagttcacaacagttt

SEQ ID NO: 268036 - DNA, 122 bp, Homo sapiens
accacccggctctgtgtgttatggccgcggccacagcagatgctctcgcagttcttctcacggtggcacctacggccagcggtgcccggggagaagcggccagccaggcagaagctaggcga

SEQ ID NO: 268037 - DNA, 122 bp, Homo sapiens
gggcctgttatattcctgtctctagaagaagggctgtgagtgcaggccaggaggggaagccgtggcccttacctgtcagtgccattgagcccagggttgaatccttgcatctgctctaaggc

SEQ ID NO: 268038 - DNA, 122 bp, Homo sapiens
agtgagtttgtgagttgacatgagcccagggggccgcttctggtctgagtgccaggtatacgttccagtgggttagactagggcttcatcaccctccaggtcagggtggggctgtgatgagt

SEQ ID NO: 268039 - DNA, 122 bp, Homo sapiens
acagctgctgtgttcctcttaggcgtaggagaacaacccctctcgcccctacacctcctccggccctgcccgctgggcgctcagagcttctcgtccagctccaggccctggttatcccgggc

SEQ ID NO: 268040 - DNA, 122 bp, Homo sapiens
gtgccccgtgggcctcagcactctggccttccccagcccagcccgtggccgcacagcgcccgacaaacagcagccctgggtctacgtccgctgcgggcacgtccatggctaccacggctggg

SEQ ID NO: 268041 - DNA, 122 bp, Homo sapiens
gaagggttaaagcaagcaaatttcttggagatctcattctagaaagtaattaaaagaatgcggtccatgagtatgtaaaaagaaaccaaaacaaaggagaagacaagaatcccaaatgtttt

SEQ ID NO: 268042 - DNA, 122 bp, Homo sapiens
cttcagcgacacctccacggaggacagtggcggcagctcagtagtgaaggtctaagccctcgagctgtgggttcgcgtcctgggttgcgtgcattcgtggaaagcggcgtagccgtgcgtgt

SEQ ID NO: 268043 - DNA, 122 bp, Homo sapiens
aactctttggcaaaaacaaaaacattttcttcttctctctcttaacttcacaatactatacgttgtgtagtcatataaatttgcagggaaccacaaacccaatgtataaaattaggctctat

SEQ ID NO: 268044 - DNA, 122 bp, Homo sapiens
taaacctcttttctttataatttacccagtctcaggtatttcttcataggagggtgagaacggactaatacaccctgattgcccaggtgaccccatgactcatatgcaagagcatggcagac

SEQ ID NO: 268045 - DNA, 122 bp, Homo sapiens
tgcaggccctgtgcgtgcggaggacggtgcccgagtcagcattttgggtctgagtcccggcgttgccgctgcctgtgcgctgcacagatgctccgggcagcaacacggctggtgccacggcc

SEQ ID NO: 268046 - DNA, 122 bp, Homo sapiens
ctaaaatgtaaggtggggtatgttccactcattcacattctcaacagagtcttttagtagcgaacagaactctcctctcgtaaagaaacagtgcgatttctatcataattccagtggttaat

SEQ ID NO: 268047 - DNA, 122 bp, Homo sapiens
gcctgtggatgaaaggagcccagaggccagtgtggctgcactgtgacccagggacccccgcgggccctcagaagtccccaggggaccagcagcaaggccaggcccaggccctctcccctgca

SEQ ID NO: 268048 - DNA, 122 bp, Homo sapiens
tggaacagctctgaaggaccttcctgggtccagagcttgccatagcattggctgaggccccggtttaaacctcactaagtgttcaactccttgtctctgtccttcatccttcagccctcaca

SEQ ID NO: 268049 - DNA, 122 bp, Homo sapiens
gtctcccggcccagattccggctcctgcttcctgccccgagcctgttaaaaggtgcaagacgtttggtctctgtgcttaacagagcagccccctctcttaacgtggccctagaagccgactt

SEQ ID NO: 268050 - DNA, 122 bp, Homo sapiens
ctgaacacgcggccacacctgctgaggagcgggggcagctgcaggcagcccgagaacagacggagactaagcttgaacgaggccgccttgggagggcggggcggggcgggatttctcctgaa

SEQ ID NO: 268051 - DNA, 122 bp, Homo sapiens
cggctagagcttcagcacaggctgggtctgctgtgccgggtctgtatggggacagctgcacgcctcttccgcttgtgtgagaacaaaggccggaacctggattctgatccaaaccccctggc

SEQ ID NO: 268052 - DNA, 122 bp, Homo sapiens
ggattctttcattctgccctcagggtagcagcacagagaagaggaagtcccagccagattcgcctggtgaagttaagtaagtcccagaaaagaaatgttgataccaacagagcttttggttc

SEQ ID NO: 268053 - DNA, 122 bp, Homo sapiens
agtggtagatttcttcttccgaaatgttttaaagccaggaaaattcagactaaggagccccgtgtactcagtgtgaggtcctctactggtggggagggtcttgctgtgccaccaccaccaag

SEQ ID NO: 268054 - DNA, 122 bp, Homo sapiens
gcagggggattccgcccctttggaaggtggccgagaccctcagccactaaaggacttcgtcgagacaggagagcccgcagagatcgttctcttctggataaccagattattccacaatcaaa

SEQ ID NO: 268055 - DNA, 122 bp, Homo sapiens
tatatagcatagcaatagcaacaatctgtttaagaattaaaggtagttaaaaaaaggaaccgatccagaggttgagacaaaactggcagaatctgcaactacattaaggaattcggtgttta

SEQ ID NO: 268056 - DNA, 122 bp, Homo sapiens
cctcctgagggaacggaggagactggagagggaacattctagtatgtgcgtgcgcccatgcgaaggctttcaaaggcctgagagcagacttcagagctgatcacaaagttgaaggtgggagg

SEQ ID NO: 268057 - DNA, 122 bp, Homo sapiens
taggaaactacttccttttctacaagcttacttcaggaatagtcaatcaaggctcttcaacgtgactaaacattgcgttaagcatcctttggcttgaagacatcagctttctaaaatgaggg

SEQ ID NO: 268058 - DNA, 122 bp, Homo sapiens
gagcttttgggcattaccacgcttatgaccccagtggaagcctcttgcagtacacggtgccggtacctgcgcaggcacctggagctgcccatcccgctgcagtagccgatgtgcctggattt

SEQ ID NO: 268059 - DNA, 122 bp, Homo sapiens
tcaagagccagatcctcttgaaaatgcattcaccaaacacattaaaatagatcggggcatcgtgcatgtgacttgcaaattgagattttgcttattaggaaatagtcacaactcgttaccat

SEQ ID NO: 268060 - DNA, 122 bp, Homo sapiens
tcaaactgcaatgcacctttcagtgcaataggagctatccaatctccagccgcgtccatccgcccactcgagcccacctgtttgcggaccacagagcggcagcacatccctacacggggctg

SEQ ID NO: 268061 - DNA, 122 bp, Homo sapiens
ggggacgaggctcatggagaagtttcgggcggtgctggacctgcacgtcaagcaccacagcgccttgggctacggcctggtgaccctgctgacggcgggcggggagcgcatcttctccgccg

SEQ ID NO: 268062 - DNA, 122 bp, Homo sapiens
ccagcttaaaaacacgcattaaaatatgtatatatatgtatatatttcagtgaagtttgacgacaagcagattggcagttgtcgcataaatgtatacattattttagggggtgggagggcag

SEQ ID NO: 268063 - DNA, 122 bp, Homo sapiens
agattgagaaggaaaataaaaggaagaagaaaacatgacatagaggacataatgtttcctcgtgctgtggtatagaatgcagaaattttatcagctaaagctgaaggggaattttagtgcct

SEQ ID NO: 268064 - DNA, 122 bp, Homo sapiens
gggtctgcacacctgcaagtaagtgggaagaagcaagcaggaagcgccagaataacctcccgcccccagctcacactcgcacctgggaatgaacttggcttcgtccccaagtcgcgcctgga

SEQ ID NO: 268065 - DNA, 122 bp, Homo sapiens
tttcatttaataaatatttgctttgctcggtgttttgatcattttcaaaaccgagtgtggcgtggcgcaagcaaagcccgccgtggcgggaccctcctagcgctcgtccctggcctcacagg

SEQ ID NO: 268066 - DNA, 122 bp, Homo sapiens
tcatcctgttcctatttagggaatccgcggggcagccagtgttgagtgcagtctgcagttcgccggctttattgttcagacttgaagagaaggtcacatgccctctttgacagagaggttta

SEQ ID NO: 268067 - DNA, 122 bp, Homo sapiens
caatgtctgtgtgaggtggaagggggagtactgtgaggagctcttaaaggtctgaaagcgcgatatggcagcctccagagtttgagagtgaaagggacagatggtaagaccagggaagtaaa

SEQ ID NO: 268068 - DNA, 122 bp, Homo sapiens
cttgctttttctgaaagctttattaaagttgcttgagagtgctgttgcagtcatctttaacgttatcagaaagtgttgaatactaagataggatactgataatacccactcactgaagaaaa

SEQ ID NO: 268069 - DNA, 122 bp, Homo sapiens
cactacggccctcgggagacacagctccactttggaaatgggcggagcgccctctggtgccgcaaatcgcacactgcccgagccaggccgaaaagcaagtggtgggagtgtctaagttgaaa

SEQ ID NO: 268070 - DNA, 122 bp, Homo sapiens
gggaggaggtgggggcgtgcgccgggccgagcggcctcggggcgcagcagctgcgggtagcggcagcgccatcatcacagccagctgcttccctgcgctggagccacagactagcggggtca

SEQ ID NO: 268071 - DNA, 122 bp, Homo sapiens
tccactccctatcctcgccttgcctctgcgagctcctcagcctcggcccggccctgtccacggccacgaccacggtcccagatgccactaccgaaacctccgcggaagccaccgcggttgcc

SEQ ID NO: 268072 - DNA, 122 bp, Homo sapiens
actctccctagcctgacccggtgaaaacagatgcataacatattcatgcgctgagcacgccgagcagcccagcgcggaacttttttttttttcttcttcttcttcttcttttaaataaagcg

SEQ ID NO: 268073 - DNA, 122 bp, Homo sapiens
ttcctcagaactaccaggaggaaaggctaagtctgctggtccatagagactgtggccacccgtcccccaaggggctcaggcccaggtagatcagagttctgtccctgagcacctggctggag

SEQ ID NO: 268074 - DNA, 122 bp, Homo sapiens
cttctggacaactcatgacctactgacacctgctgtctgcctggcctctcaggaggccaacgtgagcataagtgcaaaacttgggatgaaacttgaaattagcttcatggaatgggagattt

SEQ ID NO: 268075 - DNA, 122 bp, Homo sapiens
tttgaagcccaccaggtaactggtggtatggggcagtgagtgcttctagcctatccttgtcggtaggtgaatccccagtacgatagcaccttcctgtttgacaacgacttcccagctctgca

SEQ ID NO: 268076 - DNA, 122 bp, Homo sapiens
tttgtcatcatttgctcccttcatcacctcacccccaaaaaactaaaaaacaaccaaatacggggccccttgctgaatttcagtctccccacctgtaaaatgggggtaatccctttatcatt

SEQ ID NO: 268077 - DNA, 122 bp, Homo sapiens
tcaacttaaaggtgcgcgtgcagtgttctgtgacctccgtgggatgcgaggctggcgggccggagcgcccctgccggggattggccggccgcgctccgccgcagactccgcgccgccgggcg

SEQ ID NO: 268078 - DNA, 122 bp, Homo sapiens
agttcaaatgcctccatctccataccatttcagttcgtggttggggataggagctcccgtcgcgatcgtcatctttctgctgcagacagattttgtttccctctgtaaagttggagtgcagg

SEQ ID NO: 268079 - DNA, 122 bp, Homo sapiens
gccccgcgcagtcggacatggttgggtgcctggccgcgccgggccggttgggcctttgttcggtgtgcgcggagggtgagggaagagtgcccaccgggccgcatttagtacctgggtaggaa

SEQ ID NO: 268080 - DNA, 122 bp, Homo sapiens
cctctcactggtgcgcaaggccctgcatgaaggagtcggaagcggaagcggtagcccggacggtgctgtggtgcaagggcttgtggaaaagtacgttcctacgggtcctcccgtggctcatt

SEQ ID NO: 268081 - DNA, 122 bp, Homo sapiens
ccatcctatttttacctgttggatcccattccgtgcctagcacaccagcttgtaagcaatcgacatggattaaggggtaaaaacaggcccttaaatagctaaaattttgacaagtaatcact

SEQ ID NO: 268082 - DNA, 122 bp, Homo sapiens
ctgtgctccatgagtggctgcgctggcacagcaggactggcgcccatgggatgccacccacgtcacactgtcgtccctgtgtattcttcaatccctctacgacaggggtccccacctccggc

SEQ ID NO: 268083 - DNA, 122 bp, Homo sapiens
gccctgttgtgttgagctgagctatcaaagtgtgcacacgtgtgtgcatatgcatgcgtgcgtgtgtgtagaaaacacagacaccactttgttgtttctggtcgtcaaggatgctgtgtgaa

SEQ ID NO: 268084 - DNA, 122 bp, Homo sapiens
acaaaacaacaagactcccacgtagcggaaggagacctgagcgggttgccactgttggctcgggcagcctgcttttattgtcttatctggctccacccacatcctgctgattggtagagccg

SEQ ID NO: 268085 - DNA, 122 bp, Homo sapiens
tatgtaaatggaaacattacagaacactcttagaatgtgaatgtcaaattctcctagtgtcgaaaaatctcagagataaaaccaggtttgacacccaaagaaaaatgctggagccagaaata

SEQ ID NO: 268086 - DNA, 122 bp, Homo sapiens
cccttactccgtgggtcttatcctatagaccataatagcctaatgtgcctcaaacctccccggggctacagctaagttttcatcagcatgtgaaaattattgtttcatctaagtgttcagaa

SEQ ID NO: 268087 - DNA, 122 bp, Homo sapiens
cacggggagggcgcaccgggcacaaggaccccgtggagacctgctggttctgggaggcggcgggggtcctgccctgccacggctccttgggaaaaggtgctctgtacacagaccctcggcag

SEQ ID NO: 268088 - DNA, 122 bp, Homo sapiens
cattgttaggttttcagcagcctgcaagagagaccctgctgagcaggatggagaaagttgcggcaattaattggtagagttgaattgttaacattctctcagtgttcccagcacagggctct

SEQ ID NO: 268089 - DNA, 122 bp, Homo sapiens
cactcctggagacgctgggtctgggcagctcaggaggatgctagcatgcatctagcagggcgggggcttgttcccaggaaggaaccctgccggaggggcagcatgtcctatccgcgggatcc

SEQ ID NO: 268090 - DNA, 122 bp, Homo sapiens
ctacagtctcactaacatttcagcggcggtgtcgtcaggactggagatctcacggtatcgcgagaacttgctgagcccgggattggttccgccgctccctgccagccaaccggattctctgg

SEQ ID NO: 268091 - DNA, 122 bp, Homo sapiens
aactcctgattggggataatattttaaaggtatctgttgcacacttggattttcaaaactcggtgaaagttacaagtttgcatggtaagaataaaataagaatattgaaactggtacattag

SEQ ID NO: 268092 - DNA, 122 bp, Homo sapiens
acccagagcggcacgggttggccagggtcacccagcaccagatagggactttgccagccccggggcaggaccctgtctccggccctcgaccccgctgggccgtaccctccccgttcacctcc

SEQ ID NO: 268093 - DNA, 122 bp, Homo sapiens
taaatccccagtctcacttcagctggcagctttcccagtaagggcttccaggctgttccccgatgcccaggacctgctttccctggccttcttctccctacttgtcagagaatcctggccag

SEQ ID NO: 268094 - DNA, 122 bp, Homo sapiens
aaaaccatcatcatttcccaggtttgtgaatttaagccaacaggaaacgtgggacaaacacgcggggctccataaagccagcctggcactggctctggcaccaggtccctggactggacacc

SEQ ID NO: 268095 - DNA, 122 bp, Homo sapiens
gcgccttattctccgcccccaaaggctgctggcaaccaattctcggtggcgaagtcgtgacgtcagctgttgcgggtcagattgggagagcttcctggtccttacctagcaagattctgccg

SEQ ID NO: 268096 - DNA, 122 bp, Homo sapiens
aactaaatcctaacttgccttgatatacccaaataatggtccctggtagttcgccgtgatcgtatagtggttagtactctgtgctgtggctgcagcaaccttggttcgatatacccaaataa

SEQ ID NO: 268097 - DNA, 122 bp, Homo sapiens
atcagccgctgtggaacagcactgcacagagtgctgagccggggacggtataaatagagccggcagcttggcgctagcacaggtggctccgcagtggggagactttggccacagagctcacg

SEQ ID NO: 268098 - DNA, 122 bp, Homo sapiens
actttcccaccaggcctctattttttgtgtgaggtaggaaatgatacattgtgagaaaagcgtagtaacacaggcagcatgaggagagtgagacacagttagaagaaccatggagagaaaat

SEQ ID NO: 268099 - DNA, 122 bp, Homo sapiens
tggctctgagtccctatcaggacctctgcctgtgggctctggctgggctctcctccagggcgggcaggtgggctagaattaacatggagtgtctttccccctttccttttctgtgttatatt

SEQ ID NO: 268100 - DNA, 122 bp, Homo sapiens
caacacatgcacgcgcgcgcacacacacagccacaccaagtatgggtacagtaagggtagcggctagtcatgcacacagagtcacgcttgtacaagatgttacccacgtgcaaaatacccca

SEQ ID NO: 268101 - DNA, 122 bp, Homo sapiens
cccactgtgttgggtctacctcaggctgcttcttccctcctggaaacaggctggctgccccggctcaggactgtgctaatcaggggaaatagcacacctctctctggttggcctatgaacag

SEQ ID NO: 268102 - DNA, 122 bp, Homo sapiens
ggggaagggaagggaaggaattggcaccggtgcccagaggtgtagggggagattcacaggcgaagctgttcgcaaagtaacgtgagatagaaatctaaatcctgaacagagaaaggaagctg

SEQ ID NO: 268103 - DNA, 122 bp, Homo sapiens
atccccgcaaggcgcccctcaccgccaactttccccactggaaactattctccgagcaaccgttaaagatcattgaccccgcgaacgcctcttcctgaggtagatcacgtaagatctctccc

SEQ ID NO: 268104 - DNA, 122 bp, Homo sapiens
ccaagagggctgggagcccctagagctgatcctcccttagcccaggtcaagagactggctcgcgcgcgctgtctctctccctgtctccctcagagggcccctgctctctggagctcttgaca

SEQ ID NO: 268105 - DNA, 122 bp, Homo sapiens
ggccatgacgacgtctccaaaggggcctcaaagaggttggctcttggcaacaggctggagcgcgggccccgccctctgaacacagccaggaaaggcgccccgggctccgggaccagaccaga

SEQ ID NO: 268106 - DNA, 122 bp, Homo sapiens
aattaagttagtaggtgatgcgggccgagcaaagaccctccgtgctctaagaagcacgaccgaaatgcggcgacccctctttaatgaacgcccctcactagagagtccccgaagcccagcct

SEQ ID NO: 268107 - DNA, 122 bp, Homo sapiens
tcgccatgttggcaaggcttgttgcggaaaccctgggctcaagaaatctgcccatcttgtcggcctcccaaagtgctgggatttcaggtgtgaggcacctcgcctggcccagttcatctagg

SEQ ID NO: 268108 - DNA, 122 bp, Homo sapiens
gcaggttagaactgatctctttcggccactccaggaaacacaaacctggggacggactgacgtgttacgcctcttctaatgacatttttttctttttcttttctgtaggagagagacgagag

SEQ ID NO: 268109 - DNA, 122 bp, Homo sapiens
gggggccaatgaagtggcgcgccttcgccccatgtgggagaggctgcggtggccaataggcgcgcgcgtcggagggcgaagggccggccagggtgccgcagacgcggggacgctggctcgct

SEQ ID NO: 268110 - DNA, 122 bp, Homo sapiens
cctgcctggaactgtgctgaacacagctgcgacatcaggggcaagtatcctgcagaaggccgggagtgccagagtgaggagcccatgcctgcttcatgggcagagggagccacggaaggttt

SEQ ID NO: 268111 - DNA, 122 bp, Homo sapiens
gcgccgtggcgggtactggactggcggagcccggggagtgaagtagtgaaatcggacctacgcctctccaacgctcgcgtgatcacgtggttggcacccaggcggaagtctgcggcagttct

SEQ ID NO: 268112 - DNA, 122 bp, Homo sapiens
gaaactcagccggctctgggaggcgggggccgcggtcgaggggcgccgctattggctgatcgggcgggggaggaggggcagggaggccgtgattggcggggacccgagctgaagggggcggg

SEQ ID NO: 268113 - DNA, 122 bp, Homo sapiens
ctaaaagtgatgaaagtgggtttgcattattctaccaccaacacccaaaccacctgcccacggaaacccccgccggagaccgaagtttacccaaatagcgctcggcaaagcgctgccataaa

SEQ ID NO: 268114 - DNA, 122 bp, Homo sapiens
acccaggagggcaggggttttgctggactggctggtgggttccaagcacagggcctggcacgcagtggggtccggcgatggacgcatgaatgaagccccctaggtacccccttcttaccctg

SEQ ID NO: 268115 - DNA, 122 bp, Homo sapiens
gaggaaggtctgcccgaggcaaggcaggcccgcagtcccgggcggtggcatcagggtgagcgccctgatagcaagggacctatggcgcccacaccggagggcgggaaaaggaggaagagcat

SEQ ID NO: 268116 - DNA, 122 bp, Homo sapiens
ggtccttgggggacggaaaggaacaggaagcatgcgtacagtaggtgctcataggattgccggctggatgtgactcaaaagcctaagatttgggggctactccgggcccacctgcgggtgca

SEQ ID NO: 268117 - DNA, 122 bp, Homo sapiens
aggctccgcctccttgagtcgccagctgcctgccacacgccaggcgccacgcgccgccctcgctctttatccactgagcagcttatccactttaggtcggaaaggaaaggaaagaaaagcag

SEQ ID NO: 268118 - DNA, 122 bp, Homo sapiens
tgaactcctgaactcagataatctgcctgccttggcctcccaaagtgctgggattacaggcgtgagccaccatgccgggcctggcatatttatgtttttttgagacaaggtctggctctgtc

SEQ ID NO: 268119 - DNA, 122 bp, Homo sapiens
ccgagaaggtgtccgaggcccgcaaaagtgagtttcagggtggggctgcccggcgtggcgcgagtcgaagaaagaccgctgggcctcaggtggtgggtagattaggcccgaaaaactgcggg

SEQ ID NO: 268120 - DNA, 122 bp, Homo sapiens
gggctgctgggcctcggactcacggtgtccctcctctcccactgcctcgtggccctgaaccgctacctgctcatcacccgggcgcccgccacctaccaggcgctgtaccagaggcgccacac

SEQ ID NO: 268121 - DNA, 122 bp, Homo sapiens
ctcggggagtccgcattgaagggagctgcaaggaaagcagattctttactgtatccccagcgcctagctgaatgatatttacatgggacactggagagaggaggatactcctactgaaagga

SEQ ID NO: 268122 - DNA, 122 bp, Homo sapiens
gcattcagttccctcgatgcttcatttaaatttccaaatttaagcgctccctcaggttttcgcctagggctgggcctccctacgctgttctccattggtttagctggctttgttttgctgtt

SEQ ID NO: 268123 - DNA, 122 bp, Homo sapiens
aggaaggcacatctgtcatctccttgacagtgttccaggctgagcacgagctcctggaagcggctgtgtgtcaaggctctgctcacatctggctcctcatctgtgagccttcttggcccaga

SEQ ID NO: 268124 - DNA, 122 bp, Homo sapiens
gctgggactacaggcgtgcaacaccatgccggtctaatttttaaaatttttttgtacagacgaggtctcactatgctgcccatgctggtcttgaactcctggactcaagtgatcctcttgcc

SEQ ID NO: 268125 - DNA, 122 bp, Homo sapiens
gggctgagtgagacctcgttgccaaaaaaaaaaaaaacaaaaaaacctggggagagagagcgaaagctactcaaggggccacaaatgtaattatgccaaaattcaaatgatgattagtcagt

SEQ ID NO: 268126 - DNA, 122 bp, Homo sapiens
aatccagataccaacaggagtctgaaacccttcgcagaggcgtgcaacacactaggagagcgctatctgtttacaaatacgaatctcagttacccacgtcaaaaccgcgcattaccaccttt

SEQ ID NO: 268127 - DNA, 122 bp, Homo sapiens
cgcttgagcccaccctttggcttctccttttgggtctgtccttgctcctgcctctggacccggtcccgcccttctcgcgtgtaattgagtcctggccccgccccctccctctctggcttcac

SEQ ID NO: 268128 - DNA, 122 bp, Homo sapiens
tgacctggttcttcctactcttggatccagagctcctacagcagcccagctgtagtccctcgtcccctggtgtaaccttccttgtcaccccacccccactctgggccctgagagccttgagc

SEQ ID NO: 268129 - DNA, 122 bp, Homo sapiens
ccaccggcccgggtgctaagtccctcattgcctggggccagcagggctggccggcggctccgagtgcgggcccgccaagcccacgcccacctggaactccagctggccggcaagcgctgcac

SEQ ID NO: 268130 - DNA, 122 bp, Homo sapiens
ggaaaggtcagacagctgggcttcagtgcgtgatttagaaacagatgagggatgggggctcgaaaagggtggcagcagtacacagtcaataaatatttactgagcttccactacacgtcagg

SEQ ID NO: 268131 - DNA, 122 bp, Homo sapiens
taaaaaaaattggtttctatacccaaaaagttattcagaaataaatcaacaccccgagaccggggatgtcgggtgccgcagccaggttacacatcgagcttgcacctcgctctgtgcggatg

SEQ ID NO: 268132 - DNA, 122 bp, Homo sapiens
attcattgtgcctttcctttcctgtgagtcacggcctacctaagagaaagcttagtaacacgcaaggaaaattcaaaacacattgaggctctttaatgtacgtgatacttcagctgagataa

SEQ ID NO: 268133 - DNA, 122 bp, Homo sapiens
cagggagacccagtacacaagaaattgcagtgtaagtgagcattagcgccactggaggcacgcacaggggactgtgagtgcacagaggaaaaagagattcgctgcttccagggaagacatta

SEQ ID NO: 268134 - DNA, 122 bp, Homo sapiens
ccagtgggcgtggcttcagcgctaagggtggagattctgggcagggggcgctagtgcagtcggcgtttctgggttggaggggttacactgggggcggtggagcggggagacttccgactgag

SEQ ID NO: 268135 - DNA, 122 bp, Homo sapiens
ccacaacatccctgccaatcagttatcgagcaccccaggcagggaactcataacttcccacggcatcccatttccttgttgagcaagtgaagatctaagaaaaccttttcttgcaatctcac

SEQ ID NO: 268136 - DNA, 122 bp, Homo sapiens
caacttgagatttgtagttagagagtcctttctgacgtagtaacatttgaatttcctgctcgttactattattcatatcttaccttcctacccctgctcacccccaaattccaatctgccaa

SEQ ID NO: 268137 - DNA, 122 bp, Homo sapiens
ccggggtgcggggctgcggagaatcctagcggccgctacggaccgaagtttccaaagatgcggttccccgagtgtacaccgctcccggttgtaacatacacctagtattcacagtcacacta

SEQ ID NO: 268138 - DNA, 122 bp, Homo sapiens
cctcagccctggtgggtagggagtggctgggagaccctgcccctcacaccctgggctttgcggtattcaacgagcccccaacacacattccagggcctctgctccagattaggccacagcct

SEQ ID NO: 268139 - DNA, 122 bp, Homo sapiens
atagtattccgttgtatgggtggatcataatttatgtaactaattgccttgtgagggacacgtgggtggcttctaattctttgctattgtggactgtgctgcagtgaatatattgtatggat

SEQ ID NO: 268140 - DNA, 122 bp, Homo sapiens
tccaggctcgtcactgctgtactggtgatgatggagaaaaagaaccacgcagcacgcatgcgctcggtgcttcagctgtcacctggacgtttgagatatctagaacactcattttatggatg

SEQ ID NO: 268141 - DNA, 122 bp, Homo sapiens
aggagccatccataatcaattgatatcttcctctgctggaggcggggccccggggagccccgctccccatcctcatccgcaggggcctccacccctggatccaattagaccgcggctcagcg

SEQ ID NO: 268142 - DNA, 122 bp, Homo sapiens
ggtcgccctttcaatcctggagcccctgttccctacagcatgtgccatcagaaggggctccggccagcacaaggtcaggcagctgtggcactgcccttgttctgctgtttgattcaatggat

SEQ ID NO: 268143 - DNA, 122 bp, Homo sapiens
tgattttaacatttcttcttaatgcctactcccaagctcagaacaatagaaataaacattcgcacactggttttcttaaaaccctacatttggaactgcatctttttcatgtcaattataaa

SEQ ID NO: 268144 - DNA, 122 bp, Homo sapiens
cagcacagccagtatggtgtcattcacagcggtgtcagcacacgacagcttgatcacggccggcacctcacagaaaaagttgttcagcacctgccgcccgcagaatggcaattgcaccgtca

SEQ ID NO: 268145 - DNA, 122 bp, Homo sapiens
ataaaatttcagctctacctgtatcattacagtaataactgcatctacacacttcgagctcgtggcctcagcaggagaaagttgggggggggggcggttatttcagactaataggtccagct

SEQ ID NO: 268146 - DNA, 122 bp, Homo sapiens
gtgaccagccgcttccagctgccgcgaggtggcctgacgtccatcagactgcacggcggccgcctgtggtgctgtaagtccggcccctgccatcagagcgggcaccctacctccctgctctg

SEQ ID NO: 268147 - DNA, 122 bp, Homo sapiens
tagatatatttgcttaagcaaaatctcatatcccctttcctgggcttggtttggggtggacgggctaggagtccgggcatggggccgggaggggatgcggggttgggctgggcaggcatccg

SEQ ID NO: 268148 - DNA, 122 bp, Homo sapiens
acgcttcttaggggtttgaagcgtcaggtgagggtggaaaacgcccattctccgtggcctcgcctcccccaactcccggccccgcgctcgagcccgctttgtcgcagtgctgcatccgggca

SEQ ID NO: 268149 - DNA, 122 bp, Homo sapiens
gaggacaataataaagtagtttactaggcatcagacattcctcagcagtgctgtgggtcacgggcgtgaagcggagctcgaggcaggattgcttgtgttgctgcatgtcctgtctgctgttt

SEQ ID NO: 268150 - DNA, 122 bp, Homo sapiens
tgagccatgggaggcggggtgcccgccggcagaagtaaacagagcgagtacgcctgcgcacgctcttcctgggtcaagagccggctcggttctgggattctgaggctccccaccgcggtccg

SEQ ID NO: 268151 - DNA, 122 bp, Homo sapiens
tggggcgaggtgcttgacctctcggggcctcagtttccttctctatgaagcggagctgatcggccgcgtcccggggctgctgtgacagtccaaggcgagaacagcagctccgcgccgcccct

SEQ ID NO: 268152 - DNA, 122 bp, Homo sapiens
accttggaggctggcttccacagtatttcccaggaatttattttttgtttctgtctccctcggtcagtctcaaaagtacttaatggttggagtgttgatgtgtagtgccggctagcatgctc

SEQ ID NO: 268153 - DNA, 122 bp, Homo sapiens
ggcggtgggaggacctcacctccctgtaggaacaagtccttgatctgtcggaacgcttcccgcacaccctgggtgcatttgggactctggccctcaaagtcctgggggaaagagaccgtgct

SEQ ID NO: 268154 - DNA, 122 bp, Homo sapiens
gccgcgcctggaagccaggtctgcggatcccgcctcgctcccgccccttcctcccttccgcgtggccagcgcgaccctaggacagacttcgcgcccgtcccctgcacagacggggaaacgga

SEQ ID NO: 268155 - DNA, 122 bp, Homo sapiens
gagtgtgcgcgcgcggaggagggcgcggggggccgggaatgggcgcgctgtgggggcccgcgccacggcgggcggcggccgggggcagggcggcgtggggcggcggccaccgcgcctccccc

SEQ ID NO: 268156 - DNA, 122 bp, Homo sapiens
taaaattgaagaattacaccttgctcaaagatgccatgagaattcaatgacagacacatgcgaagtcaccccccagcacagtgcctggggcagagtagctgctccattgttccatttcctac

SEQ ID NO: 268157 - DNA, 122 bp, Homo sapiens
ttggaattacctatgtaaatttcctttatcactttttatttaaaccttttgggttgtaaacgaagcagttatcaatcaagttaggcaacacaatatcagctttggaagtaaaacaagggaca

SEQ ID NO: 268158 - DNA, 122 bp, Homo sapiens
gggagtgggagcaccacaggagccaatgcccaatcatagctgcctccagggaggtagctacggtcctttgcaccccattctgcctccagaaaagagttttccattttttttattagaaaggg

SEQ ID NO: 268159 - DNA, 122 bp, Homo sapiens
actcctgtctttttctgccttccctcctctcttcttaaaaatcctctgccagccactgggcgaggggtgcagggacaccctgctgaacccagctgacaccagaagaacctgtcctcattaaa

SEQ ID NO: 268160 - DNA, 122 bp, Homo sapiens
cccgggcggggctgtgcgaggggtggggctgcgggaggccctggagcgcggcggtgatggcggggccggtgaaggaccgcgaggccttccagaggctcaacttcctgtaccaggtgagtctg

SEQ ID NO: 268161 - DNA, 122 bp, Homo sapiens
gctcggggaggtgtggggtcagcttgccccgggagcccagcttcagggaggatgcagccccggttgccttggtttcccttttcctatcctctcaggcaccttcccatcctccccactgcgtg

SEQ ID NO: 268162 - DNA, 122 bp, Homo sapiens
gtcagtgttcttttagtttgcttaaactgtgtgggtacttgagtccttttaaacgattaacgctgggaagaggcaccatttaattaattaatttgttctggaagggatcagtgtacaatttt

SEQ ID NO: 268163 - DNA, 122 bp, Homo sapiens
ctaagtccgagcacttgccagagtcacctggcaaccaaacatgagttgggggcccagtctcggaactctgtttcatccatttccactcctgggcttatttagcttctctatctggaatgcta

SEQ ID NO: 268164 - DNA, 122 bp, Homo sapiens
tcctatcattggaaaatctccttgacatttttcacactttgaagcagctgcagctggtgtcgtcggaaaagggggtgggaaaaaagagagggggcggggagagcggtgagacacagccaaga

SEQ ID NO: 268165 - DNA, 122 bp, Homo sapiens
tccagcgtgagttaccagaaaccacaagagagagagagagcgtgcaagccccaaagcgagcgacatgtccctttggggagcagtccctctgcaccccagagtgaggaggacgcaggggtcag

SEQ ID NO: 268166 - DNA, 122 bp, Homo sapiens
tcccgcagcctgtcaggtgaggccccggcctcgtgccgtcgctcttcccgccgcactgggcggcccaggccgctccctgccgggcctcactgccgccaccatgtcctccttctctgagtcgg

SEQ ID NO: 268167 - DNA, 122 bp, Homo sapiens
gcccccatggcgtccgccttgtggataactactgtgaagcatggcgaaccgcggacacagcggtcacgggacttgcctccccgctgagcacggggaagattctggaccagaaagcatacagc

SEQ ID NO: 268168 - DNA, 122 bp, Homo sapiens
ctcacccctctttaaagaccgaactgggagttgagctcaagcccggatcctgttacctgccgtgctctcatcccccgttactcagcctactgtagctgagggtcttgctgtttgtggctgta

SEQ ID NO: 268169 - DNA, 122 bp, Homo sapiens
ccataaaacggagaaactcagcagtgaggacattctgattccaagcaggaaggagatgaacgatgaacctcaggctgagcgcctcacggtttcctcatgtcaccggggctgggggtgcagtt

SEQ ID NO: 268170 - DNA, 122 bp, Homo sapiens
gcccacagaggcctccacaaggttcctacctgaaggaaatcttgggagggcctcagtatccggggctgaccagtcctgaagccctggagtctagtgccatgggcttgttggccaacgtgtta

SEQ ID NO: 268171 - DNA, 122 bp, Homo sapiens
ccagggcgtgctgtgggtacttgctcttcaggtggtccatgaaggcatcacgcttgcggtcggcgtccgccttctggagcccgctgagcgcctccagactctgggccgcgatcaccgtgtgc

SEQ ID NO: 268172 - DNA, 122 bp, Homo sapiens
ctagcttttggaaggcactaaattgaggccattcaaatccatgtccacctatcctttgcccgtcacgagactgatggcttaggaagcatgtggtctaggtactagagagggagcctgaccca

SEQ ID NO: 268173 - DNA, 122 bp, Homo sapiens
cccacttgcaatatatccagaaatcttgcaaaataagaaaaataacttctaagtgaggatcgattatcagggttttagtacttacttccaactgatctgtacaggatgtctgtgtaagacaa

SEQ ID NO: 268174 - DNA, 122 bp, Homo sapiens
ctcgccttctcagtagctccgtaggcgtgtggccgtttctccgccaatctgagcgcaccgcgccacagcatcctgtggtcccctgcagatcccacagcgccctggccagaactagtgctgca

SEQ ID NO: 268175 - DNA, 122 bp, Homo sapiens
cccgccaacgagtcctttctgcagacggggttcctgttttcatgcaaatgcctttgttagcgcaccgggaaccagggggacggaactgcagctgacgcgggctgcgcgccgcttttccgcct

SEQ ID NO: 268176 - DNA, 122 bp, Homo sapiens
taagcgataaggagtttcacacgatgtctttttatttcgcagttgagtcccagtttctgccgctttatctttcccgcctcccggcaggcaggccgttaaccgtcttccggaagacgctgcta

SEQ ID NO: 268177 - DNA, 122 bp, Homo sapiens
ttcatacacttcagtgagcgcctgtcgagacgttaggagaacaagagcttggaaacatcccgtccaggccattgggaggcagcgtcttcctcacaccccgtccctggatgtcaggggtgcag

SEQ ID NO: 268178 - DNA, 122 bp, Homo sapiens
gcgtcagaagctgcagttcaggaagcagaggcaggtcagagcaggcccaggactcatggccgcgtccactcacgggaaaagcatcgccaagcacgccgggcagggaagatgctattctctag

SEQ ID NO: 268179 - DNA, 122 bp, Homo sapiens
attcagccattgaaagttctcaaactcttccggtgttcaggtatctctgggcccttctcccggccctgtggggatcctggcccctcactgcttgtgggtagagggggaggctctatcggtag

SEQ ID NO: 268180 - DNA, 122 bp, Homo sapiens
gctggaagggacttgaagagcaggcaaggaaaggagatggggacaaacatgtcctattcccgcggggagctcagcctttaacaacaaaattgaactgctctgaggcaattaaagagaacaca

SEQ ID NO: 268181 - DNA, 122 bp, Homo sapiens
aagaggagtttttttaaaaaacggaaaaagcagtgtttcagggaatctgttacaagtgagcgactgaaactgagaaaaaggagaggcaaggagaccagaggtcaccctgagggcgcacgtgg

SEQ ID NO: 268182 - DNA, 122 bp, Homo sapiens
ttctgcacaaagaggctcagcacctcccgagtcagcttgaacttgtagtagctggagaggcggtctcgggagatgtccaggtgtctgaagattggggtagggggtgcaggttaggagctggg

SEQ ID NO: 268183 - DNA, 122 bp, Homo sapiens
cgaggcagggacgttctctgaaaagccagatacaacctgagcccgctgtggtgcagcagtcgagccgccgggcgcccccaccgctgtggcccaggagccctgcgctggggaaccctgatttc

SEQ ID NO: 268184 - DNA, 122 bp, Homo sapiens
caaacccatcccctctatcccagaaggaactccgttgataacagaattaagagtaataagcgcaataaaggcaacaattaccaacatgtatttacatggattttcttttttaatagtaaagc

SEQ ID NO: 268185 - DNA, 122 bp, Homo sapiens
atgatgaacaggttgagactgtggactcaaggcacatgccaggaagactaatagagaggacgctgtttgggaaaatcctaccaccatccatgtccacttggactcagggctgtctgccagga

SEQ ID NO: 268186 - DNA, 122 bp, Homo sapiens
acaagtgtgcaaaatactgtcaggacccacctcgtcttcccaccatcaagtctaaaaagccgccttcatcagcatccattctcccctgctaacattggagtgttcgtgcatcttggctctgg

SEQ ID NO: 268187 - DNA, 122 bp, Homo sapiens
ctttccccgtccctccagatggtgagcacagaggaagaattgcgttaggccctttggccccggaccagtgtctgccagccacgtgctcagcctcccgtgcgctaaagctcaggtccttcctg

SEQ ID NO: 268188 - DNA, 122 bp, Homo sapiens
tgcgcagcgcagccgctatcgggcggactgcagttcttgccgagcaggtggggacaggagcggggtggggctttagtgtttttccctggatcccttgtctgctcagccttcctggaaggaga

SEQ ID NO: 268189 - DNA, 122 bp, Homo sapiens
tgtctttttctcgtctgccttcctccaaggactgtgagggtctcaagatgtgtcccatctcggttgtttgtcaacctagtcctgctatgtcgtggggactgagcaggccgactcctccccca

SEQ ID NO: 268190 - DNA, 122 bp, Homo sapiens
cagaactggaaacagaagattgtaaggaaagggactgggatcagtgtttcttctccaggacggattacccacagctgtccacgggcaggcacttgttactttctggctgagcagggcagtgt

SEQ ID NO: 268191 - DNA, 122 bp, Homo sapiens
tgtatgtcatgttcatgtctggggaagatgtgtgtgtttgtgtgcatgtgtgtacacctgcgtttccaggccagaatggtcacatgctcacagagcatgtttatcatgtgtcctgtggttgg

SEQ ID NO: 268192 - DNA, 122 bp, Homo sapiens
aatgagcagagaagcgtctggaaggcttcgccgaggaggtggctctggctcagtccatcacgcagccttgtgacccagcttgtaacattccaagctgttatctaagctttctgttgtccttt

SEQ ID NO: 268193 - DNA, 122 bp, Homo sapiens
ctcatcctaccttagattctactcgccgcgaatggatgcatgcagcctgccatcaagccacggaggtaccacatttctcaaaagcaaaagctaaccgtttttccatcgggctcttttctttg

SEQ ID NO: 268194 - DNA, 122 bp, Homo sapiens
acgcccgagccaagttcaggcgcaacctcttacggcaggaaaacacgggcgtggacaagtcgacagacgcggcgctgcagacagggacgccatcgggcccggcctcggagctctccaacgcc

SEQ ID NO: 268195 - DNA, 122 bp, Homo sapiens
atcccggacctcctggggcaccttcctccagcagggcagtcctctgaggttgaccctgcacggtcccttctggggaccgggttccagcactcctcctggctgaatcccacatgcagccaggc

SEQ ID NO: 268196 - DNA, 122 bp, Homo sapiens
ccactcgtctctgttcaccgcgtcctctagattctagaatctagaaactcatctaggacgcgaggtcatctatcgcggggagtaaaattgccaggattcgcccgtagattgacccctcccag

SEQ ID NO: 268197 - DNA, 122 bp, Homo sapiens
tggcattgcggactgacctccagggagaggcccagatctgatctgcagagatctcccttccggctatcgtggctgctgttcaggtggtggagaagaagatggaaccccaggctgcctggcta

SEQ ID NO: 268198 - DNA, 122 bp, Homo sapiens
gggtggacagcccttcctccgtgagttttttctttttcttttctagtcaccaagacagcacgcgtgtgcagaagctgcagcggtgggacgcagtgctaagtctgggggcgcacacaccagct

SEQ ID NO: 268199 - DNA, 122 bp, Homo sapiens
gatgtctgggtccagggggggtttggagggcatctgggtgccctgtgaatctggcttccacgaaggctagctgggacaggttgctccagcctgcggtggacaggagccagggctgtgtatgt

SEQ ID NO: 268200 - DNA, 122 bp, Homo sapiens
aaggtgagaagaggttccagtctggggcggctaggactggggtgatggttctggaggcggcgagggaaggtgtgaggcgaggagacctctcgaatcgcgcccgccccgcccagggccggatt

SEQ ID NO: 268201 - DNA, 122 bp, Homo sapiens
cattgatgactgcccatatccataattttattaggggaaaattacattttgattacgtatcgctggttgtttttgttcaaaacataggttgtatgttaatctgccagtacattggcatcttc

SEQ ID NO: 268202 - DNA, 122 bp, Homo sapiens
cctgagcgcggaggggcggggccaggcctctgtggggcggggccgctgcgaggctggagtcgaaggtgctgagtcgtcgcctcccactgaagcctgggagcaaatgggccccagtgtgccta

SEQ ID NO: 268203 - DNA, 122 bp, Homo sapiens
tttggggcacggtggcaaggctggctgtgcctcctgcttccccggggaaagggccccagacgacttggcaccagtcccctccatggggcgtctggatttccagcagcctttcttcctaggag

SEQ ID NO: 268204 - DNA, 122 bp, Homo sapiens
gtttttttagacatcaccatcaaataccattttaattgtttggaaatcctccaattaaggcgctctgtgattctattttccctttttggaaattcaacaagggcttagtcacctacattatt

SEQ ID NO: 268205 - DNA, 122 bp, Homo sapiens
agctggggaataaccgcggatttagcagccacagtgcgtgcctctggctacagaagccctcgtcttgcctgattcctgcagcaggagcgtggaattttcctccctttgaacaatcgatgctg

SEQ ID NO: 268206 - DNA, 122 bp, Homo sapiens
tgggtgggagactccttcttaattaaggccagcattggcctgggcgggctaggagccccgcgggcccctcaccgagtgcccagagcccggatccaccagcggccggagagctccctgccatg

SEQ ID NO: 268207 - DNA, 122 bp, Homo sapiens
gcgctcatgccctggaggggatctgggccaggtggctggctgtcctctctgccactcccccgaccctgctgagggcaccctcagccctgctctccagctcccgcccaccggacgctaacccg

SEQ ID NO: 268208 - DNA, 122 bp, Homo sapiens
gagcgtgtctgtgtcccacgccggctccggctgccccgtctctgtctcctgtgctccccacgcctgcaccccacaggcccacacgcccgttctgcatcctggggagacccctgcagacactt

SEQ ID NO: 268209 - DNA, 122 bp, Homo sapiens
taaagaatgtgtagttttaacagggacttcaggaacttgtgagttaaaaccacggaactacgtcagactacctcaaaaatatccccaaatgtttataaacaaagccaagggcacgcactcag

SEQ ID NO: 268210 - DNA, 122 bp, Homo sapiens
tgaggttcccagaggctcaataccagcaccatgagccgcagcacgcaaggcaaacacagccggaggtgagcacatacctgcttcgcaccccatgcgcctaaccacaaggttccctccctcca

SEQ ID NO: 268211 - DNA, 122 bp, Homo sapiens
gggggagattcaaaaaagactttaaagaaattagaaaatggcatttaaataagatttagacggcagaaatgtaggtagaggcattccaggaaaagatatagatgggaaagatgtcacagaga

SEQ ID NO: 268212 - DNA, 122 bp, Homo sapiens
gcctccccggtccggactcatacaacttggaggcccagaggtcgtccagtctcatcttgacgtcaggtctgtgacaagagggtgattggggaagcattcccagtgtacaccttcttccccat

SEQ ID NO: 268213 - DNA, 122 bp, Homo sapiens
ggcgtgtaaagaaatgcccttcacaacgcattactgcaaacgacaagtctgattagtccccgtggtgcggctttgctttcacttttcgtactttgagtacatgactgtactggacaaatgaa

SEQ ID NO: 268214 - DNA, 122 bp, Homo sapiens
gtctgtgggtggcaggaggcagtagtgatgtcatggaagaggaaataaatggcacatacacgtgtcttctgggtagccttggaggaagatgagaatcatatctgaataactctcaacaatac

SEQ ID NO: 268215 - DNA, 122 bp, Homo sapiens
acagcatggcttggtttttgtgtttaggaaaggattttgtactaaatgacttataagtgacgtaagtagtgacttatgagtgacaatctaaaattatacagcagtggaaatatttagtaaaa

SEQ ID NO: 268216 - DNA, 122 bp, Homo sapiens
gacgacgaaggccggctgagatgaattctggcccccatctgaatgctcaccgtgtgctttcgacacagcttccactttcacgccgcgtaacacggtgagggagaaaccgccgccttcatacc

SEQ ID NO: 268217 - DNA, 122 bp, Homo sapiens
tgaatgcccaggagcatttctggggggcagctaagactggcagctgggttggtgtgttagcgggcaggggagccattgtggggtccccaggaaagggcaagggctcagccacatcttggggt

SEQ ID NO: 268218 - DNA, 122 bp, Homo sapiens
cggcggcggccctggactgcggggaatgggaatcctaggtccctgactgagcacctcccccgcctccctgcccccgacatggctcaggagaagatggagctagacctggagctgcctccggg

SEQ ID NO: 268219 - DNA, 122 bp, Homo sapiens
aaaatggcgccattctaatcagaagagttgacacaatcaaatagccacacggcacgaagacgcatgcgtggcgacaacaacaacaaaaaccacaacccacattacttgagggctcgggcgtg

SEQ ID NO: 268220 - DNA, 122 bp, Homo sapiens
ggggctgaagcatgtgctctccaaccacctgtctgtggttgctgccactgaaagcaaccccgccctccccagcagtaggaccacagcacagccattgccacccccaccaagcattccactgc

SEQ ID NO: 268221 - DNA, 122 bp, Homo sapiens
cacacaaaaagcacacaaatcaaataacaatacaagatgatatctgatgaaactgccaaacgaatgttaccatctgtaaatcctggggaagtgctagcgagcaagaaatcactgctggtgct

SEQ ID NO: 268222 - DNA, 122 bp, Homo sapiens
cctctagagaagcctttccacgagccacgctgtggtgttgccttttccccggatggtccacggaggttgcaatgctcaattaacacgctctgagaatggaagtgacagtgtagcacaaagca

SEQ ID NO: 268223 - DNA, 122 bp, Homo sapiens
agacatttggtgtaggactgaatccccgtattttagaagccgccttgtctcttcttgcctcgatttcccatcctgttaatcaggagactcagggcgggaggacaaagccaggtgcaagaggc

SEQ ID NO: 268224 - DNA, 122 bp, Homo sapiens
gcgcaccaagccccgcccagcgcaagcgttgctttttaaaggattttccggaagccttggcgggaacttcctgccaagcgtgagaacgctgcgaacttcccggaggccaaaagttgaggggg

SEQ ID NO: 268225 - DNA, 122 bp, Homo sapiens
actgccgctccggcctcgggctgcccgtggcgcccgcaggcggcaggaatcctcctccggcgataggtgagttgtccgcgacccttctcttcccagccggcaaagagcgcggagcggcggcg

SEQ ID NO: 268226 - DNA, 122 bp, Homo sapiens
agctgagaggcctaggtgtgcccagctctcagttaactgaagtcacgtggtggtggaccccgcccccagggcccggttggctgtggccccgcccccgagccctggggtcggtgcttgctgcc

SEQ ID NO: 268227 - DNA, 122 bp, Homo sapiens
ctgctgcctgcacttcccctccatctacacacatacacacacacacataacacattctcccgtagtagagccaaggattgggggcaggctgttttattacctgaggaatcatcagaggtggg

SEQ ID NO: 268228 - DNA, 122 bp, Homo sapiens
cacttattcattgttgggtaccgcgctaagcccgtatatgtaattctcacaataaactgacggaaatggtgctattttgcagcttagccaacaaagttgtttttgaacagggaacgacataa

SEQ ID NO: 268229 - DNA, 122 bp, Homo sapiens
ccaggacggctacagcctgtgcccgggccgggagctgggcaggtgaggacgggcggggcccggcgcggaaccttcccggacgcgcggggcgggacgtgggcgccgataagtgccggcgccgc

SEQ ID NO: 268230 - DNA, 122 bp, Homo sapiens
tccggcacgcaccgcgctcgccctcccgcggcggagtcggcccccggggacgcgggtcctcgggctccagagcctctcaccctgacgccttcgggccgcccccgcagcgcccccgcccagct

SEQ ID NO: 268231 - DNA, 122 bp, Homo sapiens
ttttctggtaaccaaggcaagtaaggaagactgataatttgcatagatctcattgcctatcgagaattcatgaggagactgccaccttccttaataaagtggagccccaaatgccaagattg

SEQ ID NO: 268232 - DNA, 122 bp, Homo sapiens
tcagggaacaggctagctcatgtgttgacgctttggcatctatcatacaatccgccacctcgttcccttaccaaaatatcctcaaaggaaatcctctttgagtctttcagaagagttatgag

SEQ ID NO: 268233 - DNA, 122 bp, Homo sapiens
ggtggccccgcccctaggcctgtgggaggtgtctggtgtctgctcaagacctgcttccagcggagccgcctgccctctgcaaggcgaagcggtgggtgcgtggcctccgccccaggcccctc

SEQ ID NO: 268234 - DNA, 122 bp, Homo sapiens
gtgggggagccagaagggagatggtttgcccctgaagtcaagccgctcggtggtcctgaccgccccagccaaactctgcgtcattctgtgggtggaagtcctgcaggtgtgccggcgtgctc

SEQ ID NO: 268235 - DNA, 122 bp, Homo sapiens
cgaggtgttcgccaacgacaaggagatctgcatgatcaaggtagagatccaggacatcaacgacaacgcgccctccttctcctcggaccagatcgaaatggacatctcggagaacgctgctc

SEQ ID NO: 268236 - DNA, 122 bp, Homo sapiens
ctcagaacatctggatattgcctaaaatataaatttaaattattcatattgaatttaaggcgttgggagagggatatcttaaagttccatcattaagagcttcaataaagtggaggggactt

SEQ ID NO: 268237 - DNA, 122 bp, Homo sapiens
ttacgtccatgccatcaatctgtgtgtggaaaagtcggcaggtcgcgcgcacacacttgtcgcttgaatcgtatgtgtgcctgcagacggcaaggcctatgcctctgactgcgttcacctga

SEQ ID NO: 268238 - DNA, 122 bp, Homo sapiens
ggcccagcagggcttccagtggccttgggatgtgccagtttgttgtgaagcacagagaggcgtggtgcccaatgggtgcacgtcccagttcctgcctctgaggcagctccttacaagcaccc

SEQ ID NO: 268239 - DNA, 122 bp, Homo sapiens
cttccgtattcatgctttctccatgtgcagtctctaacatttcttcaactttgtcatcatcgtgtaggtcttttgaaattaattgtctagctagtttgatattgagtccttcattgtagtga

SEQ ID NO: 268240 - DNA, 122 bp, Homo sapiens
aagatcaaacaagaagagacagaatcacgggcgaagggggcgcattcagggttttctggacgtcaggaagggaccgcggtggggtgctttagaagtggccggagcccgcacctgcatgcagc

SEQ ID NO: 268241 - DNA, 122 bp, Homo sapiens
ggaggcccgcaacatctaccaggagttcctgtccagccaggcgctgagcccagtgaacatcgaccgtcaggcctggcttggcgaggaggtgctggccgagccccggccggacatgtttcggg

SEQ ID NO: 268242 - DNA, 122 bp, Homo sapiens
aatcccaccaaaccaaggaaatcctttcgcacccgaaggaaggcctgccgcgtggcgtgccgactgcagtcctagagtttggagcctcatggagatcattaccataaaacaaataaccatct

SEQ ID NO: 268243 - DNA, 122 bp, Homo sapiens
agggttttctcttcagaccacctgttctgcctagcaaaaagggcctaccttggccgggcacggtggctcacgcttgtaaccccagccctttgggaggctgagacggtggatggcttaagccc

SEQ ID NO: 268244 - DNA, 122 bp, Homo sapiens
ttccccatgtgtcatccaaggcttttcaccctgaaagctgcttggagagggagcagaggtcgatagcagagagaaggggctctagcacttgtgctttgcaaagaagtttcgcggctgtgttg

SEQ ID NO: 268245 - DNA, 122 bp, Homo sapiens
ctcattttgctaaatgcctcgtgggctgccagcatgatctgcctgccaggatctctgttccgtgacctgcgcccagccccacgccgtcctgtgtggccctcgtgccctgcgctcacacttac

SEQ ID NO: 268246 - DNA, 122 bp, Homo sapiens
caccgacctgagtcgccccctttgattggccatccccacggccttccctccgccttccgccgagactcagaaatagtctgtcctgaagcaatccggcgctggctcctcattggacacgacct

SEQ ID NO: 268247 - DNA, 122 bp, Homo sapiens
aacaggcaggaaggcagaaagtgtatgtggggattttggagggaggagagatggtggcttcgtattcagtgagatcacaatggcatcgtgcaagctgctgctagctgggaagcgggttgttc

SEQ ID NO: 268248 - DNA, 122 bp, Homo sapiens
cggagactgaggaggaggcggaggcggcggcggaggcggggcgactccggtgaccgggagcgccgcagactggcagctgcggcgactcccccctttgtgtctggtctgctcggagccactgg

SEQ ID NO: 268249 - DNA, 122 bp, Homo sapiens
ttcctgggcgccgcaggactcatagaagtgaggcggggccacagatttaagtttattccccgcaactgtcggggcggtcccggagctggtgaggacgcgctacggtgggtgcagaaaggaga

SEQ ID NO: 268250 - DNA, 122 bp, Homo sapiens
gtgcggaccgactccgcaggccctcccttgccccatctgggctggtgccaggccgcagctcgagacctggtttccaccccgggctcccacagagcccatgaagcgctggtcacagcccctgg

SEQ ID NO: 268251 - DNA, 122 bp, Homo sapiens
tctccaagactgcctcacagggacccccaggaggctccgaaccatccagctttctgtcaccgccgccgccaccagcgttgtgaacctctgaccctcgcggctctgcgtccattctcaggtac

SEQ ID NO: 268252 - DNA, 122 bp, Homo sapiens
tttctctccggagcaggccactcaccgcatccgtgtaggtgtcctcggccggcttccagtcgcccccggggtagcggctctcgttctgatagacttcatcagtgaactccgtgtgacctgca

SEQ ID NO: 268253 - DNA, 122 bp, Homo sapiens
ccagcctgtctcagccagcttcgtgcattgagcagaaccttcagggtggagcccgctgaccgccttgttctttctcctcagcctgtcaaggaagtcccagaaagcacagctgacttagggaa

SEQ ID NO: 268254 - DNA, 122 bp, Homo sapiens
agtcctgcacttggttcctggcacggccctcagcaagcactcagagtgtcagctgtggcccgagacagatgttcggggctgtgggggccagagcctgtgccccagaggacgttcaaggcctt

SEQ ID NO: 268255 - DNA, 122 bp, Homo sapiens
tgatgccctggttccgggaggagagtccccgctcagggttcccgctgagtgcctcctaagcgccacctctgaggagacgtcccttccagcgcccgaggggcgtcttacccacaacaaacagc

SEQ ID NO: 268256 - DNA, 122 bp, Homo sapiens
ggcggggcgggggctggggggcggaactcctcccctaggggttaatcctccttcctactccgcggtcttggagaggggaggagacaggagcgagtcccgggactggcagctgaaaggggttc

SEQ ID NO: 268257 - DNA, 122 bp, Homo sapiens
caacaggaattctatagtaaggaggaggagaaggggggctccttccctctcctcgaatgacgttatgggcacatgccttttaaaagttctttaagcaacacagagctgagtcctctttgtca

SEQ ID NO: 268258 - DNA, 122 bp, Homo sapiens
tgtttataaggtgtttcttaaaagcgatctttcaacaagctgctcatctatctattgctgcgtaacaagccactgcaaaacttagtggcatcaaacaagcacgatttattagtttttccagt

SEQ ID NO: 268259 - DNA, 122 bp, Homo sapiens
gcccgctgggagtcgcgatccatagcggccctggtctggaattcacagaagtattgtccccgggaacttaagaggaggcaacagttaattcggcgtgatagtgatgctgtggcggattctta

SEQ ID NO: 268260 - DNA, 122 bp, Homo sapiens
ctctacaatctatttgtcctatcagctcaacattcaaaatatattcagaatccaaacattcgtcacaacttcagtgcttccattcaggttcatactgacatcatctctaaatgataaggctt

SEQ ID NO: 268261 - DNA, 122 bp, Homo sapiens
aaaccagcccacttcgctggtgcaaaggttcagcacagggctcgaaggcggagttggtggcgagaggggtccgctcatctcaaacagcgaaaatgcaccttcaacatctccatttaatattt

SEQ ID NO: 268262 - DNA, 122 bp, Homo sapiens
agcccggcggcgagacggagaggcggcggaggtgcccgcgcgcagggtctggtgggcggccgcgaggctcgggagaggcgaaccggagcgcgggaccgcggtcgccccgaccagagccggga

SEQ ID NO: 268263 - DNA, 122 bp, Homo sapiens
gaagcctaggcggtggatggcaaactggaccaccacatccatggcattagcctcattctgcgggaatggcaccccctgcaggagaaagggcaaagtcaggagtgtgtcagcaccaaaggcca

SEQ ID NO: 268264 - DNA, 122 bp, Homo sapiens
cgcagcggcaggagctggaatgggagggggtgcatgaggctgagtgtggcgcatcctcctcggggctgagatggattttacttgtcttgggttccccacggctgtcacagggcagtgtctca

SEQ ID NO: 268265 - DNA, 122 bp, Homo sapiens
tgcgggcgccgggctgcccagctgacttacggatcgggttggtcccgcccccggcgcggccgttttgaaaatcctggtccgcccttggcgattttggtggaagcctgtccctcagaacggtc

SEQ ID NO: 268266 - DNA, 122 bp, Homo sapiens
cccgctagagccagctgcagtccttgccacgcactcgcctcacctgaggctgtgtaggtgcggcccccaacacctaacccagccaggtaccggggaccacagcagcgtcccctgccgcccag

SEQ ID NO: 268267 - DNA, 122 bp, Homo sapiens
acggaggctgagaagatccacgcttacattgcgtggggacggggaaggagcaggcctctccggggacatctctgcagcctctgcaaggccatcctgctccggagggtgactgttagcatgag

SEQ ID NO: 268268 - DNA, 122 bp, Homo sapiens
gtctatctgagtgcagattagagtgtccttgtctgactttaattcttagagccatcttgccgtaactcaattaaggaggagaacttgacagaattctctgggctgtgggagaagaaatgaca

SEQ ID NO: 268269 - DNA, 122 bp, Homo sapiens
cgtcgtacctgcgtgtcatttcacagatgaggactctgaggctcagagaggcaagtgtcccggcccggcgagctctggcggagaatccagttcaagtctttctgccccacctcgcagccccc

SEQ ID NO: 268270 - DNA, 122 bp, Homo sapiens
tgttttatagatataagcactagaggacaagctctacctgatctagctggcctagacatacgcagattcattaattgtagaagaaagaattatacctttcaggtaaaatggctacaaaaaat

SEQ ID NO: 268271 - DNA, 122 bp, Homo sapiens
ttaccagcctccccccaatgaggtaagaccgttttcaacaatttgctaatgctcttgtggcgcccggtgggggtcggaacctgagatcccgaatcgctgtgtgtgtgtgtgtgtgtgtgtgt

SEQ ID NO: 268272 - DNA, 122 bp, Homo sapiens
gcggatgcaggggtgggcgggggcgagaggttcgcagactggctgaggccggcgtgactccgtgggcttgcctagcactaccgcggctgtggccgggccgagccgcaggtcttgcctcgcct

SEQ ID NO: 268273 - DNA, 122 bp, Homo sapiens
caggggggcgcgctggcaagcgaacccgagcgctggcgggcgggcgggcgggcggcccctcgcccccagcagagcagctttccaacagaaagcaagtctccccagaaccctccggcccgcct

SEQ ID NO: 268274 - DNA, 122 bp, Homo sapiens
ttctgagggacagaattcgctgatgatgtatctgaggaggtttctcaatggagcttcactcgacgtgcgtcctgatggcggcttcccagcccgcagcctcagcgcttcttgacacctcactg

SEQ ID NO: 268275 - DNA, 122 bp, Homo sapiens
cgccgaggaagggcaaatcagccttggctgggctaaggcttctgctggctccagcccctccgcggacagaccctgcccacccaaggggccgcctggtctcacttgtccggctccgagctgcg

SEQ ID NO: 268276 - DNA, 122 bp, Homo sapiens
gaataggagttttgaaggtgtattagacatcatcctcaattaacgttcatgaagaacccacgtgatgtttataccaggcattaaaaattttcctacccctcctcagcttttcctgcattcat

SEQ ID NO: 268277 - DNA, 122 bp, Homo sapiens
tcttcggccaacacacctgagcttactgcattaatgttactgtgcgatacagcagctccgcgcctcctgtgagtgcccgtgttcacttcctaaactgctggtctacccagatttttaaaggg

SEQ ID NO: 268278 - DNA, 122 bp, Homo sapiens
gtcacattctccgaaatctaggtggaagttgccaaccttccttcacccttgcattctgtgcgcctgcgggtggaacaccgcatggaagttgtgaaggcttacggtggctggtgcgctacaaa

SEQ ID NO: 268279 - DNA, 122 bp, Homo sapiens
aatataaactaaatgaaataggaacacagttggattatgtagaggataatttgtaaaacacgagggatgtggcccataactccccgtggcattctttacacattaggcaattctccatagcc

SEQ ID NO: 268280 - DNA, 122 bp, Homo sapiens
gcgctccagacccccggggcggctgccgggagagatgctggaagaaacttcttaaatgaccgcgtctggctggccgtggagcctttctgggttggggagaggaaaggaaagtggaaaaaacc

SEQ ID NO: 268281 - DNA, 122 bp, Homo sapiens
cggcgcctcgcttcttggtggccttcgcctactggaaccactacctcagctgcacctccccgtgttcctgctatcgcccgctctgccgcctcaacttcggcctcaatgtcgtggagaacctc

SEQ ID NO: 268282 - DNA, 122 bp, Homo sapiens
aagtatcacaaaaaatgccaactcatcaaagaagattgccttccacctgtctttcccttccggttttctattttgcttctgttactatttcttccatgactctgcaatcccacgcacacacc

SEQ ID NO: 268283 - DNA, 122 bp, Homo sapiens
acatcacagcacaactgtattttattcacagcataaaccatctctttccttctcagttgacgagttcagatgggcaataacagtgtctgccaaagagaaaaaaaaatgtattcaaactagat

SEQ ID NO: 268284 - DNA, 122 bp, Homo sapiens
gaaactggaatccaaaacaggtcccaccagctaacgtcgagatgtcagcagggctggctccggggaagcgaccgtctccttgcctccctcagcctctagaggcttccgcatcccctggtcct

SEQ ID NO: 268285 - DNA, 122 bp, Homo sapiens
caccgtttcctgcagcctgagcctcaggaaactttccttactgagtcaacaggacccggacgggcctcgggaagaacagaatcggggtttgtgcaggtgtggacatgtgcatccttaaacct

SEQ ID NO: 268286 - DNA, 122 bp, Homo sapiens
attccacactctctgtgtctcatatgtatctgcatgtatgtatgtatttgtgtacatgtacgaatgtttctgttacatattatgtatatgtgtgtgtgtgtgcatctttatgtgtaaatcaa

SEQ ID NO: 268287 - DNA, 122 bp, Homo sapiens
aaggatgccatacatgctgttgccaacgcttgcaacacagtgactaaagacacagatgtgcgtgcctggcgtgacctctggcctacgactgtgttcagtgatgatgatgaaccaggtggtgg

SEQ ID NO: 268288 - DNA, 122 bp, Homo sapiens
gtctcacgcaggccgtggggcaaccaggaggaatcgtggctgtgagtccaggagtgagcacggactgcagcttcccagccccggactacatttcttccttccaagaggtgcaggaagaaacc

SEQ ID NO: 268289 - DNA, 122 bp, Homo sapiens
cagctgccaggtagggacggcgcccgccacccaggcgctgggcagagcgggtggcggtagcggctgacctggtttcttgccttatctcgttgcgaaaggaggaaaaagttttcggcgcgggt

SEQ ID NO: 268290 - DNA, 122 bp, Homo sapiens
agcgctgcacaaaaccaaagcaaaacaaaaccacagccagaagcgcgtccctgctgctgtcgctcctgagaagcggctgctgtccctgcagagcctggacggagctgggagaagcgcgcggc

SEQ ID NO: 268291 - DNA, 122 bp, Homo sapiens
ctcattagctgtgcccaggagttagggaggcggcgggtgtgtggctataaaaacgcaacccggggggtgcctgtgaaggaaatctgcgtcccgcagaacgcaacacgccgttgggatactgg

SEQ ID NO: 268292 - DNA, 122 bp, Homo sapiens
tgggagctggaatcatccacacgaaaaccacccagattggatgcctgctgcgcttggagccgaacctgcaagcccaggtcaggccctcaggaaatggtggaacacacttgagttgcttttta

SEQ ID NO: 268293 - DNA, 122 bp, Homo sapiens
cgggtatcccgcaggcggggctgcggaacgcacgtcccctgcgccgtgacgtcacaatagcgactcactggacccagcccttagcaacggcctggcaacggtttccctgctgctgcagcccc

SEQ ID NO: 268294 - DNA, 122 bp, Homo sapiens
ttaccttccaggcaccttatccttcatgcatgctgagctacagcaggccaatcccatccacgtgcttctgtactgcctctgcctggaaagccctcttccttttggtccacatggttaattct

SEQ ID NO: 268295 - DNA, 122 bp, Homo sapiens
cttaaaaaccctgggacgagagcggtccttgtctgcgttccgtgtccaggcaggtgcaggcgccgcggggccggatcctccgcgcggccgagtccatctcctgggaaatggggcggacagtg

SEQ ID NO: 268296 - DNA, 122 bp, Homo sapiens
ttaagtccccatctttctggtattctggccgccatcattccaaagaagaaaatagttactcgctgaacaaatgctatttgaacagctgttttgtgtgtaaggcgctcagtttaggctattga

SEQ ID NO: 268297 - DNA, 122 bp, Homo sapiens
agggaggggaagctgtccccagctgccagatgggaagtgtcagcttggccttggccacctcgggtcaccgctcctccctttcaggcgcccgggtttgcccaccgcgaagagcagtggcggag

SEQ ID NO: 268298 - DNA, 122 bp, Homo sapiens
ctggcagctcaggacaagtagaccagccagcaggacacagatcttcctacccggctgattcggagacgagaccaagctgttgctgaggacgacagccctgctctggtcactccggaggctga

SEQ ID NO: 268299 - DNA, 122 bp, Homo sapiens
ttctttgactcagaaagggaactccctgaccccttgcgcttcccaagtgaggcaatgcctcgccctgcttcggctcacgcaaggtgcgcgcacccactgacctgcgcctactgtctggcact

SEQ ID NO: 268300 - DNA, 122 bp, Homo sapiens
gactgggcgacggcattgtgagggctcggcggaggcgccagggggcgctagctggctcctcgcagccgatccaggccgcggcggttccacgaggtccggcgccccgcgccccgcgacccgcg

SEQ ID NO: 268301 - DNA, 122 bp, Homo sapiens
ccagtttacaagatacagctatttgttagaagtcggcttcagtcataaaaattttccacacggtattttttcaaaatcataactaattacaataactttagccaatcttaagtctcattaat

SEQ ID NO: 268302 - DNA, 122 bp, Homo sapiens
cggcgactgcggcggcggaagtgattgtgaagtcagctggagcccgcctccttgatgtggcgggggcggcagctgctctccacaaatcagggtgggcccgaaagcattatttcatcttaaat

SEQ ID NO: 268303 - DNA, 122 bp, Homo sapiens
ttatttcttaacttcagaacttcaaaggggtgagtacacgggcgagccaccagtaagcaccgatttccttcattgctcctttcagcctttggcacaatcatctcttttactatctattatta

SEQ ID NO: 268304 - DNA, 122 bp, Homo sapiens
gggatactcctgggccgccccggactgacacgtgagccaggcctcggtcacatcccggcccgctccacaactccgaagtagcggccgccgcccctgtcctgcagccggccctggagggtctg

SEQ ID NO: 268305 - DNA, 122 bp, Homo sapiens
agagaaagatttgtaagacgctaccccattctatccaacaggtatttactccccaggagccggcacggagcaagggttcagagtacagacgagagcagaatgcctgggcctcaacttggctc

SEQ ID NO: 268306 - DNA, 122 bp, Homo sapiens
tgcttcatgcttttgatatgcaaattaagcaattcagagctacttctcctctgtctagcccgtacacaccccaggaggcaatgttcccctactttaatgatctcagtagtaggtaccaggca

SEQ ID NO: 268307 - DNA, 122 bp, Homo sapiens
tcccagagcccctgagccgagaatcaagcccagatctgcctggctctgaagcctgggctgcgccaagcctatcacatatcccagccctcaactgtccaagaacaagaccgcacccagttggg

SEQ ID NO: 268308 - DNA, 122 bp, Homo sapiens
tccttcccttctctttctcacatgtgctgtcttgcccttccaccttccatcatggcatgacgagcaagaagaccctcacaagacactggcaccttgaacttgaacttcacagcctcaaaaac

SEQ ID NO: 268309 - DNA, 122 bp, Homo sapiens
ggttcccagcactgtcctttgcagtcagcttgtcgctggcgccgatgggaagaactgaaacgcctcaagggtggggacggcgccccctgctggtcgcgccctcgggcgacgataagagactg

SEQ ID NO: 268310 - DNA, 122 bp, Homo sapiens
ggcctcgcgagatttctttcagcgcagtcttccctttgatctgagctgtctcaggcctcgcgccgctggatattaaacctgccggccggtagctttcggctcccctgcggaaaccgccattt

SEQ ID NO: 268311 - DNA, 122 bp, Homo sapiens
gctggccctggcttctgcaactgcgcagtcggcgctgtgacgcccggcgcggctctgtgacgtcacgaatcggtcctctgtaagaggggagggcattcttctccaggggagggctacgtgtt

SEQ ID NO: 268312 - DNA, 122 bp, Homo sapiens
aatcttatgcaaatcaacgtgacgtcacagagatgactcggttgagacttgaattttgagcgaggagagtgagcagtgggaaagcgagcctggagggcgcagacggacgactagctgtgctc

SEQ ID NO: 268313 - DNA, 122 bp, Homo sapiens
caaggtgacgctgaccagggggggcctccagcagcccccacatctgccagcggggccccacgcacactcgcctgtccctccagggatcaaaagcatccaaggaattcacccggcgaagaagg

SEQ ID NO: 268314 - DNA, 122 bp, Homo sapiens
gaggggtgagtcgaggacacaggggcagccggagaatgcggaggagccgggtcctgagcgcggtctaagcgaggctcggctctcgtccaggaactcggacgcgggctcgccggctctccgcg

SEQ ID NO: 268315 - DNA, 122 bp, Homo sapiens
tctcatgtttccttctgttgagagttcacacttcgcgtcggaacttttgcgcaccaatggcgcaattagcatgcacaaaagcccttgttcgcgacgcttgcgttcgcgagctagctttagga

SEQ ID NO: 268316 - DNA, 122 bp, Homo sapiens
gtaggggttggggcgcgccgggcggcgccgtgagaaacggcgggtctccaggtgcggccgcgggcacctgtttctagtacccccgtccccgcgctcgccttccagccgtgggagccgggccg

SEQ ID NO: 268317 - DNA, 122 bp, Homo sapiens
actttgtttctacaattactttggagatttttttccgtatcacatatacaacagatccaccgcattattttttattgccgcatagtattccattgcacagtggtttcacttatttcaacagt

SEQ ID NO: 268318 - DNA, 122 bp, Homo sapiens
tgttgttgttgttgctctacaaaagatttgtcccgcagtggacgggagcctcctcacggccgcccgcccgtctccgcagttctcctcagtgaccggaggctgccgcgcgccccgttctccag

SEQ ID NO: 268319 - DNA, 122 bp, Homo sapiens
agccaaaagaagagattaacaaatgcaccaggccactcctcccccacaaagaggtcacagcgcataggtactcactgttaaaatgatggaacgcagttgcttctgagccaaaatattcgcca

SEQ ID NO: 268320 - DNA, 122 bp, Homo sapiens
cctcacagccagaagagggggagctgcccctgctggccctgccctgcccgactcacgcagcgaggtgccgcatcagactgaaatgtaattagagtgtaatgcaagccaggacgcgcggagac

SEQ ID NO: 268321 - DNA, 122 bp, Homo sapiens
tcttcgcttgaggggtagcttgaaggcccctgaaagcagggaacgaggcgcggctgtgcgcgcgcggcaggtgcacaggacccacctcgccgggacccacctcgccgcagcccctgcgcggc

SEQ ID NO: 268322 - DNA, 122 bp, Homo sapiens
cctgccctgcaagagaccgcctctcagcagggctgattcttccccatcggtaggaattctcgaaaaatactctaagccaggcataacaacctggctgaggatgacttagaaaaggcagcctg

SEQ ID NO: 268323 - DNA, 122 bp, Homo sapiens
ttctcagtggaggaaatgagccttggagcgatgggaatctgcctctggcaaacctctggtcgctgcagggcccgagagggatgcgccctcctctaagttggcagtgaggtgtgggcaggcca

SEQ ID NO: 268324 - DNA, 122 bp, Homo sapiens
aaaagggtcctggtttccctgtttctgtaagtgacacagccaggaaggacgtccaggactcgcctgagcattgtggctggctgacgcctcaggtccgctaagcatttcctgaattcacccca

SEQ ID NO: 268325 - DNA, 122 bp, Homo sapiens
gccaaaagttttaaaatggatcaaccctggtgtgtagctagcaagcaataactgactactcgtcacctacagttgtactaaatgtatctaaagaaacacacagtcctacaaaagttgttctc

SEQ ID NO: 268326 - DNA, 122 bp, Homo sapiens
gggccccaccttcccgctgcaccggctcgtctgggcgaaccggcatcgcgaactggaggccgcactgcacagccaccaggtgaggccccgctggggcacccggcccttcccccgggtccccc

SEQ ID NO: 268327 - DNA, 122 bp, Homo sapiens
cttcaattggttcactttgtccatcaggttcatcagtatcaagtgctgaaagctctaactcgatatccctatcaggtttagtatctgttgcatcttctgtataatcactctgtaactaagaa

SEQ ID NO: 268328 - DNA, 122 bp, Homo sapiens
tccagcgacgacggctctcggggaaaggtggaaggggcgcctgcctaagggtgcgctaagcgggagtcagggcagcggacactatgtacaggtccttagttctccagcctccccagtggaac

SEQ ID NO: 268329 - DNA, 122 bp, Homo sapiens
attgagaaggcacagaacaaacgctcccttatgcggctcccacggcgtctctcggtttgtcggagacagctgcccaaagcacgctatggttactcattacccgggttcccaggcaggaaaag

SEQ ID NO: 268330 - DNA, 122 bp, Homo sapiens
acctaaggaagcaaaagggcagccagcaacagccggacgggaggaccccggcggccgccacgcagtcccacaatgccccgctcgcaccaccctgagggcggagagaaaggaccgctgccggg

SEQ ID NO: 268331 - DNA, 122 bp, Homo sapiens
acttgcatagaaataattactgggttgtcgtggaggggacacgagacagagggagttctccgtaatgtgccttgcggagagaaaggtccaagaatgcaattcgtcccagagtggcccggcag

SEQ ID NO: 268332 - DNA, 122 bp, Homo sapiens
agtacacggagtagctcgccttgcggctgcgcttggtttcttgccgtccttcttctgcgccgtagtcacccacctcttggagccctaattgggatcaggagcggactttgttggctctggca

SEQ ID NO: 268333 - DNA, 122 bp, Homo sapiens
atgattctcctgtcagggaccagtgagctacgcaaaagctccctgtcttgtctggaaggacgaactgcatccttgctgctggggagaaggcagtgccctcagcactcccttaaggtaagtgc

SEQ ID NO: 268334 - DNA, 122 bp, Homo sapiens
caaatgttgccacactctgcctcacacagctgggtcaagttcaggctgcagaagaggctgcgtcaggtgaccggtcaggcacatagctacttccttccgatgcttggctgtgtcctggccag

SEQ ID NO: 268335 - DNA, 122 bp, Homo sapiens
ctggccaacatagcgagatcccgtctctacccacaaataatttagccaggcgtggtggcgcgtgcctgtagtctcagctactggggttcttattcctcgtggcaacacattttggagagggg

SEQ ID NO: 268336 - DNA, 122 bp, Homo sapiens
gttttcttggcccggccgcgcctcccccagggtagggctgccgtgccccgccccggcccccggcccccggcccccggtatattgtttttcaggactgagagaagagcctttgatgggaatcc

SEQ ID NO: 268337 - DNA, 122 bp, Homo sapiens
catcgcttgagcccaggagtttgaaactagcttgggcaacatagcaagacctcatctctacgaaaaaattaaagacttagccaggtgtgcacatctgtagtaccagttactgggcaggctga

SEQ ID NO: 268338 - DNA, 122 bp, Homo sapiens
ggccggcgaggggggcaccagggggcgtctcctcccccgtggccaggaggagcatatgtgcgtgttcctcatgactacagctgctgtggagcagtccttaacaatgcatccaaggagggtaa

SEQ ID NO: 268339 - DNA, 122 bp, Homo sapiens
cacataacaagcagcacccacaaggtgctcccttccccctagcctgaatctgctgctccccgtctggggttccccgcccatgcacctctgggggcccctgggttctgccataccctgccctg

SEQ ID NO: 268340 - DNA, 122 bp, Homo sapiens
gactgtccgcggggcccgccctcttccagaagaggttgctttccattggattttttgatacgtcagtcataagcaatggccaataggcatggggaacaggatcttagactgggctaagccgc

SEQ ID NO: 268341 - DNA, 122 bp, Homo sapiens
ctggtccccggggtcccgtgagcagccagggcggaggtcagggaaggcgggtctggggtacgagaccaggagctgtgcggtctccgacgggacttggcctccgcggggccctgctgcccccc

SEQ ID NO: 268342 - DNA, 122 bp, Homo sapiens
ctgagcattcctcaatgcagccaccacgtctgattcacctcagtcccctacgcctgacgtcgggcccggcccagagcagtccacccccaggggtagttgcttccacctcccttagtagctgg

SEQ ID NO: 268343 - DNA, 122 bp, Homo sapiens
aagttcaccaggagtacttacaaatcttgtgaggtttgactcctgtcgggggtgactcttcgctgctgggcttgaggttgctgagaaatgattaaagatgatttattgtcagaaggggatac

SEQ ID NO: 268344 - DNA, 122 bp, Homo sapiens
acaagccatgttccctcagccagcacccccagcgtgtggctcgggagccctggaaggcagcggccagagctcacagcagggacgccgtggctggtcattaactgaaagataaagcaggaggg

SEQ ID NO: 268345 - DNA, 122 bp, Homo sapiens
tctcctcttagtcagccaaggtgttctctgcctacttagcggtcgctccagaatcaagctcggatgatcccgccttccatgtcgttgtgtcccctcacagtatttattttaaacattcattt

SEQ ID NO: 268346 - DNA, 122 bp, Homo sapiens
tgcctgccaagcggccaatgaagcctgcaagtcaattggaggtggatcccaagggactggcggagcccgggaggaagcgggcggggcccgcatcagaaccgtagggcggctatagacaggcg

SEQ ID NO: 268347 - DNA, 122 bp, Homo sapiens
tggtttcatcttcagttgaggccaaaatctccgcaggttgctaggggccgggccagggctcggtgggcggggctgaccgcgggaactgggccagggtatcacatcctccagggaatgtttgg

SEQ ID NO: 268348 - DNA, 122 bp, Homo sapiens
gcttcggctgcgcggaggccgtggcacacctgcgggaggcagcgacggcccccacgcagacgccgggaacgcaggccgctttattcctctgtacttagatcaacttgaccgtactaaaatcc

SEQ ID NO: 268349 - DNA, 122 bp, Homo sapiens
ccttgcgtgggaggtggccccatgcggccgcttctctgggggacagaacagaaactggggcgagtttggcccagccgcaacatccaagtctgtgttcatttaaaactaactgcctttgattg

SEQ ID NO: 268350 - DNA, 122 bp, Homo sapiens
acattatcaggatgtgcaaccaagcccccatttctcaccttggtaggcacaaaaatccttcggaggcatcctgtaagaggcttgcgagactcttaccaagccaccccggctttaaacgcctc

SEQ ID NO: 268351 - DNA, 122 bp, Homo sapiens
ctgcaaagaagccagcgactcaatgggtgcgtcaactaggcagccgcagcactgggagtgcggcgcgggagtgacgtcaccaggcggagggggcgaggccgggcccgcttctggtcacttac

SEQ ID NO: 268352 - DNA, 122 bp, Homo sapiens
ggccggagcttccactgggggttctgcgggaaaggctaggcagggcagcgtgagccgctgcgaatgggctgggctgagtcctcccggcacgctggggctgtccctggggcaaggcacctggc

SEQ ID NO: 268353 - DNA, 122 bp, Homo sapiens
gcgcccttcgcaaaggcagagaggcccagagcgccggcgcaggcgcggagggggcgcaggcgcggagggggcccaggcgcggagaggcgcagagcagggcaggtggcaccaacagcgggtcc

SEQ ID NO: 268354 - DNA, 122 bp, Homo sapiens
tggacttaccagcacaaaggtgattttctcctcgcagactgtaggcgccactgctgggtccggaaaagaaagagaaaaggcccagcgtggtcgcgtgtgtaactcaggacgcggctgcgctg

SEQ ID NO: 268355 - DNA, 122 bp, Homo sapiens
agatacaaggaggtcagcatgaagcagcccttgctccggggctctatggcttagagaccccgtagcatgtgctggtcccagtgtctgctgcaagatgcccaaatgttgcaaacagcgactgc

SEQ ID NO: 268356 - DNA, 122 bp, Homo sapiens
acaaaatcacgcccgacacggccttcaaatcctctcatttattcagcaagtgtgtttggccgcggggtcccctttggctaggccggatcggggcggaggatgggggcacatggccgcgcgct

SEQ ID NO: 268357 - DNA, 122 bp, Homo sapiens
atcatcggccactgcttcccgatgaaccctccgtaagcatgggttcatttccggctgtgtcggtgatgcctggcccgtgggaggtttgcagtcactgcggcaggtgaattggcatccgcaaa

SEQ ID NO: 268358 - DNA, 122 bp, Homo sapiens
ttgttgggtttatcgacctattaacctttttaggatttttttaccttatgcatcttttaacgcttttgcattactcttgttttggattaggtgtagtatttaagaacatatcttccttatac

SEQ ID NO: 268359 - DNA, 122 bp, Homo sapiens
acagtcgctccgtgacagcccaccaacccccaaccctctacctcgcagccaccctaaaggcgacttcaagaagatggaaggatctcacggatctcattcctaatggtccgccgaagtctcac

SEQ ID NO: 268360 - DNA, 122 bp, Homo sapiens
cgccgccgccgccgccgtccctgcgtccttcggtctctgctcccgggacccgggctccgccgcagccagccagcatgtcggggatcaagaagcaaaagacggtaggcttccaggcgccggct

SEQ ID NO: 268361 - DNA, 122 bp, Homo sapiens
gccgagcaggacgctacccgcttggcgtaggcaactttacgcagctggctaagagggaatcgcagggtgtcgcgagtttcgcccggccgccttaatctcagcatctgagcttggtcacctct

SEQ ID NO: 268362 - DNA, 122 bp, Homo sapiens
ttcccagacggggtggctgccggacggaggggctccttacttctcagagggggcggctgccgggcagagggtctcctcccttctcagacggggcggccgggcagagacgctcctcacctccc

SEQ ID NO: 268363 - DNA, 122 bp, Homo sapiens
tacaggtggcagcctcggagggtgattgtgaagggtccaggcggttcccgcgtgcagcctcgggacagggctgtgctggagccatcgagctggagagagagtgagcttcaccccagggcagc

SEQ ID NO: 268364 - DNA, 122 bp, Homo sapiens
gggaaagggcggtaccagctcagggggcatgaggcggacgccactcagagacagtgagtacgtcgaggtgctgggacgctcggagcgagagggacagagagggacagtgagaccagcaagga

SEQ ID NO: 268365 - DNA, 122 bp, Homo sapiens
ctgctgccccctggcggctacgtggacggtgactgcggccctttagtggtaggcgaactgcggctccacctgggctccggagccgccccagtcaccagcctcttgcttctcttctgcagctt

SEQ ID NO: 268366 - DNA, 122 bp, Homo sapiens
catttaactgaaaatgtctctattttgcccttgtgtttgaaggatacactattgtataaacgtcatcccattgtcttccaacttccatccttgccagtgagaatcagtgatcagtcatttgt

SEQ ID NO: 268367 - DNA, 122 bp, Homo sapiens
tggccgccgctctgtctctccacgccccacctgtgtccccatctcggccggcccggagctcgcccacgcggacccccgccctgccccagctcagcgctccctggcggcttcgcccgggctcc

SEQ ID NO: 268368 - DNA, 122 bp, Homo sapiens
aggtatggtcatggctcactgcgcccccgaactcctgggctcaagcaagcctccctagtacgggatggaccacagacacatgccacagctccctgcttggtcacatttaatgtgattcgaca

SEQ ID NO: 268369 - DNA, 122 bp, Homo sapiens
aggcagggccggagaagctctgtcttgagatccacgcagaattgcatcagcacatcagcacgagtgcgcaggttggcaggggccccctggactagcatttgggagcctgcacagcatttttg

SEQ ID NO: 268370 - DNA, 122 bp, Homo sapiens
acttcaatatccaatatttaaaactctgctgtcaactccaaaaacagaaactgggagacccgaacgagagcgcctctttccgggcaaaaacccgcgctgccattttaggggcaaagagaaac

SEQ ID NO: 268371 - DNA, 122 bp, Homo sapiens
tctctgctgcgctttgcaagcactttctcttctgcacgtttggaacctaccccggcctgtcgtgtctttctcctggcctcctcgcgagccgaacctactgtccggtcccgggaccccctgcc

SEQ ID NO: 268372 - DNA, 122 bp, Homo sapiens
tttccctggcccgagaagagcagcccccagcaggctgccggcacagtcccggctcactcacggcctagagagcattgcagggccccagcaggctgccggcacagtcccggctcactcacggc

SEQ ID NO: 268373 - DNA, 122 bp, Homo sapiens
agcaaacatgtattggcggtgcacagcgattgtgaggcaattgttgaaggatctcaaatgcgcttggcatttggtcttggagagcaattcgaggaaccacagctccagttggctcatgctgg

SEQ ID NO: 268374 - DNA, 122 bp, Homo sapiens
cctggtgaaagcgaagaaggaggcaaatgatatttaattcagtacttaaggccacgggcacggcagaacgcagcatcaggcaatatttatgcaagagaactcacaatctaatgaaaggcaga

SEQ ID NO: 268375 - DNA, 122 bp, Homo sapiens
aaaggtgtggggcagacccgaggagctctaacccagcgcctgggacttcaacttcagcctcgtaccttgctgccacttgggcctttcctgcagtcgtgtaactgacagttagacaggtcacg

SEQ ID NO: 268376 - DNA, 122 bp, Homo sapiens
taatcaagacaatagtgaagttgagaaacagctcccgggtgtttatccccattttcacagcggcttggtgagaactgcaggcagatttctgagggcacaccaaggacctctggcttctcctc

SEQ ID NO: 268377 - DNA, 122 bp, Homo sapiens
taaccaatgacaagaaagaatcctttcgaaaggacgtgtcaggcaaccaacggccggtgccgctgcgggggtccggcggcttccgttccgagagggcggggcggcgtcccaaaacggaaggt

SEQ ID NO: 268378 - DNA, 122 bp, Homo sapiens
gacaaggaaggaaaggtggagagatgacgagcgcactgggtcccccaggcctggatgaggcgagcgatgggctgggctacgctgggctggggtcgcggcgcacgggcaccactcatcttggg

SEQ ID NO: 268379 - DNA, 122 bp, Homo sapiens
ggacaagcggggccgggtgcctcagcccggcctcctcctggcctccctctccccaactcacgcatccaccagcaggaccccctacagggcaggcgcaggagtgaatcttagctgtcattact

SEQ ID NO: 268380 - DNA, 122 bp, Homo sapiens
cttggggcccaacagctgttcatgctctattttctgacggactaccgggcaagcctgcaacggaggttcctcctccctgcgctgcatcctgcagggattgggcattcatttccctcagcata

SEQ ID NO: 268381 - DNA, 122 bp, Homo sapiens
ggtttgtctcgtgggctcagtcggacagaagcctgaaatcaaatctttctaggctgcagacgtaggagatgcctgggacaaggaggccaccttctcagggcaaaagaaaaagaaggtgacag

SEQ ID NO: 268382 - DNA, 122 bp, Homo sapiens
cgccccaaacacaaaccctgcacctctggcctgtaaaggaagtccaggctcacttagaaccggtagaattctaaaattacacaaatcagcagaggaggcctgtaaaccggagtccagaaagt

SEQ ID NO: 268383 - DNA, 122 bp, Homo sapiens
tcaggctcctaatatgaagatctgccagacctaaaaccttgctgcctgcctggaagaaaccgctccatagtactctatttctcccaggggactctactgaacaataccagccattcttcagt

SEQ ID NO: 268384 - DNA, 122 bp, Homo sapiens
caggtaagttattctctggccggggcggggggtttggaggcggggaccgtccagcgtcagcgcggggcctgggggcggtggcttgagggctcgaagccgggcggctgggcgcccagagcccc

SEQ ID NO: 268385 - DNA, 122 bp, Homo sapiens
ctttgtctgcagaagaacagaagatcgaaatggcagaaattgtgcacatcagactcctgacgtgacattatgtagattttgaggcaggaaagtgtctgcctcatgcaattactaagaattcc

SEQ ID NO: 268386 - DNA, 122 bp, Homo sapiens
ctggcagctcagcaatgtgaggctgctgggatcgcttcactctgattgtgttggctgtctcgtcatggtcatgagatgggctgtccaggcatccagcagcacttccctacccaaaaatgtcc

SEQ ID NO: 268387 - DNA, 122 bp, Homo sapiens
ggcagggcatgtgatctctgccgaagacattcaagccacccagtgatgtgtgctgggcctcgatccccaccgaccgccagtcctctcctcccctggacagtaaaggtttctccaagacttca

SEQ ID NO: 268388 - DNA, 122 bp, Homo sapiens
gtgacccaagcacctgggcccttagacagtaacaccactcacaccgagcacagaccagctcgcgcccacaacacgagcctgtgacacgcaagtctctgtttctgagctgatgccgtctggct

SEQ ID NO: 268389 - DNA, 122 bp, Homo sapiens
tggaaaggcgttgcgtcttgtccacttctacaacctggagggttgctgcctagccaagcccgctcggactgctggggcattctgctggccttttccccgagccaaacacactggtgcaagaa

SEQ ID NO: 268390 - DNA, 122 bp, Homo sapiens
acctgggagaagctggggtggcgccagcatctccttacaggtgcctccatcctgtccttgcggaaggggcttaggacaccccgcagtccgcgccccgaggtggcgaggcccgcacgaatcgc

SEQ ID NO: 268391 - DNA, 122 bp, Homo sapiens
actcaacacatcatcttaaagtggtgctggatgggtggtggccaggtgacattttctgtgcgttttgaccctgaggcatctgaggagaggccacatcttgtgtatgccctttccttctgttt

SEQ ID NO: 268392 - DNA, 122 bp, Homo sapiens
ggagcctgcctgtgtcacgatggggaaggcccttgggattcgctctgtgggtgcgggcagcgacaggggtgggtcagggtgcaggcggtgagacggcgagcgaggaggtcgggaaggagcct

SEQ ID NO: 268393 - DNA, 122 bp, Homo sapiens
ccacttcccccctgactcttgggaccaccatcgcagtgggggcaggtacacaccgcgaggcggggggggggggcaggtacacaccgcgaggcggggacagagtgtcagcccctcttccccca

SEQ ID NO: 268394 - DNA, 122 bp, Homo sapiens
gtccagcctaaaaagagaagctgaacactgttcgtttgggggctcatcggctcactgccgcgtggtcagtcctggtgccgtgagcacagccaaccggactgtaccacatgttcccttctccc

SEQ ID NO: 268395 - DNA, 122 bp, Homo sapiens
ggcggggcctcgggcgcggctgcggtgggaggtccagccgtagggggtggggcggggctgcggacgcgcgcctgggcccggcaccgcacagctggctgcagctggcgtggctcgggacgcgg

SEQ ID NO: 268396 - DNA, 122 bp, Homo sapiens
gcatctggtggtgcctgtagctccccacaggcgtgtgcaggccgtgaaagggctgtgggccgagaggctaacggctgggtgttcacgggggatgtttggtgaggggtctgggagggctccag

SEQ ID NO: 268397 - DNA, 122 bp, Homo sapiens
cccactttgaacctcctgggtacttgagcaagctcaagggtgttcggacctctagggagacgttgcatcacgcagtttggaaagaacttgggaattctccctggggggctcgctgtatttac

SEQ ID NO: 268398 - DNA, 122 bp, Homo sapiens
gatacaggtgtagtaaaatcatttgttttacttattttccttttcctttgtccttctcttcgtagatgcatgattgcctgcatatagtcagttcgatagaaggtggtcactaagaattgatt

SEQ ID NO: 268399 - DNA, 122 bp, Homo sapiens
aaagccgagaggaagcaaatcagattccaggctgctgccaggtgttgtctcgtcttccgccgttgctcagcacccgccgctgcccccactggctcgattcccaaaggggtggtgctggaagg

SEQ ID NO: 268400 - DNA, 122 bp, Homo sapiens
tggaagttctgggctgggagtggggtgcagtgagtggcctcaaagttgtgcagatgcttccgagcctgaggaaaggaggtgggacaggtggggtacagagcactgttgggaggggcagccac

SEQ ID NO: 268401 - DNA, 122 bp, Homo sapiens
gggttgagccagttccagaactcgcacgtagaccgcagagagcaaagccgggtggcctggcgccatcgcgtgatgcagactattgtgaacggcctgctctggaggcgcagagaggcgggagg

SEQ ID NO: 268402 - DNA, 122 bp, Homo sapiens
cctgggaagaggcctttgagaggtttatacacatgtgcgatgtgggccagcgggcggccccgggagccagcaaaggtcagacatttgtccttccagacacagctcccgcgaggtagaacacg

SEQ ID NO: 268403 - DNA, 122 bp, Homo sapiens
tttctcgctcgcgctgtgcgcttttttccaattggggatgaaaaggacatggaaagaaatcgcagcaaggttagcaccctagtagataccccaccccagcaaaaatgtgcaaagtcctattt

SEQ ID NO: 268404 - DNA, 122 bp, Homo sapiens
cgccccgggagtccggggatgtgggtggcgagggctgctgggcgttggagcaccaggaagcgccttcccctgtcattccccttcctgtgttctctggctgccgtaagatgcatgtctttacc

SEQ ID NO: 268405 - DNA, 122 bp, Homo sapiens
caccatttccccgttttggagagatttttccttcttaaatgaatggcatgactcaatactcgaaggcatcacgggctctaacacacagccgcccttgcagctgtgcgctctggaaagctgga

SEQ ID NO: 268406 - DNA, 122 bp, Homo sapiens
acccggcactgggcggctcccctcggagccaacaggaaacagcgtacattgctggtctgacgggtgagattggcaggagtgccagagctgctgggggcagagtcgggggtgaggacagaggg

SEQ ID NO: 268407 - DNA, 122 bp, Homo sapiens
ccgcctccgaggttcaagcgattcatgtgcctcagtctcctgagcagctgggataacaggcgtgtaccaccacgcccggctaatttttgtatttttagcggagacagggtttcaccatgttg

SEQ ID NO: 268408 - DNA, 122 bp, Homo sapiens
cccccttggaggagactgggcaaagcgcatgagacccccctctcttgtgtcttaaagctgcgtacaaatttacaatcacctccataatgatttcatttttttgtttgtttcaaagatggagt

SEQ ID NO: 268409 - DNA, 122 bp, Homo sapiens
agagggtgggtgaggacgagagtggccctgacttggtctccaaagttggggaggacacaccgaggggtgagacagtagggagtggagacggatggggacttccaggcgggtggccaggatgg

SEQ ID NO: 268410 - DNA, 122 bp, Homo sapiens
gcagcattctggaagacgccacgcctccgctggcgacgggacattattacttttggtacgcgctgtgacacttcaaactcgtaccgtgagtaataatgcgccgtccacggcaccgcatcgaa

SEQ ID NO: 268411 - DNA, 122 bp, Homo sapiens
ggccatagggccccgcggaggaggccccagcaggcggaccaggaggccgaagcctcccgacgctcccagcctgttgcttattcattcagagtgggaaagcgccagccgagcggccagccagt

SEQ ID NO: 268412 - DNA, 122 bp, Homo sapiens
acctcaggtgatctgcccacctcagcctcccaaactgctgggattacaggcgtgagccaccgcgcccagccacaactagggttttataatacattccaccagttggcctgcaagctgtcagg

SEQ ID NO: 268413 - DNA, 122 bp, Homo sapiens
cagggagaaaagagcccttcagacaagatgggccacaatattccagagtcccactcagcacgcaccaccaccaccaccctcggccgcagcgttcagcaccctccgccaacacacacaagctc

SEQ ID NO: 268414 - DNA, 122 bp, Homo sapiens
tgaaaacatttttgtattattagctgtaaacctgctgagcatgctatttctgtgtcaaatcgtcaattaaaatgttcttcaaaagaacaggttcaaaaaaagacattttatggtatgcaatg

SEQ ID NO: 268415 - DNA, 122 bp, Homo sapiens
aagactgtgaaaacaggaggagaaatgtcctgctcgtgtctatactcccgttgcctagcacggtgcctgggggatgctaagcacacgagtgtgtccgaatgaagcccctcagtcacagctat

SEQ ID NO: 268416 - DNA, 122 bp, Homo sapiens
tgaaacgagctcatggactgacccggggctgggcctcgccagccaggagagagcgagggccgcacggcagggctggcccaggcagctcgtccagggccattcagatcccaagcatcaggaaa

SEQ ID NO: 268417 - DNA, 122 bp, Homo sapiens
tctccatcgtcttcgacgtcgtcttcttcatccagcacttctgtttgtacagaaagagaccggggtatgaccagctgaactagcacccagggacccagtgtacccagcctctggcctcgtgc

SEQ ID NO: 268418 - DNA, 122 bp, Homo sapiens
ggccaggcagtaggaccagaagccagcaacatagatcagcctggatcttatgctggggggcgcagagtgagttgtggggagcaggcagggaaggcctgggtgagaggggggagggctgagga

SEQ ID NO: 268419 - DNA, 122 bp, Homo sapiens
catattatgaaaaaaaaaaacactttaagacatagctcattcattcgaaggtttctaatacgttacaaatttatgctgggccttggtgaaaaagtgaacaagatagtctctgccttcataga

SEQ ID NO: 268420 - DNA, 122 bp, Homo sapiens
tcctggcccgtcacagaggagcttactgtatatgttcaagccggtctcttctccctccaccgggctatgtttctccatccatcaaatgtgagaattggagtaagaatttctgaggaccctcc

SEQ ID NO: 268421 - DNA, 122 bp, Homo sapiens
aacaaggtaaagtagcccctttatgccaaatgcatatgtctgtgcctgtgtatgtttttacggctgtgtgactgtgtgtgtgtacatatagtcaaaagttcccaatctgtcatgcctgtaat

SEQ ID NO: 268422 - DNA, 122 bp, Homo sapiens
ggctgtacacctgctggctgccatggctgaggtgggccgtaccgggatcagctacccaggcgcgcttctcccacagggcttctgggctgcggtcgaagtgtggctggagaggccgcaggtgg

SEQ ID NO: 268423 - DNA, 122 bp, Homo sapiens
agatgaaataacaagcacaggaacaataagtaaattgcctaatattatatcacaagtcatcggtggggctgggatatgaattcctgctttctgactccagagtccaagtctcttcaggaatc

SEQ ID NO: 268424 - DNA, 122 bp, Homo sapiens
ggatgcccagaatggaaagggcttatttaataaaaggccttatttgcccttgagaaccagcgtgccatagctttcatgtgtctttaagtataaaggaggccacatttaaaaataagaatcca

SEQ ID NO: 268425 - DNA, 122 bp, Homo sapiens
cctctgcgcgcctcagcggcccccatcagcaccgcctccaccacccgcttgccagctcggcgcccgccccggcgccgcctcgagttcatgattctttagtctccttcaatctagatctgttc

SEQ ID NO: 268426 - DNA, 122 bp, Homo sapiens
ctgtgacaagaggaagctaggttgaaatcactgatagaatccagtttgcaattactttctcgattggtgtcagtagttttactgattaggacttttattgtgaattacagttgaaagctgta

SEQ ID NO: 268427 - DNA, 122 bp, Homo sapiens
tgctgtcaagtagccagggtgggctccgccgaggcgaggaggggcgccggtggggagatgcgctcccaggtgtttgcagcggaagtgggaaacctgtagggtatggtccagctgtgccgcac

SEQ ID NO: 268428 - DNA, 122 bp, Homo sapiens
aacgctccctgccaaagtggggaacagctaccctcattgtacgcctcgccctgccggtggcgctctccccccgcctgcgttcggtctgaaagtgtgaaaattacaaatcccaagaaactgca

SEQ ID NO: 268429 - DNA, 122 bp, Homo sapiens
cggagggggaagggagagagccggccaaggcggggccctcccgcgcgcgcgtcctccgcgcgcccccaccccgtgcggcgccgagctctccacgcccagaccctgctactccactggggtcc

SEQ ID NO: 268430 - DNA, 122 bp, Homo sapiens
ctcaggaccatcccggcgggctgtggatgggatcatcgtgtgtgtatggccacagccctccgcctcgctcgctcggtgagcacgtgaatcaaggaaggggcacacgactctaggcaggaccc

SEQ ID NO: 268431 - DNA, 122 bp, Homo sapiens
gaagtcctctgggagcaaacaaaggcaccagtagctttgggtcaagccctgcttcagattcgggccaaagacaacaagaatgccacaaagaacatcaaagggcagaatctggccctgaaaca

SEQ ID NO: 268432 - DNA, 122 bp, Homo sapiens
ccaacactgcaggtacgactcgcttactggggtcccggcccagcagcgtgccctggccttcgagaagggcagcgttctcttcaacatcggtgccctccacacgcagattggggcgcgccagg

SEQ ID NO: 268433 - DNA, 122 bp, Homo sapiens
attacagtaaattgttataattgtactattttattatcagttatttctgtcaatctcttacggtgactactatataattaaactttatcataggtatgcacatgtaggaaaagacatagagg

SEQ ID NO: 268434 - DNA, 122 bp, Homo sapiens
agggaagcgccgatctaaatgacatggggtccaaatcccaaataatctctatttgctctgcgttacctttaaacttaggctgcgttgtgtgattcaagtgacagcctagtactgcttaacaa

SEQ ID NO: 268435 - DNA, 122 bp, Homo sapiens
aaaaaagacataaaacatgcatggtccatagcaagtgttgaacaaatgttagatgttattcgcattataacattgcttgtctcctgaggaaacttgcaggctctgggcaaactttccaggga

SEQ ID NO: 268436 - DNA, 122 bp, Homo sapiens
tgcatcaatatttattcaccctcaaacagcaattggctagtatacttatttactttccagcgaccattgctgtcaaaccgtctgcatatcaattgactgcaaaggtaaactggatgaaactt

SEQ ID NO: 268437 - DNA, 122 bp, Homo sapiens
gctgtcggcgatgcttttcctgctgatcggctgcctgctctttgtcctcacgcccacgttcgtgttctgctatatggaggactggagcaagctggaggccatctactttgtcatagtgacgc

SEQ ID NO: 268438 - DNA, 122 bp, Homo sapiens
tgcctttgactgaaacagcagtatcttctaagccctgggggcttccccgggccccagccccgacctagaacccgcccgctgcctgccacgctgccactgccgcttcctctataaagggacct

SEQ ID NO: 268439 - DNA, 122 bp, Homo sapiens
aatgaagtccatgcatgcactttatgcatagtagaggcctactgattcttattttaagtgcgtgtgtgtgtgtgtgtgtgtctgtgtgtgtgtgtgtgtgtgtatttgagacagggtctcac

SEQ ID NO: 268440 - DNA, 122 bp, Homo sapiens
caggctggagtgcagtggtgcaatctcaactcattgcagcttcgatatcttgggtttaagcgatcatcccctgtcagcctcctgagtagttagaactacaggcacgcacaactacgcccagc

SEQ ID NO: 268441 - DNA, 122 bp, Homo sapiens
cacagtttgcagggccccctgtccgcaggatataccccgctccctcaaaaaagatgaagccgaaaattccatcattaaggacaaaatttaagggggcaccaaggagtccagtaacctagaca

SEQ ID NO: 268442 - DNA, 122 bp, Homo sapiens
agaaaagaaattagcaagcaggaaaaaaaatggattaaagagactaggaattggaaatctcgcagagttggaaaatgcctgaacattgttagactccaaacagtacgagatgaggttttaaa

SEQ ID NO: 268443 - DNA, 122 bp, Homo sapiens
tttgaagactccgagtttgcctgcgaggattcccaaagggatctgggcagctggtggccccgccccctctcttatcggagccccccagcccctccgttctccccacgcctaacttccctccg

SEQ ID NO: 268444 - DNA, 122 bp, Homo sapiens
ctcgggcttgcaagtaaaatgcacaggccttcttcctctcagttaggagagcaaggctttcgctgtccccagaggtctgcccgagactgaagccctctgactcttgacctcagtgggctctg

SEQ ID NO: 268445 - DNA, 122 bp, Homo sapiens
gcgtcctgggcttcccccgcccctcctgtcgccggttgcggactctgcgcggctacagcgcgagatctgctaggaacaatcctccgccaagctgttgcatcgcaaataaaatcctaatgagc

SEQ ID NO: 268446 - DNA, 122 bp, Homo sapiens
ttaaaggcagccaccccgcgctcctcagccgccctccgtcacgtgatcccctcccaatcacgtgaccgtctgactccgcctagtgcccccgccacatgatcgctgccttcagcaacggtctc

SEQ ID NO: 268447 - DNA, 122 bp, Homo sapiens
ctgagaggcagagaaggagtagagctgggagcagccacatgttcctgtctccttggcttccgtcctcagcaaatctaggtcccagctggaatccaagtatatgtaacggagcctgggtcatc

SEQ ID NO: 268448 - DNA, 122 bp, Homo sapiens
gatctgctcatcttaatcttaggaggaaggggtaggaatgggtcttagggaacttgaaaacgtgataataagggtagaaagcctgtttaatttgctggcgctctcagtggagctgtccaaaa

SEQ ID NO: 268449 - DNA, 122 bp, Homo sapiens
acaacagtgacgaccatttgtgagccatctctctgtctcaggcacggtgctacatgccaacgaaacctgctcccattgaaccctggccagccagtgaagaaagggttgggcctgggaggtgc

SEQ ID NO: 268450 - DNA, 122 bp, Homo sapiens
tgccctcgctgtagttctcggagatgagctgatcgaagagcaggtggatctcggtgcgggcggagctgctgtcatccgggcgcagggcgcagagcctggcagacaagaggcgaaacccattg

SEQ ID NO: 268451 - DNA, 122 bp, Homo sapiens
tttcgtcagctttggaggagataatgcccagagcaggcatccatgaatatggtttcctcccgttttttataagacccatccatcttgccatatggcttggtctcccgtaactcagtggatgt

SEQ ID NO: 268452 - DNA, 122 bp, Homo sapiens
caaactgggaacctgggcattatcatgactcactcatctccttcactcttccagagccaacgactaaatactgtccattttgctgcataaatatattttaacttttttctatttcttttcct

SEQ ID NO: 268453 - DNA, 122 bp, Homo sapiens
ggcagggcggggtgcagcagtcggggcatgctggccctccctgccgtccgccctcgaggccgcctcctaggtctgttctgggaaccgggatccctctcgggccagtccaggccggccgcctc

SEQ ID NO: 268454 - DNA, 122 bp, Homo sapiens
tttggcctttgtgacctccttttagtataaattctttaggttcctttttcttgcttggatcggaatcatctgaaagggctcaggagccagctgtcgctctgtgttttttgctactgagtcac

SEQ ID NO: 268455 - DNA, 122 bp, Homo sapiens
ggtccgtaggggagagaggggaagaaaactgggaagtctcaaggacaaggaggggcgcggcgaggaaagggcaagatacctggaaatgtcatgagaaggatggaaatgggtgaggaggcggc

SEQ ID NO: 268456 - DNA, 122 bp, Homo sapiens
gtggcctgaattttgtgtttgatttcttgccttgtaaaaaatagttttctcatgcatgcacgtattttaacacaatatgtttagtttggcttatttttgaccttattaaaaatagtatcact

SEQ ID NO: 268457 - DNA, 122 bp, Homo sapiens
ttgtaactgagaaatcttaagcctagtgaattttattccacttgacttaaataaagagcacgtgaaagaaggggatctgaggacatctatgaacagggccccgagggcatgaacttactagt

SEQ ID NO: 268458 - DNA, 122 bp, Homo sapiens
agggtcctctcctccgggagcacgtgcttggataccacagtatcctgtggatccatacaacggtgcagtgtgccccaggagcttgcaaagtaccactgcatcagtgcttccacaggtgaggc

SEQ ID NO: 268459 - DNA, 122 bp, Homo sapiens
aaggaaagctgccctggttattatctggtcacctcaccggctgcgcaaacgtgtccacaacgggtccctccccgagaggccacatctcgcctaaggtggagccagcaggtatttgcctgtgg

SEQ ID NO: 268460 - DNA, 122 bp, Homo sapiens
aaaaatttcagaaaaataaaaaaagaattagtcaaagtagtttcctcttcagctaaaagacgttatagtaacagaacacagagaaaatggagaggaggaaactttcaaatgaatactaaatg

SEQ ID NO: 268461 - DNA, 122 bp, Homo sapiens
ggtccccagcgcgtgagcaaacacggtgggcgcagagctgctggagactcactggccagacgtggatgcagccagtgcgtgcgggctggggctagtgtcagcgtctcacagcgtcagggctg

SEQ ID NO: 268462 - DNA, 122 bp, Homo sapiens
ttgttctttctccgcaggacactggtcctcccacgcctgacaccgacgtcgccaggaccgcggggttgggggaacttggctgtcccacgtctttcaaataaagctgttttgtctaactcact

SEQ ID NO: 268463 - DNA, 122 bp, Homo sapiens
gtattatttccagtatttccaggtaatgaatgagagcctaagagaagttaaatcatgggccgtagctcacctaaactagtacatggagagacggaaccaaagctctgtggagtccaaagccc

SEQ ID NO: 268464 - DNA, 122 bp, Homo sapiens
tctccagtagcgacaactctgcggccgccgccatcttccggccgtagctcctggcagacgcgagacctgcagaacaagaacctcccgcattggtggaaacagaagtcccactcctgcaaact

SEQ ID NO: 268465 - DNA, 122 bp, Homo sapiens
tttactgtgtccacctcacactcgcgcccagccttgccctgcgaaaaggggacctcacgccgctggaaaggagaaagtcgttgcaggaatttaccttcagggtaataacccggctgggagtc

SEQ ID NO: 268466 - DNA, 122 bp, Homo sapiens
tggcaagaccaatcaagtcccgggttcctcctatccaggcaaggacgggcccatgagcaacgtactcatgaagatgcacctccggccaatgagcgctctgtgctcataaagacacgcgcaat

SEQ ID NO: 268467 - DNA, 122 bp, Homo sapiens
ccagggtattcgcagaccccccccccccctccgcccaggtcctggagggtctgtcacatccgccacgtgaaagcacaacaggttgactgttctctcctgattgctccaaaccgcagagcagc

SEQ ID NO: 268468 - DNA, 122 bp, Homo sapiens
ccagtgcaggtaagggtcgcgcctcaggttcggggtgcgggtccaaagcgctggggcgcacgggggacgtggagcagctgctccactcgggccctgttttcaggactttctcgtccgggtgc

SEQ ID NO: 268469 - DNA, 122 bp, Homo sapiens
gcgggattccacggggctcgaatatggggctctgttagcaagaaaataggagttaatcctcgggcagctgcatcaggtaggcctgaactcccaaccgaggtggacctggggctaggacagga

SEQ ID NO: 268470 - DNA, 122 bp, Homo sapiens
tcaccctcaaaaaaaaaaggagattctgtcatttgtgacaacatggaagaacctagaggacgttacggtaggtgaaataagccaggcacagaaagacaaacacgacatggtttcacttatat

SEQ ID NO: 268471 - DNA, 122 bp, Homo sapiens
cgcttagcaggaacgattaagcgattcacagcactcaggggattgtgtaaatgcccggcccgggcgaccagcagggacagattcaactccccgggcgcaaagtcatctccagcccgatcctc

SEQ ID NO: 268472 - DNA, 122 bp, Homo sapiens
agactgctgcaggccaaatgactgtgttggcctatgggtgacctggcccctggctagaatcgcttccgtcccttcccttagtcccatgttccttcccacctaagtctcttgtctttaacact

SEQ ID NO: 268473 - DNA, 122 bp, Homo sapiens
ccgaaagcgtgcggcggggctgaggggcgtgccgactccggagacctcaaggggaaggttcgggtcccgaccccaaccacaactcgggccagacttcgccccactcaccaggaacccagcgc

SEQ ID NO: 268474 - DNA, 122 bp, Homo sapiens
catttatgaaatcattactaatacaacccttttagttaataaatgaaatccatctactaacggtttaaaaaaaaaaagatgtctcttgttacttgtgatccaatcattacagaggatcactt

SEQ ID NO: 268475 - DNA, 122 bp, Homo sapiens
ggccgaggagagggccaagcggagactcatgcaggcaccggaagctggacggctggtggacgggccctggaggcatttccaacatttggcaaactctttggagggctctgaatgtgagggct

SEQ ID NO: 268476 - DNA, 122 bp, Homo sapiens
ggctaatgtctcacttttacatcatagatatagagtccaaggaatgtagttattaatatacgtgagtgggctaggatcttagatcatgccagaatgtgtgctggactaaacttaagacttag

SEQ ID NO: 268477 - DNA, 122 bp, Homo sapiens
attgtctcttctcattcgggcgtgacttttctggttattggtattacgggcgataatacccgtaataccattttcattgaatcatggacattttgactttatgctaggagactctaggtcct

SEQ ID NO: 268478 - DNA, 122 bp, Homo sapiens
ggagaaaatcaaggaagacctcctgaaggaggtggagaggttaatcaggagctggaggaacgcactgcccactcagctctgtggtttgagtctccaaaggtggtctagagcatggcgaggac

SEQ ID NO: 268479 - DNA, 122 bp, Homo sapiens
ggaatttggtaggctcccatgattgggagtatgccacaatgtttcttcttgtagctgtctcggttgacggaggtttctatatcttctgtcactaaataaaatttaaacaaattatttcaccc

SEQ ID NO: 268480 - DNA, 122 bp, Homo sapiens
aatattcaggcttctcctatagctaatagttgttcacaccgtgttgtgacagtatgcattcgcatctcgattagacaattcatgatgaggaggcagtgggacattgtcattataaatgacag

SEQ ID NO: 268481 - DNA, 122 bp, Homo sapiens
aagaaaatttggaaaacattcaatgaagaaaatttggaaaatacagaaaagcacaaaagacgtgaaaccccctggaaccttcccatctagcagtagagatccagaggctgaatggtggctgg

SEQ ID NO: 268482 - DNA, 122 bp, Homo sapiens
ggttccggaccgcctggtggttcttgggcaccgcagtgaacctcagcttcctcaggacggcgggccagcccagcagctgctggtcccacaagtactcgggggagagcaccttggtgggtttg

SEQ ID NO: 268483 - DNA, 122 bp, Homo sapiens
tcacccggcaggtgtacgtgccgatgtctcccgaccacgtctgtgagatgtgcagggagccgtttctgtccaggcggatacgaggatggctctccgtgcccagggtggccccgtccttctcc

SEQ ID NO: 268484 - DNA, 122 bp, Homo sapiens
ttccccgcctgggaagtggggactggccctggtacctggctccagagctgcacccagaggcgatcagcccggtgcgggaacggggcggggtggccgcaactacgggccacggatcctgaccc

SEQ ID NO: 268485 - DNA, 122 bp, Homo sapiens
gaaagaaacgcagggcaggttcgtaaataaacaagggttgagtcggaagacccggggcctcgctcctgccgcggctttccgggcttcgacgaggggagctcctgaggctccctctggagcag

SEQ ID NO: 268486 - DNA, 122 bp, Homo sapiens
cccccaaattcatgtctactgaggacctcagaatgtgactatatttggaagtagggtctacgcagatgtagtctaaatgaggtcatactgcattagggtgggcactaatcaaacggatggta

SEQ ID NO: 268487 - DNA, 122 bp, Homo sapiens
gaatagtaaaatgaaccccattgtattcttcaccagcttcaagaattatcgggctggatgcggtggctcatgcctatattcccagaactttgggaggtgtaggtggaagaattccttgagcc

SEQ ID NO: 268488 - DNA, 122 bp, Homo sapiens
gactgccagctcagaaaagctcgcctccgagatgtcacctggcacacttggtggagtcaccgagacccagcctcagggtcctactgcagcttcctcattacggagagagctgaggcctgggg

SEQ ID NO: 268489 - DNA, 122 bp, Homo sapiens
aaacgtccacgtccgtcccacggctgggctgccgttccgtttcctccacgaacgggtacgcgcttccatgagaaaggatatttggcaattttatattccacagtcaggtgggtctgcgatag

SEQ ID NO: 268490 - DNA, 122 bp, Homo sapiens
gaccaccgctctcaagaagagacctcccccaaccccagtcaacctgcacacttcaatgagcgtatgtgctggaacatccatgatatcccgacccttccgggagcttacaggttaagaggcaa

SEQ ID NO: 268491 - DNA, 122 bp, Homo sapiens
gagggaatgtctgggggaccctgtcggggaaatccgggggggtcccaatcctccgactggcgccgacccgagtccttaccaagcagcggggactcctcagggcaggcgggcagcgacagtgc

SEQ ID NO: 268492 - DNA, 122 bp, Homo sapiens
gaactaaaagctgttggcactgggctcttaagctgccctcgaaattataaagggctagcccgcttttttttttttttttttttttttttgagacagagtctcactctgtcgctcgggctgga

SEQ ID NO: 268493 - DNA, 122 bp, Homo sapiens
ttctgtcatccagttccctttacgggttgttaaatgtctacgtgagtaacccttgaatgtcgttgctctcacaaaccaaagtctggaagcccgagtctttcttctgggttgagtactttatt

SEQ ID NO: 268494 - DNA, 122 bp, Homo sapiens
ccaccattgaccccagccccaggagtctgggtcaggtggaccggggcaggggcgtgtgaccgagagaagaggggcagacagactaatgctagggtcaggggtccattctctcctagggacaa

SEQ ID NO: 268495 - DNA, 122 bp, Homo sapiens
cataatgacaattaagtaagaacttcaagccctattcatcccatggccgtcatactgtgacgtctttcagagcactttgtgattgctcagtcctaagtataagccctataaaatgatgggct

SEQ ID NO: 268496 - DNA, 122 bp, Homo sapiens
gagaagcctgtactcagccaagggtgcagagatgttatatatgattgctcttcagggaaccgggcctccagctcacaccccagctgctcaaccacctcctctctgaattgactgtcccttct

SEQ ID NO: 268497 - DNA, 122 bp, Homo sapiens
gccgctgcaaggtcgtgcgcagctccgcctcgtagttgtgtctgcacaccttgtccaccgcggcccgctcctgctccaagaagtccttatagttgttccagtcctcgatgctccgccccagc

SEQ ID NO: 268498 - DNA, 122 bp, Homo sapiens
aggaggttgaaccccaggaggtctcagggtcttccttgctgccctcactgtctgcgtcctcggactcagagtctggaacagttttgccagagcaagaaactcccagagaataaatgtatccc

SEQ ID NO: 268499 - DNA, 122 bp, Homo sapiens
tagtgtgaatggatttgcgaccaggcaaggggcttcagccgggattacccgccccgcagccggatgaatgtgctgagcacaaagtctgctcaaagccgagcaaacggactatttgtgaaaat

SEQ ID NO: 268500 - DNA, 122 bp, Homo sapiens
taagtccggagctcgctggcagcagctgatcgaccctggaggttccgactgagatgcggacgctccagatccggctcatcccaacaggcacccctgcacacctctcggtccagagggcctgc

SEQ ID NO: 268501 - DNA, 122 bp, Homo sapiens
aaatatggaagcaggactgaatgaaactttatctctcaccaaccacttagagaaatctagcgttaaataaaacacgggtcctagcatcagaatcacttggggacttgttaaactgcagattc

SEQ ID NO: 268502 - DNA, 122 bp, Homo sapiens
gaggctattacaaggtaagagaaaccgtttgttgggatttaaagtggattgggttttgagcgatcaattgctattgattgacattgagaagatgaattaactgcattcgtatggactggagc

SEQ ID NO: 268503 - DNA, 122 bp, Homo sapiens
acttggagaaaaaaatgagtgaagatctgaacaactaacttcccttttgaggtttaacgtcgttagaaaatttctgacagattgaggtggttctgctcaagatttttaattggaaaatggca

SEQ ID NO: 268504 - DNA, 122 bp, Homo sapiens
gcctgagaacactgggctgcaggtggaccgctcccttctggccttgctggcgagaaagcccggaaggccgggagtgggggggaagcgaggcccgggccaacagcaccaaagacgctcctaga

SEQ ID NO: 268505 - DNA, 122 bp, Homo sapiens
cctaacgacactcggagtgcgagctgcggctggggtaggggcacccctttccagcgggcgcgtgggtcaccaaggagcagttctccgggacccgttgcgtcagagggactgggcggggctgg

SEQ ID NO: 268506 - DNA, 122 bp, Homo sapiens
gggacccctgatccccggtctgcgccacaaatctcccctcagccggcccctcctccagagcgccctccagtcattcattttatccagcctcgcgcacaatggcagcggcctctggccggctg

SEQ ID NO: 268507 - DNA, 122 bp, Homo sapiens
gccctgggtccctcccgtgtgggtgggcggcccctggggagtgggtcctggtctgaccagcgtgccctcccacagcctgccctccaagttcaccctgctgttcctccaagaggcacccagca

SEQ ID NO: 268508 - DNA, 122 bp, Homo sapiens
tccttccctggccaactgctctcctctttgcctagggaattatccaaagcaagaagtgatcgtacataccctggattcccagatgatcatggagcatgaccatcatctgagagattaacttc

SEQ ID NO: 268509 - DNA, 122 bp, Homo sapiens
tgatatcatgtcttccttacgggcctggggcccatggtgttctgggatgtgtagtcccgacggctccgactcccctttccctcctcccaaagggaaggcggatgggcacggggcttgccgga

SEQ ID NO: 268510 - DNA, 122 bp, Homo sapiens
gaacggggcagcctcgggcatgacgcgtgatgcctccttctctcaccccgacgggaagcacggtgtgtttgcagcatcggcaaccacaggagtaattgttcagggctcatcagagttaatca

SEQ ID NO: 268511 - DNA, 122 bp, Homo sapiens
cggcaccgcggagcgcccaggtgaaccctcgactgggggcagccgcaccagtggacacggcggggtaggattaaagttgaggcgtgctcacagacacttgtctggtgtgagcccttggcata

SEQ ID NO: 268512 - DNA, 122 bp, Homo sapiens
tgctactcctgagataacccgaccccatcacggagattcccaggtggctgcgaacgtcaacgcttagcaggaacgattaagcgattcacagcactcaggggattgtgtaaatgcccggcccg

SEQ ID NO: 268513 - DNA, 122 bp, Homo sapiens
ggttaccgcgtcccttctcggtgcttccctgtctctcccattttttttccaacatgaaagcgtctggatttgtagtccaattacagtgtatgtgcgcctatctgagcctctctctgtactgg

SEQ ID NO: 268514 - DNA, 122 bp, Homo sapiens
ccccaacacatttcctgccagatgcacccgggctgcctggtttgtaggcagtgtctgtggcgtgggcctgagcctcatcccaccagctgcattcttccttttagagacattcagggacaggc

SEQ ID NO: 268515 - DNA, 122 bp, Homo sapiens
tttgatttttcaataggttccaggaagaaggtgcattttggcagcatacatgatgcagtacgagctggagatgtaaagcagctttcagaaatagtggtacgtggagccagcattaatgaact

SEQ ID NO: 268516 - DNA, 122 bp, Homo sapiens
cttgcagactttgcaaatcttaagactaacaaatccttgaaatcacacagcttgcaaatacgtactaaactgcacaaggtgtgtgttctatatgtgcagttttagcgtattttagttgcata

SEQ ID NO: 268517 - DNA, 122 bp, Homo sapiens
acgcaccggctgctgtggggcagatttgctttcgggctctcacttgtaacagtcacttcccgcggcccccctgcacccatcactaaccaggaaacgttatcggggtcctcccgacctgcaca

SEQ ID NO: 268518 - DNA, 122 bp, Homo sapiens
cagcagttcagcatgcttacgttcattagttgtcacagaaagtccttgtcacttgctcttcgttctcattaaaatccagagcacaggctttatgactattactgagtgcagacagactcctc

SEQ ID NO: 268519 - DNA, 122 bp, Homo sapiens
ggaacaatatccctggggggtgtacactttctgcgatatacgttgtaatatcaccccctccgccttggaatattattaaggaccatctcacacgggggtgtacacctcctgcgatattggga

SEQ ID NO: 268520 - DNA, 122 bp, Homo sapiens
ctgccacagtggaaggatgaaatgggacagtatatgtaaagcccctagcccagtgcctggcgcatagaagttgctcaataaatggcctctgttgttgtcacaacttgaacccttcgaccacc

SEQ ID NO: 268521 - DNA, 122 bp, Homo sapiens
gtgcaactcaggctgggaaatgtccttatctcatcaacctttcctgtctacaggacaaaacgaaggtaataaacataaagcagggcggaacctgacctaatgttagcggatcgagatgcttc

SEQ ID NO: 268522 - DNA, 122 bp, Homo sapiens
tacgaagaagccctggtgcatctgaaggtggctggtgagtagacgggttttgactttctccgacgactcccctgctgtatacactttcgtatggatcagttactttggaaaccatcagattc

SEQ ID NO: 268523 - DNA, 122 bp, Homo sapiens
gcccagacctcgcaaatctcggcgactgggacgagccctgcgttcctgtcaaacaaatgtcggtgggagtctggctgagtgttcaggacgtttgcgaaaagaagcctcgcgcctgtggggaa

SEQ ID NO: 268524 - DNA, 122 bp, Homo sapiens
cttgatcgacagcaaagatgtccagtgtgtatcctgcatctgcctttcctgaccattcctcgtgccccattctccgtgggatagattctcatggggagtgggggagccttcgggtgtggcag

SEQ ID NO: 268525 - DNA, 122 bp, Homo sapiens
tgcagcttctcgcgaggggcggcgacggtcccctggtggcaggaggggctccccctgttgcgggtgaggcggctgctctcatattttcagatgttgctgtagaaataaagacggtttaaatc

SEQ ID NO: 268526 - DNA, 122 bp, Homo sapiens
gaatgctgtgccctggaccctgtgtttctgcatgtaactctgggttcacttcactgctgccgcctgtatccctgcctccccagcttcccactgcctgtctacttcacatccttattgcacag

SEQ ID NO: 268527 - DNA, 122 bp, Homo sapiens
gaaaaaatgcaaacgatcaaagtgcagaagcagcccttggcccgcgcaggctccggtttccgcctcccgccgccgctgccaccgcccctgcgcctttagatttcgggcagcaagtttaattg

SEQ ID NO: 268528 - DNA, 122 bp, Homo sapiens
gcgtatggagtttctgtcttctaataggcagcctgagaattcttcctgttcattggccatcggtcatggagaaggcgggctcagtggacgaacggctttctgggagctggggaatgcttgcg

SEQ ID NO: 268529 - DNA, 122 bp, Homo sapiens
gggctgcctgccacccgccagccacaggcacctgtcaggctatattaagagacattgtcacgctgaggactctccttcctgggaagaactgtccttcctccccaacagaatccacctttctt

SEQ ID NO: 268530 - DNA, 122 bp, Homo sapiens
gttgtcttctgcccgtactcttggccaccgcttagccagagctggtcttctctcttggcccggcttagttcacaacagtctccattcgtcctctcggggaccataagggtcataatgactcc

SEQ ID NO: 268531 - DNA, 122 bp, Homo sapiens
ggcgtgtgacgcagtcaccgttgcctagggccacgttctgatcagatctgacgcctccagcgcccgaccccacgccaagagggccgggcctcagtttccccacttccaaggaggcggcgcta

SEQ ID NO: 268532 - DNA, 122 bp, Homo sapiens
gagggagtagaaatggggacaggagctgaacgctgggagagggggctcaaagccagctcgcgtaggcagggactgggcactcgcaatgcgcgcagaacaaaggcctctctctctctttcgcc

SEQ ID NO: 268533 - DNA, 122 bp, Homo sapiens
ctgccagggacttggtgcgacttagccggggctccggcccccgccgctcgctcgccgcagcgttacagccggctctggtgtgccagcgtgtacactcacacacactcacccaaacccacacg

SEQ ID NO: 268534 - DNA, 122 bp, Homo sapiens
ttattgttgatttgtgggagctctttgcataggggccccgccgtcgcagcctggcgttctcgcaggcgcatgccctcggaacgccgggtgggctgcgggcgcgacgggactcctggtctctc

SEQ ID NO: 268535 - DNA, 122 bp, Homo sapiens
cacagacttggggacacccaggctgaaaaccgagtacaacataaccgtgctgctctctgacgtcaatgacaacgcccccaccttcacccaaacctcctacaccctgttcgtccgcgagaaca

SEQ ID NO: 268536 - DNA, 122 bp, Homo sapiens
cttctaaaataatcctcatgtcttgattacctgtgtatcctccctccccacccacggtcccgccctggcatccgtggaagacctcaccatcccggtcaggaggcagcagccttgggtgtagg

SEQ ID NO: 268537 - DNA, 122 bp, Homo sapiens
atctgtgcaacaaccacatgccaacaatagctccaggtgcctcagccccgtgccctgacccggggaccacagggacaccctctgagacgtgctggccccaggaggatacaggcacacgggca

SEQ ID NO: 268538 - DNA, 122 bp, Homo sapiens
aggacccgagcgaaggaagcggacccgtgcgtcttcgcacggggtctgggaattctggcccgggccgccccagtcctactacccggggctgtccgtccccggctctccccggagtttcccag

SEQ ID NO: 268539 - DNA, 122 bp, Homo sapiens
gccgcgggcgccgtggatggagcaggaggggccggaatattgggaagaggagacagggaccgccaaggccaaagcacagttttaccgagtgaacctgcggaccctgagcggctactacaacc

SEQ ID NO: 268540 - DNA, 122 bp, Homo sapiens
aaaggcggcggcatcaccttcctgcctgctcgagccctaacccccaccccacccaccagccgcgggccccagggctgcccagggaaggagtacatttttagacatttttagatagcttgcaa

SEQ ID NO: 268541 - DNA, 122 bp, Homo sapiens
ctctaccttcaatctttcatttgcaaaattacttggttttgctagacatctctagcaaaacgaagtaattctctccaggtttgagtctctttatctctaggtttgaatcttctgattgattt

SEQ ID NO: 268542 - DNA, 122 bp, Homo sapiens
tatgaagtgtagaagcgtgcccttttctcttagtccatttccaccagacacggacagcaccgcgggtcgcggctaagggctctgccatgcacatggaaccctggggcctcctccttctgccc

SEQ ID NO: 268543 - DNA, 122 bp, Homo sapiens
gaccagcctgcgcaacacagggagacttctctctttcaaaagaattgtttcggccaggcgcggtggctcacgtctgtaatcccagcactttgggaggccaaggcaggaggatcacgaggtca

SEQ ID NO: 268544 - DNA, 122 bp, Homo sapiens
actcgccctggaccacgagggccctgtcggagacagtggtggaggagagcgaccccaagccggccttcagcaagatgaatgggtccatggacaaaaagtcatcgaccgtcagtgaggacgtg

SEQ ID NO: 268545 - DNA, 122 bp, Homo sapiens
tgcctccctggcgtatttgcgccattggtggatattccggaccgtgatggtggcgctgcgcgtgcgcactcgctccgagccctgctcccgggagagggagctctcgggtcggggctagggaa

SEQ ID NO: 268546 - DNA, 122 bp, Homo sapiens
acacagctgggaagcggcaggctggggtctgaaccagggctggggcagtgcagagacacacgaggaggaaaatagagggagatgggcagggaaaaaccaaaaacgatagcaaccgctttgga

SEQ ID NO: 268547 - DNA, 122 bp, Homo sapiens
tatgaaaggctgaaagtcaaaatctgcctgagaaacttaacaaatctgcaagctggaaaccgcgtcttttccccactctctgccagacagaatcacccagtccactttcaggggcccagcag

SEQ ID NO: 268548 - DNA, 122 bp, Homo sapiens
gaggctggggagggggagggagcaaatgtcatggctggctcgctcaagcatccagggaaccgaagctaagcgcatcctgacgggcttttaaaatgacattgattaggacaagctgttcccaa

SEQ ID NO: 268549 - DNA, 122 bp, Homo sapiens
gataattcatgcctttcatgccgtaagagttcatactggagagaaatgttacacatgtaacgaatgtggcaaggcttttagtagaaaagcaaaccttgcacatcatggacttcatactggag

SEQ ID NO: 268550 - DNA, 122 bp, Homo sapiens
tcgaactcctctctgaccatagtctctgacgtccagcctcttctcctctggttgttcaaacgcttctctcttctctcttctctcttctgtgtgtgtgtgtgtgtgtgtgtgcacgtgcgcac

SEQ ID NO: 268551 - DNA, 122 bp, Homo sapiens
ccaagttaacgcatcagttgtcggggaggtccggagagcctccgccttgtgtgtggtggacgctcacctgaggctggaacgcaaagggagtagagccttcaaaaggcttctcaaggccctcc

SEQ ID NO: 268552 - DNA, 122 bp, Homo sapiens
ccgggtcgagcaccgccccgacgagggcccaggccagtccggcccgccccgggttccctccgtgcctcaggtcccctccgtgccccgcgtcctcccgcgcattccggtcatgcctcagccgc

SEQ ID NO: 268553 - DNA, 122 bp, Homo sapiens
atatggatagcggaaagcccatcacacagaaaacagtaaaataatcttctgtcattttggcgaaggtaaaaacactgtgataaatggtgtgcaggaacaggcattctggcaaactgaggggg

SEQ ID NO: 268554 - DNA, 122 bp, Homo sapiens
tgcccatgaaacccttatctggtctcctccaatgtattccacacgcggaagccatcatcacgggctcgggcttgtgatttgtaaaccttgatcttctgcactccgtgtcctaaatatggata

SEQ ID NO: 268555 - DNA, 122 bp, Homo sapiens
tgcagggcaaatcgcccatcccaaaatctggagagactggtgaatacggaaaatcatagccgagatcagcttacctgaagcagaagccactagagccagtaactgggaacattttgatggta

SEQ ID NO: 268556 - DNA, 122 bp, Homo sapiens
gtgagtcataagcacatgagttgtaagaggttgaacttgagagaccagatcaggcagtgccgcttaataccatcacatgatcctccccgaggccctgtatttaattaaaatagagagggagg

SEQ ID NO: 268557 - DNA, 122 bp, Homo sapiens
tctccagcaagaagacgctggccgtcttgtcgaaggaccccgaggctaggcgacgcccgtcgcaactccaggccaccgagtgcaccttggcgctgtgcgccaggaactcgcgcgtcttgctg

SEQ ID NO: 268558 - DNA, 122 bp, Homo sapiens
cagcggcgactacagctgcacagcccgcaacgccgcaggcagcactagtgtcgccttccgcgtggagatccacagtgagtagggcccgccccaccccaccctgcccaccttaccccaccctg

SEQ ID NO: 268559 - DNA, 122 bp, Homo sapiens
taaccttttagaagtcaggggtgctgccatgtgaccagttcaggtggcccaatctttcttcgggacctaagagcttaacaaagtatctggaagttagcaggtgctcagtaaatgtttgtgga

SEQ ID NO: 268560 - DNA, 122 bp, Homo sapiens
tactgcgcctgggggttgtgggggcgtgcggccagggtcccgtggccggaggtgtccgaccgggagcggctggagccggacgcgagcggggcgcgcgagttcgagcccagagccgacacgca

SEQ ID NO: 268561 - DNA, 122 bp, Homo sapiens
aaaaaaataaagttggccgggcgtggtgactcacacctgtaatcccagcactttgggaggcggagacagacagatcactggagttggagaccagcccctggccaacatggtgaaaccctgtc

SEQ ID NO: 268562 - DNA, 122 bp, Homo sapiens
aggcctcaccgatgcgtccaggcaagcccctagctcctacttcttggccttgacgtgcagcgcccggggctgcaccgggtgtaactcgggcctacagggggcgccctcggaagaggcgggcg

SEQ ID NO: 268563 - DNA, 122 bp, Homo sapiens
gtttgcagggaactggaaagctgcctggtgtctcaagaagcctgtttctaaaagcatcaccgccccttcccccaaccagtgacagtcaggctgtgctggccaagagcccaggctctggaatc

SEQ ID NO: 268564 - DNA, 122 bp, Homo sapiens
actgggagagagtccagctctgctgttgcaagcctcccagtctgtggtcatgagttacaacggccccaggacaccaacacagaaaccacctcacacctctcccttctcacacctgtcctgcc

SEQ ID NO: 268565 - DNA, 122 bp, Homo sapiens
accgtcccaccccctcccacccgggcgggggatctagccggtcactgctggtccattttgcgactgaagtgtgtcccatcctggaaaccaggcagacacctgcctaggaaatacttgtagct

SEQ ID NO: 268566 - DNA, 122 bp, Homo sapiens
ggcaggaggatcgcttgaagccaggagttcgaaaccagcctgagcaacatagtgagagcccgtctctacaaaaaaaatgttttaaaacttagctgggcatggtggcacgtgcctgtagtccc

SEQ ID NO: 268567 - DNA, 122 bp, Homo sapiens
aactggtcactaaggaagggtgaaaggaatgaatgaagggaggcaggtaaggcaggcgggcgggattaggttgagatgccagtgctagatttacctttattactgtccatgttgcagggata

SEQ ID NO: 268568 - DNA, 122 bp, Homo sapiens
accttctgggatgcttcaaactcagggctgcgttctgtggtctcatctcctgtggggacgcgcctgaacagagacccttattcacacacctcagagagtcatctgagaacctgcaccccgtg

SEQ ID NO: 268569 - DNA, 122 bp, Homo sapiens
tctgtgtttgggacccaccaggcctttgcaccgtacaacaaaccctcactctccggggcccggtctgcgcccaggctgaacaccaccaacgcctggggcgcagctcctccttccctggggag

SEQ ID NO: 268570 - DNA, 122 bp, Homo sapiens
cctaccccaagcactttttgtgacgtcacagctccgaggaccatccgggggctttactctcgcggaagcccaaaagttggggtttgacctcatgaccttggccttcccggggggcgggaggc

SEQ ID NO: 268571 - DNA, 122 bp, Homo sapiens
acttaagccaggaaatcaagctacagcaaagcagaggattagtacaaatacctgggcaaacgtgccacccgcagaagcattaggttcttaaatcctccaggtaattgtggtcacacattagt

SEQ ID NO: 268572 - DNA, 122 bp, Homo sapiens
cacctgaagggcattcaggccactgatctgggagtaaggcaacgaggcccggtaggtctccgtggtcttccaccagagcggtagccccagcacgatggccaccgcagcgaagaagagggcgg

SEQ ID NO: 268573 - DNA, 122 bp, Homo sapiens
agaaactgcgcggaaccaaagctcgagggcggctcgagtttgcggaccgcggggaggaagcgcccgccggaagcagtcgcaagacctgagcatggcggccaccaggtgcctgcgctggggcc

SEQ ID NO: 268574 - DNA, 122 bp, Homo sapiens
cctgctgagctcacagggcccacaaggtggcgcgtgagccgcagagatggcgaggagccccgcgggcgaagaggctgggcggcggggtgaggaggaaccctggagcccaccctggagtgtct

SEQ ID NO: 268575 - DNA, 122 bp, Homo sapiens
ttgcttgacgtagtcatcccctagagggtcatgtggcttgctcctagttattcaggtctccgtttaaatgtctcttactcagatgctcctaatcacccattgtagagtggtcccccgcccct

SEQ ID NO: 268576 - DNA, 122 bp, Homo sapiens
ggtctggggcgtgtagggtgttgtgtctatgcgcacgagcatccaaagggaccgcgcatacgcgcaaacccggaatcctggtgcccttaagcgtgactgtactgtgtgtgtcgcgagtacct

SEQ ID NO: 268577 - DNA, 122 bp, Homo sapiens
tcttggagggtgttcagcagtttccagaccggctgactccaactcttatctgcagggaagcgtgttactctttggaatgaaagacagctccgtataaatgacttgaccaaaaatgggtgctc

SEQ ID NO: 268578 - DNA, 122 bp, Homo sapiens
ctggcctgctgtgtccttcctccctctggaatccctgctctgagccacagggttgcatctcggcacccccggggaccctcccgggagcactgctcacacttggtctagcttcggcacaaaat

SEQ ID NO: 268579 - DNA, 122 bp, Homo sapiens
attcccgcccgggaagggagcggagcagcacgccagcccctgccagccggcgcccagcggcgacactcgggacacacccccgcccgccccccgcgcctccgcgcccccgcacccgcccagca

SEQ ID NO: 268580 - DNA, 122 bp, Homo sapiens
ttactctacatttagaggtgctagtaactgggcctcatcacaagagtgaaccccagacctcgcaggatgagagagacagttaattttgacaaagaaaatgcatctgaacattaatgttgtca

SEQ ID NO: 268581 - DNA, 122 bp, Homo sapiens
cctggcctgcccggcccgcgtggtgtcccagtggctgcggccacgccaggcattctgccccgcggcggctgcacagggacgagaactgagaacccctgctcaaccccatccggggtgactgc

SEQ ID NO: 268582 - DNA, 122 bp, Homo sapiens
aggcaacggcccgcgcagacttctcggcgttagccccgcctcttgaggcgcttccgccgccgggctcctggacacgcctcctttaattggctaacgtcacgctgggagtgggcggggaaaat

SEQ ID NO: 268583 - DNA, 122 bp, Homo sapiens
aaagctgaatggggcaggctgtcagggaacccggtcacagccctcttcacttcctgttggcgtctcactggtggtcatcctatcaatcaatcactgaagtggagaccagaggcctggctcaa

SEQ ID NO: 268584 - DNA, 122 bp, Homo sapiens
gtgcagcttcagaccatggcactgtcctctgtcagccctgggctcactcctgggacctgccggggtagggccctgtccccagctcagatctggagggtgtctcgagacccccggctggctgg

SEQ ID NO: 268585 - DNA, 122 bp, Homo sapiens
ggacccttcccaccctcgaacatcaacgaacatcagactctaggttcttcagttttgggacgcagactggctctccttgctcctcagcttccagatagcctattgtggagccttgtgagcat

SEQ ID NO: 268586 - DNA, 122 bp, Homo sapiens
aggaaactatctataagggctagatggcctctcaggctctgctgtgagctcaccactattcggctccacccctgaagcacaaagagccacagatggtgtgtgaacaaagggtgtgactgcgt

SEQ ID NO: 268587 - DNA, 122 bp, Homo sapiens
ttttcttatgtttactcaggtatgtggaccatccaaaggctttgccacactcttcacattcgtaaggtttctctccagtatgaattgtcttatgtttattcagggctctggaacataaaaag

SEQ ID NO: 268588 - DNA, 122 bp, Homo sapiens
gggtgccgggggccggcagctggagcccaaagcaggcggcgaggcctcgaggggcaggggcgccctcatcattgtagctgtggagcagaaaggtcttcaggccagcaggagcaatgcggggc

SEQ ID NO: 268589 - DNA, 122 bp, Homo sapiens
cgctccagaaagctcgttcaccacaatctagaaagcgcgttcaccacgctccagaaagcacgttcaccatgctccagaaagttcattcaggctccagaaagttcgttcaccacgctccggaa

SEQ ID NO: 268590 - DNA, 122 bp, Homo sapiens
gccccagggctggcagccaccagctcctcttccaggcatgggggacaccctgacaggatccggaagtctccatttacccaaaaatgcaagagccatgatcagtcatggcgacactgcaggcg

SEQ ID NO: 268591 - DNA, 122 bp, Homo sapiens
gtctgggtcggaaaggaggtgcggagaccccttcccgccctgactgtcggagaaaccgcgcgcagtgcaggccttgaggggctccaccttccaggccgctggagatgggagcagagcggagc

SEQ ID NO: 268592 - DNA, 122 bp, Homo sapiens
ggttgtagatgtccgagtgcccccatcggctgccagcaggtggccgaggggcacgagggacgacaggaccaccacaaaacaaccaagggcacagagcagcgagaagacagaaacagaaaagg

SEQ ID NO: 268593 - DNA, 122 bp, Homo sapiens
ggtgaggggtggggtgcagccctcacctggtcccacaaggccacctgccggttgttccatcgggatgtgcctgtggacatcagcttcttcaggttccccagaaacagcactttgctggcccg

SEQ ID NO: 268594 - DNA, 122 bp, Homo sapiens
gaaaaaatttccctttgcattttccttccattcacaaagagtcagcccccagcatcaagacggagcagctgtccaaaattagatgctactgctctcatttgttggttaaaaatagctgttct

SEQ ID NO: 268595 - DNA, 122 bp, Homo sapiens
tgctatgctgcagatgcaacagggtgcctgtttctttttcctggatacaagttattgtaacggaaagtattgtttgcatttgccctagaactgactgatgggttgcagaacaccgggtgtcc

SEQ ID NO: 268596 - DNA, 122 bp, Homo sapiens
aggcgcacaggcagaagagcagcagcgtcaggaaggtgccattgcggagcctcatctcctcgggtgcgcggcgggcgcccgcggggccgaggctgcatggcccgggggaccggggccggggc

SEQ ID NO: 268597 - DNA, 122 bp, Homo sapiens
gattggggctggaaacaacgtttgaaagagaaggaaacattcattatgagaatggctgaacgcatgtcgattcgatgattgaagtctgtaccagccaaaatcatactgaaacccagtaattt

SEQ ID NO: 268598 - DNA, 122 bp, Homo sapiens
cttggtggggactgctgtcctaaaggtaaaagattttgatccagaggttggattgttcctcgtgtggcaacagtcctctgacctcagtcattttcaaagtctaatgtctttttggctaacaa

SEQ ID NO: 268599 - DNA, 122 bp, Homo sapiens
ctggagttcctgtggtcgcgctgtcccgggcctgagctggaaggtcagcctcccctggggcgcagacgctgacccttcccggggctcctcccctcccttcaccccatcctctggccttagct

SEQ ID NO: 268600 - DNA, 122 bp, Homo sapiens
cctccacggctgccccatgtccgcagcggttctggccccagtgctgtcccatgtccgcagcggttctggccccagtgctgtccctgcacgtgtcacgtccagcggggcaggacagtgagagc

SEQ ID NO: 268601 - DNA, 122 bp, Homo sapiens
ggcgcggccgcctgcagctgggtagcagcgcgcggcgcggcgcggcggtggcgggcagcgcgcggcaatgccggccccggggctggactgctgaacccacaccgcttcaccaccggactcca

SEQ ID NO: 268602 - DNA, 122 bp, Homo sapiens
tgagctcctggcaaaagtgaaggaagagtgccaattaataatcagtatttgaggtgcatgcgatagacagatactaactggaagacatggtttagaagttgtaatatttattttcatcttat

SEQ ID NO: 268603 - DNA, 122 bp, Homo sapiens
caaaatattatctttcagcatgtaattcatgtgaaagattgggctgggtacggtggctcacgcctgtactcctagtactttgggaggcggaggtgggaggatcgcttgagcttagtagttaa

SEQ ID NO: 268604 - DNA, 122 bp, Homo sapiens
ggcctgccctgccctgaggcggcgggcgggcgggggctgcaggccgggctctgctctgagcgcccctgcgtcgtctcaggggcgcgccccccatggctccgaggccccctctctcaggctct

SEQ ID NO: 268605 - DNA, 122 bp, Homo sapiens
tcgaacacccacaggcagagcagcgtcggagctgcttggtcacttcaatgtgcctgtcctcgaatgtcccgtctggcagccagtgattgagagagactgctgagggcacatgctaattttcc

SEQ ID NO: 268606 - DNA, 122 bp, Homo sapiens
aggcaatacttagcactcctcatagcactgggtgcggcacggggcagggcctggggcaggcggtgcgtggtgacacctctgggctgacggcctgttctgtggatacaaacagcgtggaagag

SEQ ID NO: 268607 - DNA, 122 bp, Homo sapiens
tgcacccaaggagggatttcttgcgcctcttgttccctcagttatttcataaaccaggaccgcaactatactgtcgtgtagcgcggccaccccacagcggtccctgacgttaacccttgccg

SEQ ID NO: 268608 - DNA, 122 bp, Homo sapiens
cgagattccgggattggaatcaaaatgctaatttaaaaggtcaagtgaagctgctcctcacgttttggcgtgcctgcgctctctgcaggcagaagcgaacaaagacccagcaagagaaggca

SEQ ID NO: 268609 - DNA, 122 bp, Homo sapiens
ccagtggaaaaaaatggagtgggagaggtcgcgcagcctccctcccggcggcttagggcccgcccgctggctccgctttcgggttactgcagttcaaacagcacgtgccgccagcgctggga

SEQ ID NO: 268610 - DNA, 122 bp, Homo sapiens
gaatgctctctcctccctccgtgttcagcccgattcccatgtcctctgtggccgggtaagcgccaagtgtctttcctgttgcagcctccactgccctttcaggaggggctggtatcactggt

SEQ ID NO: 268611 - DNA, 122 bp, Homo sapiens
ttcactcatgggatggacccttcttccaggtgaggctgcatttggacatagccatattcacgcctccctgccttggctcctccgcttctctggccaggaatggccttgcctcatctctgcaa

SEQ ID NO: 268612 - DNA, 122 bp, Homo sapiens
aaacgacccacggccaggaccgcgaatgaagaaatgaacatggcatcccctgtggaataccgttaagcagcgaaatgcaaagagctggcaccgtgcagacccgcatgcatactcttagcgca

SEQ ID NO: 268613 - DNA, 122 bp, Homo sapiens
tttattttttgagacggagtttcgctcttgtcacccagctggactgcaatgatgcgatctcggctcactgcaagctctgcctcccgggttcaagtgattctcctacctcagcctcccgagta

SEQ ID NO: 268614 - DNA, 122 bp, Homo sapiens
agacagcagcagccaccgacggccctgtgttgtcagatggggcctggggaccgagggaggcggagatgcctctgggccgctgcagccttacactccgcaggttgcatcccgcccagggctgc

SEQ ID NO: 268615 - DNA, 122 bp, Homo sapiens
aggaagaaagagaaacgtgagttaccggaagcggaagtacaagtctcgcgtgacgtcactcgcaggccggcgttcgaggggcggagacggaaggagaagccaaaattgggccccgcctccct

SEQ ID NO: 268616 - DNA, 122 bp, Homo sapiens
catagttcattggctctgtgagtgtgtttcttaatgctgcataaagtcatggtacatctccgtccacagtgactttgttgtgatgagatatggtgatatattttggagttcatacagagtgg

SEQ ID NO: 268617 - DNA, 122 bp, Homo sapiens
ggaagcgtttctggagaggcacaggcaccagccggccacagaggctggcaaggtgctccccgagagatgcccgcggcccggccctcatcttaacgatccttgagacctttggtgtagaccag

SEQ ID NO: 268618 - DNA, 122 bp, Homo sapiens
cccctaggaaacccaggggaaatgccgctatgccgacataacagcgcccagcacagcaaacgcagattagacagatgcactcgcccggcatgtgcctagcacctgggctaggagatttcaca

SEQ ID NO: 268619 - DNA, 122 bp, Homo sapiens
aagaggtggtgttagggaaaggaagcaaattattcctttggctttggataggagggaactcggaaaagaggtcttgggtatgaactctcaaggcaaggaagggttcagaagtaggggcaatt

SEQ ID NO: 268620 - DNA, 122 bp, Homo sapiens
gggcagaggaaggaggccagagcgtgttgagagagaatttgggtttcacgcagtgtgtcacgggaagccttggatgctactgggtttgttttaaaaagatgaccgcactgaactcaggtaaa

SEQ ID NO: 268621 - DNA, 122 bp, Homo sapiens
caggaaaggtcatgacacacccaggtctggacacgctgtccctgaggccagtgcccggagcgccccccgcggagccgctctccaccaataagagcctgaggtcccgagatgatgagatgcgg

SEQ ID NO: 268622 - DNA, 122 bp, Homo sapiens
ccttggagtcagaaattgggatcagattttttttctttctcttatggtattcctcatattcgcttaatttctccactgcctttaccctttttggatttgatgctatgtcaagaaaaaattat

SEQ ID NO: 268623 - DNA, 122 bp, Homo sapiens
cacgtaatgaagctgatggatggagtcaatggccagcaccatttcaccaatgtagaacctcgccatatcttccggaagcttgtcttcaaatttgctgagcagggtcagtaaatcaccaccca

SEQ ID NO: 268624 - DNA, 122 bp, Homo sapiens
accgactccaaagatacggaggagaagaggcctacttgattagatttctttggggcctgtcgcctaattttgttgcgcgtcttagcatgaggtccctgtagtgactctgtagcgtgtttaat

SEQ ID NO: 268625 - DNA, 122 bp, Homo sapiens
agcacagcatcattccacattgctcttctaatggagcctttcagcccagatgttctttctcgtctggtgggttctctctcgactcgtccaaatatgtaacgattatgttctagatcagctct

SEQ ID NO: 268626 - DNA, 122 bp, Homo sapiens
agggctcaacaaataatttagaagtacaggcaatggaatttagcacaacacacacacatacgtacgcacacataagttaaaggacggcttcctttcagtttgctgagctaagccattgttag

SEQ ID NO: 268627 - DNA, 122 bp, Homo sapiens
agagtaatgtaataatacctatgtgatgctgtaattttacttttcaacataagttgaacccgtagcagtctgtttaccttgtaaagggattacttagaagacatttttgtacatgctcttcc

SEQ ID NO: 268628 - DNA, 122 bp, Homo sapiens
gtggctggatatgcagcccgctggggccctctgtcccctaaggactggccagacgggtaacgccacagactgggtcaaagcctgcgggaagccaggagcacgtcccaattgtccacttgtgg

SEQ ID NO: 268629 - DNA, 122 bp, Homo sapiens
caggaagagtcaaggagccgggggtctcagactttgctcaccccttggaaatcaccttctcgacccgctagcctaggccgagacacagtctgtattctgaaagccgccagtcccaccagggg

SEQ ID NO: 268630 - DNA, 122 bp, Homo sapiens
agaagcaaaaaaccaaagggacacaaaaagcaagagcacgctaaaataggacctcgtacacgcagtgaaaaaaggtggcacaaagaaggggaagaatcaagcttccacacctctcttagcta

SEQ ID NO: 268631 - DNA, 122 bp, Homo sapiens
aggcagcaaatgggaagggtgcggtactgacatgttgatgctggcctctgggatgttccgcgtcctagctccgcacagctgggtatctcactcagtcgccacctcggactcctcggtccgac

SEQ ID NO: 268632 - DNA, 122 bp, Homo sapiens
ccatccatacttctctccactcctttccaccatctctacccattcctaccacatctgtgacggccagaaccatctccccagaccccccgggggcagcattaacctgtctcaaagcattgtgt

SEQ ID NO: 268633 - DNA, 122 bp, Homo sapiens
tgtgtctacgctcagatgcgtcggtggctgggctgccctgctcctggtcaggccggagcccgtcctaagacacacgctttgcagagctgtgcatgcgcagtctgctagtgtgtgtgtgcagc

SEQ ID NO: 268634 - DNA, 122 bp, Homo sapiens
gttggcagagaagcagcttcttgcctaggttgggacccggagctgggttttgggggtcgccgccctgcaggctggcaaggagagactcgtgagcgcctgtgtgtctgccagggaaacagcac

SEQ ID NO: 268635 - DNA, 122 bp, Homo sapiens
gtaaacacaccagtcagcaccctgtcaaaacagaccactgggttctaccaatcagcaggtcgtgggtgggaccaaataagagaataaaagccggctgcacgagcgagcagtggcaacacact

SEQ ID NO: 268636 - DNA, 122 bp, Homo sapiens
actccgaggatgtagccgcagtcgccgtggttggagcaggagggaccggagtattgggaccggagcacacggaacatcaggcccgcgcacagactgacaagagtgaacctgcccatgccgcg

SEQ ID NO: 268637 - DNA, 122 bp, Homo sapiens
ggttgcagtgagccgagatcacgccactggactccagcccgggcaacaagagcaaaactccgtctccagaaaaaaagaaaaaaagaaatgttgattccctaccacaagtggccaagggcttt

SEQ ID NO: 268638 - DNA, 122 bp, Homo sapiens
gcacgtggtaggccctagaaattattgacagtatgatttagtttgtagccctgcgctccccgggattgaagccaatgaaattgaagccagagaggataccttcctcactagatgccatggga

SEQ ID NO: 268639 - DNA, 122 bp, Homo sapiens
tatggttttaggtctaacatgtaagtctttaatccaccttgaattagcttttgtataaggcgtaaggaaaggatacaggttcagctttctacctatggctagacagttttcccaggaccatt

SEQ ID NO: 268640 - DNA, 122 bp, Homo sapiens
gtgatccacccgcctcggcctcccaaaatgctgggattacaggtgtgagccaccatgccccgccttccctggggctttctgttctcaaacagtagggccacctgggcacggatcttgatcca

SEQ ID NO: 268641 - DNA, 122 bp, Homo sapiens
gaactcactgcgcctgcgcagcgagctgacccgggcttccctagcgaagcgcgtaggacccgcctcttcttgtgcgtgttgtcttgaatatcgccattctgctggcaacagttcctgttctc

SEQ ID NO: 268642 - DNA, 122 bp, Homo sapiens
gggtgtattaaaggggccgcgggggcccacgctcccctggagcagtggctggagcgcgggcggagaaagaagcgctctggacttggagtgcagagctagttccctcaccctgctagctgaac

SEQ ID NO: 268643 - DNA, 122 bp, Homo sapiens
ctgggagcgctcttccaaagatatttgggctgcctcgggagttgcagcgtcttgggccgccggaaggtgggtgacgtacggatcttctttttttgtgtggctgtggacacctttcaacactg

SEQ ID NO: 268644 - DNA, 122 bp, Homo sapiens
atgcctttttccagcaacagtttaatcaaattctggaagcagaaaagtgtcctgtgaggacgtgcctttcctatcaaagtgctgagtgcctggaccctctttccggaggaaacagtcccctc

SEQ ID NO: 268645 - DNA, 122 bp, Homo sapiens
ccacgcaggtgtagttggccgagtccttgacatctgtgagttccagcacgttccgacccacgggcatgtcatcctcgggggtcaggtcctcggccccctgcatccacttcacgtatggcatg

SEQ ID NO: 268646 - DNA, 122 bp, Homo sapiens
aggacttcccctccctctccaaggtggggagaagaaagcgaagggagggcgtctataaagcgctgtctcattggcctgaagcttaggcgctggagttggggcaaaagggagagggagggagc

SEQ ID NO: 268647 - DNA, 122 bp, Homo sapiens
ctggtcatctcatccagggtgggagctctaaacaggacatgagtgtcaatgacaccctcacgtccagctcagaccacatgccgcaaactgcacactgcacactctgccctctctgctggccc

SEQ ID NO: 268648 - DNA, 122 bp, Homo sapiens
gagggcgacggtggcaccgaggctggccgtgggtagcggtacccctgggcctgcatacggcgatgtgggtgcaaaccagggtgagctgaggacctcacagtcccacccaggcatccagccac

SEQ ID NO: 268649 - DNA, 122 bp, Homo sapiens
cagaaccatagccaagctgtgatccatccgatctgctgggctgtacctaaagcaaagtttcgagaaaagtggcaacagtgccttttgccagctgcatctttcttaactctggcaaaatctcc

SEQ ID NO: 268650 - DNA, 122 bp, Homo sapiens
taaactaaaaataattccgtgcgacaaatgaaaccaacatgaatttggagctaagaaatacgggtaggtcaggaaaccactaaaatgttgctgccttttagcaatggttcgtgaaactgaat

SEQ ID NO: 268651 - DNA, 122 bp, Homo sapiens
gtccctaggcaagggagtgattatggggaccacctataatctttgcagatgagctaggcccgacacatgtcactacaaacggagtgtttttaacagtcctgtacatgtatatgggaattgca

SEQ ID NO: 268652 - DNA, 122 bp, Homo sapiens
cggattgccaggacctggatcgcaacacttgggaagacccccgccccgcccagcgatctccgtgccctgagtcccagtgacggccccctggacagcggagcctgctgcagcgacgcgacgcg

SEQ ID NO: 268653 - DNA, 122 bp, Homo sapiens
agaggggtgcagagttgctcttctggaagctccctttaggcctcccagggagggcgtggtcgcacttggcactccccaagagcctgctgaatgcaccccgactttgtgcacggctccccgcc

SEQ ID NO: 268654 - DNA, 122 bp, Homo sapiens
ttcatatgcaaaacattgcatgctctagactcagtggaaagattcaggaaaaggatctttcgttccctccctagggaacctctgatttaaaggagaaggacgaataagtgtgtaaataattc

SEQ ID NO: 268655 - DNA, 122 bp, Homo sapiens
gtggcctgatgctacctcccatctgccctgaaggaggcctcgggtagcctctctgagcctcggtcccctccagcacgagcagcagtggaatctctgtgtcctgccacgtgtgcagggcaggg

SEQ ID NO: 268656 - DNA, 122 bp, Homo sapiens
ggaagcgtctttgcaacaggaaagaaattcactgcagtaactaaggcctctctcaaaaaccgtgaactaatgccgaaggaaccccacggctcctcggaggcgctgattgagaacacagcgcc

SEQ ID NO: 268657 - DNA, 122 bp, Homo sapiens
catgcatgccgatgccgccgtgtgtcggggctgggggcctgcccccaggccgtctgtgcgcgtctccattgcctgcccccacattgcctgtctgcttctcgtggtggtgttattgtggctag

SEQ ID NO: 268658 - DNA, 122 bp, Homo sapiens
aactcctggggccaagcgatctgccttcctcggcctcccaaagtgctgggattgcaggtgcgagccactgctcctggcccataagtctttcagtgtagaagagggaagcagaagaggtcaaa

SEQ ID NO: 268659 - DNA, 122 bp, Homo sapiens
ggtaaagcagcctgtcgcttgccgggcagctggtgagtcggtgacctggcctgtgaggtacgtctggcagcccaggggccgtagcgggagcccttgaggccggtagccttgcagggctggcg

SEQ ID NO: 268660 - DNA, 122 bp, Homo sapiens
ttgacttgaacaaccgttggtttaacggacagccgatccacgccgagctgtcacctgtgacggacttcaggggagcctgctgccgtcagtatgagatgggagaatgcacacgaggcggcttc

SEQ ID NO: 268661 - DNA, 122 bp, Homo sapiens
agtcacttttcttttttactgtctcagcccagaagaatcagtgcagtttctgtggcagagcgagttgcatttgaaagaggagaagagactggaaaaagctgtggatacactgttcgaattga

SEQ ID NO: 268662 - DNA, 122 bp, Homo sapiens
ctgcaaggtttgcttagtgtctgttttatttcggtttcttttcttgctatgtttatctgtcggaattacagtttgttttggttctatgtaatctctaaaatgttatcgtttttcttttgact

SEQ ID NO: 268663 - DNA, 122 bp, Homo sapiens
cccatcattctcccccggggcaagccatagaactgagaatccttcttcctcaaagcagctcgtggaaaccagactcttttctccccaaagccagccagaaagcctagaaataccactgtaac

SEQ ID NO: 268664 - DNA, 122 bp, Homo sapiens
agcatcctgccagtcatctgcagaccccagaggggtccacaagcaagtgctcaacaacaccgtcctagttacattcgggtcatgtggcttcttgaccaggaagagagaaacctctcaaacaa

SEQ ID NO: 268665 - DNA, 122 bp, Homo sapiens
cctcggccgcgcccctactggcctctggtcactggttacttggggagaggtcctcagattcgtacgcttgtctcaccgcaggggacattcccgcagatttcgggatcctgggccacctccga

SEQ ID NO: 268666 - DNA, 122 bp, Homo sapiens
ttcccccccgcccccattgatgaatgctagcagttttttagaggttttctggaggggttgcgcatgttgggaatgttcaagtttgggcttcagtcggtcttctgcaacatgttgacaatgga

SEQ ID NO: 268667 - DNA, 122 bp, Homo sapiens
gcatataaaagaacagaaccattaagtagctagagtcacttctgtgggtcttgttatttgcgaggaaattaaaaaaaaatgggtgaacctacagtatcagtaagacagagaatgtacttcgt

SEQ ID NO: 268668 - DNA, 122 bp, Homo sapiens
gtctctcagttcagtttgagaggtgtccaataaaaagctggacacatgggtttgagtgtccggaggctgaaaaatatcagggtatagccttgggtatgaagaaattactcagagtatgtgtt

SEQ ID NO: 268669 - DNA, 122 bp, Homo sapiens
ttgctcttgttggaccctgagagagccacacacaaagagctggagggagtctgtggtgtgcggttctgctgaggtaaagactgcaggataaagaaaacccaagttgcacagtggcacaactt

SEQ ID NO: 268670 - DNA, 122 bp, Homo sapiens
cgcgagcttccgaacctcgataatatcatctcgagcgcgaaagtcaatacggtgacagcgcgcggccggatacaatccaattacgctcggctgcccgggcgctcctggggctcggggtccgg

SEQ ID NO: 268671 - DNA, 122 bp, Homo sapiens
gcggcggcagcgctggtcttcaacatgtccgtttggtggtggcggctgcgctctgcgtctcgctgacacggccccccgcgccctcacgcactggctcacactggcccggccggcgagcgggc

SEQ ID NO: 268672 - DNA, 122 bp, Homo sapiens
aggcgggagggcgggcaggttccggaggggcgcgacaggtgctgggacgcgaggtaggtgcggagaaggttgggggtgcggggcaggagccgggggtgggggttgaggcggggcaggtccta

SEQ ID NO: 268673 - DNA, 122 bp, Homo sapiens
taggattagaggcgtgggccaacgcacccggccttgtgtgctcacttttatctggtctttcgaaagcattcagtgtggtgttttagaaataactactagagagtctatgtagtacagtagtt

SEQ ID NO: 268674 - DNA, 122 bp, Homo sapiens
aaaacggcctcctgcaccctggcgaggttctgggagctccggtagggtagggctggatgacgcctcctagagtctcggagcagccgctcccgcaccctcccggcacgcctgcccatgggaat

SEQ ID NO: 268675 - DNA, 122 bp, Homo sapiens
tgaatggaaccctgaaagtgaaatattgggcctgaatgagcaaaatagcaaaagtgaagtcgtaagaagtggggccttcttatccacataccattgggtcacgttgggttttctaccaaggt

SEQ ID NO: 268676 - DNA, 122 bp, Homo sapiens
taggacagaagttctcaaaatgtggtgccccaaccagggttatcagcatcacctgggaaccgaatagagatgcaaattcttgagccacatcccaggcctacttttagaaactctggaggcgg

SEQ ID NO: 268677 - DNA, 122 bp, Homo sapiens
ggccactgtgcctgacctcttgagtgttttttgtttttttttttttatagtcaaacaatccggcttttatattattgcctctgctcagtagaagtcatctaggggctggggcatttttgttt

SEQ ID NO: 268678 - DNA, 122 bp, Homo sapiens
tgagctcctcccaggaatttgattgtttgcagttgtaaagtgcaggagcttggatctgtccgagcagagggttaaatcatagagtgttttacaagagcagctatagggaatgccttgttttc

SEQ ID NO: 268679 - DNA, 122 bp, Homo sapiens
gaggaggcctctagttgtagagttgggtacttctggctaaggacctgtgaaggaatgacccgacccctggcctggcttctagggctgtggcgcccccagatatggacactcagatgaagaca

SEQ ID NO: 268680 - DNA, 122 bp, Homo sapiens
ttcgttcgcgccttgaatggaggcgccatggcacagtctggcagaggaggcctgccctggcgggcgctactcagggcccctgcgttgagaatgccgagtgaggtgctgaggtttggagagaa

SEQ ID NO: 268681 - DNA, 122 bp, Homo sapiens
ataaaaagatggcagtcgtatccaactcccgagacggcgaacccgcaccatttccatgcgcgctctgtgcacaaggctggcctcacgttggccagcgactccctcccggcgagtcagttctc

SEQ ID NO: 268682 - DNA, 122 bp, Homo sapiens
cgctgtttcagagctggaactagggaccctgggggagctccgggccagagccctcgctgccgccctcacccagggcagtctgggtggtggctggctgtggaatcactcacagcctcttcata

SEQ ID NO: 268683 - DNA, 122 bp, Homo sapiens
gctggagttctcgggtgcccagccgggcgctccctcagcccagttcgccacgtcagcgagcggccagagccacagatgatgactgagtctccgaggcctctcggtctttttctattttaaca

SEQ ID NO: 268684 - DNA, 122 bp, Homo sapiens
cctcttacttggacagacaagcgtccccagcaaagcttcccgtcctctcgataggtgactcgtcctaaatcagctctgaattcccgcaaagacttctggaagctgtgctggggttgaaactg

SEQ ID NO: 268685 - DNA, 122 bp, Homo sapiens
tctgagcagccgtggcggtgccacctggggacaagtggttgcttgtgagtccccggaggccgctgagggcacaaaggcaacattcatcctcgggactggcagccgggccctggggcaggggc

SEQ ID NO: 268686 - DNA, 122 bp, Homo sapiens
ctctgtcacccaggctggagtgcagtggcatggcttcagcttaatgcagccttgatctcccgggttcaagcaatcttcccacctcagcctctcaagtagctgggaccacaggtgccaagcca

SEQ ID NO: 268687 - DNA, 122 bp, Homo sapiens
tctgctagttttctgtccctcttgccacatccccctcacttgccgtaaagcccacgggaacggacccctccagagcttatttattttgtgccccagccccagcccccgccactgccttgcat

SEQ ID NO: 268688 - DNA, 122 bp, Homo sapiens
gctggccatcctggtccactttgacacatgttcactttcccaccctgttaaagtcagggccggccacatggcccatggcctaacggggttaaagagacacttgcagggggagcctctgagaa

SEQ ID NO: 268689 - DNA, 122 bp, Homo sapiens
ccccggcttcagtagctgagcctcgcaccctcctttgatcagtgtcggcagaggaagagccgcctggcgcaaagcaagggctcagcaaatgagagcccttcagtgcctatggcgggctggac

SEQ ID NO: 268690 - DNA, 122 bp, Homo sapiens
aacctttgtttcagactatctttttaagggtgtttatataacaaacgaccttagaaaatacgtaatgtctccctctgcaccaaaaggcaggtttgtttactgtttagtgtaataaagttaat

SEQ ID NO: 268691 - DNA, 122 bp, Homo sapiens
tgttgtggtacattatggaatcgtgaccaggtccagagggtctgcagacgagaacccaaacgcatcagcgtcctggcgtaaaacacccgtacccccaccgaagatctcgcggaagcctaggg

SEQ ID NO: 268692 - DNA, 122 bp, Homo sapiens
gcccttaggcagattcacacagcattcttgcctttccctgggggactgacttcaaatgtccgtcacattcctttcctatagcatataggccctgggtcttgggggtaatggcatggggatcc

SEQ ID NO: 268693 - DNA, 122 bp, Homo sapiens
tggctctgcccactaccaccttttcccagcatggaaatgaggtacacacgaaagctttatcgtgttggtatcaatgtattccaagtactcaactattttataagccttttcaagtaatcttc

SEQ ID NO: 268694 - DNA, 122 bp, Homo sapiens
agagtatcgcaggccagagtctatgccttatccccacctgtttggaaccagcttccaaaccgtggtccccagccttcagcaggcctaccgcgcaggcgcaaccaccagcctggcgcgaggcg

SEQ ID NO: 268695 - DNA, 122 bp, Homo sapiens
catatggtgcggcccgggagcaggggctgagaaggggcgtctgttcaagcctcacgcacacggtggcgatttccagaacgaattcctatccagtcccaaccaacccttccgttagatgggag

SEQ ID NO: 268696 - DNA, 122 bp, Homo sapiens
ggagccggatccactctcagcctcaggaagcagcagcctccgctccgcggcgggtgtgctcggcagtcacagacccactcaggacacctcccgttgccgacgggctagacctgcatccgaag

SEQ ID NO: 268697 - DNA, 122 bp, Homo sapiens
acttggggaccccttaccctggcgaggtgcctgtgaacgttgccgcctgtctgtgggagacgctgaagcagcttcggatgaccacacttgctaaccagttcccgagctgggggccactgtga

SEQ ID NO: 268698 - DNA, 122 bp, Homo sapiens
aaggcacctttgtagaaacaatgagtgactggagtcccaggtcttgccactacagaggcgcgtatgaaccacggtttaacactacgtctacgccgaagttcgggttagtcagaggccacgcc

SEQ ID NO: 268699 - DNA, 122 bp, Homo sapiens
tgagctgggggagcctggagagttctgtgcaaggcccagggacagcagacgtgtcctcagcgtctgctctgacgtaaataagagtgaagcggtaggtgaggggcagagcaggagcaagggtc

SEQ ID NO: 268700 - DNA, 122 bp, Homo sapiens
cactttggggggcggcggcagggggtgtccccatggccggtggggcggggtgggctgctgcgcgccgcgtgtccgcctctggctcggttcccatcgccccccgggccgcccggcgcccgccc

SEQ ID NO: 268701 - DNA, 122 bp, Homo sapiens
ggttcactagacccaattccttcctcagccgaacatgtctggagcagtcggaggaacagacgtggagaagaggtcgccacgaggccccaccactctccttcctcacctgctccgtggctccg

SEQ ID NO: 268702 - DNA, 122 bp, Homo sapiens
gagctcccggcgacaggagtagcgcgagcagctgacgggggaaatccactggcagcgagtcggatgagtcagcgctgagtcacgctcggcgctacgtgccggcctgggcggccgcagcccgg

SEQ ID NO: 268703 - DNA, 122 bp, Homo sapiens
ggccgagggcagagcggagaagtcgccaccacagccaccggcgcccctttcttgcctgctcgtagatctgccctccggcccagaagaggccgaggaccatttcttagctgccccagaggagg

SEQ ID NO: 268704 - DNA, 122 bp, Homo sapiens
aagcactggattatttctctctaatttcacctattggctttttaaccaagttcacccttccgcattaaaatattaagtctttgtaaatgccttaaagataaaaaggcctttacagagttgag

SEQ ID NO: 268705 - DNA, 122 bp, Homo sapiens
cctggacttgtccccatggagcaggtggagggcaggtcccacagggacgcactgcgggtacgacctggacttgtccccagggagcaggtggagggcagttcccacagggacgcactgcgggt

SEQ ID NO: 268706 - DNA, 122 bp, Homo sapiens
tccagcccactcgtgccagggtggggtggttcagggggtccagtgcctgggcctggctggcggcccggcgtttgtgaaatggcttgcttatctccttgtattctgtgctgagcattttatta

SEQ ID NO: 268707 - DNA, 122 bp, Homo sapiens
agcagctctgttataaaatagggcgcctctctcgaagccaggctctggatcccgtcaaaacgacgtgtgtctttcctttccttcctcaagaaggtgaaatataagcctggaataacactgtc

SEQ ID NO: 268708 - DNA, 122 bp, Homo sapiens
cgcccaaaccgacctcccggctgcaggagtgtgcggcctgaagggaaccccggggaactgcgcaggctttgggaaccacgcaggccgggtgcagacgcagctgccctgccaagtagcacgtg

SEQ ID NO: 268709 - DNA, 122 bp, Homo sapiens
ttgcgggatgaagagggcgcggttcccccggctgggatgaggaccgcggatgctgaggagcggactccagggaccaccgactccatggccggccccagcgagggcgagaacgggtggaagcc

SEQ ID NO: 268710 - DNA, 122 bp, Homo sapiens
tgggccagggtccctgagctcactaccctcagattctaactccagcttcacatcattaggcgtaagcagccaattgggccgtctgggagccgtgcatcctgggagttatagtttccggctcc

SEQ ID NO: 268711 - DNA, 122 bp, Homo sapiens
aaatataatctcagggggaaaaaaatccaagcttacgactctgaaccatgaagcaactgtcgagatggacctttactggatcttgcccttaattatggggttcatgcagtcttaagcctgag

SEQ ID NO: 268712 - DNA, 122 bp, Homo sapiens
atccctcccgccaaaactcctgcccggtgcggagaggcgcccggagcccagggcgctgtgcggagcgggtgtaactccccaggcctgccccgccgcctgcctccaccgtcccgcggacgcct

SEQ ID NO: 268713 - DNA, 122 bp, Homo sapiens
gtgttaggaaagcctccccaccacgattcttccacgtcactccaacctgaggcaggctggcgcccacggctgctggagaagctgctacagtgaaaaacccctcggcttcccacctcctcccc

SEQ ID NO: 268714 - DNA, 122 bp, Homo sapiens
gaagggaagagaggagtctgggccaaggccagatgtgtctcccttggggagtcctcagagcgggcagccggacgtcgctccatccttcccgcctgacggatgggtctgctgcgcaggcacaa

SEQ ID NO: 268715 - DNA, 122 bp, Homo sapiens
tactgtaaaacagtaatcagttagacaatgtgttattgtcaaaaggatagacaaaaagatcggtggaacagaaaagagagcccagaaatacatcacatgtgtcagatgatctttggcaaaca

SEQ ID NO: 268716 - DNA, 122 bp, Homo sapiens
aggagcgagaggcagcagaggggctgctggggctgttgggcccttctgggggcctcccaccgggcctgcccccccgccccccgctgtgggcctggcctggggcctggatccaagccagcacc

SEQ ID NO: 268717 - DNA, 122 bp, Homo sapiens
tcagagacagcagatatggacagcgattgcaggaagttttctgcaaagtggaactggtggcggtggtgggtaagcaaagtagttattttgtttaagatggtagaaatgacagcaaatatgct

SEQ ID NO: 268718 - DNA, 122 bp, Homo sapiens
gggcttgatggggcctgccatttcatttcgcaatgtggttcctaatgtttcttgggaaaccgggcgtgttatgtctccatgtcaccctttacttcttggatttcttggtgtgcgtggttgcc

SEQ ID NO: 268719 - DNA, 122 bp, Homo sapiens
tcctccgggaagtctttcctgactcctcccccttctaactccccaccgacggtctgtgtccgctgccacgcgtgtccagtacctcgcagacctgaggaatgtagttctccttgaagtagttc

SEQ ID NO: 268720 - DNA, 122 bp, Homo sapiens
gaaatcaggactctgagaacttaggccaagtaaaaattatcaaaacaaagaaacaaaacacgtggtggcacaaaagacaccagaagccaggtcgtttgcccctcaccattcagcccttccca

SEQ ID NO: 268721 - DNA, 122 bp, Homo sapiens
caacagggaggtgctgtacgagctcatcgagaagcgaggcccggccacgcccctcatcaccgtgtccaatcaccagtcctgcatggacgaccctcatctctggggtacccgggccagtgtgc

SEQ ID NO: 268722 - DNA, 122 bp, Homo sapiens
gtcaccccgcaggtagtcagggattgctgcgcccacgtgggagggagcccccttctgcagcgcgagttccggcgagagcacgtggagagaatcgtggctgcgggaggctgctccgctgccgc

SEQ ID NO: 268723 - DNA, 122 bp, Homo sapiens
gctggctctcagccggggtgcacactggacttgcctgggagcttttcattccccccctgccgcagctgccccccagaccagcttcagcagcctctctgggcggcccagcaggaggaggcatt

SEQ ID NO: 268724 - DNA, 122 bp, Homo sapiens
ccgcctcctgggttcaagtgatttttctgccttagcttcccgagtagctgaccctataggcgcccgccaccaccctggctaatttttgtatttttagtagagacggggtttcaccatgttgg

SEQ ID NO: 268725 - DNA, 122 bp, Homo sapiens
cgtccagggagcctcccccacccgaggccggcggctcagcgctcatgggcggcctgggggcgcctccgggaaggactcctgctcccgcaggaatttgtcccacgcagaagaacgaggccccc

SEQ ID NO: 268726 - DNA, 122 bp, Homo sapiens
tcccgcagcacctgtgcggctaggactcttccccaagtgtgcagaaagaaacaccctgggcgatagggtccggagtgtcccggaccctcacctgcggccccgcgggcgccactctatcttcg

SEQ ID NO: 268727 - DNA, 122 bp, Homo sapiens
caggaatcatcccacttaaaacgacacactcatctgcctatttttccatgcccaccagaacgcaggctccacagagtaggtaccttgtccagcctgttctctccccagtctccgggcactgg

SEQ ID NO: 268728 - DNA, 122 bp, Homo sapiens
acgcggcgttttccttaaaggcgaaaacaatcccggggcgagcgagcagccctcggccgccgctgggagagaaagtggagactggaagagaaactcctgactcatccgcccgggcgcttatg

SEQ ID NO: 268729 - DNA, 122 bp, Homo sapiens
ggaactcctgacctcaagtgatccaccggccttggcctcccaaagtgctaggattacaggcgtaagccaccaggcctggcccgatttaaaatacttttgccaggcactttggctcctgcttg

SEQ ID NO: 268730 - DNA, 122 bp, Homo sapiens
cactgcgaggagccagaacgtccctccacagccgcgccgcccctggctcgacttcccgagcgagagccgcgggacgttgcagacgcactggctccgccttcccaccaatctcgaccctcgcc

SEQ ID NO: 268731 - DNA, 122 bp, Homo sapiens
atcacagctctctccttgtgttgttcttaaactttgaagatcatacctcaccctgaattccgtcttggagttcaacccttcaaaagtttgcactgactcacaaggtttcatgctgcttagtc

SEQ ID NO: 268732 - DNA, 122 bp, Homo sapiens
ccaaggcccagagaggtgaattaactcgccaagggttcgcagcaaaggtgagggcggaggcggcgtcagcactggctggtctctcagccagaagggggcccaggacaccgggttaaccgagc

SEQ ID NO: 268733 - DNA, 122 bp, Homo sapiens
ggatatgccccacccacactaagccccagaatacggtccctcttcaccttctgaggcccacgatagaccagctgtagctcattccagcctgtaccttggatgaggggtagcctcccactgca

SEQ ID NO: 268734 - DNA, 122 bp, Homo sapiens
ggggcgcggcgctaggggcccctgctcgggtttttattcccagacctaagcttacaggtgcgtggtcccagaaagtgagtaggaaagcgcccaccacgtgccaggcgcttaagctttctgtg

SEQ ID NO: 268735 - DNA, 122 bp, Homo sapiens
attactgcagccataattcatagctgaaaactcacatgagtacagaacccaatcttgaaacgataaacttgttaattaatatcagcgctttcctttctgagcaaaggtctccagctatattt

SEQ ID NO: 268736 - DNA, 122 bp, Homo sapiens
ggtccccctcacgtccggctcggctccctttatcgcgctcctccgcgatggcggcggcggcggcgacggacaaacatctcactgcgcaggccgaacgtcgtcctcctcctcctccttctcct

SEQ ID NO: 268737 - DNA, 122 bp, Homo sapiens
cacagggaggttcacgcctggggctggacggggcgtcgtggcgtgcagatctggaggttgcggaaggaaggacagcaggctggtcgctctgcgggctccgctgcttcctcacggggccgcaa

SEQ ID NO: 268738 - DNA, 122 bp, Homo sapiens
cccgtatgttgattagcatggggtccttcttaaggcttttaaaattctccttataatattcgttttagtatttgtgtgtctgtgtgtttaatcaaagaatctcttctatactctctccatca

SEQ ID NO: 268739 - DNA, 122 bp, Homo sapiens
caccagaggccgcctggaacccgagtttcaacctcccggggatcctgtcccgcttcccagcgatgtttgccatgactgctgcgagttctccgacctcgaggccactctcctttccttccaag

SEQ ID NO: 268740 - DNA, 122 bp, Homo sapiens
tttggtttatcctggggtcaaacccagattctccctacaaggattacattagatagagatcgtcaaaaccagaaatgatcaacctgaaacacttcctggtcagcttttgctaaaagaagata

SEQ ID NO: 268741 - DNA, 122 bp, Homo sapiens
gagccatcctatggactagttaacactaaggtggagttcagacttttttagacaacggcgcgactggcagcctttctctatcaagggtcagacggtaaacgttttcagctttgcagaccaga

SEQ ID NO: 268742 - DNA, 122 bp, Homo sapiens
aataccagactaacaagtttggcctttatcttcgaaataatgggcaaccatagaagaaatcggagcatgtgagggtcaagataaaattttagttttggaattttccctctggtattgcgtgt

SEQ ID NO: 268743 - DNA, 122 bp, Homo sapiens
taatgggcgtggagcctgagcccctgagggtcgtcgctaacgggggtcgctcagcagggccggcctccgctgcctgcccggggtgtctaatcacctctccgatcctttgcccggatctgagc

SEQ ID NO: 268744 - DNA, 122 bp, Homo sapiens
atgaacttagctgtcacggccgctgacaaatagttccctttgcttcctgatttggaactgcgcgccggcgagaagttgttagtggcttggatggtgacctttggttcagcaaagctttgcac

SEQ ID NO: 268745 - DNA, 122 bp, Homo sapiens
cattacagggcgccggagaaatttaatctacccagcgggcggttccggaaaggcgcctgccgtgtagtcaggctgtgaactggcagaagctcttgccgccatgctggatcagggcggatgct

SEQ ID NO: 268746 - DNA, 122 bp, Homo sapiens
aagcactgccaggagaacaaatgcccggtgccgttctgcctaaacatcaagcagaagctccggcagcaacagctgcagcaccgactacagcaggcccaaatgcttcgcaggaggatggccag

SEQ ID NO: 268747 - DNA, 122 bp, Homo sapiens
ccctccaatttggatcgtcatatccagggtgagagacgggtgtggtattactccccgcgtcgcggggggcacccgcccccttgcaatgaggaccgtcgtatctagggtgggagatagtgtgc

SEQ ID NO: 268748 - DNA, 122 bp, Homo sapiens
agggggcgggagcggggctgtggtgcctgtcctcttacttcattctctgcacagcccgaccggtttcctgtgcgtaacgtcacacggttcattcaaaaaaagaagaaagaaagagccctcct

SEQ ID NO: 268749 - DNA, 122 bp, Homo sapiens
ttgggcccagggagcttgcgaggaaggagtgggctgagtttggggctgaggactgtcccccgcggtatttctgaattccacccagtagcctgagcctcccaggcacacccatacctgtctcc

SEQ ID NO: 268750 - DNA, 122 bp, Homo sapiens
gagccgaccatgtgtgtgcgcgaggggcagcgtgagcgagtgcgcgcgggtggcggggcgcgcgcgggagagggccggggtgggggcggggtgggatgggggagaagggagaggccggggtg

SEQ ID NO: 268751 - DNA, 122 bp, Homo sapiens
acagcccattgagagaagtgaagatgttccccacagtcataaaaacgcgtgaatatggtccgaaatcatcctccaggatcctgggagcacagtctgacccctctgccccatttccccacaag

SEQ ID NO: 268752 - DNA, 122 bp, Homo sapiens
cagtaactctgccttgacctccccttacctcctgtgctgaggtcagccctctctcctccacgtgggccaatggtggctcctgccctccagccaacatcagagaggctggaggcaccttgtct

SEQ ID NO: 268753 - DNA, 122 bp, Homo sapiens
tttagcgtggccgggattctgcagccctggacgtgtctttccctgccctgttctccgaggcggacctgtggagctttaagctcccaccttcggttttgtactgggcgcgggaattgcaaaat

SEQ ID NO: 268754 - DNA, 122 bp, Homo sapiens
aaggtcccaacggtgcctactgcgagcggtcgaggccccgagcagccccgagagcggcggcggcagcaagagcagccaacatccggggccgcgcacccggaactacttcccgacccgcatcc

SEQ ID NO: 268755 - DNA, 122 bp, Homo sapiens
acccaattccattgcactttctccagcgttgagaggggagtgtgcggcagcgccagggaacgctagagtcagaaaatgctgatttctgttccccgtctttgattaccaagtggcattttaag

SEQ ID NO: 268756 - DNA, 122 bp, Homo sapiens
cagtcttgcattagcagggccagccacctgccagcctgctgcatccccagtgcctcttgacgcagaagtgccgagcagctgaccggcagcgaggcctggagttctacacacttgccttggag

SEQ ID NO: 268757 - DNA, 122 bp, Homo sapiens
cagcctgcgccagcgcagagcaggacgggaaacagccccgggagcagaaggtcccagcagcggaattcccctccacttggaccaggcctgcgggagatccgggcactgacaggcggggacat

SEQ ID NO: 268758 - DNA, 122 bp, Homo sapiens
aacacagccagggcagcctctcccatccctgtggattagaaagctgtgtgccaccgtcagcgatttcctcggctcagccggggccgggcacaggaggacgaagggtttaacagtcttaactt

SEQ ID NO: 268759 - DNA, 122 bp, Homo sapiens
agagccaagcacagcttcccgggtcacagaaccaattcattcaccaggcggcaccactgccgtcatttcagcttctggccactgggaggcgctgctcaaaagggtttgccctgagactccga

SEQ ID NO: 268760 - DNA, 122 bp, Homo sapiens
ctgatgctgaagttctctgagtttgtgttaggtaggaaacacctggacctaggtgctaggcgcaggctaactcctgtctgacccctgtcagggaggggctgcattgttctttctcatagaat

SEQ ID NO: 268761 - DNA, 122 bp, Homo sapiens
cctgcgtcaaggagctccagcaagctgcccggatatgagcctgtcactggggccttgttgcggatgactgtgccctggcctgcgtgtgtcatgccaggtgaagtcagagaggggacaataag

SEQ ID NO: 268762 - DNA, 122 bp, Homo sapiens
tgatacattactgaagtaaaagtgatgggaattctaaaagccaaactactctgtaatgaacggccatgtaaccctggatgagtcactgttcttaagtaaatggtggcaaggcaaagatgaac

SEQ ID NO: 268763 - DNA, 122 bp, Homo sapiens
ttagagacattagacacttctaaagtacgactctgcggaaagagccctttgggaatgaagcggcaacggtggcgcacctgcgatcctatcgtgggatgacaaagctctaagaggggtctcag

SEQ ID NO: 268764 - DNA, 122 bp, Homo sapiens
ggggcagcgtgggccgctgccttggaaacgcagagcgcgcgctccaggtaaaggctgctacgcccaggacagggttctcacggtggaggaaaggacttctgcgggataccacgctgtgcgcc

SEQ ID NO: 268765 - DNA, 122 bp, Homo sapiens
tggagttccttgacatacctccataatcgtactggctggagtaatagcttgcatagtaatcgctctgactgctccatccacttttggaactatagtatccttcaggatatccttgcctgaaa

SEQ ID NO: 268766 - DNA, 122 bp, Homo sapiens
ccgcctcccgcctagcgggtccttctgtctcgggccggcctcagcggggtctttctgagacgctctctaatactgggtaaggccatctacttcccaggggtgaggatcaagtgagctgagtc

SEQ ID NO: 268767 - DNA, 122 bp, Homo sapiens
gagcagtggaaaggggtgacgagttcctggctggccaccaatcatcccatctttctgtgccggttcctcatctggaaagtgggagtgatacttgtgcttgcttttcctacccacaaagatta

SEQ ID NO: 268768 - DNA, 122 bp, Homo sapiens
gtgtagtcaacctacgaaaggaatcattagaaacagggtaggaatgttgaaccttagaaccggaagttgccagagaaaatatgtgccctggccaactccacaggactagttctaggcaatct

SEQ ID NO: 268769 - DNA, 122 bp, Homo sapiens
tgaacgggaataggactgcatgaggctgacctggatttgacaaccgcaccaggacaaggccgcgtgctgccctgaacagtggcccttgtgctaaatacgaatcctctctctcccacaggcat

SEQ ID NO: 268770 - DNA, 122 bp, Homo sapiens
aatagatggagagagatggatcagggcagggcaggggtggagaagtgagctagtgcagtccgggcggatgctttagaaataccctggaagtggtaataaaggcctaagttagtatgactgca

SEQ ID NO: 268771 - DNA, 122 bp, Homo sapiens
ccaggcctgagcctcccccccacccccgctccgtgggctcctgtgcagccggaacttccccgacgagcaccgtcccctgctccaaggcgcccagtcccatcgaccatccaagggccgaggag

SEQ ID NO: 268772 - DNA, 122 bp, Homo sapiens
cctccatggagcaacgtggtccggtgggccttgtgccccgcggccactagggggcagcatcgtccacagggtcctggagcggacgcgctgtcggggctgaggcacccagagctccggctctg

SEQ ID NO: 268773 - DNA, 122 bp, Homo sapiens
agaccagtctgactcatggcgaccaagcaaaggggactatttctaggcaccactgtgggccgattcagagcctgtgaaccagacaggcaaacagacagcacgaataaacatgatagcttcga

SEQ ID NO: 268774 - DNA, 122 bp, Homo sapiens
ttacctattcttaccaccatcaccccaaacttctttgcttttcctggtctcttttctttccgcctcagtgtccttggtgcacacagtaggcataagcacgggcatagaaattaggaaatgaa

SEQ ID NO: 268775 - DNA, 122 bp, Homo sapiens
gcaaaggagttctttctccagcccacccactcgtaccgatgtcccatggcccttcctggacggaaagagtcttacaggggttcaaacaagccatacgctgagatgggatttagagtatgtag

SEQ ID NO: 268776 - DNA, 122 bp, Homo sapiens
gggatgtcaagcgctttacaatacctgggattgatgaggcgggcgggccaatgagctgcgcgcggcgcctcggcgcgccctccgttggcgcggcggctgagggcggggggaatgcgggcgca

SEQ ID NO: 268777 - DNA, 122 bp, Homo sapiens
ttatacctcttgccattttgcccaagtcattaatgacagctttagttgatagatacaaggcgtgtaaggatagcaggagatccagctccttggtctgctgtattcatatataaaaatgtttg

SEQ ID NO: 268778 - DNA, 122 bp, Homo sapiens
taagaggaagccaggggtgtctgtctggttctgggccttcccagacaaaagccagagacccggagcctctttctgagaaggaaccgggcgtccccaagatttcctctagccgagtcccctgg

SEQ ID NO: 268779 - DNA, 122 bp, Homo sapiens
tgccgcagtaaacacaaagtggggtacagaaacgaaaactccgggaagaaacggccagcacgggcctcgccgtgccggctactcaacacgccttcctgagagcacagaacatccacagccct

SEQ ID NO: 268780 - DNA, 122 bp, Homo sapiens
gctgcagaactacaacaacgagctggtcaagtgtgagcggcgcagccgggacggggaggtcgggagggccgcagggccgggttcccggctcgcagcggggtgcccctggacccgcctcgctg

SEQ ID NO: 268781 - DNA, 122 bp, Homo sapiens
aagtcaccgcagctttgtgacatcttactagccctgatcattgcttataagccggtcatacgaatgctgttccaacagatgcaagaaattgctattaaaattaaaatgccagcgaactatct

SEQ ID NO: 268782 - DNA, 122 bp, Homo sapiens
tatctccagcacccgggctggaagagcagacaaagcagcctaacagtgctctgtttgtggcgttctcatcttatgcaaaacctcctgaaataaatcagtcatcctgcaagcgggaggaggcg

SEQ ID NO: 268783 - DNA, 122 bp, Homo sapiens
gcagccttttgcccacgcgggggtgcagaaggggctggtcagtgccaaggtggtgctgcccggacccgcccctccatccatagaatatgtcgtgctgcagtggtgagcggccagcagccatc

SEQ ID NO: 268784 - DNA, 122 bp, Homo sapiens
agaatgcgtttctgtgtctcctcgctttgtcagtgtttgctctggctcttcagtgcctgccgcagcctctctgatcagagcagggggttgaagtgggtgcggggaggcactgtcagcttgtt

SEQ ID NO: 268785 - DNA, 122 bp, Homo sapiens
catgggcataggttgcggggcaggggtgggggcttcagtcccaactcagcccttgagaaacgtaatgaacataattccccccaccccccagccccttttacaaacaggtcacattaagttaa

SEQ ID NO: 268786 - DNA, 122 bp, Homo sapiens
cggagctgcactgggattggtggactgggcactcacgtggttaacggtcgcgggaagccgcggagcccgaacctgagactggacctgaggagacctcagcctcggtgctcgggccgccccgc

SEQ ID NO: 268787 - DNA, 122 bp, Homo sapiens
aagaaaataacaactaggtaaacaccacagtaataactgttgcaggtaagaatcatcaggcggcgccggaggccccagaagggtcgaaggcgccgcgggctggggtcggtggcttagggagc

SEQ ID NO: 268788 - DNA, 122 bp, Homo sapiens
ccgccgcctacgacgtgcaggcagcactctcaacatagccccttctttcaccagaactatcgtttccacgtcagctcacgtcaccatccgtagagttggaaggataccactgtaagtagtat

SEQ ID NO: 268789 - DNA, 122 bp, Homo sapiens
cagggatcctctcccagaacttcgtgcccagcaatgtccgctcaagttctgggatttttacgcagctggactcccctccccctggcagccccgaggggtgaggagctagtccgtcggaggga

SEQ ID NO: 268790 - DNA, 122 bp, Homo sapiens
gcgagatttcgcgcgtgtttgaatccctgctctgcgacccattcacagagatgtctcgagcgcaagccttctctgcagttttctcagctgcaccgtggaggtgagagcggcacagccctccc

SEQ ID NO: 268791 - DNA, 122 bp, Homo sapiens
tttcccaggaacctcagtggtttgctgagcagctaggagtgatcacagctaagctcttgccggatctatattaagcagggcttggctggatggggtcaatttatggaacaactatgctgctc

SEQ ID NO: 268792 - DNA, 122 bp, Homo sapiens
ggtggtgtctcagactgtggggagggacgtttgataaccaggttcctgaacccggaaaggcgagtattgggatctatgtcctgggctctagaccaacactaagtggttttactctctcctgt

SEQ ID NO: 268793 - DNA, 122 bp, Homo sapiens
cctggcccacgccttcttccgcgaggagcgcggtgtgcacgtggaactagcggaggaggacgacggcgagaagccgggcctcaagctctggctgcgcatggaggacgcgcggcgcggggggc

SEQ ID NO: 268794 - DNA, 122 bp, Homo sapiens
actctgagtccagcacaacctccagtggggccagcacagccaccaactctgggtccagcacgacctccagtgggaccagcacagccaccaactctgagtccagcacagtgtccagtggggcc

SEQ ID NO: 268795 - DNA, 122 bp, Homo sapiens
ccgcacaccttcctacccccacagcggcctgcaggacacgaaccgccgccccctaccccacgccaaggcctggccctcactcccaaccccggactgcgtgagtgccgggcacagagaaaaga

SEQ ID NO: 268796 - DNA, 122 bp, Homo sapiens
ctgctctgatgttttgctgttcccagacctgggctgggataactatctctgccttttgcccgtccccaggtcagccccactctggccagggccacactgtttcctcctgggcagaggagccc

SEQ ID NO: 268797 - DNA, 122 bp, Homo sapiens
gggcttcatagcagaagacattggagttggaaggttgcatagggtttcctcattggagaccgggaaattctattcttgggataaataatagtaaattctataggattcaatacttagtttgc

SEQ ID NO: 268798 - DNA, 122 bp, Homo sapiens
cggagccccgcagggccgcccccacccctgcccaccctcccgcgggccggggcagccccccgccagccaccccgcgttcccaggaagagggaccggtcattactcattcatgtcctttcatt

SEQ ID NO: 268799 - DNA, 122 bp, Homo sapiens
caggacagcagggctttccaggcagacatgggtaggtcagcagttgtcacctggggagagcgcttaccctccttgagtcacttagggtcagttgctaacccctaggctttggtctgtgttgt

SEQ ID NO: 268800 - DNA, 122 bp, Homo sapiens
cttgccttgtgatattctattacgttgtgaagtacgagacctctgtgacccacacctattcgtacactccgtccccttttgaaagtccctaataaaaacttgctggttttgcggcttgtggg

SEQ ID NO: 268801 - DNA, 122 bp, Homo sapiens
gtcttatctttttcaggctgaatttttcctgtatgccccacctctgcctgttttttttgacgctttctgtatagtatggttgcaggtcatcctactggtctggtcagtggtctctgacacag

SEQ ID NO: 268802 - DNA, 122 bp, Homo sapiens
tctcacacctcacgaagacccgcagatgccacaaactaactgctggactgcagcgaaacccgacccctgtttggaggcactccaggtttccggaggattgtcatctccatagctgcggcaag

SEQ ID NO: 268803 - DNA, 122 bp, Homo sapiens
caaggaaaatttaggtaacctattcatactgctggcatgtgctcctcctgtttccaccctcgtttattttggatatttttccagtcctggaaatcatcttccattttggcaccatttcttga

SEQ ID NO: 268804 - DNA, 122 bp, Homo sapiens
tgatgtgccctcctctcacgtgcatcattgtgtcaaatcggaggagacagtgggtgtaaccggctctataaactgcaaagtgcttatttgagggaggaagaacttaatcgttaaatattcaa

SEQ ID NO: 268805 - DNA, 122 bp, Homo sapiens
ttggcgtggctgaggttgaggccacaagttactggggaagttaattgttgacaggagcttcgtactcggctcacagccacgcacagtgggcttcctcccagtacccgcccttgcccctgggc

SEQ ID NO: 268806 - DNA, 122 bp, Homo sapiens
taattctattcagttcttataatcatatgacagctttgggggtgagaatggagtgtttggcgactgacgacagtatttttgtatctaaagtagtacttctcagctttcaatttgctatgatc

SEQ ID NO: 268807 - DNA, 122 bp, Homo sapiens
gtgttccgggcctgctgaagttgtcacatagcatctcgcccacagttggatcgatcaacccgggaggtggagctgggcttggaatacggatccccgactatgaacctggcagggcaaagcct

SEQ ID NO: 268808 - DNA, 122 bp, Homo sapiens
caagcagtccccaccctagctggcttggggagacctgccttttaaggcctcctgggtgaacgtccccaggctcagaaggaagcagctcccaggagcccagtgaagcagctggagccacagag

SEQ ID NO: 268809 - DNA, 122 bp, Homo sapiens
agaacagcggccagttcagggagtgtggtcttccacttcgatcgtgatgtgtttctgtgtcgcttgaagtctagcttgcctttcctaacgctctcggcccgggtcagagactccatgtgaga

SEQ ID NO: 268810 - DNA, 122 bp, Homo sapiens
ggacggccactctccctgacgcacgcagtgacccgaacaaagcccgtgggaatcatggggcgttcctggagggtcgcctagacgacccagcccaaccccacccacagtgcctggcaacctag

SEQ ID NO: 268811 - DNA, 122 bp, Homo sapiens
tggggatcccacggaattgctgtgctccagcgctgggggattgtgtgtgcgcgttgcctgcgcgtgagtgtgagtgtgggtgcgcccggacgcggggagagctgggcccgctgcgcccgctg

SEQ ID NO: 268812 - DNA, 122 bp, Homo sapiens
aaaacaacacattttaaagattacgtgcttcttggtacaggtttgtgaatgacagtttatcgtcatgctgttagtgtgcattctaaataaatatatattcaaatgaaagtgactcagactct

SEQ ID NO: 268813 - DNA, 122 bp, Homo sapiens
gaagtggacgcagctgttcattgccgctgagggtattcacatgggtcagtttgtgtattgcggcaagaaggtccagctcaacattggcagtgttctctctgtggacaccatgcctgagagta

SEQ ID NO: 268814 - DNA, 122 bp, Homo sapiens
ctgaagctggatcatgggatgtggaactcatggactcagaggcaactgtacttagtgacacgtgaaaattacctgaagttcaaatatgaatattcataaagttctattggaatacagctagg

SEQ ID NO: 268815 - DNA, 122 bp, Homo sapiens
cgatgtacggcatggtctctgagccctccgggggccccttctgctcctcattcccctctccgtcgtactcgtccgtcccgtagctgaagtctgagacaaggaacaagaaaggccactgagaa

SEQ ID NO: 268816 - DNA, 122 bp, Homo sapiens
tggtagttcctcgagagaagggtctgtgcctattgttttcatggttacaacctcaggtggcgtgtaggaagcccttgatcaatgcttgatgaatgaatccaactctgaacaattttgatgac

SEQ ID NO: 268817 - DNA, 122 bp, Homo sapiens
tgagctcccctcacaggaacggtgggtgctggagacaggggcctgccttcttctaagcggcgtgggctgggagagtccggccggagacaaaagaccgtgattttgagtgtggggacacggcc

SEQ ID NO: 268818 - DNA, 122 bp, Homo sapiens
gctgctgctgaccgcctcgcagcgctggccgggctccgggaggagggccccggcgggtggcggcgcaggagcccgaggggacagaccgggcggtggcgggggcggcgggggtggtggcggag

SEQ ID NO: 268819 - DNA, 122 bp, Homo sapiens
tgttgtatcaggagctcaataaatatttttcagttgtttattgattgattctcacagcagcgggtttcaccaagccttgaaaacctccattaacaagccaggaactcaagatggagttttct

SEQ ID NO: 268820 - DNA, 122 bp, Homo sapiens
tgaggccaaaaagctgcgatcttcaagcaggaaaataccgcaattttgcattgacagcggcgcaacccaccaaaaggctccatctgggctcccgcccgcctggaggcctcgggcttcggttg

SEQ ID NO: 268821 - DNA, 122 bp, Homo sapiens
gacaggatctaaggggccccctggcgctctaaggtcctggccagtggagaccctggggtgcgacaaaggggttagggggctcccccctccccgcccctcgcccccacctttccccctcgcgc

SEQ ID NO: 268822 - DNA, 122 bp, Homo sapiens
gcgccacggacgaggcaggccgggtgcctgggcctgggagccataagccggagagtctggcgggctaagctcagcggcatccgggttccttgtggccgccgcagcagctcgagaacacgaat

SEQ ID NO: 268823 - DNA, 122 bp, Homo sapiens
attggataggttccatccaatacccttcttcagatcatctgaaatgattattttcctaaacggaactcttcctctcctaaagcttgtaaaaatttctagtgacattcagcttcctcttacca

SEQ ID NO: 268824 - DNA, 122 bp, Homo sapiens
gcggaccgcgatgggtagccgttggcggggagtgctcgcgagcctgggaagggcgccgtccgtcagagcctcgcggagggtgagcggccggcggcttcgaccttggagtcccaggctgtgtg

SEQ ID NO: 268825 - DNA, 122 bp, Homo sapiens
ttcctggttccacctaattagcctggtttttggttcatttcactgtcctgtcttagtcaccgtattacaaaccatgttgacccagacattaaaaaccatttccctcccatgagcagataaca

SEQ ID NO: 268826 - DNA, 122 bp, Homo sapiens
gagataaggaggaccagggagggctccagggaatccgactccctgggcaaggctcttccccgaatgaaaggctctgcctcaacaccctctgtccaatgacagtcgctgctgctaccaaggac

SEQ ID NO: 268827 - DNA, 122 bp, Homo sapiens
aactgtcattgtcacatggcaacaatcagctagagatgagtgacagataagccctgtagacggcacagaccctaccaatgtgccacagtcctcactcagcccatttgctcatttggatttcc

SEQ ID NO: 268828 - DNA, 122 bp, Homo sapiens
gctgcggggcagctccggtctgctctgcctgcgccctcattgggcgagaggcgcagccagcggcacttcaaagcgggtgctcctcgcacttaggctgagtttagccggcgggagcctggagt

SEQ ID NO: 268829 - DNA, 122 bp, Homo sapiens
gccagggtcctgcccccggtcgcccaaaacacctcccttgtaggtctgtccctgatcccccggctcttgatagacacagcctccccgtcgcccgaccccagggcaaaccagcagataaaccc

SEQ ID NO: 268830 - DNA, 122 bp, Homo sapiens
tggattgtcgctgggacggcagtcaggcatttggtgtggtcgcctaaggggtgggtccttcggcgggagctccgggaaaccccgtgggcctgcgcggcgttcttccttttcgatccgccatc

SEQ ID NO: 268831 - DNA, 122 bp, Homo sapiens
cgctgccggtgcagttccaagtagagtcaacataaagccaggcacttgtgagatggagaccggggcgaaactgcaagcagatgccctttgctgactgttgaagaaagaggatctggctgaaa

SEQ ID NO: 268832 - DNA, 122 bp, Homo sapiens
cctgcaaaagtctctgtttctcctgaacttttcagctgagtcaatcgggctctgggaccccgaaaccaagcctccccagtcactcgcttattcactcaacaaacacaccccccttccccgca

SEQ ID NO: 268833 - DNA, 122 bp, Homo sapiens
cagacagtgttttcaagtgggaaagtcaaagctctcccctgtcagccagggcttggagaccgcggctgcactgacatgagctgggcagatgctcacttgctggatcgaaaccctctcagaaa

SEQ ID NO: 268834 - DNA, 122 bp, Homo sapiens
cctgtcccaagtcaaaaaccctaatttcagcatctccgggtcggggtccaggtgcctcaccgtcccttttgcttgtgtcccacgctccagactccgcgcgcgcctgggcgaggctgttgggt

SEQ ID NO: 268835 - DNA, 122 bp, Homo sapiens
tggttggctggggctcctgtatgtctcttgatgattggctggtgcctgcccagaaggtttcgcgtggcagcacctctgccatggccttttccctggcgccccaaaggaacttgacctcgccg

SEQ ID NO: 268836 - DNA, 122 bp, Homo sapiens
ttaggtgcgcgttgcaaagcagtaacgaatccaatcagccggggaggcagacagcagggccggaagaacaaagctggaaagggaaacgtcgcaccggctctgcccagcggcgccagcccggg

SEQ ID NO: 268837 - DNA, 122 bp, Homo sapiens
cggccgggatgcaggagcgatggaggcagctccgggcccggaggtgcagagggggcgggccgccccgcgggcggccgggggaggcgggaggcggggagcggccccgagcgctgggagcgaga

SEQ ID NO: 268838 - DNA, 122 bp, Homo sapiens
ttgataaatcactggccatcagtgactgagtcaaccttcagcccctatcctctcccctcccgagagatgaggggatgaggttgaaatttccaaacctgtaatcactaggttggttcctgtgg

SEQ ID NO: 268839 - DNA, 122 bp, Homo sapiens
ggacagaaggggaccaggatctgcaggctgtctcctccgcaccagctgctgtggcaaatgcgtttcagcgcaccctgcgcgttcaccaaccgccgattacaggggaggagctgggcttcggg

SEQ ID NO: 268840 - DNA, 122 bp, Homo sapiens
tttttcctagaggccaatgttacatagcagctggtttctaatagttaggcttccctattgcgcactcagcatccaggatacaaccaaccacggaagacaatattaggggaaaatatccaaca

SEQ ID NO: 268841 - DNA, 122 bp, Homo sapiens
ttccccgggcggtttggggtattggagtgaggtcaggggcgtgcccttggagtgcgcggccgctgtgacctctggccccttacccacattttactttctgccctgtgacctctgatccctgc

SEQ ID NO: 268842 - DNA, 122 bp, Homo sapiens
tatataatatgtgctttttaatgtctgactgcttttgctcaagttagtgagagtcatccacgttgtaggaatagtttgttcattcttgctgctaaatagcatatgattgtttgagtctacta

SEQ ID NO: 268843 - DNA, 122 bp, Homo sapiens
tgtcctaccagcttgggcgaggcaggctcgggattcagggggccgcagcggaggcggcgccggccagggactctgcagggaccggggtgccccggagggagtggtgctggtggaggaggagg

SEQ ID NO: 268844 - DNA, 122 bp, Homo sapiens
ataccaagtttaactcaagatctcatgcttactgctgaggttccacccagccttaacttacgcatcctccttttaatatctccgtctccatggaaataaacagtagaaggaaaacatgtggg

SEQ ID NO: 268845 - DNA, 122 bp, Homo sapiens
cggcgggcgcgcgcgcgtgcgtgatggtgggggcggtgcagggaggggtttgctactgcgcgcaggttgttatctatttctgtgttatatttgaaaatgttctaatgaaaaggaaaataaat

SEQ ID NO: 268846 - DNA, 122 bp, Homo sapiens
agtagtcacggtggtttactggtggtgatggtgtggatacagcgctggctctgtgcgggtcgtgttctaagtgctttacaaaattacttaatcctgacaagtgccccatggggagggatagg

SEQ ID NO: 268847 - DNA, 122 bp, Homo sapiens
tagagaagcgagaccgtcccgccctcccgctggccctccttctctcccgcccggggcccgcgcaattctccgccagagggacagtcggcctcatatgttaagacctctgatcactagatccc

SEQ ID NO: 268848 - DNA, 122 bp, Homo sapiens
ccagcggcagatgtcagggtcttcaggcgaggtctgacctagctagcgccactctacatacggataggtgtggggatagtgagacccagaatggacgggctcgcccgagctcactggctggt

SEQ ID NO: 268849 - DNA, 122 bp, Homo sapiens
aaagagacatcaaaaattttaacataatcacaatgaaatcattttttaccacttttacagcggtgtttcaagcggactgtcactcagatctgcagagatgaatattactcaaaaaatttttt

SEQ ID NO: 268850 - DNA, 122 bp, Homo sapiens
aaagggcgataccacccggagacctccggcaactttctgcccgcggcagctgctcattcacgcgtttcttataagcccaggagccaatcagaggctgcgtcgggaggaagttggagcgcgga

SEQ ID NO: 268851 - DNA, 122 bp, Homo sapiens
ggcaggagcagctgtgtacgcgggggccttgctcagcgcagggctgggctgcacgccgagcgcagactctgacggctcctcacacagctctctgcgtaggactgcgttcccattttatagag

SEQ ID NO: 268852 - DNA, 122 bp, Homo sapiens
acagactctacgcttatgtagtgggcaatctctccaactaaggagcttcaaacaaagacccgtatctggacgggcgcagtggctcacgcctctaatcccagcattttgggagacctaggggg

SEQ ID NO: 268853 - DNA, 122 bp, Homo sapiens
tagtggtttggtcaaggaatggaagaaagcctagctccttttttgttaccaaagtaaggccggaaacggttttgattcctacaaattgagatggttggaatttttctgtatgtttgttaatt

SEQ ID NO: 268854 - DNA, 122 bp, Homo sapiens
atggagctacggccaccgctgccgagacaaaatggcgccgacaagctggtttagcgcaagcgccttggacagaccctgccccgcccccgtgcaagcccctggctgcaattctgggttccgtt

SEQ ID NO: 268855 - DNA, 122 bp, Homo sapiens
ggaaagcctagtggcaccggctggttatgcagaggctcgtaaggaaagcctagtggcacccgctggttatgcagaggctcctaaggaaagcctagtggcaccggctggttatgcagaggctc

SEQ ID NO: 268856 - DNA, 122 bp, Homo sapiens
aggcgctcgggatacagaagtgatgtgagtgtctgcgagcgtggtctcgcgggcgggtgacgtcatcgaggcgagagaggcggagccgtggacagtgggcgggaggctgccaacggttttga

SEQ ID NO: 268857 - DNA, 122 bp, Homo sapiens
ccgcccaccctccgggggtggggaaaggactccaaccttcgcttcccgcgcggcagagtgcgggaagcgccgatgggtccttacctgcagggagctttctccggcttcttagaatacctggg

SEQ ID NO: 268858 - DNA, 122 bp, Homo sapiens
cggagggaggctgggcttctcctccatgtcggggtctgagatctcctcgtagcctgctgacgcagacatgtctgaagatgccttcctcaggacatccttactgcccttccagtctttagacc

SEQ ID NO: 268859 - DNA, 122 bp, Homo sapiens
tttcatgtctctcttccaaatagagctgagtttataattttctgttaaaaggttgtgttgcgaaatttggctggtcagatgacatttggaggccatcaaattataattgacgaataaacaca

SEQ ID NO: 268860 - DNA, 122 bp, Homo sapiens
ccagacctgccctgggctgagtcttaggaaagggagagaaaacaatggaaacctcagatacgtaatcagcttaaatatcgaggaaactatgtctcagttctcctgtgagtcccagggagctg

SEQ ID NO: 268861 - DNA, 122 bp, Homo sapiens
gcgacatgtaggactgtgggcctagggtcacctgtgtctactaaaaatacaaaaattagccgggcatggtggcataggcctgtaaacccgactgctcgggattcttcaacagaagctataac

SEQ ID NO: 268862 - DNA, 122 bp, Homo sapiens
tggtttaccaagtgcctgccaccctatgcggtgggctggggccagtctattggtccctcacggatgtttccttcaaaatcccactggcagaaaatgtgcgctgcatgagtgatccaacagcc

SEQ ID NO: 268863 - DNA, 122 bp, Homo sapiens
gctgcctaagcctctccccaggtacgccgctcacgccgtaagccctcctgttggacctagcggaactccgggtttggagtcaacctcttaggggcggagaaaaaaacagcggaaaaaaaaaa

SEQ ID NO: 268864 - DNA, 122 bp, Homo sapiens
ccaacctgcccagcacacgacaagttaggggcagcatcaggagcagatcctaagcctctccgtgaccaggccaaggacttcagcccagctaaccctggtccctcctctggcctttgtgggac

SEQ ID NO: 268865 - DNA, 122 bp, Homo sapiens
aacatattaagcctcttcatcttacttgataaattcattatctgctgtctttgtgggcctcgttcagactttgtggggcctggtgtcacttccagatcttgaagccttgctttatttctatc

SEQ ID NO: 268866 - DNA, 122 bp, Homo sapiens
gcgtgcccgcgcacgcagagaggcggtgacgcactttacggcggcagcgtaagtgcgtgacgctcgtcagtggcttcagttcacacgtggcgccagcggaggcaggttgatgtgtttgtgct

SEQ ID NO: 268867 - DNA, 122 bp, Homo sapiens
atccgcccacctcggcctcccaaagtgctgggattacaggtgtgagccactgcgcccggccgacagatggaaactatttacacaaaaccattccttgcgggcagtcagatggggtcttaatg

SEQ ID NO: 268868 - DNA, 122 bp, Homo sapiens
ccccgacacgcacaaagccggggaccctcggccagttccggccccgcccattaaaggagacgcacagtcctggaaaagaaaaggcgccgagaccccgcagccctacccggagcccgcagctt

SEQ ID NO: 268869 - DNA, 122 bp, Homo sapiens
tggggtaatggcgtcccggcctctggtggccacgggaagcattggcaagacggggtaacccggccagcagacagcgtggggtaacggcgtcccggcctctggtggccatgggaagcattgac

SEQ ID NO: 268870 - DNA, 122 bp, Homo sapiens
aaggctctgcagcccgagggggcgtgtgtaggggcggggctgcgggcggaggagcgcggacgctccgggtatcgcgagagttgggcgggccgagcaatcgcagcagtctattccctcactct

SEQ ID NO: 268871 - DNA, 122 bp, Homo sapiens
gcatggctgcgagctggggcccgacgggcgcttcctccgcgggtatgaacagttcgcctacgacggcaaggattatctcaccctgaatgaggacctgcgctcctggaccgcggtggacacgg

SEQ ID NO: 268872 - DNA, 122 bp, Homo sapiens
agacgaaagacggaaagatacacagagtcaagaaaaggcggcccagagcaggtcagcagccgctgctggaagaggcccttgcaggcttcgcatggcttcatcgatcgcctacaaattgcttc

SEQ ID NO: 268873 - DNA, 122 bp, Homo sapiens
ccactgaacaaatgaattaaataagtgaactgaacaaatgaacatgagccttaacgtggccgtgggtccacgtccatggacccacgtattctggaaggtgcagaagtttccacgaccctttg

SEQ ID NO: 268874 - DNA, 122 bp, Homo sapiens
cttcgcgccgccgccacgccatggcagcaccgctgagctgactagggggagtcagggtcacgcgcgagtgcggtgcagtcgaagagcagagagaagcggacacccaccgccgccctggaaga

SEQ ID NO: 268875 - DNA, 122 bp, Homo sapiens
gtaacaggcagcaggcgggcagtaggtcatcaccccaacgctagaggaatgagaccatatcgatccgcgaggatcaagtcctgatcctgtccctggcgacttctccaggctgcgcggtctct

SEQ ID NO: 268876 - DNA, 122 bp, Homo sapiens
gagatggattctgcggcaaagggaggttccttcattcagtgtttatggagagaataaaggcgctggcccctccagtgaggatatggagtaaacgagacaatcaagtccatcactcctggagc

SEQ ID NO: 268877 - DNA, 122 bp, Homo sapiens
ttagaccaaaatagagaacagatattgaaagagccacgcaaaggcgtatggccatgcccacgatgacctctaaggagggcgaacgccgtcacctgtgtactcggccactgaggccagggaag

SEQ ID NO: 268878 - DNA, 122 bp, Homo sapiens
tgctttcctcaggctctaaggcccgcggtgtggagcgcggcgtaggcagcggggagtgggcggcgcggggtgggtggagtgggtcggcggcggggatcctgccgagcccgcagctgccctct

SEQ ID NO: 268879 - DNA, 122 bp, Homo sapiens
ctcgggctcccgccttagcatgctggccgggacatctggtgaacatggcctctgctactgcggcagcagcacgacggggcctcggccgggctctccctctcttctggcgtggctaccagacc

SEQ ID NO: 268880 - DNA, 122 bp, Homo sapiens
attcatcccagttctaacgtgggacgctcgttcccaagtacagaggcaggagattgattccggctgccgctaatgccagctgccactcagccccctttcctgaggccagggcttgctcgagc

SEQ ID NO: 268881 - DNA, 122 bp, Homo sapiens
tcgccgctggcgcccccgccccggagcccgcggacgctgcgcgaggtcctaccgcgctgccgctgctgcccagggcccggctctgcgctcacaccggccactgccgccagcgccgcggcgga

SEQ ID NO: 268882 - DNA, 122 bp, Homo sapiens
tttcactttatgcttcttctctgggaggatcgtcattttgatatatgggtcagaggtcatcgactgctcatccatggctggcaagccacgggcttccttgatattgaccacaaatgcttttc

SEQ ID NO: 268883 - DNA, 122 bp, Homo sapiens
ggcagacaagctttcagggcacctatggtccctgaccctaccggagctctatgacaaccccgcaagagagacagggatgaagcctccagggagggaccctcacacccttcccagaagcccac

SEQ ID NO: 268884 - DNA, 122 bp, Homo sapiens
accagggggaggggctgcctcggaacagggtcctcgcctcctaaggacgggaagaggcgtcgagtaccctttggagtagggggccggaaattgaagacccatttgcagtgggctctccagcg

SEQ ID NO: 268885 - DNA, 122 bp, Homo sapiens
acttacagcatgacacataaaggcctctgaggccaagtatacaccagctacatttcctgccgcactcatatttcatattttgccaccacatctttgttatacttctttgcctgaaaaagcct

SEQ ID NO: 268886 - DNA, 122 bp, Homo sapiens
tgaatagagaacaagcccaatctacgtctcattgttaagaaaggggtgaaaaaaggctgtcgtgctttctggagagccgtttatggtccgcctgtgatgtcatggcaggatccaggtgcact

SEQ ID NO: 268887 - DNA, 122 bp, Homo sapiens
ggaagcatctcccaggattcagggcggcccgctgacgactcctgcccggacaaaggtccccgtgctccacgcagaatgagacgatggccctgacccatcgtcaggttgacctgctggccaac

SEQ ID NO: 268888 - DNA, 122 bp, Homo sapiens
gaagtgccagggagcactctgaagcagtatgttttggtctaagtggggctcacgtggcaccggctcactgcctgccctctggcctacagcgtggcaggtatcaccgaccacccgaagcactc

SEQ ID NO: 268889 - DNA, 122 bp, Homo sapiens
agttctctaatccaaagaaatcattatttggcaacgtacggttttcagggggatataccccgcgactgcgttcctgtaggatgtgagacaaagagaataaatatcccaggattgggtgctgg

SEQ ID NO: 268890 - DNA, 122 bp, Homo sapiens
tgtccgcgcccgggctgggaccctccactgggatgcagaaagagtcctgggacgagtggacgtgcacagaggtctccacaactccctgcaagctcggttacacccaacctcaaatcatcttc

SEQ ID NO: 268891 - DNA, 122 bp, Homo sapiens
gaagagaaaggcatacaaatagtgatgagtcattcagcaaacattccttactccccttctcggagctacccgcatcataggcatgatgtgggctcagccatgcattgaattgctgtacttag

SEQ ID NO: 268892 - DNA, 122 bp, Homo sapiens
cacccatttacgctattcgtagccgtttttagttaactgcgcatctaaacttggcattcacgtgtctggtcttaaagagaacgtgtgtttttttcttatcctgaattcctttcagaagacct

SEQ ID NO: 268893 - DNA, 122 bp, Homo sapiens
tgcggcggaactcctacgggaactgcttcctggtgtgcggcatcctgtatgccgtggacacgtacaaccagcaggaaggccaggtcgcctacgctttcgacacgcacacgggcaccgacgca

SEQ ID NO: 268894 - DNA, 122 bp, Homo sapiens
aaaacacactcaacacaggtagaacaaggtgcccgagctcggcgtgacaaatggctcgcccggcccttgctaagcgtggctgtaaattgcccctcccgttggcctggcgtggccgggggctg

SEQ ID NO: 268895 - DNA, 122 bp, Homo sapiens
catccccactctccaaaaaacgttctctagcctttaaaggtggacgcggtggctcccggccgactcaggcgtaattagtcacatcgggacggtgacactcttctccacctcctcactcagag

SEQ ID NO: 268896 - DNA, 122 bp, Homo sapiens
ccgtttcccagccagtggctttggcggagcggatcctgccatggtcctgccctgtggattcgccccaactccctgttggcccagagccccttcgcacgcttcataactgaaggaaaatatgt

SEQ ID NO: 268897 - DNA, 122 bp, Homo sapiens
cggggggcgcgcgctggggcagtggtgctccatgtaggtctggaggctggcaaaggaggccgaacattcgttgcaggtgacctccttgctggcgggctcggaggggggcccggccgacgcgg

SEQ ID NO: 268898 - DNA, 122 bp, Homo sapiens
gaaattcaaatttagaagaactgtacttttacttgctacatctggcaactcagggttcggcgccaggggaccccaaatcctaggcggatcgcgccccgcctgggtcaaaggggaccccaaat

SEQ ID NO: 268899 - DNA, 122 bp, Homo sapiens
ttcccgagggacttcggaaatggccccctgagaggtgaattcttggaaagaatatgagggcggttaaggcgtctctgtctcaaactctccggattttttgcagctaccagggactgcgaggg

SEQ ID NO: 268900 - DNA, 122 bp, Homo sapiens
agggcacctttcctgctgcaggtgactcatcgtgaccctggcttagtgacagcctggcaccgtgagccagcagaagcagccgtcccagtgtgaattctggctggtctgtgagctctggacct

SEQ ID NO: 268901 - DNA, 122 bp, Homo sapiens
cccaagagaaagttagggtgtgctatgctttggctcaaactccgcctcacagaaacaacccgactatgcctaagggggagggaatggtaaggtggagctaagcagaggtaaagataagaaaa

SEQ ID NO: 268902 - DNA, 122 bp, Homo sapiens
ccggcgctgcgggggccagcctggagggtgcgcttctccggcaagcgagaccctgctccccgacagcccccactcagccggcacaagacatcagcacccacggcagagccgcaggacatggg

SEQ ID NO: 268903 - DNA, 122 bp, Homo sapiens
agcattaatagaggctggcatcccacaaactgatcgtgttccttaaacgtaacatcaggacggtcagggttcacagggtcatgggtcagtagccttgtaaagaacaagttttatcctttttc

SEQ ID NO: 268904 - DNA, 122 bp, Homo sapiens
cactgaggtcgaaggtgggcaggtcgtcggcctccacgccgtggtactggatgtccatgtcgcggtagtagtcgggcccagtgtccacgttccagcggccgtgggccgcgttcagcacgtgc

SEQ ID NO: 268905 - DNA, 122 bp, Homo sapiens
gagttatcccagttggctagagctgcaggtctttgggcaggggaatactgaaggatcaagcgagaaagttaatgtggaccttggctttaaaaggccatgtgtttcctcccatctcctttctg

SEQ ID NO: 268906 - DNA, 122 bp, Homo sapiens
ataaatgcttgtagtttaatcttttagcttgaacttgatacttttcgttttcagacctcccgaattcctatggtacttcatagatcatgaagcaaagccatgtttgttatttttaaaattca

SEQ ID NO: 268907 - DNA, 122 bp, Homo sapiens
cagttctgtggaagggtaggggaaggcctgaccccgggggcaatgtggtggcgggacagtcgtatacaccttcaggagaaccacctcaggctgacaggcagtgcggagggccccaagagcgc

SEQ ID NO: 268908 - DNA, 122 bp, Homo sapiens
acaggcggagggatgttctgcccggtctccccaccctgcatccggccgtgttaggtgtcccggcacaggtggaaggatgttctgccgataacttctggccatgttacgtgtcctggtgcagg

SEQ ID NO: 268909 - DNA, 122 bp, Homo sapiens
tcaggaaggaaggctgacaccgaacacgctggacagacttgtcaagaccattgtctgctccggggcccagcagacttgaacgaagaccgtggcgtgctcttcaagcccactgaatcctccct

SEQ ID NO: 268910 - DNA, 122 bp, Homo sapiens
tggtcaggacgaatagagcctgacaaaacctgagttaattggccgagcgaatgtcgttcgcgtcaggagagcacgtccggagaagccaagggaaatgtggagcaggagcagccaaagtggcc

SEQ ID NO: 268911 - DNA, 122 bp, Homo sapiens
cgccttctaaatctccccaggtctccagcccactggaattttctcttccaagcgtggccccgccctctccgctcgtgattggccctaagttccgggccccagtttcattggatgagcggtcg

SEQ ID NO: 268912 - DNA, 122 bp, Homo sapiens
gcttcctccctcctgttttagatccagcagagaaaccagcctaacggggaggaggtgctgcgtgaggagccaaggacattcccagcaaatactttcacagcttaaaagccacagccaaaagc

SEQ ID NO: 268913 - DNA, 122 bp, Homo sapiens
tcttgggtccaactggcactgcctgttagtctattgggaggcccagcaggtcacaactgacgtcccacagccgccttgctatagtctcattacgagcttgggcagagacccatgccacatga

SEQ ID NO: 268914 - DNA, 122 bp, Homo sapiens
tatgactataatgaaatagctttcacaaggatcatcagtgacttcagacaaacaaggtcacggcctctgctcttgcctcatccttctttttttgtctgtggcatttaaaactgctgaccttc

SEQ ID NO: 268915 - DNA, 122 bp, Homo sapiens
cgaggttcagcgcaaaactgactcatgcagtaccgggatcgctgccagagcgacggagcgcgcgagcagcgcggcatcaacaggcagaaggtgccacggggcggacgggacccactgcccgg

SEQ ID NO: 268916 - DNA, 122 bp, Homo sapiens
cttttcacaatttgaaatgctctgtgatagcttatttatgatctgtcttctttttcttcacgagggcaggggtcgctgtcctattcaccagccatctagcatagccttagcaaatggtaggt

SEQ ID NO: 268917 - DNA, 122 bp, Homo sapiens
accccattacatcttggtagattccatgtagtcacagtggctgcggttgtcctcggggcccggcaggggctgtcgagggacggtgggccggccatggcggaagctgtgcagggagaggcgca

SEQ ID NO: 268918 - DNA, 122 bp, Homo sapiens
ttgttgaactgggtcgagtctctaggctccctgagcagctgcagggcccattccacttcccggacccctttggtgaggacccccatgaggtctgcaaagccgatctggctgcccaggctgcc

SEQ ID NO: 268919 - DNA, 122 bp, Homo sapiens
agtctggagacgtagtttggaacgtctggagatccccagtttggaacgtagcacagcgtgcgtggggggcagggggcagggagcaggagggtccacacttgcgtggggcaggggcggggtct

SEQ ID NO: 268920 - DNA, 122 bp, Homo sapiens
tgcacgggaagcagcggagaggacgcaggtaaggtaaagccaggcagacccgaacctggacgcgcacctgcgggggagggggtatgcgcggggcgggttgccgcccctcccgggagtacggg

SEQ ID NO: 268921 - DNA, 122 bp, Homo sapiens
cggagcccggagtagggccgggctgcttacctgttgctgctgcagacgtggcgtcgcgggcgccgcgtgcaggtccttcggggctcctcgcgctcgtcccggccgcctctcggggctcgggc

SEQ ID NO: 268922 - DNA, 122 bp, Homo sapiens
gaaagatcattacaacgacttaactgaaacatgatcaggcaggtatttcatattctggtacgttctttatgatcattcactggccggcagactccacatatcgtttccatgggtccaggaac

SEQ ID NO: 268923 - DNA, 122 bp, Homo sapiens
gggatgaatactgtccacaagcagagcatcttaattcccaatccacaggatatatatacacgtagcaaaagctggactttgctctttagatccagatattgcatactagttaagctttcatc

SEQ ID NO: 268924 - DNA, 122 bp, Homo sapiens
actgagaaaactatgacaatgaaagagatctacctgattccatcttgcttctaacctctacgctctcctaatttatacctgggtttaggcagaactattttttggaggaacttagtttatag

SEQ ID NO: 268925 - DNA, 122 bp, Homo sapiens
gccccgcctgtgctcagctgcggctcagtgggcctgaactccggagcccacagaatctggcgctgggcgtccgctctccgcgcctgaccgcacctcagaactccggtaggacgggggggtgg

SEQ ID NO: 268926 - DNA, 122 bp, Homo sapiens
aatgagtgcctccatcgtcctggcactcaagggcattcctggtccaggtggcagcaaatccgcctggttgcagactggagctgcagcttccagaaccatgaggatgggggaaacacaacaaa

SEQ ID NO: 268927 - DNA, 122 bp, Homo sapiens
gagactggagagctaggaggggctgtgacactgtggcgatggctaggtcctgggttgtcccgggttccaccgaaggagaggcgccttggacgctgcttgggcctgcaaggaacagaacacgt

SEQ ID NO: 268928 - DNA, 122 bp, Homo sapiens
cccatcgcctgtctggctggcagggaaggaaaatagcttgaatgttggtgaaagacttagcggagtgggagggcagtgaaatctagagtaaaaccaagttgggccaagtgtcctgcagaatc

SEQ ID NO: 268929 - DNA, 122 bp, Homo sapiens
ccgcccgctggcactaaggacccagggcccgtgctctccccgacctcagtctccagcccccggcacccctcacatcataacgaatgcacggctgcttagcccctgtcctgtcccaagacctt

SEQ ID NO: 268930 - DNA, 122 bp, Homo sapiens
agccgccccgccccgcgggcagcgcgttcagcggccacgtgacacagccagcccatcacgcgcaaagggcagggcctggaggacaccacccccgccactctctcagccctccactaggaaag

SEQ ID NO: 268931 - DNA, 122 bp, Homo sapiens
aacccattcgctcatggattgttcttttctctgtcagcactcaccttgcttttcaaaatacgtcccaccttagacccaacccgtgtgaggctgcctcttggtcaaacactgcattctttgaa

SEQ ID NO: 268932 - DNA, 122 bp, Homo sapiens
ggtcaaaggctggggccacgcactaagtgtgtccaaagggcaagaacgaatggaactggccgcagaccaacactgttgttctcactttcagtggggctgggctcacccccaggtgtcctttc

SEQ ID NO: 268933 - DNA, 122 bp, Homo sapiens
cggagctcaggtctcctaggcccagtgggtcgaagcccactgcgaaaccctgcgccatggcggctgggctagggcggcaccctacaggtccagaaggaatctgctagctctggagaggccag

SEQ ID NO: 268934 - DNA, 122 bp, Homo sapiens
acagtgaatcggggcagcagaggatggagccctctcctcctcctggggggacagatggcgcggccccccggggttcggcacccttgtctggtgccctgtgctgtggggctccaggagcccgc

SEQ ID NO: 268935 - DNA, 122 bp, Homo sapiens
ccagcccttcttttcttcctctaaagcgactccaaagtcagcagctgtccgtgagagtggcgtgggggctgctataaatagcagcaccctggctcctcttacagtccctgcggagggccacc

SEQ ID NO: 268936 - DNA, 122 bp, Homo sapiens
aaaaaaaaaaaaaaaaagtaaggcgggcccaggctgctactgcgcgagcccagccaggcccggcccacttgctcagagcgtggccttagggggaggcacgcctccaattggcgcgaaagtga

SEQ ID NO: 268937 - DNA, 122 bp, Homo sapiens
cctggctcttcctcagcatcgcctcctgtgggcggccaggtgggcaggtgggcaggtgggcggccaggtgggcaggtggggcctcttgggtgagcccaacactagtgattctgttttcagaa

SEQ ID NO: 268938 - DNA, 122 bp, Homo sapiens
gaaggagggtagggatgccgggggccactcctgcgtggtgcgagtgggaacgcgcgcgcgcgcctgggtgtgtgttgttagctgatatccatggcagctgcagtggcagggtgcgtgtgcgt

SEQ ID NO: 268939 - DNA, 122 bp, Homo sapiens
gtgtgcgctccccgggaccccggcctgggccacctggcccacatcaccactggtcacacacgtctggctgagcagccagcaggcccttctcggactctccatgctcaccatcaggcccaggg

SEQ ID NO: 268940 - DNA, 122 bp, Homo sapiens
catctggcctgccgcaaggggaatgtggtcctggcgcagctcctgatctgggtaggtggtcggcacgcctggcagaggacggggccacaggaggcactctctgctttgttctgcttccgtgg

SEQ ID NO: 268941 - DNA, 122 bp, Homo sapiens
cacaggttccgtggtcctcagggaagaaggtcaccggcggcgggggggggggggggggaacggtgtggccccaggatcacccacaggaggccccaggtgggcaccctgggcctgcccctcct

SEQ ID NO: 268942 - DNA, 122 bp, Homo sapiens
ggcgggcgcgcctgggcagcttcggggcgcgcggttggacccgaccaactccgaaaacggcgagcgcccgaacgctcagtaaaccccagccgacccgcaccacagaacttcccgacccggga

SEQ ID NO: 268943 - DNA, 122 bp, Homo sapiens
ggcgctgcgcccctccgagcccgcccggccgcgctctgcaaaccgatgctgtttaattaacgtgcaaattgagtagattaaatgactctaaataattagccacagatcctacaaacaggata

SEQ ID NO: 268944 - DNA, 122 bp, Homo sapiens
aggggcgtgggggagttactgagcatgcgcccgagggtgtttcggggcgtccgaagcgggcgtgctccagcctgctcagcagcgagtggttggaaattagcaaagtgagagggtgcgtggcc

SEQ ID NO: 268945 - DNA, 122 bp, Homo sapiens
atgcagggagacccagcctgcgggaacagttcccgatgtgctctctgcacatccacaaagcgccccagctacgtcgctgggcagccagttgaccacggccaaacccgtagatggtccagatc

SEQ ID NO: 268946 - DNA, 122 bp, Homo sapiens
ctctggcctcggtattctgtctctgtgctttcctgggtggtgtagcatccagtgtagcatcgttctgggcttgagagcaagcccacattcaccctttgggattttaattttaagcacatttt

SEQ ID NO: 268947 - DNA, 122 bp, Homo sapiens
ggcggttccttcagtccttgaccttcgcagaacgtagttcagatcctcaggcccagcaagcgcccctctgttggcggccgggggccgcggggagttcgcccctgtgggtctgggcccaaggc

SEQ ID NO: 268948 - DNA, 122 bp, Homo sapiens
atttcccgctcacctccacctgcccacccctctctcctgcacagcactccacagtcacctcggctagtccttgaccatcacagacagaccgtcaggcctgggaaggcagagctgaccctggg

SEQ ID NO: 268949 - DNA, 122 bp, Homo sapiens
tatcaagctgacccccaggctcagcaaggatgcctacagtgagatggtaagtgaagcaaacgggtgatgaggagcgcactcccatgggattgcgaggacctctccccttttttccttctcag

SEQ ID NO: 268950 - DNA, 122 bp, Homo sapiens
gctgacctcgaccccaccacctcaccccaagcctcgcgactcgggcccgtgtcctaccaacgaggccactcccgctcggcaccctcggtcctttattgttgactcgaagctcccaaaatggc

SEQ ID NO: 268951 - DNA, 122 bp, Homo sapiens
ggactgcttgagtccaggagttcgaggctgcagtgatctatgactgcagcactgcactcccgcctggatgacagagtgagaccctgtctctaaaaaagaaaaaacaaaataatatttttttc

SEQ ID NO: 268952 - DNA, 122 bp, Homo sapiens
taaatatttacagatgtcaaccagagtctctgctgtatgtccctatcattgaggttcatccgtactgtctctgtattggaattatggtcatatcagactaagatcactagagatctaataaa

SEQ ID NO: 268953 - DNA, 122 bp, Homo sapiens
taatgagagggaaggaaaggaaaaaagtccctccctaaggaatgcgggtccgggagcctgcggcatggaggtgcacgggagactctgcactctgacactctgaccccgcgctgtccccacga

SEQ ID NO: 268954 - DNA, 122 bp, Homo sapiens
ggacctgaccaccgcgggcgctgtcacccagtgctaccgagacatgggcgcccggcaccgcgcccgggcccactccattcagatcatgatggtggaagagatcgcggccagcaagtgacgcc

SEQ ID NO: 268955 - DNA, 122 bp, Homo sapiens
actctaggctcagctcccgcagccccgccaactttccgatttcaaacctagtgcacttcccgccacccgcctccaggcgcaggctggccttctgattggccgatagcgcaggctctccttga

SEQ ID NO: 268956 - DNA, 122 bp, Homo sapiens
tggtcccagatgcatcggctcctccctgcacctgggtcctggcagccggcacagcctccccgcaatcacccaggggcaaaacgggcccctccttggagaactaccgggaagctaaggctgca

SEQ ID NO: 268957 - DNA, 122 bp, Homo sapiens
caggaattcacagaattgtgcccgcggaacaaagcgtgccatgcagggtatgggatgaggcgcccgctctggcctagaggtgggggttagattcctccccggcctctgctgggcggtgtgaa

SEQ ID NO: 268958 - DNA, 122 bp, Homo sapiens
aaaccatgaggtttcccagaaaggctgccatttattaaaatgagttaattaatagactcacggactctttcagggtctagtctgaattcactcacaggaaactaaacagactaaactctttt

SEQ ID NO: 268959 - DNA, 122 bp, Homo sapiens
tccggttcaccttttcccgccctagggcacttccggcttgaaggtcattagcctaagatacgtgggtaatcttgagcatctggggcaaaatatgattgattttattttctttttaaatacaa

SEQ ID NO: 268960 - DNA, 122 bp, Homo sapiens
ccgggagctcagcaagatggcgcagctcactgagctcagtgtggccttctccacgctgaccgggaagatcccgacgctgcttgggtgagtcttggggaggggactgagggcgggctggtggc

SEQ ID NO: 268961 - DNA, 122 bp, Homo sapiens
acacaagcccctggtcttgtgtggccctcctgggtctggcaagaccatgacactcttcagcgccctccgggccttgcctgacatggaggtaaagaggccaggaggtgggcagcagacctttt

SEQ ID NO: 268962 - DNA, 122 bp, Homo sapiens
ctcttggctcaaataacactctgctcttctgtattcaggtttctctttttggaaaaattacgtggcaaagaccagaggtatgggctagacagacagaagctttaggtcctctgcaaggtgga

SEQ ID NO: 268963 - DNA, 122 bp, Homo sapiens
tgaactccagagctcaagcaatcttcctgccttggcatgctaaagtgttgggattgtaggcgtgagccaccacacctggccccaatgtcctttgtttaaagatggagagggggcaaatgggt

SEQ ID NO: 268964 - DNA, 122 bp, Homo sapiens
tccagctgacactggacctccgcctggggtcctaagttggagcccggcggaaatatgccccgtgggggaaccaaccgtggcatctgccaagcaggccggaagggtccaaaggcagggcctgg

SEQ ID NO: 268965 - DNA, 122 bp, Homo sapiens
gtgaacgcaccagagcacctttccccgatgtgtgctcttgcagaaccacagtgggctctgcgtctactggccaggttggttcatcgatgtggacatggccaggtgaacttgacgccctgtca

SEQ ID NO: 268966 - DNA, 122 bp, Homo sapiens
cactgtcagggttcccctagttcatgaacaatgtcaataaggtagaatgctctggaagaacgggaccaggtatgaagttgggagtcagggagggaggacagatgaagagaggaaccaaagac

SEQ ID NO: 268967 - DNA, 122 bp, Homo sapiens
atgaaattagaagattcacaaatataaacttagtaattaggaagctaactctaggccagacgcggtggctcacgcctgtaatcccaacattttgggaggccgaggtgggtggatcacgaggt

SEQ ID NO: 268968 - DNA, 122 bp, Homo sapiens
cttctcagcctcttgagtacctgggactacaggtgcatgtcactacacctggctaattttcgtattttccatagagatagggtttcaccatgttgcccaggctggttttgaactcctgggct

SEQ ID NO: 268969 - DNA, 122 bp, Homo sapiens
ctggtaatgacttcttagtgaccactgtctgctcgcagtactagcgcttgccttggaacgcggcaggccctgggatcaccgatgctccgccgcggtctgagatcgctcccctgcgcgtatcg

SEQ ID NO: 268970 - DNA, 122 bp, Homo sapiens
aggtgctcacctcggggggcaaatacggggggttgttggctttgccccctctgttccttccgttcttcttctttccctttggccccccgcagccgctgctgctgccggcccccctagccttg

SEQ ID NO: 268971 - DNA, 122 bp, Homo sapiens
cagcgggggcagacgccacatggcaaagagcagagaagcccgggaggtgtgaggagtggccgacctggcctcagcgcatctgggcactgggcgcaagatgaagcttcagggggcagatgtga

SEQ ID NO: 268972 - DNA, 122 bp, Homo sapiens
tgccgagctcccgaagccctgtggcggctccgggcaagaactaagggcggcccctgcaagcgtacctgctccgccggctccgcggggccaacgaagcgtcccggaaggatccgggttcccgg

SEQ ID NO: 268973 - DNA, 122 bp, Homo sapiens
accatgttgtttccagccatcttcacagattggctgcctcacccacagcacacagcatggcgtggacagtcccaggacttaatgccttggctttcttgctccatgtcctatgttctttctcc

SEQ ID NO: 268974 - DNA, 122 bp, Homo sapiens
gtgcccatcagggcagccttgcagaggcatctgctgaatctggactttcactcaacagcccggtctgctcctccgtccctcctcatcgattgcaggttgagtccatctttggtaaccaatca

SEQ ID NO: 268975 - DNA, 122 bp, Homo sapiens
gaccgaactggatcattttcaagtaaaataggtagcaaggcaaaaagaccgcctcaaagtcgctgcccttggggctctgccacttgctttacaggctaggaacggacaatgccgggaacccg

SEQ ID NO: 268976 - DNA, 122 bp, Homo sapiens
caccttctttccagccagcttcgggggcagggggcgctggaaagctgcgggggaatcgtgcgaaaatgagggctctaccgccaccggactccggaccagagccccgcccagcctcacaagtc

SEQ ID NO: 268977 - DNA, 122 bp, Homo sapiens
ggcccttttgagctggaggctccccaggagagggagggaagaaggcattccagggggaagcgatgcttgtaccaagtcatggagcgacatgagaaggctggaaaatagggagggaggggctg

SEQ ID NO: 268978 - DNA, 122 bp, Homo sapiens
aaggagtacaaattaaacaacctgtggaagttcaagtaaaagaaagcttatttccagtcacgagaagttaaatgtgagctgggcagattcataatagagaagtaccgtttttttgtttgttt

SEQ ID NO: 268979 - DNA, 122 bp, Homo sapiens
gtgagtagaatcattcaagggctcagcatgagtagaatcattaaagggcctggcttcagacgtcttagcctcaactgaaagagaaaagtaaatgttttctaaccaacaatttaccttataca

SEQ ID NO: 268980 - DNA, 122 bp, Homo sapiens
tgtcccctgccgtggcccccacatgtgtgtcggcgggcgtgggggtggttcttggcatcacgacgagttgtgggtctctgtgtcctctccgccggggctgtcatccctccctgtcctgccgg

SEQ ID NO: 268981 - DNA, 122 bp, Homo sapiens
tctcaaaagatgctgctgcctgctcagagacctcgctttagatgtgacagtggagagactcgcacctgccagggctgccagctgtaccccggagcacggagcaggcaggctggcaccaccag

SEQ ID NO: 268982 - DNA, 122 bp, Homo sapiens
agggggcggggcaggaagcagccacatccggttccagattcggctctcagaggcttccggcgccgagaccgagatccccgtcggctcggtgtatcctcgctggtggagtaccctctgcttga

SEQ ID NO: 268983 - DNA, 122 bp, Homo sapiens
gtgaagagagactaggaaacggccctgtgacttctcatgcccgaaacccactcctcaccacgtcgttcacctaaagccagcgccgctgcagcccctaacttctggtcacgtgtcccaacgga

SEQ ID NO: 268984 - DNA, 122 bp, Homo sapiens
ccttctttcgaggtcgtggtgttttgtttgctgttttagctgtggtgtgtgtgtaccactcgtacctttcacaggaggacacctcatctgaataccagtcaggacctgagacgcgttgagcc

SEQ ID NO: 268985 - DNA, 122 bp, Homo sapiens
tcctcttctctgggccagctgcgccggaggccccgggaagagtccccctgctctggcccgcgggacctgctccccagcctggaaagtctgagctggccccgctgccgggacaccctccccag

SEQ ID NO: 268986 - DNA, 122 bp, Homo sapiens
ggtttgcggcggcgccgctgccggctaacgcggaggggcgcctggaggcggcgtggcgtccgctctggctccgactccggctctcgctctcgcttctagcccgcgtgcctgcgcagtcccct

SEQ ID NO: 268987 - DNA, 122 bp, Homo sapiens
cccaacaaagatcttcagaatgcccctctccaccttcattctgaccaaacagcaatgatccgtttcaaaattctctgaaatcccatatcaaccccaaatacccagagagcagcataaaggaa

SEQ ID NO: 268988 - DNA, 122 bp, Homo sapiens
actttctttaaagcaaacggtgcctctgaggctgagtagggacctggggggcgggggattcgggggaaggaggatctagagttccaagaatttaggcttccaaatctcggctaggccctact

SEQ ID NO: 268989 - DNA, 122 bp, Homo sapiens
ccctgaccccacatcccctagaagaccttttttctgagcctcgctgctcggatttcttctcggcgctccccggtggtctcttccattatggtccccacctcagaaattttttttaaccgctc

SEQ ID NO: 268990 - DNA, 122 bp, Homo sapiens
cacgcgtttcttataagcccaggagccaatcagaggctgcgtcgggaggaagttggagcgcggacatgccccctctacggtgtccttgcaaagtgtggcagtcactacaggtttgaggaagg

SEQ ID NO: 268991 - DNA, 122 bp, Homo sapiens
ctggatctccacccaatgacttccacactaaattttcccaattctcgagaaccaccctcacgggaatccattgcatgagtgttttcttctaaaccctgtgaggttttaatgactgggcctca

SEQ ID NO: 268992 - DNA, 122 bp, Homo sapiens
cctcggctggaaccttgtcggggagctgggttgtgcatgagcctctgaccatcccccctgcggcccccaggagagacgagagttcacggagccctgcacggcgggggcctggccggccgagg

SEQ ID NO: 268993 - DNA, 122 bp, Homo sapiens
ctcacgccttaggtagggagcggggcggggtgaactccgagccccgccttctcgggcagtcgctacggtgcgcgtcgaggcccagccagcaccgcgcgttgcgttcccgctaccgccgggct

SEQ ID NO: 268994 - DNA, 122 bp, Homo sapiens
ggggcccaggttggggctgtggtggctcggggaggctttgtggcttctcaaaggtagtgccgacagaactggtaaacttgatggctcattgcagctcttggggtccagttctcagcagtgga

SEQ ID NO: 268995 - DNA, 122 bp, Homo sapiens
ctgcaggctaagggggaaaaaaagtgggtctccggagaccagggggtgagtgcagggggacggggagggggcagaacttctaaggtgtcaactcagcccccggatggagtgtcctggagtgc

SEQ ID NO: 268996 - DNA, 122 bp, Homo sapiens
tgttcatattggattttgcctgttcagatctaagtgggaatcagtagtttctttgtttgtcgccatggaaaccagtcagccaatctgaatggctcttagatcatacagaacgatgcaatgct

SEQ ID NO: 268997 - DNA, 122 bp, Homo sapiens
atgctggagggacggccgcgtggggcttcagaaaggctaggcgccgaggagtgtaagcagcgtgtgcccatttaaagacaaaatcagtgtgtttttcaggtttgtacgaaatgaagttgtag

SEQ ID NO: 268998 - DNA, 122 bp, Homo sapiens
gtcttcatgtcttggaaacttacagaaagttttctctgtataatgggtaaggcagcaaaacgggagttcctagtacatcagtcatgtcactgtgtgacaaatctggggtttatctgaggcaa

SEQ ID NO: 268999 - DNA, 122 bp, Homo sapiens
tcccctacatctttggcacccaacacggtctccttgaacccaggtgaagttacacctgagcgtggtcgttgtgaagaacggtctgtccaggaactcccgagaacgtgtggtcggccttgcgg

SEQ ID NO: 269000 - DNA, 122 bp, Homo sapiens
ggaccgtccccctgaggagcaaggagtgcaggaccggggctgtccctccggggccggatgcgcagagcggggacctttttcccgtggcgggggcgcagggtgggggacccctaagaagtgca

SEQ ID NO: 269001 - DNA, 122 bp, Homo sapiens
ctgtctctcgggctggccaggcagctgcaacctgcgctcaggcagctcttaaagacatagcgtgcccctccccgggggccgcctccccctctgcaccggccggacccctcgtcctcccaccc

SEQ ID NO: 269002 - DNA, 122 bp, Homo sapiens
tccgtttttctggggagtattctcagattgcagaccgcgcattccactcagagcgctgggcgagtgcagttccattcgcttggcagtcagggcggcctggctctcctgtaggccgggcacat

SEQ ID NO: 269003 - DNA, 122 bp, Homo sapiens
tgtgcattcagggctggggaggtggagctctttgtaaatcagaatggcagccccagtccccggggacacactcaggccctgacctccccggagggtggagggaatgttgccagtggccattt

SEQ ID NO: 269004 - DNA, 122 bp, Homo sapiens
cgcatcgacgcaggacgcacttccgcatgcgccgcactcccggccttagtcgggtgcgcgcgtgcagggctgtttccggcttagactcagtggaccggaatctggccagcgggtgtacctgg

SEQ ID NO: 269005 - DNA, 122 bp, Homo sapiens
ctcggacaccgcgggctggaggtggcgcctgcactgcgggcgcggaacctctcgggtgtccgcggctctgccccaggcttactcggccactgcaggaggccgcctcgtccagcaggaacccc

SEQ ID NO: 269006 - DNA, 122 bp, Homo sapiens
cactaggagctagattacactaatgtctgttgtgaaagtaaattttaacagcagctgttacggtgattatgataagactaaactaataatagagtatatgctaacagatcagtttacaaaaa

SEQ ID NO: 269007 - DNA, 122 bp, Homo sapiens
gtgtttcaataaaaaggattatatctgtcttgaccattgccacagcattgatgaaaatcacgtactccatccaggacaaatcccacagtcgcctcactttccttctctcaacattttatatc

SEQ ID NO: 269008 - DNA, 122 bp, Homo sapiens
ccacatttgcaaccttggccatctgtccagaacctgctcccacctcaggcccaggccaaccgtgagtaccctgccccactgggctagtccctggcctgccagcttcagggagaggggtcttc

SEQ ID NO: 269009 - DNA, 122 bp, Homo sapiens
tggagcctaagcaaatctgaaaaccaagcagccccaggcaactgagcccagcgtagcaaccgacgccggggcctgttgctaagggaaaagaaagaaaggacgtggtccgtcagctattgctc

SEQ ID NO: 269010 - DNA, 122 bp, Homo sapiens
gggggctgcctattctcacttctctccaccagaatctaagtcaaggatagaagctgattccgcacgaagttagataaactatcttgcatttaatcaatcattacaaaaagtattcatgccac

SEQ ID NO: 269011 - DNA, 122 bp, Homo sapiens
catcccttggaaatgggtacacccccggcatattgagggggaggcacgcagaggaacaaacgtgataaatgcatccatgggctgcaaatcgggggccgctcggacagctgtcccccactcct

SEQ ID NO: 269012 - DNA, 122 bp, Homo sapiens
atttcttacacagagggtaaaacgagctctcctgcattctcacctaactccagtcactcacgctggtatgagtatatatccactgtttcagaagcttccctgtttccactgcccttgggggc

SEQ ID NO: 269013 - DNA, 122 bp, Homo sapiens
catgccaaccttctgtaagtccagcatctgataggcagtggaccagtggattccttcttgcgaagcaacattatgcagtaccacacaatgatcagtcagacatcctctgagtccttggactc

SEQ ID NO: 269014 - DNA, 122 bp, Homo sapiens
caggaggaaaatcctgcagtcagaaaggccttgctggtggaaggtggacaggagaggtggcgagaagtccaggggctctagtccacaatgagatgacaaggccctgagccaggagagttgca

SEQ ID NO: 269015 - DNA, 122 bp, Homo sapiens
ggccgtgggagaggagggacagagacaggccccccgctgacgccgtgtgtgaggagggggcgctccagtcactagaacggtcttggtatttcacataaaatggtactgggacaagtggaaaa

SEQ ID NO: 269016 - DNA, 122 bp, Homo sapiens
ccactctcagtgactatgtaactgtgtcagggtgagttggtgcagtcttttgtcttatcacgtgcctccatctcctggaggcagggtgcccaaggagggcagggaggggttcttgtgctcct

SEQ ID NO: 269017 - DNA, 122 bp, Homo sapiens
tcattgtagacgcggacggacggcacagtaatggggtctgtgggaggctgtgctcacacccgcagctgcaggataatcgcctccttcagcagggctgggggagctcagtcctgcctttctcc

SEQ ID NO: 269018 - DNA, 122 bp, Homo sapiens
tgggcacaatccagagtcatgaatccttgatatgcggctcaacagagaggcacaggacagcgtagtccctttcccttcaccagtttcctgcctgcctttctattctgggaccactgtacaga

SEQ ID NO: 269019 - DNA, 122 bp, Homo sapiens
gcacagcacacgggcagaaccgcacgctacatcctcaggctttgctttggggccaagaagcgacccccctacagtgacagagtgtggctccgggccggacgccccacgctggcctcccgttc

SEQ ID NO: 269020 - DNA, 122 bp, Homo sapiens
gaggagggaagcttctttcttggagggcttttcaaggttgtctcttcaaaggggcaagtgcggatggcatagcccccatgtggtctctcccttgctagccctggggagttcttgctttctgt

SEQ ID NO: 269021 - DNA, 122 bp, Homo sapiens
gcggcccttccacccacgcactgtggccctggaccccgaccgcacgcctccctgcctgcccggtgaccccgattactcctccagcagcgagcagtcctgtgacacggtcatctacgtggggc

SEQ ID NO: 269022 - DNA, 122 bp, Homo sapiens
cgccctgagcatggggaccccagggccggaggtgcgacctgagcatggggatcccggggccggaggcgtgacgtgggtctcctcatcccgacctcagctccagacatgtcaccatctccccc

SEQ ID NO: 269023 - DNA, 122 bp, Homo sapiens
attagaaataaggctggtaatattttccactgaggatttgactctgctgcagaccctgttcgctgactatctaccaactgttcttccttgctgctccccaacaaacctcagatactctaccc

SEQ ID NO: 269024 - DNA, 122 bp, Homo sapiens
ccggggcggctgccaacctcacctcttagtcaaccagctgtttgacctgtgaattaggcccgtaaaagacttcgtttcttgagaaaataagattggagtccgtcgtaggaaactggaaccga

SEQ ID NO: 269025 - DNA, 122 bp, Homo sapiens
agctctggcagctcccaccaccctcgagggaccggcccctgcctcctcccacaagcaggccggattccaggaattgcccaaacaataaaataaagcaaacctgagacacccctttttgctac

SEQ ID NO: 269026 - DNA, 122 bp, Homo sapiens
cagttaatccctcccttcccttttcttcgtgctctttggagtaatacggaaagttgttaccgaggaaacggtttcctgtgcctctgcgagccctttccctacgggcggtggtggggacattt

SEQ ID NO: 269027 - DNA, 122 bp, Homo sapiens
ctgtctatgctcagggcagcctgcgtgcagcgacgccgcctccagagcgcaccccctgggcgggagccaggagaataaggagaaaacctgaacagggcctctgtggctaaaggaggccagaa

SEQ ID NO: 269028 - DNA, 122 bp, Homo sapiens
gtgggttaaaaatagctccacagagtgagccttagtgaataaaaaaggaggtaagtccaccgaagttctgattttaagacaaagatgtggtttcaaatgtgtcaggtaagagacttacatag

SEQ ID NO: 269029 - DNA, 122 bp, Homo sapiens
tgcccttgaagtgatttgtcaggcggcccacgggtgacagggaggatgtgcagcggggagcgggggcgggacatgccggggggagcggagagggctagaagagaggggaggaaggggggacg

SEQ ID NO: 269030 - DNA, 122 bp, Homo sapiens
tgtgtgtggcagacactgttctaagtgatttacatgttttatctaatttcttctttataacgacactgtgagaaggctctagaatgatcctctttatacctgaggaaactgaggcacatgag

SEQ ID NO: 269031 - DNA, 122 bp, Homo sapiens
agggaggctgtcctgacgcgtcatcctgctgtgtgggtagctggcaccatctggcttcaacgctggctcacaggagagattttcctctcggagaatgaagtttaaacaggatgagactcgca

SEQ ID NO: 269032 - DNA, 122 bp, Homo sapiens
acttggccgcagcgccaccacgtgttctcaggcgtctgcacattcccccggccaggcatgcggttcagtctctgccttccacacaggtctgctaagagctcaggaagcgccatgcactgtgc

SEQ ID NO: 269033 - DNA, 122 bp, Homo sapiens
gccacaaccctccggtagcggtagcgtaaccccgttcggtgatccagccgcacagcgcaacgggtacaaagaaccccactggctaaggccgacctaccagggcttgggggaggggagcggaa

SEQ ID NO: 269034 - DNA, 122 bp, Homo sapiens
agtaatccacccacttcggcctcccaaagtgctgggattacaggtgtgagccaccgcacccggccccatttttgtaaatatggttttttggtaacacagtcatgctcattcattttttgtat

SEQ ID NO: 269035 - DNA, 122 bp, Homo sapiens
ggcaggtgtggagaggggcggagctgtgctgccctgggcgagggagcctcccgctctggacggttcgccgcccctgccccaggaaggcgctgcaggatctgggtggggaaggggagggacga

SEQ ID NO: 269036 - DNA, 122 bp, Homo sapiens
tgcctctgcaggtcagctatggcactgataacctttccagcagacaaatacatgtaacatcgcctcatctaattaaaagctcagggaggtgtagaaaaataccagcacattgaatccaagca

SEQ ID NO: 269037 - DNA, 122 bp, Homo sapiens
gagatgtttttgctgacagtcatggcctatgacaggtatgttgccatctgtaaccctttgcgctaccttacagtcatgaacccccagctatgcctttggttggttcttgcctgctggtgtgg

SEQ ID NO: 269038 - DNA, 122 bp, Homo sapiens
ctagtgggttacattacacttattctcagattttatttctcagcccggttcggtggctcacgcctgtaatcccagcactttgggaggccaaggcgggcggatctcttgaggtcaggagttca

SEQ ID NO: 269039 - DNA, 122 bp, Homo sapiens
aattgggacacagccggctggggactgctgggagggccggaccctgcgagaacgggtgggcgtgtgcccggtgggcgcgggaggggcccgggctgcacgagcgcgcgtgcgcgtcggaactg

SEQ ID NO: 269040 - DNA, 122 bp, Homo sapiens
gacagcgtcgagattgctgctttcggttccccagcgggtggtgaggcagaaagtgcagggcggaatgaggagccccagcacctcagagctgtcgggcagtggcggggaagcaaagcacagga

SEQ ID NO: 269041 - DNA, 122 bp, Homo sapiens
ttttaatggtaagtgtcttggcggatttagactgagagccttgccagaggccgatggaaacgggggtccctccttgctgtctccagtgaggttctccgtgaggcactcacgtcggtagctgg

SEQ ID NO: 269042 - DNA, 122 bp, Homo sapiens
gaagcccagggtagtctttctgcatggaatccacatgctgcaacacatccctgacgaaaacgtggaagtcagacactaccatcctctccccttcgctctgtccgtggccaactggaaaggaa

SEQ ID NO: 269043 - DNA, 122 bp, Homo sapiens
tgcacagttggatgtggctccttcccggccacttctcagccttgctctggcctgccacagcggtgcccacagagtcttggcggaaagaacagaacatcccatggctctgagccaggtccctg

SEQ ID NO: 269044 - DNA, 122 bp, Homo sapiens
cgtagggttcctaggttctggcttcactgctctggaggagggtgttgacaatgagtggcacgttgcctgtgcctttgagcaagagagcttttcaaaagcagagatacaggagggttcaggat

SEQ ID NO: 269045 - DNA, 122 bp, Homo sapiens
gaaaaagtagagcaggctaagggacagtaggagtgctgggggagggaggcagggactttgcgatttggtggagtatagtcaaggtaggcctcactgagaagagggcttgaaggaggaagaga

SEQ ID NO: 269046 - DNA, 122 bp, Homo sapiens
gtgctagctgagtctgtgtagtcaatagaaaaactttacaagatagtgtcaggtgaaaaacggcaaacaaaattgtgcttcccatgattatagccgtacgaaatatgtatacttgcatgaag

SEQ ID NO: 269047 - DNA, 122 bp, Homo sapiens
acatgcagctgcagtgacctgatggcttgcagtaagtagagcgtccgggctggcttcactcgctcctctggcagtctgtgctgtctgttgtttgaggcacctgactcttctccacatggccc

SEQ ID NO: 269048 - DNA, 122 bp, Homo sapiens
agtcccctaattccaacgagaaaatctgcttttcccatctccctgaatctctactatctccgcctttttaggaaggtaatgattaaaaaatataggatgatattcagggaaacaaaccccag

SEQ ID NO: 269049 - DNA, 122 bp, Homo sapiens
gaggagcccaagagcagcagaggctcttcaggaaatccactgaggcctacacacggagttcgcttttagttttctcttttagaagtcaagggaacagtgaagcccatgccgggggctggccg

SEQ ID NO: 269050 - DNA, 122 bp, Homo sapiens
gtttgaggttgaggctcttatttcgagccagggctaggatacggcctggagtccccacgacgatatgcgggcagttcttcttcagcacctcttcatccttcttgatagacagaccaccaaaa

SEQ ID NO: 269051 - DNA, 122 bp, Homo sapiens
ggcctgaggtccacctcacatgccatgtccagagggggtctcaatttctcctcctcacttcgtctcgttttggatatttacgtcatctctctgtatttcgtgcgttctgtcaggcatctgaa

SEQ ID NO: 269052 - DNA, 122 bp, Homo sapiens
atttcccatggctggcatttatggaaacaaccgctggtatgtgaaaaacaggtccgtcaccgccgtcacgacggccagagattatacccgccgagatgcccgcggcccagggcctacaattt

SEQ ID NO: 269053 - DNA, 122 bp, Homo sapiens
accccgcgaggcggggactgagagccagtccctcttcctcccgtggcttaggacccccatcgcggattctaagatccttaggaccgacctggaggactgtgggtattaggtgtccaagaaga

SEQ ID NO: 269054 - DNA, 122 bp, Homo sapiens
agccgaggcggaaggggcggggtccccgggcaccctgagaggtggccgcagggcgcctgacgcgctgggcataacctccgcagaccctgaacatctaccagaacctgaaccggcggcagcac

SEQ ID NO: 269055 - DNA, 122 bp, Homo sapiens
aaccaaaccagaccagacaccccctcccgcggaatcccagagaggccgaactgggataaccggatgcatttgatttcccacgccactgagtgcacctctgcagaaatgggcgttctggccct

SEQ ID NO: 269056 - DNA, 122 bp, Homo sapiens
agatggggtgcggggacggagacaaatgacggcctttgtaatttcttttctctctttttccgggggagggggaactcgcagaggagatttaaatatatgcaaaattgtttgcgggctggggg

SEQ ID NO: 269057 - DNA, 122 bp, Homo sapiens
agaattctgtgactgaattccagggtagaaacagcacctggtgtttttatgagtatcattcgccagctctccaacctctgtggtgaatggctgggtaagagaaaaaacagtgggcagggaat

SEQ ID NO: 269058 - DNA, 122 bp, Homo sapiens
aagtgacccagcagaaataccagagaccggagacggaatggcccagggtcagcctccacccggaaccggaggatgcagcgaagacgtctccttgaagtgggatacggatgtgaaccggccca

SEQ ID NO: 269059 - DNA, 122 bp, Homo sapiens
cagcgcagagtcctggggtcaccagagctcgtactaggacatcgtctccccatttaacaccgcctccggtcccatctgagttgcaagtggtggggatgtggggctccggatcaaagtccccg

SEQ ID NO: 269060 - DNA, 122 bp, Homo sapiens
gtttacagaaaaccagatttactctgatggtcaaaaatatggtagtatttctgtctcattcgaaggcctagagtttgtgtctaggcagaagttactgagtatgtccccttataactaaatga

SEQ ID NO: 269061 - DNA, 122 bp, Homo sapiens
gctgttgatttcaacacacaaattctggtggtagatgaaagcaaagcaagtaagtttctccgaatccctagtcaactggaggtagagacggactgcgcaggttaactacagctcccagcatg

SEQ ID NO: 269062 - DNA, 122 bp, Homo sapiens
aattttagaactgttttttccatttctataataatcagttactgggagtttgataggcaacgcattgtatctatagatcacattgggtaacatggacattttaacaacattactcttccact

SEQ ID NO: 269063 - DNA, 122 bp, Homo sapiens
ggatcacgagggatgcctctctgcggaggcgatgcccacatcgaagctctcaggatgagacggaaccagccgtgtgggcagctgtgggaggacgcagagatgggcaaatgtaaagatgcgaa

SEQ ID NO: 269064 - DNA, 122 bp, Homo sapiens
aggagggagaagctgaggggacacgaagttctctggagaccaccagaggcggggaaggggcgagggtacagggactaagacatgaaaataaaaagcaaaatactctgcaatcagcctgaatg

SEQ ID NO: 269065 - DNA, 122 bp, Homo sapiens
tctcctggagatcagatgttggcgtctgggaaatgaaaggcggattagacaggagaggagcggtccgaagtctgacagttgggaaggtgggggaatgtaaacccttcctcctcgaggattcc

SEQ ID NO: 269066 - DNA, 122 bp, Homo sapiens
gcgggttagcgttttctcccatctccgcgcctcacgccccttccccgcccccgcacgagacggccctcggccccggcgagcgacttatccaaccccgttttgtagctgtgcccacaatcacc

SEQ ID NO: 269067 - DNA, 122 bp, Homo sapiens
cgggccccttttaagcgcttggagtcactaggaatgtaccaacggccctcggagggaggacgaggcggagagccacccaagaaaggtggcggaggcggggagaccctgcgggcacggctcac

SEQ ID NO: 269068 - DNA, 122 bp, Homo sapiens
aagcccagcccagcaggggccccgacagcccctcgagtgagttgtgctgcgtgaccagggcgggagcctgagtggattctgcgcagaaccaatcgagcagatcccaacagtgaaatcacggc

SEQ ID NO: 269069 - DNA, 122 bp, Homo sapiens
cggggccgttgttgggggcgctgaggcgagtgaggctggagctgggagtggggggctcgtcgccttcgtctctgggccgccccctccacctgcggaggcgattgtaaagggaaggggggaat

SEQ ID NO: 269070 - DNA, 122 bp, Homo sapiens
cgacatagatgttgttctgcaggatttatagttaggacccactcaattctccaggactcccggttttgcccccctcccgctttgccttggtgggggtggggattgggggagtggggattgcg

SEQ ID NO: 269071 - DNA, 122 bp, Homo sapiens
caggatgtccaggcctatttctacccatggccggggtttcctaagggtggggagctctgccgagagctcctgcggcacccctagtaccctcctgtgtccctggctcggcactgccaccatct

SEQ ID NO: 269072 - DNA, 122 bp, Homo sapiens
atccgctaggagccgcgtctgcactgcttccgcggcccgccgccgggagatgtgctccagcgccagccccgcctcccgcccgcccctgtcggcccctcgcgccgcctccgctgcggcccgtc

SEQ ID NO: 269073 - DNA, 122 bp, Homo sapiens
cccgtgggccctcaggaggagcgtcggctggtttgactgtggctgtcgttcctactccgacggtcccgtggcccctcagcaagagcatcggctggtttgactgtggctgtcgttccgactct

SEQ ID NO: 269074 - DNA, 122 bp, Homo sapiens
ccggcgggtgggggtgggagagcgaggggacggccgcctcccgctcctcccccgccagtgcgctgcctccgcgctggagcaggtcctccaccccgccaccgaagagacgccaccacctgaag

SEQ ID NO: 269075 - DNA, 122 bp, Homo sapiens
ccgttttgggctctgtccttcctggcggatgtgagcctgttgggagagatgctagtttctcgcctctcagcaggaaatgccacgggcagatttaaagtcacttggatcccagtgctttttca

SEQ ID NO: 269076 - DNA, 122 bp, Homo sapiens
cctgcccctgtagacctagggagaagcccttctcagctcagctcacctgtttgtaggcatcgaggaggaagctcttccagacgcagcgcagtccctctgaggtcagcatgcgccgccactct

SEQ ID NO: 269077 - DNA, 122 bp, Homo sapiens
gcttggaatcctgagaaattccggggtgcggccactatgcaagcattcctattctgacagcggggacaaatggagaggggaccttacaacctcctttggagaagaatatatgagaaactcac

SEQ ID NO: 269078 - DNA, 122 bp, Homo sapiens
tgaattaaaaaatctctaaaacctctaatataagaaaagttgatatgttgatctctttatcgtctgttcttggggacactgaacaagttactaaccaacgtcattggttggacgtggcctca

SEQ ID NO: 269079 - DNA, 122 bp, Homo sapiens
atagtagaaacttccaatttacaaataaggaattctctgggggttagaactgccatgtcacgcaaaaagggaaaaatcatctgtaaactggtacactgcaatgtgttaagtgagtcatgaaa

SEQ ID NO: 269080 - DNA, 122 bp, Homo sapiens
gtcgctgcggcctggcagtgaccatgtcggcgtccggcccctcggccggcgatagagttgcggctaaaatgaaaggacgcccagttacatttgcatcgtagataaagaaagagcatttagta

SEQ ID NO: 269081 - DNA, 122 bp, Homo sapiens
cagggggacaggagcacgtccagcccagcccagtcacacaaccaccctgccatgccagtgcgggggcccaccatcgcgtctcggggaaaggcagcttctcctgcacaggaatctaagcctga

SEQ ID NO: 269082 - DNA, 122 bp, Homo sapiens
cgtactccggcgacctccagatgttcccgacagtgcggccatctgcttagattgctggggcgcgcagggggagggggcagggatccgggatgcaggaagctgtgagcgaggccaactagagg

SEQ ID NO: 269083 - DNA, 122 bp, Homo sapiens
ctgggagggtgagggacgcgcgtctggcggccccagccaagctgcgggtttctgagaagacgctgtcccgcagccctgagggctgagttctgcacccagtcaagctcaggaaggccaagaaa

SEQ ID NO: 269084 - DNA, 122 bp, Homo sapiens
ttaattcctggactcaaatgatcctcctacctcaacctcccaagtagctggcactacaggcgtttgccccatgcctgcctctcaccccagtgtttccactgggggcctggtgtttacttccc

SEQ ID NO: 269085 - DNA, 122 bp, Homo sapiens
tgtggaaaaaatgtttggaggcaagatagtgactcggatctgctgtctctgctgcctcaacgtctcctcccgggaggaggccttcacggacctctctctcgccttccctcctcctgagcgct

SEQ ID NO: 269086 - DNA, 122 bp, Homo sapiens
tcccggggaggcgcggggctagcgtagcctccgccccgcgcctcgcgttaccactcgtcccgcccctcctcgtcgcctccgagccaatgggaaggctccatactgcagggtgcgaaggggcc

SEQ ID NO: 269087 - DNA, 122 bp, Homo sapiens
tttgacttagaagaagcttaggacagccatgcaaatactaatggatgactcccacaccaccgctcacaccccagtattttcaaatacaaacatcaaggcagagatagatggggagagagata

SEQ ID NO: 269088 - DNA, 122 bp, Homo sapiens
acgtgttctcctttaagagttaagaaacttgaaaccttgtttgcgcaacaatcagcgccgcggagccgccaaagtgtctagactggcatatgatgggaggcagccaatgactccgcggcgct

SEQ ID NO: 269089 - DNA, 122 bp, Homo sapiens
cttgctttgctgaaatccccgtggctccggtgacgtcaagagtctttctggataagggggcgaccggggcggttactagcgaatgttcagcaccgttatctacaagaaaatcaatgtctcta

SEQ ID NO: 269090 - DNA, 122 bp, Homo sapiens
ctgagaacatgagtctgtgctcttggatgaggggtcacctagagtctgtgactccaaagccgatatttttcctatatgataatgctttcaaatgtaaaatgtgtctacaaccaaaggttttc

SEQ ID NO: 269091 - DNA, 122 bp, Homo sapiens
tcccgctctcccggaccccgcagtcagtgtgggcagcaggcccagagtggtgcgagccgacggcggcgttagaaaggcggcgtcccgacgaacagagtgactcggcctcggctccccttcaa

SEQ ID NO: 269092 - DNA, 122 bp, Homo sapiens
gccgccccgcggctgcgcagcgccagcccggccccgccccggcccccgggaccccggccccgccccaccccgcccgggccccgcccagaccccgcccagaccccgccccaccccgcacgagc

SEQ ID NO: 269093 - DNA, 122 bp, Homo sapiens
ctgagagtcgtgggcatcagacttgccctttggcctgaggttattgcaggtcctgccccccgctgcagacacgcagttccacagagtctcgcttcccagggctctatccctccagcccctct

SEQ ID NO: 269094 - DNA, 122 bp, Homo sapiens
cctccttggccccttgcgtggcagggactgggtggggccaagggagcgcgactgtccctacggggtgcagacttactccttgctgccggcccggcgttaggacggttggaggggcgccaccc

SEQ ID NO: 269095 - DNA, 122 bp, Homo sapiens
ccttgtctgtttaacttagttcagtgaaatttttgcttggacagtttggagaaaagaaaacggtaatttccctcagcagtgtttataaaatgcttttgggaaattatcattattgaacattt

SEQ ID NO: 269096 - DNA, 122 bp, Homo sapiens
cctcttccagaaggccttccctaaccaccttctgctgcttccttcttattttatcactcacggttgaacactgcaaccattggagcacttgtttgtctcttccactagatcagggccttgca

SEQ ID NO: 269097 - DNA, 122 bp, Homo sapiens
ccgtgccactcaggggctggctgctgccttagggctgactgggctcataggtagggcctgcggtgcaagtttgtgataacactgcctgtaggctgcggttgttaaggcagagatttgaaggg

SEQ ID NO: 269098 - DNA, 122 bp, Homo sapiens
aagagtagcttaatatctagcaaaattgcatagatgaattcatgctttcacccaaaaatacgtgtggtgaaaatatgaaagagcatgcacgactattcagcacgattcataataccaaaata

SEQ ID NO: 269099 - DNA, 122 bp, Homo sapiens
gtggggagggcagccccgcccggccatggactgtgagcttgagcaaggcagaaggaggggcgccccaggctctgcttggcaccagcccacgagccacggcagagccgtccaaggcccagccc

SEQ ID NO: 269100 - DNA, 122 bp, Homo sapiens
gggaggaagggagggagctgaacacggaagtggtggcggcgcccagggaaccggcggaggcgatgaccgtgacggctgggttgggaccggaacgccgaagcggggttgggggtggcagaaaa

SEQ ID NO: 269101 - DNA, 122 bp, Homo sapiens
gaacttcagagaacttctaagaaacatttcccatctcttttaactttgtttccaaaggaacgtgaccttggtctacttcacagtccagacctaatgttggcccatttatacacacccttgtt

SEQ ID NO: 269102 - DNA, 122 bp, Homo sapiens
ggctgggagccgaagcccgaacggagccaatcacggacgtcgtttgtttgcggctcctcccggaaaaagccgatcagcctgagaaaccaattagaaagtgacgctgggaagccacgcccaaa

SEQ ID NO: 269103 - DNA, 122 bp, Homo sapiens
ccaccagcagcccctccgcgggtcccatgggctccgcgctcagaacagcccggaaccaggcgccgctcgccgctcgctgggggccacccgcctctccccggaacagcctcccgcgggcctct

SEQ ID NO: 269104 - DNA, 122 bp, Homo sapiens
gacagacacgaaatcgggcattggggccctcgcaggcagggtatctagactggcagctgccggtgcaggatattgccaaggactcggcatccggctcagctcaaggtggggacgaagacgtc

SEQ ID NO: 269105 - DNA, 122 bp, Homo sapiens
caattggtcctcacagctgtggatggcggagacccacctcaaagtggcacgacccaaatccgaatcaaagtcacggatgccaacgataaccctccagtgttcagccaggacgtgtacagggt

SEQ ID NO: 269106 - DNA, 122 bp, Homo sapiens
cgcccaactcccacccagatagccttactcttgccaatagagtaagggtccttatctgcacgtgttgcaaataaagcacattcgtcgttttgccacagttaggacgtgaagttctctgaatc

SEQ ID NO: 269107 - DNA, 122 bp, Homo sapiens
gttttggtgtcattggccatggcagttgaccacattcagctttgcaagtttcacagtccacgccttgtaggtggtaccaaaacaattttttaatacacaagtattttcaacatcttgcctta

SEQ ID NO: 269108 - DNA, 122 bp, Homo sapiens
gctgcgtagcgccctctgtggctccccagggtggagttctcactgctgcctggccacggacgccccttcatcctcaggagccaggcaggccccaccaccataccccttagcaaccagcttcc

SEQ ID NO: 269109 - DNA, 122 bp, Homo sapiens
gcatgacgggagttgtagttgagggggcctcgggaagaatctgggtgacgccttctggtccgggggcgggcggtcatagcgttacttggctgcaaggaggaggaactggcagcggggaggag

SEQ ID NO: 269110 - DNA, 122 bp, Homo sapiens
gtgagctcctttgatactgcttgggcaactaaagtagtgagtggcctggtcacttcaggccgaagcattatgattccaaccagagatgctctttgaccttctgtcccagggagtgagtgggt

SEQ ID NO: 269111 - DNA, 122 bp, Homo sapiens
ttggtaggaagctcacctggtgtgtgtaggggaagaccagcagccctagcttcttggccacgtaggctgtgtccacagcaaaaaaatacttgagtttgctcacagacacaaaacggtgcagc

SEQ ID NO: 269112 - DNA, 122 bp, Homo sapiens
aatggatgactgtgatctgagaagcaggaaatccacaaggaacgcagagcaagcccggcacggtgcccccgtgcagcgcaggctgtgaagacgggcgggttgtgcagaaggaggaggaagag

SEQ ID NO: 269113 - DNA, 122 bp, Homo sapiens
acaggtttatcaagttttttaaacttcagcttctcatccttaaagtgggaattttaatagcgtttttgagggctgtgtaagttttaaatggcacagcatatgtaaaagggctttctgtggtg

SEQ ID NO: 269114 - DNA, 122 bp, Homo sapiens
ttgtggcttcgtgtccaaccctcttgcccttcgcctgtgtgcctggagccagtcccaccacgctcgcgtttcctcctgtagtgctcacaggtcccagcaccgatggcattccctttgccctg

SEQ ID NO: 269115 - DNA, 122 bp, Homo sapiens
tgctcactaggcctgtatctgtgacttaagctagcctgggcctcaggctgtcctgggctgcgcctaaatttcaaagacttgctagttttcactgtcgctttgccatctcaggttggtctttc

SEQ ID NO: 269116 - DNA, 122 bp, Homo sapiens
caccacagactctgggaggctcggcggctggagcagcaggcagctccccgcagctcccggcgcttccaggcagctctctgagccgtgccagaggcccggcccgccattcccaggtaggagac

SEQ ID NO: 269117 - DNA, 122 bp, Homo sapiens
attggccttttctcctttcaataagtcaaggccaatggtaaaatgcttgcccgtttctaccgactgtgtgtggaccacctccccctttgcaggtagcaaagccaacgtgcagaagtcccagt

SEQ ID NO: 269118 - DNA, 122 bp, Homo sapiens
cctgcagagctcggagcggcggaggcagagaccgaggctgcaccggcagaggctgcggggcggacgcgcgggccggcgcagccatggtgaagattagcttccagcccgccgtggctggcatc

SEQ ID NO: 269119 - DNA, 122 bp, Homo sapiens
cacaacaaatggttcggtaaaagcagtaaagttggatttcagaaagtagccccctcccttcgagctcttcccgacttgcaagtgatccttcagaagtctcagcttcctatttccatgggtct

SEQ ID NO: 269120 - DNA, 122 bp, Homo sapiens
ggcgctccgtccgtcggccgtagcgactgaactgcgcgcggatccctccgcggggctcctcgtccccgtcacgctgactttccgtgcagtgctgtggtgcgaaaatgcctcgccggtgcgca

SEQ ID NO: 269121 - DNA, 122 bp, Homo sapiens
gcgaggaggcccaaggtgggcgggtgtcaacctccggcaccgaagatgggtcaggccaaccggcaccgaagatgggtcaggccaagaggtgtcctggatcagagtaggggtcccattccttt

SEQ ID NO: 269122 - DNA, 122 bp, Homo sapiens
tgtgtggtttttctccgttcagggagtttcatcaggaccgcagaacccataacacgtaagcgaacataggcaggaaggacttgagaaaggaactggcttatgattataagaccacgcccgtc

SEQ ID NO: 269123 - DNA, 122 bp, Homo sapiens
aaaaatccccccttcatcctggtgctctcaaatgaccttaaagggtcccagcactgggaacggcggttcgtccaagccggacgcctgcagcagccacctcctgggcctcacggcggggccgg

SEQ ID NO: 269124 - DNA, 122 bp, Homo sapiens
ggcctttcacgcaaaacctgctcagatactcactgcccgttcccgtcgccatcttggccccgaagtctccaaccctgaggagagacggtctggaagggccgaaaccctggaattctgggaaa

SEQ ID NO: 269125 - DNA, 122 bp, Homo sapiens
cgggattacaggcatgagccaccgggtccgccgctcaggtgtttttaaaggacgtagacccggtggtgattgttgtgggacgatgaaagggtccggccccaagatcgatgtagtttagggaa

SEQ ID NO: 269126 - DNA, 122 bp, Homo sapiens
gggcgggggtggcggtgggaaggaggaggggttgggggagggcggcggaggtgttgggtccggccggctcacgagggagctgcagaagagctggctcagaccttaatcagagctgtcgccgg

SEQ ID NO: 269127 - DNA, 122 bp, Homo sapiens
ctctggctcgtcgttcttcggcgagctattcaaccagaatcccgaggtgttctttctctacgagccagtgtggcatgtatggcaaaaactgtatccgggggacgccgtttccctgcaggggg

SEQ ID NO: 269128 - DNA, 122 bp, Homo sapiens
tggggaatgcttaccataatacagcccaaaaactattccagcacccaagaaggctcccagcgtctgtgccagggtgtagatgggcagcttgatccagggctcacgagccaggaagcacatgg

SEQ ID NO: 269129 - DNA, 122 bp, Homo sapiens
ccctgggcaccccagctggcgggggtcagtctttggtacaatgtggacactttggtgtgccgggggcaaggttgggggggtggccacacagctctcatcatctctgcaacgccaagaggaag

SEQ ID NO: 269130 - DNA, 122 bp, Homo sapiens
acacacaggtagcgaggaggtcggggtgtctgctgctgttcccatggccccgctgtgctgcggaacagtccctcgaggtaacaggttggctgcctcacacttgaggttttgtttttccagcc

SEQ ID NO: 269131 - DNA, 122 bp, Homo sapiens
tgacgtctgctacccacagcctggggcaggagagtggcgacggcgaggagcaactgcacgcgacttgggaccttgccctgccccgcggcccgcgtcaccatggcaactgcaggcagccagca

SEQ ID NO: 269132 - DNA, 122 bp, Homo sapiens
gctgcgccctgggtcctggaggctgatctttttcaagaaagcgcgtgcagctccggcagacggagggatgaataattaggaagggcttccatgaaatcactcacggagaaaattacctgccc

SEQ ID NO: 269133 - DNA, 122 bp, Homo sapiens
tcctctgagcgtggattccaacaggagctctgccgccacccagcagggtgaccttgaatacgtctgcccgcatggctgggcttcaaagaccttgcctgggtgatgtgtgagcacatgtgatt

SEQ ID NO: 269134 - DNA, 122 bp, Homo sapiens
caaacccccatcccaagtgcccccgcctctgcccttaccctgcctcagttggctctggggcgtttgcttgtgtacgaagctcacattttcgttctagtaagttccagataggtggaaggaat

SEQ ID NO: 269135 - DNA, 122 bp, Homo sapiens
caccttgtggactctgggtggggaccagacacgtctgctggacgggggcgtggccgcactcgcttcgtcgccgctgcccccgcccactccgggagactctctcttggacggcaaggatggcc

SEQ ID NO: 269136 - DNA, 122 bp, Homo sapiens
aggtttttctgtgaacatcccagttttcactgggataaaagtataagagtatgattgctgcggtgtatcggatagaaactgccaaagagtgttttccatagtggttgtactattttgcattc

SEQ ID NO: 269137 - DNA, 122 bp, Homo sapiens
ttggctgcctgaggctgcagctctcccgattgaaacccaaaccggaggagctgcctgtcacggtgcctgtgatcctgtgatccgaggcatgattgagagggggcgcggcaggagggggctgc

SEQ ID NO: 269138 - DNA, 122 bp, Homo sapiens
attagaggttacctataggtcatttagggcgccaacgctgccagagcacaaccccctccacggcccccacacccacaaaagaaagtttagcaccgcggaatccacctgcacaccaatggaag

SEQ ID NO: 269139 - DNA, 122 bp, Homo sapiens
gagatgggactctggggatgggggatgggggcgagtgggaggttagtgacgagcagtgcacgagtctgtcctgaaactggacgttttaaagatcagattgtggttctatctggatctcggcg

SEQ ID NO: 269140 - DNA, 122 bp, Homo sapiens
gagcctgagttgaaacctggccctggaacaggaagtgcttggaagcttccctgccgttgccgtggtgctcacaaccacccaggaaaccaaggcaagctccccctgtcaaagcaccttggccc

SEQ ID NO: 269141 - DNA, 122 bp, Homo sapiens
tcggcgtccgggtactgggtcgagacgtgtgtaggtgtagggaggtggatagcccttttccgagccgtaggcgtcacccctacgcccaggcccaggcccagtgctggatcctgcactttccc

SEQ ID NO: 269142 - DNA, 122 bp, Homo sapiens
cgcggaagttgagcccaaagcaagagcgtgccgggcacctttaagctgtttgtaagcccacgtgactcaccaagtgcgggccccagcggtcacgtgacggcgcgcgcgccctcgcgcaggga

SEQ ID NO: 269143 - DNA, 122 bp, Homo sapiens
ctacaaaccaagggacaccgacgccgcccacagtcaccaggggccgggggacacatgggccggattctccctcggagcctcagaaggaatcctccctgctgactgcaaggaccggggcgggc

SEQ ID NO: 269144 - DNA, 122 bp, Homo sapiens
ttgtgctgggctacagcagagccttgatgtggcttgttgctcacagtccagtgggggagacgagacaaggcaatttcagccccatgagataagtaggtgctgtgatgggatgagcaggaact

SEQ ID NO: 269145 - DNA, 122 bp, Homo sapiens
gttgacacaagttaaaagatgacacaggcctgaggtgagctaggactgaaatggaagctgcgatgccagagcccacagcttttaagtgttcctatcactatccagctctcctcttccttttt

SEQ ID NO: 269146 - DNA, 122 bp, Homo sapiens
acttcctcggaaaatgcccgaggaacaggactcctccggccgtatttgcgcgagcgcgagcgcacatacatcgtgccttggatgcctcccgccagccccccgaaaaagggaggaggctggaa

SEQ ID NO: 269147 - DNA, 122 bp, Homo sapiens
aagaaagaagataaatggcccggagaagcaacaggaaaccaaaaccgactctattcaaatcgaaaaatagtaggcagcccgcccgcccggccgaccggcggcaagccccacgcgcggcgggt

SEQ ID NO: 269148 - DNA, 122 bp, Homo sapiens
aaatatgggacttaaaaaaaagtaaacagggtaacatgagggttgcttgcagtcttagagcggttgtgtatcttggctgtatcaaggttaatatctggttttgataatccactatagtcttg

SEQ ID NO: 269149 - DNA, 122 bp, Homo sapiens
ttattagctctgggtctttggtcaagttgcttaacctctctgagtcttttgtctcatggacggaggatggggataatagcaatcatgattatacccacctcatggatagtctgaggataaaa

SEQ ID NO: 269150 - DNA, 122 bp, Homo sapiens
gaggcggggcagaccccatggactgagcagggagcggattcacggccgctaatggggccgcgcacgtaccactgaatgatttccgcaatctgagcttcccagtgggccactgactccttctt

SEQ ID NO: 269151 - DNA, 122 bp, Homo sapiens
ctctcctgaacctctggtgcctccaggtcccggctcaggctctcggggctcgtcaggggccgagctccggctgccttagctgcccggctcacagcctctgagagaagcagctgggggccctc

SEQ ID NO: 269152 - DNA, 122 bp, Homo sapiens
cacacacacacacacacacacatatatatgatagtacacactatagttagtgtagatctacgattattgtgaggactaaataaaattatgcataaagagcccagcagtcgtaggcccttaat

SEQ ID NO: 269153 - DNA, 122 bp, Homo sapiens
atgtgagctcctgtcctcagaaattcttgaagatttctaaacccttctgcggcacggtcgcggctgtgtcccagtcattctcggggtaagttccgaagttggaggtgtcgccttcgcgggct

SEQ ID NO: 269154 - DNA, 122 bp, Homo sapiens
cattggccagttcctctcatgggccaaacccatccaaagccagagagagagtgagcatgtcgatgtagcccatagggtcaccttcctgaggcacaaagcaaggtggacaagggtggagagca

SEQ ID NO: 269155 - DNA, 122 bp, Homo sapiens
cgggcgcctttgcagcctgaggaaatgacaagttgaaatgagtgattgcccatccctgcccgctctctggctgcgccctgcccaccttaacagctttactgctggggcgtgtgtgctggctc

SEQ ID NO: 269156 - DNA, 122 bp, Homo sapiens
caagttacttaacctctttcagcctcactgtttgcgaaaggtgggataataacagagctgcgttgttacactccatacacagtaggtgtttgatcattggcagccaggatttctattctgag

SEQ ID NO: 269157 - DNA, 122 bp, Homo sapiens
tgtgccttcttagcgcatcccttacagtagggagtgtgcatcttttctaacccttggcgacgtgtcatactcctttctgtgggatcatctcctgcattctattccttttgttttcaataagg

SEQ ID NO: 269158 - DNA, 122 bp, Homo sapiens
gtcgtcgatacctgcttggcccggccagggcgctgctctgcgtcgggctccagggagcctcgttgggatcggccgccagtgttctgaccccgcccccacagccaccctccactttgagcgcg

SEQ ID NO: 269159 - DNA, 122 bp, Homo sapiens
tcagcggcggtggcttccgtcttaaaggggccgcggcggccgggggaggaggaggtgggacgccccgcggcctacgctcctggcctccccgccttggcctggccgtttaaccgattctttcg

SEQ ID NO: 269160 - DNA, 122 bp, Homo sapiens
tcaccgagggacatttgtttccaatcctcgtcctcacgggcagcgccgcagccatcaccccgcacccaccccatcagcccagtgctcggttattgccttaggaaagacgggttgattttgcc

SEQ ID NO: 269161 - DNA, 122 bp, Homo sapiens
cggtggcggcggctgctcagcgaagtcgcaaagcaggagccgcttccaaggcacgtggaacgtcaccggctcggccgcacgccgcttggccatgggcccagaggctcgggcggagcccgcca

SEQ ID NO: 269162 - DNA, 122 bp, Homo sapiens
gacgtgtgggcggacagatctgtgcacaccggcccaggcaagaagcaagtcctcctgggccggacctaagggcagagatcgcccctgccacctcccaacctcccagccttggggcccaacag

SEQ ID NO: 269163 - DNA, 122 bp, Homo sapiens
ttgggaatgggcctctgtggccttggacttcttagtgacaacttcggcaagatcctgggccgggccggaggggctgctcactggagacctggccatcttcggaagccagatctggctccaga

SEQ ID NO: 269164 - DNA, 122 bp, Homo sapiens
cttggctgcttgtcataaatggagcgacgtaatttcgacctgtcctttcccgggagttagcgatccctcaacccctgcactgcgctagtcctaaagaggaaatgtctctacgctgcggggat

SEQ ID NO: 269165 - DNA, 122 bp, Homo sapiens
ttttttgtctcccaaattccttcgattcctggagtcttacaggcctcgtttttatgtacacgtcatggaaaagaataaaagggtaaggtcgcggggcgcgatggctcatgcctgtaatccca

SEQ ID NO: 269166 - DNA, 122 bp, Homo sapiens
gggtcttctcccctctgaaggaaattctaacagcaggccttaggatgaaagtagaggaaacgtgcttcagttaaggttttctccagggaaaagaaatcggcccagcaagatgcacagagcac

SEQ ID NO: 269167 - DNA, 122 bp, Homo sapiens
tgcgcacgcgcggctcccggcacaaaattctcttgaatcgaacttatttgcatacgggcgcgcgcacgttgcgggctgggagggggagaagtcccggcgaccgcgcgcgctcccgaggcctc

SEQ ID NO: 269168 - DNA, 122 bp, Homo sapiens
cccgcctcgaaatccgcctccaaaggggaggagcgtttccagggggcccggcgccttcctcgatggcattggcctggggaccctggcgcccaattttgaaaagaaccaatagtttgaaaatg

SEQ ID NO: 269169 - DNA, 122 bp, Homo sapiens
ttttggggtcgggctggtaggggtggtgcttcttgctgttgagctggtagtagtacttgccgctcttgcccggcggcgggggcttgcccgcccgctccttgctgtgcggctggtactggtgg

SEQ ID NO: 269170 - DNA, 122 bp, Homo sapiens
gcggggtggggggggtggggggggttggggggtggggggggttggggggtgggagggaggcggccaccggaagtgtgacctttcgctccccgctgcctattctcatccggggtcacgtcggt

SEQ ID NO: 269171 - DNA, 122 bp, Homo sapiens
tcttggcttgtagtttttgttgtactcatgaaaatgctcccccatatatatgatcattctcgcttactataacatccttgcttactaaatgagttaacagggctttatggtgtgtatcgtga

SEQ ID NO: 269172 - DNA, 122 bp, Homo sapiens
cagctgcggcattagattctggtaggagggcgaaccttattgtaaattgcacatgagaggcgtctaggttgcccgctccttgtgagagtttaactaatgcctgatgatctcaggcggatcag

SEQ ID NO: 269173 - DNA, 122 bp, Homo sapiens
acacaaagcaaacaaagaggtcattcttagcagctaattttaaatcttcaggcaactatacgaacctatgtcacagtctctcccaaaatttattataatgcccttgttataaatttagaata

SEQ ID NO: 269174 - DNA, 122 bp, Homo sapiens
ccagacacatgggctggggtcagttcacagaggaccttgaataatccccaaagtgggggtcgagtttatcctgatgctcgggagccacaggaggtagagggctgagtcgggcagagatgccc

SEQ ID NO: 269175 - DNA, 122 bp, Homo sapiens
ctgccgggtcctgcctgttggaggctgacgggaaccggggatcctggggtgggcaggtcccgtggggaaagggagagacagatggtcaggggcacagagacgcggcgttgtttggctccagc

SEQ ID NO: 269176 - DNA, 122 bp, Homo sapiens
ggccctgaccacaggctggcggtggcattgcggagtctaccaaagcgcagggcctgctcccggaggtccgcatcataggtctggaagcaagggtggcaggccacgcacaccgggtagcgatt

SEQ ID NO: 269177 - DNA, 122 bp, Homo sapiens
ccatgagatataattaggaaaaactagtgacactgctttatttgagaacagaataaagagcgtggctggaactctgccaagatggtctttaacattctgccctaaccagggtgttaactttc

SEQ ID NO: 269178 - DNA, 122 bp, Homo sapiens
tggcccgagagcgcccgccctaccgacagcgcgcccggggactggtgaagacccggcttgcgccccaggcggctccgcagtgctcgcaccacgggcatacacagctgagccaaggacacgga

SEQ ID NO: 269179 - DNA, 122 bp, Homo sapiens
ttgccacacagtaggtaggagctaccaacccagccaacccagcttccccaactccctccccgagagggtggccttagatcatgttttgccagatcatttccaataggtgcccttgtcatttt

SEQ ID NO: 269180 - DNA, 122 bp, Homo sapiens
tcccaacccgcgttgtcctcgcgccttcgccctgggtaggtgaggccgagaaggcaaccgcgaaaaggaggcggaaacgcctcctacccgacccccgaaaagttgaccgcgaccccgcctca

SEQ ID NO: 269181 - DNA, 122 bp, Homo sapiens
gcgatgagtcagaaattatgtattcccctaggaatttcccagtccagtgtgggagatggacgcaaagagcaaattgcaaaaaatatgggaagtgctacagtacagtcatgtacaactgtcag

SEQ ID NO: 269182 - DNA, 122 bp, Homo sapiens
cagcccaacccggagctgaggccagcaggctggctctggcttctgacctgctgggcaggccggagctccaggggaggctagaggctctgctctggaagagagatcagagaggcaaggagaga

SEQ ID NO: 269183 - DNA, 122 bp, Homo sapiens
ggcatgagccacgccactgtgcccaaccccctgtgtttaaatgagtaaccaggcctgtgtcgttatctccacagagggccccattgtgctgtcccgaccccaggatggggactctccactgt

SEQ ID NO: 269184 - DNA, 122 bp, Homo sapiens
gaactgagggggctcaggccacccctcctcctaaactccccaacccacctctcttccctccggactctaaacaggaacttgaatactgggagagaagaggacttttttgattaagtggttac

SEQ ID NO: 269185 - DNA, 122 bp, Homo sapiens
ggtgctcggtggcagcctggaaaaagctcttcttgtggccttcgggcagcaggacaaccccggccacgctgccggtaccctccaggtagcgccgcacctcggcacgtgcactcacgtccact

SEQ ID NO: 269186 - DNA, 122 bp, Homo sapiens
cctgccccgcaggccccgaaatagcttgttgtggaaacacttggggataaatacgcccaacgaggctgaaaataccttgacacccaatccgagaggtttgctcatttcccttcggatttagg

SEQ ID NO: 269187 - DNA, 122 bp, Homo sapiens
tggggtcggccgaggctctgcactaacaagacggatccagggttcaaagctggggtcggccgaggctctacactaacaagacaggtcccgggttcaaagctggggtcggccgaggctctgca

SEQ ID NO: 269188 - DNA, 122 bp, Homo sapiens
aggagggtaaatgagagagagagaagcaatactgactgactgggcctcctagtgtttccccgacctggtctagtcagcggcttccgggatgagaatggtctgagatcctagaggccgtggtg

SEQ ID NO: 269189 - DNA, 122 bp, Homo sapiens
catcatgctgacactccctaactgttaacagcagccctaaggtcattcactaatgcaagacgttgagacccacttaatataatataccatcccaagcaaggatatttaccatataacctgaa

SEQ ID NO: 269190 - DNA, 122 bp, Homo sapiens
ccacaaccacgtggtcctggaaactgcctcgctcactttgtctgcctttgtatctgctggcgtggatcttgtcaccatggcatgacactatatccaagtatccagctctgccctgtactcag

SEQ ID NO: 269191 - DNA, 122 bp, Homo sapiens
tcctggaacactgaacaaacacccaaagcagggggtgggggaaagaaagcactcaacagccggctgacaacctgattagaaaacctaagggcggggaaggaaaagccagtcccacctttgag

SEQ ID NO: 269192 - DNA, 122 bp, Homo sapiens
ctgtcccagtggctggaacagggctgactcctgaaggctcatggttggggggtgcaggtgcgaggccccaggcagacaaggccaaggggctataccacagggaccacctggcagcaagggtg

SEQ ID NO: 269193 - DNA, 122 bp, Homo sapiens
ctgtcacgtccccctcagtctacctggataaatatgagaagtgcaggctttcatctgaaccgtcctctgaccagctgcagatgacgtgaggttctggttcactttacacatttcgtccgacg

SEQ ID NO: 269194 - DNA, 122 bp, Homo sapiens
tggggctctcggaaaacagggaaggtccgttttcgcttttcatttcttgacctgtggccacggtaagactcggccgcctgcccacccgactccttgcccctcacccctgtgccaggcacaag

SEQ ID NO: 269195 - DNA, 122 bp, Homo sapiens
ttcgtgcccatcagcctgtctctgggtatctctgcaagtgtctctgccactgggaggcgccgggaccccaggcaaggccaggctgtgggggatggggtaggaggctccgggctgaggcactc

SEQ ID NO: 269196 - DNA, 122 bp, Homo sapiens
atgacagtctttaaaaagataaccttagattgtcagagcaagatttggtgatattcaatacgttgtgcttacattctgcttggcaatgagaccacttaaccatcccttcacaacttgtatag

SEQ ID NO: 269197 - DNA, 122 bp, Homo sapiens
acttcacatctccttacctcagtttcctctgtaagttggaagtataataatagtacctaccgtatcagttttctcatctgtaaaatgggggtgatagtaatacccactcacacggtgttgtg

SEQ ID NO: 269198 - DNA, 122 bp, Homo sapiens
ggccaccagtgctgggtggtgtgggtttgggctgttctccctcctggctcagcacgggcccgtcagcccagtgtcctttgggcctgcccttcccctagcatccctggttggaagggtgtcct

SEQ ID NO: 269199 - DNA, 122 bp, Homo sapiens
ccatgacccacctgagacggctaggaattccctagctttaacagccgcgcgtttgacttacgaacgattcattctatgaattaatgcgccatgtctgacaagagagacttgattagagaggg

SEQ ID NO: 269200 - DNA, 122 bp, Homo sapiens
gcaccggaagcagatggctgccaccttcatgcatctctgcaggcagcatagcctttgtaacggacaggcattaaccaagacgtggcagagtgaaaaagaaatcatggatgaaatagtactca

SEQ ID NO: 269201 - DNA, 122 bp, Homo sapiens
agcaggcgggggggtccggtgcggggcggcacgggtggaacgctcagctctgccaaatgccgcttagcaggcagcgggggcagcacagggtctggggcagctgtggatggggtggtgaagca

SEQ ID NO: 269202 - DNA, 122 bp, Homo sapiens
aaaaaaacaaaactgttttataatctaatcagcctgtcaaaggcatcactcataagcaaccgaattgtatttttggagagcaccattaaagatgtcttttaaaaaacagttatagatgtgta

SEQ ID NO: 269203 - DNA, 122 bp, Homo sapiens
aaagggctccctttttctaaaagaaaaacaaacctcttctccctcgcagcggcggagaaacgtttgagtggccttgaacagaatccctccctagggagaggctgcctttctccccttctgct

SEQ ID NO: 269204 - DNA, 122 bp, Homo sapiens
agtcgttcttctttctgatgctcaaattgccccatctttagccaataggaacctcctggccgggcgcggtggctcatgcctgtaaccccagcactttgggaggctgaggtgggtggatcacg

SEQ ID NO: 269205 - DNA, 122 bp, Homo sapiens
ggggtgggaaagggctgggggcagaggtgccaggcggagcaggttgggtaccgttctcggcggccctcttgaggttctcaatcatggtgtcgtagtggatgcggcagagcaccttctcctcg

SEQ ID NO: 269206 - DNA, 122 bp, Homo sapiens
ccacgcagggggagcgaggcccagggtcccccggagagcccatggagaagtaccaggtgccgagtgttccctgcggggaggcgggagctccgtggggtaacggtcgcaaccctggagctacg

SEQ ID NO: 269207 - DNA, 122 bp, Homo sapiens
agagattgatctggattcaggcttcctagatgcagtctatccaactcaggcagcagtgaacgaggaatacaggctctttcccacatgtttggaatcctggccctgagccctgagctgtgcat

SEQ ID NO: 269208 - DNA, 122 bp, Homo sapiens
cagtgtcaccctccttcctgctgtgctgatttcagcgagggcctccgggccagactgccccgtgcgccccctgttgactaacctgggaatcgcccgccgcctgccttgagccttgtgatgtg

SEQ ID NO: 269209 - DNA, 122 bp, Homo sapiens
gtcacggtggcaagcaagtaactttgagttagttgctgtattccattgtttcctttcagccgaaagactaaaattctatagtacatgtcaaactacattaagtctaatttccacggttctaa

SEQ ID NO: 269210 - DNA, 122 bp, Homo sapiens
gatccctctgagaaaggccgcaccctaaatgcacagactctgactctaaggggatggggtcggggaatctgcattttagtagcttctcaggtgattcagatgctcagtcaggattgagaaac

SEQ ID NO: 269211 - DNA, 122 bp, Homo sapiens
aaagaccccgacttgtggtgtccttccccttgcccaaactggccacgaaaggacatatagcgagagagaaagaggtgcggggggacggggggggtcgattgaaaatactgggtgagggaatg

SEQ ID NO: 269212 - DNA, 122 bp, Homo sapiens
cacacacacacacacacacacacacacacacacacacacacacggtgagagacgagcacacgggccgactggaggtagcttagatccagaatcaaggaatgttaagagaaggattcattcat

SEQ ID NO: 269213 - DNA, 122 bp, Homo sapiens
acgcacaagcagagcctggaggacatgctggagaagcacgcgacgctggcgcgcgagggccgcctgtgcaagcgcgaggtgcagctgcgcctgtcctacgtgtacgactggtccgcgccgcc

SEQ ID NO: 269214 - DNA, 122 bp, Homo sapiens
ggagctcgcatctataaatacgcattcatgtttagtcaagtccctttgtcaacttcttcccggcgcctgagcctcagccgctgctctgcgcccaggacctggcccctcccggccccctagtc

SEQ ID NO: 269215 - DNA, 122 bp, Homo sapiens
caaagggagtctcgggccatggccgacagggctgagaaacagctgcatgctgcccgtaatcgtctccctgagtcccactcaggccctgtgctggggttgggctcagctcatcactagctggc

SEQ ID NO: 269216 - DNA, 122 bp, Homo sapiens
ggcaagccacagaaagttaggggatactcaggagggtgtctggttgaggcctgaggaagccgcagcattgttgacaacttggacagggagctgatcctggggctccagggacaggcaacgtg

SEQ ID NO: 269217 - DNA, 122 bp, Homo sapiens
atattatctagacaagccccctcattttattgttacagatactgaataccagtgataacacgacttcctcaaggatatgaaactaataattggcagtcgttgttatgttaatgatggttggt

SEQ ID NO: 269218 - DNA, 122 bp, Homo sapiens
agaagggccgccgcggtggggacggctctcacccgcaggaatgcccccgtcgggatcgcccgtgccctcttccaggaaaggcagtctgccaaggaaccacttcgaaggtgctgaggccaaaa

SEQ ID NO: 269219 - DNA, 122 bp, Homo sapiens
gcccacagcagccagcccctcaggccggcctccgccatcccaggtctgggaaggggtcagcggggagccaggccaggcctcaggaacagccaagggctgaacacacattaaggcagcctcct

SEQ ID NO: 269220 - DNA, 122 bp, Homo sapiens
gtgcccatctgcgagggatatgccctcccccacaccatcctgcatctggacctggctggccgggacctgactacctcatgaagatccttaccgagcgtggctacagcttcaccaccacggct

SEQ ID NO: 269221 - DNA, 122 bp, Homo sapiens
cctcccgcagtcaagccgggacctcgcccagcaaggactccagggctgcccaggcaggggcgcccgtccggcaccggactcccgccctgggcccagctccggcgctcggccagccccgtgcc

SEQ ID NO: 269222 - DNA, 122 bp, Homo sapiens
aagacttcaaaggactttcatatatattatctcatctgtcttctcagcatccctcagaagcggtaaagacagatatgattatttccatgtagacgggaaacaacaagatgtagataagttat

SEQ ID NO: 269223 - DNA, 122 bp, Homo sapiens
aggcatctacaaaaccgtgtgttgagtgccatgcctgacggtacagaacgatcgcgtcttcgagaaagaacagccaccctggaacggttgtcaaggcccagcacaacccacacgttccgggt

SEQ ID NO: 269224 - DNA, 122 bp, Homo sapiens
tttctaggctgggaaccccgctgaaatttccgcggtgcctgggaattcctagagcctgagcgcctggctcaacccggtctgggcctggggctggcgtgcagggaaggggagctggcgggaga

SEQ ID NO: 269225 - DNA, 122 bp, Homo sapiens
cagacagtatcacaggagtttaaagaggaggaagactcggagcccgaacgaggctctgggcgccttgtcggggccccagagtcagggctttgcagctgagcagcaattagagcccaatctag

SEQ ID NO: 269226 - DNA, 122 bp, Homo sapiens
cctcatgtgtttggcagtataagcgggcctttaatcacccacctgccggttgtcatacttcgcatcacccctctccccatcacggggaaggggaggacatgtcccttccccaactcgtgtct

SEQ ID NO: 269227 - DNA, 122 bp, Homo sapiens
acctggagccgaggagatcccaggaggctgaggctgccccacaggcacggtaggctttgccgtgggtgttcagcttcctgggtttgaaggaatgtccttctatccatagaaaaagaaggaaa

SEQ ID NO: 269228 - DNA, 122 bp, Homo sapiens
cgcaggtgagggcggcaaggctcctctggacccaggggggccagcagctgctggaagctccgccttctgtccccgtaagtcccacccccgtcccccgcttcggccaccgcgcttcggccacg

SEQ ID NO: 269229 - DNA, 122 bp, Homo sapiens
aacgcttgccaggccctggaccaaaagccgtgcaaacctctctgtaaaaccatcctaagacgtaactctgtgcacttgccaggccctcagcccagagccgtgcaaacttctctcttcagagc

SEQ ID NO: 269230 - DNA, 122 bp, Homo sapiens
ggacgccgtagccaagaggttgggcggatgttgtgagccgggtcgctgcggccgaggctccgggtgagtgaggggcggcagggctctgagcctggcgggttccggctattcccttcgcggtc

SEQ ID NO: 269231 - DNA, 122 bp, Homo sapiens
accaggtaaggattactcatctctatttcagttctaaagatgttctgaatcctgaagcaacgagagttggttctcttacaaccatttggggcatttgtgacttggaaatgaggcggcagtgc

SEQ ID NO: 269232 - DNA, 122 bp, Homo sapiens
gtccccggctaaatccacaggcgctccactctgtcccagagagcccacagccaaaaacttcgtcctgtcctggaaaagcttcactggtaagcattcccgacctttagacctgccttggccca

SEQ ID NO: 269233 - DNA, 122 bp, Homo sapiens
tgcgagttccttggctggcattcctatttcccaccttttccctgatttcctttgaagtggcgatatgcccagctatcacctttatttccagcctgtctcgcacctaggaatttccaaaaaat

SEQ ID NO: 269234 - DNA, 122 bp, Homo sapiens
actttgtagacactgactccaaaagcgggtctggtctctgcccagccccactttggctggcgtgcttaggtgcctctcgggaagctggagaccaccctcccccattccagcaaacgctccat

SEQ ID NO: 269235 - DNA, 122 bp, Homo sapiens
atttctaactcttctaaagttaaaccaagagttcacccagtgtattttccctggggttgacgaactaccacctgtgtcctgagagcaaagatttttttttcttttttacatttttaagtgta

SEQ ID NO: 269236 - DNA, 122 bp, Homo sapiens
cctgatgctgaatctcacttccccttccaggcagggtgcccagtctacccaggatgaggtcgctgcatctgccatcctgactgctcagctggatgaggagctgggaggtacccctgtccagg

SEQ ID NO: 269237 - DNA, 122 bp, Homo sapiens
ctccagctgcaccgccccggggcggggactaatccgccggcctggcgtcttggtcttccccgcaagcagtaatctcctgcaacccaggaaaggagactaggtggaggagaggagtgctttcg

SEQ ID NO: 269238 - DNA, 122 bp, Homo sapiens
caccaactccagcctctttaaattcagaattcctcagagatcttctttcccgacctcccacgagggcagctcttggcaggcactgaggttcagactggttcctcagatccctctttgtcctt

SEQ ID NO: 269239 - DNA, 122 bp, Homo sapiens
tgcctgtgaagtggacattggcatatcttgcctaggctgctcctgtggggttcatctggtcggcagggtggggaatagttgtctgcaccataccaaggtcagcctgctaggtctgacagtct

SEQ ID NO: 269240 - DNA, 122 bp, Homo sapiens
gaccggggctggccactcggggcttggggagcagggggcgctgctggggacagtcgttgtcggatgaagcccaaggaaccacagggagataatttggtttggacagggctgttcgggaggcc

SEQ ID NO: 269241 - DNA, 122 bp, Homo sapiens
gtaacaccttctgagtagctgctgtcccacacaatagggtatgaagctgcgctcctccatcgggtttggggagggagcactctgggactgtgagacaaggaagcagggccagcagtgagact

SEQ ID NO: 269242 - DNA, 122 bp, Homo sapiens
cgggcgggcggggcccgcgcgtcagccgcgggagccggccaatccagtggctctcctccgcggtcgcgtcataggccgaacaaccaaacagaaaagtttaataaacagcggacggaggggcc

SEQ ID NO: 269243 - DNA, 122 bp, Homo sapiens
gttgcagttggacagcccacagctgtatacaaggcacttcagggagaggaggggtggtaacgttgtccctcccactgtgcctgtgattgtgccacagagcacaaaggaagcctcccatccct

SEQ ID NO: 269244 - DNA, 122 bp, Homo sapiens
cgttcttctgaggaggttgctgcagccctgtatggattcgccgctaacatcttccgctgccgtgtgactcagataacttccatcgctaacgtggagaggtctgtgcctaagcggggccaagt

SEQ ID NO: 269245 - DNA, 122 bp, Homo sapiens
aaactggatgcatcttaaagagtgttttttttttagattgttccatattaatttaatgttcgtgaatttgtaaaactgttaacctatgattatatgtacagaggctaaggcttctgcaggat

SEQ ID NO: 269246 - DNA, 122 bp, Homo sapiens
cagggcccgaggtttttatgcatctccttttgattactaactaagctatcctaaagtgcccgaacgtcacgagcgcgagagaaaaaccacactggtgtctttaacgcttcagacacacctcg

SEQ ID NO: 269247 - DNA, 122 bp, Homo sapiens
gggcagggcaggctggggtcaggggactggaccccctggtggcagagctgtctcagtgatcgcgtggggcttcctgatctctccccgcgtccacccatggcctttcctctctctgcaggagg

SEQ ID NO: 269248 - DNA, 122 bp, Homo sapiens
ctgggttggaagggagccagccaggtgggtgtgtacctgcctgaaaaggcatctactctccgggcacattcctgggtgatcccagtgactgggctctgtgccccacgcctttggggatgaca

SEQ ID NO: 269249 - DNA, 122 bp, Homo sapiens
cctatggctggtatctggaaatactggaaccgagcgttctgattatgtgaagaaagtggtcggtttggcttgctggggattggagtaatatcttagaacagagcttctcaaaactcagtgtg

SEQ ID NO: 269250 - DNA, 122 bp, Homo sapiens
gtgagaatgtgtatttgtgtgtcatgagtgtgtgcgcgtgtgtttttgtgcatatgtgcgcgcattgtgtttgtgtgcatttgtgagtgtatttttgtgcgtctgagtgtgtgcattgtgga

SEQ ID NO: 269251 - DNA, 122 bp, Homo sapiens
ggggtggctgctcctctctgttctctgcatacaaagcacgtgagatcccggtctgtggatcggtgctctgtcccctgccctgtgatgctcacacacccacactccgcacacctgtgtggcat

SEQ ID NO: 269252 - DNA, 122 bp, Homo sapiens
tgcacaaggttctggggacagattggggtcagctgggtgcccgcgccccggccatttccccggtagctcagaacgcacatctgccaaggggcctactccaacccaggctgcaacccattcta

SEQ ID NO: 269253 - DNA, 122 bp, Homo sapiens
atagtatatgaaggagttgacaagctatggcccttgggtcaaaccaatttgcaatctgttcgtgtaaataaagttttattggaacacaggcacagctatttgttaatatatcgtctacagcc

SEQ ID NO: 269254 - DNA, 122 bp, Homo sapiens
gccgcccaggctccccgcagcctcccgccacctcggcgctccactgcgcagcccgagggacggctccagaattaggaggggacctactcgggtcactctcctggaaacctctccagtctccc

SEQ ID NO: 269255 - DNA, 122 bp, Homo sapiens
tcctgattcaacagagatgggcagagggctgagattctgaatttctaacagcctcccaagcgatgtccatgggccacatgttgagtagtgagggtctgggcactggggataaactggtgaac

SEQ ID NO: 269256 - DNA, 122 bp, Homo sapiens
aaaccctctgcacaaggtttccgtgtttgtaaagggcagggggaagggaaatgaataaaacgtaaagcatcaggctcatccacgcccactcagtgataacacaggaatgtgactaatcacaa

SEQ ID NO: 269257 - DNA, 122 bp, Homo sapiens
ctcttgggacagggggcccagccaggccagaggtgctgtgcaggaaggagcctgccccaccgcctggcgtgtgcacacgcagccagagggccaggggggtcccacatctggccgaagggctt

SEQ ID NO: 269258 - DNA, 122 bp, Homo sapiens
cacctgttttaaatttaaaacacaatctgcaagccctatctacattacaagtaaaccatacgctatccaagatttagtgttttgggccctgatttgacacaattatcagggatctaatgtat

SEQ ID NO: 269259 - DNA, 122 bp, Homo sapiens
attctttgaacatacagagtaatctttataaacaaaagaaccttcacccagcaatcagatcgagcagcaacagacaaaccagccagccaatctcccaaatttcaggcacaagtttatttatt

SEQ ID NO: 269260 - DNA, 122 bp, Homo sapiens
cacggtggcactccgtgcagtaactgctagtaattgcactatagcattttagaccactgacgtatcaaaacctgatactattaagaaacttcgatttataaaaaaacaattctctgtcactc

SEQ ID NO: 269261 - DNA, 122 bp, Homo sapiens
aaggaactgaacaactggacactgtagacatcagatagctggccatggtgttggccatggcgtctcaggatgttcagaacttcttccagcctttctcttcctggatatctcgggtttatgaa

SEQ ID NO: 269262 - DNA, 122 bp, Homo sapiens
gcctaggagacggggatggtggcatccctcgtgttttctgagactgcaccatgaacaggacgggcctcacatccagggacacagcacaggaacagcgagagcggcccctaaaaccacggtgt

SEQ ID NO: 269263 - DNA, 122 bp, Homo sapiens
gactgcttgggaaatgccttcggttcacccaccacttctgaaggggcttcacttctaaggcgagaggccaacgtcccaacagagggactctcacttctttctgccatttgttaaattgttcc

SEQ ID NO: 269264 - DNA, 122 bp, Homo sapiens
tctcccccggggatcccctgggattaccgacggagctcaatttcgagagtatggtgccagcgcccgggctaatctagtcctctctactcgctctttttcccctcctcctcctacttctcctc

SEQ ID NO: 269265 - DNA, 122 bp, Homo sapiens
cagacatgctcgttaacaattgaggaggtaacgaaacctcggctgaggaacttggctcaccgagagcagagaaaaactggccagagagcagcggcaagtcacatgctcagctgacagcatca

SEQ ID NO: 269266 - DNA, 122 bp, Homo sapiens
tgctttctcttctctttttttgggggggggagggggtgtggttgcatatttaaactctcacgcatttatgtactgaggactgcagtgtaggactttcctgcagaataccatttgatcctatt

SEQ ID NO: 269267 - DNA, 122 bp, Homo sapiens
aggggtacggggctagggctaggcaggctgtgcggttgggcggggccctgtgccccactgcggagtgcgggtcgggaagcggagagagaagcagctgtgtaatccgctggatgcggaccagg

SEQ ID NO: 269268 - DNA, 122 bp, Homo sapiens
tcccctagcgctcccgctacccataagccctcgcgtctcagcgcgcacgcgcagcggcgacggccgtctcaggaagaggaaaatggaataaacaactcggaggaaccagagcgcgagagagc

SEQ ID NO: 269269 - DNA, 122 bp, Homo sapiens
agaggggcagagggtgggggctgggggcggggacctggggggtgcagcccagccagaacccgcggcctagcctgatcgcggggagccgggatccgccttccatcctgggaaacgactcgggt

SEQ ID NO: 269270 - DNA, 122 bp, Homo sapiens
gctctccaggatgtgtgggtgggcacacgcggcccgctcaggtccgggagagtcggcccgcggctctggagcgtgcatctgcgatgccagtgaacgaggtgattacacacagccggcgctca

SEQ ID NO: 269271 - DNA, 122 bp, Homo sapiens
tgttttgcagctggtcacatgactgacaagtccattcatcaggaatgttcttccttcacccgaggccagccatccacttcagcttttagacatgaattaagcagaacagaggtttttaaagt

SEQ ID NO: 269272 - DNA, 122 bp, Homo sapiens
cccacctgcaggtgagggcctcgcacgcacagcgtctgcgctgggagcccatggacttgccgcgctcctgttcagcttctgcaactttctagccacctgtgcgcccttgggtgtggctaagc

SEQ ID NO: 269273 - DNA, 122 bp, Homo sapiens
atcccgcgccacctgcagctggccatccgcaacgacaaggagctcgacaagctgctggcccgagtgacaatggcttagggtgacgttttgcccaacatccaagctgtgctgctgtcccaaag

SEQ ID NO: 269274 - DNA, 122 bp, Homo sapiens
tgattgtttccttatgcattctctgaggacacaagccctggcttcatggctcagtgttaacgttatgaaggagaggtgactatacccagcttccttacaaggttttggaaatgctccatgag

SEQ ID NO: 269275 - DNA, 122 bp, Homo sapiens
cgcgcgcgccgctcggcgctcccgccatcacccttactccttggctccggggaatcagggcgagtttccccttagctgttctggtcctttgagaactcggaagctcattccccatccccctc

SEQ ID NO: 269276 - DNA, 122 bp, Homo sapiens
ttgaactccagcttcgtctgcaacatactgtgtgacttgggcaaattatttcccccgccccgttcctgccagctttaaaacggtcatcagtggggggtgctgcgtatcccctttcactgggg

SEQ ID NO: 269277 - DNA, 122 bp, Homo sapiens
aagaaaactttcatgcaatgaaggaacacagctaaagcatcacacgatccaaccccgtggcgtttctctgttaagcttttttcttggccctgagaggcccacgattcaacataaaaatggga

SEQ ID NO: 269278 - DNA, 122 bp, Homo sapiens
gccaggcggggtgtcggctctgggcatctgacttcgtggggccaggcagggtgtcattgtcggctcttggtggagtttgctgcggtttcctgtgttcctcctcttcagggtccccagcccgc

SEQ ID NO: 269279 - DNA, 122 bp, Homo sapiens
ctgagtgagaaaacgtgctgggagatgggtaacagcagcgtgtgcggagaaactcagttgcggctgaagaataggatccaggggtggagaaggtggtggctggacacaggtgtgttgtgtgt

SEQ ID NO: 269280 - DNA, 122 bp, Homo sapiens
attagagtggaagtcacaactgtggagcagatcagtagcggatcagaaggactgccgtaccgagaagtgaaagaaatacagacacagcatgagcagtgacagaactcagaaacccaagcaaa

SEQ ID NO: 269281 - DNA, 122 bp, Homo sapiens
ctcaaggtttgtaaatgcaccaatccgcaccccgtgtctaactccaggtttgtaaatgcacgaattagtgctctgtgtctagccgatctggtggggacttggagaatctttatgtctagcta

SEQ ID NO: 269282 - DNA, 122 bp, Homo sapiens
acatctttgtattcattctctgcaattcagctgacctggccaaggaaacaagatcctaagcgtctttccggcggcgccgtggcttagttggttaaagcgcctgtctagtaaacaggagatcc

SEQ ID NO: 269283 - DNA, 122 bp, Homo sapiens
ccaggaggcggaagtgctggtccaggttgtccccgtagaggggcggcaggcgcagctccacgtcgggcaagggcacggctggctgcccccagagcccgtgcttctgcaggtgctcgacgctg

SEQ ID NO: 269284 - DNA, 122 bp, Homo sapiens
gaaaaacaaaacaaataaaaccgtgcggacccccaagcaaggattcactaacattcctaccggccttgcttaacctccatgcccccgggaagtggcgcgaatcactcttggcaccacttggg

SEQ ID NO: 269285 - DNA, 122 bp, Homo sapiens
cccgcccgggcacccgccgtgcgtgctgacgctgtcttctctccctctctcccaccccggcgctgccaggcaacatgaagaagcgcctcttgatgcccagtaggggtaaggcctggagccgc

SEQ ID NO: 269286 - DNA, 122 bp, Homo sapiens
gagccgctgaggaccgagagcagtgtttccagaccgaattcctggaaacagccgcggctgcggaacaaccaagcccaacgcaggatccgcggcagctgagatccccaaagacccccaaagac

SEQ ID NO: 269287 - DNA, 122 bp, Homo sapiens
gcgaaataagccttttccagcattacgactcaggaatgtttccctgaaggacctgggcaccgcctctttgagatgtaaattcgaaggaaaacagcgcccctagtgttcagtgggaggaagga

SEQ ID NO: 269288 - DNA, 122 bp, Homo sapiens
aataattcatcgggaatcccgccacctggtggagattttcgcataaccacctggtgcctgcgccgcgtgctgaagcctgccttcccgctcagctcacccctgcagggccggcagtgcctgtg

SEQ ID NO: 269289 - DNA, 122 bp, Homo sapiens
ccttgcctaggaaggactcttggcacttggtgtttagtctgtttgcagacctcatggagccgatgaggtgccccaggcagtgctctaaacatcacgcagcagatatgtcacactctggcagt

SEQ ID NO: 269290 - DNA, 122 bp, Homo sapiens
gtgtaggagcgcaggtgcagatagatctgggcgcaggaggggtcgcatgagagccgggcccgcctggtacccctggaccagcccaggtgagccgggaaggaggtgggggtgggtgcaggagg

SEQ ID NO: 269291 - DNA, 122 bp, Homo sapiens
aaggacctccggcctggtggtggaggtgggccatggcgtgtcctacgtggtccccatctacgagggttatcctttgcccagcatcaccggaaggctggactacgcgggctctgacctgacag

SEQ ID NO: 269292 - DNA, 122 bp, Homo sapiens
tagtcctccttccgagtgcccagggctgcggacgcggcgaaggactacatttcccagaagcgccggtgacatcccgggggcggtgcgggctgcccctcttcccaccgagctcccggctctgt

SEQ ID NO: 269293 - DNA, 122 bp, Homo sapiens
aacacaggaaatgctgaaagccaaaacggcagaaagggcaagttagtaaagcagcaccctcgggccccgaaggatccctgtacttcgccgtgcgtgacgcgagcaaaggcgacgcccgcggg

SEQ ID NO: 269294 - DNA, 122 bp, Homo sapiens
ttcgacatcgagatcaaccgggagccgggtgagctggaaactggggagcgctgctggggccgaggcctgccttggcgaaggggaggggtctaccctcagcaaccctcccccggcctttttgg

SEQ ID NO: 269295 - DNA, 122 bp, Homo sapiens
ggggtgaggtccagggctgcctcctcatggagctgtgtgtgagcaggcgttggaggggttcgagcccctggttctgtatcttcagccagcaaacgaaaccatatcgcaaaccagagctgctg

SEQ ID NO: 269296 - DNA, 122 bp, Homo sapiens
gaagctggagtgcaggcttccagaaggcggaagcgtggcgttgccagggacactcaaacgcgcagtcttcatcgtggaacgcgcgcgaggccccagcgcagacgcgcgccctcacggtcgct

SEQ ID NO: 269297 - DNA, 122 bp, Homo sapiens
acgggtggggaggaggccagtggccacttccccgggccaccgcaggtgggcgtgggggggcggcgccggcactcaccgaggagcagcagtgcgttccggggacgcgcccggcagagccccag

SEQ ID NO: 269298 - DNA, 122 bp, Homo sapiens
gatgggcggccaggcagagacgctcctcatttcctagaggggatgacagccaggaagagacgctcctcacttcccagactgggctgccgggcagaggggctcctcacatcccagacgatggg

SEQ ID NO: 269299 - DNA, 122 bp, Homo sapiens
gtgggcttactgggaaaggctcatgccatgttgctcccacaatggagggccttatgatggcgatggttaggtttctgctctcctgttgcaccaccatttctcccaaggccttgatgtaggtg

SEQ ID NO: 269300 - DNA, 122 bp, Homo sapiens
gctcaggggctggggaggccactctgaggtctcttgtctcactctggcccagagcagagccgacatggaatcccagtacccacccctgaaaggggatggcatcatgaccctctctcccagcc

SEQ ID NO: 269301 - DNA, 122 bp, Homo sapiens
agccgccccaacctggcaagcctggcttcccgggcgctgaaaaccccgtggctcagggatcgccgcgtagcacgctctggctctactcgggccctgggaccttgcccagtttcaatcccggc

SEQ ID NO: 269302 - DNA, 122 bp, Homo sapiens
gttgttatcaagatttcctctgacccacgagcaatgaagcaaatgtctttcagtaaatgccgcgaagatatgccacggttaagagtcatgcttttgggtcatggaaatccccgagtgggttt

SEQ ID NO: 269303 - DNA, 122 bp, Homo sapiens
tcgctgcgcggcccaatggtgaacgcgccggcttcgggctgggcggtactgggctggctgcggtggcgcgcgggcgcggcacccggaagtcggcggcggtggcggaggcggtgagtgcgcgg

SEQ ID NO: 269304 - DNA, 122 bp, Homo sapiens
tcagcacattccagctctgtgcagagcctaggaaagtagggaagacagggcccccgcccacgtgggaggactgccgtgtaaataaataactgcactttattgtgactggtgctgtggaagag

SEQ ID NO: 269305 - DNA, 122 bp, Homo sapiens
cgtgtgttgtatgtcagaacgtttgtttaattttagttacacagataatcgcatcaccatcgttgctcacccaggagctgaccgtgtggcgcgttccccggagtgcgtgacctgctccgagg

SEQ ID NO: 269306 - DNA, 122 bp, Homo sapiens
tgtatgcaacagttctcaaagaacatagtttactttataaccggatccaacaagagtaggcgtggcagttaagtgagtgagataccaaaggtgttgagctaccaaggctaactaagaaggat

SEQ ID NO: 269307 - DNA, 122 bp, Homo sapiens
ctcgctggttcgaggacgcctcgtctgttgctatggaaacagagtagtcaaatcagactgcgacggaggactctactgagtccccgagaacaaattgtttccttctgtttggttccatttgg

SEQ ID NO: 269308 - DNA, 122 bp, Homo sapiens
ggtcagtccaaattatgccatctgcaagagacatccttgacagctccattcagcccacaccgatctgtgcattttaggaagatctggactacttgggaaatatctgagaagaaaaacatgta

SEQ ID NO: 269309 - DNA, 122 bp, Homo sapiens
gctggcgcctgcgcgtgtggttgaggatgggctggcggcgggtccgggtccgctgcctggcgctgcgggcggcgggccatggtggtttggattgagccgggcccggccggggcgccgagtcg

SEQ ID NO: 269310 - DNA, 122 bp, Homo sapiens
acaggggctagacagagagggccaacatctgttttttgacatgggttataccaaggcatccgttcaggcttaggatggggtcttttatgggtgatgggggtcacaggagagtggtggctccc

SEQ ID NO: 269311 - DNA, 122 bp, Homo sapiens
tcagacccccgaccctgggacccaggccctcacttgccttcatcccacgctcaggcggctcgcatctcatcctgagccctgataagccagggacagataagccagagccctgtcccagggag

SEQ ID NO: 269312 - DNA, 122 bp, Homo sapiens
aagggaccgggccagaggcgggccttacgaatcgggggtctttgttgaggcaggcctccacgaactccttgaagggcttgctgtgctggccctccagtgtgggtgggctgttcttgggaatc

SEQ ID NO: 269313 - DNA, 122 bp, Homo sapiens
aaaactggccctggcaagactatttaagctatgtctccaggagactcacaagttgcgtttcgcagtcaggcctgggagcagtaaggacacccccgttttctgacttctcctagcatttcgca

SEQ ID NO: 269314 - DNA, 122 bp, Homo sapiens
agatcagggacaacctgggaactgaataactttcaaagccagtgctcagcttctctgctccgtactagcgtttacaggtcttaattcaaaccagatgcctgtactagtttttagaccccaag

SEQ ID NO: 269315 - DNA, 122 bp, Homo sapiens
taaaacattattggaccacactctggcaggggaggctgccaaagggatttccctttggaacggaaaaatcttgggattgaaggcaggggctggcatgatattggagttggctaccagagttc

SEQ ID NO: 269316 - DNA, 122 bp, Homo sapiens
aaggagatcactgccctggcgcctagcattatgaagatcaagatcattgctcctcccaagcgcaagtactccgtgtgggtcggtggctccatcctggcctcgctgtccaccttccagcagat

SEQ ID NO: 269317 - DNA, 122 bp, Homo sapiens
agcgcgggggtgggtcccgaagcgtcccatttctcctcctggctgttaactgagcgctctcgctcagtgcagcgaggccagcgatgccttctggaccacacgctgtcctcgccgaggtcctg

SEQ ID NO: 269318 - DNA, 122 bp, Homo sapiens
ggcgctcctgcctactccggaccatccctgcttggactgaaagcctgggcttcggcggggcgggcgggcagagggcggagggcggccccaggaggggcctggcagcagagaaaggtggcccg

SEQ ID NO: 269319 - DNA, 122 bp, Homo sapiens
aaacaaatgaaaacactatttctgctactgaaaaagatgcgtggcaggctctttaatggacgaattgagaaatcaacagcatttggttaagtctggcgactgctggaaatccggcggctccc

SEQ ID NO: 269320 - DNA, 122 bp, Homo sapiens
aatggtagtgatatatttgacaagacctcatctagcaaacatggataaggttcagacacacgctaaattataaagcagcacaaggggaaaaacctttttcttactataactggctgtaaaaa

SEQ ID NO: 269321 - DNA, 122 bp, Homo sapiens
ggtgcctgtggtaccctggctctaagagggatgcattagactaaacgggatcgcaacttgcggtggttcgcccgcctgcagctcttatacagcagcccgtgccgtgcgccctgcttgctgca

SEQ ID NO: 269322 - DNA, 122 bp, Homo sapiens
agaaggaggaggcgggggcccagggtggagagcacgagggcctggcccaggcacggccggcgcctccgccctcgaggagggcgtcacctcagctccccccggcggcggagccggcgggctca

SEQ ID NO: 269323 - DNA, 122 bp, Homo sapiens
ggaggctgggagtctgaggccgggtgtgggcaggacgagttttcctgaggcctttctccccggtgtgtggacgccgtcttcttccgggggcctccacccgccgtccctgtgtgcgtgtctgt

SEQ ID NO: 269324 - DNA, 122 bp, Homo sapiens
catttttactgcaccatcacttacttcctggccttcccggaggaagtgtgcgggcctccccgaagtaaccggtaccgcccggggggttttgaagttcttggtcaactgcaaaatcaatcaac

SEQ ID NO: 269325 - DNA, 122 bp, Homo sapiens
tttcacacgatgtctttttatttcgcagttgagtcccagtttctgccgctttatctttcccgcctcccggcaggcaggccgttaaccgtcttccggaagacgctgctagaaccctccggccg

SEQ ID NO: 269326 - DNA, 122 bp, Homo sapiens
cgtccccggagcccgggaattgccgagcgagctcaggtatcgctccctgagtcgtggtgtcgggcaccgtccgcctccactcccatcctggcaatgcggtggctaaatacaaggcacaaaag

SEQ ID NO: 269327 - DNA, 122 bp, Homo sapiens
ctcaggcggagaccagctgcagggtggcagccagggtttggaggaggtgagggagcgtgccggcccggcacccaacaggcttcagtcttggctcccacacagcttgatgctcctttcggggt

SEQ ID NO: 269328 - DNA, 122 bp, Homo sapiens
gcgtggcgaccaccatgacgaaaataaggaacctgaggagcccggaaggcatgacatcaccgttcctcctcccagctaccgaaggcgccgcgcgctgacctcacaaacacggcttctcctgg

SEQ ID NO: 269329 - DNA, 122 bp, Homo sapiens
taggcagcaggactaaagtgatgagagccgccatgatagtgagggccgagagcaggatggcggaattagaaggcagcgtcctgacccctggcgatgagctgagtcaattggtccctgtctcc

SEQ ID NO: 269330 - DNA, 122 bp, Homo sapiens
tatctaatgaattatagtcattcctgatagccagagatggggatcatgatgaatccagcccgaagatatgctttttcaggttaatctcccaggctaaagttgtttttgtaatagtagctgac

SEQ ID NO: 269331 - DNA, 122 bp, Homo sapiens
acttgtttttttgggctcgttctggcctgcgctgcgagggctgtgggcactgatgggcaacggaccagagcctccagcactttcctgtgccaccccacgcctggccctttgaaatgtgtgcc

SEQ ID NO: 269332 - DNA, 122 bp, Homo sapiens
gctctgcagaagaagcggctgcttggctccgcctcaggcagcagcgaaggggtgggatggcgaagggcaggggcgggatggcgaagggcaggggcagagggctaagttctggggaagaacag

SEQ ID NO: 269333 - DNA, 122 bp, Homo sapiens
gttaaggacatgcccgtgacacagccttagaaggtcctaagaatgtgtgtccaaaatagtcgggacaccacttgattttatacattttagggagacgtaagacatcaatcaatacatgtaaa

SEQ ID NO: 269334 - DNA, 122 bp, Homo sapiens
atcccaaatccttactgggatgctggtgagaatgagtgctccgctgccgcaccgcgatttcgactgcaaagctttccaacacaaggtccactgcgcggggagcaagtgtttgggaggcagga

SEQ ID NO: 269335 - DNA, 122 bp, Homo sapiens
gactataaactccagctctccctgcaaaacccctgggtgctggcgggaaagtgatggcgtcggctccaagctctaacggtcctccatctgtctgccttcatttcagcctttgaaaaacaccg

SEQ ID NO: 269336 - DNA, 122 bp, Homo sapiens
attgtatcaccttctgccagctccccgtcaagctgtgctgtgctttggttgcttcctggccggtgaggctgtcatctggaatcctccccagtatctgacccggttaatttgcaggagcaaga

SEQ ID NO: 269337 - DNA, 122 bp, Homo sapiens
gtcttcatttaaagtgattctgcttgtctgcgcccaagagccgtttctgcctccttgtcgcgcttcggaattaaaattctaaatgatgccaaaggaagataaaatgttaaagacagcttctc

SEQ ID NO: 269338 - DNA, 122 bp, Homo sapiens
attcagcttcatcgtgcccttgctgtgtgcctggcagagacctctgtgcttactacatgtcgcatctcattgaatcctcacaaccttaagatccttccaggttgagcatcccggaccctaaa

SEQ ID NO: 269339 - DNA, 122 bp, Homo sapiens
tgatgtaatgaacctaatttgatttccattttaaggtggtgtctgtgcagctggtgtccccgattctggctgtcctatgtccaggaagaagcccatttgttgaggctgaccttcctgatcat

SEQ ID NO: 269340 - DNA, 122 bp, Homo sapiens
aagctgggcacgtggggcggaggcagctgcctggtttccatgtgtgcgccctttaagacccggcggcgcgacggaagcgcgtgggcagcacgtgggcagcacgtgatagcgctgggcgactc

SEQ ID NO: 269341 - DNA, 122 bp, Homo sapiens
ttccaagaccttgggtccagtccccacatggacaatgggccgagtggctcagggagtgcacgaagttccaatgggcttatgggagggctaggtctccacttctttgtacctacacacagttc

SEQ ID NO: 269342 - DNA, 122 bp, Homo sapiens
aagacatgaacggccacctcacattaaaagcaacaccagtgtcctcatcgtgaaactagacgcccgatcttatcctcgaagcaatgaatgctcaacaggacctgctgctcagcaggatggca

SEQ ID NO: 269343 - DNA, 122 bp, Homo sapiens
gactgccacagagaatagcgggctttgacatcaacagttctgattgggtaaaaagaccctcgtcttggggtagttctcttttgaagtcctagagtccgtcacacacaaacgccttcttcccg

SEQ ID NO: 269344 - DNA, 122 bp, Homo sapiens
ctaacatcccctaaagtaacgagcagagtggtcatcaggagtatataaacgcagggcaagcgcacagcaaacattggtgctgggccctgagcgcccagaacttgcaacgtgcccgactcagc

SEQ ID NO: 269345 - DNA, 122 bp, Homo sapiens
caggtctggtctgaggagctattcaagctggctatgaacatcctggctcagaacgcctcccggaacaccttcctgcgcaaagcgtgagccccaggccacccgagggggagccggggggttca

SEQ ID NO: 269346 - DNA, 122 bp, Homo sapiens
agttcacgtgccacctggaggcagtggtagtcatccatgccttctcggtgaggcactgtacgccagagtgactttaaagtatgaggaagccattagcactgctccagggaccacatattttt

SEQ ID NO: 269347 - DNA, 122 bp, Homo sapiens
gaaaaaagttacgtggacatcgtctgtggactcaggacggacagaggccgttcccagccgcgtcacatggaggttaggatgccttttcctttctcacgcaggctgctccagactcctgctcc

SEQ ID NO: 269348 - DNA, 122 bp, Homo sapiens
ctaacgaggcaccatcgcgggtgggggtcaggctatcagggccaagggcagtggagaaagcgcgggaagcgcggaggtccccgaggtgcaagctgaccacccgcggccccgcgtaccttgcc

SEQ ID NO: 269349 - DNA, 122 bp, Homo sapiens
ggcagcccgggccaccagagcccgaggagccggaggccgaccagcacctcctgccacctacgttgccgaccagcgccacctccctggcctgtgagtgctcaggggtgggatggccatgggca

SEQ ID NO: 269350 - DNA, 122 bp, Homo sapiens
gagcgccaggtgggtgcgttacagagctgcagctgcagcatctggggcgtttgtggctcacgcatattctggtgtctctcaggccgcctttgaacagaggccgtgtctgcattggcatcgct

SEQ ID NO: 269351 - DNA, 122 bp, Homo sapiens
aacaggggtgccgttcatcatgacagtgtcctcatgcaagaaactttgcagttacagccacgagggaagaaaggaaaagggtccctgtttgtgtcagccggaaagatagcagaggctagcgt

SEQ ID NO: 269352 - DNA, 122 bp, Homo sapiens
tatcttaaattcagaaattgctttcaaatgaattaaattttagaaatatccattcctgttcgtcctattcccagtgaaaataagcaactcttccctcttccaaaacagtggatttcttttct

SEQ ID NO: 269353 - DNA, 122 bp, Homo sapiens
cattggaccacccccactcttattcctaaaacgaatctgaaaataattagcttgctttaacgggaagaatgaatgttagggaaccaccctgctgaactccattttgctgtcggctctgaata

SEQ ID NO: 269354 - DNA, 122 bp, Homo sapiens
gttgggcgtccttgttgctggtgtccagggtctcacagctccttctcccctcagggtgtccgtgccgctgctgaagacgctggaccacgtgctcacccacggctgcttcgacatcttcacca

SEQ ID NO: 269355 - DNA, 122 bp, Homo sapiens
gccacctcacctggcctcccagcctggtttttctctgcctgtttgtagccctgggttcgacgggggaagcagtcgcctgatgggcaagtgctctctgagtggtgcatgaaggtggctgtcca

SEQ ID NO: 269356 - DNA, 122 bp, Homo sapiens
ctccctgggaagacggcttaggatcctccgcgttatttaacttggcagctggttaaactccgcggtggagcctgcccaaaggtattagcgttaagtgctgagagcaggagttaagccggcag

SEQ ID NO: 269357 - DNA, 122 bp, Homo sapiens
atctgggaccctgaccccccggctcgcctcttaaagtcggtgctggagaggaatctgattcgtccacagaaggccactccgcccacttggtagatgtggaagtgaaagctacaaaggctgga

SEQ ID NO: 269358 - DNA, 122 bp, Homo sapiens
tcttttctgtgttctggaagagcagtgaagcagctctgaaatgaagcatttactactgtgcgtgccaggacaaaaacagatggaccaaagaagtttagatggatgaatctgaaaaattggat

SEQ ID NO: 269359 - DNA, 122 bp, Homo sapiens
tgaagcatgtgtgaccacctatacccattgtggcctgaactagagtttcaggtttactttcgaatgtccttgactgagaggagagatccattcaatttgttgcagggcttagaattttattt

SEQ ID NO: 269360 - DNA, 122 bp, Homo sapiens
ccccaaaagggctgaaaggtcattctcacccccaaacaaatgtcctactctgcatgggggcgagtatgacttctattgtgactttgctatggagcttcccagaaggccttggggactagccc

SEQ ID NO: 269361 - DNA, 122 bp, Homo sapiens
aaaatgtacagttcaaaaagtcagtagctaaactgaaatacctaaaacttaggtccctttcgagcctagccatttaattactgataaattgttatcatttgaaggtaaatttgtcattttat

SEQ ID NO: 269362 - DNA, 122 bp, Homo sapiens
aaccctaccggcctgggagacattaactggggcacaggggccaaatctatcacctcctcccgcaaagaaacaccagtacaacccaggacagcggtgcactctcaccccccactccggcctgc

SEQ ID NO: 269363 - DNA, 122 bp, Homo sapiens
tggctggcgtgtcggcggcgctcggggagggcgggccggggggcgcggcgcccatgaggccgctgcagcgcttgatctgcttctgcaggtacttgcggtggttcaccttccgcttcgacttg

SEQ ID NO: 269364 - DNA, 122 bp, Homo sapiens
gctgaccgttcactgacctcatcaacaatgacacagctgaaggggacacccccttgcccacggaaagcagactcaagtagtaaaccaccacttgtgctcaacgtgcagcagatgatatggga

SEQ ID NO: 269365 - DNA, 122 bp, Homo sapiens
gctatgagaaccgactgcactggtttgccaagtacttcccctacctggtgcttctgcacacgctcatcttcctggcctgcagcaacttctggttcaaattcccgcgcaccagctcgaagctg

SEQ ID NO: 269366 - DNA, 122 bp, Homo sapiens
agtgcttcccaagagctcctgagaacgcagcgctcaggcctcccagctgggtgagtctgacgccctccatgcgaagacggcgcgagcacggcttcacctgtggaaccaggggcagacttatg

SEQ ID NO: 269367 - DNA, 122 bp, Homo sapiens
taggtttatgctttttatttttttttcctgtggagcacataccactctcccatcccccaacgcataccttctaggaccacatcgcccttttgtaggacttctctagtgtgtagaatctagaa

SEQ ID NO: 269368 - DNA, 122 bp, Homo sapiens
gtgagtgatctggaggattctttccttcccaaatggctgggaaagcttaatggaaggccccggaggaagtggctttcatctccgattagaagccttctgtaaatgcaaaagccctattaacg

SEQ ID NO: 269369 - DNA, 122 bp, Homo sapiens
gacggtgacaggtgttcggccgcctgctgtctttgcacgtccatgtgccctgagtgtctccggccagggccacctggcaccagctgctgtctgtgccacagcaccggttctaaccagccccg

SEQ ID NO: 269370 - DNA, 122 bp, Homo sapiens
tactcaactttttaaggtcctgttaaaaccaaattgtttttctattatgaggtgacctttcgcgggacccgccagggcccagattccagcagtgcagagggttgggatgactccaggcagca

SEQ ID NO: 269371 - DNA, 122 bp, Homo sapiens
ttcctttcttcccctctacactccaagggcgtcacctgttccttcctgttttttatagttcggctgagcgcagcgtgggtattttgagctgagtcaaactgatttccgctgacaccagcttg

SEQ ID NO: 269372 - DNA, 122 bp, Homo sapiens
gcccgggggcagtgccgccaggaagtgggacggggactctggcgcccctccaggctgctgcgcgcgggctggggaccgtgcaccgctttgcgcgccagacgatgcatcttctggaacggcag

SEQ ID NO: 269373 - DNA, 122 bp, Homo sapiens
aaaaatcatctcacagaaaacaagggaaatgctctcatctgaaaggtggggaaggcagagcggggtcatgtcagtagcaacactggagtcacacagaagtttgttcccatctaaactccaca

SEQ ID NO: 269374 - DNA, 122 bp, Homo sapiens
actgccatctccaggacacaggagtcctcgccaggatgatcaaagcggcagccaactcagcgggaaaacgtgcaacatcaccctcgtgaccagggcttttgatccgggaaggtcggagcaga

SEQ ID NO: 269375 - DNA, 122 bp, Homo sapiens
ccaagtgcccggcaccagcagacgtctgcccgcacggggtcggtccgcatggggtcggtccgcacgcagctgacgctgaggctcaggtagtctctttggtcccactaagcggaggatgcatt

SEQ ID NO: 269376 - DNA, 122 bp, Homo sapiens
gctcacagctgtgcccggaggggtggactggcacaagccgggcctcagctcccgcttaggcgtgcactgccaagtcccactctgcagcacagccatccatgctgccgcagacacatgtcagc

SEQ ID NO: 269377 - DNA, 122 bp, Homo sapiens
aaggctcactccctcccaggtaacacgcaacccgagtagctctgtctgagaaccgccattcgccttgccgtggtccctgctgtgctgatttggttaagtctttttgccatgtcaccgcgcat

SEQ ID NO: 269378 - DNA, 122 bp, Homo sapiens
ggtgggctggccaggcctgaaagcagcacctccagcccttatatcctgggcctcagcagccgccccgcccccacctttcctccctctggggaagctttaagatcatataacccccctccgga

SEQ ID NO: 269379 - DNA, 122 bp, Homo sapiens
cgcaggtagacaggccaggtgagccggccaccgcagaccggaatgagagcctgggaatcacgagctccaggtccggaggtaggagctgggacggcctgtggtcaaattatttttccctctaa

SEQ ID NO: 269380 - DNA, 122 bp, Homo sapiens
tgttgactggagtagatgagcagcaggaagaaagtgcactgtagtcctttgcaaaacacacgcaccccacaaggtgaagataaaccttatacagcttcaaaggtgggcactgaagtgaagtt

SEQ ID NO: 269381 - DNA, 122 bp, Homo sapiens
gctccattagctttcagactgagaatcttaaaagctgtgtgggccgggcaagatggctcacgtctgtaatcccagcatcccagcactttgggaggccgaggcgggcagattacgaggtcagg

SEQ ID NO: 269382 - DNA, 122 bp, Homo sapiens
taaacaaaggagcgcactctctgcggcggcagaaaagcgaaccagagagcaggaaggcggcgctggctccgagccttgtgtctgcatttcccgcactttcatctgctggtccggacccaggc

SEQ ID NO: 269383 - DNA, 122 bp, Homo sapiens
cccaatgtcagccctggtcacatagccagtcgaaacacagcagggactgcctcatgaggacgagaacaactattcctacctcatgcttcctgctaggcagatgtaagtgttgcacggatcat

SEQ ID NO: 269384 - DNA, 122 bp, Homo sapiens
gtgaagttcaaaggaaaggaccgtctgtccgggctgctgagctgtggtgcaggcagagggcgcggaggcccgggccaggcagagccccacgcgtgtccggccccgcgcaccgcggccaccac

SEQ ID NO: 269385 - DNA, 122 bp, Homo sapiens
ctctctgaccatcctccctggcctcctttgctggttcctcctcttctcatcctaaaaccccgacgtgctcagggctcaggcctcagacacctccagctgcacacactcctcaggtggcccct

SEQ ID NO: 269386 - DNA, 122 bp, Homo sapiens
cctcacacacacggatctgcccgtggagtgatgaacttgtaaaagaacgtcaggtggaagcggtgagagggcctggacagttgttctgcagctgtgttctttgtctggttaatcgcgtgcgt

SEQ ID NO: 269387 - DNA, 122 bp, Homo sapiens
gtaagtgctgccgcctcaggagcgggcgcagtcgcttatggtgccggtgagcctgcgcggcgctggcttttgctcctctggtgccaatgcagctcgttgacagctccaagatatttggatat

SEQ ID NO: 269388 - DNA, 122 bp, Homo sapiens
tcactctctgtctgtccaatgcaggcggctgtaagttgggaagctcattaattagcgggccgggggtaggaggagccggctggaattagcctgcctaatgcgcctgtcagtccgggcgctgc

SEQ ID NO: 269389 - DNA, 122 bp, Homo sapiens
ccccagctcaggaatcatttcttcaaggaagcggcagagacgcgctcctgatctgatcagcgtctgcacgaagcacggcttctgctccttcccactccctgaccaggagctccagccacata

SEQ ID NO: 269390 - DNA, 122 bp, Homo sapiens
ccgagatgttgagccagacctgggcatagtgagtcacgttgcccacaaaagcaaaagtctcgttggcctgcagggggtgaggcaggggcatggagtttctggacggacccccaccgacttgg

SEQ ID NO: 269391 - DNA, 122 bp, Homo sapiens
tcttacatctcctgtagcctagcccaatgtctagcccagggcctggcacagtagggcttacggatggcaatctcattggaaagtttgtcttgaaactgcctttgcaaaacaaacactgcttt

SEQ ID NO: 269392 - DNA, 122 bp, Homo sapiens
tattcaatgctggaatgacgctaaactttttgtatttgagattttttccaactgtggtaacgtctgcacacattagatcaaatgtgcagttttttgtttttgtttttgagacggagtctccc

SEQ ID NO: 269393 - DNA, 122 bp, Homo sapiens
ctgggggagcgggctaagggccccagtttatgtgctggggctgtcactttgcactgagcgcgcccccagctccagccgctctggctgctctctggagggaacaagggctttcagagctgggg

SEQ ID NO: 269394 - DNA, 122 bp, Homo sapiens
ggtgctaagcccctcactgcctggccagtggggccggcctgccgctccgagtgcggggcccgccaagcccacacccaccccgaactggcgctggcccgcaagcaccgtgcgcagccccagtt

SEQ ID NO: 269395 - DNA, 122 bp, Homo sapiens
gagcctgtgggacgtgtcggaggctaacgtcgaggacggggagatccgcatcaatgtgggcggcttcaagaggaggctgcgctcgcacacgctgctgcgcttccccgagacgcgcctgggcc

SEQ ID NO: 269396 - DNA, 122 bp, Homo sapiens
ccttggctgtcatgtagaagaaaggaatcccagtgctattgttgaaggggccatcactgacgggcaggcagttcccaaatggcagtccttggatctaacaaacaccaaaaaaggctttttca

SEQ ID NO: 269397 - DNA, 122 bp, Homo sapiens
ctacgctcagagcagccccggaggagcccggctccttgcagcgcagtagatgccagaccccgagcaggtttaaaaaagaaagccaaggccgggtgtggtggctcacgcctgtaatcccagca

SEQ ID NO: 269398 - DNA, 122 bp, Homo sapiens
tgatgctgacgcactccgtcagacactgcgcatggtcagtggtggctgtgtcaacggctgcgcagctcatgacggcgccgggctctaacggccagaacctgtagtttgggcgagggaatatt

SEQ ID NO: 269399 - DNA, 122 bp, Homo sapiens
cagagcctgtgtgtgattatctgtagagatatgcctgtgtgcagaagccataactgtcatcgggcctgtaagtatatgcaggccttgtgcatatggacactctactaatgtattcaaaaatc

SEQ ID NO: 269400 - DNA, 122 bp, Homo sapiens
gtataattcctctacagtggtctgtcatgtggaacaggacccagcattgcgggggcacgccgcaagtgggaccgttaccactgtttacaccagagcaaggaggaactggggtaaaggtgcag

SEQ ID NO: 269401 - DNA, 122 bp, Homo sapiens
tgtgctttgtttctgatgattgccttttagtctccttgaggaagtcactatgactgagagcgaggcacacaccatgtcaagagtttctcctgctcagacatgccttgagttggccttttggg

SEQ ID NO: 269402 - DNA, 122 bp, Homo sapiens
ggtcttaggaaggaactgcccctcccagggttagctgagtcctccagagagcaaacgactcgctgttgggcgtgcctttgctttgcaagctgaccagtccagagcccggacaccagccacct

SEQ ID NO: 269403 - DNA, 122 bp, Homo sapiens
tgcgccagccccacccccgcgtctcctgctggctctgggggggtgctccgtgcagctctgcgctgtcttcagcctgttgcgagtgactcttgacgtctgtctttcagagacactatggacag

SEQ ID NO: 269404 - DNA, 122 bp, Homo sapiens
acctccgacttccaggacggcagtgagcatggtgccttgtggccccaacagttgatgttccgagggtgggatggtgtttggccatgttcgactcgatgctgtgaaagatgtcttcaggcttt

SEQ ID NO: 269405 - DNA, 122 bp, Homo sapiens
gttaacagtattgctcatgaacttggcctgtctgtctggctcgtgatgaatggtgagacccgctgacaagttcagcctagggacctcccctactgtggaagtgggagaaacacacacgggcg

SEQ ID NO: 269406 - DNA, 122 bp, Homo sapiens
tttcttctccccgctggggctctgttgtgcctcaggtttaatggatgtcactctccttatcgcctccaacacctgtgcgaagctggaggcaccagtcagggtagggtaagcgagtgcttgga

SEQ ID NO: 269407 - DNA, 122 bp, Homo sapiens
agtgaatggtgtttctgggataccacagcaaccttgacgaggactcaaccatctctccaacgggggcacaaagtctccgctactctggattctgtcttttcttgtgcgttttttcccctcca

SEQ ID NO: 269408 - DNA, 122 bp, Homo sapiens
gagcaaagtcttgggagcagtgaaatgggggttggatcatagagacaggcgctggggactcgggtactgcagttaggaaagtagcgttatgagttgtactgaaaatgttgattctctaatct

SEQ ID NO: 269409 - DNA, 122 bp, Homo sapiens
gacctctgaggtctcctttaggtctgtgctgagacgctttgacgcgacatgggaagcaggcgcaggccacagagtttctagcaatgagcccaaagtgagagtcagtgtgatggggtggctcc

SEQ ID NO: 269410 - DNA, 122 bp, Homo sapiens
cacgctttgagagcctggaacttttccgtgcgttccggaatgtaaaggtgttttcaagctcgtctcctctccgctgggattatgacctcattatccctgaatttttctccttggagaatgtc

SEQ ID NO: 269411 - DNA, 122 bp, Homo sapiens
agcttcaaatgtagtggagtgccctgtatttttatttgctaaatttggcagccctagtaacgggagctggaaggcttttgttatttgccctcaagcagcatttcctggcattggcttcagtg

SEQ ID NO: 269412 - DNA, 122 bp, Homo sapiens
cctcctcaagacaagcccgggagaaaggcggcagctgcggcgcggacggctgagcctccccggccagcactcacccagcattcgcagacgccctctccagcccgccgctcgctcccagagtc

SEQ ID NO: 269413 - DNA, 122 bp, Homo sapiens
gccctatgaatgccttgtctacgggaaagccttcagcgaacattattccttcaggagccacgtgaaaactaaccggggagagaagctctttgagtcgtccatgtggaaaaggctccagtgag

SEQ ID NO: 269414 - DNA, 122 bp, Homo sapiens
taggtggtggggcttccacagatgaacgttttgattaataaaaaatggactgaaagtcttcgggtatgaccaatggctaaatgcaattatttactcttgcaatgtgttcgaggtcacccagc

SEQ ID NO: 269415 - DNA, 122 bp, Homo sapiens
agcgaagagtagagaccctggatgcgtcccggccgacgcaggtggtgggccaggagagcccgcagggcggaagagaaactgaccacttaggaaggggcgccgaggccacgggggaggtgagg

SEQ ID NO: 269416 - DNA, 122 bp, Homo sapiens
ccggcaccgcgcggcctccggagctgcacccccaaatccccgtggcgacttcatttgaagcgtggaagaagcaaccacgcaagtggagagtgggttctgaaagctctgggatgaaccaccct

SEQ ID NO: 269417 - DNA, 122 bp, Homo sapiens
gataagaaaagttcaagggtgctaaaaggttgaagttcacttttcgtactctcggttccgcgggtactcgcgacaatgatggaggctgggggaagaagcaatgcgacaatatggtcgttgtg

SEQ ID NO: 269418 - DNA, 122 bp, Homo sapiens
agagcaaggactatgtcccttttttgtgcagccaggcaggccctgtactttttctctgcgcgaccctcctcgggcagcaccgggtctcgaactctcacgccttactcccaagcaggttctgt

SEQ ID NO: 269419 - DNA, 122 bp, Homo sapiens
tcggaatcacccaaagggcaggttatagcactaatttctgggtcctacttccagatgtttcgggctggtaagtgttgccattcttttacaaggccaacatacaaatccagagttctccttta

SEQ ID NO: 269420 - DNA, 122 bp, Homo sapiens
agcagagtggggtggggctctgcacaagctacgccccccacctccctggcctccgggtcgcgtcagaaacagccgcggggcaccacgggatatagagtccccaggcctgggaattcacttaa

SEQ ID NO: 269421 - DNA, 122 bp, Homo sapiens
gttgaggtgcccgggccctgtggctgggctgcgggcgtgtcacccggctgttgaggtgcccgggccctgtggctgggctgcaggcgggtcactcggatgttgatgtgcccgggccctgtggc

SEQ ID NO: 269422 - DNA, 122 bp, Homo sapiens
ccgcggaggccggctgtgggtggaggccggctccgagcgcaggccgtcgggagcaagcggcgattagccttagctagccatcgcatctaagaatcgctcacgccgtagttgggcgccgccat

SEQ ID NO: 269423 - DNA, 122 bp, Homo sapiens
agggagtcaggatctccaaaccctaacacattttaacgctgaggttcacataactcccagcgctccttccgcacgaaccgcccctgcacagggaacctgctggaaaggacgagcctctcttg

SEQ ID NO: 269424 - DNA, 122 bp, Homo sapiens
tcacttcccagactgggcagcggggcagaggggctcctcacatctcagacgatgggtggccgggcagagaccctcctcacttcctagatgggatggcggctgggcagagacgctcctcactt

SEQ ID NO: 269425 - DNA, 122 bp, Homo sapiens
caagactcctccagctgtggctcaccactctggccaggcaggtggtgacgagagacaccacgccctacagggaggcccgtgggacttcggtaggccagtgatcctcaaactctgctgcatgt

SEQ ID NO: 269426 - DNA, 122 bp, Homo sapiens
gacgccaaatgccaggtccttggtgagcccagtggtcctgtggagatgggtcacacagcccggctcagcccagggcaccgaaggaagccggtggccagcctgtcagcggcagtgggactttg

SEQ ID NO: 269427 - DNA, 122 bp, Homo sapiens
tgttgcaggcatgcaggtcggtggtgttacacacattcacgcttttgcaggcgtgcaggtcggtggtcttacattcatactgttgcaggcgtgcaggtcggtggtgttacattcacactgtt

SEQ ID NO: 269428 - DNA, 122 bp, Homo sapiens
ccaaccctgcgtccccgacgcccgtcaccgtatgtccccgcccacccccggcctctgccccgcccgcgcagtccagcctggtgtgggctccctgcaaccccaccccctaagccgggtcccgc

SEQ ID NO: 269429 - DNA, 122 bp, Homo sapiens
ccgccctcctccagcgccgccctactctcccgccagctttctcaccctctagcctccccacgtccccactctgtaaggttcccgagccctcaaagcagccgcgctcccgagccgcagccgcc

SEQ ID NO: 269430 - DNA, 122 bp, Homo sapiens
ttgcttccccccaggctgcccgaagcctgtggatggggctggactgcagggctgacaccacggcataaactgaagagaagtttcggagcagccggcactcctgtgggggtcaaagaagagag

SEQ ID NO: 269431 - DNA, 122 bp, Homo sapiens
tggggagggttggttaagtaggcgcacacagatgaaaggatctattttcataatagctaccgagtacagagtgcttcttttgcgctgagccctttatgtgctttgactcattaatcctcact

SEQ ID NO: 269432 - DNA, 122 bp, Homo sapiens
ggagaatcacttgaacctgggagggcgagtttgcggcgagtttgcggcgagccgagatggcgccattgcactccagcctgggcaacaagagcgaaactccgtctcaaaaaaagaaaaaaagt

SEQ ID NO: 269433 - DNA, 122 bp, Homo sapiens
tgagtgataattaattttcaggaaagattccagaatattggaaatatttttgtttttttgcgggagtgaatctgttttatttatgaattttatggtaattttaccttacagtgtgtcttagc

SEQ ID NO: 269434 - DNA, 122 bp, Homo sapiens
ctttctactcaggtattcctgtagtaatattcagcagtccctgtggcctccagtaacccccgaggcatcagtgttttatgttaatttgtgagctattaaatctcatttggcctgctggctct

SEQ ID NO: 269435 - DNA, 122 bp, Homo sapiens
tgggcaacctggaggagcccagggaatagcgctcaggacccagaggctggacagccagcccgcccgcccgtccctggccacgaggcgccccggacctgaccaccgcccccgccacctccgcc

SEQ ID NO: 269436 - DNA, 122 bp, Homo sapiens
gcaacacacaaggaaggccggccttgcgtacttgcttttccgtcttggctgcttccaggccgaccccgacgggctggttccctctgtatcggggcgggcagggcaggcagtggaagccaggc

SEQ ID NO: 269437 - DNA, 122 bp, Homo sapiens
gggtgggggtgaggttcatcctgtaaggagggcatctagcgttcctgccccacgggccagcgtcggggctcctctccctctggccaatgtggggagcctccctaaagtgctcccctcccgcc

SEQ ID NO: 269438 - DNA, 122 bp, Homo sapiens
tcaacaaatatctgtagaatgaatgaataattaaccctagttactaaccaagaactctcccgtaatggtagcccaaacagagaaaagcgaagattcttgaagaattatgggggaaaaaatta

SEQ ID NO: 269439 - DNA, 122 bp, Homo sapiens
gggtttggctctgataggctgcgtggtcagatcagactttgacatatcactacccttccccgtagcagttttaaatgcagcacaggtgatttgggaagacttcctaaatgtataatatttct

SEQ ID NO: 269440 - DNA, 122 bp, Homo sapiens
ctgaggaccggactagggtggctgaagtggtgaacggacctggctgggggcggatggccccgctgcggggggcgggggccggctaggggtacgtgagaggccctctggagcagatgagggag

SEQ ID NO: 269441 - DNA, 122 bp, Homo sapiens
gaagtccttcaggctaaggacttcctttctcgtctttgtgggtttttccagaggcgatcacgtgaaagttcatgtctcagcacagtttgggctggaatgactcccatatagatgctgataaa

SEQ ID NO: 269442 - DNA, 122 bp, Homo sapiens
gcctcactgtcttcttcctctgaaatcaagagcacagacagagacaactggggactctctcgaataaaagccgtctggtggctgatcaccatatatcagtattggtataattataaggagtt

SEQ ID NO: 269443 - DNA, 122 bp, Homo sapiens
tctcaaagtaacattctaaagaggcaccgtgagagccaatcagagagcccatgtaaataacggcccgctgattggctgtctccttcacgccctgaacgaaacttcaacttcatcaactcagc

SEQ ID NO: 269444 - DNA, 122 bp, Homo sapiens
tcacccacggttccgcctgctcttccctgggctcctctccgcggagccgacggggcctcgcggccacatcaggtctgaccctggtgcgcccctgctgggcatgggccatgctggccgcagcc

SEQ ID NO: 269445 - DNA, 122 bp, Homo sapiens
cagtggggaaaccaaggcccagagagaggggctggcctgaggccacacagtgagctgaggcggagccacataggaacccgttcttcccggagctgcccctgggcccgcggggcccaccttgc

SEQ ID NO: 269446 - DNA, 122 bp, Homo sapiens
gccaaccccacccccgggagaaggcccacatactgcaggggcctaaggcactcagtgaggcgcagaaccttctggaaggccccgccccaagaaagccaccactttaccctccagtcacggct

SEQ ID NO: 269447 - DNA, 122 bp, Homo sapiens
cggcagcggcggcgccgagagtgtgagcaccgcccgggagccgccggcccgggcgcagcgcgaccccgaccccgcccgcccgcctgcccgccatgggcaacgaggtcagcctggagggcggc

SEQ ID NO: 269448 - DNA, 122 bp, Homo sapiens
gcacgggggccgtgtgccctctagcgggaaacgctggaatgggccgcctggagggagagccggtcccctcggtgtgcctggcagcgcagaagtgggtggtcgagcaagaggccgcgtgggaa

SEQ ID NO: 269449 - DNA, 122 bp, Homo sapiens
gaggccagcacatgcagagccggcgtctcatccccagccgttgctgatcatcggcgaaggcggagttcaggtgcctcgctcctgacgccacaggttgtgcttgtctcactccatagccctgc

SEQ ID NO: 269450 - DNA, 122 bp, Homo sapiens
gtcctggccgctcggaaggcggggtgcgggcaggagctgcccggggttggcgggcggccgcggcctccccaccccagcgccgccgcccgcccggccgctctaactttggggggtctcgtcca

SEQ ID NO: 269451 - DNA, 122 bp, Homo sapiens
gccggccgcccttcccgcccgaggtcctggccgaggccctcaacacacacctgcggcacccggccatcaggtgagcccgcgacctaagcagccctggggctgtgccttcccgactccatctg

SEQ ID NO: 269452 - DNA, 122 bp, Homo sapiens
aaggttgagatgcatatatcctgaaaaagattattcacaaaggaagacgcagcctttgttcgttcttacctgtggaaagtaaagcccagggaggactcattcctcccgtcagaggcttcctg

SEQ ID NO: 269453 - DNA, 122 bp, Homo sapiens
gccagggcagcagtttttcacagtagttgtcgttgatggggacccgcatgaagcggctctcgcagatgaagtcaggcttggggcaggagttgctggcgttgaggacgtagcttattccattt

SEQ ID NO: 269454 - DNA, 122 bp, Homo sapiens
caattaccttaatcatcctcctcagggtaacaacaaggaagtgcttaggctgcctcggtgcgcggaggcagagtgagcagtgagttctggggagacaaacagccccggattcaaataccagg

SEQ ID NO: 269455 - DNA, 122 bp, Homo sapiens
ggggcaggaagggtgtgccagaaattaatactgtgtccggttcaggacaaacctaaggaacggtgtgtggtcctggcaggagggtgaccgaggtggtgggactggcaagtgggatgtgcttg

SEQ ID NO: 269456 - DNA, 122 bp, Homo sapiens
ggcataaagcaaaacaggaccttggcacaccgtcagctcgaactcaacactggcagccaccgtctcacccctgcggaggagcgctcccgtctcccacaggtgccttaccgcgttccctcccg

SEQ ID NO: 269457 - DNA, 122 bp, Homo sapiens
tgaaaccacagaatataaaaagcaaatcttataaataactggagagaaaagtcagattcacggtgttctgtcaaagtgttcatgtagactaagggtggggaaactttctgtaaagggctgga

SEQ ID NO: 269458 - DNA, 122 bp, Homo sapiens
gcggtggggatgggagtggatgctcccgggtcagctctggcactcgccagctgagcccagcgccagtctaggtgagccccacggcggtgagggacgctcgccagacggcccagaggagttag

SEQ ID NO: 269459 - DNA, 122 bp, Homo sapiens
agttgatgcgtagagggcatcaattactgtgcctggtacacagcaggtgctccataaatgcgtctcccctcttccttcccagggcctcacctggggagctgagaaatccattactgacaact

SEQ ID NO: 269460 - DNA, 122 bp, Homo sapiens
gagggtcaaccctggatcgatgatgagcactggtggagtatgagtcacatacgatgaatacgtgtctggaactctgaggtccatcgcagaagtcagtttcctctgtttcaactaactctgta

SEQ ID NO: 269461 - DNA, 122 bp, Homo sapiens
agagcggggtgggggtggggcagatggttggcttggagggctggcaagctgcagagcgggcgtcgggagcacagagctggcacaagtagaagcagctcagccgccctgtctgtctcctcgcg

SEQ ID NO: 269462 - DNA, 122 bp, Homo sapiens
cgctgggatgccagcggcgcccgcggaggcctcaccccctacctcggccgctccagggggcgggcctgcatctgggccacctcttttgcatattggcacccacaatccaccgcggctatgag

SEQ ID NO: 269463 - DNA, 122 bp, Homo sapiens
catcctgggcgcggagggcggaacagtttctggaccagagcacccgcgagaagcagggagcggccgcacagcagccagaagagggcgccagcaccccggggccggggctacagggctggctc

SEQ ID NO: 269464 - DNA, 122 bp, Homo sapiens
gcggcggaggctgtgcttgcgccctcgaccgtctcgcccagggctccccgccccacccctcgcccggccgccggctctgggcacccgactctgccctaataaggaaagtgggtgtgccgccc

SEQ ID NO: 269465 - DNA, 122 bp, Homo sapiens
cacacaggtcttggtggctgaggtagctgaagacggccatccacacctccctgtgcatgacgtgggctgccccatcgtccaggggtagcgagtcaggcggggggctgatggggggtggccgg

SEQ ID NO: 269466 - DNA, 122 bp, Homo sapiens
gcttcctcacggtctccttcctgcagtcctttgggtccagactactagcatcgccctctgcgcccccggtgcgcctccgccagcctcggctggacagcgggtccccattctagccgagggtc

SEQ ID NO: 269467 - DNA, 122 bp, Homo sapiens
aactggagaacaggccggtggcagagccccagcgcccacagcccctcggagagggcctggcgggaggagaggcacccaccgatggcagagcctcagtgccctcgcagaagccagcacccaca

SEQ ID NO: 269468 - DNA, 122 bp, Homo sapiens
gtgacgccaccgcggggcagccgagaggggaccgcgggctccgggcagggcaggcgctcccgcagctccagctataacacaagggagagaaagcaacgctttggttccagaaacttccatcg

SEQ ID NO: 269469 - DNA, 122 bp, Homo sapiens
cgccgccgtgggtttcaggccctggagatgatgagaatcagctggagggctgcttccagtcggcttctaactcgggagggctgagagccgctccccaccccgtaatttctgttcccagccag

SEQ ID NO: 269470 - DNA, 122 bp, Homo sapiens
gccccgccgaagcacagggtaatgtcgcagaagaggccctggcgccgctgctcgttctgccgccaggacagctctgagcagtgagagctgcactcgaaatcctcggcttctgggcccggatc

SEQ ID NO: 269471 - DNA, 122 bp, Homo sapiens
gggtgggcccagaggtccagatcctggggacagacagcaccccgggcaccttgggatgggcgcgccaggtactgcgcgagtctagcggggttcgtgctgcgtcccgtacagcgcgggctgca

SEQ ID NO: 269472 - DNA, 122 bp, Homo sapiens
ctgcccctaaagcagaagtcacggggcttggcggggggggggggtgggggaggaggagagcgcgggacagaagagccccactgagaggaggaaaccccgcccccaattctcaggcaccccgt

SEQ ID NO: 269473 - DNA, 122 bp, Homo sapiens
gcaggctcgaccaatcagaagaggtcttgggcgggcgctgccgtccagcgagccaataggcgggcagtcggagccgggcttgcccgggcatgtgggagctgccggctttccggacgccacgt

SEQ ID NO: 269474 - DNA, 122 bp, Homo sapiens
acaactctgcgggaagaatcgccgtggatgcacacaaataagcggcctacaaaatggagtcgcagccgtcaactcgccctcggcctttttgcggccctttcacgacagagccgggccccttt

SEQ ID NO: 269475 - DNA, 122 bp, Homo sapiens
accccaaaagaggtccttattttagagaaaaggcaatcctccagcttccaggggagcagacgcagagggacctggtggcaaccaccaggaaggcaccatgtaccccgcatttttacccagag

SEQ ID NO: 269476 - DNA, 122 bp, Homo sapiens
ggacggccacgcatgcccgtccctggggatcagcagatgtggggagcaggcatccaacgccgccctagccactgtctcctgggcctggcacacccatgcccagtgggaatcgctggacctgc

SEQ ID NO: 269477 - DNA, 122 bp, Homo sapiens
agtacagggtaaaatatgacagtagaaggcagcctgcccccattatgggttctacattcacgccccactcaccagcctgagcttgctgtcatgttgctggacagaaattgtctgagctcctt

SEQ ID NO: 269478 - DNA, 122 bp, Homo sapiens
aaggacctagggaaggggcctcaaggactacaagttccagcgtgctttgctcgatttcggcgggacaaaaacaatcttcgcggctcgtcagcacattgcatgctgggatgcgtgagctattt

SEQ ID NO: 269479 - DNA, 122 bp, Homo sapiens
tactttatgttttttgtgcatttatcctcaccaactttatgatgtagctgtgattttgcccgcctcacagtttagcaatccttagagacagtttaaacaatttgctcaaggtcacatggcta

SEQ ID NO: 269480 - DNA, 122 bp, Homo sapiens
taaagaaaattagttgccagcataaaaaagtgggagatttcacatagaaatccagatttccggcttctcttgaagaaatgggaggatccggtaaaatggtcccaaattcctgcatgaagaca

SEQ ID NO: 269481 - DNA, 122 bp, Homo sapiens
aggtgaaacctgaaataacatggagtcacttatgtaaaaatcaggaggaagagggttccacgtgagcacattagcccaaaggtggaaatgagcatggcaaaatcaagccatcaaacacggac

SEQ ID NO: 269482 - DNA, 122 bp, Homo sapiens
ccttcctaagtgctggggtcacagcgcccaccccttgctcactaagagccagggtcacagcgcccaccccttcctaagtgccggggtcacagcgcccaccccccttcctcactaagtgccgg

SEQ ID NO: 269483 - DNA, 122 bp, Homo sapiens
agggttccagctggcggtgggagtgggccacaggccgggtgatgagccgggacgggagcccggaagaaggggaaggagaaaggcggaaattgcaggtgcctgaaccggtagggcctccgccc

SEQ ID NO: 269484 - DNA, 122 bp, Homo sapiens
taccccaatgcctgaggagtggcgcatccaggccccagtgctccacctggcagtcatagacgtcctcggctgagggcacgaagggcaggtagtggaacttgcggaacaaatggtcaggctgg

SEQ ID NO: 269485 - DNA, 122 bp, Homo sapiens
aaagaagactgaaaacacccacagtagtagtattgaaatttcacgtgtcactcagcaactcgcgagagtcccgtctggtgctgagtccatttggaatatctgtccctgccctcccctcctcc

SEQ ID NO: 269486 - DNA, 122 bp, Homo sapiens
tctccaggcagctgcatgtgttgcaatccgctcacatggggcctgtgacatcacttcctccgccaggggcggagtggaaggcggcaggcggaagggagggggccggtgcgagtgaggagaag

SEQ ID NO: 269487 - DNA, 122 bp, Homo sapiens
gcattaatcaaataatctttcaagtatgttaatactacagcagtaagagctatgaaagaacggtctagggagccctgagagtatctataatagcatgaagtcttgattatgtttggagggtt

SEQ ID NO: 269488 - DNA, 122 bp, Homo sapiens
gatccacccatctcagcctcccaaagtgctgggattacaggcgtaagccaccgtgtccagcgtgttaacttcttaagagaatatcttttaagttgggttgcaaagtgcaaaatataatcgag

SEQ ID NO: 269489 - DNA, 122 bp, Homo sapiens
gggctcagtcccacccaggccagacgccccagagccacgtagcccgggtcctccagccctcgctgccgccgcttctcgcagagccaggccctccaacccgtgccacctcagcctctgcgggg

SEQ ID NO: 269490 - DNA, 122 bp, Homo sapiens
gggcagtggcggggcttgcaggaggcctcagagctctgtcggggccggacggaccgctgtcgtcgccagtgcagggacagaagggaggaccccttggagggcggtggagaccagagtcgtga

SEQ ID NO: 269491 - DNA, 122 bp, Homo sapiens
aagattccaggaggcggtgcgttgccacggagacggagcagggctactaggacgcacgcgcgagatagaacctctagtctcgtggagagattgaagatggcggcttctcaggcggtggagga

SEQ ID NO: 269492 - DNA, 122 bp, Homo sapiens
gtcccggcgagagctgcgattgggcgggcgcggcgatccctttgaagtgtggctgccgatcgcggctatttgacgtgcggctcgaggaaggcgaaggtttttgtgttgctagccggggccag

SEQ ID NO: 269493 - DNA, 122 bp, Homo sapiens
ggaccatcaccagcccctgggccctctgcctcttctccatctggtcctagttctcgaagtcgatcactagaagacacaaagctggggagatgcagactgaagatcaaaggggggttttacct

SEQ ID NO: 269494 - DNA, 122 bp, Homo sapiens
cctctctaccaatactcagggtaaatgtagacccagtcaaaggtggtccgtttctggttacgcatgagagtcataacagttattattagagccacgtgcatttaaatatttgtattaaaacc

SEQ ID NO: 269495 - DNA, 122 bp, Homo sapiens
cacggcccattcctacagcagctaaactacagcagttaaaagcactaggtcggccgggcgcggtggctcatgcctgtaatcccagcactttgggaggccgaggcgggcggatcacgaggtca

SEQ ID NO: 269496 - DNA, 122 bp, Homo sapiens
ccacagatgttttaatgtccagagatggaaatggtttctggattatccaagcaggtccaacgtattcacaaggctccttatgagaggtaggtagagttagaggcagaaaggtcagaggagag

SEQ ID NO: 269497 - DNA, 122 bp, Homo sapiens
gagaaagggctcggggtggtgggtgtgcggcttcagagggagcccctccctgggagtgggcggggcccggtggctgaggaggcagagtgaatgcttcagggcccaagctgcctcccagagtg

SEQ ID NO: 269498 - DNA, 122 bp, Homo sapiens
cccgcgggcggggcggagcgggccagggcggagctgccaggagcaggcccggatgtctgccgaccgccgaggacccgccgtcgcgctgacaacggcagcggagaggcagagccgcgcacgcg

SEQ ID NO: 269499 - DNA, 122 bp, Homo sapiens
ggctcctctctccgctcatctccgcttgtgtgcgggctgcgcctccgtgggctctcgctgcgtggggggaaggcggtctcagcagccctcggctgaccagtcatccccaagaaccctgctgg

SEQ ID NO: 269500 - DNA, 122 bp, Homo sapiens
cactcttctgatagaggcacaagtccattaattaccaaactgtgctgccacagagttatacggtcttcattcttcccctataaagtgtgttttagttttcgaggcaagaggagaaattcaga

SEQ ID NO: 269501 - DNA, 122 bp, Homo sapiens
gcccgccggggttactcccggtcattccacggcaccacctcggcccagcttccccatctgcgcccaggcagaagctgccccgagagaccagcagcaacggtctggaagatggggctgcaggg

SEQ ID NO: 269502 - DNA, 122 bp, Homo sapiens
caggggccccagcctcaggccccactcactctggggcttcaagggtggtgaccccagggccgtttctagcgatgattctggagggtgatgagttgtgaccactgcgttgttgctctccatgc

SEQ ID NO: 269503 - DNA, 122 bp, Homo sapiens
ggacccaggagtccaaatcccgtgtcctgggactcagcatccagcatgggtgcttggagccgttgtgaggagctctgcgtcctgtggggagcacccttcacgtggccgtgcggcacagagaa

SEQ ID NO: 269504 - DNA, 122 bp, Homo sapiens
gggtactttctccctctgggtcactccatcctgctctctgccatcccagagagatgaccacgtcaattccagaggtgacaccactctgagtccatttctagggtctttgttctagttgagct

SEQ ID NO: 269505 - DNA, 122 bp, Homo sapiens
atccccaccccacagtcgacacccgaatccccacagacgcccgaatccccaccccgcagacgcccgaatctccaccccgcagacgcccgaatccccaccccacagacgcccgaatccccacc

SEQ ID NO: 269506 - DNA, 122 bp, Homo sapiens
atataggtttaaatatttatatagaagccatacagaattgcacggcgagggcttccggggcggcggaggccgctggtggcggccggcccggccggccagcctgggtttattgcttcgagagg

SEQ ID NO: 269507 - DNA, 122 bp, Homo sapiens
gtcatggtctataaaatcacacaaaaactgaattacagaatactgaaccattgctctaggcgaagaacaggattaggttcctgtgaacctctctgcacagcatttttatcaaccaataaatg

SEQ ID NO: 269508 - DNA, 122 bp, Homo sapiens
ctcagcctgctgggacttgtagttctttttttaacaggcataggttcccgaggccactttcggctctgtcggcctgaggccgagcccaggatttaatgttccccaccctcccgcactcccca

SEQ ID NO: 269509 - DNA, 122 bp, Homo sapiens
cttctgaggaagccatctctagggtctcacttgagcagtgagagtggctcggggtcatcacgtgacccacaggagctaattgcatggggtaactgactacctatggggtgaactggcactaa

SEQ ID NO: 269510 - DNA, 122 bp, Homo sapiens
cagcaggagcaccacaaacctgcagcctctctccagaggcacagccactccatccgcagacggggggcagctctccagagaaacagccactccatccacagaccaggggcggctctgcagag

SEQ ID NO: 269511 - DNA, 122 bp, Homo sapiens
cctgaacaagtatctgttgcatttaatgcaactctttttcttgccagaacagtaacccctcgtgatttactgttcaatctgtatgaaaaacctgtgtgacctaattctgcatcaattttctg

SEQ ID NO: 269512 - DNA, 122 bp, Homo sapiens
gctcgccgccggcgcccgcgtcgggcaaaagccgccccagcccaccccgcgccgcgcccgcgaccccagccttacgctgcatggcgactccagccctggcgggggctcctgtgtcagggatg

SEQ ID NO: 269513 - DNA, 122 bp, Homo sapiens
ctcctctctctctgtctcttactctttccctctctctgtcggtttgtttgtgtccttgtgcgtgtgtttgtttggacgaatgtgccttgtgcgccaaagaagctatttttgcatgtcgtctg

SEQ ID NO: 269514 - DNA, 122 bp, Homo sapiens
tcagcctctctgccagctaaccccaaacaaatgtaggttctactctcaaacagggagtgccgcctgccctgccgcgcctgctcccgtctctgctctctgccagccaggctgaggacacctga

SEQ ID NO: 269515 - DNA, 122 bp, Homo sapiens
ctttctccctctgggacggcctgtcagcccgaccgtccccgccgcccgaagagctgtcgccgtcacagggcagacacttcggggaacgaccctctttggcgctcctcagtactcccctcccc

SEQ ID NO: 269516 - DNA, 122 bp, Homo sapiens
caatgtgtcccggggggcagggctggggctgggatcctcgtgtgtgcccagtctccttctcgtccctgcgggttccaccatcctcccatcctaacgcatcgttagggatgcggttaggtcgg

SEQ ID NO: 269517 - DNA, 122 bp, Homo sapiens
catgcttatcctgtgtccagccagccagagctccctgctcagagaaactcactcaccccacggaacaagacaccatgtggaggtttccgagacaggacccttccgcttttctgaacccaaag

SEQ ID NO: 269518 - DNA, 122 bp, Homo sapiens
ccccgcctcgccactgtgcacgatctcgcgagacttggcccagaacattgcggatcgggtcggcgccattttgggactgagactggttgtgggggagggaaaagcggcaaaaggggattatt

SEQ ID NO: 269519 - DNA, 122 bp, Homo sapiens
aagccgaggtccgagcagccgccgctgctttgggtggggggctgacagggctgcgcgcgtcgcgctcttggctggggctgcgcgggcccggggcgctgcgggcggctcagcggcagctgccg

SEQ ID NO: 269520 - DNA, 122 bp, Homo sapiens
ggctgtgcctactggctgcagccctcccttggcccatccagcagtctctccatccctccccgctgcacccccagaggagaaaaaatgtggcctaaagacagcactggcctggagggggctgg

SEQ ID NO: 269521 - DNA, 122 bp, Homo sapiens
gggaaacatttttgcaccctcccccaacattttgcttgacatacctatggggaaagttttcgacaagtgcttcccaggggtgtgtcccacagtgtcactccctgagaacaccatcaatttgt

SEQ ID NO: 269522 - DNA, 122 bp, Homo sapiens
ggctcgctttgaagctggagaactaatcacccagagagagcagatctccaggcaggtgagcgatgaccttacggagccagcagccacctttgggctcattctggacgacgtgtccttgacat

SEQ ID NO: 269523 - DNA, 122 bp, Homo sapiens
tcgtctggatctagcctagcaaagaggctgctccggatggggaggggatgaaaacccctgcggctgcgacgcagacgcccactttgcccaggccttcacagagccccaaaccggaaccgccg

SEQ ID NO: 269524 - DNA, 122 bp, Homo sapiens
acgaatgacacaagcagcttttcccgtgtgccagccatttcagacctcacatttgaacagcgtgcatgcaacacggaccgggagggggttgggggttggggggctgaggggcgaggaagaag

SEQ ID NO: 269525 - DNA, 122 bp, Homo sapiens
atattaccatctgttaagcttttaaatacctctgccattactttagacctaaaaataactcgggcttgggatcatcgcaaacatttgttggcagatgctaaaaatacaaatgggaaattctg

SEQ ID NO: 269526 - DNA, 122 bp, Homo sapiens
tccacaaacacatctgtctggttacaaaggcgctcccattacctggaagcccaagggccccggcgtcctcgatcggaggagagcagcccgcagagttcctgtctagacctcctgcacatttg

SEQ ID NO: 269527 - DNA, 122 bp, Homo sapiens
gcgcacgtcggctaccccgggagggacgcgggcctgagtaccgtcttggccgcgccgcggcgtaggtccagcttgagctgctggttctgctggagcagggtcttcatgttgttcttcagctc

SEQ ID NO: 269528 - DNA, 122 bp, Homo sapiens
ggtgtgtatgctgaggaagaacgctgttgccatagttccagtaaacaatgatggtggctccgaccaaccagtggcactggcagtgataagagggtccacacatcacttcagtgtaatagagc

SEQ ID NO: 269529 - DNA, 122 bp, Homo sapiens
gcttgcccaaagttacaggactagtcgatgtctggggttccaaaccaggccttctgactccgaggcgcctgcttaatggtccactttaaggaccagggatgcacttggcattttcgttactt

SEQ ID NO: 269530 - DNA, 122 bp, Homo sapiens
tttggagccacgttcctctgcgcggaacgtggagcgaggagttgccattcgaatttcctacgcggcctccgtgcgattggctggttcgcggatggcgggacgacacgattggctagtcgctc

SEQ ID NO: 269531 - DNA, 122 bp, Homo sapiens
cctggggaaccaattcccttatcttcaataaacaatacagcaaggtagtctgcttaagtccgacttgcaggaagtcagattgctgtctctagtaacaatccaggaggctaaataataacttt

SEQ ID NO: 269532 - DNA, 122 bp, Homo sapiens
agtaggccctgagcgttcatcttcatccgtccttctcagccggagcaccttgagctggcgcgtgttcaggtgcctctgagtctgtactccaaattatgttgggcgcaccttcagcctatgag

SEQ ID NO: 269533 - DNA, 122 bp, Homo sapiens
tggacgccgagtcgcggcgagttggtcccttgcggtataaacttggggcttccctaggggcggtgccgggatggatgggggcgcctctccacctgcaactcccccagcgcagagcgcaaaaa

SEQ ID NO: 269534 - DNA, 122 bp, Homo sapiens
gccctctctgcgaagtgggagttgaggtagaagcgcaagagataggaagtatcttctctacgagcttaagagtagttagggacatggaaacagtgatttgttaacttgctcacgacctcttt

SEQ ID NO: 269535 - DNA, 122 bp, Homo sapiens
cctgccaggccagagtgacagcccgggtgaccgaccaggggacagagtgctgggaattcacgtccctgaacacactgcaccctcccactctgcggtcaaaagccctgctgctccttcaagcc

SEQ ID NO: 269536 - DNA, 122 bp, Homo sapiens
tagggacttggatgactttgggcaagtcattaaactgaacaacggtagtgtggacctccccgggatgctgacagcctcagagagatagtattcaaagttgtcccaacacaggtttgggagca

SEQ ID NO: 269537 - DNA, 122 bp, Homo sapiens
gtgatgaaagtgtgccataaactgagagtatgactaaaacctttcatcttcctcttctgccgcttctaagttattggttctgctgttccttgacctgtttcaagctctcaccttctatatca

SEQ ID NO: 269538 - DNA, 122 bp, Homo sapiens
aagccacctggaagagaagctgccccaagattctccaggccctttctgagctgaaggtgacgtgacagacaggcttcaaagaagggtcagagacggccggtgggtgggccccgttcccaaac

SEQ ID NO: 269539 - DNA, 122 bp, Homo sapiens
tgccatgaataataaaggcctttatctctgacacaggaatctttgtctagcgccagcatccgtgaaacaggcacaggctcacttatcagcttgtaagtaggcaaaaaacaaatcccagatcc

SEQ ID NO: 269540 - DNA, 122 bp, Homo sapiens
gagacaaatgacccttctgtgagccggagtcccagctccgcccaggtgccgcctcggtcccggccactcaagccctggccactggagcagggctgcagagaagcaggtgcccggctggtcag

SEQ ID NO: 269541 - DNA, 122 bp, Homo sapiens
accccagaacgctccacagggtgcggctcccgcgatggggtggatcctggttctaacaggcgaggaactcctggccaaggcctctggcccgccccgaacggtccctatgacatcaccatcaa

SEQ ID NO: 269542 - DNA, 122 bp, Homo sapiens
cattcttctcgccttcctcctcgccatcgcctacttgatcgttaaaggtattgaagccgacgccttgaaagtctgtccagagtaaagttgagccagggtgtggctctcgtctccacccatct

SEQ ID NO: 269543 - DNA, 122 bp, Homo sapiens
ccgcagtcccggcggatcctcacttgcccgagggctacgtgaggactaggtgaggcggtgcgaggacagtgcccagcgcagaccttggcactcagtagacactccacaaatgccggttccct

SEQ ID NO: 269544 - DNA, 122 bp, Homo sapiens
cagctctgccttgggggtagacaagtcatgggtcttctcgtttggttctctgtcctcagccgggaaagcagcaatgactcttctttcccacaatggctctgaggggccatattcatttccta

SEQ ID NO: 269545 - DNA, 122 bp, Homo sapiens
cttccctgtcttcgctctccacccccgctccccctcaacacacacataatataacagacgcgaagataatcctgccatctggcaaatcccaaatttggtgaccaagctcggaaagcaacagc

SEQ ID NO: 269546 - DNA, 122 bp, Homo sapiens
caggagtggcccagccaggccgccctgcgcactccccgcccgggtgcgcccgggggaccgcggccctcccaccccgcccctgtgaaacgacagccggcagcaggcgccgcacgccgacttca

SEQ ID NO: 269547 - DNA, 122 bp, Homo sapiens
ctggctgccccattaccgctggcgggcctggctgctcggagatgcggtggccggagtgaccgtgggcatcgtgcacgtgccccagggtgagaggccctaacagcagcctgtcgggagcacaa

SEQ ID NO: 269548 - DNA, 122 bp, Homo sapiens
gtaatctatgtcttgggagcctaggcttgggctggcaacgcctccctgggctctgcgccccggcccccagctctgggacagatggaaacacctttcacccaggcccctgagagttcctccaa

SEQ ID NO: 269549 - DNA, 122 bp, Homo sapiens
cactgaataaacatggacagatttttcatgaagcaggcctgccaccgagggccacagagacgtaaccacgccagcatttcccttttggtagctaagatgcctgggacctaagaattggcttt

SEQ ID NO: 269550 - DNA, 122 bp, Homo sapiens
tcatctttttgattaaattttaagatccttgtcaatgagaaatcaatgaactaatcactacgagcggactgaccaggtgctccttaagagatttatttttatttttttaactagaggtatcc

SEQ ID NO: 269551 - DNA, 122 bp, Homo sapiens
ggttaaagctgtttttgatctccttatccaactcacatccattttcattattatcatccacgtaaagcaccttcactggtcccttttcaccaatttggtaagaaacctcaaatgggtcgatc

SEQ ID NO: 269552 - DNA, 122 bp, Homo sapiens
ggcccaatggacccaggccagtggccatcagccaggtgcccaccctggtgtgctgaagcgcgggacctacctgttgtcctggtttcctacactgagctgaggtgagcacatctgggtccctc

SEQ ID NO: 269553 - DNA, 122 bp, Homo sapiens
gagagatggggcaaagcacccgagccagatggaggcggcggcggggggtggcgtggggggcgtgcgaaagaaactcggggctggcgcggaggccgagggtccttcgcggggggctgctccgg

SEQ ID NO: 269554 - DNA, 122 bp, Homo sapiens
tgagcagacttgttcaagttatctcacagtgaatagtgttccctttattgttagtgatgacggacattttataaatctcatctgtatcacattttcaagtcagctttaaatgttttgtggcc

SEQ ID NO: 269555 - DNA, 122 bp, Homo sapiens
ctctctcgccctctccagcctccaagtgcccttgggcggttcacagagctccggatctggcgctgggaacccgaccaaggcctcctccccattcccccgcccttcctagagagctcccgctc

SEQ ID NO: 269556 - DNA, 122 bp, Homo sapiens
acagtgtgaaggcccttagattacaagtagcttgacatagtggagggaaggaaagaagaccgtgtagctggagcagagtgttcaatgagaagagtagtcaggaactgatgttgggaaagaaa

SEQ ID NO: 269557 - DNA, 122 bp, Homo sapiens
ggccttttcttggtaatgtgaagccttgtgcatgcgaatgatttttctgttccacccattcgggaagtgagctaaggcagtgtatagaggctactgaataaaatattaaggcaggacgtgaa

SEQ ID NO: 269558 - DNA, 122 bp, Homo sapiens
ttatatcctaaaacttagcaagcctgaggatttgcaaatggttgccttcttacataccctcgcgaacgctccccacgaaggcttgcgggtggttaggccgccatgtcttctgtctcacattc

SEQ ID NO: 269559 - DNA, 122 bp, Homo sapiens
tcttaaagtgttgccgaatcccaaatgaaacgggcatgtcccacctttttcccagaaactcggctctcagcgggttttgtgactgtttgaaattcacaaaaccagagcaaagctttcatttt

SEQ ID NO: 269560 - DNA, 122 bp, Homo sapiens
aggcgcgatccacatgcaaatgagctgggtttgcagccgaggagaggggccgggaggaggcgggcacttgcaccagcccagggaggcagcagccttgattgctcaggctttgggagaggggc

SEQ ID NO: 269561 - DNA, 122 bp, Homo sapiens
gtacccctctgccccctcccttgttctcaagcctgctaggtacttttcactgagcacttccgggaagagcaggcacccagatctctgtccttgtcctggcacaggctgctgctgcttccggc

SEQ ID NO: 269562 - DNA, 122 bp, Homo sapiens
cttcagtctcagataaccccttgagccaccagacttctgggcatcagcagctggtcacaacgtccttcaaggcattcattcctgcaattttttttttttgagacggagttttgctctttttg

SEQ ID NO: 269563 - DNA, 122 bp, Homo sapiens
ccccgggaccaaatgccagactgtttgagtggcaacgagatagggtggctaggtgaccgacgggggaaaaggggtcgccttggtagtgaaagtgcccccacaaacctggtgcagagctcttc

SEQ ID NO: 269564 - DNA, 122 bp, Homo sapiens
ggaaaagccaacccctaaaagctcagggaagagagcacgcctgccccgaggacggacggtcggagaaggcagtaggtaagcagcaaagagacaccaatccgattggctgaagggggcgacaa

SEQ ID NO: 269565 - DNA, 122 bp, Homo sapiens
ttcggctccacgtccacgcctgtcttaaacacagagagatgggtccagaaagcaccaccccgctagggagcggctcccgcgagggcgtgagcaccctggacaccagaaccgggagggcccca

SEQ ID NO: 269566 - DNA, 122 bp, Homo sapiens
agcccaccgtcgtcatggtgatgacagcccaccagtagcaggcagggatgctggtgaactcggggctgtcggccatctcgttctcgatgacgtagagcaggggcgcgaagagggcgatggcc

SEQ ID NO: 269567 - DNA, 122 bp, Homo sapiens
tgagaagttaataattctcctagtgtctggcttcctttttctttgcctttccctctcatacgttcaatcacctgtgttacaggacacacataagtagttggaaggtgttaaactttgacagc

SEQ ID NO: 269568 - DNA, 122 bp, Homo sapiens
acatttctaattataaggacagccaaattccattataagcacatcatgggattatagggccgggagtcatcctgagaggacatctagttcattctccagccgttcagcaggaccacactttg

SEQ ID NO: 269569 - DNA, 122 bp, Homo sapiens
gggcatttggtaatcttcctcagcatccatggtagcttggctgctgcccttgcctttggtcgcagctgtggccgaccctaagcttctttgatatgggtgttctgctctgttcttcctgtact

SEQ ID NO: 269570 - DNA, 122 bp, Homo sapiens
tggacttggcttcctgcaccaacgcacccctcgacccccagacggcagcggcattagtggcgctgatggtgtctgatgagcaaatgaataaaggcagcaggtcccccaccaccacctccatt

SEQ ID NO: 269571 - DNA, 122 bp, Homo sapiens
cagcgccacggccagagcgcgccccctagcgggggctccgagtgggccgggctctcctgccgcaacctctggggactgaagttggcagagcccagtgatccggcaggaatgaatgggggaaa

SEQ ID NO: 269572 - DNA, 122 bp, Homo sapiens
cttgttccctcatttgccagtggagggactttgggcaagtcacttaacctccccctgcatcggaatccatgtgtgtttgaggatgagagttactggcagagccccaagcccatgcacgtgca

SEQ ID NO: 269573 - DNA, 122 bp, Homo sapiens
gtgggttgtacttgctgacccctgccttggagaataaattatatacaaagacactagacgcgaaagaatagaaacagttcccgtttgctttgaaggttggaagtagcacagaatctgtcatt

SEQ ID NO: 269574 - DNA, 122 bp, Homo sapiens
ccaccccttcgtccctgggggtgggcagcagcgccggccttctcagggcagtgagacccacggagctgcccgcccgcccggcccctcctcggcctgtcgcacgcgcgtggccaccccgaata

SEQ ID NO: 269575 - DNA, 122 bp, Homo sapiens
cccgtggggcacagcccttacccctcagtgggctggatgctgtatgactcctgggatcagcggcgtcgtggcacggagggctttgagcgcccccctgcctcggtgtcccggaacgcccggcc

SEQ ID NO: 269576 - DNA, 122 bp, Homo sapiens
gacaccagacgcccaggcgaggggcaggctcgctctcaaccactcgagatggccggccaccgcgggcgcgtgggctcccaggacacaacagaaatgccacccctctgggcaccgtgcgaaag

SEQ ID NO: 269577 - DNA, 122 bp, Homo sapiens
catagcctgccaccctgcctctcagcagtaccagctgcccaggtgactgagccgccctgccgctcaggccatgtgaccacaggtcacggccttcccagcaggaagcatgtgacggagacagc

SEQ ID NO: 269578 - DNA, 122 bp, Homo sapiens
attgtcacccacaaatgtttgttttttttgtttttgtttccatatagggttttactctgtcgcccaggctggagtgcagtatactttggcccagtcatagcccactaaagccttgacctcct

SEQ ID NO: 269579 - DNA, 122 bp, Homo sapiens
gcacttgcccagcggggagcccggaccccccttcccagctggaatgcctggcggaggctccggtgtcaagagcctgagaacctgagaacccacccgaggcccccgccaggcagcgccgccag

SEQ ID NO: 269580 - DNA, 122 bp, Homo sapiens
cctcccccagtggctgtttaaagggataatcactccccccaccaccatcgcatacacccccgcagctctcaactgagtgactgcttagattcagatctcagctttgggggccgttacatgat

SEQ ID NO: 269581 - DNA, 122 bp, Homo sapiens
aaaggaaaaagcaaaataattaattgagagtattttttagtgagtgtaatgtataatgtacgtatgcaaagttcaactcaataggttattgatcaccatgaagtattgatcattttctatct

SEQ ID NO: 269582 - DNA, 122 bp, Homo sapiens
gaggcccggcgcgcggtctgcgctgcagcagagctcggcgcccccgccgccacctctgcgcgccccccggctttcccgacgctgccagggaggatgccccgctccccgccccgagtccccag

SEQ ID NO: 269583 - DNA, 122 bp, Homo sapiens
aatatcagcccctcctgacattacaagccacatggcaggggatggacacccccagtgatgcggggagtaatatctacccccccttccccatggatattaggagccacatcgaaggcgtgtgg

SEQ ID NO: 269584 - DNA, 122 bp, Homo sapiens
tccttacgctgcaccagcatgcgctgtctctcatcagcagacttggagaagcggctcccacgagcctcgaagtcttccacctcactgggctccacttccacctcgccgaagtccagcgtctc

SEQ ID NO: 269585 - DNA, 122 bp, Homo sapiens
taaggaaacatagttacaaaggagggcagtgacttctgactcctaagcaaaagatcgacccggaagtgcaagatctgttcgccgccccacccctacgctgcctgcgggactataccgggagg

SEQ ID NO: 269586 - DNA, 122 bp, Homo sapiens
aggatggatgagaacaccagaaagcaaataaaacaagtcattcaaaaatcccaagatcatcgtggctgggccagagaaagaatcagacagaagcagcgcacggctctggagagttgcaggga

SEQ ID NO: 269587 - DNA, 122 bp, Homo sapiens
cactacagtctactgtgccacagtctccatggcccagtggcaggggcggagaaccacttccggcgtccggcggatgctggcacgacctggcgacgccccgccccttcctctcagttcagcag

SEQ ID NO: 269588 - DNA, 122 bp, Homo sapiens
cgaacacaagatcgagccggcgagcgtggcgggcgaaagagtcccagcccgggcctgccacgaagcggccaccaggcttctctcccaaggtgtttctaaacccggcccacccagcaccaggt

SEQ ID NO: 269589 - DNA, 122 bp, Homo sapiens
ctggaagcggcttcatccacctgtgtgtgcgccaagagggcaaactatgcaccaaggctgcgctcaccgcgccccgtcaggcccctcctcctcagcagcaagccccgcctccgcctcccgcg

SEQ ID NO: 269590 - DNA, 122 bp, Homo sapiens
ggaagcaccactcagctacagtggctcgttggtctaggggtatgattctcgctttgggtgcgagaggtcccgggttcaaatcccggacgagccctcgtggctactgtttttccacccccttt

SEQ ID NO: 269591 - DNA, 122 bp, Homo sapiens
ccagaggaggagggcctgcatcccggggagggcgaccggtcacctgggctgggagggcggcgcaggggcggaagcggcggtccgggacagtctggctctgcagcctctccccgccgcggtcc

SEQ ID NO: 269592 - DNA, 122 bp, Homo sapiens
gactgtttcaccatcttcccgagttcccatttctagcacagcatcactccacctggccagcggagtctgtgttccagtgctgcctctttgctgctgcctggaggaccaatgccctcactgaa

SEQ ID NO: 269593 - DNA, 122 bp, Homo sapiens
agtcttgttatccaatcagaatggtccatttcacactaaccagttttaagctaggtgaagcgatagtttcaacggcttgaggtttttttcttggttttcactttccattagacttgcatacg

SEQ ID NO: 269594 - DNA, 122 bp, Homo sapiens
gatacaactggagaatgagggtggccgggtgggagcagggatcaggcctcacccagagcccggagcctggagcccgcacgactcgaggcctctttccctctctgccccacagaaagagcgga

SEQ ID NO: 269595 - DNA, 122 bp, Homo sapiens
gttaaggagctgaattaagtaggttctcaaactgaaccccggacttcgaagctggttccacggttttataagggccacaagaggccatctagcccaaaacagctaactttccaaaccgaaac

SEQ ID NO: 269596 - DNA, 122 bp, Homo sapiens
tccggcgcggctcacagactgcaggccgccatccagcagctgagtcaggaaagcgcagcccgctgggcctgccggcagcaccaccgtccggagctggctaggaagccaaaggctcagggccc

SEQ ID NO: 269597 - DNA, 122 bp, Homo sapiens
gaaataccagttttctctagtgattatgtcagtggttctcagaactactttggatatctgcgcctttcttttcctggagcatgaattgggcttgtttggatgtgaggtcaggccatagtgcc

SEQ ID NO: 269598 - DNA, 122 bp, Homo sapiens
cggagcctccggcctgaggcaggatcagggccccttcctgggggagtttcctgcctggtccgcccttccccgctctccccgccccctctccgggccgctccttgtatggtctgggcgccgct

SEQ ID NO: 269599 - DNA, 122 bp, Homo sapiens
cgcttccgggcaaggttctgtgcacctgttttctccttctacgcgagtatctttcccctccggaaagaatgggatatgcctgtgtccaaaggacaagaagatgcgcgccagcaagcctaagt

SEQ ID NO: 269600 - DNA, 122 bp, Homo sapiens
gccaggaccagagttcgggccccgcctcccccacacctcctcgggttccctggcgcctgacgccacccagctcagcaagcctcctggcacctggagtcctcagttacggctcacggcttcct

SEQ ID NO: 269601 - DNA, 122 bp, Homo sapiens
cccgcgcgccccgcactgacatggccgtcgcccggttccgcgcgtccgccgcgcgccggccgttaataggcttgctccctgagcgccccgcaccgacatggcggccgtcttcgctgtggtga

SEQ ID NO: 269602 - DNA, 122 bp, Homo sapiens
gggggagggggccgcgtggaagcgcctagagcagtcggcaggtcacacacacgcggtgctcggcggcaaactcagtttacaaagagacatctgttccattactccaatgcattgtggctaat

SEQ ID NO: 269603 - DNA, 122 bp, Homo sapiens
gcctgaggtctcctctccaacacccacccgtctcctggcagcttcgtgcagaagttccaccggggggaccccagatcaagggtgcagtgcagcccctcatccacatccccatctcctggcag

SEQ ID NO: 269604 - DNA, 122 bp, Homo sapiens
tctagcaggtcgggagagagcttgggcaggtgatgtctagccaatctcgtggggagaggtcgaaactctgcctacagactggcctttgcacttcacctgaggcaggtttcactaatttgctt

SEQ ID NO: 269605 - DNA, 122 bp, Homo sapiens
cgtgtaatcctagcctcatttctgcagggcacccctggctggcagagagtgccccagaaacgcggaacccagagctgtgtacaggtgcatgtccgctacgccccgccccgcgctccacggaa

SEQ ID NO: 269606 - DNA, 122 bp, Homo sapiens
cctcccccccgcgacggccagtgcccaagggcaagggcaagggcaagggcgagggcaggtcgagcagtcggggactgctccaggcccttacacgtgctctttcctggacactcgggccgcag

SEQ ID NO: 269607 - DNA, 122 bp, Homo sapiens
tctgtaacatacaggccatatatattcaattttgcaaaatatcccagtaatatcccttgtcgctgattttctttttttcccaattagtctaccattaaggatcatccgttgcatttaattgt

SEQ ID NO: 269608 - DNA, 122 bp, Homo sapiens
gtccatcatgcctcaccataggtatgatgattctaatctccactatacagatgaggaaaccgagccctagaaaagagaaaaatcttgccagggttacagagcaaggtcttgctccctaaact

SEQ ID NO: 269609 - DNA, 122 bp, Homo sapiens
accccgcccccgggccgcagccgccgccgttcattggcccacgcttcggacgcatgggcgcggccccgccccgccacccagccggcgttccgttcggggtcctccccagccagtgggctggc

SEQ ID NO: 269610 - DNA, 122 bp, Homo sapiens
tgcggatcgcggcccggtgtcactcggcggcggcggtcgttccgggagcactccgggctccgatctccggtgtcacagcaaagatccgcgtctttccgatgaatccagccaatgccatccag

SEQ ID NO: 269611 - DNA, 122 bp, Homo sapiens
aaaagccaccgcaccgaccttagcacaatttcctttcttccttcaaagttcttttctggccgcctcggctgccgcccacccctggcaagccccggttcacttcagcggtctctctgcctgtt

SEQ ID NO: 269612 - DNA, 122 bp, Homo sapiens
tggcctttgggtttaaattttaaccctgaccttgatgaaaacaaaacatttttgtatgatcgcccagcagataagctgcttattgtcctagagtctccattcaagaataagacaggggtttg

SEQ ID NO: 269613 - DNA, 122 bp, Homo sapiens
gggcgttagggggcggggccgggagccgccgagggggcggtgggcggggtattcggggggcggagccgggagcctcccagggggcagtgggtgggaccgggagccggccggccgggccgggg

SEQ ID NO: 269614 - DNA, 122 bp, Homo sapiens
gccggctctcaggggccaccagaagctgggtgggtgtacaggaaaatatttttctcctgccgtgtttggctttttcctggcatttttgcccagggcgaagaactgtcgcgcggggcagctcc

SEQ ID NO: 269615 - DNA, 122 bp, Homo sapiens
aatgccgtcgcgggcggggcagacccacgagcctgcacgcagccccgcgccgccccgccccgtccgcgcaaacacgcgacctcctcagctcccattggtttctgccagcactagccacaccc

SEQ ID NO: 269616 - DNA, 122 bp, Homo sapiens
ggttacccctctaattacctgggtgggggccgatcgatcaccagcccgggtcctcctcagcgcgagctgcttgccaggagacagtggggaagctctcaagtgggagccgtgggatgggaggg

SEQ ID NO: 269617 - DNA, 122 bp, Homo sapiens
cgttctgcagtggaagctgcgtcgacactctcggtgtcctgcgccccggacctgggctggcggaggctctcctgccgtccagtgcgtctcacgcgttctgttctggctttagaccgaaccgt

SEQ ID NO: 269618 - DNA, 122 bp, Homo sapiens
aagtttgaagttattcaacacacattccactttcagagagagtctaagttaaataggtgtcggggtcttgatttcacttgttttctggaacatatggattggtccagggtttagaattcaag

SEQ ID NO: 269619 - DNA, 122 bp, Homo sapiens
cgggtgtcacccagattgaccttcaaggctcatttcttgtcagtccagtacccgtcccctcggttcacacgaccatccagaaacctcaaattcagtccatgcttcttgttttgggtctcggg

SEQ ID NO: 269620 - DNA, 122 bp, Homo sapiens
ctgttcttagagatgcggagtgacaacataaaggtggcaacttcttgcatggcaccataccgcagggaattttaagtttgacaccccgcccccgccactgcagcctcagcaggcccagcacc

SEQ ID NO: 269621 - DNA, 122 bp, Homo sapiens
cccacctctgtaccccaagacacccgtgggggctaggctgggggtgctgccacactgggacggagtgatgcctgctctgtccttctgacccctggactgtgatgggccctctgctgccgcct

SEQ ID NO: 269622 - DNA, 122 bp, Homo sapiens
cagcacagcagtgcagccgcggctgcccagcagggcggctacgagatccccgcgcggctgcggacgctccacaacctggtgatccagtacgcctcgcaggggcgctacgaggtagctgtgcc

SEQ ID NO: 269623 - DNA, 122 bp, Homo sapiens
gagccgcgccaggttggccaagagctgggcctgctcgcaggtcatcatagaatccccctgcggctgctccagggtcagctgcgtgaaaggagagggtggcaccagccatgcaggtcacccac

SEQ ID NO: 269624 - DNA, 122 bp, Homo sapiens
ataagccactacacctggcctagacagattttttgaagctaaggactgtgctttagccatcgctgaattcgtcactcctagattgtgcctggcagagttcaataaattgttgctgaggggca

SEQ ID NO: 269625 - DNA, 122 bp, Homo sapiens
ggacgcctgggagtcagtgtgtccgtgtccgtcagccactcccagagggtgatgtgatggcggagtgcaggggacactgagggacaggaaagcaacctcgggacatcttcagaaatgaggaa

SEQ ID NO: 269626 - DNA, 122 bp, Homo sapiens
acgctttcccagtctcctgcggtggatgtgcttactttgcagtcagaagaaaataagccacgaccaaacgtttatttaagaaacgagggcggcaggggccgccagaccccctcaccctgaca

SEQ ID NO: 269627 - DNA, 122 bp, Homo sapiens
agtttctgcagcactgctagagcgcgtcagggcgcaaggctgggaggcggctcgcgttcccggtggggttaccaaactctggttacagcttcctaatctttgtgttgagacccccttgcaag

SEQ ID NO: 269628 - DNA, 122 bp, Homo sapiens
cagacagacggacaggctgaccccggcccgggggagcaggcgcagcggctgcgcaggtcccgccaccgccttctggccccaggcggcccctcagggcacgagctcttaggcgggcggaggcg

SEQ ID NO: 269629 - DNA, 122 bp, Homo sapiens
ggtgagttgcagctagaagtgcccagcagaaatgcctccaaagaatttacaaaagtgtctcggagagaattggctttaagtcagataaatagtccctttgttctcctgtgagaacacataaa

SEQ ID NO: 269630 - DNA, 122 bp, Homo sapiens
aacagaagcagaaaggaaatcttgctctgattccatggatgtgaccagggaggtgttggtcgatatttctgtgctgtggcatctttggtaaccaagttaccagagctggcagcggctggagg

SEQ ID NO: 269631 - DNA, 122 bp, Homo sapiens
gatgatggattcggccgcgaagacccgctcgcccactgcagacagctccatcttgctcagcggcacccacagcccataatactccctgcgcccgcggccggtgcggcaccgctcgcgcacgc

SEQ ID NO: 269632 - DNA, 122 bp, Homo sapiens
ttgggccgactgaagggttcagctttttgggagaagtgagggcgagtgttatttctccagcgaggtgtaaacaagactgtgctttcatgggagggacaaattgcagagttgatcccttacca

SEQ ID NO: 269633 - DNA, 122 bp, Homo sapiens
ggacaaaaaggcagccagccaaaccacgccaggcgtggcgtcctgcagccagcaagcacacggggctgtcatctggaatgagttcaggaaactcaggctaattttagccatagcctaagaaa

SEQ ID NO: 269634 - DNA, 122 bp, Homo sapiens
aaaccagaaaagttagaggtttattctgtgctggccgggtgaccactagaggattttaagcgggagggtgacctgctgtaattcatgtttttaaagggtggctccgcttctgtgtggagaaa

SEQ ID NO: 269635 - DNA, 122 bp, Homo sapiens
catgcatttcctcgtgcccggcttcgggaagcagagtttcccactgcaccgccgaggggacgaagcagatgtccgcacaggaagcagagaagccccaagtgctgagtgcagagaaatcccca

SEQ ID NO: 269636 - DNA, 122 bp, Homo sapiens
caggaataccggttatcccagttgtgtccctggatctgtccctgtccagataaagccattcggtggcctcctggagggtgaggtgaatgactaaagaacaccagactctagccttggttgac

SEQ ID NO: 269637 - DNA, 122 bp, Homo sapiens
gggaggacagatgctgcccttgcatcagagccctgggaattccaggggaggcctgtgaagcgtaggaccggatacccagagctgaggatatttttcccttgccaggtggggcctcacgattt

SEQ ID NO: 269638 - DNA, 122 bp, Homo sapiens
ccgcgggaccggagcgcgcggtcccgcccgcgtcctcctccgcgcgcaccagtggggctgcggggaagggtatccagtcttgccccggggcgtgtctccaggtacctccatcagcacaggcc

SEQ ID NO: 269639 - DNA, 122 bp, Homo sapiens
tggtgcccgctggcggctccgagtgtggggcctgccgagcccacgaccacccggaactcacgctggcccaccagcgctacacacagccccagttcctgcccgcacctctccctccgcacctc

SEQ ID NO: 269640 - DNA, 122 bp, Homo sapiens
gtgtgtacggggacgccctctctaacatcatccccgcagctggggaggatcttttagtgccgaggtatgggaaacagaagcaaggccctggggtcccacccccatcagatctgcctccctct

SEQ ID NO: 269641 - DNA, 122 bp, Homo sapiens
tgttaccagaattcccgtgtttccttcatattcaaaggcacaggaaatctggggtgcaagcggactgctgtctctcaaggaatagaagtctgtgacaaacgtatagaaatgagtttcatgtt

SEQ ID NO: 269642 - DNA, 122 bp, Homo sapiens
cctcttttgggctggaaatctgcccactggaaccacgcgtgcagtgaccctgtggagacacggtggctcaaaagggaattttttttcttggcacagggtatcaggtaccagggtataacttt

SEQ ID NO: 269643 - DNA, 122 bp, Homo sapiens
gtcacgttcttgagtcgcctgttgtgatgataggcaggaacactgttgccgtgggcagagcgacgcgtgcgggttgtgtgtgtgagtcaggaaggccgtcgccacgggcagagcgacgcgtg

SEQ ID NO: 269644 - DNA, 122 bp, Homo sapiens
gtctgctctaagctgcagcaagagaaactgtgtgtgaggggaagaggcctgtttcgctgtcgggtctctagttcttgcacgctctttaagagtctgcactggaggaactcctgccattacca

SEQ ID NO: 269645 - DNA, 122 bp, Homo sapiens
ggacgggagtggggagggctcgaaaagcaggtcggcacaaagtccaggacaggaggcggtcgccacgccacgcttggtaacccatctgttggcaaatatcacaattatcacatcatcatacg

SEQ ID NO: 269646 - DNA, 122 bp, Homo sapiens
actgggatttgaacccgggcacagcaccgggatttgctcggcgtgaagtaaagatgggctcgggcggaagcctcccattccatgtgtgccctgcctcttccactggcagaagctatgttccc

SEQ ID NO: 269647 - DNA, 122 bp, Homo sapiens
ggccctggcttgttgatgagccgctcaatgcgcctgttaacctctgggtagcgggtgccacggtaggggatgcgctgctctatgacacggccggtcagtgaagagcagtctttcagctcaca

SEQ ID NO: 269648 - DNA, 122 bp, Homo sapiens
tcctcgcggggaaatcccggggaagtgctgagtctggagtatcgactcccttcgtcctcgcggggaaatcacggggaagtgctgagtctggagtatttattcccttcgtcctcgcggggaaa

SEQ ID NO: 269649 - DNA, 122 bp, Homo sapiens
tagaactctgaatacttaacttccagtactaacagcagccacaacagcctgcaatcatagcgtgcttacataataccaggtactcttgcaaatgcttcatatgtattatctcatttagttct

SEQ ID NO: 269650 - DNA, 122 bp, Homo sapiens
cagggccgggcagcgttgtgaggagctttccagaagaggcgggggcaggggctgaggacccgaggaccacccaggccacacggagaggcccccgcccgaccctgccccccggggtctcctct

SEQ ID NO: 269651 - DNA, 122 bp, Homo sapiens
ctgggtctctagtggacatgggagctggccttgaagaattctgaggcttagagaatttggcggctgcctcagggtacgcctctggagtaccgtgcctaggttactaaacccttggatcgcgc

SEQ ID NO: 269652 - DNA, 122 bp, Homo sapiens
gttcaagttcctgaagccaattatccccaacttcgttgctcagggtgcagagagggttagcgaggcaaatcccagtttcaggaagagctttgaattcacttaagtgttaataaggatctact

SEQ ID NO: 269653 - DNA, 122 bp, Homo sapiens
gaggcaggtggaaggcagcgtcacctcctacctcagctcagtctgcccccacccatggcacgtgcttcctgccttgcccctccatggccagatggtagggacaccccactccccctcctggc

SEQ ID NO: 269654 - DNA, 122 bp, Homo sapiens
ggcagaccttggtaggtgattagatctgaaggacacaggaggaaaaaaagttagagctgacgtatttctaaagttcagagagaggcaagcagatggagtcattccaagatacaggcctctgt

SEQ ID NO: 269655 - DNA, 122 bp, Homo sapiens
ccctggccaaatctctaacctgcaaggctaattccgaattccaaatcggaagcaagagggcggggccccgtgagaggcgatggattgctccagtccgttcccgacgcactgtgcgcatgcgc

SEQ ID NO: 269656 - DNA, 122 bp, Homo sapiens
ctcgcagcgctgccaccgtgagccccgtcgcgggcacccacccctggccgcagtacaccacgcgcgccccacctggccacttctccaccaccccgatgctgtccttgcgccagaggatgatg

SEQ ID NO: 269657 - DNA, 122 bp, Homo sapiens
ggggtttcactgtgttagccaggatggtctcgatctcctgacctcgtgatccgcccgtctcggcctcccaaagtgcgtgagccaccgtcttcggccgatttgttgatttcttaagaggcttt

SEQ ID NO: 269658 - DNA, 122 bp, Homo sapiens
tctctgcggccgccgctgcccacatccagttcgcggaagagcgagagccggcgcgccgagcgagcctgtccttcgggcgcttccgcggcactccttgcggtccccaactccccctacccgcc

SEQ ID NO: 269659 - DNA, 122 bp, Homo sapiens
tggcctgcgtcagctgcctggcgaatgtgacttacaaacgatgaaaatatccctactatacggtgacacaggcaggctgtgcctgtaaggactgggaaatgagtctctgcgagcccccgccc

SEQ ID NO: 269660 - DNA, 122 bp, Homo sapiens
gcactccagcctgggtaacagagaccaactccatctcaaacaaatacataaaaattaggccgggcgcggtggctcacgtctgtaattccagcactttgggaggccaaggcgggcggatcacc

SEQ ID NO: 269661 - DNA, 122 bp, Homo sapiens
gactctttcaccgccaaaatgtggccaaggctctgagggtcgtcttctcatgcaaatatccgtgttctataaagcctgagctaaatgaaaaccccaaactctactctgtagtagaaggcaca

SEQ ID NO: 269662 - DNA, 122 bp, Homo sapiens
tcaagaatgaggggatgcaggagggaaataggatatgaggggcagggttatgcagcctggcgggctgggaatcatggattgtatttaatcttttcagatgccagggttttgtgttctaggag

SEQ ID NO: 269663 - DNA, 122 bp, Homo sapiens
ggcccgtggaccacgacccgccacgcccccaactgcgggccacgccccatccagtggccccgtccagactccgcccacctcaggccctacctcgtcaaggccccgccccgtgcttccgtccc

SEQ ID NO: 269664 - DNA, 122 bp, Homo sapiens
ggtttcaggtctatagcatatccactaaaatattcctacttcaaaaggcaataaagtaagcggtattatcattcttcaaaaagttataatggtagtgtaggcattcatagtatgatttagtt

SEQ ID NO: 269665 - DNA, 122 bp, Homo sapiens
taagaacccctctgggcatttcctcacaggaaatagtgattttcttttgcttcatctctgcgataaggctagtcaattcccaatctctgctggtagctcaggtgtgagagcataaacttgtt

SEQ ID NO: 269666 - DNA, 122 bp, Homo sapiens
atgtgagaaagaacatacttctatgccttttctgttacagctatatcttttttaaaattacgatgtgagtgagtcatcactttctaaaaaatgaacaaagacataagagggaacaaggtttt

SEQ ID NO: 269667 - DNA, 122 bp, Homo sapiens
ctgtcagaagaaaaaacaaaaatgagcatctactctgtgttctgcatattcacatattatcgcaattggaactgaggtatctacttcttaatttgagaaggggaggacaggaagagggaggg

SEQ ID NO: 269668 - DNA, 122 bp, Homo sapiens
aggacacagcctctctgggcccggtagtatgcgaagacacgcataacgcaaaaggattcccgtcctggactttgggaattaaggccctgaacacattgagcaaaaagtagatctgtctgtac

SEQ ID NO: 269669 - DNA, 122 bp, Homo sapiens
ctggtgtccggggcaagaccacgccctcagaggcggggcggcgaggtggagtgagcgccccgccaggcatccgtggctgttagggactgccctcccacctcggggagcctggccatgacctt

SEQ ID NO: 269670 - DNA, 122 bp, Homo sapiens
gtagtccctgcctgggttagacgctggcatacacaggcaccatgtgtcaggcggcccatccgtctgactgcaactgcacgctcgccaggtccagcagcgccgtacgctcagttctggggtca

SEQ ID NO: 269671 - DNA, 122 bp, Homo sapiens
ctccctccaggagcctgcgccccggccccggggtcagggttgggatgcgggctctgcaggcgccccggcgaacagctctacctggaggctgtccctgccccgcttagtccaagggccttggt

SEQ ID NO: 269672 - DNA, 122 bp, Homo sapiens
gaagggccacgccgagagaggcaggcaacaagggcacggctggaggccggaaggtcaccccgtccccggcggggcgggcgcggcccagcctcacttcccgggcacgttcgggcggggcgatt

SEQ ID NO: 269673 - DNA, 122 bp, Homo sapiens
ggcaatttgaagagcaaattgtggcctgcacgaggagcggggcggatgccaggctacccccgtggaaacactggggaaggaagcagcgtctgcagcgggggcgagagactggagggagagag

SEQ ID NO: 269674 - DNA, 122 bp, Homo sapiens
catattggacaaacacgaggaccccgctgcaggccaatcaccgcggagcaaaggtgaccgcggagtcgcctgacaaaaaatatagtacgaggggaatccttaggaaagctgagtgcaaggct

SEQ ID NO: 269675 - DNA, 122 bp, Homo sapiens
ggtgggctgttaattttccttctttatactcagtgaactgggcttttgtgttctactccacgaatcccgcatctcctacctggtttggtgtagtgaacagccctgtctgacacccaggcaag

SEQ ID NO: 269676 - DNA, 122 bp, Homo sapiens
cctggggttgtggtgaaaatgggcttttcagtaggggttggggcagtgcctggaataacccgcagtgctcacatctgcctgcggggaccttctgcagtctttctggccaccctgggggcgag

SEQ ID NO: 269677 - DNA, 122 bp, Homo sapiens
acgcacacccacacgcatgggcacacacacgtgggcatacacatgccacgaggacctgcacgaggtccctgcccaggtcagctccctcgcagacacacggaaaggggactggaaggcgcagc

SEQ ID NO: 269678 - DNA, 122 bp, Homo sapiens
tccacgggaaacagcctctaattccttcctttacttttctaggcgcaggagccagctccccgcccctccacaccgctccactccccgcttccaggcgcatccctgcgggtggtgttccggtt

SEQ ID NO: 269679 - DNA, 122 bp, Homo sapiens
acgtggccacagaaggagccaaagaaaggtgagggggaggtgccacacacttttgaaggacgagatctaatgagaactcactcactatacagtaccaactgcggggtcggggggcaggggtg

SEQ ID NO: 269680 - DNA, 122 bp, Homo sapiens
tcctctcgggcatctgttcttccgtaacgccccttctcctaggagacagttgtccggccccgccccagcatccccgcggctccctgcgcggttctggccctctggggcccacttggggccga

SEQ ID NO: 269681 - DNA, 122 bp, Homo sapiens
ttgaattataacaacgctgtgtgtcattaatccactctgttaactgcagaaatacaaaagcgtccttaaagcgtcccattataatgggcagacagcctggagaagaaacggcaggcgagcag

SEQ ID NO: 269682 - DNA, 122 bp, Homo sapiens
attaccatcaccaactactacagtaattctcaaacgtgataaagggccagaacccagtgtcggttaaaagatctatgatattaaacaaaatgaggcataaattcctagtgtttacagatgtc

SEQ ID NO: 269683 - DNA, 122 bp, Homo sapiens
ggctggctcagagactatagacgggcggggaccgccccggcccgggcctccagcgcccggcgcccgcacactcgccagcccagctgccggcacgccggccagccagccgctgccgcttacca

SEQ ID NO: 269684 - DNA, 122 bp, Homo sapiens
cagtcccgggaacacacttgcataacctttggtaattggaaatatatctcatattggccacgtgcacaataattcagtgtgaatatggccaataaacatgccttgtttacaggtcattagtt

SEQ ID NO: 269685 - DNA, 122 bp, Homo sapiens
ggtgtacgaggaagtaaatgccggaaatccagattccctacagcgactgacaaggcccagcgtgatctagcccaccctccttaccaaccttgttcccaccgttttcctcctaaacctctagt

SEQ ID NO: 269686 - DNA, 122 bp, Homo sapiens
gcgggttcgaggtcccagcagaggcagtgggaaggtctcaccaggctctgggcttctcagcgcatcgaggcccctcagcgcggcagaggggtccacagccacgggtgctgggctcggtgttg

SEQ ID NO: 269687 - DNA, 122 bp, Homo sapiens
cgcgacctcgaggcgaccgaggtcccctaggcctagtccccgccttgccggcatctagtgcgcctgcatcggaaccgaggggcccgcctcgcactcgcctaagaaaaccatttcccgggacg

SEQ ID NO: 269688 - DNA, 122 bp, Homo sapiens
attccactgcctaacccggggagggcaggcacggcggggagcagtctcgaaggaggctggcgccaggccaagcgccgggccttgacggctggaaccgtggagtaaagtctttgggctgcgca

SEQ ID NO: 269689 - DNA, 122 bp, Homo sapiens
caatttaagattttggcttaagatttttttgggcggtttctctttccagccagcgccgagcgatgggcatctctcgggacaactggcaccagcgccgcaaaaccgggggcaagagaaagccc

SEQ ID NO: 269690 - DNA, 122 bp, Homo sapiens
aaaaacaaatgatgtctaaagttcaatcctgacactgtgctgattgcttggacacagttccgtcaaaacatttgtccaagtcatagttgtaccttttagaaattagccacaaacaacatcct

SEQ ID NO: 269691 - DNA, 122 bp, Homo sapiens
agctccatccatccacacggggctctcttccccgccagggcgtcttccccgccacagtcccggagcacctgcagcacagccagctgcagtcatgctagcgccacccgagccagcacaggcct

SEQ ID NO: 269692 - DNA, 122 bp, Homo sapiens
gatcttgggtctgggctctgaagcccctgtccacggcaggctccaggtgctgagtgtgaacgctgggggcagctgtcctggagcccactctgtcccctcctcgagaaccccctcttggaccc

SEQ ID NO: 269693 - DNA, 122 bp, Homo sapiens
caaacaaggaacttagagggtgcccaatctcctggtgctgggctccaaagcacaactggccgacactcaggcctgctgcgggccccgcacatcgagcacaccagatactcagctcttggcac

SEQ ID NO: 269694 - DNA, 122 bp, Homo sapiens
ccggctaacacagggaaacccagtctccaccaaaaaaatatgaaaaccagtcaggcgtggcggcgcgcgcctgcaatcgcaggcactcggcaggctgaggcaggagaatcaggcagggaggt

SEQ ID NO: 269695 - DNA, 122 bp, Homo sapiens
ctttcctctgaagcttccgaacagtctgcttcagggagcgcagcctgaggcggtgtggtgcggtgcggctgcagggcgggcgagtccccggagctgccctcagcgctgcacagtttccagcg

SEQ ID NO: 269696 - DNA, 122 bp, Homo sapiens
gaagaggtgtcattccagtgtggccggagggtaagatttctggaggaaagtgagcggggccgagaacatcaagctgagcgcgcaacagattgtgaagggcctcgtatgctctacatgtacat

SEQ ID NO: 269697 - DNA, 122 bp, Homo sapiens
attatgaggatcaaataagtacgtgtaagtactttgaaaactgtaaaaccttagtcatctcgtgctcaaaagccttcactgtctccagctgtctggagtctactcaaggaccaattcctcag

SEQ ID NO: 269698 - DNA, 122 bp, Homo sapiens
tgtgctccaaagtgtggaggtggccatgggatcctggccctgtgtgtccctgggtgagtgcgattgtggattgtgtgttgtctttgtgtatgtatatgtgagggctgtttgaagggaggtat

SEQ ID NO: 269699 - DNA, 122 bp, Homo sapiens
tcccctgcacatcccctgtgcctgcatcggagatcaacccctggtctggggtatcaatcgcggagcagtcaggatgggtttgatggaactaatttgaagtttctgggaggcctatcccaagt

SEQ ID NO: 269700 - DNA, 122 bp, Homo sapiens
cgtgctaaacctctccggggtcagcactgtggtatgtcggtttccatagcaaccagccaacgggccactttctcagaacaattcccctactcagccgggttctggacttagctcagcccaag

SEQ ID NO: 269701 - DNA, 122 bp, Homo sapiens
tcggtgccgcgtaaaacacgcttcagtctactgtcagattcttgaggttggctgtgcacacggtcagaggtccagggtctaagaggaataaagctgacaaaatgtcaatgcaaagcccaggg

SEQ ID NO: 269702 - DNA, 122 bp, Homo sapiens
ctgtctggttgaaaaagccaataaccaataagttcctaatcatatttacaactgaccttccgtaacttagatagaaaaatgtggaaatgttgagtcatggaaattaactaacatcatacaat

SEQ ID NO: 269703 - DNA, 122 bp, Homo sapiens
agctggggcgtctgagtctttagagcaggtttctgatcaggattgtttgggtcccacaatcggcgtgtggtgcctccacggccccaactccgagatcccttactaccagatccaaacaaaag

SEQ ID NO: 269704 - DNA, 122 bp, Homo sapiens
caaccagacccgggcaccaggcagccagcagcaggggctgtgctcggatgcagctctacacgaggattttgtgccgggtgcagccactggctggcggggacactgtgggttcccaactactg

SEQ ID NO: 269705 - DNA, 122 bp, Homo sapiens
agagcgcagcaccccgactccagccaggagcccccgcccccccggagcgcaggaggaccccggcccgcctctcccaggcgcagcgcccagcatctcgctgctcctgtcgtctaagcgtcggc

SEQ ID NO: 269706 - DNA, 122 bp, Homo sapiens
ctccttaaccttgcaaataactatatcagacttagagggccccatggccagggggcaaagcgcttctcatctggaagcaaacaagtgatttctggtcagtgtgaggcctaaaagagctaact

SEQ ID NO: 269707 - DNA, 122 bp, Homo sapiens
ggagataactgcagagccctgagcgttacatcactttgagatgggcaagagaaacagtggcgacccttaattgttcctgaagcccagtcacagctcacatgcctttttaaacagctgggttt

SEQ ID NO: 269708 - DNA, 122 bp, Homo sapiens
gcagatcatcctcatgctgactaagaagtgccaggagcagcagcaggacaccaaggaggccgaggagctgcgcctcctgctgagccagttggagcagagatccctgcagctgcaggtggata

SEQ ID NO: 269709 - DNA, 122 bp, Homo sapiens
taggtgtgcgcctgtgcggcctggggcggtggggcaggtgtgtggctgcacgcgagtgcccgctgggtcctcgggaccagagtgtgtgtgtgattgcaacctgtcggagcctcagtttcctg

SEQ ID NO: 269710 - DNA, 122 bp, Homo sapiens
aggacaggtcctttttcacggagagacgtgagcctgggctttccttatatggacacagctcggcctgtgtagcattaaacactgatttcatccaccgctggagaaaacatcctacaaaaagt

SEQ ID NO: 269711 - DNA, 122 bp, Homo sapiens
acagccgctctgtgtaggaggctcgcccagccgcagccttgaccaacgtgaaccaaaaaacggcagcaagcctcatccgccttgaggccccagggccgttcagcaagttcacaactgacggg

SEQ ID NO: 269712 - DNA, 122 bp, Homo sapiens
tcttggtttcatttctgcttttaccccctggcttccctggaaaccacatgtgggcaggcacgtatctgctggattaacagtactattccagtgcctgtcacagtggccagccccatagaggt

SEQ ID NO: 269713 - DNA, 122 bp, Homo sapiens
agagtcagggtcctccgctgcctgaggcgtcaacatgcctgcctgcaatgtgtttgtgcacgtgcgtgcacacgtgtatgtggctaaacatgtctgtgcacatgtgtgttgcttctctggcc

SEQ ID NO: 269714 - DNA, 122 bp, Homo sapiens
aagccctgggcacacagtagtgcctgcccttgcctagaagatgtgggaggttagtggggtcgcagacttgtgaatagacagtcttacataagagtgacatggggtataagaggggataattc

SEQ ID NO: 269715 - DNA, 122 bp, Homo sapiens
ctaaccacagaggaagtctccttgtctcatcttgacactaaaactacccagttactctgtcgatagggttgggcacaggccagttagtctagataatctaaagccgaaagagggtgaaagta

SEQ ID NO: 269716 - DNA, 122 bp, Homo sapiens
gcccctgctgctcacagacagtacgctcagctcagcaggggctgctcttacaaatgccatcgcagcacaggcggtcaatgcttggcattttctggggcccctggtttccttttagaggacgc

SEQ ID NO: 269717 - DNA, 122 bp, Homo sapiens
gcctgggcaacatggcaagacccacaacaaaaacacaaaaactagttgggcttggtggcacgtacctgtagtcccagctacttgggaggctgaagagggaggatcacttgagcctaggagtt

SEQ ID NO: 269718 - DNA, 122 bp, Homo sapiens
atgggcaggcatgtgcccctcactgggcacactgggtcctgacacgcagtgggaactcagcgctgttaaatgtggatttcactgagccccacaggcagccctttaggacctcggcccaaggt

SEQ ID NO: 269719 - DNA, 122 bp, Homo sapiens
cccgactctcccggtcggcccttcttctctgcccagttcggacagtctcgaattccccgtcgcagccccggccacctcggactccctggtccccagcccccgccccaccccccgcctccacc

SEQ ID NO: 269720 - DNA, 122 bp, Homo sapiens
ggtgaacgtcaaagcctgtccccggcttcttcacatctcgcgcctccgcgggcgtcgggccgcccccgtgagcctccccggatggactgggttttagggacccccgcagccggactgcaaag

SEQ ID NO: 269721 - DNA, 122 bp, Homo sapiens
gttagatatgggtagttagtagccaattcttgctgtcacttgactctgatttacagctagcgggaaatggcctgtgatatatatcaaaataatgcatgctcgttaaataaacttaaaaagaa

SEQ ID NO: 269722 - DNA, 122 bp, Homo sapiens
tatttgtggtcattttttatgattgcagaaacccaacacacagctattctgtcaggctgccgagaaaaggctgttcggcagttgcagccctggtgaggcaatgaggaggaaaggtggacgca

SEQ ID NO: 269723 - DNA, 122 bp, Homo sapiens
ttatacggacagtaaataaatgtcaaacacacacaaaatccactctgaggcgggtgctgacgtggccccatccatcatccgcccagctggaggctccaaccaggttgccagggcccatgggc

SEQ ID NO: 269724 - DNA, 122 bp, Homo sapiens
gggttagaaggcagctgtgcgcgaaaaacacctcagattttcttcaagcgtgaggaaggtcgagaagataaagtttttaaatgagtatcttcagaaagctatttaattgttctgattttttt

SEQ ID NO: 269725 - DNA, 122 bp, Homo sapiens
tgtaatcccagtacttcgagatgctgaggtgggatgatcccttgaggccaggagtttgaacgcagcctgagcaccatagcgagacctcatccatacaaaaaaaatacaaaaaattagctggg

SEQ ID NO: 269726 - DNA, 122 bp, Homo sapiens
aaagcaggagcaacgccagggcaaacggaggcagagtcctcgcgtatctgtgatcagcaccggcccatcctgggtgcaagagagcccgctgccaactcgcccccgtcacagcagctgcctca

SEQ ID NO: 269727 - DNA, 122 bp, Homo sapiens
tatttatttactactaaaaatattctaccattaaggaacaggaaccatgcatgacttactcgtgactataatcttagctaggtagaggttctctaaacattcacaggaactcatctacatgc

SEQ ID NO: 269728 - DNA, 122 bp, Homo sapiens
ggaggccagtatccgcccgggttaagactcagggcgtccccaggctgagcttcttagggacggcgttcggcccccacctgtcaccaccctggcattttcaccccaggagcctcactctagga

SEQ ID NO: 269729 - DNA, 122 bp, Homo sapiens
cactctgctgggtcttttatatgcatatgtcatttattgcatacaccataccaatctacccgtcagttattgagcatttatgtacctgtcactgtgcaaccatttaatcttgcaaatgagga

SEQ ID NO: 269730 - DNA, 122 bp, Homo sapiens
tctttgaaatctggtgtctcatgtagtgcgcctcaggtgggagcagctgtgctccggccccggctgccacatcggacagtgcagcctgggcgagctccagagcagcgcacgtgagggcttgc

SEQ ID NO: 269731 - DNA, 122 bp, Homo sapiens
cggacttgacccgcgggctgacaacccaccgcgacaagcaggcggctgggttcgcgccgccgccccggggcccttggctcaaatttcacctcgagtcctgcagaccctgcgccactgaattg

SEQ ID NO: 269732 - DNA, 122 bp, Homo sapiens
gtcagcacggcctttctcagagaaaacctcctaaacgtgtgaagaccgctttgggggaagcgagagggaggttggaggagccccgggcggggtctcagcgcccaccagctgtgccttcaggg

SEQ ID NO: 269733 - DNA, 122 bp, Homo sapiens
tgctcttgatctggctgatgcgcttgttggcgagtcggcgcgggctgctgcagcgggccccgcttgtctcgatggggttgtcctggaggtagtcggccagccacttcaagtggcagtcgcac

SEQ ID NO: 269734 - DNA, 122 bp, Homo sapiens
ggcggatggagggtggagaacagggcatattgaccttttccaggcaggctaagcaatgatcgtcctctctatatgggttgttatcaagatttcctctgacccacgagcaatgaagcaaatgt

SEQ ID NO: 269735 - DNA, 122 bp, Homo sapiens
cctctggaaataagaggcctcctctgggcagaattccgctgtgggtggagtacagatctgcggggctctctgtagcctatgtttagcaatagcaagcctccgctaggctgtcatggttttca

SEQ ID NO: 269736 - DNA, 122 bp, Homo sapiens
gtgctactttcattatctcaagagagccgtggggttgtacatgggtctaaaacggacacgcgacaagggttcctaggaataaaccataaacaggcccgggagctacgctaacgccaaacgcc

SEQ ID NO: 269737 - DNA, 122 bp, Homo sapiens
atttcccgctgttccgcagagctgaaagactgaggccagacacctcctcagggcttatcacggtggctcacctgctcctgcggcttcatcatcatccagtcagagtccgtggaagcggagct

SEQ ID NO: 269738 - DNA, 122 bp, Homo sapiens
ggggagggggagtggtaaatggcagcacagctctagggcacctgaagtttctatcccctgcgtggagactccaaacaccaggctggggaaggtaaaagtagcctgtagggagatggacgctg

SEQ ID NO: 269739 - DNA, 122 bp, Homo sapiens
cagggatgtccaatccatagtccatatttcctcatttagtctcctaatgtgctaggtactcgttaattagaacaaccagctagtggtctttgaaaaatcttaccagttgggaggaaggattg

SEQ ID NO: 269740 - DNA, 122 bp, Homo sapiens
gcagagacgcagaaagaggctgagcaaagacagaccgtcatgtgagaaaccgctctgtggcgcacagggcacattcagccaaagacaaacacgcacacgagcacacacacacaaacccacag

SEQ ID NO: 269741 - DNA, 122 bp, Homo sapiens
actcagtggtcagaggaaactctgtgacagcatagtggtcaagcttgtttctcctggggacgctcttcttaagggaggagaccacccctcatattgtcttatgcccagtttctgcctccaaa

SEQ ID NO: 269742 - DNA, 122 bp, Homo sapiens
tctcatcagcccagcaggagcatgcaaacaccctcccaccatcactctcccctcagtcagcgtctccctggggacctgggcatgacatggaggtaaacccctcgggccgctagcaggggagg

SEQ ID NO: 269743 - DNA, 122 bp, Homo sapiens
taaatccactctgtggcagccgaggttcggtcccattgtgcggcaaagctaatgagattccgctgggagataaaagccgccctcccccttggcggaggccaggaagggcactaatgctccca

SEQ ID NO: 269744 - DNA, 122 bp, Homo sapiens
ccttctcggccctggcctctcaccccgcagccccggacagtaacagaagggctattttaccgcccagttcctgccaggagggccaatcagagccttcgccgttcccgagacccgcccccttc

SEQ ID NO: 269745 - DNA, 122 bp, Homo sapiens
ccctgtggttccccctgagggcagcctgtctttgctgcttgtcctgctctaatttctgtccggtgcctgggcacctcccggctccctgtgtgcagtggtctctgccagtgtctccgtggtct

SEQ ID NO: 269746 - DNA, 122 bp, Homo sapiens
gatatataagattaatactcagttgactatccacacttctttttgcttcagaattgacaacgctcaatgtatttttaagaaaagaaaaaaaatacaaacccttttttccaagaacctgaaac

SEQ ID NO: 269747 - DNA, 122 bp, Homo sapiens
gctcattttctttcttcatacctgttctgtccagctaagtgtccccagtggcccagaacacggggagaaccttccacctgtggccagcatttgcacctgggccccctacagaccatgtctac

SEQ ID NO: 269748 - DNA, 122 bp, Homo sapiens
tttcccctataccctcttggttacattcaatactgacaacctcagtctgatgagtctgatcgagtttcagacagttgctttctaagaaattttctacatctcatgttgctccccttttctct

SEQ ID NO: 269749 - DNA, 122 bp, Homo sapiens
cactaccccggcgcagtgaccgccgcgcggcagcctcagggttaggggactggcgggaagcgtgggccggtcgagtcaggagcgagcgctctcctgattggctgccggtccccaccgacctg

SEQ ID NO: 269750 - DNA, 122 bp, Homo sapiens
gcagtcggctgtcccagggtctcctcagcattcacttacccaggcagactcctcagtgggcggctgaggcacgtgtgcgcctgtgtgtcaggaagggactccatgcaggggcctctgggtgt

SEQ ID NO: 269751 - DNA, 122 bp, Homo sapiens
ctggcttgagtcaaacagaaatccaagtgataggttatgagtcagacacataaccactggcgtgattccccagcccctcatgtgtgtcagtggcccaaaggatgctactaggagaggctgtg

SEQ ID NO: 269752 - DNA, 122 bp, Homo sapiens
cactgggagggtggtttaggccaaacgcaggagtgcgggggaaaggtttgcagggaggaacgtagttttagttatgtcttgggaagccccctctggctgtactgcaggggctggattgaagg

SEQ ID NO: 269753 - DNA, 122 bp, Homo sapiens
tgcagagatcaagtgcacctacgcccagcacctcccccagcggacacatttagagaccctcgggagcgcgagggatatgagaatcacaagcacagagactcatctcttgaatatcacccggg

SEQ ID NO: 269754 - DNA, 122 bp, Homo sapiens
cagctaagaggtgaaatgtaggagagggcaccacagaaaaggagatgcatctgggagcagcgaacacacagatggtgagggccagaagacaatgacacagccctcctgtcctcacaccagct

SEQ ID NO: 269755 - DNA, 122 bp, Homo sapiens
tccaccttcccaagaacgtctaattgccgttggaatagccagggttaggcagcttctgctcgggttgatgtggcatctgacccttgttgggttgccaggcattccttcctgtttccgccatg

SEQ ID NO: 269756 - DNA, 122 bp, Homo sapiens
agaacagaattaattaaatcacacacacacgtctgaaggtaaagctcctagcatcgttcccggcacacaggaaataataaatgtgagctgccatcatcctcatctgggaaaaatcttgggca

SEQ ID NO: 269757 - DNA, 122 bp, Homo sapiens
accccggaggccggcgcccctcacgccgcccgcccgcccgctccccgcccggcccctgcgcgcgtgcgtgtcctgctcgctccatgttgccgcctctcccggtacctgctgctgctcccggg

SEQ ID NO: 269758 - DNA, 122 bp, Homo sapiens
tggcacctggctgcttggctgtgagggctgatcttccagtgcccgagtccccgctgtgagcgccctgaggagcatgtgtgtctccgcactatgccctcagcggccgctggagtggggctcgt

SEQ ID NO: 269759 - DNA, 122 bp, Homo sapiens
tgcctgtaatcccagcactttgggaggccaagccgggaggattgcttgagcccaggagttcgagacaaggctgggcaacctagtgagaccccatttctacaaaaaatttaaaaattagccgg

SEQ ID NO: 269760 - DNA, 122 bp, Homo sapiens
gcagcttgtactcctcctccacctggcccagctcattcaggtggttgagccaggcggagacgccgagcctcttgtacatgctctcctcggggtgcgtctcggaggacggcagcttggggcgg

SEQ ID NO: 269761 - DNA, 122 bp, Homo sapiens
tggactccgaaaatggagcacactgtccagggaaaagtcatatggaaggcgcagttcgctcgtgctcctccacggctggccaggctcaaatctgggggataaagccttccccggactgattg

SEQ ID NO: 269762 - DNA, 122 bp, Homo sapiens
ctctcatcgcatgggctttctcgtggctagcgcacatcagggttcccgcggccgggcgggcgtgggcctgccctgtgcctgccccgcgcctgctccatgcctctcggccgggcactgcttcg

SEQ ID NO: 269763 - DNA, 122 bp, Homo sapiens
cccctgccccggagccctcagtgtcagaaccaggctgctgtggctgtttcctctttaattcgcctgagttttatgagcccaaattcatagacctttgttgctgcatataaacttgaggataa

SEQ ID NO: 269764 - DNA, 122 bp, Homo sapiens
agcacacactccgggttgacgataggcgcctggctctgggttgcacggctccggattggacggctcccgggaagagagaggagtcatctgacgtccagctcgccaatcagagtcgaggactg

SEQ ID NO: 269765 - DNA, 122 bp, Homo sapiens
cctcgtaatccccaagccgaatgcccagcaggacgcagaggtcagtagggatattttggacgcacgaaagaatggcctcactgtttcgatagttgctcacatattctaagcacgtcggaaac

SEQ ID NO: 269766 - DNA, 122 bp, Homo sapiens
tctgcagcgaactccatgtcgcagcttgtggctgcctgtgtcctgtggtgagagccgagccgcacaggagatcctttgtctaggaagggctaggctgagaagatcactttggagttgctaag

SEQ ID NO: 269767 - DNA, 122 bp, Homo sapiens
aagtatgctaggaaatgccatgtactccaagtcctcagagaagctctggttagctggctgcggtgggatctgcttttgtggagtttcttcccatgagggtatcagtcaagagaacctggaac

SEQ ID NO: 269768 - DNA, 122 bp, Homo sapiens
ggcaccaccggggtcctctgttccccatcctggacctgcagggcgtggttctgaggagaacgccccccaagctagtgctatggccgctcgggacttgggggcgtccctgcattcacactcag

SEQ ID NO: 269769 - DNA, 122 bp, Homo sapiens
accctgaagctccgcggttctgtctgctctggtgcccaaaggtagcttgtgtgtattctgcgatctcggcagaactgagattttcaagcagcggcactcaacaactaggtgtggtctagaga

SEQ ID NO: 269770 - DNA, 122 bp, Homo sapiens
tgggttgatatttgatgtcgaagaaagaaagagaaagtggccctgaagataagcctgggccgagaggaaaacagatcaggcaccctgagacctgggaggcacaagcatgacgaatttctacc

SEQ ID NO: 269771 - DNA, 122 bp, Homo sapiens
gaagttcttcccatggcctacggggtcccagagtctgggcctgcatagcctctccacactcgcctccactcatctcaggtccttccataactattccctctcctgtcagggaggctctgccg

SEQ ID NO: 269772 - DNA, 122 bp, Homo sapiens
ggccggaggcggcccctttgtgaacgtgagcaacctaggaggcttcggcagcggcggcagcgcacagccgttgcaccagggtactgcagccggggccgcgtgcgctcagggcaccttgcagg

SEQ ID NO: 269773 - DNA, 122 bp, Homo sapiens
tggcattcctgtctttcaggtctgccttccatgcatttttagcaggtttggggaaaattacgggtacttataagggaagtcaagcacatatgcagtaggcaaacctatatgtcacatatatt

SEQ ID NO: 269774 - DNA, 122 bp, Homo sapiens
cagtgcgcacgcgtgccgttcgcgattctatgaatgggtgggcacaacagaccctgagcgcgcatgcgctccgctcctttttttatgaatggggggcgggaaaagatcttaacccgtgattg

SEQ ID NO: 269775 - DNA, 122 bp, Homo sapiens
cgtcctcctcagagttcgtcactcttgtccactcccaaaccacaagaaaggcccacacaacgctcaccccacgcgacccatggtcttcctcatgctctaagaaaaacgccgggtggcccccc

SEQ ID NO: 269776 - DNA, 122 bp, Homo sapiens
tctcaccaacactgtttccccctcggtgagaacaacaaacgggtaggaaaaaaacaactacggcactgacttgttgcttttctcaagtgatcgtacttagcaggaggaaaaccacatgaagc

SEQ ID NO: 269777 - DNA, 122 bp, Homo sapiens
tctggagggactgcggaggctgctgctgctgcttctgctgctgctgctgctgctgcgatgcgtccgggtttgcttcccacctgccctcagcctgcggggtgctcctcctggctcctcgggac

SEQ ID NO: 269778 - DNA, 122 bp, Homo sapiens
gaggtatcggggctgcttgggcccagaggaagtccctgaggaccgcagcagtgcctttgccgctgttgcagaaggagaaggcttgcagtcgagccccggggcctggggacggtccttcctct

SEQ ID NO: 269779 - DNA, 122 bp, Homo sapiens
cttcgggacagcagaggagcagtgtccggccatggccggagcccgcaggctggagctaggcgaggccctggcgctggggtcgggctggcgtcatgcgtgccacgctctcctctacgcgccgg

SEQ ID NO: 269780 - DNA, 122 bp, Homo sapiens
ttgcggggtgcatccgggggtctggagagggggtgcgccccagccggctgcagccccggtcgattttatggctgcaaaggagccgcagacacctgccgtctccacgccctccacgccggtcc

SEQ ID NO: 269781 - DNA, 122 bp, Homo sapiens
gacgccctcttgccagggccacagcagcatcccccgggtcaccgagccggggctttcccacgtgcctccttacaattgctatgtttctgcaagcagaggcccaaggaagtatgaagcactcc

SEQ ID NO: 269782 - DNA, 122 bp, Homo sapiens
ttttctcacttctttattgtctgtctcccccactagattacaagctcccagggcagggtgcgtactgtctgcagacaacgctgttatcaccagagcccggcactgagcttggcacatggcga

SEQ ID NO: 269783 - DNA, 122 bp, Homo sapiens
cacaaagccctccacagttgtttctgggacaacagccccacagttgcacacacctctctgcggagaaacgtatgacagcacggaagggatggaagccctgagcctccccaggctggggtcaa

SEQ ID NO: 269784 - DNA, 122 bp, Homo sapiens
ttgtccaatcccaggtggggtggttgcctcttcatttcctttgatagcaaccgcctgttgcgtgatgtagtgtgggtgtcctcagaggtagctacctaagtttgcatacttcctgactgaca

SEQ ID NO: 269785 - DNA, 122 bp, Homo sapiens
gagacggttatccggacactggagagaagcgtcctgggccatgagaagggcttgggcacgcgggacctggcccaggaccctcagaccatcatcctacctgcccgcatcagggagattgtcac

SEQ ID NO: 269786 - DNA, 122 bp, Homo sapiens
ctgtgcaagcattctcttattaaaattctcttataaaagcagtggcatgtgcctataatccgagctactcaggagactgagacaagaggattgcttgagcctaggaattcaaggccagcccc

SEQ ID NO: 269787 - DNA, 122 bp, Homo sapiens
ggttgcccgtgccgcctcggaggtgaagtgtactgcgctgattggcttccaggcgccggccgcgtgtgatgtcccgggcaacgattggctctcgcctaccgggggcttctctcaccgggact

SEQ ID NO: 269788 - DNA, 122 bp, Homo sapiens
accttgtcctcactcaggcgtcctgcaggcggcttcagcgagttgttggggcagatgcgccgggagctcccgagggcagggacggcgtcttatttctctttttaagtccacagggcttgcac

SEQ ID NO: 269789 - DNA, 122 bp, Homo sapiens
gacaaagggcacagccccttcccagagacccacgctgcatcagactctcggtcttaccgacgtcgctagtcctgaggctgctcgccccaacccaccaggtcccggctgcgctttggcgccac

SEQ ID NO: 269790 - DNA, 122 bp, Homo sapiens
gttcactttcaatatatccaggattctaaaagacggcaacttttagttcgatgctcgggccgtttcaattgtggcttaaaaaactaacaggcaagagagtttcgacgtttaaaagcatatac

SEQ ID NO: 269791 - DNA, 122 bp, Homo sapiens
gcagtggggggggccgtctcccacctccctcctcttacctccccccacctccccagggcacgcactccctggctcctgcgcgatgcccagcagggtccaaaatgcacctggatgcccgggag

SEQ ID NO: 269792 - DNA, 122 bp, Homo sapiens
gccagcccgaggggatttctctgagccgctgggccggaaaccaagtccgagcgtggctggcgcgggaaagttcgggaacgcgcgcggccgtgctcggagcagcgccagggcacggtccgggg

SEQ ID NO: 269793 - DNA, 122 bp, Homo sapiens
ctcacgacaggaagaagctggccttgctcttggaggtgctgaggaactgcaggtaggggccgccggggcccagggcagcctgatagtcctcctccgccaggcccagggagcggcgcagccag

SEQ ID NO: 269794 - DNA, 122 bp, Homo sapiens
cttctgggtttttaatttaggcaatcattatttcccacccagatacttcccttggggcaacgctgccctggcacactggatatttgggactattttaaatatatccattaaaccttagccaa

SEQ ID NO: 269795 - DNA, 122 bp, Homo sapiens
gagggaagggttaacccgcggctcttcccggcgcggagggatccggaggcgagccgagcgcggtggtgaggccgcctcagcgaaaaaaatgtccgcctgaagagacccacaagttctattcg

SEQ ID NO: 269796 - DNA, 122 bp, Homo sapiens
tcattcattcactcattccttctgtcttgagccccagctcagggctagcctgggtgctcccggccgtggggctccgccccggcacggggccacgaaggagggccacccccctcgccgcgcgc

SEQ ID NO: 269797 - DNA, 122 bp, Homo sapiens
agctccaggagcgtggtctcctcgggcagatgccaggactggagctgagagctgcagcggcggagtggttttatactttggtgtgtaataaataaggctgtaggcatgccagagtgacagca

SEQ ID NO: 269798 - DNA, 122 bp, Homo sapiens
ctagcacccaacaccccggtccacttgtgcgagtgagagcgctcggcgaagtcttatatacggggaggcgggaagggggcggagactcgatacgcgacatcacgtcacggcctatgccccgc

SEQ ID NO: 269799 - DNA, 122 bp, Homo sapiens
aacacagagtgaagcctgcttgcatctccctggggtgtagagactgacttcctcccacagcgtgagtataagctgctctctgttttcccgatgacctctctctgatgctaatcttgatcctg

SEQ ID NO: 269800 - DNA, 122 bp, Homo sapiens
tcgggttgccgtttcccgccccaccccgcggccggcctggcttcactggcgccctttggccgcgaccacgggaaccagcggtgaggcctgacccagcaccacgttcttcttgctttgctttt

SEQ ID NO: 269801 - DNA, 122 bp, Homo sapiens
agcgctgagaaaatgcgaggttggggtggctaagacagactgtctgtcagcaactccgcccggaggagagtgagccggggaagggggcggagagcgggctgcggggcgggttgccagctaat

SEQ ID NO: 269802 - DNA, 122 bp, Homo sapiens
acactcctcccagggctcctccagcactcctcccacagctccccccacagcacgagcttccgcgtgcccacccacgcgcagaagacctccacctgccgcatgctcctcccacagctcccccc

SEQ ID NO: 269803 - DNA, 122 bp, Homo sapiens
tactgcagttgtttttgtttggtacaaaggtggaagctctgccaaggttttttcttgatgcgagccaggatcgaagggctatggtgtttaaagcttgcgagctgaaggcccttggaaggcag

SEQ ID NO: 269804 - DNA, 122 bp, Homo sapiens
tgcctgcaccgtcacccacgctcacccacagccctcggagataacatcaaactcttaaaccgggaaggtttgtgcaaacagcagtgacctccagaagccactgtcagtaactaagtgcccac

SEQ ID NO: 269805 - DNA, 122 bp, Homo sapiens
cagatagctgtgatgaagagcaattggctggtagctcgtgcctcaccaagagtttagcaacgttaatcagtgaatgcagaacagcttccattctacctgaggcctagatctgagatcgctgt

SEQ ID NO: 269806 - DNA, 122 bp, Homo sapiens
tttggggtgagccccgccttgctgaggtgtcctcagccatggacctgtggctgtcggaggcgtccgcggttcaggatgacgcccttggcgggagcgagaggggtttccacagcccccttcac

SEQ ID NO: 269807 - DNA, 122 bp, Homo sapiens
gcgcggccactgctccggagctgcaggcttctaggcgctgggagggcgaagcaggagagccggttagtccatccccgcgctccgcaaacttttctaaccgggtaacaaagtgagcagcggtg

SEQ ID NO: 269808 - DNA, 122 bp, Homo sapiens
ctctgggacttcgtttctggaaagtgagctccctgatcagagcagagcagagccctggagcggacctcacccccctgggcctcgcgctgatcagcagtgcacactctccatttctctctccc

SEQ ID NO: 269809 - DNA, 122 bp, Homo sapiens
gaggatgggcacgcggcactgacccctgccgagggggcacccaagcggcctcgtccttcccgcaacccaaggaaggaagccccagggtttcccaaagtcctcaggggaaagcctgctgaaaa

SEQ ID NO: 269810 - DNA, 122 bp, Homo sapiens
ttaaaatgtatttaagtgtcaattagatgcctagaactgccctagacctgctgtctataccgtatttgcttaatgtaaggcctcatggattgtgtgataccctactgttttctatattaata

SEQ ID NO: 269811 - DNA, 122 bp, Homo sapiens
agccctggcccgagacctttccagggaggcaggctcctagtggctcttctgagcacccatcgtttgtaaccacagaaccagggcacagagcccaggggacagagttgtgtgctgcccgagga

SEQ ID NO: 269812 - DNA, 122 bp, Homo sapiens
ttctctaaggatatgggatggacttgggagcgggccacctttcatttgggaagggtagctcgccaagtccggtgacggtgctccctggagacccccacctgcccgcccctccacactgccgg

SEQ ID NO: 269813 - DNA, 122 bp, Homo sapiens
tccaggaattctccccacccaggtttgtagaagggccagtgccttctgttcctccacccccgctagcctcagtgtacactgtaagacctattcctgctttatgcccaggtaagggcgcccca

SEQ ID NO: 269814 - DNA, 122 bp, Homo sapiens
atattaatccactctattaattgctaaattattttatttagtgatttagggctttccactcgagccagctacttgttatatgaattatatttattcctgacaggtgttatgcttgggttcaa

SEQ ID NO: 269815 - DNA, 122 bp, Homo sapiens
tgaatgcctgcagatgagaaccagccgcggtgcccagaaaggaacagtgtgcgggtgaggcgggctctccactttgctgtatcctccccaggcccccacccccagcacgtgggcagtgaggt

SEQ ID NO: 269816 - DNA, 122 bp, Homo sapiens
ttcgactaggcctagtcgtagcggcggccagcgggagggcgtagccgtagtcttggcccacgtcattctgtgccccgggtcaggtcaccgcccggagggtatgggaagagaaatgaagaaga

SEQ ID NO: 269817 - DNA, 122 bp, Homo sapiens
gaaaaccactgctagaggcaaagaactgctgaagggctttaaacctcaggatgacatgatcgtatttgcattttggaactattatgataactatgtaaaggataggtttaaggggcagaacg

SEQ ID NO: 269818 - DNA, 122 bp, Homo sapiens
gaagctccctggccatggacgatcgctgggttctaggcgcctgctcgccccagcggttgacggtcacgtgataccccccagtgtacctttcctgcagcgtgttacgtggcgcacagagaacg

SEQ ID NO: 269819 - DNA, 122 bp, Homo sapiens
ctggacactgtgcaccgagcggggctgggggctggacgtactctcgagggtcgggctccacgcgtgggtcccacggcggcattctgcaggagtggtgcgtcgcgccttttccagggttaggg

SEQ ID NO: 269820 - DNA, 122 bp, Homo sapiens
gcatcccgcgtttcattccgttcttgagaacaggacgacggtgaagtcaggattcaaacccgagtcttccagtgtttccttcctccgcaatttagtgcccgatgtcatctttatttcaccac

SEQ ID NO: 269821 - DNA, 122 bp, Homo sapiens
ggtccggagggtcgtgggagcgcagcctctcctgggggtccctggctcggggctgaggggcggcgggaggcgccgcccgggtttcccgcatgcagcgccgcgtgctcgccgcctggctctgg

SEQ ID NO: 269822 - DNA, 122 bp, Homo sapiens
tggtctcagccacatgggagcttgagcttaggaggtcgaggccacagtgagccatgttcacgcctctacactccagcctgggtgacagagtgagactatttcaaaaaaaaaaaaaaaaaaaa

SEQ ID NO: 269823 - DNA, 122 bp, Homo sapiens
gcccaggatgggcatctgtactccaaaccaggcattatgcaagtcccccgctcagctcagcgctgtctccaggccaagaggcttcaacggagttccacaaaattatattttcctctttgaaa

SEQ ID NO: 269824 - DNA, 122 bp, Homo sapiens
ggtcctgataaagtttgagtttggcgctcggcttctgcggaggaggcggggagggagaaacgaggggaaggcgtaagagacttggccctcgccagccaccatcggattcttccggttctgcg

SEQ ID NO: 269825 - DNA, 122 bp, Homo sapiens
aaagtgctgggattacaggtgtgagccactgagcctggcccacactttcactattgaaaacgattgtattctggagggccatgagggaggggacaggtctttttcaaaatctagggaacact

SEQ ID NO: 269826 - DNA, 122 bp, Homo sapiens
ctccccaccagctaactagcccagagcaagcagctaaatatagttccttattctttgactcgtagaaatcagccacaaactgtctgtcaacatgaatttctcagctcagttgttctagccat

SEQ ID NO: 269827 - DNA, 122 bp, Homo sapiens
tgaatgctaagctgacttgttaagcagggtggagttgccgttagtattttccagctcgcacgaacaaggcagccggatgagaatgagtagcccgagctggatggccggcacatgggcagcag

SEQ ID NO: 269828 - DNA, 122 bp, Homo sapiens
ggccaggcgacctttctctcaagaaggagatgtcagaggcccctcgtgacagcgagcttccggggacagggctcctaatgtgtttgtcaagtaaataatgagtaataatccggccaattggt

SEQ ID NO: 269829 - DNA, 122 bp, Homo sapiens
gaggcccgggctggggacccgctggccgggggagcgtctcctggaagtcccgtcccccaccgacctgcatggtttctgcgctcgggacttgcaggctgagggccaagcaccgcgagaccacc

SEQ ID NO: 269830 - DNA, 122 bp, Homo sapiens
ccctcccatgcactctccccaactggggtgcagccccgtctgcccgtctgtccacccatccgcccatctgggtgcatctgtgtgggaggcttctccaggcccagggctgaagccggccagac

SEQ ID NO: 269831 - DNA, 122 bp, Homo sapiens
gttcgcccacgttaccaacttctccccctcccccagcacccccgtcccttccagcttccgcgccccccacccaactgggcaggacccaggtcgtgctgccaccccctcttcggggaaaggcg

SEQ ID NO: 269832 - DNA, 122 bp, Homo sapiens
gctgtaaagtcaggcttggctgacgtcagttgagtgggcgcggctagggcggttttctttcgcgtcgaccaaacgtgggccaatggaaaaccggaagcgtcctgtgagtgatgtaatgacag

SEQ ID NO: 269833 - DNA, 122 bp, Homo sapiens
aagcaggcagtgctgtgttagactgaaagtaaaagataaaaactctaagaacctatgaagcgccagggcagtgctggttgctttcacccatatggtctcctttggtgttctgctggtgctta

SEQ ID NO: 269834 - DNA, 122 bp, Homo sapiens
tgtggttctgagtgtctgcaagttggtaaaacaggtctctgttccccacactgagcctggcgtacatacataggctctgtccctttgtccaccccaccccacatatagtagacactaaataa

SEQ ID NO: 269835 - DNA, 122 bp, Homo sapiens
ttctcacctgaagtgtccacatctggggtctcagtttccccaccaagtccgggaagtgatcgaccactaaactcgaggggcagaggggcgtgcgctgaggatggtcaggggccttgaggaaa

SEQ ID NO: 269836 - DNA, 122 bp, Homo sapiens
ggtggcctctcagtgaggctctaaactgcccgacacgtgcacccgacacgcctgcgggtccggtgaccccctttgttgcacctggcatgctttgcacaaggtggctggaggggctgccatgg

SEQ ID NO: 269837 - DNA, 122 bp, Homo sapiens
cggcggctggctgggggcgcgttccgaggcgccctcaggcagggcgcgggggcagagcctcgcctgggttctggaggctgcggggccatcgctccaggtaaatgctctttgggactccatcg

SEQ ID NO: 269838 - DNA, 122 bp, Homo sapiens
cgctccggggccgctgaggcggcagtagcgacctccggaagcgaagacgggcaaggcgagcggcccgagcccaccaccagccgcctcccatgattcgcactacggccgccgcgcgccgtacc

SEQ ID NO: 269839 - DNA, 122 bp, Homo sapiens
gctgccagatgttcagatccgatgccaatgtcagagaagtccatagtgctgggtcaaggccgtggccagcgggagcctcagctgcagtgtggggaggggggctaggggcctgcaatagacct

SEQ ID NO: 269840 - DNA, 122 bp, Homo sapiens
tgaagaacttgaggccccaaagggcatctcaggggtcctagccctgtctctgtgcccctccgtgaggcagcccaggctccctgtgttgacttggtgtccaggctctgcttcctggggatagg

SEQ ID NO: 269841 - DNA, 122 bp, Homo sapiens
tagaacaaaacagcaaccttttttcccgttgagaatttaaaagaccttttttccccttgacgattttcccatgaggaaggcagataggatgttggtaagcttgggcttggggccagttagat

SEQ ID NO: 269842 - DNA, 122 bp, Homo sapiens
tgctctatgccatggacagctattggcacagccggtgcctcaagtgctcctgctgccaggcgcagctgggcgacatcggcacgtcctgttacaccaaaagtggcatgatcctttgcagaaat

SEQ ID NO: 269843 - DNA, 122 bp, Homo sapiens
gaaacaaaataaagaatggaccacattcatgttggttgcgatctttagctcttaactttgcgtcccccaatgatgatcaggaagagagatgagcattggggtttaggcaacgacaggtttaa

SEQ ID NO: 269844 - DNA, 122 bp, Homo sapiens
ctgtcgggattaaagaatcagtcgacacccccagggctgagccccgcagcaagcgccccgcgggtgctggcccccagactgtggttaccgccatcctttcacttaaactccgccccgattac

SEQ ID NO: 269845 - DNA, 122 bp, Homo sapiens
cagcccgtggctgagaggcggctgctgaggggccgggcgggctaggggccggctagccgccgttcgcccctgctttgcatattcatgaagtctagcgaggccggtcgcccaggctagccgtg

SEQ ID NO: 269846 - DNA, 122 bp, Homo sapiens
tgaccgcacttttggatttagttgaaaacttctttatttcctctgttaagccactcatgccgatacttttaagttttatcaaggagttgaatgccccaaaggtcctatttctcttaatatca

SEQ ID NO: 269847 - DNA, 122 bp, Homo sapiens
ttcagagggagcacattccaacctcctcagtcactaacccccgccttgtggctgcagaaacgttcctggcctctgacctcaccagcttccacccagggaggccaggagagaaccccaggggg

SEQ ID NO: 269848 - DNA, 122 bp, Homo sapiens
gcggggcggagggagacggggcgggctccgctaggggagggccgggcgctgcgagtgtggcgtcctcgcggggcgggggctgctggcctgtccgggctgcgcgcgtgaccaccagcgggctg

SEQ ID NO: 269849 - DNA, 122 bp, Homo sapiens
gtcctccaatttgatttaagttattgaggtcaggagatttatctttttttatattttctccgtggattttaatgtagcagctcagctgctcaataaacagtggttgcttggctaaatattca

SEQ ID NO: 269850 - DNA, 122 bp, Homo sapiens
cttggcaagttgtcaacgcttgatgtgctgaagtagtcaccgcagtagccacagcagcaccgttacagtggtttcccttagttctcacctgccttgtgaacaattcctcttacactttccct

SEQ ID NO: 269851 - DNA, 122 bp, Homo sapiens
caagacagcatggagttctaaagcaaaatcccacaatcactatggtcttccttccccaagcgcacagattctccatgccatgtggcaactgttgagggaatggggaaggggtggtggcagca

SEQ ID NO: 269852 - DNA, 122 bp, Homo sapiens
ctgcaatgggacctcgatttcatgagccaattcagtctcctcaaatggtgagacaatgcccgggagctccccctgctgcaagaggtccccagctgacccgcaccgccaggtgcacagtggtg

SEQ ID NO: 269853 - DNA, 122 bp, Homo sapiens
ctgcaggcgcccccaaggtccccccagcctgcaccccccgcccctccggtctctgcgccccgaatgctccaccgccccgagccgctgcccctgggcccgctccctggcccccaccccatccc

SEQ ID NO: 269854 - DNA, 122 bp, Homo sapiens
gacgccacgggcaaccacccgcgtccgtgctgggcgcagaggacgccacgggcaaccacccgtgtccgtgctgggcgccttgagagagagaagaacttgttcttgaccttcaatttatttag

SEQ ID NO: 269855 - DNA, 122 bp, Homo sapiens
ccgaggcccccgggcccaaccttggggactcagtcattccaaagccactgctgccggaaacgcgccctgcgccacaggagtcccgtgggcgcggcccggacctcacttcctcgcggtcacct

SEQ ID NO: 269856 - DNA, 122 bp, Homo sapiens
ggcggttccctgccttgggacaaacgggctctgggcactctctctgcttcccgaagcggacggacacggacttccgaacccccttggagcacgcctgggaagaggaaaggtgggtccgagtc

SEQ ID NO: 269857 - DNA, 122 bp, Homo sapiens
ggtggctcgtttcgttgcatctgtttgcccacctcggtgtatttattattcgtgcccatgcgaggcagccagagggtgcttggttattgtacacgaaacagatttcactctcctctgcaggc

SEQ ID NO: 269858 - DNA, 122 bp, Homo sapiens
acctcgtcagctcctctagccctcggccagactctggcaacaccttggtttgcctggcaccgcaggcaatttcctggaaccccacccccacccaggaacggggaccacagcacctttaaagg

SEQ ID NO: 269859 - DNA, 122 bp, Homo sapiens
ggaggagacccctgaagacataggggttctggcagtagcctggtcagccccgggggtgggcgttgagatcgccagagaggatttatagagtaagggctgcgagggtacagggggtgtgtcac

SEQ ID NO: 269860 - DNA, 122 bp, Homo sapiens
ctcacaccctgagctctgcccagggagctggggccaagtcccgcctgacaccaactggtccggcgggaaacgcctgcccagccagacaggcacaggccccccaagggtccctccttgtgctc

SEQ ID NO: 269861 - DNA, 122 bp, Homo sapiens
gcacttggaagggcagggcggagaacagctggagatgagatagagagcagggggagaatgcgccgacacctcaaggtgagagagtagaaacagtctccgccgtgggagccgcgcgctgctca

SEQ ID NO: 269862 - DNA, 122 bp, Homo sapiens
ctggtctttctttcactttgttttatttctgtgtggacaaacaatggggaaaatgccgcgcgtctagccaggcagataagaaaacaactatacccgtcaggcccccaacccggcgccgccat

SEQ ID NO: 269863 - DNA, 122 bp, Homo sapiens
gctggtctggctgaggaagggccagggtgccggggactcaggccccaccctcaggctgcacgaggcacccagagcagcccctgaggcaattctgctgacctgggagtcctgggaggcacctt

SEQ ID NO: 269864 - DNA, 122 bp, Homo sapiens
gggcatgtgcggcagggtggcgctgtcgaagcctgcccctctcggtgggcggcagccccccggatcacttccctcagatgtccccaggccctgtccctgggcgtaaagggcgcgcagcccgg

SEQ ID NO: 269865 - DNA, 122 bp, Homo sapiens
gccccattgttggacctggggtgcgaggtccgccatgagctctgagtccggtgcctgccacggtgggagcgccctacgcacctgccccgggggtgagcattgctccccgatgtgtgcgcgct

SEQ ID NO: 269866 - DNA, 122 bp, Homo sapiens
aagcgggcgctgtccatctccccactctcagacgccagcctggacctgcagcggatgatccgcacctcacccaactcgctagtggcctacatcaacaactcccgaagcagctcggcggccag

SEQ ID NO: 269867 - DNA, 122 bp, Homo sapiens
ctcaaaatatgggggtcgtcctggcttggctgtagtggggtacagcggtggaagttcccccgtggcgcgggacgcctggccgcccgcctgttccccccgccagggtggaacccatgccctta

SEQ ID NO: 269868 - DNA, 122 bp, Homo sapiens
tcgctcgctcgctccctctagctctcccctccccccaaatatctacactccaggatctggcgccgagccgcggcttcttgaatccagatataccattccccgctggaacctcttctccgctc

SEQ ID NO: 269869 - DNA, 122 bp, Homo sapiens
aacccaccccgagacggagccggaaggccgttattcagaggcggctccgagcctccccttcgccttctggatgctctgagctcctcaacttggcgttcagggccctgcattgtctggtccgt

SEQ ID NO: 269870 - DNA, 122 bp, Homo sapiens
catgcactgtcgttagttattaccgcggaacatttggtacaatttactgggcgaccaactcgctctggtttgaacctgatcagaacctgatccgaagtccttattgggacttcccagttttg

SEQ ID NO: 269871 - DNA, 122 bp, Homo sapiens
cctcagcttttgcagactgcatgggggcccctggcctcaccctcatgggaggggcagggccgtggttccctgattggcccactgggtttcccaagggagcaaaggacacttgggggctgtcc

SEQ ID NO: 269872 - DNA, 122 bp, Homo sapiens
ggcgggcagatcacccgaggccaggagctggagaccagtccggtcaacatggcgaaaccccgtctccaccaaaaatacaaaaaccagtcaggagtggcggtgtgtgcctggaatcccaggca

SEQ ID NO: 269873 - DNA, 122 bp, Homo sapiens
aaagtgggtcagaaatgagaggattaactggatccagttgcattttggctacaggtagcccgggtcacaggaggaatcttcatccctgggagttcctgctgcagaaagaaagatcaagctca

SEQ ID NO: 269874 - DNA, 122 bp, Homo sapiens
gtgcgaggcccaagggacccaccttccgtcacccgttctgctttgtttacagggtgtgtccgcagccggccaggtggtatccctgaaggtgtggctgattgacgacattctagaaaagatca

SEQ ID NO: 269875 - DNA, 122 bp, Homo sapiens
ggctccgggtgatgcgctacacccgggcggcgacagcgggagggaccgccgcctgggctgcggcttctatcccggccacccccacttccggctccggggactacagcccccggcgagcactc

SEQ ID NO: 269876 - DNA, 122 bp, Homo sapiens
gctccgcacctccctgccccaaaacccattgatgcagcggccactgcggctgccgagcggcgtcttcccagagcccggggctgtgcccgcccgatgcaggatgcaactgaggaagcccgctc

SEQ ID NO: 269877 - DNA, 122 bp, Homo sapiens
taactttgactttcatatatgtatacaaggcctgcttttccttacgtttcagtaagcatacggtctcttttggcaccagcttaatggtatgctatgtatcttttatttgcgccaagtcttac

SEQ ID NO: 269878 - DNA, 122 bp, Homo sapiens
tagaggtttggggagagggcttcctgaaccggggaccttcacccttcgcgggtgctggctcgcgttcacaccccttccaccccggaagaagtgagctccctcatcttcctctgcaagtttcc

SEQ ID NO: 269879 - DNA, 122 bp, Homo sapiens
gcgggtgatgcgaactggagtctgagcctgcccgagcggagctgggagggggctggcgggcgggcgcgcgcacacccgctgatctatcactctcgttcttgtagctcccagccgaggacgtc

SEQ ID NO: 269880 - DNA, 122 bp, Homo sapiens
gtcagacctggtctctggagggccagccgggggttcccgtccacctgtcagggggttcgacgccactttgagatgacaagtgaggccacctgggcacagcgctggtgtgagaaggaggccat

SEQ ID NO: 269881 - DNA, 122 bp, Homo sapiens
caggaaccccgggcgttggaggatggggtggggtctgtgctgtgctgctgggaggggctgcgctgcgctggcgcacggccaaactctgggaaactcagagccttggagatctgatccaccgt

SEQ ID NO: 269882 - DNA, 122 bp, Homo sapiens
gcacgcaagggctgctctgaagaaatacgggaggtcctcactggagggtctggggccacacggtgggtccggagacagaaacgaggagaggacgggctcacccagccgtggggccgcgggct

SEQ ID NO: 269883 - DNA, 122 bp, Homo sapiens
agaagcgtttgaacccgggaggtggaggttgccgtgagcagagaccacgccactgtactccggtctgggcgacagagcaacactctgtctcaaaaaaaagaaaaaaaaaaaaaaagaaattc

SEQ ID NO: 269884 - DNA, 122 bp, Homo sapiens
gctcccaggacacatgcacttgaggcccaaaaggacctctgctcccccagtcacttgatgcgggaaaacatgcaccttcttagggaagatctaggagaaaggaaacagtaagccactgcttc

SEQ ID NO: 269885 - DNA, 122 bp, Homo sapiens
aggatcagcaccagggccatggtgggcagatacccgctagagctggagccagggcttggtcgcaccctctcccctcccaggaaatgaggcaacatcagaaaaccagacccagatcctcattt

SEQ ID NO: 269886 - DNA, 122 bp, Homo sapiens
gtgagagaggtgggacagcagtttctgcatctgttcgcagcaaggcagtctcttctgcctcgcagtctcgttcaggcaacactgcgggaattcggcgtgcatcgctggcgggccgctgctcc

SEQ ID NO: 269887 - DNA, 122 bp, Homo sapiens
cgcgcccctcacctgcccagactctccgcgggggctcaccccagtcacgcggatcagccgcgggaggctccctgcctgcccctcctgggtgctgcagggcttccacctgcgcagtgagaggc

SEQ ID NO: 269888 - DNA, 122 bp, Homo sapiens
tgtgtggtctgagagaactgcggggtctcctcctcgtgcctgtgcggtctgagagaactgcggtggccccttgtgggcctcttggttctggggacagaggacacttttcactcagcccgggg

SEQ ID NO: 269889 - DNA, 122 bp, Homo sapiens
taatgccgacagcacagggagcctttgcctgccggaggaagcggtgaggaagaggtggtgcgtcgtgcacttcctgttgctgttttaggacagcttgggtgagtccagcattaaaaatcaga

SEQ ID NO: 269890 - DNA, 122 bp, Homo sapiens
ctcaaccaaattctgctatattctgtcaaaattctgaaatgaaaactgttaattcttccccgacactattatctctgacccccaggctgatgtctttgccttcgggattgtcctctgtgagc

SEQ ID NO: 269891 - DNA, 122 bp, Homo sapiens
tgtgtccactccctgctccactgccccgaggcccttcctgccccttcctgcagtgggaggcgactcagagcagggaccccagggagaccttaccagcgcttccctgctgagtgccaaacaag

SEQ ID NO: 269892 - DNA, 122 bp, Homo sapiens
caccggctgccaggggctagaccagtggccattgttctgcttccaggagtaaaggcttcccgggggtttgggtacagaaggggtggggagttccagtggatgggaccggcgtcagggcccag

SEQ ID NO: 269893 - DNA, 122 bp, Homo sapiens
cgcccatatatttatgatttatttttgaatattcaaaataccctgctttagcccaagtttcgcagtgatttttatgctgcgatcttaaagattcctttattatggctttatgtgtgtctgtt

SEQ ID NO: 269894 - DNA, 122 bp, Homo sapiens
acttcagcttgatggcagcgttttgtgcactgtctgcatgacattgcttgtgaagggcagcgctaacactgccagtgcctgtccagctctcctgatacggcctttgtatttttcctaggtcc

SEQ ID NO: 269895 - DNA, 122 bp, Homo sapiens
ggacgcccggcaacctcccctgccctcatccccgcaccgccgcatctcctcgctgcctcccgggcttcggacccccggtctcaccccctgaaacacgactcgcgatttcaaacctggagacc

SEQ ID NO: 269896 - DNA, 122 bp, Homo sapiens
catgattcattcatagggctctgctatgaaaaatacagatacacctgacctcaggtgatccgcttgcttgtgttggtaaaataggcatatctgtaaatttagtagaaaaaaagcagtgttaa

SEQ ID NO: 269897 - DNA, 122 bp, Homo sapiens
gatttcaattaagataccatgagcacgggcatcaccgctgctccagggggtgggtggtggcgagggcatgccttggccctgccgccttgtccttatctttacccccagcttggggagcctga

SEQ ID NO: 269898 - DNA, 122 bp, Homo sapiens
ccacccatcccagagaagctgcctggctggctggcaggggcgcgaaacaggaaccagccgcggtctccagccccgcccgccgggtgccgttttccaccctggccacaaggcggcgggctgcc

SEQ ID NO: 269899 - DNA, 122 bp, Homo sapiens
aaaaaaagaaaaaaaagacgtgtactttaagacaaacccacatacccaaaacactggctacgataagattttttttatttttttgagacagattttcgctcttgttgcccagcctggagtgc

SEQ ID NO: 269900 - DNA, 122 bp, Homo sapiens
ggtcctttctttccctgagttgaaaaaaggggctccgtctcggcccctccatgactctcgcgctgttagtgaacatctggaagaaaccaggggcttggagtggggttatttgggaggaagtg

SEQ ID NO: 269901 - DNA, 122 bp, Homo sapiens
ctcctggccgggagttcccttgccggctctgcttccccacccgctggctccccacgcctgcgggcagctgcagcagctggtcccggtcaccaaaccaaggcttcactgggacggagagggga

SEQ ID NO: 269902 - DNA, 122 bp, Homo sapiens
tgccatcaacttccttgcttgctggggactggggccgcgagggcatacccccgaggggtacggggctagggctaggcaggctgtgcggttgggcggggccctgtgccccactgcggagtgcg

SEQ ID NO: 269903 - DNA, 122 bp, Homo sapiens
ggtgcatgtgtaatggtctccaagaattacaacaacatcctacccggaggaccacaaccacgacaccactggctttaaaatcaaagcctggtccctagcgaagaaagcgctttaatgtgctc

SEQ ID NO: 269904 - DNA, 122 bp, Homo sapiens
ctcttcacccgcatgtccagagggcggccgggatgtggagggtgagcgctgtgggcagctcgggggctgaaagctgggaagagaaatctgaagaacagccccatctctttcgcctgcacact

SEQ ID NO: 269905 - DNA, 122 bp, Homo sapiens
gtgctctatgcaaggtcttatctttcactagcaaaatggagatcaggaggttgcccaccacgctgactcctattatgaaacccaaggaagtcagtttcagaaaggctgttagaggcgagaga

SEQ ID NO: 269906 - DNA, 122 bp, Homo sapiens
tctcggtggctttactgtggaggggcactcctgaccagtggtgcctgccttgagcaggatcgcatattcatgaagcactgctgtttcagtttactatgaagacatttcctccttgtgttttt

SEQ ID NO: 269907 - DNA, 122 bp, Homo sapiens
ccaaaggtcttctgcaggtactttcagctctgccgggtctacttcctcacccgcggcaggcgcctctcatctcaggttgaaatccgccttccccactcgcggcaggcgcctctcatctcagg

SEQ ID NO: 269908 - DNA, 122 bp, Homo sapiens
agcgttcaaaaaaagtacgaaaaccatcgggtaatttccaactgaaccgattacggacggcgaatttatccaaacacttaagcaaggagaggatcctaaaatcgaaaaacgaaggcggaagg

SEQ ID NO: 269909 - DNA, 122 bp, Homo sapiens
cgccggggcgggaactcaccttctctgaggcaggggcgggcgtctacaactactgtcccccgccccgccaacgccgccagccaggggataagccgcggtggaggtggcggagaggcaggaac

SEQ ID NO: 269910 - DNA, 122 bp, Homo sapiens
aaggctgcaaaaagccggaaaatatcccagcttttaaggcacactgacagccaaacagaacgctctttccgtttgcagtttttttagtgtcattttaagttgcagcttccggccaatcagcg

SEQ ID NO: 269911 - DNA, 122 bp, Homo sapiens
atgggaccctgccaggcccagtgccactgccccccgaggctgctagacgtgggcgttaggcgtgtcccacccacccgccgcctcccatggcacgtcgggaacaccggagccgccaacttgga

SEQ ID NO: 269912 - DNA, 122 bp, Homo sapiens
cctgcatttccgggggcttccacgctgctggggggtgctctgaagagttccctggggacacggggatggcgggctgctcccgagtatcccaaagacgccagcaaccctcgctcactgggcca

SEQ ID NO: 269913 - DNA, 122 bp, Homo sapiens
agggagggccgcccctcttcatgcccagggacctaaggccacagaggcacttgtggcacacggccccgaggcatggggcccgggctggttttctgaattccaaagcccagtcctgaagtact

SEQ ID NO: 269914 - DNA, 122 bp, Homo sapiens
ccgcccacatagagctggaccccgcagctgaagcggaaatgtgagacaggctggcacctccggaaaaactgcctttcagccttggtgttccgtgcaaggtgaaaaaaaataggtcctccaag

SEQ ID NO: 269915 - DNA, 122 bp, Homo sapiens
acaagagagaagtcaaggatgattcaagattttaggcctgagtaattggaaggagggagtcgccacaaactgatttggggaagcagtagatagagcagatttggaagacaacctcagaagct

SEQ ID NO: 269916 - DNA, 122 bp, Homo sapiens
tacaaaaccaaaccagcaagccctgggaagcggtaggcttaggaacatggaaagctcaaccgtcggttgtggggcccgcagatctctctggttcccctctctgccccgtctccagctttttt

SEQ ID NO: 269917 - DNA, 122 bp, Homo sapiens
gatgaccggccgcagcaatgcctccactcagtcccagttgggcaaagtttcactccactgcggcgacgtgaacaagaatcacggcttccttatcgtgagttatgaatgatttaagccaagtt

SEQ ID NO: 269918 - DNA, 122 bp, Homo sapiens
tttcctctcctttctccctcccccttgtctgcgccacagcccccttctctccccgccccccgggtgtgtcagatttttcagttaataatatcccccgagcttcaaagcgcaggctgtgacag

SEQ ID NO: 269919 - DNA, 122 bp, Homo sapiens
tcctggctgggcctttggggacgcggcccctggccctccgtggcctgtgttcctgttgttcgcttctctcccagcggaccactgtgtctggggcgccgcgccctccggtgcgctcagacctc

SEQ ID NO: 269920 - DNA, 122 bp, Homo sapiens
gcccggccaccgcgcggagccgggtgtccgccgactcgcaagggggacgcgcgggctcctcgtccccaagctccgccctgcgcctttgctgcgccgggccctcccaggcccaccctggcccc

SEQ ID NO: 269921 - DNA, 122 bp, Homo sapiens
atgtagaggccaaaatagaaaacacatcttcagatcccaagtaaagtgctctttcaggcacgtcacacctgccatctcaaactatatttacattcatttttgcaaatagcccattcttgtat

SEQ ID NO: 269922 - DNA, 122 bp, Homo sapiens
cccgcgggcagaagcgcttccactgcagagagccaacagaacgggagggctgtacagctgcgacatcaccgcccgggggccatgcacgcggatcgagtttgataacgatggtgcgttccttt

SEQ ID NO: 269923 - DNA, 122 bp, Homo sapiens
tcttaagttacagtacagaccagcatattaaggaagagttaataatggcatagcctgtgacgtgtcaggcgttgtgctggcctctctcagtctcgccctctatgagatgggggttttacctt

SEQ ID NO: 269924 - DNA, 122 bp, Homo sapiens
agatgtctggactccaagcgcggttccttcccagtgttcagctgctgcgttgatcctccgcgggggggcctgccctgcactgctctgatgaggtgttccactagggcaaatgcctacccggc

SEQ ID NO: 269925 - DNA, 122 bp, Homo sapiens
agttgggactaagcgggctctatcgctcagggcgacaggcccggggctacgcgaagaagtcgcaggccaagattctttacagtttgagaaataaaagcaggggggtgggggcttcgtttttt

SEQ ID NO: 269926 - DNA, 122 bp, Homo sapiens
ccaggtgggcgtggccggaagtggttcctcttgacttccacctaataaaggggtctgagccggtcgcctgagcctgaaaagtgctgtcacgtcagcggaaggaggcgtcccagatcttctca

SEQ ID NO: 269927 - DNA, 122 bp, Homo sapiens
cgggaggcctaccccacagagaggcagggctggaatgaaaagaaacagaacggcctctgacgccagaagggaggaattctagcccgcagcccaggtctgcttcctgactctcaggaaggggt

SEQ ID NO: 269928 - DNA, 122 bp, Homo sapiens
gtcccagccaatcctgaaacacctccctccgggtacttctgtttcctctctttcattggtcgccttggaggccgctcgcctccggcgcgggcacagagaggggcggggctgatagggcgttg

SEQ ID NO: 269929 - DNA, 122 bp, Homo sapiens
ccagggccggggcaggaccacctcggacgatgctgaagagctcctcgatgcgcaggctggcgtagatgcggtagaagaacctttgcacgtggcagcgccagcggcgcagggtgttgccggcc

SEQ ID NO: 269930 - DNA, 122 bp, Homo sapiens
gcggggagccggtggagcctgcagcggtttccgcggatgtggaagggtcgtggcggcgggcgcggcccgcgcgccgggctcacctcggcgggcgcggacggcgggcggctgcggagagcggg

SEQ ID NO: 269931 - DNA, 122 bp, Homo sapiens
cgctgagattctttggccgtctgtccgcccgtgggtgccctcgtggcgttcttggaaatgcgcccattctgccggcttggatatggggtgtcgccgcgccccagtcaccccttctcgtggtc

SEQ ID NO: 269932 - DNA, 122 bp, Homo sapiens
atggctaatttttgtatttttggtagagacggggtttcgccatgttgactgggctagtctcgaattcctgacctaatgtgttccgcctgcctcggcctgtcacagtgctgggattacagacg

SEQ ID NO: 269933 - DNA, 122 bp, Homo sapiens
cggtggtgctttccggcctagcggcggaaatgcgacagtctctaagggaggaggccggagcgcctccctgtaatcccgaaggaattgaaaactaacaaagaaaaggaaatcacgggctaggt

SEQ ID NO: 269934 - DNA, 122 bp, Homo sapiens
gggactaatgaagcaaaggaaatggaaaaggtgacattttcaaataatattattagtaaacgaattgacaacatgtcagatgacaaagatgacaccaatccaaagtcttattaagtcaaaag

SEQ ID NO: 269935 - DNA, 122 bp, Homo sapiens
gcctggcaagaaaggtcagcgaggctgtccccagtcatccgggccggtcagtgtacacagcgacacctggggaggaagcagaccccctccagggctccaccctctcagccctcctctcctca

SEQ ID NO: 269936 - DNA, 122 bp, Homo sapiens
acatatgtagtggtattttattgtggctttaatttgcatttccctaatgactaatgatgtcgagcatctttttgtgtgattatgtgttgtcaatatccttactttgtaatgttttatttgaa

SEQ ID NO: 269937 - DNA, 122 bp, Homo sapiens
aggcagttgggcagaacccgagcccagagaatttctccccaggccccgggaccagcccaccgttgctgtggctctaaagatgggcagaagaaccagtttcaaaaagcaggatctgggatccg

SEQ ID NO: 269938 - DNA, 122 bp, Homo sapiens
ccaggatgacaggagcacacgccgtattcaccacagacggggatcactctccagaactcacggggagaccccaggacgacaggagcacacgccatattcaccacagacgggggtcactctcc

SEQ ID NO: 269939 - DNA, 122 bp, Homo sapiens
ttttttttttgggacagtgtctcactctgtcacccaggctggaatgcagtggcacaatcacggctctgcagggtgcagactccaccttctgggctcaagccatcctcccacctcggcctccc

SEQ ID NO: 269940 - DNA, 122 bp, Homo sapiens
cctcctttgggattgtgctaactgggaccgcaaaatctctcccgagccagcccggggctccggttgtggggagatgggaatacaccctgcttttaaaggctcccagagcctgaggaagaaag

SEQ ID NO: 269941 - DNA, 122 bp, Homo sapiens
ggaacggaagtgacgtgtacgtcgcgagcgattgacggaaacagaaattgctttgcggcccgcacggaaattgctttccttcggcttccgttcttggtccatgtgagagaagctggctgctg

SEQ ID NO: 269942 - DNA, 122 bp, Homo sapiens
cggccggactcgacgccacttctcctccgcgcaggcgcacttggcggagctctacggccgcgcagaagacccaatattcctcgaggcgaacgtatttgtgtcgcttttctgaagatttcgat

SEQ ID NO: 269943 - DNA, 122 bp, Homo sapiens
ctgaggggagcactggagcagccctttggcagaggctgaggagggagatggaccagcccacgcctggcacctggctccatggcataaggaaagggagatgctggcctctgtgctcctgctgt

SEQ ID NO: 269944 - DNA, 122 bp, Homo sapiens
cgggcagtgctaagctgcacaggacttccggggacaacgcgcgtagcgaggcgacgtcggcgcgcatctcctccacatcgcgcttgagcttggctcgccggttctggaaccaagtgaccacc

SEQ ID NO: 269945 - DNA, 122 bp, Homo sapiens
agtgtttggatcgtaatctgagggcagtagggagttacactgccttgaagtctgcaagtacgttatgaaccataagagaaagggctgagctgtcttcaaagctctcagtccatatcctgagt

SEQ ID NO: 269946 - DNA, 122 bp, Homo sapiens
ccgagtccaatcctggtgacgtgaagggagaggggaccagaaagaacaacatggagatcacgtggacggtaagaggccctcccagccccagtggagcagctcaccttgccgcatgcaccggg

SEQ ID NO: 269947 - DNA, 122 bp, Homo sapiens
gactgatgccccgaagttgcctcggggatctccccaccccggcgaccccgctctaccgagcggctgctccgggagtcggggcagcgccctactttgctcggcccccacctgccccggccgcg

SEQ ID NO: 269948 - DNA, 122 bp, Homo sapiens
ataatttagaccccaggcctcatatgaatataagagggggtgcggtcttccccaagacggcgcgctggaaggacagattccccttgccgacccacatacaccatgaagaggtgcagatcgga

SEQ ID NO: 269949 - DNA, 122 bp, Homo sapiens
agatgctacagggactctgctgcttcacagacatgaagcgttggtgagaatgtaggcagccgcctttggggacttcacatccccgccgccccacgcacggtgagctagtgtttaaacttagc

SEQ ID NO: 269950 - DNA, 122 bp, Homo sapiens
ggccagggcagagagacaaaatcacctggaatctaaaactactccacggccgaggaactgcggcctgcagcgggctgggacgagggtggcggtgtagggtccagcgtccaggcctcgggatc

SEQ ID NO: 269951 - DNA, 122 bp, Homo sapiens
ccgggctgcgtcggcctgtgggcgcggcgcaaagcccggactggattccagaggggcaggcgggggtgggggcagcgggcacgcaccagagccaattttccttttctttctttcttttttta

SEQ ID NO: 269952 - DNA, 122 bp, Homo sapiens
accaaggtaagactcaggacgcatcgtgctcttcaacagaccttggaaaaccgaatgcctcggccgttagcacaggccgcccgccctggtggaatgggtcgccgccaccacgtgaccacttt

SEQ ID NO: 269953 - DNA, 122 bp, Homo sapiens
gaggggagaggatttgtagccatctttgctctgggtggagatttcatatccgcagtcacacgaggtaaccgacaccccccccccgtaacctgagctaaaggtaaaggtgatcctgaaaccgc

SEQ ID NO: 269954 - DNA, 122 bp, Homo sapiens
atgagcttgcattcttccttttgacacatctttattgcctaagtatgttgatctgatagccgtagaatttggtaatggtatggaggagcagattttggatataaccagaacaaaatatttgc

SEQ ID NO: 269955 - DNA, 122 bp, Homo sapiens
ccgggacgggtctctcacactcgaagctggagtgcaggcttccagaaggcggaagcgtggcgttgccagggacactcaaacgcgcagtcttcatcgtggaacgcgcgcgaggccccagcgca

SEQ ID NO: 269956 - DNA, 122 bp, Homo sapiens
caaaagcccttatcttgaattcatagcagcagctctcgttctgagacagtcattgtaccacgtagccaaggaggaaaccagctttaataaaccagaacatcaaccaagacaggaacttcatt

SEQ ID NO: 269957 - DNA, 122 bp, Homo sapiens
ccgacgcctttttttttctttcttttaaagagatggagtctcaccgagcactgtggctcacgtctgtaatccccaggactttgggaggccgaggcgaggggatcgcttgagcccaggagtcg

SEQ ID NO: 269958 - DNA, 122 bp, Homo sapiens
aagtgaggagaccctctgcctggcaaccgccgcgtctgagaagtgaggagcccctccgcccggcagccacccggtctgagaagtgaggagcccctccaccgggcagccaccccgtctgggaa

SEQ ID NO: 269959 - DNA, 122 bp, Homo sapiens
ggcaaaccctggggtctgcctcacattgtttgtacagtaaagaaagatttaatactgacacgtggctctagtttacagattctaatctgccaaatcctatttcaaggatgtggacggacagg

SEQ ID NO: 269960 - DNA, 122 bp, Homo sapiens
cggcgctgtgcctgggaggactttcccgctcatcgcgggggctgcacgtggcgctgaagccggggtcccacccccaatgtgctcgtcctaccacagccaaggctgggattccagggcgccgg

SEQ ID NO: 269961 - DNA, 122 bp, Homo sapiens
attgggcaccccacgactacagctctggcttctcctcctcgaattctgggaggtggggagcggccagctccactactccgtctcggaggaggccaaacacggcaccttcgtgggccgcatcg

SEQ ID NO: 269962 - DNA, 122 bp, Homo sapiens
ggacctgcattttttgagggaatcaatcagtgtgaaggaagagaaaagaaaatcactgtgcgtgaaagcagcctttaagttgttttgaggctgctgagagcattcaggctgggtaggggatg

SEQ ID NO: 269963 - DNA, 122 bp, Homo sapiens
tgcctctagccctaaattagtttcttgttgattgctggaaacaaggcagtagtgattctccgctgccactgctaccttttttttttttttttccttaaactcacgttcttaccttgataagc

SEQ ID NO: 269964 - DNA, 122 bp, Homo sapiens
tctgtttcttgacagtattgatttatccagcctgttcacacacttccttgacttgattctcggggtactatacttttggttactttctatcttattagtcattccttctcattctccaactt

SEQ ID NO: 269965 - DNA, 122 bp, Homo sapiens
gtgcttaacaaaggaacaaatgcatagacaggcacctagccaggactcgacatacaggagcgggtttttgtgtgtgtgtgaggagggctgtcactctctcacccaggctggagtgcagtggt

SEQ ID NO: 269966 - DNA, 122 bp, Homo sapiens
tcctgccccgcccccagcctccccacccctcaccggccagtcccctcccctatcccgctccgcccctcagccgccccgcccctcagccggcctgcctaatgtccccgtccccagcatcgccc

SEQ ID NO: 269967 - DNA, 122 bp, Homo sapiens
tgcagggcggcggccagcacagcttggtgcccaggaactgctgacggaccgaaggaggagcgcctgagacagtgccagcgaataggcccctgcagcaaacattacgactgcgcttacaccta

SEQ ID NO: 269968 - DNA, 122 bp, Homo sapiens
gcaacaccggatccgcctcggggactgggaaagttccctccacggctcccacaggcgccccgcctcctgggctcccaacggctgctttcgacgttgtgctccaccctttccgggcggggcgg

SEQ ID NO: 269969 - DNA, 122 bp, Homo sapiens
tgggccttttaagagaatcctcaaatataaaaaagaaaccataaaagcataagaacttagcgccatgcaatgtgttttcacacgcagtgaactggccgtgaagtcatacgattctgacttcc

SEQ ID NO: 269970 - DNA, 122 bp, Homo sapiens
gccacatcctcttagacagttcatcgtagctgggctggctggggcggtcaggactccagacgctcacactaaaagaggggtggtagtcgagcagtcactccactcctctgtagggagctggc

SEQ ID NO: 269971 - DNA, 122 bp, Homo sapiens
gggccggagggaggcggaggcgtagcggtccaactgctgaagtccccatgtgacagtgagcggggtccccgctccaggagacgctcgagtctgcgtcccggccctcagcactgtccactgtt

SEQ ID NO: 269972 - DNA, 122 bp, Homo sapiens
tgactcgtgaaacgtccgctccgggcggcggcggcagcggcggcaggctggcttgtaccccgacaacgcgcgtctggcttctgccggacgttcctatctgggttcagaactggggccgggtg

SEQ ID NO: 269973 - DNA, 122 bp, Homo sapiens
ggcgggatcagtgcgccggaagtggcgtgccggaaacaggcgcgtcggaagttgcgtctccggaagcgtttgtctctttacccagcttcccgggctaacccttaccgagtgtcacctgcagg

SEQ ID NO: 269974 - DNA, 122 bp, Homo sapiens
cacacatattgactaacgtccctgcaaaatgttgaatcaatttatacttgcagcaccaatcggcaaattaatgtccattatgctttcgcttcaccaaaactgatacttatattttattttgc

SEQ ID NO: 269975 - DNA, 122 bp, Homo sapiens
tgccttggcagcaccgaggtccgctcctctgggaggtgccccacgtgatcagtgagcctgcgcagcacggtctttccagtgcctgagccgcctcacgcaaatcctgccggggtgtaaattcc

SEQ ID NO: 269976 - DNA, 122 bp, Homo sapiens
gccccgcaggcctcgggttccatcgcagcagcgtggcctgatgactccattttgtcgctgcggaggagccgcaccgagtccacagcgccagtgcgggggagccgcgccggggaagagggagg

SEQ ID NO: 269977 - DNA, 122 bp, Homo sapiens
atgtcaggaaagggcatcatagacaactagcactcaactagacggtcacaagccttcccacgcaagtatatgtagtaggcagacgagataaatatgaaattttactcgacaacagaaaagga

SEQ ID NO: 269978 - DNA, 122 bp, Homo sapiens
ccctgccgcatccccggagccagtgcccacaggggccaggcagcccgcaggggtcgctcacggctggtgtaggggcttggtccaccacgctagtacttcgggcaccaaaatagaaaaagaat

SEQ ID NO: 269979 - DNA, 122 bp, Homo sapiens
tctacaacgacccagtctgacgctccccaacatccaaaggactacgcctcggaaggtgctcgaaagaggcagaagttcactcttcggtggaaggaaacccagtccatgggaaaggcagcaga

SEQ ID NO: 269980 - DNA, 122 bp, Homo sapiens
cgtggtgcttgctgtggtgcagctgcatgatctgcgcgttgatgtgaggttccagggcgccgtagtcgtagggcaggtcggggaggctgtgcttctgcctggagcccagataccccaaaacc

SEQ ID NO: 269981 - DNA, 122 bp, Homo sapiens
ctagacccattcctctgttttaatgttctgtaagaaaggagacacccgaaacttgtttggcgattcagactagtgttttacagggcaaatttaattttttgtaggtttctttgaaccaggag

SEQ ID NO: 269982 - DNA, 122 bp, Homo sapiens
gaggttgggtgagttaatgcagttacatggttggccaatggtggggccagatgaacaattcgcaccccctggcttccagaacaggctggttttaccaccggtgaggctggtcctttcagtgg

SEQ ID NO: 269983 - DNA, 122 bp, Homo sapiens
gaggaaatgcgctcacctgcgagtctttcaggcccagcttggccgccagcttcttgcggtcgggcttgctgatgtacttctgcttctggaacatcttctccagcgccttccgctgcacgtcg

SEQ ID NO: 269984 - DNA, 122 bp, Homo sapiens
aaaagaaaatgtaaatgtgaaagcattctttgtactctgccgcggcaaggagctggcagacggtacagaagagtaatgaactaaggacatgctccacagcaaggttatttactagtgatttg

SEQ ID NO: 269985 - DNA, 122 bp, Homo sapiens
ttccgaggcctggacttgctgcctctcaaggaatgctcaggaagggggtcacacagtcctcggtcaggacagatcacgtatcctttgctcctgagccaaagctatttatattttggcaggag

SEQ ID NO: 269986 - DNA, 122 bp, Homo sapiens
ggggcccggagggggccccgcacttcccgggggtctgcgcttaatgcgtccttttgtgtgcgtgtgtgtctgtgttttctgattcaacacatttatgcatctgcggctcccggtccccgccc

SEQ ID NO: 269987 - DNA, 122 bp, Homo sapiens
gagcctagtgctgcagggggccgagccccggcctctcgtgcttagtgccgcggtggccgccgcctccccccgctacacttccgcaacggagctgcatggagcgggccgaccgggggagtcac

SEQ ID NO: 269988 - DNA, 122 bp, Homo sapiens
cgatgagacttgggcagctgcagttgttgccaaatgttacccttggtcacagaggcatgacggatgcctcatgctagaagttcaggggagtttggaaaaatatggaaattcccaggcactat

SEQ ID NO: 269989 - DNA, 122 bp, Homo sapiens
aagggtggctattgtttagtgctctctagcaaaagaatgggattgggggcggggttggggcgaggattgagtttaactggcattggctctggcttttctgcattccaaactgtctgaggcac

SEQ ID NO: 269990 - DNA, 122 bp, Homo sapiens
tccccaccccatttttttttttttttttttgatcagcaaagaaatacaggagaccagtctcgagtggtgctgtacttgttatgagtgaggcagcagcacagtgtgtggcatttacatggtac

SEQ ID NO: 269991 - DNA, 122 bp, Homo sapiens
aatgctgtccactggctgaacctcgctggaggccagctatctaagaagcctgggaaatgtcgttcataggagctgaccccctgcagtagagaggaggtagggggagggccaggactgggtgt

SEQ ID NO: 269992 - DNA, 122 bp, Homo sapiens
ctggcaggaaacctttcaaatcttgcacacgctggcctctgcctggggtgcctggctgggcggtgtggggggcatggttggttaaggcgcagagtccgcctttcctaccagccactctagct

SEQ ID NO: 269993 - DNA, 122 bp, Homo sapiens
gattcctcccgccggcctcctaggacctggggatgacgaaatgagttcacgcacgtaaagcgctcggcccaggccctggcgtacagcagatgcttaataaatgccgggtacaagagttccgc

SEQ ID NO: 269994 - DNA, 122 bp, Homo sapiens
gggcgtgcacacacattggctgatgaaacccccttcctgttgcacagggtcagaactaagcgaggtgggtgtagctttggagggttctgaaatctaagaaccagcttcctttcccaccgctt

SEQ ID NO: 269995 - DNA, 122 bp, Homo sapiens
gagctcacccgggtgggagacagagccggggcgcgcgagcttggtgtgggggcgccactccggggcggaggggaggggctaccagtgacttctccgagtcgggagctagaaagaggcttccg

SEQ ID NO: 269996 - DNA, 122 bp, Homo sapiens
gtggaggattgggggtggggcgaattttgcagaaacctctttgctcctctggtaggcattcgaaaacgtggcttggctccggcacaggcccctcaccccccgggtcctaggtgttcttcgat

SEQ ID NO: 269997 - DNA, 122 bp, Homo sapiens
ctactgattatgaacaaagcacaggaatgcaggagtgcagaaagtattttaaaatgctttcgaggaaacttgctcaacttcctgatagatgtacactgaaaactggacattataacattaag

SEQ ID NO: 269998 - DNA, 122 bp, Homo sapiens
agacagaatctcactccgtcacacaggctgtagtgcagtggcaccatcttggccttctcacgggttcaagcaattctcgtgtctcagcttccccagtggctgggactactggtgcgtggcac

SEQ ID NO: 269999 - DNA, 122 bp, Homo sapiens
ctcggggcaggcgccgtcgaacgggatgcacaaaagcacagggatcctcctcacctgcggcgtcatccaaaggcgtgtggcacccagacgttgagcagagtctgaggcttcagggaagacag

SEQ ID NO: 270000 - DNA, 122 bp, Homo sapiens
cttccccttaggccagaacaaaagaacaaagccctccaagggatcagggcgggaccgccccgcacagaaggaggcgaggtgcgcccccttcgaggactccccagctttctcctgcagaggcc

SEQ ID NO: 270001 - DNA, 122 bp, Homo sapiens
cgtttctgtgcttttgctcatgctccctctatctgaaatacccttccctcacttctttgtcgagtcctttaagcctcagcttgtgggtcatgagttctctgaaacctgctttttctgactgg

SEQ ID NO: 270002 - DNA, 122 bp, Homo sapiens
ggcagacggggcggctccctgagatggggcggacgtctgtggtgcagctgcggcagaagacgtggccacagtcaatggtcacagggtcccgcaggtaatcaagacagatggagcaggtcacc

SEQ ID NO: 270003 - DNA, 122 bp, Homo sapiens
ggcgcatagctgagcgcaggtagcgttcccgggccgtggcgaaaagcgggctctgcgagacgtggtagagcatatacgccactccggccacgtcgccataaaccccccctggcagccgctag

SEQ ID NO: 270004 - DNA, 122 bp, Homo sapiens
ccatcgctagagtgctcgccgcgctagcagcctcgcgttccagggctgggggtgcgccgccgggatcctctctgatcgcccacgccccatctggggtccccattcagccgtcagccctgttt

SEQ ID NO: 270005 - DNA, 122 bp, Homo sapiens
cagtcagtgtgggcagcaggcccagagtggtgcgagccgacggcggcgttagaaaggcggcgtcccgacgaacagagtgactcggcctcggctccccttcaaagcgccatcttatcgctgct

SEQ ID NO: 270006 - DNA, 122 bp, Homo sapiens
ggaactcttgacctcaagcgatccacctgcctcggcctttcaaaatgctgggattacatgcgtgagcaccacgcccagccggcacttccatcaatttttgagtctgaagcccacccacacgc

SEQ ID NO: 270007 - DNA, 122 bp, Homo sapiens
ctcctctgtgctttctgatgtgctgctttttgccttgcaaacaaccctcctctgtctccccggattaactgtggtcattgccaaaactcactttaaacatttaccagtcccaagaatccttg

SEQ ID NO: 270008 - DNA, 122 bp, Homo sapiens
gttaggattatgaggggagaattctgctaaaatgtagtaaacgataaccagccattgtttcggaggacatcggatgtgtaacttccccaattattcctgtagataacgttatcgtagcacct

SEQ ID NO: 270009 - DNA, 122 bp, Homo sapiens
aagaaaaatcccacagcctgcccaccccaaggccctccctcccagcctcgtgaccctaatcgcggcttccagcacctcaaacatgaccactagctcacagcaggccccgcccaggaacaccc

SEQ ID NO: 270010 - DNA, 122 bp, Homo sapiens
actcggcctaacgaacggacgaggaagcccccgccgcacttggcttattagttggtggaccggaggggcaaggaggggatgcccgaatcctgcactgagtctctgaggtccttaaagaagaa

SEQ ID NO: 270011 - DNA, 122 bp, Homo sapiens
tgtggtggctcttcatggacaggagcgtcgccctgggacccccaactccgctcccacgttcgtggacaggagcctcgccctgggacccccaactccgctcccacgttcgtggagaggagcgt

SEQ ID NO: 270012 - DNA, 122 bp, Homo sapiens
tctgaccttcttgttctcgggaaagagcggtgcctccaggattcaggcctgagtcgtgcccgggaccatgtggatccctttcgttcctgtgtcacctgggggtgaggcagacattcctagtc

SEQ ID NO: 270013 - DNA, 122 bp, Homo sapiens
gggcagccccacgtccccggcgccgccgttgcacatggtcagtaccgacggctgcagcgccgcattcttggtcttggactcagccaggaagggcgacaggcgctcagccaggcgcgggggcc

SEQ ID NO: 270014 - DNA, 122 bp, Homo sapiens
gggcggaagacgagggcggcgaggtcgggttccgggcgcttggagaagatggtgctgcggcggctgctggccgccctgctgcacagcccgcagctggtggaacgtctgtcagagtcgcggcc

SEQ ID NO: 270015 - DNA, 122 bp, Homo sapiens
tcaaaagagttggcgtttcctgttctgggtgctactgccaaacgttatggtacttagagtcgggatgcacaacttcaaccaccgacttatcaatgcagccgcctgtgtattgcaattggccg

SEQ ID NO: 270016 - DNA, 122 bp, Homo sapiens
cgctgccttctacggatgtgtttgctgcgggcttgggccgggccgcagttttattgcgctcggaggattttctgctcctcctcccggtggctggcggccaatgcaggctctgggcgctccca

SEQ ID NO: 270017 - DNA, 122 bp, Homo sapiens
atttatatagtggtagattgcaacctaatgacaaacactgacctttttgtataataactgcgtctctcctcaatatttgtggctaaagttttagagcctccttctattttcatgtgcctccc

SEQ ID NO: 270018 - DNA, 122 bp, Homo sapiens
gacaatttaattgaggaactgaaacataggaaggaatttaatcttaacaagcaatatatccgtaagtgcaaagtactgtagtataaatcagggactgcatttcttaagcccataattatatt

SEQ ID NO: 270019 - DNA, 122 bp, Homo sapiens
tatctattgacagctgttaacagcatagttacacttgtgggcctagagcagcactttcaccgtggttctcagcactcttgagagatagcaagagctcagggacctttgccaaagatggctgg

SEQ ID NO: 270020 - DNA, 122 bp, Homo sapiens
ataggaggaagagggggttattatggagctgggcgtggaagtatgtatgacagaatgcgacgaggaggtgatggatatgatggtggtatgtgtatctaatgaacaaaggttctgttgtcatt

SEQ ID NO: 270021 - DNA, 122 bp, Homo sapiens
gagcaattccccaccgagcctcccttcccaggcagtcgaggtccctccctacctctgccccgcgctctgggaggctccttgttccgcgaccacaaagcccctttgatcctctgctcggctct

SEQ ID NO: 270022 - DNA, 122 bp, Homo sapiens
ggctctagatttgcctggggccaccaatattctgcaggaaggggaggttctgtccccttccgtctagggaagatccagagaactcgaggaactccccaggcaggacctgcgcctcagtcgaa

SEQ ID NO: 270023 - DNA, 122 bp, Homo sapiens
gaaaaggtcatagagacccctgagaatgacttcaagcaccacaggagtcaaaaccactctcggtcacctagtgaagaaagagggcacagtaccaggcaccacacgaaaggatcacgaacgtc

SEQ ID NO: 270024 - DNA, 122 bp, Homo sapiens
ggcagcctcatcccgggaaagaggggctgacggacacccagacacaccccaccactaccacgagcaaacccaccctgacacacccacggatacacacgggtgcatgcgcgcagacacacaca

SEQ ID NO: 270025 - DNA, 122 bp, Homo sapiens
cgatgacaacggtaatgatttggaagttcccgacgacaacagtgatgattcagaagctcccgacgacaacagtgatgattcggaagctcctgacgacaacagtgatgattcggaagctcccg

SEQ ID NO: 270026 - DNA, 122 bp, Homo sapiens
cagggccatctggctgcttgctggctgccctctttggaaccaggggccccaatcccatcgcgtttctaaaccaccaaccggcaggcattctgagattccaaacaaatgcaagagagattagg

SEQ ID NO: 270027 - DNA, 122 bp, Homo sapiens
cagtggccatcatggaatttctctcaggctgtatagagttatgaggctttctggtcttgacgtctgcgacttatttttaaacggttagaatggagagagggaaagccgccgtgggacacgct

SEQ ID NO: 270028 - DNA, 122 bp, Homo sapiens
agtcagttggcatgtgggtggcggagtgcctggtaatggaataatagggtcggcgatgcccgccaagattccagagtaagtcaggtcgctaggtgagttgtgactgattgcttttcctgcag

SEQ ID NO: 270029 - DNA, 122 bp, Homo sapiens
ggacatccttccttcttgtagtggatggagcaggaggttgtccagggactgtcacatgctcgctcctcaccatgggcaggacggtggcagcaggggggtccacgggcccgtcctttttttta

SEQ ID NO: 270030 - DNA, 122 bp, Homo sapiens
ctggtctctctgctgcctgctcgcccctctcaatctctcctttgctttttgctttaagatcgctcttctctattgcatgcagggagttttcttgagctgggtagcaggctgattccattcat

SEQ ID NO: 270031 - DNA, 122 bp, Homo sapiens
catgtctcacgttccaagccggatcaatagccgcctctcggccgaccttgacctctccctcgaccctgccaggcttccgcagctggccccgtactaatgtttccccactctctagatgccca

SEQ ID NO: 270032 - DNA, 122 bp, Homo sapiens
ccgggcaatcaggccggcaggaggcaggtggtccggggcagacaatggcgcggaggagtgcggaacctgggactaaatttggcgttgcctttgcagggcgcggggcgcccgttcatctcgat

SEQ ID NO: 270033 - DNA, 122 bp, Homo sapiens
cgttactcgctcgttctagatgctgagctgctggcgcactgcagcacaactagagatgtacggatgcccccatcttgatcttacagaatcagaggtacagccgcgagaaaggtctgtaagtt

SEQ ID NO: 270034 - DNA, 122 bp, Homo sapiens
tgagcccctgcacttggaagtagcagcccccagccagcagacgggactcgtacacatcaccgtgtcttacactcttgcctgtcaccgcgtccccttatcttcccctttagtgtatttacttc

SEQ ID NO: 270035 - DNA, 122 bp, Homo sapiens
tatatacaaagcagctggattcagcccatgggcagtggtttgctgacctttgtgctacaccgtggttattttctcagttataccaaaaataatgtaacacagcatcgtgtccatatcacagc

SEQ ID NO: 270036 - DNA, 122 bp, Homo sapiens
gttgcgcgcgtggctctggctgcgcaggaacagctggtgcctccgagggcggtcggcgagcgcgcgggcgtggggcgctggggggccggtcgggcagcgctgcgggagcagccgccggcacc

SEQ ID NO: 270037 - DNA, 122 bp, Homo sapiens
ccaacagcccacgctgctggagctggtgagcctgcggccgtgcttcagagactacagtgacgagagtgactcggccatcgtctacgacaactgtgcctccgtctcctcgccctatgagtcag

SEQ ID NO: 270038 - DNA, 122 bp, Homo sapiens
cgtacctgcggaaccggagcaagctgtgggagatggacaatatgctcatccagatcaaaacgcaggtggaggcctcggaggagagcgccctcaaccacctccagaacccgggcgacgcggcc

SEQ ID NO: 270039 - DNA, 122 bp, Homo sapiens
ctctttctcggtgcatataattgagcagtgacgtgggagacagcagccccctgggctctgcgccgggagccgggagcgctaaagcgagggcaattgtgtatggggaggtggggacggggagc

SEQ ID NO: 270040 - DNA, 122 bp, Homo sapiens
ggaagatggaggtcacagtagacgcacccagagcagagcccgggagtccgggatgaaggccgtcgtggggtggtttcaggggtgaatgccaacacttttaaaagagtgaaataggggtaaaa

SEQ ID NO: 270041 - DNA, 122 bp, Homo sapiens
aagaaaaaaaaaagaaaaggtcagctgagcaaagtgtgtaaggggcaaagtgataagagtcgaagttggagaagtaggcaggcgccagattatgcgacactttgtggaccacagtaaggagg

SEQ ID NO: 270042 - DNA, 122 bp, Homo sapiens
caatttaaaattctctgggttgtaggctaaggatcaaagggttatgtcctcagaattacacggtgagtcactggaaaaactctgagtaaaagtcaggcatcctgttttccaatcttatatgc

SEQ ID NO: 270043 - DNA, 122 bp, Homo sapiens
taagggaagacaaagttacacagtgagtccaccttctgaaaagcaacaggcagacaggaccgagggccatgctcttaaggggagccgtgatggagccgggaggagaggcgcatcctcagcag

SEQ ID NO: 270044 - DNA, 122 bp, Homo sapiens
aagagttaagagcctgggccctggagtttgattgtctaatctgagtcccaactctataatcgtgttttgttttgttttgttttgtttttatttttatttatttgtgtgtttttagaaggagt

SEQ ID NO: 270045 - DNA, 122 bp, Homo sapiens
tgaatatcggaagtgacgtcgtacggactgaaaacgcatctgtccatcacaccagcacggcggggcctgctcctgccctctaggttggtgctgagccctccgacctgagctctcacctgctg

SEQ ID NO: 270046 - DNA, 122 bp, Homo sapiens
aggagggagaggggaaaccaggagacccactaccagagcctgagctgaaccctgacaatccgcttgatggtaaaaccagtgaacctctgctcctccacctcctggctggcctttccacggcc

SEQ ID NO: 270047 - DNA, 122 bp, Homo sapiens
tgaagccgagccgcaaagtgcggtctgcgcgctgattggcggacgcacgtcacgggaccgcgggtccccacccacaattcttctggatacctgggcgccttcaggccactggtatctggccc

SEQ ID NO: 270048 - DNA, 122 bp, Homo sapiens
ttaacagaatgggaagttttaaactctacaccaaccttttcatgacctacacagcagcaacgctgctactcttagacaaacaccgcggggaaggctgttctgtttatttaaatttgtaaata

SEQ ID NO: 270049 - DNA, 122 bp, Homo sapiens
ccctcctctacctcgaactggaccgcctgacatctcaagccaggaaccaccgcgcaggggcggtcatggcgagggactcacagcctgggggacgcacaccgcattttttaatggctctagtt

SEQ ID NO: 270050 - DNA, 122 bp, Homo sapiens
tgctcccagcagtcctgcagtgaagatgttgtacccgttttgaattttaggaaactgacgcgcagaaaatgcaagggacttgcctggagtcacacggctagaggggataaggccaaagattc

SEQ ID NO: 270051 - DNA, 122 bp, Homo sapiens
cttagacacaagctccacttaggagggcttactggttctcatctaaatggaaggacaatacggttctaacaatacgtgagcctcatacatttattaaaataagaatgtgttatgttaccctt

SEQ ID NO: 270052 - DNA, 122 bp, Homo sapiens
ggaacaaaggcctcaggccagggctgggctgagggtgaggggcttgctgtgggcttctcgcggggctgatgaatcctgagctcgcagcagctggcagagtctctctgggcttcagttttctc

SEQ ID NO: 270053 - DNA, 122 bp, Homo sapiens
ttgggagaaaggccccattgctcattccccttgagtctgcagcttgggcaatcaatcggtcgccatggaaaccagccttccaatcagaagcaggcacttcttggctgcgccagcgccaccta

SEQ ID NO: 270054 - DNA, 122 bp, Homo sapiens
ttggcataaaaccaatcactgaagccagggaatagttgagattgtagagggaagaggtcccgtgtgaaaaggtggccaatgtcaggactctaagggacatcaagagtttaaggagtgagtag

SEQ ID NO: 270055 - DNA, 122 bp, Homo sapiens
ccacgtagccagcctcacacagacacaggccgctgatggcatcacagctcccgtggccagcgctgcagttgcaggggtggctgcagtcaggtccccagtgcccagtatcacaggctgcaaca

SEQ ID NO: 270056 - DNA, 122 bp, Homo sapiens
ctcagcacctgggcggacggtgagtggctagggaaacggactgggacggccgcgggcccgcgtcggagctggcgttctcgtgcccccgctgcccgcttcgggatccgggctgagggctcggc

SEQ ID NO: 270057 - DNA, 122 bp, Homo sapiens
gagactgaagtcatcacccaccaccgtctcccactcctccagggacccggggtcccctttcgtcagggtcacttctcctgaacgccgggcagaacctaactcctctgactagaaaaagatca

SEQ ID NO: 270058 - DNA, 122 bp, Homo sapiens
actcactacacagctaagaaagctcaaaggtaccctgcagacactcaaaacttgagggcacgcaactctcagttacgagtggtggcaatcataatgacagaatgaagtaccagtgcaagaaa

SEQ ID NO: 270059 - DNA, 122 bp, Homo sapiens
tgacctcgtgatccttccaccttggcctcccaaagtgctcggattacaggcgtgagccaccgggcctagccctaatttttgtatttttggtagagcccaaggtttcaccatgtcagccaggc

SEQ ID NO: 270060 - DNA, 122 bp, Homo sapiens
ggacccggtgagaaggtcgtgagctctgcaatggcctcgcctggcagctctgcctggacacgctctcgagccctgggaaaggtaactttaccttcctgggcctcagtttccccccaagtaaa

SEQ ID NO: 270061 - DNA, 122 bp, Homo sapiens
agcgagaccaaacccagcttctctacagcaccaggaagaaggcaagctgggccaccagggcgcggccccaggaaggaaaatcctccatggtcctgttgacagatgtggtatcaaatgaattg

SEQ ID NO: 270062 - DNA, 122 bp, Homo sapiens
ctcctgctccggttgctggcgctgttgctggctgtggcggcggccaggatcatgtcgggtcgccgctgcgccggcgggggagcggcctgcgcgagcgccgcggccgaggccgtggagccggc

SEQ ID NO: 270063 - DNA, 122 bp, Homo sapiens
tatcattctacccatctttggaatcagtgtaccttatggatttttttaatcctctttaatcgatccctcagtatgctggtgagacagggaggcacaggttaaccccattttacagatgaaga

SEQ ID NO: 270064 - DNA, 122 bp, Homo sapiens
ccggggaatgagtccactctggcatgaaagccctctgctggcccaaggtctatgccaaggcggaggattcattctccaccccagccctgcatgtgggactcagtcaccctgccagcgagagc

SEQ ID NO: 270065 - DNA, 122 bp, Homo sapiens
ggctaatttcagctcgtttttcccctgagacgaggccatcgtgccagtcggcgtgcagcgcgctggtcccagcactcctcgggcaggctggcaggctgctgccgctaatccaatgtttgctc

SEQ ID NO: 270066 - DNA, 122 bp, Homo sapiens
gacccagcccctaggccccatccccggttaagggccagtcttggtctgggtgtttctctccgggagctggtcgcaggtttccgttttcctcttcaaggaaggaaagaccagcgagagaattc

SEQ ID NO: 270067 - DNA, 122 bp, Homo sapiens
cgggagaagccgcccgggctcgggggctctgggcaccgccacgccgaggctcggcgctcccgggctcaggacaggtgacggctgcatcccactcagggaccttgacgccctcgaggaacgat

SEQ ID NO: 270068 - DNA, 122 bp, Homo sapiens
ccgggcaaacaccgggccccaacactgcagtcactcaccactgcaagtggaaggtgtggccgcagtggatggcggccacgtcgcgggagtgatcgaagaagtcggagcagatagtgcacaga

SEQ ID NO: 270069 - DNA, 122 bp, Homo sapiens
agatcaagcatctcagctcccaacattgcaccatggggactgagacccagagaagtcaagcgacacccccaagcttacacaggagtgggtagtccagctggggctccctacagaaggcagga

SEQ ID NO: 270070 - DNA, 122 bp, Homo sapiens
cagcagcatctggctagaacttacgggtgttgtttttattctatttatagttaccttctacgtacatcaagtgatgacactggatttccattttcggtggtaattctgggctcgctattgtt

SEQ ID NO: 270071 - DNA, 122 bp, Homo sapiens
cccagcccggggaccgctcctccctcccgtggctcactttgcaaaggcacttcgagtgcgcgggtgaactccacgcttcccggggaaccccggcttcctggcaagccgagaccctcgctcgg

SEQ ID NO: 270072 - DNA, 122 bp, Homo sapiens
agtgcagaatttcccaagtgagtttgactgtagaatcccattaatatcccacaggacatgcgtttgtttcctgaacaccctttgcaatttcctgcctgcatgctctgcacaggtgggtcttt

SEQ ID NO: 270073 - DNA, 122 bp, Homo sapiens
cctaggagtagaagacggtccatcttagttgtcacgaggtagtgcacgtggggaccctttcgggtacagttgcacacagtggatcacacagatccgaagtctgaggcacagggcgcggtccg

SEQ ID NO: 270074 - DNA, 122 bp, Homo sapiens
gggccaggcctctgcacaccccatttctgctgtgccagctgcactggcaggccttgtcagcgtgggtgtggaagggcctgctccctcctgccctcccttcctgtctttgggggagtggcagc

SEQ ID NO: 270075 - DNA, 122 bp, Homo sapiens
accgctcaccaccacccccaacggggcaccggcagccacgtggtcggaaggggcctatggcgcaatggcccggaaggcagtgacaccatcgttcccgtcctaagaaccatccggccctttgg

SEQ ID NO: 270076 - DNA, 122 bp, Homo sapiens
catggtgaaaatatgtgttgtttatttccataagcacctgcacttcctctcttgacacaccgtcacatctgagagggaacctattagaccacattttggctcagctgagctagattgacatg

SEQ ID NO: 270077 - DNA, 122 bp, Homo sapiens
tcatttcaaaagtaaacatttggctcatgttatcacctctgtctaagtgctttacacctgcgtgatttgttcattcatccaaggctcttttatccactctttctgtatgttgcacaagcatt

SEQ ID NO: 270078 - DNA, 122 bp, Homo sapiens
ggaggagatggcggagccctttttgttccagcaagtggtagtcggtgcatggcttgttaccgtctgtcagggtgttctcaggggcaccacaaggtacaaatcatgtgtcctgtcctccggga

SEQ ID NO: 270079 - DNA, 122 bp, Homo sapiens
aggatggtgttcagaggtctgaatctgtgtcttggtgagcgtccaggttccctgtgatcacgtttggtgtcagggctgcggcccgactggggagcctgggatccagagatgtgacccgaggt

SEQ ID NO: 270080 - DNA, 122 bp, Homo sapiens
actacgtctcaaaaaaaaaaaaaaaaaaaaaaaaaaagaagaagaaatttaacatacaggcgatttttcaggttctcatttgctaaaccaacaatgcagaatttgtgaagtaggggcaacaa

SEQ ID NO: 270081 - DNA, 122 bp, Homo sapiens
actccaaattatcgcagggggcggggcttcaggccaggggcgggaacgtccagagccaggcgctgtcagactttgcacgctctcagcatgacagaagcactggactggttttctcaagttgg

SEQ ID NO: 270082 - DNA, 122 bp, Homo sapiens
taccaagggagaaatattgttgtttcattttgtttttttcccccaagtatttttgacctgcggttggttgaatctgcagatgtggaactcatagatacagagcaccagctgcagtgggaagc

SEQ ID NO: 270083 - DNA, 122 bp, Homo sapiens
actttacaataatacatttgcattgttttagcccctgggattggggtaatttgttacagccgcaactggaaactgcaggaggtcaatggaacatccaagacaggcagccgtcaggcctgctc

SEQ ID NO: 270084 - DNA, 122 bp, Homo sapiens
agcctcggctcggggaggaggagaggagggtccccatcccggcccgggcctccggagcctcgaaggggtgcgccccaaactccagcccccgcaatgggtgctcgccccgccggcccgagcgg

SEQ ID NO: 270085 - DNA, 122 bp, Homo sapiens
ctacattcagaatttcctcctccattgttgttgaaagtgagatctcaagggaaaaatcagcgctgagacctaggagcaagtaggtcagtagatggcactcctcgccaactcagatactgggc

SEQ ID NO: 270086 - DNA, 122 bp, Homo sapiens
cacaccggggaggcgtggagagagccccgtcgcccgctaacccaggccaatggggcgaaacgcccggagacaagccttaccctagggcgtgcgggctcccaagccgccacaggtggtccagt

SEQ ID NO: 270087 - DNA, 122 bp, Homo sapiens
tctgtgtttttggacagacacatacagtcattcaactaccatcacaatcaagatactgaacggtttcctcacccaccctaaattccttcctgcacttttgtgtaagctgtcccctatccttg

SEQ ID NO: 270088 - DNA, 122 bp, Homo sapiens
gctccttctcagtcatcaggtccaggatctcctgcatctcatcggggaaatactccacggcgtccaggtacaacacctagggggcaggcaggaaggccgccccactcagccgccacttcctg

SEQ ID NO: 270089 - DNA, 122 bp, Homo sapiens
gccatcagatctcttaacattggctcactgtgggatctttcctcttaggttgaatttctacgtgaatatcaaagtgcctttttcctgaaaaagcacagtttgaagctttactgtgagaactc

SEQ ID NO: 270090 - DNA, 122 bp, Homo sapiens
taatcagtccagcttctctgctgtcttctgagaaggttgatggaggagagtggtctttggcggggatggaggtttccctgcaggaaatgaaccaggactgaggggaacctgtgccgttcccc

SEQ ID NO: 270091 - DNA, 122 bp, Homo sapiens
tcaggttttatgtacgctggcggccgccaggccgttcccggaagttgatggccttacagtcgtagaactgattggctgatcatgaccatgcagttagccagggttttcccgagttgtttggg

SEQ ID NO: 270092 - DNA, 122 bp, Homo sapiens
agcggggggcggagagaggagcccagactggcccccacctcccgcttcctgcccggccgccgcccattggccggaggaatccccaggaatgcgagcgcccctttaaaagcgcgcggctcctc

SEQ ID NO: 270093 - DNA, 122 bp, Homo sapiens
aatactatcccgcagctccacgattagccgcagtcgtgggcggggattggggcttggatacgccttttgcgtctggtccccaagggacgctccccaaccctcggcgcgcgaggcgccgcgtg

SEQ ID NO: 270094 - DNA, 122 bp, Homo sapiens
tggaaggaggagcaggaattgtaagggacacttagatgtctcttccattggggtcactggcgtgagtgtggaatctcaacactgtaatgtacattttcttcctctcaaagtaccttgggagc

SEQ ID NO: 270095 - DNA, 122 bp, Homo sapiens
ttctcaggcagaatcgcagggcgccaagcctgtgacggagggtgcaggacggttgccgtgcgctctgctctcagactctcccgaggaccctcacttggggctccaagaggaaacctcacagc

SEQ ID NO: 270096 - DNA, 122 bp, Homo sapiens
caccctccgtggggctcccggggaggcttgacttagcgaacaccctgcagtccgcaaaagcgcatgtcctggctgaaatcaccgtcttccaggtggccccaaacgaatcccaaaaggggcag

SEQ ID NO: 270097 - DNA, 122 bp, Homo sapiens
tcttccttctccgagccctcggcacggcccttgcccttcccgccaccacggcctccgacgcgcaggtactccaggatggatctggtctggcagccgctgaccatcttctccaggcgcttgtc

SEQ ID NO: 270098 - DNA, 122 bp, Homo sapiens
ctgtggctgtccaagaagctgggggtgtgcgcgggagagagctcgtcgtggggcagcgtgcgaccccttatgaagctgctggagatctcgggacacggcatcccctggctgctgggcaccct

SEQ ID NO: 270099 - DNA, 122 bp, Homo sapiens
tcaggtcagaaagagggacttgcagtcatgtgggatgtccccttgaaagccccagtaggacgttgattttgagacataagggggagtctggagtgagagatagccttgggaacgtggtgtgt

SEQ ID NO: 270100 - DNA, 122 bp, Homo sapiens
gctgggcacagtggctcatacctgtaatcctgaccgtttcagaggctcaggtggggggatcgcttgagcccaagatttcaagactagtctgggtaacatagtgagaccctatctctacaaaa

SEQ ID NO: 270101 - DNA, 122 bp, Homo sapiens
ccatgttcacagccctaataataattctgatcacgccacttcagcatcttgtgtcaaagtcgaaactggcttccccgcccccttcaatctgaaagctgccaagtcctcacacacttcacatt

SEQ ID NO: 270102 - DNA, 122 bp, Homo sapiens
cagtgatatttgggtgaaaccatttccatgatgtcatgttcctcctgccctctggctccgcgatggacctgcttcttgctcagggtctgctgggctcagtcacatcgggctggcccaaggga

SEQ ID NO: 270103 - DNA, 122 bp, Homo sapiens
agcacacatcctgggtgactcagtgattcctcctgcaggaattcaccccacacatacactcgcacactcctgcgggaattcaccccacgcatacactcgcacgctcctgcgggaattcaccc

SEQ ID NO: 270104 - DNA, 122 bp, Homo sapiens
agacggcaggaccacccgtctgcacaggcggagcttctgcacgccggacaagatggggcgcggactcctctccgtgtggacagatgacgaggagccccctccctgggctcagtggcagcgaa

SEQ ID NO: 270105 - DNA, 122 bp, Homo sapiens
tggccttgtacagcgttcagaaggcgacctgtggccggcacacagcattggagaagtcgccggtgtgatgagaatgcccaatgtgccccaagcagccgtctgtggcagaagccagccctcac

SEQ ID NO: 270106 - DNA, 122 bp, Homo sapiens
aacattgtggaaagcctcaggataaacagaagacttggttttttgctccttttctctgtacggtacagtacgttttggtttacaaccatgagtacatacaattaaaaaaatccctcatgcaa

SEQ ID NO: 270107 - DNA, 122 bp, Homo sapiens
ttccctccctcttctccccctgccatgggctgacaggctgagcagctggactgtgactgccgggctggggccttcttttctgtttccgtggtggaggtccctcccccagtttggtacccttc

SEQ ID NO: 270108 - DNA, 122 bp, Homo sapiens
gtggcagggcgggaggcttcggcgctcgcggggagctgcttgtgcggtggccgagggaggcggcgaagatgtggtaggttgcagagcatttggaaatggggtgctaactgggcgggtgcatg

SEQ ID NO: 270109 - DNA, 122 bp, Homo sapiens
gccaaggacgcactctcattggccaatcgagtttctgccatttgttcattgcctcctgagcgtagtccagttactttcaggctcggggagtgaaggcctcgttgagagaaggtctcattcgg

SEQ ID NO: 270110 - DNA, 122 bp, Homo sapiens
gcttcctgtggcagaaaaaccctcagtcgccaaaagaaagccgtcttgagggttcccccgcgctcccacccgcgccccaaaagctcaggtctctggagtcggagaccctcctgcccacctgc

SEQ ID NO: 270111 - DNA, 122 bp, Homo sapiens
aagttgactgttggagacagcaatttttgatccatagctcctcccaccaaaagcttcacacggctcgctaccctggcagccactccaccttcccacccaccggtggcgcaacagtatattta

SEQ ID NO: 270112 - DNA, 122 bp, Homo sapiens
gcaacctccctgcctgattctcctgcctcagcctgccgagtgcctgcgattgcgggcgcgcgccgccacgcctgactggtttttgtatttttatggtggagacggggtttcgctgtgttggc

SEQ ID NO: 270113 - DNA, 122 bp, Homo sapiens
acgtagctggctttttggagaggccgcctaacgttctgccacttcattggaatcagcctccgcccttctcaactggctgctgcagggccagtggtgccgggagacgacggcggccgctcagg

SEQ ID NO: 270114 - DNA, 122 bp, Homo sapiens
ttacacttccggatcctgggcacacagagacgcgaaaagctcccgcgggaaactggggagcgggactacatctcccagagagccccggggctaaacagcaggtgattggttgatattgacag

SEQ ID NO: 270115 - DNA, 122 bp, Homo sapiens
tcccccgagcagaggggcagtgtgggaggtcggcgagggcgtctgtccgggggtgccaggcgcccggggagcagagatgaggaacattcatttcactgagagggatggagacagtggagacc

SEQ ID NO: 270116 - DNA, 122 bp, Homo sapiens
tacgacccggcgcatgctcccggcacgctccacgcgctcctcccatccaggccgcgcctgcgctgtatgccgtgtggccgctacctcgcaggctctcccggtccctgctggcgcggcagtgc

SEQ ID NO: 270117 - DNA, 122 bp, Homo sapiens
ttgtttgaggctccggaataagaactaaaaaaaaaacaaaaaacactggtttcatgcttacggggtacacactttggtgcatcccgtgaacacaaattttaataccaaacaatccttgatgc

SEQ ID NO: 270118 - DNA, 122 bp, Homo sapiens
cgccgtgcaggaagtcccggggcaatagggcaggaaaaggaaaggaagacatacatgatccgacatgtagaaaatccttttaaggccgggtgtcgtggctcacgtaatcccagcactttggg

SEQ ID NO: 270119 - DNA, 122 bp, Homo sapiens
atcacacagccactgtatccagactgctgagaagcaaactatcaggcaaaattcagggcgcgcagcaggaggcagtcgctttcccggctctggggaaaacgatccaaccacgcccactctcc

SEQ ID NO: 270120 - DNA, 122 bp, Homo sapiens
tcccctccctgtggccgattgtgggattgcagcgagaacccgccctggtcttgggcaggacgactctagcggacaggagttgaggggcggggctagacgggagggaggggttaagtgcgcgc

SEQ ID NO: 270121 - DNA, 122 bp, Homo sapiens
tgacctcgtgatctgcccgccttagcctcccaaagtgctgggattacaggcatgagcctccgcccccggccttaaataattcttaaaggaagtaaagttaactttgaaagaactatcaggat

SEQ ID NO: 270122 - DNA, 122 bp, Homo sapiens
ctctcctgactggggcttgcgactcacaggattgcatcgtcccagctgctaacttggggccggggcccctcccttccacatataccttgggtttgtgcatgttttctgctgggtgggttcag

SEQ ID NO: 270123 - DNA, 122 bp, Homo sapiens
aaagtctgaggttaccaggcgttgaggaagagaccgatgccttcctaacagaatggctgtcgtctcaaagtctgagtttaccaggcattgaagaagagaccgatgccttcctaacagaatgg

SEQ ID NO: 270124 - DNA, 122 bp, Homo sapiens
ctttgggaagttacttaacctctctgtttcgtcatttgtaccttagaatgttgctgtgagcgttaaactacagtgcccagcacacagtaacagtttaatagatgttagctgtttttattgct

SEQ ID NO: 270125 - DNA, 122 bp, Homo sapiens
ggatacaacgggaacttggatggatacagtctgggcctgctgggccagatgttccgagggcggcccggcaagcagcctgtcttgcacattgcaactgactggcttaatctacggcaagagtc

SEQ ID NO: 270126 - DNA, 122 bp, Homo sapiens
ttttcacctaggactgactgcccagcactttatctctgtcgatcttatttccttgtttagcgttgtgttttcaccttttcctgcatgccagtgtctgggtctttatttccattatgcaaagt

SEQ ID NO: 270127 - DNA, 122 bp, Homo sapiens
agaagaaatttataagcagcaaagcatgcaagaggtgactagggtaatgttaaaggcattcggttttaaaagggaaacagggcatagaggttcagaaaatttgcagcctgataatgtgatag

SEQ ID NO: 270128 - DNA, 122 bp, Homo sapiens
tttgaaacacaagctggatcctagggctttgacctccactgctcactgccacatgggatccgtctctgtgccccactctgccccagccccactggccttcctgctgctgctcacacaggcct

SEQ ID NO: 270129 - DNA, 122 bp, Homo sapiens
tgactggtggagctatggggcgtggcatctgccaaaaccaatgggaggagaggacgaggccggcgagccaaagggactacaaatcccagtgtgcatgggcaggggcttctgggctgggcgcg

SEQ ID NO: 270130 - DNA, 122 bp, Homo sapiens
acaacgcgcagccaccagacaacccgcagccaccagacaacgcgcagccaccagacaacgcgcagccaccagacaacgcgcagccaccagacaatgcacagccacctgcagcagcccggcct

SEQ ID NO: 270131 - DNA, 122 bp, Homo sapiens
aagaaaataatagggctgaacggcaggaccactcccacatctgagcacctaggcctgagtcgggcaagcttcccacacccctcccagcaccaacgcaatgaacagctgccctggagaaaaca

SEQ ID NO: 270132 - DNA, 122 bp, Homo sapiens
cgtctctctggctccctctaggccggcgccgacgctatttaaaccgcggccatccccgggcggccacgccacatgggctgacagcttggctgcgccgcccaggccaatgagcgtcggggctg

SEQ ID NO: 270133 - DNA, 122 bp, Homo sapiens
tcaacgttgtctcctgtggccaagctagtctcccgggtatcactcgggtccgctccgtcccgcccccgcaggccctgccgaaggccccgtcccggctgcagccccaccccctagccccgccc

SEQ ID NO: 270134 - DNA, 122 bp, Homo sapiens
acgggggcccctaagcctttaatgctgcaggaatgggtacataatgtggaatgtcggtgccggccgtctggcagcagtgacgccatcccctgggccaggccggctccccagcactctccggc

SEQ ID NO: 270135 - DNA, 122 bp, Homo sapiens
gtgctggctgttagtcgagggacatcaggccaatgtctgtctgacccctaggtcaaaattcgcatcctactgattgaaggccttgggtctcgagccttttggttgcaggtgtggggatggtt

SEQ ID NO: 270136 - DNA, 122 bp, Homo sapiens
aaaacctttgtggatggtcctaactggccagtcctgctcggcccagaccctcacagcccacgcactggtggagctcaggagccttaggaactgtgcggctgcaggtcagcctcaaagcatcc

SEQ ID NO: 270137 - DNA, 122 bp, Homo sapiens
gggtcaacacaaggtgtctaagctgcgttagaattttgctaaaagtccctgttaataaaacggagacatttgcccctctgcaagtttctgcaagttctaccatgcttcataaagtctcatat

SEQ ID NO: 270138 - DNA, 122 bp, Homo sapiens
ctgtacgtccctgccctcacatgccctgtgcccccaacgacagggagggcgccgaacacccgggagtgttactgtttaaagacctgaagggtgaactgttttaaaaactgagagtcaggtct

SEQ ID NO: 270139 - DNA, 122 bp, Homo sapiens
cacccgcttgctgcgtgacgtcatcgcgtcgcgtcactgttctcggtccgctgtccgtggcgggttgtttccgtgcagcctttctatcagacaattttgggacgatttctgggagggctact

SEQ ID NO: 270140 - DNA, 122 bp, Homo sapiens
caaaggtcaccttcaagaaacggagtttgcaggaagtcaacggtgcctgcagaacaggggcgagcacccagcccagccaaggccaggaggagcccaagccttcctccgtcgccacacggcag

SEQ ID NO: 270141 - DNA, 122 bp, Homo sapiens
ggaaagagcagggtcctttccacgagccagtggccctctcctcacagcagtgtacatgagcgttggttgcccacgtagctgacattgttggagaggtggctctgtgagatatatatttagta

SEQ ID NO: 270142 - DNA, 122 bp, Homo sapiens
ggggcaggtcaggggtgaaaatgtgtgtctcgttcccagctctgcctccatccagctcctcgaacagcatgtcaccctgcatgggactcagaaatagactaaatgctagaacatcacagtct

SEQ ID NO: 270143 - DNA, 122 bp, Homo sapiens
caccatatagccaaaaagatgtgtgcttaacttagaactgctgggtctattatgagaaaccggggcagcaaaattctgccttaggaacttttcagagttttgtaaactgaatttttccaatg

SEQ ID NO: 270144 - DNA, 122 bp, Homo sapiens
cacagagaggagaaggcactcgcctgaggtaccctgccagacgctggggacgggctcacacgcagcggcccaaagcctgctgcctctcggagcagcgggggtctgggacggatattgaggca

SEQ ID NO: 270145 - DNA, 122 bp, Homo sapiens
agtgaagctgcgtgcagcgcccaggcctgcgaacgccacgaggggccgtgcacacctctgcgtccaggcccctcccggggtccgcttggagatcccacagccacagggcggccgcgaagctc

SEQ ID NO: 270146 - DNA, 122 bp, Homo sapiens
aagatatcaacactgaattacccaagtcactattatactgaattttcacatttgcaaaaccgtttacaagaatccagagtttatttgtttgtttgctcatttatttatttattttgagacag

SEQ ID NO: 270147 - DNA, 122 bp, Homo sapiens
ccagccccgtcccaggcgccggctggaggcgcgcccggctgcccgggacggggctcggggcgccccctgctggagccccctccggacagtcccggggcgagagcccagcttcccggccgggt

SEQ ID NO: 270148 - DNA, 122 bp, Homo sapiens
gcgtgtatattggaatattaaagtcaggcccaaaactcttggaaaggtgtgctgtgaaaacggcttagagtcatgaatggggaaagaatatgagacctcaaaaaaattgctccctccatagg

SEQ ID NO: 270149 - DNA, 122 bp, Homo sapiens
actctggccctcacttcatcctaatctcggcttaaagtcttctcttcaagagaagacttccgagacgaaagaagcccaattctcgtccccactactctccacctttattcttgctttggttt

SEQ ID NO: 270150 - DNA, 122 bp, Homo sapiens
cgagatgagcttgtgggtctactatctaatcgccttttctacttgtaggctgccaaggcccgtagagacaggaagctggtttttctcgaggcttcacatggtcaccttattgccaacaaaca

SEQ ID NO: 270151 - DNA, 122 bp, Homo sapiens
cccactccacctcctccacagatgataggatcaggggtggaacctggccagtcagagcctcgtccctggaaattggaacagggagaaagagagggaaggagagagacaaagtctaacatctg

SEQ ID NO: 270152 - DNA, 122 bp, Homo sapiens
gggccagccatcccaagtctagggcttgctggggcctagacttttgacctccaaagggtacggagtctggggaccactctgcacaccatcctccatccagagagaggggccatttccatcct

SEQ ID NO: 270153 - DNA, 122 bp, Homo sapiens
cattccccggtcccccgcgccaccccctctccttccctccaccctcaccgcgtggccaggcggctcactccttgcagggacacgtgtcggcctggctgccccacccctcctaatgccctcac

SEQ ID NO: 270154 - DNA, 122 bp, Homo sapiens
gtcactgctttattaccaggctggcaccgtccaggggctggttttaataaccggaggcaccgcggtggccccgacacgagacccgaacccgtaaaccagcttcctccccgaaggctgcaagc

SEQ ID NO: 270155 - DNA, 122 bp, Homo sapiens
ggaggccggccccgtgggtggggagccagcgtgcgtcccagcgagtcagctccacttgatcggcagtttaaagcccgttctaccgtcccccagtccttttggagagaaattattattgctgc

SEQ ID NO: 270156 - DNA, 122 bp, Homo sapiens
gagacggggtttcaccacgttggccgggcaggttttaaactcttgacctcatgttccacccgccacggcctcccaaagtgctgtgattaccggtgtgagccactgcgcccggcctttttttt

SEQ ID NO: 270157 - DNA, 122 bp, Homo sapiens
taagttggggaccaatagagtagggcgggggcgggctttactgacagggaccaatcgagccggccggggggcggggcgtcacgccgacgtcaagtcgaggccgccgccgcggggcctggtta

SEQ ID NO: 270158 - DNA, 122 bp, Homo sapiens
gctgcccgagacgagcctcagttccccgagggaggctcgggagctgcgggcagagcctggcgcgggcgccctggaggcaggcgcgggatgagcctcccgctctgcttggcttgcgggggcgg

SEQ ID NO: 270159 - DNA, 122 bp, Homo sapiens
ggcagaggaagagaggacgggtaggccccatctccctgtcccaggtctggaaatgacgcccgcgccccaagcccttctctcctgcccagcttcgtctgtgtcgtctgtgtcgtagaaaggcc

SEQ ID NO: 270160 - DNA, 122 bp, Homo sapiens
ttctgaagctggtgtgaaccagcagacactaaatgggcttgtctgatctctacaacagagcgttcagcccagtgatttgagcacatcctttctgcttcattggtcaccaatgaattttctat

SEQ ID NO: 270161 - DNA, 122 bp, Homo sapiens
ggacagatttagaaacctcctcccagcacacctccacctgctgtctccctccttgacggacgcgtggttagtgcaggaaactgcatcaaagactgcgcctccttcctgctcttctgtttact

SEQ ID NO: 270162 - DNA, 122 bp, Homo sapiens
tgcagcgagaccacgagccaggtggccaagcagcgcaaaccgtggatgtgcaagaaacaccgcaacaagatgtacaaggacaagtataaaaagaagaagagcgaccaggccctgaactgcgg

SEQ ID NO: 270163 - DNA, 122 bp, Homo sapiens
gagcagctctaggttctaagctctgcctgtaaaaagagccccgggctctgggctctgcctcgagaggggcacaaagctccctgctgactctggtgttttctggggccctggctctaaagtga

SEQ ID NO: 270164 - DNA, 122 bp, Homo sapiens
tccctccccggccgcagtgactccctagcttgcgggcaggagggcgtgagcggggtgcctcgacctcccgcgcagagcggggtgcggggcatcctgcccctcccagctgcggagagggtggg

SEQ ID NO: 270165 - DNA, 122 bp, Homo sapiens
ggatccagatagaaatgtgctgttaaaacacattgaaaacttgtaggaggccaggcacggcggctcacgcctgtaatccccacactttgggaggccgaggcatgcagatcacctgaagtcag

SEQ ID NO: 270166 - DNA, 122 bp, Homo sapiens
cgaactgggcgggagtggccggcccgcgggggagcgaggaacgacagggttccccccactcgctgcccagactggccgcgggatagcgcgccccccccaaagcctgcacccctgccctgctc

SEQ ID NO: 270167 - DNA, 122 bp, Homo sapiens
ccagtccctccgagtgccagccttcttcaccgagagcagcgagtacagctgtgtgatggacggccagaccatggcggtggccactggagggggcaccagccctccccagcccaaccccttcc

SEQ ID NO: 270168 - DNA, 122 bp, Homo sapiens
cagggagggatcctggatctactccaagccctgtttgctccactgaccaggagaaaaatgcggaaaaggggtgaaagggtgacatcacccaggattgctccacctctggggcaattatcggg

SEQ ID NO: 270169 - DNA, 122 bp, Homo sapiens
gagttggggcctcctgagaacctcaggaactgtctgtgtcaacccagaggctgccttctccggggtgcaggcagcaggatctggtgcggagaggggaggtgggaggacactaggaacactgt

SEQ ID NO: 270170 - DNA, 122 bp, Homo sapiens
gcccgatggccgctaacagttccacccgtcgccgtctgggacttcgctcacctaccaggccggttaagccctttgtccgttgtcttcaggactaggtaggtctcgcccaatggcgacagagt

SEQ ID NO: 270171 - DNA, 122 bp, Homo sapiens
gcatcagcatcagcagcagtagcagcagcgggcggccgcgtgggtgtttttgtcgggtctcggggtctggcagcagcatggcggactacctgatcaccagcagcaccggctacgtgcccagg

SEQ ID NO: 270172 - DNA, 122 bp, Homo sapiens
ctcagacgcgctcggcctcgcgctccggggctgggaccaccgagggcgagctgcagccttcgccacccggtccgccgccggactccgcctcccacaaacagcccggcaaggcccttttccgc

SEQ ID NO: 270173 - DNA, 122 bp, Homo sapiens
cgccgcgtccgagcgagaggccggccgggggccaccgaggggccaggagggcctgtgggccgcgggcaggaccggcccgccacagagcccctgcccacgtcccgttccgggctcagacccga

SEQ ID NO: 270174 - DNA, 122 bp, Homo sapiens
gccgtcaatgtcatctactgggcggcatacgccatgtgagcacaggactcaggccaccctcgcttgtcctggcgcccggcggcagctgcccagaaacttcctgggagaaagagccctcgggc

SEQ ID NO: 270175 - DNA, 122 bp, Homo sapiens
acgtgccctaaccacagcctccggcctctcctagcttctctggacggccgccctggggaccgggtgaatctctcctgcggaggagtctctcatcccatccgctgggtctgggcacccagctt

SEQ ID NO: 270176 - DNA, 122 bp, Homo sapiens
atgcacttaaaagaaatctgagaaagggaccataggcttcaccaaactgccaatgaggtccgtgcacaaaaagattaagaactcctgaaataatttgggaggccgaggcgggcggatcattg

SEQ ID NO: 270177 - DNA, 122 bp, Homo sapiens
tgggagctggtacccaaagtctttatgcacttatttgctgaagtagaagctccagaagggcggggatctttcttcccattctctatcccaagtgcgcaggacagcatctgatacctggttag

SEQ ID NO: 270178 - DNA, 122 bp, Homo sapiens
ggtcccagcgaggcaggtgcaggtccccggagaggacctgggtgcggtccaggacagcgccgaggcctgcggacacctgcactcactcgcttccagcaaaccaaagggaaccacaggtgaag

SEQ ID NO: 270179 - DNA, 122 bp, Homo sapiens
gccttgggagaagctgccatgcaaaggtggacaccattctccagcttcaggggatatgctcgtcccgggcaccggtggcaggcagctggccttctggactaaggcagcctggggggacactg

SEQ ID NO: 270180 - DNA, 122 bp, Homo sapiens
cctgagatgacccccttctgagtattctccttgtgatttattaaactttttcccacccaacgtggtgggaacatgaactattcccaggcctgcctgagctctgaggatccttctgcctgtct

SEQ ID NO: 270181 - DNA, 122 bp, Homo sapiens
ttggaaatagctgccccagagctctgacatcccagtcaaggcccagtactgagctgtagtcggtttgagtaaggggaaagacagttttggggctgggctgactgtataggagggagtgacca

SEQ ID NO: 270182 - DNA, 122 bp, Homo sapiens
aggtactcagggttgtcacaggcaaaactgctggaactcagggcagcattgcaaatgccacgccgctctcagggccccttgcctgccgctggaattaaacccacccagatcttggaaactct

SEQ ID NO: 270183 - DNA, 122 bp, Homo sapiens
tccgtggatcaagggggtcagcaccgtaggttgcccagccaggcagcaggccaccagatacgaggcctggaagcagagagtggccaaggcccgggggcccccatccagggctgcccgctgcc

SEQ ID NO: 270184 - DNA, 122 bp, Homo sapiens
ctcgcctcataaacacgtgtctggcttcagcagctccctgcggacctcctccaccggggacgccgggggaggctctcgaaggccacaccgcaagcccaccatcctgcgcaagatctcagcgg

SEQ ID NO: 270185 - DNA, 122 bp, Homo sapiens
gcgcaggggctgctgcttcgccactaaggagttcccgtgccgtgggagtgggttcaggaccgctggtcggacctgagagtcccagctgtgtgtcagggctaggagggctggggggggcgggg

SEQ ID NO: 270186 - DNA, 122 bp, Homo sapiens
tgttgagcaaatgaatgctgagctgtgatggcaccgacgtgtccggggagaggacgcacccggctgtgtggacatgtgcccagggcccaggacagcgccacggaagaggacacacccggctg

SEQ ID NO: 270187 - DNA, 122 bp, Homo sapiens
gcaggagctttggactcaggaggctgtagtgaggcgagagctagctgggcgtggagagtccgctgtgaggctgaggctgggcctgtgcaggccttcaggaggcaggaggccgggaaggccgc

SEQ ID NO: 270188 - DNA, 122 bp, Homo sapiens
gctctgtcgttaatggctcagcctctgacaggcccgggggctggggattgcaacaccttccgagcctccctcctgccctcccttgcgccttcgagggcacaggcagccccttcctcccagga

SEQ ID NO: 270189 - DNA, 122 bp, Homo sapiens
cctggatttgtgtgtaacagacagatggtgatggcggctagagccacgtggggcggggagcgccactgtcactcacgcacctttccctttctctcccggttcaagtataacgcagacaaggc

SEQ ID NO: 270190 - DNA, 122 bp, Homo sapiens
gggatgcgctgctctatgacacggccggtcagtgaagagcagtctttcagctcacatagtcgcccaaagaggcggatcagcttacgcttcaaccgtgcctcctgcaggtatgcggagtctgg

SEQ ID NO: 270191 - DNA, 122 bp, Homo sapiens
gggtgggacaaactctgtggaattacccagaagtccccaccagagccgctggcccttggacgtgtgctttgagaagcatttcctgagcctggagggtctggacacaggatcaagtccgagtt

SEQ ID NO: 270192 - DNA, 122 bp, Homo sapiens
tgcatgatggtttctaactccttaggaaaagataagtcctttaattctattacctgatttcgacatggtcgtagttacttgaatactttttccagtgaaatttggggagtaagatgaatttg

SEQ ID NO: 270193 - DNA, 122 bp, Homo sapiens
gctcagttaatgagaagcaggtttccacagtgtgtgtgtgcatgcttgtgtgcgtgcatgcgtgtgcacgcaggtgtgtgcatcgcatgtgtgtgcacaagtgtgtgcgtatcgcatgtgtg

SEQ ID NO: 270194 - DNA, 122 bp, Homo sapiens
agggggaggaccacaacaaagccaccaggtcagcacccacataaggcctagtcagggtgtcgatgcataaaggaagacaccttatgctccctctggagccccagtacaggcccccagctcac

SEQ ID NO: 270195 - DNA, 122 bp, Homo sapiens
tcctaaaaacaaactgattggtgtcaatttgtgtagcatttagggctcatatataatggccgatttcaagcaggcttaatttcattttagcgcaagataagttttttcattggagccacttt

SEQ ID NO: 270196 - DNA, 122 bp, Homo sapiens
tcaaagccagcagggaagagggagactctaaagccagtctgctagaaagttggagtcttacgtaacacagccagggagtgacaacatacacctttgccatatttcaatggctagaagcaagt

SEQ ID NO: 270197 - DNA, 122 bp, Homo sapiens
ctcacagccccacccggagcgctggagcgcggacgcggtcactgcgcgtgcgcctcaccgcgctggcaccccggcctggcagcctttggggacctgaaccagctgcgcctgcgcaggtggaa

SEQ ID NO: 270198 - DNA, 122 bp, Homo sapiens
attcttagtgaccaaatctctgtctaggacccagataccttatttactcaaaatagtggacggaaaataaacgtttgatatacatgtatgcataatattttcatctacataatttttatttc

SEQ ID NO: 270199 - DNA, 122 bp, Homo sapiens
ctcagccttctctcccatcaccacccaaccaacgctgccctggatggcctggagtccatgcgtcagatcctagggaggtgccttccctgtctgggctgtgtgtgtccctgggagagtccagt

SEQ ID NO: 270200 - DNA, 122 bp, Homo sapiens
ttctttattggtagcggccaaaaagagttgattgctattgggatccgctgagtaaagacacgggcaggggtgcgcggaggtgagaaaactgaagacctggaagatttttttttccttcaaaa

SEQ ID NO: 270201 - DNA, 122 bp, Homo sapiens
atctccatttcctggcccactttcaaaatggcagccggaaggaaatttgtgattagaagccgcgctgttcttatttaagagcgttagcgcaacttccggtattgttgcaagatggccgcgcc

SEQ ID NO: 270202 - DNA, 122 bp, Homo sapiens
aagccttagaactgccaactggcttgatggttcaattagtaagctaatttctcccacacccgctccttgatttttagactaattttcccaaagcaaggtttagtcacacaaacttgaaagta

SEQ ID NO: 270203 - DNA, 122 bp, Homo sapiens
ccagtttctccccgctttcctgactggcctggttagggcagcgtttatctcctccaattgcgatagaaaaacagtcaggggactcagccactccagtcagcactgccccgtggagtgactcc

SEQ ID NO: 270204 - DNA, 122 bp, Homo sapiens
ccacaggggatgtcttggcctgaattggagcaggtatgaaggtggggtctttgggcttcccggcattggcctttgccagctgctcacaggtactctcattgtggatgacgaggtggaagggg

SEQ ID NO: 270205 - DNA, 122 bp, Homo sapiens
tttcctggactccctgtgggctcttcactggcgttgcggggtcacctgagggctgcactgcgctcgcgctgctgctcctctttccttctctcactgggtcgcttctgggttcaggcagggtc

SEQ ID NO: 270206 - DNA, 122 bp, Homo sapiens
ggtcggagggagagggcccctcagggacagctggccagacccacagctgcccacacagagcgagaccacacaggcaggcagacaccctctcctagggccagggagcccccggccgaagggcc

SEQ ID NO: 270207 - DNA, 122 bp, Homo sapiens
gaagaaggcccggggctgggggtcaggaggcccgcgtgcgacagaggaacgctctgtggtcgtggacaggacgctttgacaaggcggctggctgggcggattccctctccgactcggggaga

SEQ ID NO: 270208 - DNA, 122 bp, Homo sapiens
gccctttgtgagggctgtgagctgcgcctgacggtggcaccatgagcagctcaggtggggcgcccggggcgtccgccagctctgcgccgcccgcgcaggaagagggcatgacgtggtggtac

SEQ ID NO: 270209 - DNA, 122 bp, Homo sapiens
agatttgataaatattcagagggcagcaaggaagttttagagaaaataatatatattctacgtatagcctacagatattgatccagagaagggacatgcatgaaggcaagacaacagaagtg

SEQ ID NO: 270210 - DNA, 122 bp, Homo sapiens
ggcgccgggcataagggcagcaccccacgggtggctgtgcggggggccgctgggtgtggccgggccctgtgtgcctgtgcaggggcccagctcctcggggactggcccacgaccccccactc

SEQ ID NO: 270211 - DNA, 122 bp, Homo sapiens
actccgaggggcctctgcgtcttgggcagctgccggcctgtgggcgcagggcgtggccaccggcccagaccctctctggccacagccgctagggggtgcttactttatggaaatgtaactca

SEQ ID NO: 270212 - DNA, 122 bp, Homo sapiens
agacggtgtcagtggtagcctagagaggccgctaacagacaggagccgaacgggggcttccgctcagcagagaggcaagatggctacggcagggggtggctctggggctgacccgggaagtc

SEQ ID NO: 270213 - DNA, 122 bp, Homo sapiens
aggcttcctgacctcgacttccctgggcctgtttccttatctgtcatgctgcggtgataacgccctcatcacagggcttctgtgaagatcagaatgagacaatgtgagagtctttttgttca

SEQ ID NO: 270214 - DNA, 122 bp, Homo sapiens
ctcctgaaggccacatccgtgtcactgacacatatcgggggctttctgggtttctttagccgggcggccctgagcagcctggcccatccagcctctctgagctccatctgggtaacatccgt

SEQ ID NO: 270215 - DNA, 122 bp, Homo sapiens
cttagtgggccgcagctcataggaatgctggggtttcccagattcttcccagacgggcatcgctttcctctaggaatgacagtttccgccttggctcgcctcagaggtgcgcatcagagcca

SEQ ID NO: 270216 - DNA, 122 bp, Homo sapiens
tggcaattttctctgtactgtcctgacaacctccagccatgaaattaaaaagctagttaccgaatcttgctcctaacggctttgtccttgccagcaattcgacagagaaatctggaagagag

SEQ ID NO: 270217 - DNA, 122 bp, Homo sapiens
attctgagattgggggtgaggacaccaacatatcattttggggggacaccatggagcccacgacattttcacttcttgggtggctgaagtgatgttttcctataactgacactgagattacg

SEQ ID NO: 270218 - DNA, 122 bp, Homo sapiens
gctccagcagtgcccgggcctgctcactctcccggagccgggcctccaggctgccagcttcggttgcccgttcttcacctagccgccggcagcgccgtagctcctcctgcagcagcgcatgt

SEQ ID NO: 270219 - DNA, 122 bp, Homo sapiens
ctatgccccgggatgacctcaggccagtcggccccatgcaccagctccgctgctcatcttcggcctcagcgcgctccttacgatgaggactgagtcattcacctccctcaatctcctacggc

SEQ ID NO: 270220 - DNA, 122 bp, Homo sapiens
catgaagagtagactggagaaagatcagttttccctccgctgaggccagtgttctgcgctcgcgcatctccagtgcccaccttgactctggcccatgcagcagcatgttctggtcaaaacct

SEQ ID NO: 270221 - DNA, 122 bp, Homo sapiens
gaggaggaggcaccagtccatcagaactcacacttcttcctggcaaagaagtgcccaggacgggagctggggagccagggctgatctaggaggctgggagccaggtgacaggatggccccaa

SEQ ID NO: 270222 - DNA, 122 bp, Homo sapiens
ctaaaatccttttgccagtttgggtctgatgttcaaagggtatcttacctgttcacaagacgggtgcttggaagagggtcacagcagcactgaaaccagagcttgtcacatgagggggagaa

SEQ ID NO: 270223 - DNA, 122 bp, Homo sapiens
tactaaaggatttggggactgagcctgaaagcactaaagtctgcacccagttctatttaccgagatcccaagccgtagtggtagaagagccaaacaggaaacagaccagattctggtgctgc

SEQ ID NO: 270224 - DNA, 122 bp, Homo sapiens
ctgaaaagaacctgcttggagctttgggctaacgtcttcattattacctactctgatcagcggtggctttcctaacctgtagctcccaaccctcattccccattcttcaaatacttacttct

SEQ ID NO: 270225 - DNA, 122 bp, Homo sapiens
ctgataccatctcttgctgcagccttcatgcctagtgcctgatcctgcctcaccctgctgcgcgttggcattcagatttgacttaaaatccgagtggctcagcctctgctctgaattgtccc

SEQ ID NO: 270226 - DNA, 122 bp, Homo sapiens
accaggtcagaagaaccaacagagaaggactggaaacgggggacagagaaaggggtggcacgatgggaagaacaatgaaaatgctgatgtttcaaggagactttaaaaacaaacttttttag

SEQ ID NO: 270227 - DNA, 122 bp, Homo sapiens
ctctattaaaaatacaaaaagtagccaggcattgcaggtgtctgtaataccagatactcacgaggctgaggcacagaattgcttgaacccaagaggcaggggttttgttgagccgagatccc

SEQ ID NO: 270228 - DNA, 122 bp, Homo sapiens
gccccgagaggtctcgcccgcgctgagccctgtccctggggcccccgcccctgttgcgcccggagctcagccacagatgtccagccacaattctcggttggccgcagactcgtacaagaatt

SEQ ID NO: 270229 - DNA, 122 bp, Homo sapiens
accccctaccctgccacccctcccacccaagccacctcatttcctcttcctccccagcaccgacccacactgaccaacacaggctgagcagtcaggcccacagcatctgaccccaggcccag

SEQ ID NO: 270230 - DNA, 122 bp, Homo sapiens
gttgcaatggcaagtagataacacaaaataaaggagggtcatcattatcagcaacagcagcgtcaactgccagacaggtgggagaggccacggggaatcttctgcactgtcccgggccaacc

SEQ ID NO: 270231 - DNA, 122 bp, Homo sapiens
cacgtgagccgccccatcagaaggaccgcccggccacgtgggccatgctaggaaggcaggcggcatccaagttcactacacctgccagtaaagtaaaagggcaaaggagactcacacgcaca

SEQ ID NO: 270232 - DNA, 122 bp, Homo sapiens
ccacaagagctccagccccttcccataagctgcagcacagttggtctggccgtctgcattcgctgaaatgtaggcatgaaatgagaaacaccagcacatgtgagtcaccacttctcgggaat

SEQ ID NO: 270233 - DNA, 122 bp, Homo sapiens
ctgtctgaagggcagccatcattgaagaaaataatactttcccgcaaaaagagaagtggacgtcacagatttgatccattctgttgtgaagtaatttgtgacgatggaacttcagttaaatt

SEQ ID NO: 270234 - DNA, 122 bp, Homo sapiens
tctcaaaggcatgtgtaatccccaaagggttaaaaaccattggcgtttaggatagtagtgcgcgacttccgcctattagaatcacctgtggccaggtgctttaaaacatgccgatgcccacc

SEQ ID NO: 270235 - DNA, 122 bp, Homo sapiens
caccctcttccaccctcagaggccccggtgtcctgccccacgctctaccccagagccccacgggtggctttataaaagtgccgggcccagccctctagcaggaggggaatgctgggcatctg

SEQ ID NO: 270236 - DNA, 122 bp, Homo sapiens
cttagacgcagttatcagggacgcactcagcctcttcttcgagctcggggcaggggctcccgttgttggcgggctggacccggacgtagcgagtcctgctcttggtcccgagcctcccacag

SEQ ID NO: 270237 - DNA, 122 bp, Homo sapiens
ttggtgccatgatgttggtgccaaggcagcgtttttatcgttgctgtccttttcattcaccggttgggaattcactctctctgtggcttgagtcctctccccgtcagcacagccatacactt

SEQ ID NO: 270238 - DNA, 122 bp, Homo sapiens
ttttatattttgtgactaatacatcagattcttatgggagattaacccttaatttctgtgcgatttatgttttatccataaaaatatcagtgaaaggtgatgatcccctcattagtttgatg

SEQ ID NO: 270239 - DNA, 122 bp, Homo sapiens
ggcccctcctcggcgttcccgcgccgaggtccctcccgcggagggcgggcccggctcccacgacctcttcgagcgttcctgggcttcccgctccgcaggtgggttccccggctgccccggag

SEQ ID NO: 270240 - DNA, 122 bp, Homo sapiens
tcctgatttagccattgacagcgggtggacgtgtgtccttccaggctagttttctgttcccgtgctgctggctgtggtgtccatggagtatgggccgcaatctgtggggacagtggctgggc

SEQ ID NO: 270241 - DNA, 122 bp, Homo sapiens
atctcagacccccgagctaccgggccaggctgccttctgcatccgtggagccccagtgcccgtgagggtgtccaggcctcaccctgtggggccgtgcatgaatccaggcatggaggaagtgt

SEQ ID NO: 270242 - DNA, 122 bp, Homo sapiens
ggaatttttaggtccaagtgatcctcaaagcttctgctttttgcagggtacttaagtcagcgtggtggctgaattaggagactgctcctgagcatgcaagtgagcagaaagaaattttgttt

SEQ ID NO: 270243 - DNA, 122 bp, Homo sapiens
aactcctgacctcatgcaatactcttgcctcagccttctgagtatctggagctacaattgcgtaccactgcagccctattaaaataattttttaaatgtttcttatgaaaaaatctaaacac

SEQ ID NO: 270244 - DNA, 122 bp, Homo sapiens
caccgtttcccccacatttttctatattaaagagaaagcaaacataagccaggacagtttcgtttttcttgcactgcactgctgctcacgagaggacagagtgaggcccacccacagagatg

SEQ ID NO: 270245 - DNA, 122 bp, Homo sapiens
cagagataaatccctcaagtgcaggcagggagtggcaacctagaagtacttgcttttaaacgtatagttcaaagccttctttcttcagatactcagcatagccctagccataggtcatttct

SEQ ID NO: 270246 - DNA, 122 bp, Homo sapiens
gcggccggcacggatgcctctcaataggcggcatggggccgacacgactcggtgagttcccgccacggctttcgccggcagccggcggctggaggacaaggagaatgcgccggttctgttcc

SEQ ID NO: 270247 - DNA, 122 bp, Homo sapiens
gttagaaggtcagccaaggtcaggcggccagcagggcgggaggaggcgttggtgtgcacacgcggggagcctccgtgtcctcaggacaccatggaagacggcaggacacacgtgcgagccac

SEQ ID NO: 270248 - DNA, 122 bp, Homo sapiens
agtctgagcagacagcatggcctgccactggcagtgaacaccatgtctgcaggaggtggccgggcctttgcttggcaagtgttcccccccatgcccacttgccgggtctatggcacagtggc

SEQ ID NO: 270249 - DNA, 122 bp, Homo sapiens
agagaattgctatccagcacttaactcattatatcaactatgtaccactggttttcctttcgtaaagcattttatgatttttaggtttctcagttaaggacaagatgatttctgagttttaa

SEQ ID NO: 270250 - DNA, 122 bp, Homo sapiens
ccagctcaaacgcgcgtatttgcggaccaggcgctgagggtcacgtgagcagcttggggccgggaggatcccctagcgccaccccggccccgcccggcgcgtagcgacgcccacgcgcccgg

SEQ ID NO: 270251 - DNA, 122 bp, Homo sapiens
tctggaaggcgacaagagatcacaggctttctaggtctaccgcgcaccccgatgacgtcacgcggcgacgttctctgacgtcagagtttcctgcccaccatctttgtccctggcaaagtggg

SEQ ID NO: 270252 - DNA, 122 bp, Homo sapiens
ttttgtggccccagggactcctcccagacgttttgcgaaagagcgagtcagccccagatgcgtgggcgcctccccctcctcccgtacgaacctcctccgccacaaacttcccttcccggggc

SEQ ID NO: 270253 - DNA, 122 bp, Homo sapiens
tcagaggagggaggttgaaagagcaaagcgggtcagggaattgcaactcactggtcaaagcgtcccttgcaggccctgccagggaatgtctggctggaccgagcactgtccagggtcctgaa

SEQ ID NO: 270254 - DNA, 122 bp, Homo sapiens
gctgagacctcgagggcaggaggagccagccggagaagacgtgggggccgcatcccaggccgagagaggggctggtgccacggctgggagaagaggctggagcagggggcagggccaggacg

SEQ ID NO: 270255 - DNA, 122 bp, Homo sapiens
ggtcgagataaatggaaatattttcagactacgagttccagtcagagtaaatgctgaaaacgaacaagagtcttcaaattgacaatcttcagggtgagaaagaatatacttgaagggtgaga

SEQ ID NO: 270256 - DNA, 122 bp, Homo sapiens
acggatgaataccgcaggcaggtgaagagggttgcctattctgccaagcgaacctgaaaacggaagcagagccgcttcgctcgggtctttcaggactgaccagcagggggcgcgcgcactct

SEQ ID NO: 270257 - DNA, 122 bp, Homo sapiens
gatgattccttggaaacatgcactttactacactttgaacttaccgagttctgggagaggcgccaaagccttattagggtagagggaacgactgcacgggggagtagtctgttttagccggc

SEQ ID NO: 270258 - DNA, 122 bp, Homo sapiens
gtaggtccctctgcactattcttagcctttcatgaatatgctgtagattttttaattacacgaggccctttgcaagtaaaaatgacttttcctgttgttttggcatcactcctcttccagtg

SEQ ID NO: 270259 - DNA, 122 bp, Homo sapiens
aattacaccattaaggttttgtgggtgtccagctagcaatgatgtgcaacttctcagtctcgtgtgagccaattcctcataataaatctctttctacatatacaacctatcagttatgtctc

SEQ ID NO: 270260 - DNA, 122 bp, Homo sapiens
ttttttctctcatccaatcagaacatgtagtccaggaactgcatgtgcgcgacctcagtacgtaaagcatgctgaggcggtgtcaggtcattttaggctcttcagtttcgcgtttggtatcc

SEQ ID NO: 270261 - DNA, 122 bp, Homo sapiens
ccgcgcggacccctgcgctctggggaaggcttagggagcggagaatagaggtcaggggtgcgaccagttacaccgaagaggcggctagaactctgaagtgacaaccgccacttttcagtact

SEQ ID NO: 270262 - DNA, 122 bp, Homo sapiens
agcggtggtcgccccacactctgcggagaaagtggtttcgcgcacgcgcgccacgcccatcgaaccctcctaactcactatagacccgaaacggcactcacggggcgacagacctgctagct

SEQ ID NO: 270263 - DNA, 122 bp, Homo sapiens
acacactcccagttcgcagggcttcgtggtcaaggttcctagttcacctgtctgggagggcgaggtgtgtccaccccttccagcacctgggcaaacagctccctttgcggtcctcttccact

SEQ ID NO: 270264 - DNA, 122 bp, Homo sapiens
tgaaaatcctcctgtctctggcagcactgtctgcactttcttgtttactgtttgaagggacgagtaccaagccacaagaacacttcttttggccacagcataagctgatggtatgtaaggaa

SEQ ID NO: 270265 - DNA, 122 bp, Homo sapiens
ctctcctgagtccctccgggactgcccggatctgccggcgggagggggaggggccggggccgcaaggccccagcactcaccaggctcaaggcaaccgatcccggtgccaccgctgaagttag

SEQ ID NO: 270266 - DNA, 122 bp, Homo sapiens
ggcctactctaaaaaagagcagagcagccttccaaagctttagagagacacctaaggcaccgagatgcacctactggcagttggaagtccacagaaacacacagaaggagtgggatctagag

SEQ ID NO: 270267 - DNA, 122 bp, Homo sapiens
ctccggggggttgttcgagtggaggaatactcttacgtgaaagtgctcagtacaccactgcggcaggaaggaggaagggaagaattccagatggggagaaagtaatattttgcagcacagta

SEQ ID NO: 270268 - DNA, 122 bp, Homo sapiens
gcagagacgtcctcctcccccttctcctcctctttggtgcctccagccaggaggcgggagcgatccacagcagctgacccagctcaggcactgcctctctcacagccctcaagacacaccat

SEQ ID NO: 270269 - DNA, 122 bp, Homo sapiens
gcgcctctggctttgtgcagcccgagatggttgagtttggctccggagccgggagtggggcgcagattgatttttaaatatggagaaggagacgcatctgccgctggcgcgttcggtccgag

SEQ ID NO: 270270 - DNA, 122 bp, Homo sapiens
cgtatcttcagtgtttttggtagctgcatggtgtgtgacatagaaaagtcccagtttcctcgactgtgatttgggtgaggtctgtatcctttggtgcacagtggaattacaaggtcagaagg

SEQ ID NO: 270271 - DNA, 122 bp, Homo sapiens
ttcaaaccactctttggatattccggttcccactgcttcactgcgcttcactggtcagtgcgtcactcaaactagctgaaagaattgtctaactcatacacagggacaaagtccagcaagct

SEQ ID NO: 270272 - DNA, 122 bp, Homo sapiens
cactgctgctatctgcccaggaagccaggagcagccacagaggcaaaggtgagaagtccccgcaccctgagctgtgaggctgggcagtggggaagccagtagcactccctgctttggcacta

SEQ ID NO: 270273 - DNA, 122 bp, Homo sapiens
cgcacctcctcctcgatctcctcctccagctgcacgagtgtgggcgccgcaacaccaaagcgccacgcccggcggcccagctccagcaaacacagcaccacgttcttcacgttcttgcgcag

SEQ ID NO: 270274 - DNA, 122 bp, Homo sapiens
caagaaccctcttcagcaaggattcacttaatcacaaccagagggcagaaaaagtggactcgggcatttttttaataaccagcagctacaaagaggactgaaacaaattgagttttattaaa

SEQ ID NO: 270275 - DNA, 122 bp, Homo sapiens
ggggtgaagtcaatacttttttctttgaaagccaaaatgaatgtcttgactggtaagatgcgggaaatcacattagaatctcattttaaaatcttagccctgggggaaggaggaagcctcca

SEQ ID NO: 270276 - DNA, 122 bp, Homo sapiens
agccgggctcctcccctggcacatggccagctgccaatatgaagcagcaatctcagagtacgagctacccacaggcaagaatagtgcctcggccacctcctctctctcgtccctcattctag

SEQ ID NO: 270277 - DNA, 122 bp, Homo sapiens
aactaacctttcagacactaccactcatcaggttttggtgtggtatcaaggaagaatgtccgtaattatctgaaaaggttatttcaattctctggcctttcccaatgatgtaactgtgtgaa

SEQ ID NO: 270278 - DNA, 122 bp, Homo sapiens
cctgacctgcgacggaaagccactgcaagcccggaggcgaacagaaggcattccgcgagccgggctgagttggtgaacacggtcctcgttcaccccgcctattggtctgggcgtgtggggta

SEQ ID NO: 270279 - DNA, 122 bp, Homo sapiens
ggaaggagagcagcaaatggcctcagctgtgtgggtcccgctcggtcatggccggaagaacggcccccaataggatacgtccaagtcctaacgctcagaacctgtgaatgtgacccgattgg

SEQ ID NO: 270280 - DNA, 122 bp, Homo sapiens
ggagaccgtgccggagttcgggagcggcaacagagtgggcatagacactccgagcagcctcgccgtcgtctctgcgttcctgttgactgcctggctgccccctcccctactcctcggttcct

SEQ ID NO: 270281 - DNA, 122 bp, Homo sapiens
aatagccatgcataagaaaatgctctgcagccggcttgcgttttcatcccgccatctgcacgtctaggcctgctgccagggttggttgccatggtgcgtcagcatgctgccgttgaaaagca

SEQ ID NO: 270282 - DNA, 122 bp, Homo sapiens
agcacccgtgccctcgatcacatcgccagttcacaaacacacatgcgcacacgcacacgccgcccgcccaccaggcagacacccacacacctgtgcacgcacgcgcacgccaagccagcggg

SEQ ID NO: 270283 - DNA, 122 bp, Homo sapiens
ggcattccccaccccctccctaagatcttgtattcacgtttggaacgccgtgtgcacaggcgcacacatctatactctcacacaagaagacaaacctctccctcctctcctgctccagcgcc

SEQ ID NO: 270284 - DNA, 122 bp, Homo sapiens
ggcagagctcagtcttagcaggtgctgttgggacagaaatcaatgggatctttgtgtccccgagcgggagttgggggtgggcaggaaaggggaagggtgatgagacctcagtgagaggaaag

SEQ ID NO: 270285 - DNA, 122 bp, Homo sapiens
aggacaactacagactcagtttaaaaggacttgtttacgtgacaacacagggcagttactcgggcaattccattgaaagtgaagccatcctctgaaaagaccagaaatagtgagcacagagc

SEQ ID NO: 270286 - DNA, 122 bp, Homo sapiens
aacattggaatcaaatagatatgtctcaatgagtgtgtccaactttcaacttttactactcgcacacacgtctcgttatattcaggttcagttttatgtctttacataaaacatctgttact

SEQ ID NO: 270287 - DNA, 122 bp, Homo sapiens
gcctctgctgtgtctgtgcaccctgattgagaagcctgcgtatcagagacctccaagtgccggctcgcctctccctcgtccataatttagtgacaatctccatggcaactagactccaagaa

SEQ ID NO: 270288 - DNA, 122 bp, Homo sapiens
agacgcaggtgcaggagagtgcggggcaagtagcgcattttctctttgcattctcgagatcgcttagccgcgctttaaaaaggtttgcatcagctgtgagtccatctgacaagcgaggaaac

SEQ ID NO: 270289 - DNA, 122 bp, Homo sapiens
ccactacgaggtggacagcggcggggggctggacctggccggggacctggctctaggaggcgacttcacgggcgtggggcccatggggctcctgtggagcctcatgccggccgcttcgaagg

SEQ ID NO: 270290 - DNA, 122 bp, Homo sapiens
agagtcccagaaaccgattcattcctgggttctgcaggccataatcggaagtggcatgggcgtactgtccgtagagatcagcattctggatgtatgcttggatctcccgggcacttttattc

SEQ ID NO: 270291 - DNA, 122 bp, Homo sapiens
gagatatgcgacttcccaagagcagttcttggcctggaggggccatgagagtgcaagacacggggccgtggccggggcggggctacgggagcggggcgtggccggcccctgaggttactata

SEQ ID NO: 270292 - DNA, 122 bp, Homo sapiens
cacctggagctgcccggagaggacgctgcaaagctttagagcaaggcctccagcctaatccggatgggtgggtggaaaccaagcacacaacctgctccagagccacagggcaggtgctggca

SEQ ID NO: 270293 - DNA, 122 bp, Homo sapiens
cttgcgtcatctttctcttcccctgggtcagcctgtatatttcaatctatccacaccctgcgcaagctcattcattcatgggctttctctctgcaattttcattgtgcctccctttgttggc

SEQ ID NO: 270294 - DNA, 122 bp, Homo sapiens
ggggtctttccatgtcagcacgcttggagcctgcacacctagaaaagaatatggctgcttcgagtgcagcaggaaggatgcaggttagacttaagcaggaacttccaggccttggagaatgt

SEQ ID NO: 270295 - DNA, 122 bp, Homo sapiens
ggctggcaccgtctacctggcgttggttttgcagcgctcctggactgggagtttgttggacgtttctgtctgggttttgaagtgctgggagttgaggtcactgctgcagaggttggagtgac

SEQ ID NO: 270296 - DNA, 122 bp, Homo sapiens
agggtgcagcccttgttcctagcagggcctttccagtgtcccggccgtgctgggggctggcgaggtccccctactcgggctgttcccccagagctcccggcaccactcgacctcaggtatca

SEQ ID NO: 270297 - DNA, 122 bp, Homo sapiens
cgtaacaccagcctgcaggaggtgagcctcgcccgcagcggcctcgctgcctgggccacgcgtgggtccacctcatcggggacggccccttcgcagaggcctggtgcacaaaccagggttgt

SEQ ID NO: 270298 - DNA, 122 bp, Homo sapiens
ggaagcggaggttgcagtgagccaaaatccttccactgcactccagcatgggggacacagcgagactccgtctcaaaaaaaaaaaaaaaaccctgtatttgtgagcgcacacacacacacac

SEQ ID NO: 270299 - DNA, 122 bp, Homo sapiens
ggtgatgtgattcaggatctgttgaatgagttgaattcaacttctcagttggcttgaagccgctggattctacagctctgtgcagcccctggcatgccccggtgatcacttggcttcacaca

SEQ ID NO: 270300 - DNA, 122 bp, Homo sapiens
caaatttcatggttcctgtttcttcaaaatctcaaagctcttcattcagccaggcatggtcgctggagcgtgtatattcaaccacttgagaagatgaggatcttttgagcccaggagtttga

SEQ ID NO: 270301 - DNA, 122 bp, Homo sapiens
cagctttatgttgatggagctgcaagtcattagcaacccaggcatatggcccgagttgaccgggtcattctccggggccagatcgccctctgctgctgactgataaataacactctgggact

SEQ ID NO: 270302 - DNA, 122 bp, Homo sapiens
tctttggagtttgcaatatagcataaaggacaagtagaactgcacattaagattacctaccgaagcaactagatgtggctgggacacaatcaaaggaggaattttgtccacaggaaggtgag

SEQ ID NO: 270303 - DNA, 122 bp, Homo sapiens
tgcaggggttcttgtaataacagttgccgtccatgaataggaagcgcagggcatgcaggccggcgaggctggcagagtctagcatcaggatgttggtatggctgagggacagggatatgagg

SEQ ID NO: 270304 - DNA, 122 bp, Homo sapiens
ccctgggggagctgcttttacgcagtgttttgaggtgcaggactgcaatgcccgcacttccggaccccagactcttcctacggcgactgacacctcagacacgcgttgtggggggcggcgct

SEQ ID NO: 270305 - DNA, 122 bp, Homo sapiens
gctggaaagatggatgctttggagcctgttgcctggcagaagaggagatgccagtgggagcgagagacccagtgtgtgaagaaggggggctcattaatgccacaaagtcttggggagagact

SEQ ID NO: 270306 - DNA, 122 bp, Homo sapiens
cttacctccttcccaacaaagggtccttggaaattccgggatttttcactctacgtggagcgatgtagagttctagagttctactccacacaaatcccttccctattcacattcacagtcat

SEQ ID NO: 270307 - DNA, 122 bp, Homo sapiens
aagcctggctccccacagggtcgaatggaaaggggcagccgcatgtggcggtgggttctccgcagctcggagactggagacctggatgcctggccaacagggaggaacttgggaggggcagc

SEQ ID NO: 270308 - DNA, 122 bp, Homo sapiens
cctacctctgaagacgcgtcagtgaataagctgaatgtgctcctggtagaggtaacagagcgtgcaaaagccggacagagagatacagcacgctttaggatactgcaatatcgtgggagcta

SEQ ID NO: 270309 - DNA, 122 bp, Homo sapiens
tgaactttagctgggccgccgcctgtcagccccagaaagcgttaaaggtgcagcagctcgcgccagcctccgcagccgcctttgtacgcgtgatttatgacttcaatcttggttcaccgaga

SEQ ID NO: 270310 - DNA, 122 bp, Homo sapiens
cgcagttggcggcggggcccagcttgcggggcttctgatcgcaggggcggggcccgccgccggtttctaagggcctggcagagttcctgcagtcacggtcaggggtctttgctttcgtccat

SEQ ID NO: 270311 - DNA, 122 bp, Homo sapiens
gctcctgcttggggcagcgtggaggccagcggaggaactgcaggagcctaaaggagatggcgcgcgggcctggctcaggagagcagccgtctgaaagatggcggcgaagggtgcgggaggag

SEQ ID NO: 270312 - DNA, 122 bp, Homo sapiens
gaggccagcccgtctgcactgaccaaccacccaccccgccaggaccaccagaccatcctgcgcgcctgggccgtgaaggacttcgcccccaactgccccctctacgtccagatcctcaaacc

SEQ ID NO: 270313 - DNA, 122 bp, Homo sapiens
ggtggggctgggtttacacatgcgcagagcgagccccgaaaccccattcccaaagtgctgcgcggtaggcgcgttaacattgaaaactacagtaactacagttcccgtaagcccgtgcgtcc

SEQ ID NO: 270314 - DNA, 122 bp, Homo sapiens
gtaccctgacaaatcaactgtctacatttttcccgttcccctccgggccacacgcttgtgcggacatgactttgaagccacagtcaaagagcaattgtgtttgtgcattcatttgttcagca

SEQ ID NO: 270315 - DNA, 122 bp, Homo sapiens
cccaggctcgccccggagggcgctctctgggtccttgcaaacgccctgaccctttccacgcgactacatggccgctcccgtcgcagcctcgaacccttcaggacacgtgcgtctttccacac

SEQ ID NO: 270316 - DNA, 122 bp, Homo sapiens
gctcagtggttcctagctttagctgcacattagagtcacctgcagctcttttcaaactgtcgctccacagctgggcctcaggcatcaatgtcgaaagctctccgggtgattccagcttgcag

SEQ ID NO: 270317 - DNA, 122 bp, Homo sapiens
cctgcccctctggcttgatcgtctggtccctttcttttaattcactgtcctctggcctgccggccttctgtggggccctcggacatgccagactcagtccttctcagagactgtgcttctcc

SEQ ID NO: 270318 - DNA, 122 bp, Homo sapiens
aaaaaagtgccggaggagtctgtctgaagttggtcaagcagtgagttattatcgtgctctcgggaggaaatgcagaaaggactacccttaaatcaggggcagcggggaggggagaggggctc

SEQ ID NO: 270319 - DNA, 122 bp, Homo sapiens
atctaaggcaagagaagtgaagtagtgtgctaagtaacatcccaaagacagtaagcaggccgggtgcggtggctcacgcctgtaatcccaacactttgggaggccgaggcgggtggatcaca

SEQ ID NO: 270320 - DNA, 122 bp, Homo sapiens
acctctcacctcctacctttaccctcccgccccgccgccctccgcacgtgcgcccagcggcgtgcgcatgcgtagtcgaaccacattcgcgtctcccgttcgccctctggtggacaccggag

SEQ ID NO: 270321 - DNA, 122 bp, Homo sapiens
agactgatgaaattctgtgcggcaaattgaaccagatgtccatcactgtcatcgctactacggcattgtggtaggcattttacatattttatcctttttaaacttaatacaacaaccttgtt

SEQ ID NO: 270322 - DNA, 122 bp, Homo sapiens
tcggctgcccgacaactacacgcaggacacgtggcggaagctgcacgaggcggtgcgggccgtgcagagcagcacctccatcaggtacaacctcgaggagctctaccaggtgaggcggcggc

SEQ ID NO: 270323 - DNA, 122 bp, Homo sapiens
cattagtgagacactcgaggctcctcacagcatgacccctccatctacctttcactcctgcgagcctggccattccctgaggcaagagattccttcagatccctgagctattccccgctcat

SEQ ID NO: 270324 - DNA, 122 bp, Homo sapiens
ggcagagctcggcggaggtttcacgacctcaaactccatcgggagctacagggacagccccgttggcggcggcgaaggccgcgacggggcctcctcctcctccctccacctccgcctcctcc

SEQ ID NO: 270325 - DNA, 122 bp, Homo sapiens
ctcaggcacctgtagctggtggctgggggtgttgtccacaggcgaggagtagctgtgctgcgaggggggcgtcaggaactgggctgcggtcacgggtgggaccagcgaggatggcagcgacg

SEQ ID NO: 270326 - DNA, 122 bp, Homo sapiens
aggtcacgggtggttgtgcggagtgaggaaacgcgcggccgcccagggctgccaatgccccggcggcgctgttctgaacaaactgttttggccagcctgtgaaatccctggaaattgacgat

SEQ ID NO: 270327 - DNA, 122 bp, Homo sapiens
gtcctagtctggcaccgggttggattgtcgctgggacggcagtcaggcatttggtgtggtcgcctaaggggtgggtccttcggcgggagctccgggaaaccccgtgggcctgcgcggcgttc

SEQ ID NO: 270328 - DNA, 122 bp, Homo sapiens
tggttactttctcagaaaagcttccctgaatggctatttgcaatcgcagtcaccttccctcgcctagcacttccactcctccatcactgctttgttgttttccacagtgtgtgtcactcact

SEQ ID NO: 270329 - DNA, 122 bp, Homo sapiens
gttccctaaggggcaacttcactgacctggacacctttggtctgtcctcagctcatcaaacggatgattgatgagacatccagtggaggtgtcacaggcaatgacgtcattatgcacttcac

SEQ ID NO: 270330 - DNA, 122 bp, Homo sapiens
ctggagccgggccttccgtcgctgcgccctcctgcaccctccgagtgtctcccccgcccacgtcggaggcacacacctgctgtcacctgcacaccttgcgctgccaccaccccccactccat

SEQ ID NO: 270331 - DNA, 122 bp, Homo sapiens
ctgtgggttcctggtaacctggaagatgagcgggagtttagagagttgccacctcccacgcgagctcggccccgctaggctttaggggacaactgctgatggagagcccttccctgcactga

SEQ ID NO: 270332 - DNA, 122 bp, Homo sapiens
catattgcctttgaaattagcagcctctgggtgaccagaccttggccctcagaggaatcccggagaaaggtagaaccagcttcggcgttgggaacgcaggcgcgcttacgcatttagtgagg

SEQ ID NO: 270333 - DNA, 122 bp, Homo sapiens
atgtagcctttcttcaaattgagggcttatcactttggatccccctacaagatagcagtccgttaataaaggcttgaagtactattttcctaactgagggccccctttggagcctattaaca

SEQ ID NO: 270334 - DNA, 122 bp, Homo sapiens
gtgcttaggattacaggcgggagccaccgcgcctggccaaggcggccttcttaagaagcgcgcgtaaaaccccaacttcctgctctggcgctgcggccgctggggatctgagtgggctccgc

SEQ ID NO: 270335 - DNA, 122 bp, Homo sapiens
ttagatcttattcccagatggcagcactggaaattgtgagcagacagcgtcatggccagacgtacctttggaaaggatccctccgggccttctgactgcagggaggaggcaccggaggctga

SEQ ID NO: 270336 - DNA, 122 bp, Homo sapiens
atgcaggcagatgagtgtcacagctgtaactgaggcacagagcagtacacacagtggagccgatttccgcgatggcgagagggggcaccggaggtgacaacaataacaagactgtccttcgg

SEQ ID NO: 270337 - DNA, 122 bp, Homo sapiens
cgcccccgtaatccaatcacctcccacccggcccctcctctaacattaaggattacaattcgacctgagatttgggcagagacacacatagaaagcacatcagttataaacgggaacttccc

SEQ ID NO: 270338 - DNA, 122 bp, Homo sapiens
aaaggccacatagctgacaaataccaccacatctcacagaagaggctgaggcgtcctggccgaataatgctttattctggaaaagatctgtacgaatctgcaaagcagtgaaaatgtgtgga

SEQ ID NO: 270339 - DNA, 122 bp, Homo sapiens
gaagggcaatgaggcagctaatgcgaagaaagatagaaatttacttgctttaacttcatacggtccacagtgaaagagttcattcagtcgccggcccgccatagctgatggatgaataaacc

SEQ ID NO: 270340 - DNA, 122 bp, Homo sapiens
tctgcattctttcagtacgtgcacttctcttcccctttccagaggcatagatttaacggacgtagttgattcattcatttctctgtcactatttatgtgtggaacgggtcccaccgagtttg

SEQ ID NO: 270341 - DNA, 122 bp, Homo sapiens
tccctcttccttcctcctcctcctccctgttacacaccagggaggctgctgcatgattgacgcaaagccagtggctgcttgaaggggaacgtgaggattccagaagctctgagctgggcagg

SEQ ID NO: 270342 - DNA, 122 bp, Homo sapiens
caggggaagcagaggccaggtgcccacttactcaccggcagacggcacacacgaagcagtcggggtggtaggtcttgcccagcgccgacaccacctcaccctcaatgaactggtcgcagctg

SEQ ID NO: 270343 - DNA, 122 bp, Homo sapiens
agaggcagaggttgcagtgaggcgagatcgtgccattgcaccccagcccgggcaacagagcgagactctgcctcaaaaacaaacaaaaaagaagccggtccccatccgcagtgactcgcgtt

SEQ ID NO: 270344 - DNA, 122 bp, Homo sapiens
ggtgagggcatcctgtgggcggcaccgctgtggcccctgccctcagccaccacccggccccgaccacccacttcctgcttcaccttggagacccggaggccgactgcctgagccccaagccc

SEQ ID NO: 270345 - DNA, 122 bp, Homo sapiens
ggttttatttctaagcaccacagctgcccaggaaagacatctggctctggcaactgacctcgtagagaactgggcctggctatctgcatttcaagcttgattccagaactcccccatcatgc

SEQ ID NO: 270346 - DNA, 122 bp, Homo sapiens
tgcccagtgtgcagtctagacccagcctttgtctgccaagagcctggaaatgttgacctccgttattaagcctggtcagtctaagactaattcttattaccgaagtaccattaggtaaatgt

SEQ ID NO: 270347 - DNA, 122 bp, Homo sapiens
ttgagggatgttgttgggcaagaagatctgtgttctttttctttttttttttttttgagacggagtttcgctcttccaccgaggctggagggcagtggcacaatctcggcccactgcaacct

SEQ ID NO: 270348 - DNA, 122 bp, Homo sapiens
agccttgcagtgtcgagcggagctccctgtaggtcacctgagtgtgacgaaaagggatcccgacgccaagacctaagttcacaccaaggttctggaaagagactcaaaacacaggccctcag

SEQ ID NO: 270349 - DNA, 122 bp, Homo sapiens
atcccgcacgccctggggcctgtcccgggggcagaggggcaacgtccccaatatggcctccgtcctgagagcgagcagagaacagcgcgtgcaggcagcctccagagccggcggccccgcgg

SEQ ID NO: 270350 - DNA, 122 bp, Homo sapiens
acggcacgacaagtgcaccttacaggattcccagaagatctgctgtgtgcactgaccacgcgggcgtcggacaagcagcacgctgggtttactgcccgcgagtaaacactctgggggccaca

SEQ ID NO: 270351 - DNA, 122 bp, Homo sapiens
cccgagcggggagtgcgaagtcagcagaagaggagcggccggggggaggcggcgccgcagcgaatccccaagtaggtcaggcagagctgcgccatgacaggcactaaactgcttaagtgggg

SEQ ID NO: 270352 - DNA, 122 bp, Homo sapiens
ctgtcactcccctggagctgggaatggcattgggcggtggctcagggtcccttgccccagcggcaccatctctgcatttggccagcaaggctgatgggacttgtgtggacatttctgggacg

SEQ ID NO: 270353 - DNA, 122 bp, Homo sapiens
tctctaactccataaacacaacagaaagtctcacctgagcacaggtattcacagccaagccgtagcagaagctgcaaaacaatatcccctcatttccctctgctactcattccttttcttgg

SEQ ID NO: 270354 - DNA, 122 bp, Homo sapiens
ctgaggcctccctgggatggagtgggctcttctactcaaggagaagacacctatcatcctcgatatgccctctctgggcactcagcagcttcctggggtgggggacaggaggtcatctggac

SEQ ID NO: 270355 - DNA, 122 bp, Homo sapiens
accccgaaacccatcaggttgacccctcggcgtttcagaatccggctggcccgagtgaggcggtccaaagtgatccctggagggggcagtgccagacgttttggggtccccttcctcagcgt

SEQ ID NO: 270356 - DNA, 122 bp, Homo sapiens
gctcctgtggggatgaaggccgagggcttcgtggatgccctgcaccgggtccggcaggtacgggcgcagccggctggcaggagcacgagatcccgaggcggggcctggcgggcggggaagag

SEQ ID NO: 270357 - DNA, 122 bp, Homo sapiens
ccggccgccacacacactcccctggagggctaaatgcactgtggcaataaaacattcatgcgacttggaattttaacacaatgccatttccctagtttaacctgaaaggaatgcactagtca

SEQ ID NO: 270358 - DNA, 122 bp, Homo sapiens
gaacccttcctccgacctggcttcctcggcacaagcgagccgggtgagtccggctgcagccgggcctgtttaccgaggctgctggcattgcatgccaggtgcagagcccacgggcgactcag

SEQ ID NO: 270359 - DNA, 122 bp, Homo sapiens
tgcctggctccaggggcctcacacgcagcgacctcagccgggcccaaggtgcgtgtactgcgcatgcccagccaactggtcttccagaaccttcttcagtgaggaggttatacccggaggtc

SEQ ID NO: 270360 - DNA, 122 bp, Homo sapiens
gccgggtcattcgagaaggcacaagctgcggaggccagtctggggcctctcgcagaacctcggggaacagaggcgtctgccgggccgcctaccctccgcaagagtgggccacgcgggcggca

SEQ ID NO: 270361 - DNA, 122 bp, Homo sapiens
agcacctctctaacggattggctgaaagaatcttgcccacttcccagatcaaaaagcgtccgccccaattgggttctctctgggccgtggtccaactgaggatcctggaagttatgcctgtg

SEQ ID NO: 270362 - DNA, 122 bp, Homo sapiens
tccggggagagaagaggctcggtctgcaagagttgtcatttgttggctgcggtgagaccacgccccgtcgccctcccacacctgaccccgccctcccgcgtccattgggaacgccaccggaa

SEQ ID NO: 270363 - DNA, 122 bp, Homo sapiens
acctcgcaggcgctgggctgccaccttgcggaatttgggtgcgtcccggaccatgtgacgcgccccgtgcagggtgcgcaacagccgctcacagctctcgtccagcggccccgcgacttcct

SEQ ID NO: 270364 - DNA, 122 bp, Homo sapiens
tcttcgctgtggctccccaacctgctctgctcaggctccccgcgcccgtccctggtcccgcggcaggctcccgcttcgtcattcgcggggcaggtggcataccttgcccatcagcatgggca

SEQ ID NO: 270365 - DNA, 122 bp, Homo sapiens
tgggatttttgaaagaaaagggtttcttcaattaccatttcccagtttgggatgaagagacgtaaagaagccctctaataaggaaattacgccgggcctcactgttaatagtacagtattta

SEQ ID NO: 270366 - DNA, 122 bp, Homo sapiens
attctcgtaattttcttttaccgtggccccagactgcgcatgtgcgcccccgtgcggaatcgcgcaccccagcggttttccagcgtacgcacaagttccgccctaagggaccgcccctttaa

SEQ ID NO: 270367 - DNA, 122 bp, Homo sapiens
ccaagccctgaggacaggtacttttaaaggtttggttttcttacactttagaagtcacagcgatgattccttttgatcaagaagtgaaggacttatttaatgggtctttaataagaggctga

SEQ ID NO: 270368 - DNA, 122 bp, Homo sapiens
tcgcctctccctgcctcctgcctttccacttgcaccagttttcccaccccagcctcagggcggggctgcctcgtcacttgtctcggggcagatctgccctacacacgttagcgccgcgcgca

SEQ ID NO: 270369 - DNA, 122 bp, Homo sapiens
aagatggttttcttgtcagatggtgctggagtttgcgtcaggcacataaagaggcagccccgaatctagcctacgtgagtgccggaccgctgagtggttgttagccaagatggcggtagcga

SEQ ID NO: 270370 - DNA, 122 bp, Homo sapiens
tcttatgggaccaccgttgcatatgtggtctgttattgaccaaaacatcattatgtggcacgactatacacacacacacatgcctgcacatgtatattacataaatatgcatgcagatgtat

SEQ ID NO: 270371 - DNA, 122 bp, Homo sapiens
cgtgctgctgcagtacctgctggagcagccctgaaaacagagcagctcagcgaaggccggcgaggccaagcagcacaggctccccagtcctgtcctctctcatgctgtggctctggttttca

SEQ ID NO: 270372 - DNA, 122 bp, Homo sapiens
gctgcgcggagagctcagcgagctcttctgtgtctgtttggggcgtgtgggctccgggagcgtgaggaccgggaagctaggaggctccttcccttctggcggctccctcactgagaccgggc

SEQ ID NO: 270373 - DNA, 122 bp, Homo sapiens
acggggaagaggagcctgagcagctctgaggggccagtctctgacggtggggctccccctcgtcccgtcaggaccctgccccaaggagaagacgccttagaacgctaccagagttaaaaatg

SEQ ID NO: 270374 - DNA, 122 bp, Homo sapiens
cttggaaaatgaggatttagatctgtttatgaagccccgctatcggatgggaaccaactccgcgcgcgtctcctcctcttcctttattgtatggatttataggtatatatcttctcggactg

SEQ ID NO: 270375 - DNA, 122 bp, Homo sapiens
tggatggagctggaggttatcatccttagcaaacgagcacaggaacagaaaagcaaataccgcacgttctcatgttcacgtgggagctaaccactgagcacacatggacacgaagatgagaa

SEQ ID NO: 270376 - DNA, 122 bp, Homo sapiens
tcggggactgcgccgaggagccgggccgcatcccacgtggggtgactcgcacctgcccgtcggggccaggctcatgttgggtatttcatgcggctccctgaattctcagaacagcctgcgag

SEQ ID NO: 270377 - DNA, 122 bp, Homo sapiens
tgcaggtcacagggaaggggagggtaggggtcgacccgcggaagaagcttcaagaagcatcgggaggacctggccctgcctctgggccttgaaaacaggcctggccaggctgattttgtcgc

SEQ ID NO: 270378 - DNA, 122 bp, Homo sapiens
tgaggactgtataattaagtggaggccggctctctcctgcggcactgggcgttattaagacgaggagcccctctcattacccggtcaagagcgccgcgattggccgctgcggtcaggcctct

SEQ ID NO: 270379 - DNA, 122 bp, Homo sapiens
tcaatatcctttaaaatgacagggtataaattaaacaggaatctgacttggaattccggtcgaatgtcaataaaacttgcattaacagatgtgttctgttttacaggtgcctgatgaaaacg

SEQ ID NO: 270380 - DNA, 122 bp, Homo sapiens
gatgaccagctgttccaccgcagccaggaagcaagggccggggctgcagcctggaacgagcgtgcggcaggtccagggctctggagcctcacactcacttagcgacggactggatgaccttg

SEQ ID NO: 270381 - DNA, 122 bp, Homo sapiens
ggctgaagggaccttggaggacatctggacagaatgccctcttgggatgggagaagcgtccgcttccacacccccagggacagggaactcactttctgaggtgaactcccatccactcacag

SEQ ID NO: 270382 - DNA, 122 bp, Homo sapiens
gccttccctgacatcatcgtgactggccctctgtctccacagagcaattgggtgccacgccgaggggatcagggtcccaagaccattgaccagatccataaggaggctgagatggaagaaca

SEQ ID NO: 270383 - DNA, 122 bp, Homo sapiens
ctgggaccagcttcgagtttgcgcttgcaattgttgaagccctgaatggcaaggaggtggcggctcaagtgaaggctccacttgttcttaaagactagagcagcgaactgcgacgatcactt

SEQ ID NO: 270384 - DNA, 122 bp, Homo sapiens
ttaaatattaagaacaagaagagtcggctgcttttaaaatgtcactcttctggcggggtgcggtggctcatgcctttaatcccagcactttgggagggtgaggcaggcaggtcattgaggtc

SEQ ID NO: 270385 - DNA, 122 bp, Homo sapiens
cgcaattgaaaaataaacaggcagcttgttagagtacaattcagggtatattgttaaagacgtatataagaaattttaaatacgagcaaaaagtatctgaggacctgtcagacactagacac

SEQ ID NO: 270386 - DNA, 122 bp, Homo sapiens
gactcaggcacagcaggcaaagattcaatgggtagggccggaccgactgcccgaccttcgcggtgcttcacttgcctcactgcgcatgtgccaaagacaatcacccaaagtactcgaaacca

SEQ ID NO: 270387 - DNA, 122 bp, Homo sapiens
gccgtcccgcagaccgggcgaggcgccgtggcccagcagcaggaagaggcactcggggcgcgccagctcacaggccacgtgcagcgacgtgccaccgccctccacgcggctgcagccacgcc

SEQ ID NO: 270388 - DNA, 122 bp, Homo sapiens
ctctgcggccactccaggccgtctgcgccccagtccagccagtgccctggatatcagccccgccctgtcccgggtctgtctgtacccccaggccccgctcctgcctaggcgccctccttcgc

SEQ ID NO: 270389 - DNA, 122 bp, Homo sapiens
agtatcacatgtgaggctgtggaggcagggcctagtcagctgtgttagcttagcaatgttcgaagagaaaaatcaagcactgtctccctatacgtgactgtttcctgtgctccgcattgcgg

SEQ ID NO: 270390 - DNA, 122 bp, Homo sapiens
tgcggggccggccctccatccactcctcggaacgcggcactccgcggcctcccgggtagacggtctccaccactacttgcttctgttcatctctgacggcagagttaaataaaattaatact

SEQ ID NO: 270391 - DNA, 122 bp, Homo sapiens
caccgctccccagagccctgtagtcccttctgctctctaatctaaagcagtggttcccagcgggagagatttgcatgtctcactcccaggaaccttaggcaatgtctggagacatttggggg

SEQ ID NO: 270392 - DNA, 122 bp, Homo sapiens
gctcatcagggtcgtttttctttttcttcttacaaaaagatcaggtggctgtgtacttcccggcgccgggccaggggctgccccgccttgcccctacctctgcggccaggaaggactgcagg

SEQ ID NO: 270393 - DNA, 122 bp, Homo sapiens
cggatcggagccgccggggcgcgggcggcccaggtaagcgggccgggtgggtgggggtcgcgtccctccgtccctgtccccggtgcacacaggtgacagcgccggcagtgctcggccggagc

SEQ ID NO: 270394 - DNA, 122 bp, Homo sapiens
cacacccgcgcctgcccctctggaggagcggaatcaccctgaaggctgacgtgcgcacggcgccgcggggcgaaggactcactgcccttttccgtttccttcacgtgtgacgtcacagggag

SEQ ID NO: 270395 - DNA, 122 bp, Homo sapiens
tgacatttgagcaaaacttgaaggaagtgaattagccaagcaaatattggaggagcagaccgggggaaaaacaaaaataggtagagcaaagaacttgaggtggaaacatgtccagtgtattt

SEQ ID NO: 270396 - DNA, 122 bp, Homo sapiens
ccacgttttcatcctgagagcgcagctggtagatctatttccagggcatcctgcagcgggcgcgtgagtcacgaaatcagtcacacaaatgacccaccacatataaaaaagccaccaataca

SEQ ID NO: 270397 - DNA, 122 bp, Homo sapiens
tacgatgtatccaagtctgacggccccagaaacgggtgtgcagggcgcccattgggtccgcggtatgactgcagaaagagcctgggagatcgaggggcgcagagtggggccggaccaggggc

SEQ ID NO: 270398 - DNA, 122 bp, Homo sapiens
cgcagatgatgtctgggtaacaggagctgtggtaataggtctttagcaaggtagtggtaacgtatgccggggaggagaagcagtctgtagtcctatgattgcccgtcaatcttttcatgagg

SEQ ID NO: 270399 - DNA, 122 bp, Homo sapiens
ctccccgcacttccaaattaagaaccacgtgtgataaaggcactaggaagatctcgctctcggttgtccacacaagcatttagatgtgtgcaaacggcccatccatgagtcccagtctcctg

SEQ ID NO: 270400 - DNA, 122 bp, Homo sapiens
gctgccccctactcagcctggactcaacaccccaatccagctctgctgccccgctgctcccgcctctcccgctgccactgcctctgctgctcggctggctctgggaggaggttggagcaggt

SEQ ID NO: 270401 - DNA, 122 bp, Homo sapiens
ccctgcgtagaaggcatttgcgcatttcacttttgttgtctttgacggccatttctaaaacgggctggctgtgtattcttggggggattttaggcacttaagttactcttttaaaagatctc

SEQ ID NO: 270402 - DNA, 122 bp, Homo sapiens
ccaggcagcctgccttgcaggcatagatcttgacaggctggccacgggactccacggacacgtgtaggtagggcttgccctcggcatccgccagcacggccaggttgatatggtcgttcttg

SEQ ID NO: 270403 - DNA, 122 bp, Homo sapiens
tggactcgcaggtgcctgccctcgctctcagtgaagggaagtcgcagagggcggggacgacggtttgcttgccctttgtttttagggcggtgcatgggtctccaagttgggaatggctcctg

SEQ ID NO: 270404 - DNA, 122 bp, Homo sapiens
ggaggagggccgcagagggaagcacacccagcacaacaaacgctttaaaaatcgttgatacgaacttgaaagctctcacagggaagggcgagtggtggttttcttggtttcggctgggtcag

SEQ ID NO: 270405 - DNA, 122 bp, Homo sapiens
ccaccctcgctgccacccaccccaagctgctgccgcctcaccttccttgaaatttctcagcgggagtctcctcactgccactaaaatccacccagcccactaactgaggagctagtgttaat

SEQ ID NO: 270406 - DNA, 122 bp, Homo sapiens
acccccatgtagccaggcaaaggctttcatttcccgttcattttacgaatgtgtctccggcggctcatttcatcttcaagtgacacaggacatcacgaaggccttctgtggtatttgtacgc

SEQ ID NO: 270407 - DNA, 122 bp, Homo sapiens
agattccatcctgtctctcctgtaaggaaaatggcttctgttttaaggcattcagaactccgggaaacacagtcaagcatttcctgactcggcaactgggaatcagttgagggtctctcaga

SEQ ID NO: 270408 - DNA, 122 bp, Homo sapiens
gccccttcctctgcagctcccacctcactcccctcagcgttctttttcccacggtcttcccgttgccgctaacctaactaactctcagccatggcctccaacgaagatttctccatcacaca

SEQ ID NO: 270409 - DNA, 122 bp, Homo sapiens
ttctcattcctaaaggaaaatatttatattacgccacagaacgggtttccatgacagtgacgactgtaacactgttgccttagcaaccacttgagtccatcttgaatgatctgaatcccctt

SEQ ID NO: 270410 - DNA, 122 bp, Homo sapiens
gtggcacagccccggggccgggttccccgggcaggcgctctctgaaggtcggccttgttgcggggccggcccagcccccggtccctctgcagggcatccaggatgtcgctgacggagttcac

SEQ ID NO: 270411 - DNA, 122 bp, Homo sapiens
ttgctcagcccctccggggagtggaatcgggtgtgcaacaggccgtgaggtccggctttgcgaggaactcccattggtcagtcaaacaggagtcccaccctcctgggcttcccattggttgc

SEQ ID NO: 270412 - DNA, 122 bp, Homo sapiens
cccgggctctgggtgcggagacccaggcggggctgggcccagggcggcggcgggagaagccggggaagccgaagagcctggggaggaggagctgcgagcgcgggagacgagcaggagccgcg

SEQ ID NO: 270413 - DNA, 122 bp, Homo sapiens
tcctcctgccctttcaaagaataaccacagctcagaagacgatgacgtggtcatctgtgtcgccatccccttcctgctgcacacctgcaccacggccatggggaggctgctccctgggggca

SEQ ID NO: 270414 - DNA, 122 bp, Homo sapiens
tcaccttggagaggcctcagtacagccttcgggcttgggccgcaggcttccctggacttccgcagtcccccttctccccattccagaacctgccgagcccctgctgcatctgggacccgcct

SEQ ID NO: 270415 - DNA, 122 bp, Homo sapiens
gcagtgactattcttccagattattttgggaggtttccaagaagttccagcacctttacccgccatgtggtatttgtatttgccagttttttaaattcacagttattactggccattactat

SEQ ID NO: 270416 - DNA, 122 bp, Homo sapiens
acccgctcgcgcacgaactcgctgcacagagctgtcaggagtggggcgtgtggcctggagcgaggctgctcgcgtaggctgggcctgggctcctggccgtgttgtcaccgccaatccccaca

SEQ ID NO: 270417 - DNA, 122 bp, Homo sapiens
gcgccctccccgcggcctcccgagccctgagtgctgccctcagccctcccttctccgcgacgcccctcgcccggttgctcgcagcacccccaaggccgctccccgaatcccccgggcgcgag

SEQ ID NO: 270418 - DNA, 122 bp, Homo sapiens
cctttcctccgcttccatgtaaatactgtgcaaatccccgcctttgacacaggcgaccttcgctcggctcgctctccctgctggcctgggaacttagcgatttggaacccactacgtggacg

SEQ ID NO: 270419 - DNA, 122 bp, Homo sapiens
gggggccctccagtgctcctgcgccgtgggaaacgcgagaactctagctgctgcgtatcgcgctatttacccggcttgtggggagtttcaagttgggcggctactttttggcttctatttag

SEQ ID NO: 270420 - DNA, 122 bp, Homo sapiens
cagccgagcacgaggaatcggggacggcggggggctctccaccctcgcagggcctgggaacggctcaggggtggccgtggggtgcggccagggcggatctgtcctgggctgggctcagggga

SEQ ID NO: 270421 - DNA, 122 bp, Homo sapiens
gctggctccttctcatcattttggtctcttctcaaatgtcacttctgcagagaacacccccgactcctgccaagccaatgtgaactttccacacccacaaagataccttttttcaccctgtt

SEQ ID NO: 270422 - DNA, 122 bp, Homo sapiens
cggacctggtggagctcaagcgggagctggaagccgtcggggagttccgccaccgttctccgagcaggtctctgtcggtccccaaccggcctcggccacctcaacccccgcagagacccccc

SEQ ID NO: 270423 - DNA, 122 bp, Homo sapiens
tggaagtggcaaggaatgtgggaaacatgccgtgcgcgggaagagggacaggcgcagccccgtcagaatgcacagtgcacgcgtcacggcagctccgcttctggaaactcacactaaaaaag

SEQ ID NO: 270424 - DNA, 122 bp, Homo sapiens
ctgcaggagcttctcctgccgccagccaggttggaggtggagtagttcagaatcaactgacgcagccgggaattgagctttgcaaagccacttgcaaggaagggaagcatctgcccaaccct

SEQ ID NO: 270425 - DNA, 122 bp, Homo sapiens
tgactgaactaagaagagcaaaacaacatgtgactcggcgttacgcaggcacacacagcgcggccgccccgccccgctgcctcgcattggcgccgcgccccccgacggacggcgcgctcggc

SEQ ID NO: 270426 - DNA, 122 bp, Homo sapiens
tctatttcttaggtacctgaactcaatgtttataaaaatccatttaaagcccaaacctaacgtgcttattggctggtgcctggcacagcttttatgccagataaaggcagactttagataat

SEQ ID NO: 270427 - DNA, 122 bp, Homo sapiens
ccttattggtggcgttactacgcctcaaggcgtttcttccctctttgctgttcgcagggacgctgcctggtagtttcagttacttttgttttctttctgcctgcctttattgatcattacag

SEQ ID NO: 270428 - DNA, 122 bp, Homo sapiens
gggccgtggcggtcgctgctggggtctgccaggaaaataaacgagagcaacagttgggtacgaaggtccctcggctcctgtccccgttcccacccacactcgagacctcattagtcacaaca

SEQ ID NO: 270429 - DNA, 122 bp, Homo sapiens
aggtgtgttcagggtggtatggccttagacaagtgttctgtcttaagagtgtctcctggccgggtgtggtggctcatgcctgtaatcccagcactttgggaggccaaggcaggcagattgcc

SEQ ID NO: 270430 - DNA, 122 bp, Homo sapiens
ccccagaccccccaaagagctgagccttccagcaagggatagtggctgggagggtccagacggggaggacagacccgagggcacttgtaggggaggtggaaagggtctcagactccgcactg

SEQ ID NO: 270431 - DNA, 122 bp, Homo sapiens
gtccgtgttttcttggtaactggtaaatggctgtagattactgacacgcggtcctttgtacgtaacagaaggctttgagtgtttctgtgaggatcaccctgtgaagaaacggctgcagtgag

SEQ ID NO: 270432 - DNA, 122 bp, Homo sapiens
cgcacttcgctgccccttgcccctcagcagcactcaggcagtgaaatggaccgcaccggccgcctgtagacttaccctgagccaagtggttttttcggataaaatctgtgtcgtctggatgt

SEQ ID NO: 270433 - DNA, 122 bp, Homo sapiens
gccccttccgacgcctttgcctcccagaaaatcacaacaaagcgatcggaaattcagccacggtcccgggaagaaggagtagcagtgaggccccggaacccactgcggccgaaactgccatg

SEQ ID NO: 270434 - DNA, 122 bp, Homo sapiens
ctgactctgtctgtcccgccagctccgggctttttatagagaggctgtgttaggcgagcccgggtgagctgtgcatggacctcatctgactgtggcatgtggacccttcgcagaggtggcct

SEQ ID NO: 270435 - DNA, 122 bp, Homo sapiens
aagagctcgctggaggtctcagagctgtgggtggagccagggcgtccaggctgcgccgcgcggcctatctcggcgatccagcagccaagccgcgaaagccagacccccctcagcaagcagcg

SEQ ID NO: 270436 - DNA, 122 bp, Homo sapiens
gttcatgaaagttgataccattgccattccttgatttttacaagcatagcaaacttaaaacgctcaacacacccagaatgggcaataaatggatgtgttggcatggtcctcctcgtgctggc

SEQ ID NO: 270437 - DNA, 122 bp, Homo sapiens
atgaagggccgagaccaccggcttgttggtgacaagggcccggaagtccggcctggctttcgacgcccccgccaccgtgggctgcctgaagaagtaggatttgctgccatggagcaagcact

SEQ ID NO: 270438 - DNA, 122 bp, Homo sapiens
atgtagcagtttgttgcagagcagaggcaggactgtgggtcacccaccatccttactgaacgtggtgggtgtcgtcaaagccaggtttctttagctgtcatggaaagaagagagcttagtgg

SEQ ID NO: 270439 - DNA, 122 bp, Homo sapiens
tccaccctcgagcatttgcgaatgtcaggctgacacctgtgtctgagcctgtctgggcaccgggactgctgtgaaggacacagtcagccggactttgcttagttcacctgtcggagccactc

SEQ ID NO: 270440 - DNA, 122 bp, Homo sapiens
ctcctggaggagtcagcatctggtactcccgctgtctgctgccatctgagttcagccttccgcagttgggtccaccttaaagcgggcccccgggtagcctagtgtttgtatacagggaaaat

SEQ ID NO: 270441 - DNA, 122 bp, Homo sapiens
ggtgaactcggtgactccaaactacaaaattaataggtggcggcgggggcgggcttcagccggggtagaggcggagtactcaccgcggctcctgttcattgagcaccttcgataggctgggc

SEQ ID NO: 270442 - DNA, 122 bp, Homo sapiens
gaactgggactccgacactaactggaactggaaagtcatcagctggggagtggcctcccccgggaactttctttactctggctttgacctccatccctcggaagcccgtggcttttcaaggc

SEQ ID NO: 270443 - DNA, 122 bp, Homo sapiens
ggggcgcgacggtctggcggctccggggcattgtctaagcgggacggggcggggcttcttcgggccacgcccattccgccctgctaagcctcgcccattacatccagactgcgccccccttg

SEQ ID NO: 270444 - DNA, 122 bp, Homo sapiens
cagccctgcgctgctggaaatgcgctggtctcggcctatcagagctctagtgagcggttccggcgggttatcaggaagcattacttcccgcctaggcattcaatgaattgcataaatgccat

SEQ ID NO: 270445 - DNA, 122 bp, Homo sapiens
caaggcccgagcaggtgcggcccccgttggccgggctggaggagaaagcaaaggccttgccgctccgtgccattggaaagaggcagcacccgggtgcccttgtgagatctttttagggggga

SEQ ID NO: 270446 - DNA, 122 bp, Homo sapiens
catggatcctttaggagtgaggaagcgggatgcgctggtgtggaaggcctttcatatggtcgggcgtggacacagagagaaagcgccaaacatccttgcggcattgctcctgcctggtggaa

SEQ ID NO: 270447 - DNA, 122 bp, Homo sapiens
catctgtctgtcatgtatgagagactgagacaagaggtaagtcagtgcaaaagtggccttcgtctacagtgggaaggatgtgggtaatccttggacgtacagggatagtcaactggattctt

SEQ ID NO: 270448 - DNA, 122 bp, Homo sapiens
ctgggcggtgcaggctgtggagcacgaggaggtggcgcagcgtgtgatcaaactgcaccgcgggcgaggggtggctgccatgcagagccggcagtgggtccgggacagctgcaggaagctct

SEQ ID NO: 270449 - DNA, 122 bp, Homo sapiens
aaaaggaaagggtttatgaaacccaggttgaaatggagacaccgaggcacagtgcctctccggaacccagaggagagtcacggagcccactggagaagacctcagccgccatgagaccctgt

SEQ ID NO: 270450 - DNA, 122 bp, Homo sapiens
aggaaatccctctcagacatgagatgctactcctcgaagtccattcaaaagttgcaaggtcgggaatttcagacagccaattaatcatgaaagggtgttatgaccttcattcatctcactct

SEQ ID NO: 270451 - DNA, 122 bp, Homo sapiens
acagcctgtgagccacggcagagcggagaagcctgggacccctgtcacctctcagagcagcgcctcacatggcagaaggagctgctttccgaagagctaaaggttgccataaatatttataa

SEQ ID NO: 270452 - DNA, 122 bp, Homo sapiens
ctctgtctgcgtggaaacacagtgcagtagcttccaacagtgcagacacccaaatgagaacgagtacttggcttagggcacactgagagaagggaagaggcggtgctctgtaaactgtaact

SEQ ID NO: 270453 - DNA, 122 bp, Homo sapiens
ccttggaatcatccttatctcctgtgtcttcctgtatcttgctttaaaaagtttccccaccgcaagcctattaaatattctcacatacttttccttaatgcttatatttttaaaatatttct

SEQ ID NO: 270454 - DNA, 122 bp, Homo sapiens
accacctagccctccaccccaactcccgcccttggctttcagcaaggatggcccagctcacggccacagggtggcaaggggccacttggtgcccagaacaacttctgctcccagaaagcctt

SEQ ID NO: 270455 - DNA, 122 bp, Homo sapiens
ggacatccgcttccagggccctggagacccagggagacctcagttccttcaggtgcagtccggggcccctagagggaaatgtttatcccaattgcttgacagaaaataacttgactgacaag

SEQ ID NO: 270456 - DNA, 122 bp, Homo sapiens
tgaacttcaccactcgctccaccttctccaccaactagcggtccctgggctctgtccaggcgaccagctacggcgcccggctggtcagcagcacagccagagtctatgcaggcgccgggggc

SEQ ID NO: 270457 - DNA, 122 bp, Homo sapiens
tgggggggaaggagagcccggggagggagaaggggatggagaagatgtgagctcagactccgcccctgactctgccccaggccctgctcccaagcgaccccgtggagggggcgcagggggga

SEQ ID NO: 270458 - DNA, 122 bp, Homo sapiens
gacaccctgtcttccccagtggcctagtctaagcactctgcagccacaatctagttcatccggccccttggaatgccagcgcagctaagggaggagctccttgggtccacccagctccccag

SEQ ID NO: 270459 - DNA, 122 bp, Homo sapiens
cgacagacgcaccctcacaaacccacaggaaaaatgacggcacggacagaggccgtgaaccggtggctcagaaggaaaaagaaaacaagacacaggaagaccattcacctcacgcccgtctc

SEQ ID NO: 270460 - DNA, 122 bp, Homo sapiens
gcagctgaagacagtgcctgtcagcactccataatgtctgtcagcactccaaaatgtcgacgctgtaggtcactatttatttatttatttatttattatttttatttttttcttttttgaga

SEQ ID NO: 270461 - DNA, 122 bp, Homo sapiens
aggctcgggtccagcggagcatgcttgcaagctgttggccggctcgcatctcacaaggtacgtcctccccgcgctccttctcccgccctagctcgcagccccgcccatttccgtcttcagcc

SEQ ID NO: 270462 - DNA, 122 bp, Homo sapiens
cgtcgccctcccggctggagccgccgccctggccgggcagagtccggagccagtgccagccgccgccccgcccgccggacctggcccttcgcagctccaccagcgcccccgctgcgcccgcg

SEQ ID NO: 270463 - DNA, 122 bp, Homo sapiens
ccggagcaggcgcagcttggccacctcccgccgaaaggcaaggaaggaccggctgcgacacgaggaagaaggcccctcggcctcagcagagcgctatcctccactggttccccgggttcccc

SEQ ID NO: 270464 - DNA, 122 bp, Homo sapiens
ccttcttcagcagcagctccgtgacctctaggtgctcgttgcccacggccagctgcagagcgttctgccccatgtagtccacacagttgaagttaagggtcttggactcctccagcattttc

SEQ ID NO: 270465 - DNA, 122 bp, Homo sapiens
tttttgtatttttagggagacggagtttcaccatggtctcgatctcctgaccctgtgatccgcccgccttggcctcccaaagtgctgggattacaggcgtgggccaccggcgcccggctggc

SEQ ID NO: 270466 - DNA, 122 bp, Homo sapiens
cctccccaggtctggtccgtactattgggcctcagtttctccatctgtaaactgagagggcgggaccagacagcacattccacgagcacatcttgcccccttcccaagtgccaatcctcaga

SEQ ID NO: 270467 - DNA, 122 bp, Homo sapiens
ggctgcgcatctcatacttatctcccgggcacagctcggccccctcccgcagccagcacacgtggccccccgagcgggacacagtcacctccagcaccgcccggcggcccaccagaacggtc

SEQ ID NO: 270468 - DNA, 122 bp, Homo sapiens
tacaggccaatatttctgaggaacattgatggaaacattcccaataaaatattagcaaaccgaattcaacaacacattgaaagattatatgtcattatcaggtgggaatgtatccctggcat

SEQ ID NO: 270469 - DNA, 122 bp, Homo sapiens
ggaatataggcaaaagatgcaaacagacaatttaaacatacaatgcaaatgcccatctaccggccacagaaaaaaaatactcagataaatacagactgaaagaatcagaatgtggaatacaa

SEQ ID NO: 270470 - DNA, 122 bp, Homo sapiens
cacggctctttgctgctaaagttacccggaacgggagtcattatgacccttacggtcccccgagaggaggaatggagacttttgttaactgagccgggccaagagataagaccagctctggc

SEQ ID NO: 270471 - DNA, 122 bp, Homo sapiens
ggggtgtggaaatagcccatggaaagtgggcccatccccctgcccggggtgggagagcctcggctttggcaggaagactggaaccagctctgggtgcagggttagaccaggatgcctcaaaa

SEQ ID NO: 270472 - DNA, 122 bp, Homo sapiens
tgggaggacttcatcaacagcacagttacacatcaaagtcctttagctctccccagctggcgcctattttcactttcactttcaatttcacagacagttttacagcactttccatttcattc

SEQ ID NO: 270473 - DNA, 122 bp, Homo sapiens
agacagccccgccccggggcggcaccttctaagggcctgagcgctgcacagggatgggggcgggcggggcctcccagagccgccaggcgtcccgccccactccgcccacacgcacggcccag

SEQ ID NO: 270474 - DNA, 122 bp, Homo sapiens
acaggagatgtcccagtgaggctgaacagctcatggtgaaatcactgctgcactttgtcacgccacctccagctgccccgagcccccacccaccttgcaaaagtcatgaccaaggggtggaa

SEQ ID NO: 270475 - DNA, 122 bp, Homo sapiens
ttgtgcttgagtagaaagcaagcaatgatacatttctatctcagaacgtttttctggggtcggtcctaaaataaaaggtgagttcctgaatgatgggactaaagaggagagacggaacaata

SEQ ID NO: 270476 - DNA, 122 bp, Homo sapiens
agccccactcccacggcggggcagccaccccatagagtgactccagtgcacacgtgggcacgaggccctccaggatgggctgtaggaaggggcaaaagccgtgtccccacgcacgtatccgg

SEQ ID NO: 270477 - DNA, 122 bp, Homo sapiens
aacagcaaatcccaaagccttaacagctgttgatatggagaccatttaaaaacgtgtgttcgtaacccaagtaatagatgtccactgtagaaacacaggaaaatatagataagaagaattaa

SEQ ID NO: 270478 - DNA, 122 bp, Homo sapiens
cccagggtaaactggtcctctgaaattagtgtctcaagttatacaggggcatcagctaagcgtttagcctttcttgtctgcttagacatgaagtttctagaaagagagggcaatgtggcagg

SEQ ID NO: 270479 - DNA, 122 bp, Homo sapiens
cacaggttagcggcagacttgatcccgagtctcctaactggcaacccaagactctatccccggaactggcaagaatcttcctgaactaccccgataaaattttgagtgccaaagaaagtccc

SEQ ID NO: 270480 - DNA, 122 bp, Homo sapiens
ccagcttgtcctaaccgctttcgctgcgggcagcgctggccacgcggcccccgccgccggcggttctccgtggccaagcatccttggccttggagcccaggggctgcgttccccttggggcc

SEQ ID NO: 270481 - DNA, 122 bp, Homo sapiens
cccccttttaaaatcagccactctgcagcgctttaggccggttttcatgcctgcagactgcgagcgtgctggtgggggtgtatccctcctcagcaggtgaggaaaccgaggcacagcctttt

SEQ ID NO: 270482 - DNA, 122 bp, Homo sapiens
gggccgcctgggctcctgggtgcgggtgccggagggcgggagagaccgcaggtccggagacggggtgctgagctgggtacccaactgtgtattcctaggctctttcagacgcttccatttaa

SEQ ID NO: 270483 - DNA, 122 bp, Homo sapiens
ttgctgaaagacaggctaatgttatttacagcggccccagtgaggggccggacgaaggttcggactggaaatgtgcttggctctccctgaggacaatttctctgaggaacggggtactatag

SEQ ID NO: 270484 - DNA, 122 bp, Homo sapiens
ggtatgtctgtaatacaaatgaaacaggcatttgggggagaaaaaaccttttgccttactcgagagaggagccattccagaggcttgcctgcacggaagtctgtggctctagctgcatttca

SEQ ID NO: 270485 - DNA, 122 bp, Homo sapiens
tagctgttggcatcattaataccactaatattaactttccagcccctgccaggcatttgacggttgtcacttctggtcccacaatgaccgtgcagaagtacatactgtcatctccatgctgc

SEQ ID NO: 270486 - DNA, 122 bp, Homo sapiens
tgtctcagacttacatctgacccagcagtgccgcactgacctgattttactgaaagaagacgccgtctacaagacaaatcactttcaaaccactgcactggggtttccatttctttgctgca

SEQ ID NO: 270487 - DNA, 122 bp, Homo sapiens
tatgataggaaatctctgaaaaggaacagacgttgagtcccagtctttcggcccaaggttcgcgcgtgcgcacagccccctttccgagacttatttcgcgcggtcggagaatcagattgtgc

SEQ ID NO: 270488 - DNA, 122 bp, Homo sapiens
ccctcccctgcccttggggatgcatttgagtttgcaagggggtggttgagccgagcggcccgccgagaacttgaggacagggctccacaggcctcatgcagccactcggggcctccacgcct

SEQ ID NO: 270489 - DNA, 122 bp, Homo sapiens
atatttcagtagctcgagcacagcgcagggcagtgtaatggagccagcctgctgatgtaacgtgcggggtccaccctcagcgattgaggtcagtcagaaaatggcagtgttttcccatttca

SEQ ID NO: 270490 - DNA, 122 bp, Homo sapiens
ctcacataaaaggtgccatttaaacgctgaaactggcaactggaacaacacaaaagtgaacgaccaagaactaggctatctgccgtacacgggtccatttgcctggctcactacggacagtc

SEQ ID NO: 270491 - DNA, 122 bp, Homo sapiens
actggggaaggaaaaaagaactcctttgccatactcctgctctctggaaaactgctcagacgcaaggggtaaagaagcaaagaggtgacaaaaagagacctgcattcagagagatcagctgt

SEQ ID NO: 270492 - DNA, 122 bp, Homo sapiens
ggtgctgtaagaattcatcacaatctttgggaatcattcaatctttcaacacgtatttatcgagagtctactaaatgctaggaactgggaatagtgtagagaacaaaacagaccccattcct

SEQ ID NO: 270493 - DNA, 122 bp, Homo sapiens
atggtggaggtggggcagcggctggggcgggtcctgcatgcttcacccgcagcacgcggccgggcttgacctctacaaaggtgtagccatcgctggactcgacgctctccagtggccccacg

SEQ ID NO: 270494 - DNA, 122 bp, Homo sapiens
aggagtctcgagccagggagtgcagatgctcctgggatctggggaaggtcaggaaacagacgctcccttagagcctccagacggaacttagccctactcgcgccatgatcaagtgtctgacc

SEQ ID NO: 270495 - DNA, 122 bp, Homo sapiens
gccttgcagggaacaacaagaacaacaacagaaaagagtagaaaaagaaattgaacttaccgcggggtgctgaaggtggaccagctgaaaaacagagaggtatcttagcaactgttttttct

SEQ ID NO: 270496 - DNA, 122 bp, Homo sapiens
tatgagaaaattagaaccatgttaacagggcagaaaatccgggtgaagggtgcagtggggcgtggccctcattgcccagtggcgaacatcctcaagccccctgctagaaaagcaagtctgac

SEQ ID NO: 270497 - DNA, 122 bp, Homo sapiens
gggcctgctgggcacagctgagcgctttctggaagcacggggccagcagctcgtaggcatcgccggcctcctcgcgggacagtgcaatgttcagccaggtcttggcctcctggagcaggagg

SEQ ID NO: 270498 - DNA, 122 bp, Homo sapiens
gtcctgcgtctctgtctccacttctgtctcttctgtctctgttttgtttctccttcccaccgctgagctgcaccttcccctcccctgggtttatgtcacccggccccacactcgagtcccgt

SEQ ID NO: 270499 - DNA, 122 bp, Homo sapiens
gcccacgacaggaccagtgctgtcacctggagaccgggcgctgacggcgggaactgcagccgccactctcgtgggggtcttgtgctttggtgcccgtcagggcccagtgaagatgcggaaat

SEQ ID NO: 270500 - DNA, 122 bp, Homo sapiens
cgtggttgatgcaacctgcaggctgctcttttgggctcactgccctggtggtgactctcccgcatagagaccttaccttctgtggctccctcttccccactcaggaaaatccccttcccctc

SEQ ID NO: 270501 - DNA, 122 bp, Homo sapiens
atggtcctcagaacccggccgcgcggccccacgtgcaccgcgtgcatggtccctcgaggacgcgcatctgcagcccccgctccccgcaaacctccaggccggagagctccggccaaggccgc

SEQ ID NO: 270502 - DNA, 122 bp, Homo sapiens
gaggccacgggcttgaaagctttccctgcatggaggccactggatgggattctagatgctcgcctgggacccagggtgagttttttacaaacaccgaagccctccagcccccggggctgttc

SEQ ID NO: 270503 - DNA, 122 bp, Homo sapiens
ccactttgggagtctgggtccccgggaaggaaggcctccctattggtgctcaacgtgttacgtcacttccgctacctccacggcaggcgtcgctaaatgacgttgccgtttccgggtcaccc

SEQ ID NO: 270504 - DNA, 122 bp, Homo sapiens
cttgctgacctcaaattctggggttcaagcaatcctcccacctcaacccacaagtagctacgactgcaagcacctgccaccataaagggctgcattttgccaccataaagggctgcattttt

SEQ ID NO: 270505 - DNA, 122 bp, Homo sapiens
ttccattcaagaggggaggagccctgatgacttaaccacctcttaaaggtccctcttggccgggtgcagtggctcacgcctgtaatcccagcactctgggaggccgagacagtcagatcatg

SEQ ID NO: 270506 - DNA, 122 bp, Homo sapiens
gagataagtgggcttttatgtaccttccttgttaaagaggttaataatagtaggcacctgcggagatgtcacagggagtgacacataataaatggaaggtgaacgtggtacaggcacatgca

SEQ ID NO: 270507 - DNA, 122 bp, Homo sapiens
gcacggtggggtagcgcttcttcaacgtgggccccaggaggcaactagcctcctcctcctcggcctcccgtggccgaggctccctgttggcctgactgaagtgctggtcctgcagagtccct

SEQ ID NO: 270508 - DNA, 122 bp, Homo sapiens
gaaggatggacgcagccccaacaaatgggacaaggaccatatccggtggcccatgagtggcgttcatgatcttcagcaagcggcactaggccctggcagggcgcaccagggtcaccccaacc

SEQ ID NO: 270509 - DNA, 122 bp, Homo sapiens
cacgatttcagaccgctggtggcggctgagctcaggtgggcctcacctggagagcctggacggtgtcagaggtgcttcttggctggtggctgaggcttcccagatgcctctttgcctttctt

SEQ ID NO: 270510 - DNA, 122 bp, Homo sapiens
acacagctgctttgggtatcggtgacagcactcctgagtgtccctgtccctcttagctcccgttgccagctccggttccgtgcagcctctccggcttcgcccctggaagccacgcccagggc

SEQ ID NO: 270511 - DNA, 122 bp, Homo sapiens
gagatgagtaagtgactcatgattcacattaaaacttctttttcctccagaagtaaacaacgttcagaactgtgatatactcaaatgtgtgctctataaatattgctaggtttcaaccatca

SEQ ID NO: 270512 - DNA, 122 bp, Homo sapiens
gtggggcggctgcctgagggatggctgagctggaggctcaaggggggctggccaggacgccgcccagggcaaagaaagtaagtggcccgaacggcggcggcggcagcggcggcctcagcagc

SEQ ID NO: 270513 - DNA, 122 bp, Homo sapiens
ccgggttccgggactgacaagcaggtgacagaggagccggcgcgcgtggctgcaagtgtccgggagagcgcggcgcgggctgcagccgccccggcccgcccgcacgacgccggggcccgggg

SEQ ID NO: 270514 - DNA, 122 bp, Homo sapiens
tctattctgacactgaaaatttcagtgctttagggtgctaaaaggaaaaaagagggtttgcgaggaatcctgcagttgctgagggggtaccctgataagggaattttaagcaattacagtaa

SEQ ID NO: 270515 - DNA, 122 bp, Homo sapiens
cgggtggcttcttcctcaacgcctgcctagcgccagggtccacgggtgagttcatggccacggcccgggtactccgcagcctgcccttagcagcccacgccacagttcattcacactaggta

SEQ ID NO: 270516 - DNA, 122 bp, Homo sapiens
tccggaccatccctgcttggactgaaagcctgggcttcggcggggcgggcgggcagagggcggagggcggccccaggaggggcctggcagcagagaaaggtggcccgcggcagccccgcccc

SEQ ID NO: 270517 - DNA, 122 bp, Homo sapiens
gcagggggtcccccggagagaagttgtgagggtggctttcccagtcctgcttctgattcccgggaaggcgcacgctgaggactagagtggggtctccctgctgtggttgttgcctttcaggg

SEQ ID NO: 270518 - DNA, 122 bp, Homo sapiens
cccgccacgccggagcacccccgcagggggttcccatgcggcccgagcctccccaaggggcgccgcctactgctccgcggcgcccggtcccattgaccacccagcggctcaggagtgcaggc

SEQ ID NO: 270519 - DNA, 122 bp, Homo sapiens
aaataacaaaaaagtcgccctcttcccttactttaccgaaaggagcacgaagaacaggcacggagcccaaggaatgcccaagtccctccaggggtttcctcggtcacggtccgccggcgcag

SEQ ID NO: 270520 - DNA, 122 bp, Homo sapiens
tttccgtggtgtagtggttatcacattcgccttacacgcgaaaggtcctcgggtcgaaaccgagcggaaacaacttgcaatttttcggggtgtttctgttttccaagattcccttagctgac

SEQ ID NO: 270521 - DNA, 122 bp, Homo sapiens
aacaaaccaaaaaacataaagatttatctcaagttttagccagacaactaattctggctccgatatttagtaatgtcagtactctccagtttttattatagtcatgtgctgagtaaaatttc

SEQ ID NO: 270522 - DNA, 122 bp, Homo sapiens
aacatgcccacagaccttagacacgtaacacttggcaagggcagagcagccaccaggggccgcccaccacaagcaaagggaatggttttcctgagtgcctcagagagatctgccccagccct

SEQ ID NO: 270523 - DNA, 122 bp, Homo sapiens
ggtccacagctggcacagtggtatgaggacaatgactcattctgggtaaacgtcaagagacgaagcagctacaaagagccaggctcctggaaaattaggcaaggtacgctttggacagaaac

SEQ ID NO: 270524 - DNA, 122 bp, Homo sapiens
attcgtcttgtgtctcctctgcagctggagctctcaaacactgctgtcctgcaccagatgcggcgggaccaggtgacagacacgtgccgagccaacagcgccacaagccgtaagcggagggt

SEQ ID NO: 270525 - DNA, 122 bp, Homo sapiens
gccagggggcctctgacgtggagggggcttctgtgctacttggaaggtttaagtgtgtcccgaggacactcccgcagagcggcggggcggacggggccgggccgtccacaccgcggctccag

SEQ ID NO: 270526 - DNA, 122 bp, Homo sapiens
gatccttgaatcggaggccgtgcctctcatcgtggcctcccgacctagcctggtggagagcgccccctgccggtagatcctggcccggcacactgagagcggcaggccccgccggaggggcc

SEQ ID NO: 270527 - DNA, 122 bp, Homo sapiens
gaaatcggcggcctccgattggcggagcctcagtccttcttgatgcgcgctgggattggccgaaccgttaggccaagcgaggaaatggcggcggagttcggtgggctgggaggtgtcgcagc

SEQ ID NO: 270528 - DNA, 122 bp, Homo sapiens
tctaaacgtggacagtctttttcccatgttcaccctaggctgcaggggacagcgctggaccgtacagacctgcctaacatgccagcgcagccaacgcttcctcaatgatcccgggcatttac

SEQ ID NO: 270529 - DNA, 122 bp, Homo sapiens
gtcagacagatgtgaaacgtgccaagcccagccctaaattgagctttctaaacaccgagtcgcggtcaggctttccagcactgtcctcaagcctgagtgcgtccggagtgcaaactacaagc

SEQ ID NO: 270530 - DNA, 122 bp, Homo sapiens
gagggtccctgggctcccccaggtcagggcagaggtcctgaccccagtctagctctttagcgggggccaggcccgagatggccagctccgtttcccctgcgtggcctggcagcccctccagg

SEQ ID NO: 270531 - DNA, 122 bp, Homo sapiens
ggtgggctcaggatctgtcccatcacgagttggaacctcagctctgccactcggcaaccgcgagccgttagtaagttgctgaatctctccgtgtgcctccgtttcctcacctggaatgtggg

SEQ ID NO: 270532 - DNA, 122 bp, Homo sapiens
tcctcctcctccttcttctcactctctctctttctctctcttcccccccaccacatgtaacgctatggctcacgcctgtaatcgcaacactttcggaaaccgacgcggtaggatagcttgag

SEQ ID NO: 270533 - DNA, 122 bp, Homo sapiens
caaacaaactccttaaggccaggacaacactcccaatccctctgctctcctctcttcccccgctcatatcgtattgtaattgtccatcttggagtttctcagtctctgcactatagacattt

SEQ ID NO: 270534 - DNA, 122 bp, Homo sapiens
caaaggagatatgcttagtttgcaagtttattggggaggttgacaagcggccagattactcgatagtatgggacaagtggaggcaaggtagtgtagatgttaacagctgccggagctttgga

SEQ ID NO: 270535 - DNA, 122 bp, Homo sapiens
tgaccaagtcctagcgggtagtacgcaccacagtaaaacaccacgggggccgctgggcaccgccgagcgccaggctggtgaactgacccgcagcgcaccccatctgtgtgggaaggtcgggg

SEQ ID NO: 270536 - DNA, 122 bp, Homo sapiens
aagccagcgaatttattccttaaaaccagaaactgaacctcggcacgggaaaggagtccgcggaggagcaaaaccacagcagagcaagaagagcttcagagagcagccttcccggagcacca

SEQ ID NO: 270537 - DNA, 122 bp, Homo sapiens
gggcctgtcctggagctgcggcgcggcaatggcgtaggcccctttcgagaatcaagccagcgctccacgtggcgggccagcccaccaggccccggcagcctggaagaggcgggactcgagtt

SEQ ID NO: 270538 - DNA, 122 bp, Homo sapiens
gaacctatcagaaggaagaaactccgaacacatccgaacgtcaggaacaaactccggccacgccgcctttaagaactgtagaactcgctacagcactcaccgtgaaggtctgcgatttcatt

SEQ ID NO: 270539 - DNA, 122 bp, Homo sapiens
tggagccctccccaacccgggcgttccccagcgaggcttccttcccatcctcctgaccaccggggcttttcgtgagctcgtctctgatctcgcgcaagagtgacacacaggtgttcaaagac

SEQ ID NO: 270540 - DNA, 122 bp, Homo sapiens
gccggagaccaggcctcaccgcagcctcgccacccgtggccgagctcccggcttcccgttcgtccaggccagccgggcaggccccgccccctggtcctccaggaaacgctgccgaggagtag

SEQ ID NO: 270541 - DNA, 122 bp, Homo sapiens
atattgctggggacacagtggggccttgccaacagtgattcctctttgttaggatctttgcgtgtagtcaaaacagggccccatctcctcattactcccccaggtgtctacctcttcccacc

SEQ ID NO: 270542 - DNA, 122 bp, Homo sapiens
aaaattatttcactgatgttttgctaaactaaacccctggtagcaatacagatgtagtaccgacctccatggctatggcataggttcttcttaagctgagtagttcctgcactgccgtgtgc

SEQ ID NO: 270543 - DNA, 122 bp, Homo sapiens
atgagctgcgtatgaggtaagtaagccgtccggaggggcgggggtggggatgcatgggggcgtggcccatgtcctctgtccagaagtcatgtccccatttttggcatctctgattgggcagg

SEQ ID NO: 270544 - DNA, 122 bp, Homo sapiens
agggctctgatgccctcctcccttcgcctcctcagttgaagaagctggatctggcagctgcggcagcacacaccttctttgtagcaaaccccatgcacctgcagatgcgggaggacatggct

SEQ ID NO: 270545 - DNA, 122 bp, Homo sapiens
tctaataagcaatgtctttaggggagaaagtcgaagtgagcaaagagaagagaatgaatgcgtgatagtagctgctagaatatattagttgcagacaaatttcagtgagagtgtcagtcacc

SEQ ID NO: 270546 - DNA, 122 bp, Homo sapiens
gcaagggagaccgagggacccaatctccagcagggacaatggagaagcctccgtagagcgcgtggtgaaggcatggaggcccccagtcgctgtccccccacggctccgtccgagcccctcac

SEQ ID NO: 270547 - DNA, 122 bp, Homo sapiens
ctctacagggactggtgctggagttattagatgaacacctgccagtgacctcaaatagatcgtattctaatgaaagagattagcaacacagacctataattgaatgggtatagtagtgtaat

SEQ ID NO: 270548 - DNA, 122 bp, Homo sapiens
cacccaaaaaaacgggtgacccaaaacccgcccactggggctgccctttcctttacacctcgaggccgcctggtgggaggaagtccattcccatcttgacacaaacagaaggaaacaaaagc

SEQ ID NO: 270549 - DNA, 122 bp, Homo sapiens
tgcgccgctcggcccgagccccgcccccgcctcccccgccccgcctcccgccctccgccccgagccccaccccccgaaggccgcgccccaccgcacctccgcgcacggccaatggcgtgagc

SEQ ID NO: 270550 - DNA, 122 bp, Homo sapiens
gggcgtgtcttctcccggaaatggtctaagccccagctcctggcggagcgagctagcctgcgaatttcagcatgagtgtactgctgaggtcaggtttggggccgttgtgtgccgtggcgcgc

SEQ ID NO: 270551 - DNA, 122 bp, Homo sapiens
acatgcagagatgaggcaggctcatgtcttgaataaaaacccgccaatgattctcatatacgccttaaggcccaaattaattttcttttttctttcttttcttttctttttttttgagacag

SEQ ID NO: 270552 - DNA, 122 bp, Homo sapiens
cctgtagaatggacttgggagccagactcagggaattatttgggttcatagagtaaggctcgactctggggctctaggaaatcagcgtaactggtggtaacctgaaaggtattgacggtccc

SEQ ID NO: 270553 - DNA, 122 bp, Homo sapiens
tgcaaagggtgtccctccccacgccagcctgagtgcaggggacactctgacccacggccccgggcggtgctcaaggccactgtcgcctctgcccacctgtatgtgatccactcagcattcac

SEQ ID NO: 270554 - DNA, 122 bp, Homo sapiens
tggtttccaggcacattaggtggaaatccctctctgagcctgagtttcctcatcctgctccgcaccccagaatcaatcactcctctgaaaactagggcacggtcaggctgtctaggatgaga

SEQ ID NO: 270555 - DNA, 122 bp, Homo sapiens
ctaccttcctgcagcctcggcccgcggggtggggggttgggagagatgaaaggaggtgaccgatcccgaaccatcgcctctccattaaccagggcccgcagccccgcccctcccccagacat

SEQ ID NO: 270556 - DNA, 122 bp, Homo sapiens
caagggatggcaggtctcaactccaagtgcggttctgccgaccctaccagcctactgcagcgggagaaggacgtgggtgccagtagcttccatgagagcttgtttgagccaggacggcaggt

SEQ ID NO: 270557 - DNA, 122 bp, Homo sapiens
gctccccttgccgcccagaagggtcctggggatcccgggtcgggcgggaggcaggggaggcgccgagcccggagttcaccactctattgcgggtgttcatggttcacagcccgcgggtcccg

SEQ ID NO: 270558 - DNA, 122 bp, Homo sapiens
acatgtggccaactgcctttccacagaggagccaagccaaccggaaggagggctcctcggcgcatcgtgccgcagcgacctgccatcccgggaaagggtgggccaccaccccagcctcacac

SEQ ID NO: 270559 - DNA, 122 bp, Homo sapiens
actgaaatctctgtggcctagaccaaggatctcaccccaccgagccccagtttccttatccgggaaatacctcacagatggggttactataaggcagcactctctggagaaggacccacaaa

SEQ ID NO: 270560 - DNA, 122 bp, Homo sapiens
tgggcgcgctccctgcggatctgctcagcccgctcccgcccttcctgtagaccttcctcacgttgcttcaggttctgctcctgctgaagcttgcgcagccgatcctcccgggccgcgcgctc

SEQ ID NO: 270561 - DNA, 122 bp, Homo sapiens
aaacaaaaccacaggaagaaacgaacaacgctttcgggtgggcccgggaccatagagggtcgctccgccactttcctagagcgaccgcggcggcgccagagcgcggcgaggccctcacttcc

SEQ ID NO: 270562 - DNA, 122 bp, Homo sapiens
tgacagtcaccactgggacaggcctgggccccaccctcaccacccaggaaaggggaaatgcggcccgctccccactcagtgccactctgtgccactccgtgccaggccctgagggcacccgg

SEQ ID NO: 270563 - DNA, 122 bp, Homo sapiens
cctgcgggagagcgagtgaggttctggccctccgagttgaccgcctgcaggtagaaatagcggaccggcaggacgacggccgcctgcagcccgggcccccacaccaggctccgcggcgcgct

SEQ ID NO: 270564 - DNA, 122 bp, Homo sapiens
ccctcccttcgtgggcgtgcggccagctgggtcggcagtgagcacccctgttctgcctcacgtgcctcttaggtccttgatcagaagaacaggactgcatgcctgggggtgggtgcagtctg

SEQ ID NO: 270565 - DNA, 122 bp, Homo sapiens
tattagagaaaattatttaacccccaaaacctggaactgtgacacttacaaatttacaaacgttttcttttttttttttttttttttttttgagacagagtctctttctgttgcccgagctg

SEQ ID NO: 270566 - DNA, 122 bp, Homo sapiens
gagagccgggggtggagtaggggcgtggagttgtgagcggggtctggcctcggccgggggcgaaggtagatcggcggggccgcgagcggagggagggaggcccgcggcggcgcggcggcagc

SEQ ID NO: 270567 - DNA, 122 bp, Homo sapiens
gacagattgagcgatgagacgcattacgcacttaatccgcctgattgaatgttttgctttcgcccaaattgaaacattaaacaacacgggacgagaagaggcggccgcaaatcactcatgaa

SEQ ID NO: 270568 - DNA, 122 bp, Homo sapiens
actgcccggaccctcccgctcccgagcctgcccgttagagcgcaaggaaaactcaccatccggcccccagtgcgtctcggaagagctcccgctccgaaacaaagctcacaacttccggaagc

SEQ ID NO: 270569 - DNA, 122 bp, Homo sapiens
tggggagagggagagcctcgagtgagaacttttgcctgcaggcttttctttgtcaaaagtcgtcttacttggagtgggggagggaaggacctgaaggttccagcatctaaattcgtctctgg

SEQ ID NO: 270570 - DNA, 122 bp, Homo sapiens
gtaggcccgccccgcgaacacctccagtgcggcccacatagtcagcggtctcttccaggtcggagtttgtctccccgaacccaggcgtcccaaagcagctgggggccgccattttgccgtac

SEQ ID NO: 270571 - DNA, 122 bp, Homo sapiens
tcttccaaatacactctggctccaccccaagaaaacacagctgagaggattcggcccttgcggtagaccagtttggcctggggagcgccaccttgaaaagcaaggtggtagtcctgggccct

SEQ ID NO: 270572 - DNA, 122 bp, Homo sapiens
cttactagcccaaggtcacactgctaataagtggcagaggcagaatttggacccagcattcgggctctgaaaacaataatgataactcccatattatactgccacacagataagaggaaaag

SEQ ID NO: 270573 - DNA, 122 bp, Homo sapiens
gctggaggcggggcatgcgcacgggcctgggcgagggcgctgggcggcggggaggtggggcgcgcgcgtgcggcttctctcagccgggagcggcgggggcgggcacgggcagcagcgggccg

SEQ ID NO: 270574 - DNA, 122 bp, Homo sapiens
tcatgagtcctggcccccttgcaggggttggggagctggggatcccagatctgcctattgcgcccgatgccccgaggctctctcttggactctggccctgagttcttctgcgcgatccttcg

SEQ ID NO: 270575 - DNA, 122 bp, Homo sapiens
ctgcgagtcaaacttgtagcgcctactggggaccagtggaaacgtgatggtcgccccctgcgggaccaggtgaataaagctccttaagatgcattcaactgagttccctgagcccattcaac

SEQ ID NO: 270576 - DNA, 122 bp, Homo sapiens
ctgcagcagaagtcgttttctgtgggcagcctccgcctgacggtcctccctggtgccattcgccactgagtcttcccagaccctctggggactgctccgcctcctcgtcaccaagacagtgt

SEQ ID NO: 270577 - DNA, 122 bp, Homo sapiens
cgggctgcgggcgctgggcaggatctgcgctggaggctcccgagcccagcgttgacactgcgccgcccgcagctctcccggcggcggctgctcacagtcctccgacgcgctcccgggtaccc

SEQ ID NO: 270578 - DNA, 122 bp, Homo sapiens
gggctgggggagccgggctgcaagtgccagctctggccagcagagggcgacgtcgtccaccgaatccacagcgtggcgcctcgtcgtccacaagtcctgggtctgggctctagccagatggg

SEQ ID NO: 270579 - DNA, 122 bp, Homo sapiens
gcctcgcccccttcagatactcctcactacaaatcggctctctcgggggattagtggctccgcgaaagtgcacacaagcgcggcgggcgggagggccaggggccgggcgcggcgggcactcc

SEQ ID NO: 270580 - DNA, 122 bp, Homo sapiens
ggttgcagcaggaagagagagacgtctggggggctttttgcctgttggaagggcatcactcgtccacagctggagcccctgggatgacccatcccaaggtcccagcctaagtctgaggttcc

SEQ ID NO: 270581 - DNA, 122 bp, Homo sapiens
gtctctgtagcagctattcatctctgcctttgttgcaagaaaggcaccatagacaaaatgcgaggaaatgggcacctgtttgccgaaagggaataaaacaaagcaagcctgtcaccgttgac

SEQ ID NO: 270582 - DNA, 122 bp, Homo sapiens
agtgagcagacctaagcctgcgcagctgcttcggaacggttcacggccgtctaagaaggccgatttctgccggcctttctgccaggggaggagaaaccccagacttcacagcgaacgttcca

SEQ ID NO: 270583 - DNA, 122 bp, Homo sapiens
tcagttcttgcctcctccgaagaaagaatttgaccgaggcacataagacagaggagagaccgaagcaaattttagagcaggagtgaaaacttactaaaaagttttagagcaagaacgaaagg

SEQ ID NO: 270584 - DNA, 122 bp, Homo sapiens
ccaaactttatcactgtgcaagtccataatttcaacgtgtaaatgcactgcactaggcaacgcaggtgatgtgaacaagggtgaatcacaggctttggcctccagaagtttacaaactagca

SEQ ID NO: 270585 - DNA, 122 bp, Homo sapiens
agagggcgggaggggagaggcttgacctgtgcactggggacgaggaaggcgcacaaccaccgtgactcctctctcccggcctcccgggcaccccctccccaccaggctgcaccccttttttt

SEQ ID NO: 270586 - DNA, 122 bp, Homo sapiens
ctagttttagttcctttttttgcttcactccattgtagcttaggaagctagtttcaattccggattctaccgtctatctgtatgactgggcctttggtcagtctttctaaaatgaagattgc

SEQ ID NO: 270587 - DNA, 122 bp, Homo sapiens
gagatggtcagtgctgtaaatagaaagggagttaagagcagactctgaagccagactgtccggaatgaatccaggctcctctagctactatctatgtgatgttgaaaaaatttcttaatttc

SEQ ID NO: 270588 - DNA, 122 bp, Homo sapiens
ggctctctggcgccatctagaggtctctgagtagcttgggaactccctctcctgcgcttgcggtttggtaacccaggctaccaagtgtcccagttcaacaggacctcctgccttcttcgcct

SEQ ID NO: 270589 - DNA, 122 bp, Homo sapiens
gatgtattatcatggaatctagtgtggggggtcctaatgctcacagcccccttttcaaaacgaaaacaagccacatacccctgaatagtagaatggtacttctaaagcagggcaccttggct

SEQ ID NO: 270590 - DNA, 122 bp, Homo sapiens
acacagtcggggagacgctctagcccgcgtggagctggcctgtcttctctggtcgcttcccgtcacagcagcagcaggcatggaaccagaccatagagctacgtggagtacaggggctgttt

SEQ ID NO: 270591 - DNA, 122 bp, Homo sapiens
gtgtggcccagcttgttcaggccctgggatgctgcatctccaggcaactatgcactttcccggggagagaaccagtatgagaagtgggggcagggcacacattcatctttgtaggaaggtct

SEQ ID NO: 270592 - DNA, 122 bp, Homo sapiens
gagagggagacagtgacgtgttcctaacttacttgattcctgaatccttctttcctggaacgttttatggaaattaataatgctacatctaacaagctttgagagatgttaaaatagctaca

SEQ ID NO: 270593 - DNA, 122 bp, Homo sapiens
acacgtgccaagaaggaaggacaagggagagagacaaagaagcatgattgtgacaagtgtcgatgaagaccaagaggcaagataaaaccaggatcaagggaaggaagccatccaaaggagga

SEQ ID NO: 270594 - DNA, 122 bp, Homo sapiens
ccctgcagagacctctgtccacccggctaggcctctttcaggaggttaaggggtgaccttcgcagaactctacaaaagccagggactctctcaccagaataatgctcagagaatttaggtat

SEQ ID NO: 270595 - DNA, 122 bp, Homo sapiens
cgctcagttttccctccccctgcgtgtccccagcgagctcgctaagggagacgtggcgagcgcaacggtggaactcggcgaggtctcgcccttagccccgccctaacgtcaaagccctcccc

SEQ ID NO: 270596 - DNA, 122 bp, Homo sapiens
ggacagacccaggagcttggagcgcgaaatgaaacgcgctaaattgtacctgtgcgtggccgttcccgccgccgccgcaggtctatcccggggccgaagccggcgcccgccttctcggggaa

SEQ ID NO: 270597 - DNA, 122 bp, Homo sapiens
cgaccgtatggggtgacggcggtgatgcccactgtatggggtgacggtggtgatgccgaccgtatggggtgacttcggtgatgccgactgcatggggtgaccaaggtgatgctgactgcatg

SEQ ID NO: 270598 - DNA, 122 bp, Homo sapiens
ctgctggccagcggggcactgaggaccacgctgctccgtgtgaataaatgcccagtggcacgcctgtgtcctgtctctctgttctggccaccagagcccctgcgtcgcccccggcagtcctg

SEQ ID NO: 270599 - DNA, 122 bp, Homo sapiens
cctttctccggtgcagccacactgggcatcccaccccagggatccaggaagggggcgtgtcggccgagtgcgagcccgtttctgaacaccctgtgaagttggtgagaattcaggtgcctatc

SEQ ID NO: 270600 - DNA, 122 bp, Homo sapiens
tcgggttgacagcggcagtcaccgcatcgagacggggtccgggaagggacaatcgccggccgagccccagcgacctcataggcgaggctgcccacgtgaccctgcctgtcacagaggcagcg

SEQ ID NO: 270601 - DNA, 122 bp, Homo sapiens
ggacaaacgcctgtcacagcgtggcagcctggttcatttgataacacaagtctcacacgtcggctgagcccactggagagaagcacacaggccagcttccttctgaacacagccgggcacgt

SEQ ID NO: 270602 - DNA, 122 bp, Homo sapiens
gctgtgaggcgagagagagagagagattcaccttgcagagttctacggcgcggcacggagcggccattccataagcatcgttgccgtagctgtaatatgttatcactataacgtatatctat

SEQ ID NO: 270603 - DNA, 122 bp, Homo sapiens
agatgttgacacacaacggtaaaaccttgtggtcatcaccacaagaaaatcatgtataaacgattatgaggacaaagctaaatatttttcaaatataatcttcaaaatcttaaatataccta

SEQ ID NO: 270604 - DNA, 122 bp, Homo sapiens
aaaaacaaaacacacacaaatgccacagaactgaagcaccgtgaaatggctacaagacctcgccactcccaaaggaaatgggacgtcgaggagtcactcacccgggcacacagaagcatcgc

SEQ ID NO: 270605 - DNA, 122 bp, Homo sapiens
ctgtgagagtccctgcagcacaggacctcagcttaagtgaggtgccgcacaggatgctcccggcaccgccaggcctgctggactcccagttctcagcaaattcctgccgcttctcaccccga

SEQ ID NO: 270606 - DNA, 122 bp, Homo sapiens
atcaaagcaggaagaaggggaggccttttctgcctatgactccaacttccctgcatgccacgtctttgcaggcctgcagtgaggttaggatgtaaacgactttcttttctttcccatcccaa

SEQ ID NO: 270607 - DNA, 122 bp, Homo sapiens
tggcctaggtaacggggcagagatgtggttcgagattctccccggactctccgtcatgggcgtgtgcttgttgattccaggactggctactgcgtacatccacaggttcactaacgggggca

SEQ ID NO: 270608 - DNA, 122 bp, Homo sapiens
gctatggtagccaatcagaaaaagaacctggcactcctaatttgcgtattcctttcccagcgatgacgtagaacaacgtttgatccaatcagaagtgagcaaatcctgagccttcatttgaa

SEQ ID NO: 270609 - DNA, 122 bp, Homo sapiens
agctatgcggagatgcagtttctcacatatcagactggcagagattcaaaagcgcgactgcggtggaggaggccgtgggaaactggctccctcagacactaggagggaaactgtccttcacc

SEQ ID NO: 270610 - DNA, 122 bp, Homo sapiens
catgtgcagacagacacccaggtccaccgaccatgctaggcaagaggggtgcggtcagagcgctggtctctgccttgggaacacaaatcctcccagcacagtgagggaacatccccggaggg

SEQ ID NO: 270611 - DNA, 122 bp, Homo sapiens
cagggaacaagaagaaagaggcatggatcttccagaacccatgatggtttgcaatcgccccgacctgtgagtttgttccccccgtgagactctaagctccctgaggcacagactgtatccac

SEQ ID NO: 270612 - DNA, 122 bp, Homo sapiens
agggtacgtgggggcgcgtcgaccaatggcagggcgctgttgagtgcagcggggcggggccgggcgcgggggtggggcgagcggcgggcggggcggggcggccggccggggggtgggaggag

SEQ ID NO: 270613 - DNA, 122 bp, Homo sapiens
tgcagaggccggaaaaggcccgctcgcccgcgctcggcaccacccagcccgcgctccgggcgataccaccctgggcggcccctccaaaggccggagatggtgtcgtccccggcctccgattg

SEQ ID NO: 270614 - DNA, 122 bp, Homo sapiens
aaacgtgctgtgctctggtctctcccatgtgggaataaatccatccgatcacctgcaaagcgttgccttcgcatcctggccctcctccttcccgactccacggagacggtgtccttccaggt

SEQ ID NO: 270615 - DNA, 122 bp, Homo sapiens
catgataccacctgctctcggttgttcatgagctggcacagtggaaagagctctcctcagcgggctggagcatctcttgtacgcccagaggtgtgggtgagctgttctgtggcacaattgtc

SEQ ID NO: 270616 - DNA, 122 bp, Homo sapiens
aggatgatatttttaaccatttgctgggactaaccaaatcatctctcctaatttttgctacgaaaaaatggctactatgtttcacaaattgttcttaccctcatcttccaacataaattctc

SEQ ID NO: 270617 - DNA, 122 bp, Homo sapiens
ccctctgggtgcttcttctctagggacgccggaagaccttgctgaaggctgcagccaagacgaccagacccccagccaatcctacattgacgacagtactttaaggcctgcacagaccgtta

SEQ ID NO: 270618 - DNA, 122 bp, Homo sapiens
gctggagtccaaccccggaagtagcaagtgcctctcccacagctgagggccagaacaccacgttctcttgtgctctggctctaggccactcttctctgggctcttgagaagagctgctgcag

SEQ ID NO: 270619 - DNA, 122 bp, Homo sapiens
gattttttttttttttcctggtgcggaaaggcctggtggtctctgggactctccagttatcgagcgttcccaccctacagcgtccgcccaggcgcaggcctgcccctagttcaggagtgaac

SEQ ID NO: 270620 - DNA, 122 bp, Homo sapiens
acccgtgcgcctgcgagccgggccacccgcgccccgccgcgcgctgggccgcgctggccgcgctctccctggcagtgccctgcctctgctgctacgcgcccctgcgcgcgtgccactgggtc

SEQ ID NO: 270621 - DNA, 122 bp, Homo sapiens
ctctcgtgcagccagttcaggttggtcagctcttcatcttccatggccccctcttctaatcggatgtcaggcagagaaaagtcgaggtcatcgtcttcctgaagggccttggagaaaccgct

SEQ ID NO: 270622 - DNA, 122 bp, Homo sapiens
agggaggctctggaggcgcgagcctctgcctcatggttcccgccaagtgcactgcgccagcgcagatcccttcagcctcaaggttggccctcctgacttctggcaagcacgtgctggccaga

SEQ ID NO: 270623 - DNA, 122 bp, Homo sapiens
cgccggtctcctctcctcaggcctcgggctgctgctgcctctgtcgccccctgggtcccacgccgccaaccccgcgctgtcaccgcgcgccccgcactcccactaccggccccgcccccggt

SEQ ID NO: 270624 - DNA, 122 bp, Homo sapiens
cctcctagggtgtcctcctagggtgtcccggacgctactcacagtacctcttggcaaggacgagatgagaaggagctgaagaaaagtgagccccaactgcgtccagcaacccagctccatcc

SEQ ID NO: 270625 - DNA, 122 bp, Homo sapiens
agggtatatattgaccttggcttgtctggagcggagggcgtaagctgcacttctgtttgccgcgctgaatgcggtcactttacaggtaagctgctcgggggtacacgtttaggttattaaaa

SEQ ID NO: 270626 - DNA, 122 bp, Homo sapiens
gtgcaggacctcagccgtgctgccccatgggaggatccagggagccgagcacaagatcagcgattacccaggtcacagtcccaggatgcacagagcccgcgtgtggcactaggagcgagccc

SEQ ID NO: 270627 - DNA, 122 bp, Homo sapiens
acctccaccatcactaaagcgtaaaggtagatgttgaaaggaagaagtcccagctttcctcgcagtgggctcgctgtgcaagtccaagagagcagatagttctggcaaggctcattctggga

SEQ ID NO: 270628 - DNA, 122 bp, Homo sapiens
aaaatttgatcatgatattgtatagtctctcaaagtactctaaaaattgtcagtggtggccgggcgtggtggctcacgcctgtaatcctagcactttgggaggccgaggcgggtggatcact

SEQ ID NO: 270629 - DNA, 122 bp, Homo sapiens
atgaggttaaaagaatagatacaggtgagcgcttagcaccaagctgagccatagaaaacacgcagactccacaggacattcttctctctgcaggctctgatgcaaggtggcgactgtggcat

SEQ ID NO: 270630 - DNA, 122 bp, Homo sapiens
ctcagtaacaaagtgttacaaaggacacataggatttgggcttgcattaggtgatttggacgagggcttaagaaaatggggttttctggattggatgctgcctatgagtgagtaccttgata

SEQ ID NO: 270631 - DNA, 122 bp, Homo sapiens
atagccggtgagttttccttggcactagcaagtgggatcattaactgtctccatttggttcggatgtagaattattaaacctgtggttctggtcttgagagccaatgcctggcaggtgactg

SEQ ID NO: 270632 - DNA, 122 bp, Homo sapiens
ctggggacggtgggggcagagaggtgggccgggtgactgcctgttgggagcaggggccaccgtggggacggaggttctcatcgtcacacagggccagacctctctgccaccacacatcttcc

SEQ ID NO: 270633 - DNA, 122 bp, Homo sapiens
cacgtacccagagcttggaggaggcgcgccgggggagtgttgtgctggggattcccaggccggctcctgcttctcgcctgatgaatgtggagttccttcagccatccctcggatcctcttaa

SEQ ID NO: 270634 - DNA, 122 bp, Homo sapiens
cttcacagcctttgctttggcttcggcttgaggaggggcaggagcttccttctttgctttcggtgccatcttgtgaaaagggctctgcagcttttaatgtgtacagtttccatgatatgatt

SEQ ID NO: 270635 - DNA, 122 bp, Homo sapiens
aggcccagcagtgcctggagggcatgtggagtgtctcgcgggtcaacagcttcctcccgccggcgtgcctggtgagtgtcttgctcagcggatgggagctgctggcctccttgtcagaactg

SEQ ID NO: 270636 - DNA, 122 bp, Homo sapiens
ctctatgttaagtacaagctaaatcttttgcacttatcgtatcatcttatttaatcatcacgacaaccttatgaggtaaaatactttttaccgttttacaaatgacgaaacagatttagagg

SEQ ID NO: 270637 - DNA, 122 bp, Homo sapiens
ttggtttagccgtttcccctccctggaggacgggggctccagcatattcatgatgtcaatcgccttggactacatgccagcgtcattgcgaacctgctacactttacaaaatagctttccaa

SEQ ID NO: 270638 - DNA, 122 bp, Homo sapiens
cctccccgagtcccgcccccgaggccccacccccgcggctgacactccaggcccgcccctcgaggccccgcccccacagcgcaacacactgggcccgccctcaaggtccccgccttggctga

SEQ ID NO: 270639 - DNA, 122 bp, Homo sapiens
taggagcggcaggggtctcggaactgggcctcctcggagaactcgccgacatccaccaggcgaagcaggtctcggttcagcttattcacctggtttgtgatgttggtgtccagggacagcac

SEQ ID NO: 270640 - DNA, 122 bp, Homo sapiens
gtcacaggtaggtacttggtaatgttaacacccatgctgccgctgctgttgctgctgttacgttgggtagagcaaggctggaacggccacatgacctgtatttggggctttggaggcagaaa

SEQ ID NO: 270641 - DNA, 122 bp, Homo sapiens
atcctgctgccgtccgtgttcattctccagcagaagccacacctcactctccccttagagcgagggagagatatgctcaattaagctgggggcaaatggcgtctgcacagccagatccaggg

SEQ ID NO: 270642 - DNA, 122 bp, Homo sapiens
tctccgtagccttcatgtgctggaacatgatgcaggtgctcatgaaaagccagaagggctcgctggccgggggcacgcggcctccgcagctgaggaagtccgagagcgaagagagcaggacc

SEQ ID NO: 270643 - DNA, 122 bp, Homo sapiens
cctctcccgatgctctgtgactactcaactaagggactggaagacaaaccaaagcaaaatcgaacacatgctgactgtcggtgggaaaagcagcaacagggatatgcaacagaaaacatata

SEQ ID NO: 270644 - DNA, 122 bp, Homo sapiens
tgagctactgcgccctacctataattgttttttaaattataaaaacaatatgtgatcactcgagggaaaaatgagccaaaacaaaaaaaggaaacatttaattaaatcaccctgaacttcag

SEQ ID NO: 270645 - DNA, 122 bp, Homo sapiens
acggtggggagtttggattttacctccactgctgaagagggtttatttttttggggggtgcgtgggggttgtttttgtttttgagacatatcttgctctgtcgcccaggccggagtgcagtg

SEQ ID NO: 270646 - DNA, 122 bp, Homo sapiens
gggaaatctgacctggagctgtgcctggtgggtggttatgagccaggaagccctggggcacgggattggaagccgtctgactttccagaaccctctcttgcgctcaatgctcctcaccgaga

SEQ ID NO: 270647 - DNA, 122 bp, Homo sapiens
gaacccggtccgactgcagcaaggacgccatcttggggagggaggaggcgatgacgctcccggcgcatcacgtgacccgagagccagcgtcttcctcgctgccttccctacgacttcctacg

SEQ ID NO: 270648 - DNA, 122 bp, Homo sapiens
atcgagcagcaggcgggggtgctggctggaggccaggcctcccatatttggggttcctggcggagggtgtcgggtgccccggagaagctgtcgccgggctctcccagttgtttgagctgctc

SEQ ID NO: 270649 - DNA, 122 bp, Homo sapiens
cagattatttggaatcacttggtgttgcaatgtcatgattaacttcaaacaagatgtgtgcgaaggagacacactctgccatgtaaacagtggttttctccaattcatttctttcctatttg

SEQ ID NO: 270650 - DNA, 122 bp, Homo sapiens
ggctccactggcttatgtccaggtcatcaaatgttccaagttctttccacccgctgggcccgtgcatgtattgcaccctctgaaacaatctttcagctactctttccacagctatctcctat

SEQ ID NO: 270651 - DNA, 122 bp, Homo sapiens
gctcagggcagtggccttgaggactccaagccgggatggtgctaggcctttcaagtcgcccgagagcaaagtggtatcaggatagcacagagcaaagaagataaagaaactcaagagcccat

SEQ ID NO: 270652 - DNA, 122 bp, Homo sapiens
gggtgcgcgtgctgcgatgcgatccggcaaatgcagctgacgaacccctggcctgatccacggtggctcccagtagaaggctctacagcccttggaaacggaacacgcagctccgtaaagcg

SEQ ID NO: 270653 - DNA, 122 bp, Homo sapiens
gtactgtgtcagaatgcaagctttcctctttgcattttggcatttgaaaactccgaagagcggtttttgttttttatttaaagaagatgatacatatgtgtacccgattcaaaactagagaa

SEQ ID NO: 270654 - DNA, 122 bp, Homo sapiens
tgtgttgagagggctgcagaaaggttttcaccaggtcaagactgcaaagtcacaggaccacgttctggatccagggctcgggcaggcttcacctggtgtcttcacacctctatccctaatgc

SEQ ID NO: 270655 - DNA, 122 bp, Homo sapiens
tcctcttgctgtcactctcctttcactcagtgtttgaagggctagctgtggggctgcagccgacagtagcagctaccgtgcagctctgccttgctgtcctggctcataaggggcttgtggtg

SEQ ID NO: 270656 - DNA, 122 bp, Homo sapiens
aagttataggattagttcaaaattgcatagctaggtagaagccctagagaaattcagaaccgagacagacaatgcatgatgtatttattaggatgccattggctacatgaaagagaaacttt

SEQ ID NO: 270657 - DNA, 122 bp, Homo sapiens
actgtatcccccgcatatgagggggacaactatcattctgaaattaaaacatggtaaggccgtgctcaagggacttgggagcaactggcgattttgactgctagttacacagagcaacgctg

SEQ ID NO: 270658 - DNA, 122 bp, Homo sapiens
acacacacacacttaggagatggaaggctaaaaactgtatttcctggacacccttgtgatcgggttgcggatgtgatgtagggtctgccagtgagaagcacatacaacagctggatggcagg

SEQ ID NO: 270659 - DNA, 122 bp, Homo sapiens
aacagcacggccatccaggagctgttcaagcgcatctccgagcagttctcagccatgttccggcgcaaggccttcctgcactggttcacgggtgagggcatggatgaaatggagttcaccga

SEQ ID NO: 270660 - DNA, 122 bp, Homo sapiens
cacagccgcggcccggccccgttctgagcttgcgcactagtgaccatcgggctttgggggcggagcccgcgcaagcactcaggccacgcccatggccaagcccacattccgccccatggaca

SEQ ID NO: 270661 - DNA, 122 bp, Homo sapiens
tggccccataccatcagtacaaattgctactaaaaacatcctcctttgcaagtgtatttacgtaatatttggaatcacagcttggtaagcatattgaagatcgttttcccaattttcttatt

SEQ ID NO: 270662 - DNA, 122 bp, Homo sapiens
ccgcgtttgcgtggcacggggttgggatgcctggccatgggaagcatcccaagtggggggcgcgccggtctcccggagcttgacagtgtcggaggatggacaagaaaccagcaacgtggccc

SEQ ID NO: 270663 - DNA, 122 bp, Homo sapiens
ctggaaaggcagtttttcgccccttaagtggcctgaactaagcacccccagacctttctccgtagtccacccaattaccaagccccatcgcagacagacacggtccctaagtcaagtttgtc

SEQ ID NO: 270664 - DNA, 122 bp, Homo sapiens
agtgctatgggagactggagtttatttcacttctgcaatctcgaccataagagacaggtacgccctgggggggccagttcagagacctatcgctaggtgcgcattctctttctcagagacgt

SEQ ID NO: 270665 - DNA, 122 bp, Homo sapiens
ggccagctgaaaatgacacctagcctcatatgtggccaccacatatgccgaaggggaggacggagaaggcgacctgctgttccccacaccccgcagcagagagaaagggctcccagggcaga

SEQ ID NO: 270666 - DNA, 122 bp, Homo sapiens
tccagaccctgtagcgtctcagctccagctccgccccctcctgccctcagggatctcacccgcgctgttcccccgggctacccgtccatcacaggctgggctccccgctcaggacagcctcc

SEQ ID NO: 270667 - DNA, 122 bp, Homo sapiens
caccaatattgtgtgctttggatggcaacagtgtacccggccggccaaggagagcctgggcgctggtggcgttggctgcagaccagtctccggcccaggacctgccgtaagacctgggggcc

SEQ ID NO: 270668 - DNA, 122 bp, Homo sapiens
cgccggctccacagcctcccattgccccaggagcccacccgcactccaacccccgcatctcggacctgtggcctcagcccagactcacatcaccaagtgcacctacccagcctccgttatcc

SEQ ID NO: 270669 - DNA, 122 bp, Homo sapiens
ccacctccaacctgcacctggctagggccatggtcggggtcggggtcgggagtccctcggcgcccggcaagcttctgcttactcccacaggagaccactcaggtctcccagacccctccagc

SEQ ID NO: 270670 - DNA, 122 bp, Homo sapiens
aaattggagggctgttaattttacactgattctggtttaaatccttggaaaatcttaagccgcttcactctgggaacttcaaacttcttgggagtagaactttcctgatgtgttgttttgaa

SEQ ID NO: 270671 - DNA, 122 bp, Homo sapiens
atccccagagcaggttcagcgttcacaccctgcttctccccaattctgtctcctcttctccggaatcagatgaaaggacctggggagaaagagaaggtgccggcaacccccacttctgggga

SEQ ID NO: 270672 - DNA, 122 bp, Homo sapiens
aattatccttaaaaactctgatcccgcccttcggtggaaaagttcagtctgaacgtttagcgagtgctgcctctaaagagagcaatcactacacttacggctgagactttgcgcttagtagt

SEQ ID NO: 270673 - DNA, 122 bp, Homo sapiens
ctggatggagtggaattccaggccttcaattcattaccattcctgctgtgcccaagagttcgagttggaggagatcattgaaaattaaatcaaatttatgaagtttctaagtgcgctcctct

SEQ ID NO: 270674 - DNA, 122 bp, Homo sapiens
cttcatgcagccccaaagcataaagaatactccacagatagtcatataccttgattaccacgattaaaaaaaactcctgaatacccttctttccccccaacaggtccacacttccttgcaaa

SEQ ID NO: 270675 - DNA, 122 bp, Homo sapiens
tctggtggctacccccaggtgaagagcatccctgggctttggttggcccaggtccaagcccgttctttgctaacccagctgcaaagctcgaacagcttaaggaaggcccgtagctgactggc

SEQ ID NO: 270676 - DNA, 122 bp, Homo sapiens
tatggtcgttagggacacagggcagccccagccagatcccagctggtccatgcagggcatcgtcagtagaagctcaacgtcccacttcgtaaccaggctacaagacaccaagtccggtcacc

SEQ ID NO: 270677 - DNA, 122 bp, Homo sapiens
cagcgccggccacagcgctatcaagaccacctcaccccgccttgtccaccaccgggcgcccgccgagccctgacctgagcagcaggacaccgcccacctgcacccgcccagctcacggctgc

SEQ ID NO: 270678 - DNA, 122 bp, Homo sapiens
gccccacgtcgaggctccttatgggaaatgtagttcacgtcccgcttcaggagctagcggcgccctcccttatcgccttggcaacgacccagccgcgccgcgaggagagccgggaatggagg

SEQ ID NO: 270679 - DNA, 122 bp, Homo sapiens
cacacaccgcccctctaccgcatgcgaatctttgcacctaatcgtgtcgtcgccaagtcccgcttctggtacttcgtatctcagttaaagaaaatgaagaagtcttcaggggagactgtcta

SEQ ID NO: 270680 - DNA, 122 bp, Homo sapiens
cctcctgctccctcgaggacccccgcccctgacacacccgtcccaaagggccagaagagacgctccgaaagggagctacaactttccagagacctggggcttggcaaactccagcgagttcc

SEQ ID NO: 270681 - DNA, 122 bp, Homo sapiens
cgtgatctgcccaccttggcctcccaaagtgctgggattataggcgtgagccactgcgcccggcctgatttaagctctcttagcaactcaatgcacagaatggtaacttactacagcgctat

SEQ ID NO: 270682 - DNA, 122 bp, Homo sapiens
gagtcaggaagagggagtgtggagcactttggggatgagggtgcaggagagaaggcgccgcgctgggtgagcctaattgggactcccatccaaagagaattccctgctcttgcaggcagagc

SEQ ID NO: 270683 - DNA, 122 bp, Homo sapiens
cgtgcccaccgcggccgcggccgctgctgcgtaggcgccggggcacagcaggacgcggctcgtggggaccccaggagggctgttccgtggcgcttcattcacaaaaaagggcccacaaccct

SEQ ID NO: 270684 - DNA, 122 bp, Homo sapiens
tgcagcctggatgggcacctcagcccgggctccactcttctcagatgtgcagaggctcaccgggccctgggctcactgggctagccagaccctctgatatcactgaggtctgggggagccag

SEQ ID NO: 270685 - DNA, 122 bp, Homo sapiens
ctatgattccacacctggctctgccacacatctgcaaccagttttcttcacttctgtgtccgggctctgggctctgcccctgattttcttcctgggaaaatgttgggcagacaagagctttt

SEQ ID NO: 270686 - DNA, 122 bp, Homo sapiens
gtccgacggacgcctcctccgcgggtatgaacagtatgcctacgatggcaaggattacctcgccctgaacgaggacctgcgctcctggaccgcagcggacactgcggctcagatctccaagc

SEQ ID NO: 270687 - DNA, 122 bp, Homo sapiens
tgaaaagagttgactaattattgttgtttgaagcaatagtgatatggtgtcttctacctccggcaagcatacaaacaccatttgtctaaatagctctgtgtgatccaagatatactattatt

SEQ ID NO: 270688 - DNA, 122 bp, Homo sapiens
ggacaaccaatttaattaacctctagcgtcagctgtcgaacaggaggcagaatgagattacgtgtgcatctctcccgccagcagccagccgggagaggggctcggcaggaggccagacaggg

SEQ ID NO: 270689 - DNA, 122 bp, Homo sapiens
ccgccagtcctgggacccctgaagtttctattcaggtcttccagctactcctggaaaagtcgcgtcaacttggatcccagcaaacccagaagcgcagtgaaagtggccaacccggtcgccta

SEQ ID NO: 270690 - DNA, 122 bp, Homo sapiens
ttcatcctgcacctcggctgtggatttatttcccctttgttgactcggccatcggcctgccgggcctggcgtttcccagaaggcccagcgccgggaaggggtttgcagctgctccgtcatcg

SEQ ID NO: 270691 - DNA, 122 bp, Homo sapiens
ggaggggctctaacggcagtgcaaaggtggggggtccaatgccctgggaagcgcccctgccgaggccacagggcaaagcctaagcaggagggaggaagcaggctgcactaaagacggcttag

SEQ ID NO: 270692 - DNA, 122 bp, Homo sapiens
atcaatagacaaggcctttaggaaactgcgacaacggcttttgctctgggcctttactgccgaatccaggtctccgggcttaacaacaacgaaggggctgtgactggctgctttctcaacca

SEQ ID NO: 270693 - DNA, 122 bp, Homo sapiens
agccactctgtaacccctaaaaccagagaaattggcagctgctcccttggctgagaacatcgctgactccaagtgccccagtgctctccactcatcatttcacagacgaccctgagggaggc

SEQ ID NO: 270694 - DNA, 122 bp, Homo sapiens
tggtggaggcgggggaaggggacgtctctgcagagccgagatttgggctctgaagcccgacggcccttcaacatgtctgcgcaggataagtgagctttcggggagtgaaggggcacatcttg

SEQ ID NO: 270695 - DNA, 122 bp, Homo sapiens
tatctgcgtttggactgggagctgcttcttgcctttcctgcttcctggacctctctggagcgttggctggggagccgcagccacagccttgacccagggcctccgaagccgcggcttaaacg

SEQ ID NO: 270696 - DNA, 122 bp, Homo sapiens
ccgcccccaccctccggggacccccgcctggtccctgtcccctgcgcccaggcgctccagcgggaccacggcccgcgcccgggccccgcctcccctacctgaggccctcatggccggaggcg

SEQ ID NO: 270697 - DNA, 122 bp, Homo sapiens
ccagatggagggagctgccatttttctgaaacatgtcccttgccttcccatacaagattccgtggttctcggctttcctctctgagtgctatctccagctgtgttgctccttttctctgttc

SEQ ID NO: 270698 - DNA, 122 bp, Homo sapiens
ggagtaaaatgtggaaaaaccacagcctagagtctgaaagcctgcattctggctgctacacgctggctgcggggaacgacgggaaagcagggccctccgtggtgcagcgcgtgagccgtgcg

SEQ ID NO: 270699 - DNA, 122 bp, Homo sapiens
ctcaagggcagaatttgaaccaataatccttgtcgatgacaagacaaataccagctcatccgttataaatttatcttagaaaactctcagatccccaggagtaacagcgattggcgtgacct

SEQ ID NO: 270700 - DNA, 122 bp, Homo sapiens
aaacaggtgaaaatatggaggtgaaggagtaaggaagagtggggccgggagccccggggacggtcaccaagtatgctcgccagatctgttgtgggccatgagggtccggaaacgtggaaccc

SEQ ID NO: 270701 - DNA, 122 bp, Homo sapiens
atcaagaagaaaagggtggggacggaatgaatagtagattgaagaccaaatcagggagcccgggctgagctatgggtgaggaactgaagaactcagatccctaagtaggtggggtacccctg

SEQ ID NO: 270702 - DNA, 122 bp, Homo sapiens
agggggaggcccgcccccccttcccggcctgccccgggcgcccctcacccaccgcccctgcgcgccgctccagggccagccccacccacgtcccgaaccctcacctgccccgtccgtaacct

SEQ ID NO: 270703 - DNA, 122 bp, Homo sapiens
ttccagactccagggctccccgggctgctctggatcccaggactccggctttcgccgagccgcagcgggatccctgtgcacccggcgcagcctacccttggtggtctaaacggatgctgctg

SEQ ID NO: 270704 - DNA, 122 bp, Homo sapiens
gcgcacccggcccgccgcgggggcgcgcctggctctgggcggggctgtattgtcctccttcgtggtggagcataatcaaaatggcttccagctggtcctcggtgggaacgatgaggctcgag

SEQ ID NO: 270705 - DNA, 122 bp, Homo sapiens
tgcaggagaaactgtaaactctctgtgaagataaggaccatgtctgttttgctcatcatgcggttcgtggtacctagcacttgtatgcttttagtgagtgatcataatggaattctaattgt

SEQ ID NO: 270706 - DNA, 122 bp, Homo sapiens
ttcaacaaggacaaccgggtgtccctggcggaagccaagtccgtgtgggccctgctgcagcgtaacgagttcctgctgctgctgtccctgcaggagaaggagcacgcctccagactgctggg

SEQ ID NO: 270707 - DNA, 122 bp, Homo sapiens
ccagtgcaccctgcgctccctcagccgcgggccgtcggcgcaggccgggaccctcctccgcgcgagccctgcactcctccggtgccctccacgccgccaccggctgctgctcgcagcctccc

SEQ ID NO: 270708 - DNA, 122 bp, Homo sapiens
aaggaccatttcctccagtgtggagagtggatcccaaaggcaaaattaagctggtcagaacggggagcccagcaatctcgttggtcaagtgtgtggtcaacatccacttcactaactctgga

SEQ ID NO: 270709 - DNA, 122 bp, Homo sapiens
tggtttttggagtaaaagtcgctgttggtcatgtcacccatgtttgctgcggtccttgctcgggctgggcccaagggtcagcgctggacaagaggctgccgggtgatggctgcttgtggctg

SEQ ID NO: 270710 - DNA, 122 bp, Homo sapiens
ctagtttagaagatttgcaagtattccaggtgtgaagaaacaggaggaaataccctagtccgaagactcggatatctgcctcagcagtacagctgaatgattttgcagttttggacaagcca

SEQ ID NO: 270711 - DNA, 122 bp, Homo sapiens
cctgggcagtttcatgaaagatttcttggaacttaacaaagctgtcatttccaatacactcgatgcctttttttttttttttttttttttttggctcttgcatgtggtttgcaagaaggttc

SEQ ID NO: 270712 - DNA, 122 bp, Homo sapiens
gagactcctcaaatgcttgaatacgaaacaaaacatttgtccctccaatcctattattctcgctgtggttcccatcttgtttttttgttttgcacagctgtcttcttaacacttatcagcta

SEQ ID NO: 270713 - DNA, 122 bp, Homo sapiens
tgaatccttgacaaccgcagcccaaagaatgataaactacaaaggccggaaatgcgtcaccgcggcccgctctccgcgaaacagcggttccggctgtgttccttctaggaaggccggaggtt

SEQ ID NO: 270714 - DNA, 122 bp, Homo sapiens
atctggctcaattcagtctgagaaggactgttgtttctgatgaagaaagagctccaccctcggccactgccacagctgctctgccaataacaaaggcacagcattttccctctgtgcatctc

SEQ ID NO: 270715 - DNA, 122 bp, Homo sapiens
ccacgaggggaggggccggccatcccaggagacaccccaccacccactccccgctctgcccgtcttgagagaatgacccaggccttggcactgcaggcggggtccctggaagatgggggacc

SEQ ID NO: 270716 - DNA, 122 bp, Homo sapiens
atcccagccccctgcacccctggcagggagagccagacagcccttacaggacacggaagacgcacgacccacgacccacgagtggcctcggcggcccggggcgcggcgactgccgccgcgga

SEQ ID NO: 270717 - DNA, 122 bp, Homo sapiens
ggcattcctgctgagcaccgtggggcacccagggagcaggggcgtcagggatcctgctgccggcacccctgtgccgctggcatgagggccgtgtccccactgtgaaggatgaagagcaaggc

SEQ ID NO: 270718 - DNA, 122 bp, Homo sapiens
gtgacgcctcgtccctgtcaattccacacagctgcacccggaagagctgtggccgggcgccgctctgacctgtgtgcggtcccctgaatgggtctcaggtgtcttcagaatggtgaggccgc

SEQ ID NO: 270719 - DNA, 122 bp, Homo sapiens
tgaatccaggaggtggagcttgcagtgagccaagaccctgcgactgcactccagcctggacgacagagtgagactatgtctcaaaaaagataaaataaataagtaaatgtgtccacctgggt

SEQ ID NO: 270720 - DNA, 122 bp, Homo sapiens
atgacactaatataacaggataagggccaatctgagcgtcaggggagccagggcatccaacgagagcagagcacatgcctagcttatcctggaaggcttcctggagtaggtaatgtttgaac

SEQ ID NO: 270721 - DNA, 122 bp, Homo sapiens
ctgcccgggcggggctgtagtgggatgctggtccccaggctgcgcctcggttctccagggcgaaacgcaggggcggggccgtgcaggggctgggcgtcgccgccggagagggtcccagcgcg

SEQ ID NO: 270722 - DNA, 122 bp, Homo sapiens
gacgttgccatcaaaacacatacacccagaaagaaacaacagaaaccaaaactcacaaggcgcatgattacttgttttatatttcatgttgggttttccctcccactattaaacagtctgtt

SEQ ID NO: 270723 - DNA, 122 bp, Homo sapiens
tttagggctttctctacgtgctgttgtctcactgggtttttgtcggagccccacgccctccggcctctgattcctggaagaaagggttggtcccctcagcacccccagcatcccggaaaatg

SEQ ID NO: 270724 - DNA, 122 bp, Homo sapiens
gcaatttcttggctttacagagccccaaaccccaaagacaccaagataagacgggcaggccggtatggggaggtcccacaatgacatcagcatttggaacaattcaaaccttcaccatctct

SEQ ID NO: 270725 - DNA, 122 bp, Homo sapiens
gaatcatcccaaaaaaccgcttgtattttccaaggtgaaatttgcttttgtggggggaggcgtaaagaaggaaaacaattatttatttctaattctagaaagtgcgggttacctacatctgc

SEQ ID NO: 270726 - DNA, 122 bp, Homo sapiens
gcgcagctggggtacagctccccaatccctgaccctctccacacctcagagcctaaacttcgcttctaaagaattctgggttgaatttacttctatagaagtcaggtctgtgatgtgtatat

SEQ ID NO: 270727 - DNA, 122 bp, Homo sapiens
cgacggccatggaaaccagcttcccgtggtcagcccaggtgtccgccttcgtatttcagacgtgcctggtcacttgagggaggttcaaacctctgcagtgcagcgatactacagtttctgag

SEQ ID NO: 270728 - DNA, 122 bp, Homo sapiens
tggggagcagtgatctctgaccttcgcctcatccaaccctaggctcctgcaagaaagactcgtgactgcccagcgccccaggctggactgagcccctcacgccgccctgcagcccccatgcc

SEQ ID NO: 270729 - DNA, 122 bp, Homo sapiens
tgtctttctcctttttctttggtttgttctgctggggctgagagagggctgcaagctgctcgtgcacggctttgagctgtagaccagacaggcaagacacacactcagggctgaaaccacct

SEQ ID NO: 270730 - DNA, 122 bp, Homo sapiens
ctagcaataaacccatgttgaacctaccatgaaaactttcattcactgtgcttttggttacgttgcctcctgattagtcattaattttaatgaggttttttccttgtgttgagtatgaatag

SEQ ID NO: 270731 - DNA, 122 bp, Homo sapiens
tcttggaggtttccccagtaacctctcagcgagcagaagcccagcagaaggaaccgaagacgcctcggcctccggtgggcacagccgtggtgacagctgtgcacgcaccgggacggacatct

SEQ ID NO: 270732 - DNA, 122 bp, Homo sapiens
ttcttcccattggagaatctgcagagcttctttctacaactcacagcagccagcatggtacgtgtgtacagatgaatggtcaggtttgtccttcagagtccctttgtacccagctttgcccc

SEQ ID NO: 270733 - DNA, 122 bp, Homo sapiens
gggagggggaggaggtctggagggggctttgcagcttttagagagacacacaccgggagccgaggctccagtctccggccgagtcttctcgcagccgcaacccacctggggccagcccagag

SEQ ID NO: 270734 - DNA, 122 bp, Homo sapiens
tggcctacccagaggccgtctagttgaaatggcaaccccaaagaaaaccaaacctgcgcccgaagcaacagtgaccatcaacgcgagcggctctgatcttgctccagtccccactgctgtca

SEQ ID NO: 270735 - DNA, 122 bp, Homo sapiens
tgtttataaaaccattttttaaagaccaaacactatcacaattaggcactattatttttacgtagcatcaatttttaatgatactatgatactttaatgtaggttgataacatatacattta

SEQ ID NO: 270736 - DNA, 122 bp, Homo sapiens
gcactttgcgatccagtgtcgccattgctcttccttcttgttgctttttccctgttccttcggcagcagcagccgagagacacgggattcgagaacgctccgacgtcatcttcggaacgttc

SEQ ID NO: 270737 - DNA, 122 bp, Homo sapiens
ttctggcattattttatttattcattcatcatccaacaactattgattggacagttatcacgcagcagacatgggtattggggatacttctttggcctttttacctagtgtatgtctaggtt

SEQ ID NO: 270738 - DNA, 122 bp, Homo sapiens
gttaagcctgaaagacctagatttgtatcccagctttgctccttatgattggcccctggacgaggtttttaatttttgtgcttctctttcttcgtttgtaaaacgggtaacattctataggg

SEQ ID NO: 270739 - DNA, 122 bp, Homo sapiens
tcatccagcctgattagcacagtatcatcgagctactgaatccatgtgatgttttgtaaacgaagattgcttcagactctgtcatgatggagggcataaaagaacacaacccgggacaacac

SEQ ID NO: 270740 - DNA, 122 bp, Homo sapiens
ggaccacctctcagccttagctaggcgtgaagcagcgagctaagcttgcacatgcgcagacgtcatccagaagaccctttcctagagtgtggcgcgcgagccattcggatttaagactacgt

SEQ ID NO: 270741 - DNA, 122 bp, Homo sapiens
catctgaaattcccaaagcagatgacctgaggagattccatgtaagataaaattgatccacgaaaggactttatgtaaacaatctacacgtaaggattggtgtgaagtcacttaacctggtc

SEQ ID NO: 270742 - DNA, 122 bp, Homo sapiens
tttccaatatacaatcaagacgactcacgacacttgaaagaaaggagaaagaaaaaaaatcgattgcacccacaagtaaaaaggctttattcattttggggatgctgcaatttggtatttat

SEQ ID NO: 270743 - DNA, 122 bp, Homo sapiens
gaaggccagaggaggcaggagagaaaaaaggagagaaagtatgtcataggctgggaggggcgggggagggaaatgcaaaacccgacaggaaatgagactaaaaaatgcgaaaggttagaaaa

SEQ ID NO: 270744 - DNA, 122 bp, Homo sapiens
tcagacaccgcatgctcgtgcgaggcctgcagtgagcgcaggtatgtgacgtgtgtgccacgttgctcacacctgtccacaatgacatgcagacctgcatattggagctggacggagaaact

SEQ ID NO: 270745 - DNA, 122 bp, Homo sapiens
tccccagaaggccgcgaggggcggagccaccagcgcccgccccgcccgggcccgccatgccgcacagcatcatgggagttgtagttcaggccctgtcccccgggcagccgctggcgcggacg

SEQ ID NO: 270746 - DNA, 122 bp, Homo sapiens
ttttttttttttttgagagagagagagtctccctctgtcaccctggctggagtgcagtggcgcgagctcagctcactgaaagctccgcctcccgggttcactccattcttctgcctcagcct

SEQ ID NO: 270747 - DNA, 122 bp, Homo sapiens
ttttttaagtttttgttcctgttattgatgtctagctcatcctattgggatcacagaaaacgctttgatgagttcagtcttctgaaatgaattgagatttatattgtagcctaacatacgga

SEQ ID NO: 270748 - DNA, 122 bp, Homo sapiens
ctctcactgcagcgaccaaagcgatgatgagcatcaatggagatgaagacagcgccgctgcgctgggcctgctctatgactactacaaggtgggtttgcctgcctttaaaacccttaacagc

SEQ ID NO: 270749 - DNA, 122 bp, Homo sapiens
gaggtctctggcttcattatgaagggctgaccatgaataatgaccccaagatccggctcccgttgacccaggcacagtaagagaaacagggtgcaggggaaagtcagtgcaagtccaagtct

SEQ ID NO: 270750 - DNA, 122 bp, Homo sapiens
gaggtcagcacagccctcaagggctgatgcagaagaaaaagcccatcttcgctcttgatgcgcttcccctaaataacctctaacccagatggcgccttgcacatgcagctccatccagcatt

SEQ ID NO: 270751 - DNA, 122 bp, Homo sapiens
cggactcgcggggggcgcagagccgaggcctgggggcgcggctcgctgtagaggcgggggcggtcgtggggcggagcgggtcgtggggcggggctggagcggcccgcggcctcagctctctc

SEQ ID NO: 270752 - DNA, 122 bp, Homo sapiens
cgactccacctggcgagcagggaggggccaagcttacgcgaggcgtggcatcccgcccctcgctgcattgtacttccgggctcacatttctgcatccggagtatgagaaccctcaaccaggc

SEQ ID NO: 270753 - DNA, 122 bp, Homo sapiens
ccgaaagacgttgacactcatttatcttactgagagagccatttacgaggagaaatgcgacggtaatggatggtttattgtagaaaatagccagatagctacactacgactgctcctatgaa

SEQ ID NO: 270754 - DNA, 122 bp, Homo sapiens
ttttttaatttcacagatttctttaaagactcgtgcagcacatcattatcgctggatgcccggacatgtaatacacctgacagcatgtgaagtgctcagaatggggcaggatgtcacctgga

SEQ ID NO: 270755 - DNA, 122 bp, Homo sapiens
aagatgaaagcacgttcacccgccatttgcggctgccctagcgcgttagtaccatctccccgtgcccacagatatccacacacagcaactctcaggggacaaatgcgaagccatgtgatttt

SEQ ID NO: 270756 - DNA, 122 bp, Homo sapiens
agctgggactacaggcatgcaccactatgccagactcattttcaaattattctgtagagacgcggtccccctatgttgcccaggctggtctcaaactcctggcctcaagcaatctctcagcc

SEQ ID NO: 270757 - DNA, 122 bp, Homo sapiens
tcacgcagcacttaataggccatgataaggattttaaaattgtacgtaacaggaagccatcgaaggggtggaggatttgataccttttaaagcagtatgtcagctactatgtgaagacagga

SEQ ID NO: 270758 - DNA, 122 bp, Homo sapiens
gttgttctggaaatactgcaggaggctgttgatgcagcagtcgtagagactggtattgtccggattgaggggggcgtagcagatgtcctgcagggagatgttgcgctgtgcttcgggcgacc

SEQ ID NO: 270759 - DNA, 122 bp, Homo sapiens
caccccactgggttaggaagttctagaatagcacgggcccctccgctgcactcacgcacacgccccactgggttaggaagttctagaatagcgcgggcccctccgcagcactcacgcacacg

SEQ ID NO: 270760 - DNA, 122 bp, Homo sapiens
gtgacatgaggttgatggtatcccatgacatggctgtagaccccttcaaggcctcctccccggcccggtgggctgggctgggctgggctgggctgggctgggctgggctggtgccccaagtc

SEQ ID NO: 270761 - DNA, 122 bp, Homo sapiens
ctacgggctcccctacgaggacaaggtgcgcgtctggcagctgtacggtgagtgtctccccgaagccagacacagggcccctggaagaggggtcagaaaccccaggcacccctgagcagagc

SEQ ID NO: 270762 - DNA, 122 bp, Homo sapiens
gatgccacgtaattggggagcaaaaggaagccccagtcacccacaacctttcacagcacacggtgcagggctggacagtgcaaataacttacaggggtttcctcatcaaatccaaggccatt

SEQ ID NO: 270763 - DNA, 122 bp, Homo sapiens
ccggccctcggcccccagccagcctgccccggcccacccggccccgccggccagacacggcgacctatacggaccgcccccacgccgaccctccaaagggcccccggccttgggtttcccgt

SEQ ID NO: 270764 - DNA, 122 bp, Homo sapiens
ctggtgatgggcgctggtgctcacccaccacttcctgtgtatctatctccctggcccgcccggctcagtccccactgctcagcactaggccggcagaatctgagcgatgtcttccacactcc

SEQ ID NO: 270765 - DNA, 122 bp, Homo sapiens
aatagtggaaaggaaagtcgtggagaaggccagcacctgcccggtgtggggagcagggcccgggcacgtgaacctttccctgcggagctggtgcctgtgggtgcacgggtgtggtgcgtttt

SEQ ID NO: 270766 - DNA, 122 bp, Homo sapiens
actcctgctctggaggggttgcgggtacctgatggccacagagggctctaggaggccgagcgtgtaagcggggtgggcgccatggaggcagagcagcggccggcggcgggggccagcgaagg

SEQ ID NO: 270767 - DNA, 122 bp, Homo sapiens
acctggctgcgtgccagctcctcgcacgctctgcaccaccggttcgggtcccatggcagccgacatgccgtgggcctcctccaggccatccatgcgtgggaccggccccctcagcttcatgg

SEQ ID NO: 270768 - DNA, 122 bp, Homo sapiens
ggatcagatcatattacaagttagctgtggccaaatccctgttatcctcctaccctttctcgggaaggaggaagcactagaccacgttaagagccaggtcccaagatattcaggcccagctt

SEQ ID NO: 270769 - DNA, 122 bp, Homo sapiens
ccaccgtgccgccgctgacccccgagcagtacgagctgtacatgtaccgtgaggtagacacgctggagctcacccgccaggtcaaggagaagctggccaagaacggcatctgccagaggatc

SEQ ID NO: 270770 - DNA, 122 bp, Homo sapiens
ctcaagtgatccacctgccttggcctcccaaagtgctgggattacaggtgtgagccacggcgcccagcccattgtatccttcttgtgactttgtgtcttcatagcttagctcctactaataa

SEQ ID NO: 270771 - DNA, 122 bp, Homo sapiens
ctttttggtggcctggccacagcaccactgtcactcacagtggccagcagggcagggcaccgccttggcagtgcaggtactttaccagtgaaacccaaattattagccttaatacaatttta

SEQ ID NO: 270772 - DNA, 122 bp, Homo sapiens
gtttgaacttattaactgtaccttgaatactcctcaaaataatcttgcagtataaactttcgggaagtttgtctcagaatatgattccaaagtattggtgacaagaaatcaaatactggtat

SEQ ID NO: 270773 - DNA, 122 bp, Homo sapiens
gaggaagcggcggggattttatccggcctgaagcagccccataacttcactaccatgaaccgagaaaaaaaaacttcacgcctattcctcccttacaggaagggagggaaggggaaggggaa

SEQ ID NO: 270774 - DNA, 122 bp, Homo sapiens
ggggtgattcacgtcttgaggtctcggccggtgtgagagcccagcctgttcccctttctgcgcccatccccggctcggccgccaccccgcccgcccgccccattccgttcccctgagctggc

SEQ ID NO: 270775 - DNA, 122 bp, Homo sapiens
ccccgccccgcggggtgtcgtggccctggagctccggcgccaaggggggctcttgggggacgcacggctggagcccggctcgctttggagctgcgcggtgtagccgctgtcatgtgccgggt

SEQ ID NO: 270776 - DNA, 122 bp, Homo sapiens
ttatttagcctaccacaggaccagattttgccataaactacaaaacttttaatacaaaatcgtatttatatatttataagtcatatacatgccctatctgtgattttagaaaataaaagcta

SEQ ID NO: 270777 - DNA, 122 bp, Homo sapiens
cggccaccggctggcttctcagtcgggccactgggtcgaccagatgtgggctgcgagccgcgaacattgctcttggccactagctcgaaatactaaaggtcaacctaaatatttaatatcaa

SEQ ID NO: 270778 - DNA, 122 bp, Homo sapiens
gaagagtgtcgggatccacacaggaacacacaggagaaattcaccactgtgcaggagggacgtggttaaggcgagttctgccattaacgtgtaattagacaacacttttaccccgcccctcc

SEQ ID NO: 270779 - DNA, 122 bp, Homo sapiens
cataccatttttgcagtcgaagctttccctgacgactaaaaagcaacataaactgcatggcggccgcgggccgcgggcgcggcggagcttggccggtggcggcggagcttggccggcggcgg

SEQ ID NO: 270780 - DNA, 122 bp, Homo sapiens
atccgactgtttccagaaggaaactgaggtgtgcaaggaagactgacacctgaaatcccccgagcccttgcatttcaacacccttagagcactgcatgctgctccacactcacgcgaggcgg

SEQ ID NO: 270781 - DNA, 122 bp, Homo sapiens
ggtcctggggctgcatggggaggtctctgatggtggctcatgagaccccctttccccatgcgggtggccaggcgagagcgtggaggagaacgccaatgtggtggtgcggctgctcatccgga

SEQ ID NO: 270782 - DNA, 122 bp, Homo sapiens
gccgcccgcactcgctcctccagcccgggccccgtcagcagcagctcccgccgccgctcgcgctcagccagctccagctccggccaagactctgacaccgctgccgccgccatggcgcctca

SEQ ID NO: 270783 - DNA, 122 bp, Homo sapiens
gaagcgccggagctgcttggcgcgctccccgttgctgaataccacgcctggggaggtgaacgcgggaatggagacaggccagggggcggcaggggcaggagcggagcagctccaaggggctc

SEQ ID NO: 270784 - DNA, 122 bp, Homo sapiens
tgaggtcggactagcgactgtccaatcaaaagcttcttcttcttcgggttttccgctgcgcgccccgcggtggcgggaaacgtaccatccgggattctctgttcctcccctccctccgcctc

SEQ ID NO: 270785 - DNA, 122 bp, Homo sapiens
cctcccactggcctctttccctccccttctgtcactctgcctgggcatgccccagggcctcggctgggccctttgtttccacagggaaacctacatggttgggctagatgcctccgcacccc

SEQ ID NO: 270786 - DNA, 122 bp, Homo sapiens
gccagtgctaccagtgcctgcatgcagccggggctcatggcatctggatctcaagccacccggtcctgacacctgcaccacggggtcgtttcctcatgcacacacttgcaccactgagcagg

SEQ ID NO: 270787 - DNA, 122 bp, Homo sapiens
gaaggagctgcatggaggaagctcctcctggctaccaagcatcgggcagggggtgcatgacgtggactgtgtagatgggtgagggagcacccttttcaaaatattttgctgaaaattaagtt

SEQ ID NO: 270788 - DNA, 122 bp, Homo sapiens
ctgaccctactttagactattttttttaacacaaggtctctgtcactcaggctggagtgccgtggtatgatcacagctcactgtaaccttgacttcccaggctcaagcaattctcccatccc

SEQ ID NO: 270789 - DNA, 122 bp, Homo sapiens
atgccacctccacacacggcctcctgcagcctcaccagctactcacattgcacacgtgggcgggaagtggttaagcggcctcagtccccacaggccccagccatgctctgggggcacctttg

SEQ ID NO: 270790 - DNA, 122 bp, Homo sapiens
aaccaagcagggtgagtgtgcgggctgcgcgggcggcgcggagcggagggagccgcgcggcgccacactcactcgcactcgcactcacaccggcgtgcacgccggcccgggaccccgcgcgc

SEQ ID NO: 270791 - DNA, 122 bp, Homo sapiens
tgctccgaacacaccaattctttttatcttaaagctctgcggagcgccggggaagcagcccggcaccgagctaatctgccctcagcagccccgggccgctcctcccggcatcggagcacaac

SEQ ID NO: 270792 - DNA, 122 bp, Homo sapiens
gtactcgtgtggggaccagaacacgctgatggaggagtcggcggagcaggcacagcggcgcgacgagatgctgcgcatgtaccacgcactgaaggaggcgctcagcatcatcggcgacatca

SEQ ID NO: 270793 - DNA, 122 bp, Homo sapiens
cggccgaccgaaccgcgttgcgtgcgtgcgcgcacgcgcgggccacgtgggcgggcgccgcgccgttgccccgccccttgcaaccccgccccgcgccggccccgcccctgctctcgcgccgg

SEQ ID NO: 270794 - DNA, 122 bp, Homo sapiens
gccgccgccgcctcctcacgcccccttcccgaaataccctggcagcccccgcggccgcgccgttccagcccgcggcagcggcggcatccaaactccacaatattaccaccaccgcccgccgc

SEQ ID NO: 270795 - DNA, 122 bp, Homo sapiens
aggcgaggccttccttcctgtgtccatcggccacgtgctctgcatccacgacctgcagaccggcgacctcctagcttgtcctggagaacacaggtgtgtgcccgcctcaagactgcacctgc

SEQ ID NO: 270796 - DNA, 122 bp, Homo sapiens
cgactccctcccccaggcagctggggcaggaattcggctggagaatctggcccgggcacccggccctggagggctggactggttcgcccggggccgcgccctcatccccgctcctacccggc

SEQ ID NO: 270797 - DNA, 122 bp, Homo sapiens
tgagaagtgaggagaccctccgcccggcagccgccccatctgggaagtgaggagcgtctccgcccagcagccgccccatccgggagggaggtgggggttcaaccccccacccggccagccgc

SEQ ID NO: 270798 - DNA, 122 bp, Homo sapiens
agactctggcctatcagtcaaggtcttcatgaattggcctaggagttccctgaaacaaagcgtcctctctcttttcctccagccgggctgttttctttaatatccccagggaaacatgcccc

SEQ ID NO: 270799 - DNA, 122 bp, Homo sapiens
tcagggacgtggtgctgttcccatgctctgtactctgattctgaaaagacccgcccaggacgccgtggcctggtgatcctggcctccacatgcagttccccggagggctgggaggggatgtt

SEQ ID NO: 270800 - DNA, 122 bp, Homo sapiens
gggggttcctggagtaagacggttgctgattggctggctttccgaggcggggttgtgaagcgttggtcattctatctgggtgctgggttaggcagtacgaatactaaaattggaaccagtga

SEQ ID NO: 270801 - DNA, 122 bp, Homo sapiens
gaagatctgaaaatcgctctccttaaaactatctgtgcatatattccccttggaaattttcggcatactcttaagacccctggtttttctcttaactccatagctttccttgtgagttcctt

SEQ ID NO: 270802 - DNA, 122 bp, Homo sapiens
tagcctagggaggggagcctgaggcttccgggataggttggcttccctcttcccccctcccgcctctcttcttggtctgtgtctctgctctcctctcctgtatctgcttcgttcttttctct

SEQ ID NO: 270803 - DNA, 122 bp, Homo sapiens
gtggatggtggggtgggtgggcgaggttggccgggtagaagccaggagcagagctgtgtccgagctcaccagagtgtggggacagctgctggaatgtatccaccgggcttcctgggtgaagg

SEQ ID NO: 270804 - DNA, 122 bp, Homo sapiens
ttccggcctaggggaagggcgtctggaatgggagcgggcgctccaccgcctgcaggcatacggtaggcctggcccagtactgggcgtccgagctgcacccaaggggcagcacccacacctac

SEQ ID NO: 270805 - DNA, 122 bp, Homo sapiens
tgatgagtacaacatcgtcaagcgggacgtgcccaacatgattgtggaggagtgcggctgcgcctgacagtgcaaggcaggggcacggtggtggggcacggagggcagtcccgggtgggctt

SEQ ID NO: 270806 - DNA, 122 bp, Homo sapiens
ccagctgacatcaagtagaacagaaatgatccatccctgcagagcacttccacataataccgaagcctgaaggtgtgagctattgaggagatttgtcatatggccacaataactggatcaag

SEQ ID NO: 270807 - DNA, 122 bp, Homo sapiens
cagctttactaaaatacactctgccaacagcagaaggccctctgaggtgagcaggtgggacgaggctgggaagctgtcacttgacttctgccagctactcggaatgtcagatgaatcccaga

SEQ ID NO: 270808 - DNA, 122 bp, Homo sapiens
ggcctccggctgctcccaatgctgggtttgctgcagttgctggccgagcctggcctgggccgcgtccatcacctggcactcaaggtaaagcttggcaaggccgggccggggggcggaggccg

SEQ ID NO: 270809 - DNA, 122 bp, Homo sapiens
ggggctgtgcgtggagcccgcggtaagctggaatatccaagccagctgcaagtggccttccgttccccacacgcctcctgcgtgctgggcccagctgggcgccgcccaaatcttctctctcc

SEQ ID NO: 270810 - DNA, 122 bp, Homo sapiens
cgccacctggaaaatcatcacgtgccctccggggcaagaccaaggcctcaagtcacccctcgcagcccagtggacctcccggccatccctttcacggctccacagcgaccgcgagccgttgc

SEQ ID NO: 270811 - DNA, 122 bp, Homo sapiens
tgaaaccatttttccgccgttgctcaccaggaacatgccggaagagataggttccagacgcgggagaatgcggggccagagccaacctcaccagaagggcagaaatccttttcctttcggaa

SEQ ID NO: 270812 - DNA, 122 bp, Homo sapiens
gcgccaccctcagagcagtcttgtgtcaccgggtacataggagttcaagctctgccttcacgtcttctcccaattcctgtgctttccctctcccggagtttggaaggcatcccctggagttg

SEQ ID NO: 270813 - DNA, 122 bp, Homo sapiens
tccgctcccaaagagaagcccagactgggcccacagtacccgggaaggtgagtccttactcgggggcccagatctccccacggaggccacagatctgggtccccgaggaaggagagcccccc

SEQ ID NO: 270814 - DNA, 122 bp, Homo sapiens
ccaagtcccggcagctgctgcggtggacttagaggcagcagctcctgcttctgccccaaacgttcagtgtagtcggattcccggggacagcagggcagtctgcgcgcacatccccggggcat

SEQ ID NO: 270815 - DNA, 122 bp, Homo sapiens
acctaatgttccatgtttgcaggtatgaggactgtgcatggatcaatgatgacttccatacgtgggttccttggaaagttgaacaaaatgagtgaaaactttatactgtcatcctcttcaaa

SEQ ID NO: 270816 - DNA, 122 bp, Homo sapiens
cagataagggatactcatctcaggtggtaggaacaaggtcactcaccatttttaagtgtccgttgcataaaaatgttatttggtatggtggagagattgaaaagaaagtagcttttagtgtc

SEQ ID NO: 270817 - DNA, 122 bp, Homo sapiens
ttctaattgagaaactcacccagagaggctgccagagcccaggtaatcaatctcttgggccgtgtgtgacagggcagccttcgcgcccctattccacggggagaaatcagaacttccggtgg

SEQ ID NO: 270818 - DNA, 122 bp, Homo sapiens
ctggctccagtgcaggcctgactgtcacgggcacctacagcataaccctgccagtgacctcgcagcagctgcagcaccaagctctccaggcagcgccctggcgcaggtgaagcagcccaggc

SEQ ID NO: 270819 - DNA, 122 bp, Homo sapiens
tgtatcgattggttggcgccgcgggcgcaggtgcgcgctttctattgggtgtgggcggaacgcgagggattgcggcatcttcgggggctgcaggtgagcgcgcgcacgcgccgcggctgtgg

SEQ ID NO: 270820 - DNA, 122 bp, Homo sapiens
aggcgaaaatcatccctctgctgaattgggttttgatttgctggtgttcacctgacaggacgcatctcccgcgaagaagcagtgtttgactccgtgctgcagggttgttttgtctccgaaat

SEQ ID NO: 270821 - DNA, 122 bp, Homo sapiens
gcccctcgggcctcgcgcctcaccgcacagcctgcggcctacctgcgtccgccgcgccctcggagccgctgctgctgacccccgctgacctccgctgaccccgcgctaaccccgcgcggcgc

SEQ ID NO: 270822 - DNA, 122 bp, Homo sapiens
gcggcaggcaacaataagctacaaggggagctttaccactgcctggattactactacctgcgcgttgggcgcagcaagggcttgacgctactggagcacgcgctgcgcaccaacctgctggc

SEQ ID NO: 270823 - DNA, 122 bp, Homo sapiens
ctaaatggggagaaatgcaaaaaactctgactcttcagagtcataactaacattatcttgcgccacaagcttatcaagagtgcaatacaagtcagtgtcttctcttttctacttaaaagaaa

SEQ ID NO: 270824 - DNA, 122 bp, Homo sapiens
acagatgggaatgtaatcattggcatacagaatacttttttgatcaatcttaaccatatgcgcaatgtatttattttctaaggaatgcaataacttgagagaaccttctatttgaattcagt

SEQ ID NO: 270825 - DNA, 122 bp, Homo sapiens
ctgcagtacagccctggagggcgtggggacttgggggcggtgaaatagccgctgtaggtccgcctctttcattgaagaaatttaagttcgtgtggttttaccttttccgggagtctccagct

SEQ ID NO: 270826 - DNA, 122 bp, Homo sapiens
tgaatgtatgttaatgaactattgctgcaggaaacccatgtctccttttgtatttgcaaacgattaaactccttcgaagccactgttacagaagaattcctggtctccattatttttatttt

SEQ ID NO: 270827 - DNA, 122 bp, Homo sapiens
ccgaaggaactagaaagactttcgcttcttttgaaaagaagggaagtggtgagtgagcttcggcattcagccccacccaaagagctccccagacctgggccacagtgtcaggaaattgcagc

SEQ ID NO: 270828 - DNA, 122 bp, Homo sapiens
gaggcggacttggtttaccggctttactgaccacagctgatgccaatgatttcatttaatcgtctttagagtccctgtgcatggggagttaccatccccaattagtttcttgtgaatgcagg

SEQ ID NO: 270829 - DNA, 122 bp, Homo sapiens
tgcggcaatcgttgttccctgcggggccacgaatcacaccacctcccgacatggcggtgacgaaaagcgcggactcgagaacaggccttcccaccaagcctagcgcacggcagagcgagccc

SEQ ID NO: 270830 - DNA, 122 bp, Homo sapiens
agaatctcgctgcacccccgcccagagttcagaccaagcgaaaagttatttgagaggcctcgggggcgcggggtgaggagtcgtggcggaggccttggtcggggcgccgtggatatccccga

SEQ ID NO: 270831 - DNA, 122 bp, Homo sapiens
ccatttgggcctcagcatggaccatcccccttactcgcccggagccctcgccgctgcccccgaacctcggttgacttcccagccctggaggtcgccgggcctctgaaggagccgggcggaaa

SEQ ID NO: 270832 - DNA, 122 bp, Homo sapiens
ttgtacaaactgaaaatttatgcattaactgtttgcattctgagcgtgtgttccagattacgtcttacagcattcttctggtatgctgcagaatgcgtgtgtgcaaaaagcacttctttcac

SEQ ID NO: 270833 - DNA, 122 bp, Homo sapiens
cgggacccggtgggggagggggtggcggagtgctaagtcccagaccctccccatcccctgcgtcctgagttcgcttcccgcggccagatgatggaacctagtgggaagaggcgaacgacagc

SEQ ID NO: 270834 - DNA, 122 bp, Homo sapiens
gatttgacacataaaaggcccttctctagccttttttgagagtctcatctcactctccagcgactttgattgcctccagctcctttcctgcttcctctggccataataatggcaggacttct

SEQ ID NO: 270835 - DNA, 122 bp, Homo sapiens
acttgctgagtctggccattccattgcagactccagattgaaagcattgctagagagtgtcggggcaccaggtctccccaggctttgagtgggcatctttgggtgctgcaactcctctctcg

SEQ ID NO: 270836 - DNA, 122 bp, Homo sapiens
tagcagaagaaaggctccacaggtatcctcagttgttagctaaagctgaactattttccacgcaattatcattgagacaattgttttggagcccaacctcagggagtttaaattcctactct

SEQ ID NO: 270837 - DNA, 122 bp, Homo sapiens
ctaaccaaaaatggtcacagagaatccaaattctcggcataagtctaaacatcggttgagcggaactggccaaaccatcgcactgcatttcgaggcctggcacaaaagaacaactttggtaa

SEQ ID NO: 270838 - DNA, 122 bp, Homo sapiens
caagcactccatcggctgacagcagcctctgtggtccgggacaatgagcagctggccctccgaggaggggcagagaccacagctgaccggggtgagttgctcatgggtccagtcaggaccca

SEQ ID NO: 270839 - DNA, 122 bp, Homo sapiens
tgggttctgtgcttttcctggattaagtgccactttgttctccagctctgggacctgagacgctgatggctccttgcacctgagtgcttctctcaatgcccatcccaaccctccacttcata

SEQ ID NO: 270840 - DNA, 122 bp, Homo sapiens
cccgcgcggaccagacacaaagccgatcaatcccggaggcgtgggggcggagggacgacccgccggggctttcccgggcgctgctctcctcctgctgccccctcgctaggacccggcggacg

SEQ ID NO: 270841 - DNA, 122 bp, Homo sapiens
tttgagtggatgatcagccacagcaggatatgcttttttttttttaagtgagattaaacacgagttagatggtaatcagtgaggctggttatatacataaatatctgcacattattttaatg

SEQ ID NO: 270842 - DNA, 122 bp, Homo sapiens
attgtaactctcccccaagctcagggacgctttcctgagtcttgtggttgtaatcttacacgttgcgtgataaactttcattttccaacgaggacattccaaaatgttaaaagtcatggctc

SEQ ID NO: 270843 - DNA, 122 bp, Homo sapiens
gggcattcttctgcacaatggcccagccatttctcgaaaggtccactggtgtggacactccgggccccctgaggctcaggtgggggcacgcggctccaaaacccacagccccatgggggcac

SEQ ID NO: 270844 - DNA, 122 bp, Homo sapiens
ttcttatttgctgggacattaatagctccaccgagtaatattcatgtcctttaagcagttcggcattctggaaataattggcatgcaaaaattcaaaatggtttgtgaacttgaattcagaa

SEQ ID NO: 270845 - DNA, 122 bp, Homo sapiens
ccttcctctttccttacttccttcccttccctcggcttcccgctcttgcctcactctcagcggctgccttcgcccctgtctgcagacagcgccgctggatgctcccagctggacttcaaccc

SEQ ID NO: 270846 - DNA, 122 bp, Homo sapiens
tcccccgggccgaggacggtggtcggggctgcgtattgcccggaccccgggtaggggaggcgcagagacccggccctaatggacttcgctcggaaaggccccggcggaagtggccgggagag

SEQ ID NO: 270847 - DNA, 122 bp, Homo sapiens
aatgactcatgctgttctcagaattttgcttttgtggaaactaaagtgcagtcataaatacggcactgttatttagatcttagtgctaatgatactattgtgagtagactagtgatgggtaa

SEQ ID NO: 270848 - DNA, 122 bp, Homo sapiens
tgctgtgcagcggtgtcagtgcaggggcatctgtggagctcagcctgccctggatgttctcgtctcctcccaggggacttaagactccacctaaggttgccagcctttcagtggtaagacat

SEQ ID NO: 270849 - DNA, 122 bp, Homo sapiens
tgttaaccgcgcacagtctcacagccacagacttctcatatctccccgattatttcgcggcgtattagtcccaaccttggctaggcctgaaactttttggaggttgttccatgtctagggta

SEQ ID NO: 270850 - DNA, 122 bp, Homo sapiens
gtttgcatgtgagttgttcgcaaccttagcattgttcattattttgcaaaactggcggggcggggggggagtggaatcattgcattccttttcgaaaagagaaataaagcggcggaaaggag

SEQ ID NO: 270851 - DNA, 122 bp, Homo sapiens
cagagcagcttccacctgggccccaccctccggaccccccacccggcccggctctccggacgcccccgcttccagccccgaccccaccccgcgggccactcagcggcccgagctggaagcgc

SEQ ID NO: 270852 - DNA, 122 bp, Homo sapiens
gttcgcggatagggtctagttgcctgctctcggacatccgttcagcagacactacctcttcgtcaccccctgcccaccctgacccgcctttacctcgcgtctagaggacacagccagggatc

SEQ ID NO: 270853 - DNA, 122 bp, Homo sapiens
aaaaagcatttgagcatcctggaagggaactctgactgacacgcgggacaactgcaggagcggagtctccaaggggaatgagcagctccctcctgcacgcctgctgagccacggggtctgcg

SEQ ID NO: 270854 - DNA, 122 bp, Homo sapiens
tggaaggtggcctctcgcttcacagaatcctatggtagacccgggttcaaatccaggcttcgccacttatggccgggagaccttgtagagttgcttgtcgggtctgggcgtcagctttttgt

SEQ ID NO: 270855 - DNA, 122 bp, Homo sapiens
ggcaggggctgtgctgcccacagacaggccccttggtgacagtgggatccatcgtgaccacgtgtggcctcatttaatcctcactgtggtcctagctgccatgaccacctacaaaacagaga

SEQ ID NO: 270856 - DNA, 122 bp, Homo sapiens
ggcggcgaagggaactgacaccactccttcccggtgagctcggcagggctgcatctctcccgtgggacgctgcagagataaccaggtagagccacgctcacgagaaccaccagccactctga

SEQ ID NO: 270857 - DNA, 122 bp, Homo sapiens
gagccccagccgagggagggtgcgtgccgcgcacgtgactcttgttgtaggcggggcctgcgcagcgtcggtggagagaagaggggaggaggagggagggaggaggtggggaggagggaggg

SEQ ID NO: 270858 - DNA, 122 bp, Homo sapiens
gaggttcccagcctggtggccccaggacgttccggtcgcatggcagagtgctacggacgacgcctatgaagcccttagtccttctagttgcgcttttgctatggccttcgtctgtgccggct

SEQ ID NO: 270859 - DNA, 122 bp, Homo sapiens
aggggagggtcctcggggcagcatctgccagccagccctgctgggggctacaccgaaggccgtcttcatgtctcaatctgcttaccacagggcacggattttgttcggactctggcagagaa

SEQ ID NO: 270860 - DNA, 122 bp, Homo sapiens
gacaaaggttccttttccaattgtgggggttagtgagacaaagtgtatgaaaagcataaacgctgaagtgccatgttggtattgcttagcaacactttgttcacactgtcacgtattgcact

SEQ ID NO: 270861 - DNA, 122 bp, Homo sapiens
aaccagagtcgtcccaacagagacagacaaatcagagatcagcagcccttgaaaagtgtccggtgcaacaatgagcaatggggcctgcgacatccccaactcttgctccccaagaaagctgt

SEQ ID NO: 270862 - DNA, 122 bp, Homo sapiens
gcttcattctgaggcggaatcccattggccagttggggaagcccctcccaggattcctggcgctccgccttccctgaagcctataaaagcgcaggtccccgcctcggcagccacgggacacc

SEQ ID NO: 270863 - DNA, 122 bp, Homo sapiens
cccaggagggaagcctggggtggagtgaagatctgggctctgtgctccacaccctgctgccgcccggggaggggccggcgtggcttccttcccttccttcccccacgcagggcccactcaga

SEQ ID NO: 270864 - DNA, 122 bp, Homo sapiens
tgaaagtgaggggcagcctgtgaaagtgtgccttagcttatccgaacagctcaggaagggcgaagctaaaggggcgagagagtgtgcctcgaccgtggaacccagttgcttggagctgtggg

SEQ ID NO: 270865 - DNA, 122 bp, Homo sapiens
gcaggttgcagatacgttgttgcatgggggtcagcagcactggggctacagctgggccaccgccaccactgccaccgcctgtcccaggccccccagctccgtcctcctcagtgggccccggc

SEQ ID NO: 270866 - DNA, 122 bp, Homo sapiens
agcaagaaggcaagctgagaaatcacggggaagagaggcaggagataaagctaaagagaacgatggggacagatcatgcctgtatgccacaccatgccccttcttgacataattcagtttga

SEQ ID NO: 270867 - DNA, 122 bp, Homo sapiens
ccctcttggtaacacaccagagcctgcggataccgcgactccgaatctagttctactgcccgctttagcacagtggctgcagctgtgctctgcgggtcctgcctcagcccggacttcgccat

SEQ ID NO: 270868 - DNA, 122 bp, Homo sapiens
tgggcttaagcgatctgcctcagcctcccaagtagctgggactacagatgtgtgccaccacgcctggctaaatttgtttaaaattttttttgtagagatggggtctccctatgttgcccagg

SEQ ID NO: 270869 - DNA, 122 bp, Homo sapiens
tggaagggtcgaagtggttgctgggggtccaaatactgcctgaacagggtactcccaggccgtgcgctgggtagacccaaggaaaatgacctgggaattcatggactgtaggcagcctatca

SEQ ID NO: 270870 - DNA, 122 bp, Homo sapiens
catagctgtttctgaaaatatttgggaaacccttggggagaatccccctccattgagagtcgccatcactgggagcctttcttacccaggagagaggatatggaggcagaatttagggtgag

SEQ ID NO: 270871 - DNA, 122 bp, Homo sapiens
gaaaggtccccgcatttgctgtccctaggaaaggtgaggctaggaggaagggggaggcaacgcagggaatgtgagaggactggggccacactgtgtatctaggaggaaactctgaatcctaa

SEQ ID NO: 270872 - DNA, 122 bp, Homo sapiens
actaccagtcaagctccaaaggaaatggcacagctaatgtaagttcctctgaagctgacccggtatctgctggttgacagttaatgaccctggttgggaccccattagagagtggggtaaag

SEQ ID NO: 270873 - DNA, 122 bp, Homo sapiens
gctcaccggtatcgtgcaggaagagcaccagcgtgattccccaggtcagcacggtgtgcccggtccgcaccaggaccccagggctgaggagcgcccagggcgccatcgcctcggcccggggc

SEQ ID NO: 270874 - DNA, 122 bp, Homo sapiens
cgagtgctgtaattattcctcgctggagcccgctgccatgaggctgcagaggcaggcccacgtggcaggagccagaggtctcactgcaggagtgggtctccatgctgtgaagcctcacccag

SEQ ID NO: 270875 - DNA, 122 bp, Homo sapiens
caggaggcactctgaaagaacgggctggtggacatggagagatgatggaggctcagaagccgctgtgagtgttccgggggaagcactgccttctgcgtcctgccgcccccagtatttctcct

SEQ ID NO: 270876 - DNA, 122 bp, Homo sapiens
aaggaatgaagacataggatagattcatggtagtaaactgttccagtttagcacagagtgcgaggcagaaggctaatttaagtaacattgcaatgaggtaccaggctttttttttaatattg

SEQ ID NO: 270877 - DNA, 122 bp, Homo sapiens
gggttgcctctctccaggcgcagcccggaaggccggtggatggcgggcgagtcttgagaacggagggagaatcggtagtttggtttggaatttgggcttaatttttaggagtaagggaaaga

SEQ ID NO: 270878 - DNA, 122 bp, Homo sapiens
gcagccacgcccccagcgtgcgcgcggccgccgtgtacgacccggcgcatgctcccggcacgctccacgcgctcctcccatccaggccgcgcctgcgctgtatgccgtgtggccgctacctc

SEQ ID NO: 270879 - DNA, 122 bp, Homo sapiens
aatcccttggagttgaacgtctgttggagagctcaggtggccttgctgttgtcctttccacgttggggaaagctggtcagctggagaacttcctcccatgtctttagtaggactaaatccct

SEQ ID NO: 270880 - DNA, 122 bp, Homo sapiens
tgctgaaagaagcctgtatttcttaagcgcctactgactgtgaggtagtatgaaagattccgagataaatatcttgcctggtctctgtcttctaggagtctgaaatccattgcagagccata

SEQ ID NO: 270881 - DNA, 122 bp, Homo sapiens
gcctgaccagtcctcagcctgacccctcactcctccctgccatccaggaccatcggtgaccgcatgggggaggccaaggccagtggaaacctgggaaacacactcaaggtcctggggcgctt

SEQ ID NO: 270882 - DNA, 122 bp, Homo sapiens
cttgaactatcagccacaacccattatgctgccaagccttttagccttatcttcctaaaccgttattctttcactgtccagtgaatttcagagactgactgggactgtctgactccttttga

SEQ ID NO: 270883 - DNA, 122 bp, Homo sapiens
cacccctagaggctgggcgtcctggggatgtcccgccccgggcggatgcagtaaccatagcgacccacaagccttccagtcacgccttgggggcccctctgtgcgcacctttacctcgagga

SEQ ID NO: 270884 - DNA, 122 bp, Homo sapiens
acgcgggcgcgcgcctgggaaggactcctgccggggtgctgtgtggcttcaagctgagcgcgcccctctctgtgcctcgttttcccctgctgcatattctctcctttatttaacagactttc

SEQ ID NO: 270885 - DNA, 122 bp, Homo sapiens
cccagggccaccctgccctgaggtccttgtgtggccgccctggcttggcagccctgcccacgctgcccccgcaaacaatggtgtgtgcgtttttacagccctttttaggaacccaatatggg

SEQ ID NO: 270886 - DNA, 122 bp, Homo sapiens
cggaatcaagaaacccctttttttctgtcccttcttggtctcttccagtcgttgtcatggcgacatgttgtttagcatgagaacaggatgatgataaagccagaggctcttcagaggcgcca

SEQ ID NO: 270887 - DNA, 122 bp, Homo sapiens
aacaatatgtactcttttgcgactggcttctttcactcaactgttacattcttccacgttcgtaatctaatccatgttcattattgtgtagcatttccactgcgtgataccatatttattta

SEQ ID NO: 270888 - DNA, 122 bp, Homo sapiens
ttccgctgttttagctgaagaattaaatcatcttgtctattatgttttttatggttccatcgggtgggggttttctgtcattagagtttgccctgtcactacctgtgctatggagggtatca

SEQ ID NO: 270889 - DNA, 122 bp, Homo sapiens
ttccttcttttactcatttaacaaacattctcatgccagtactttgctgagtcctggggacgcaggatgaataaatggagaaggatccaatctagagctgactgtattctctggtttagcac

SEQ ID NO: 270890 - DNA, 122 bp, Homo sapiens
tgtgtcgtcgtccctgtttgttcttcttcaaacgtcaggatttctccgtgtttcccagaccgtaacgtacatttaaaaagcttgctttctgtcacatatgcccttttatattatggacataa

SEQ ID NO: 270891 - DNA, 122 bp, Homo sapiens
tagctccgaaaaggtccagtcaatcttgggcactttacctacttaaactttctgggtcttcgtttctcccttcctaaagtagcgaagatgataagaaggtcctcctgggcttagtgaaaggg

SEQ ID NO: 270892 - DNA, 122 bp, Homo sapiens
agatgataaatcaggttttagaggagagaaagatatataaagttggtgcaaaggtaattgcggtttttgccattacttttggtaaaagctgcaattaactttgcaccaacctaaaagaagaa

SEQ ID NO: 270893 - DNA, 122 bp, Homo sapiens
atcctcagtggaaacacctctcatccttgcgcctccaccgtgctcaggggaaagacctctcgcctgtgagcctccaccatgctcagtggaaacacctctcatctgtaagcctccaccgtgct

SEQ ID NO: 270894 - DNA, 122 bp, Homo sapiens
ggctgggcatgcgctcggcggggcctccggctctcggggacgcgcgcgggcggggctcgccggggctgaaccggctgagcttcccagggacgccccgacccaagccctgcagtccgcgcgcg

SEQ ID NO: 270895 - DNA, 122 bp, Homo sapiens
tacttagggaacttaaaaggagagtttcaatttttcttccctgccgttcgggggagcgtgcgcatgtgctggccaaccagcctgcgctgcagtgagccctgctgctttcccacttaggccca

SEQ ID NO: 270896 - DNA, 122 bp, Homo sapiens
tcctgacacctggtcccatatggcagtgcatgctccaggacatgagccaagcagtccctccgagtaacagaaacacattcctaactctgtggtcagaccaacaggaggcagggaggcggggt

SEQ ID NO: 270897 - DNA, 122 bp, Homo sapiens
ggagcggggccagagaggatgtccttattccgggccgggcctgggtaccctgggcgccgccgagcctcagccacgcctctgtgcagcggggaagactcctctcgcgccttctcagtcagtca

SEQ ID NO: 270898 - DNA, 122 bp, Homo sapiens
cagtcccaccgagagactttaatccattcctgggatgtgggagagggaccacccgccccccgtcctctcgggaaattcacatgctgcataacagcaccaggcagaacagcctgaagactttg

SEQ ID NO: 270899 - DNA, 122 bp, Homo sapiens
cacccacccacaagaggccctcagccaactgtaggccctgggcacagactgagagcagggcggggctgggccagcgtggggactcccagagcctgcagccaggccatggctcagggctctgc

SEQ ID NO: 270900 - DNA, 122 bp, Homo sapiens
atggtgcgagaaggcggtcaagagcctggtcaagaaactcaagaagacggggcagctggacgagctggagaaggccatcaccacgcagaacgtcaacaccaagtgcatcaccatccccaggt

SEQ ID NO: 270901 - DNA, 122 bp, Homo sapiens
catgctacttaagctgtctatgtcttgatttcgtcttctgtaaaatgaggatgataacaacgtttctctgtaaggttgtttgatcagtagttgagataatctctgtaaggtacttagcacag

SEQ ID NO: 270902 - DNA, 122 bp, Homo sapiens
ctgttaagacccagtgggtgaaattcccctgacgaaaaccggcccagcaagaagtgggggcgatagccttgactgaccctcccctgcctgagctcacggtctgcctccggcaccagccatgt

SEQ ID NO: 270903 - DNA, 122 bp, Homo sapiens
tgcggggattatcaaatcccgcttcagtgggaaacgtgagcgaaacccaaggtgagtggccgcagcctttcgtcacgtgctctcccgcatgtcctaagtgagggctcaggctgagctgccgt

SEQ ID NO: 270904 - DNA, 122 bp, Homo sapiens
aactggaaacaaggttcttgcagcgagggaggctctcggctatctccgccgccggcgccgcggccgccgctgctgcattcagcaccccgggcgagtggacagctcccacccagaccccgcgc

SEQ ID NO: 270905 - DNA, 122 bp, Homo sapiens
gctgaaacagccaaggaggacagagccagtggacatgctctatgaatcatgacccacatccggccagcagaataaataaataaatcaagggcagaaggtgggagaaaagctggtgagcatgc

SEQ ID NO: 270906 - DNA, 122 bp, Homo sapiens
cgggccaggggcgcgccaggagccgggcagcagcgcgcgcagcagcggcagctcagcttgcgcagcatccagttgagcacctgcttgatgaggatggagatgacgttgaagagcgagtaaat

SEQ ID NO: 270907 - DNA, 122 bp, Homo sapiens
acttactagagttcaacaataaaacttacttgattccgtggatgaagcccaggaataggacgagactgtcagttttgagcattacaagtgagaaaatgaagaagggtttattttgaaggctg

SEQ ID NO: 270908 - DNA, 122 bp, Homo sapiens
ctctgtgccccctgtaccaccctcagaggccctgcccccacctgcgtgcccctcagcccccgccccacggcgcagcatcatctctaggctgtttgggacgtcacctgccaccgaggcagccc

SEQ ID NO: 270909 - DNA, 122 bp, Homo sapiens
gccgctagccgtaccccaaagtgggcagaagcccatgaggggaaggtgaggcacctggggcggagagaaaaggaaaaaaccttgccacggagaagggaggcctgggttccccatgaaagaaa

SEQ ID NO: 270910 - DNA, 122 bp, Homo sapiens
gtgagcctgcggtccgccccgcgcgctccgattggctctggggcctggcccgccccttcccgacactgtcattggcctaggcaaagccgtaagggtggggaatcctattggcccaggggtgc

SEQ ID NO: 270911 - DNA, 122 bp, Homo sapiens
caaggagtgcagcctgaatgtcacctgcctcgatggcagcccatgtgagggtggctctcccgctgccaactgcagctgcctggagggtcttgctggccagaggtgggtctgggggcctggga

SEQ ID NO: 270912 - DNA, 122 bp, Homo sapiens
aaagttggaggcaggaactccagtttgctttgttcccgctgcgcgtttgcatcagagtttcgccagcggggcaccggtgaggcccctcggtgtggagaggctcaccggggcgttggagcccg

SEQ ID NO: 270913 - DNA, 122 bp, Homo sapiens
gtaccctgactttctctgcctcctgctgtgggaaccgcttgctcttaggggtgtgtccagcgagggatggggaaccaggccccagggacctccagggctggagctccagggaccttgacctg

SEQ ID NO: 270914 - DNA, 122 bp, Homo sapiens
accagcgccaccgagaacaccaggctccacatgaaggcgcgcagcagcttcagcgacaggcgcgacggcgccagcagcgcggtcaccaccagctccggcatgtcgccgcgctccgggaccac

SEQ ID NO: 270915 - DNA, 122 bp, Homo sapiens
ctgttagtaacgacgtcaggagtgctcttcgtgccaggagtgctcttcgtgccccgtctccggggtgtcctggggagcagacactagtgtgttctcctcattgccgatggggactcggaggc

SEQ ID NO: 270916 - DNA, 122 bp, Homo sapiens
tatcctgttacactaggatttctattctcttttttattctctgtaaaattgaaatgaactcgtcttcctcctttcttacaaagccttccacattagatagggttctttgggatgtgagtaat

SEQ ID NO: 270917 - DNA, 122 bp, Homo sapiens
ctccccacaggctcacacatcagtcacccactcgaactggagccgggccctcgggtgaatcgttagctcctcgagcaccgagactgagacttatacattttaataacttgggacgtgcacaa

SEQ ID NO: 270918 - DNA, 122 bp, Homo sapiens
tggcacaaagctgttcttgtccaaaatagccaacacgatcgtatttgttattattagggccgcatctcctttttatagggcttttcattcagtgagcctaagatgcctgatgaaaggaatcc

SEQ ID NO: 270919 - DNA, 122 bp, Homo sapiens
ggagcggagggactcgggtgaggcctaactttgggtgacctccccttgcagtttcaacgtcggtaaacccaggagagtgaaggccagcctttaactgtctcctgaggttgtgtctgtcatta

SEQ ID NO: 270920 - DNA, 122 bp, Homo sapiens
actccagggcggccccggtgttgggggtcggccctcccagcagggtcagctggcggacagcgttgacgacgtcctgcttgttcatgtatgaattcaggtagaactcgggcctggtccggtcg

SEQ ID NO: 270921 - DNA, 122 bp, Homo sapiens
tctggaacatgggcacagagaggggcctgtgggaggggctgggaaaataaagtccaaggtcgagaccagacagctgccagcctctacatgccttcatgagcctctgctccagggaacaggca

SEQ ID NO: 270922 - DNA, 122 bp, Homo sapiens
acgtgccttttattgggcactggctctctttgagcccggagtcccgcccccgccctctctcgaagaactggccagactttttgcaaacgccttgaagggtagaattagcagcgagctcttga

SEQ ID NO: 270923 - DNA, 122 bp, Homo sapiens
cactcccccgcgaaacacaagccgtgaattttgtccccgacaaccctctttaattaacaccggattttctcaagagccagttttgagtcagcttgagataagcattgttttcaggaactgtc

SEQ ID NO: 270924 - DNA, 122 bp, Homo sapiens
gaggcccgcccctcagcccaccactgtcagctggagcaggccggctcggaggggcgggcccggggcctaccctcaggcagcgctcgctcgaggccagcttccgagctccaacccctgcccga

SEQ ID NO: 270925 - DNA, 122 bp, Homo sapiens
gtgagttctttgggaaaacgagagctgggagaggagagggtgagatgggaaaacacacagcgagttagtcccctcacaaggaaacgaacaaactccacgaaaacgtgactttgcaggacaag

SEQ ID NO: 270926 - DNA, 122 bp, Homo sapiens
cccagcccgggggcagtggcagctcgtcggtcacgtcgtaggactgctggcggaggtgcgcgtgctgctgcgcggggctacccgcagcacccgcgccggtgcccagctgcagggacgcgggc

SEQ ID NO: 270927 - DNA, 122 bp, Homo sapiens
aggagagcgaagtgcgagagaactcttcaggtgtcaccaaggtgggaaggtgctacgaggcgaggcgccgagcggcgacccccatcccgctcgcccggagtcaacatggccgccgcgcaggg

SEQ ID NO: 270928 - DNA, 122 bp, Homo sapiens
ggtcctgcaaaccccacctctccctgggcaaagcccgcgtccctctctcctccccgcccgcgccctcccactgctgaattcccagcatccaggcctcaccgccagctccccggcgcccctag

SEQ ID NO: 270929 - DNA, 122 bp, Homo sapiens
actgagagcagggagaggtgacagcagacagaaagcagaaaaaactgggtcaactggccccgtacacatcagcactgccccatggagggaagggttgttttagttcagagtaaatattggcg

SEQ ID NO: 270930 - DNA, 122 bp, Homo sapiens
ggggctggtacccaggggaagaaagcgggaggtctcgaagctggctttgtagccgcgccgcgacgggcagcccccgcgtggctcccagactgccctatcattacctagggcagggcaccgcc

SEQ ID NO: 270931 - DNA, 122 bp, Homo sapiens
acagcgtggccacaaggcgggactgccggaccccccgacgcacgccatgttctggcagagcgtggcctgagctgctgctccgggcctcaccctcgcccgtgaggagcagatagcaggcaccc

SEQ ID NO: 270932 - DNA, 122 bp, Homo sapiens
ctctcaggctcaggtgatcctcctgcctgggtctcccaaagggctgggatttcaggcgtgcgccgccatgccctgccgcaggctttccgattctgaaccatagagtcaatgaaactgtcctc

SEQ ID NO: 270933 - DNA, 122 bp, Homo sapiens
aaacagtatcatctgcagaacatctgtcttctctggctcttaactctactttctttgtgtcggttttattcccaagcagctgctccctagctgtggctggtaatggtttgtgttctcccagc

SEQ ID NO: 270934 - DNA, 122 bp, Homo sapiens
tgccacatgcgtgtcgtctctgcatgagtgtttgctggagcgtttgtcgtctgtgtgagtcgtccctttgtgtgtcctctccgtgcttgtgtattatctctttgcatgtttctcgtctccat

SEQ ID NO: 270935 - DNA, 122 bp, Homo sapiens
gaagcagaggttgcagtgagccgagatcacgccattgcactcgagcctgggcgacaagcacgcaggaagtcaggggacctagccaggatacactgccttttccatcaactggctgtgtgtcc

SEQ ID NO: 270936 - DNA, 122 bp, Homo sapiens
ccttgatggtctgtatcttgctcaggtccctgcatagacagattggctcctctataattccgtgatttattttgggaatgatagaggtctgtggcctcttgtattctccaggaaatcctgga

SEQ ID NO: 270937 - DNA, 122 bp, Homo sapiens
ggggagaggagggccgcagggggcggacgggccaggggaggcggcgggccggcaggtgcgcgccctgcaccctctctgccgcctgggaggagccctcgcagacatagggctctgcgcgctcg

SEQ ID NO: 270938 - DNA, 122 bp, Homo sapiens
atgcgtccccggcgtcggtgtcactaagcatggccgcgggggcccctgcgctggcggctgcgggctccccgctcaccgcctcgcaggagagactgccggaaaacttcttggacgctttgtct

SEQ ID NO: 270939 - DNA, 122 bp, Homo sapiens
aaggaactgacatcatttagaatcatgaaagcgtagaatgactgaggtgggctcagcacccgcgcactatagtcctgtagtccgggaaagggatcagagagctgcctactaagggtaaatgc

SEQ ID NO: 270940 - DNA, 122 bp, Homo sapiens
caccttggtggagaacaagaaagctcagctggtggtgattgcacacgacgtggatcccatcgaggtgcgtttgcctgttgactgctaacccaagggcttctggcagtaccaggaagagagag

SEQ ID NO: 270941 - DNA, 122 bp, Homo sapiens
tgctgacatgaagagagctatgatatgccactgctgccaactcatcctctgcccccacctcgaaacccacagtccccagtggagggccactactcatccccattggtttcccaggggagggg

SEQ ID NO: 270942 - DNA, 122 bp, Homo sapiens
ctacactcagaaggtgaaacaggaaaatttttttctccgcacccacattccaatcattcacggaataggatcgactccataatgactgtgatgctggaaaaaatttactaaatatgtactta

SEQ ID NO: 270943 - DNA, 122 bp, Homo sapiens
aggccgcgccgcgccgactcagggcctggcccggccagacagggaagctcagtccccgcacgccagacagcggtactcctgctggcgtcaccgcaaacatcctctgaccgctacagccagtg

SEQ ID NO: 270944 - DNA, 122 bp, Homo sapiens
ccctcccccggcagcacccccggcttctgcaggagcagggaaccttctggtggacgtcttcgatggcccggccgcccagcccagcctggggcccacccccgaggaggccttcctcaggtagc

SEQ ID NO: 270945 - DNA, 122 bp, Homo sapiens
cccctggggggccaggttcctccctaggtgtcccgtacagtctccacggtgctcactccacgactcttcaccgggcatcctgcacttgtgcactccggcagtcattggccataaatggctgc

SEQ ID NO: 270946 - DNA, 122 bp, Homo sapiens
tggaggcagctggcagctggaccaagtgtgacttgtccagcactttctcccagcccactgcgtgcctctcataacgtgggtcccttcacactcaaataaggtcagtcccagcccctgcaaaa

SEQ ID NO: 270947 - DNA, 122 bp, Homo sapiens
agtttaggttccctcttaaaaataaatatgggcccagtgcattggttcatgcctatgggacgctgaggcagatgatcgcttgaggccagcagtgtgaggccagcctgggcaacaaagtgaga

SEQ ID NO: 270948 - DNA, 122 bp, Homo sapiens
tgcggcattgagcatgctcaggcctttcccgcccacttccggtggagcagccaaccaccgcgctggtcaattgtatgcctaaaactcgaaaaccaaggcgcccagggttgtgtgagggtttc

SEQ ID NO: 270949 - DNA, 122 bp, Homo sapiens
agggggtcaatcttctcttcccaccccttcccggcctgtggggtttaactctcgggaacgcgacatccttttagtctagcaagctttacaagggctgggtatatgtgtgggaggggcgggta

SEQ ID NO: 270950 - DNA, 122 bp, Homo sapiens
tcaggactgctggggatcaagcccaaggatgtttttcagagctctgtgatttaagatgctcgaaaagagtgtccaagaggagtaaaggtcatgacagaatttactcccaggacaatctaagt

SEQ ID NO: 270951 - DNA, 122 bp, Homo sapiens
agccatggaactccagggcagtgaacttaagatgactgtaatgaaaaaaacataggattgcgtgcgtacataaatataaaatgtaatttgaagtgtgaaattgtggtgatggctggatggaa

SEQ ID NO: 270952 - DNA, 122 bp, Homo sapiens
aaaaaaaaaaaggggccgcgggaggggcacagggcttccccctcgtgatgcttccgggatcgcgcaccgctgctcacgcactctcctctgtcctgtgtcctccgtcccccgccccccgcccc

SEQ ID NO: 270953 - DNA, 122 bp, Homo sapiens
gaggagtttaagaccagagatggtgaaaccccgtctctactacaaatacaaaaattagcccgttatggtggcacgtgcctgtattcccagctacatgggaggctaaggcaggagaattgctt

SEQ ID NO: 270954 - DNA, 122 bp, Homo sapiens
ggaggctgttgattggctcttgactgtgatgcccgcaattctcaaaggaggactaaggaccggcactgtggagcaccctggctttgccactcgccggagcatcaatgccgctgcctctggag

SEQ ID NO: 270955 - DNA, 122 bp, Homo sapiens
atctgtgaaatgggctttgaaacctgccttgcctttctccgcccggtcccagcgggggtccgatcggcatcaaggcttcacccactcccagagccttcgggatcagccccaccccatcagca

SEQ ID NO: 270956 - DNA, 122 bp, Homo sapiens
tcttccagaaaagcattcatttgtcaacagagggataatgctaaaaccttaaagacaaatcggccagaaggcagggatgggagaagcaggcagggtacagcccgggagagacggcagctttg

SEQ ID NO: 270957 - DNA, 122 bp, Homo sapiens
gcggctccccctgctctgacatcttgaagacgattggggaagcgcgtcccggaagccgcccgccgccatcttggtagggtacagtgtcgccagcccgtccccgcggccaccatcttggcaaa

SEQ ID NO: 270958 - DNA, 122 bp, Homo sapiens
ctctttcaaacttgctactttccatcccgttaatacaatcccggccctgtttcccggccccgcggccattgcagagtcatgaagtcatcgcagctgcgcctgcagccaggcgggaacgggaa

SEQ ID NO: 270959 - DNA, 122 bp, Homo sapiens
cggtccggggagctgaatggcctcaggacgccggccgaccgggtgtctgcatactgtgggcggcctttccaagtgtggggagcggcctccgagaacggtgtccatgacacagggcgggaaga

SEQ ID NO: 270960 - DNA, 122 bp, Homo sapiens
tactactactaataattgcccgagaggtctgctatccgttaactgacactcggtagcggccgctgcggaatttcgaattgcgggaaacccgcagacttagtaaggtaaaagcgcagtaacac

SEQ ID NO: 270961 - DNA, 122 bp, Homo sapiens
ccgccgcccgcggccgccgccagcccctccccggccgtgcgtgctgcgcaagcacgtagccggcctctgcggaactgggcgttgcggccccgcctccatccacacccaggccacgcccccag

SEQ ID NO: 270962 - DNA, 122 bp, Homo sapiens
gctatttcacacacgctcatccctcccctctctcacccgtccccctctccaccgccaccccgcagactgctgtgtccactgcatcctgtcctgcctgttctgcgagttcctgacgctgtgca

SEQ ID NO: 270963 - DNA, 122 bp, Homo sapiens
ggggcacgggtggaggccatctccctgcttctggtcagagatctcctgctggacgcttcccgcccttggtcttaagcggggtccatttcacagaggggacaactgaggcccggagagatgat

SEQ ID NO: 270964 - DNA, 122 bp, Homo sapiens
gcgagggcgaacgggcgggcgggcgggcgcgccgggaaggctcggacctggccccagcgccggcctcgccgctctgccgccccctgcaggtgacataccgcgtagtccaggtgactgatggt

SEQ ID NO: 270965 - DNA, 122 bp, Homo sapiens
tgctcattggcagtggcagcaaaacgtagtgtagggtagaagggagcaaaaccaaagctgcgcatactctgagcagccctcaggtatgtcaccttgcttctgtgcaagaaggcccacttcca

SEQ ID NO: 270966 - DNA, 122 bp, Homo sapiens
aagattgacgtcacagttttggtttgagcaactgttaagaatgaaattacttgacccgggcgtggtagtgcatgcctataatcccctctgcttgggaggctcaggtgggaggactccttgag

SEQ ID NO: 270967 - DNA, 122 bp, Homo sapiens
ttccaggtgccgtcagtcacccctttctttaactaggaaagggaactccctgaccccttgcgcttcccgagtgaggcaatgcctcgccgtgcttcagctcacgcacggtgcgtgcacccact

SEQ ID NO: 270968 - DNA, 122 bp, Homo sapiens
gaaatcaagcgtgaccagttgccaaagtgggactgcaaagagcgtattcatggagggtctcgaaattgccatctctggggaaaggttcgtctttgtgtagctatcgcctacaccctgggtca

SEQ ID NO: 270969 - DNA, 122 bp, Homo sapiens
ctgcggtgggacagtccgggggagttgtcagcccctcttcaggccccagcggtgatgccccgaacactcaggttgcttccgggctatgcactccttgccctggcatcctcaagaacccgcgc

SEQ ID NO: 270970 - DNA, 122 bp, Homo sapiens
taaggatgccatgatggccatgaatgggaaggtgaggatcagggtgctgagcaggagtcccgtctcgaggatggggcacccacctgctaacccgtcccgccctctgtctccagtctgtagat

SEQ ID NO: 270971 - DNA, 122 bp, Homo sapiens
taggagaggggtgcttgtcagtgcttagatgccagacaaggggaagtgccaggtgccctgcggctctgcactggctgggcactcggcatccctgagcccctacacgtggcttctgggcacca

SEQ ID NO: 270972 - DNA, 122 bp, Homo sapiens
aagaagatggctctgtgcccgccttccactgtggggagatgggtggtgatcaggccaggccgctgctcagaggaaatgctaggcccgtggaggggcgcggggacagggcaaggggtttgggg

SEQ ID NO: 270973 - DNA, 122 bp, Homo sapiens
tgttccacgtttagctaaaacagtgaattgttagaattgcagcaaaacaatgaaccaaaccgtcaaccgcgagcaacctgtacttgggaggtgaaagtcagaggtgagattgtaagggctct

SEQ ID NO: 270974 - DNA, 122 bp, Homo sapiens
atgctgaaggtgctgaaatagcaatgacaagagacttggctcagtgttaaataactgccgcgctggcctgacagtctctgagatgacaatagggagaatggagaacgtggaggtcttcaccg

SEQ ID NO: 270975 - DNA, 122 bp, Homo sapiens
gtggctcattccccagacccttaatgagagtgcagcggcgctgcggaagcagcaggctaacggggcaggccttgccctcgcgtggtacgacggggaacagcaggagcagggcgagagccaga

SEQ ID NO: 270976 - DNA, 122 bp, Homo sapiens
gcctgctcaagtgattctcccacctcaacctcctgagtcgctgggaccacaggcatgtgtcgtcaccgtgcccggctaattttttttttgtagagacagggtttcaccatgttgcccaggct

SEQ ID NO: 270977 - DNA, 122 bp, Homo sapiens
cctccccccatggccaggctggcatcagcggcctgggcaccatggctaggcctggacacacgagctgcattcagatctggtccctgacgaggaggcggcgggaacacagcgttctcttggtg

SEQ ID NO: 270978 - DNA, 122 bp, Homo sapiens
gaaggggtctcgctttgttgccccggctggtctccaactcctggcctcaagcaatcctcccgactcagcctccccaggattacaggcgtgaaccagcacgcccggtggagactcaattataa

SEQ ID NO: 270979 - DNA, 122 bp, Homo sapiens
tgtgaggcgtgactgtgaggcgtgactgtgaggcgtggactgtgaggtgtgactgtgaggcgtggactgtgaggcgtggactgtgaggtgtgactgtgaggtgtgactgtgaggcgtggact

SEQ ID NO: 270980 - DNA, 122 bp, Homo sapiens
tgagcctcagccgcttctcaaactgggtctcagaaaatttctcctcgagatggatttcagcggcaggaaagaggggccagtgacgcgaggagcaagaaaagagtaacatgggagatgaatgt

SEQ ID NO: 270981 - DNA, 122 bp, Homo sapiens
agggccagggccggcaggcaggggcgggggccagtctgcgtcaccgcccgcccggccccccgcccccctgcccgccctaactccaccccgagggaaggcggcgcggataaaggctgagggcc

SEQ ID NO: 270982 - DNA, 122 bp, Homo sapiens
cttactcagaccaagggacccagaagtcccggacttccacaccagccccgcatccaagcgcgcgcctttgaaaccttcggcctctcctgccagccagagacccgccctgccgttgccatcgg

SEQ ID NO: 270983 - DNA, 122 bp, Homo sapiens
gccccacgccgaggaaacgcctgcgcccgccgccaggaaggaccccgcagacgccgctgtcgcctttctgcccgggaggacaaccctctgcctgaggaccagttccgaggtatgcccgccgc

SEQ ID NO: 270984 - DNA, 122 bp, Homo sapiens
cgtgctggagcagatccgggcctactgcgagacctgctgggactggctgcaggcccgagacggcgggcccgagggaggtggcgccggcagcggtgagtgcctggcctggtgggccccctccg

SEQ ID NO: 270985 - DNA, 122 bp, Homo sapiens
ggagaaagggtcgcgccgggcagccgcgaaagcaaggcttccccacgtctgttgacaggacggccgcctctctacttccgctggctacggcctctacgcagtagaggtaccgcgtctgtggg

SEQ ID NO: 270986 - DNA, 122 bp, Homo sapiens
gctgctttgtcagtctagtctatctcccattcagagcctgtccagggctccccagtgacccggacctcatgacttgccccctacttttgtagctttatcatgctctgctcctctttccatgt

SEQ ID NO: 270987 - DNA, 122 bp, Homo sapiens
gagcgcttgggaaaacaaagtcctgaaattccttgcattgactctttctctggagcctgtcggaaatgctaggggtaatcttgaggtcattgaatttaaaagcattcaggtaagcaacattg

SEQ ID NO: 270988 - DNA, 122 bp, Homo sapiens
ctgtttggtagtctgtaagtataatctggacaactacttggcattttaagggaatttaagcgtcatgttggtctggattggtggctccatattggtgctgagctgtctacatttggaagttt

SEQ ID NO: 270989 - DNA, 122 bp, Homo sapiens
agggcacaggcgccctcgcagccactcggagacttaccaagtgctccccaaactctgaggcgcaaccactgctgctgccttgtggccatggcccactgtttccaggacacgacgaggccgtc

SEQ ID NO: 270990 - DNA, 122 bp, Homo sapiens
ggcaccgtgggggagccagggagccccctcagcttctctcttcttcctccctctgctctccgctgtgcctaattcagaaaaataggaatcaccccccaaaatgcagcattcctgctaaaggc

SEQ ID NO: 270991 - DNA, 122 bp, Homo sapiens
aaggggaacgaaaagtgtggggtggccggtgttgcccctggatgagaccttgagcggtaacggggtatggatcttgggggacggggtctcagtccatccgactgctctagccatgtgccacg

SEQ ID NO: 270992 - DNA, 122 bp, Homo sapiens
ctcccaggttcaagcgattctcctgcctcagtgtcctgagtagctgggactacaggcacccgccaccacgcctggaaaatgtttgtatttttggtagagacggggtttcaccatgttggcca

SEQ ID NO: 270993 - DNA, 122 bp, Homo sapiens
ctccttacctttacgacctttaaatgatcagtcttgttcacagtcctttctttgctctgccgatttggagttttctctgctgtggtaaatatatgaaaccttcattaccaaagaagagtagt

SEQ ID NO: 270994 - DNA, 122 bp, Homo sapiens
gccggcagcgcggggcgggcgccggggagggcgagttcgtgtgcggcgagtgcgggaaggcgttccgccagagctcctccctcacgctgcaccggcgctggcacagccgggagaaggcttac

SEQ ID NO: 270995 - DNA, 122 bp, Homo sapiens
aaaaattgattgggtgtagggaccagccccacagggttgatgggtttttctccccgtgtgcggagatgagagattgtagaagtaaagacacaaggcaaagaaatgaaaagacagctgggccc

SEQ ID NO: 270996 - DNA, 122 bp, Homo sapiens
cctgttcaccccacctcaggtcctcactactttcctaccgataccattctaagttcccaacgcattttgtgaaagtaagtcagtttgattcatcatatagtcattggttctgatgttgtggt

SEQ ID NO: 270997 - DNA, 122 bp, Homo sapiens
accgagacgcgccggcggaccgcgggcgagtgcagccggtgacccggcgagaggcggcgccgctcccaagatgtcgcagacggccatgtccgaaacctacggtacgaggcccgggctggcgg

SEQ ID NO: 270998 - DNA, 122 bp, Homo sapiens
ctctctgccccaccacaccactgcccttcactgcggactgcgccgtgtgcgctccgggaccgcccctgcacctttgcccacagcttcccattaccaaggcagccggaggaagacctttccga

SEQ ID NO: 270999 - DNA, 122 bp, Homo sapiens
tgtgtgaggaatatacagctggaaccatcaggcccgggctggctgttgggaggagtggggcgtccctgggactgcggggtcctgagctgaatgccagcagcactggtgtggctggagcggcc

SEQ ID NO: 271000 - DNA, 122 bp, Homo sapiens
gcagatatggctgccttggatcagctgcacgcagtgcactcccgacctggccgctggaggcgcggctcccatcacctgcaccgcgactgctagggactgtcaaagcggcagcatgccatcgc

SEQ ID NO: 271001 - DNA, 122 bp, Homo sapiens
gaatcacaggtgctcaccccttatcccagagatatcgacagaaaggccataagacacacacgcctcacccatcaacattggcgtctaccatccccacaccagcaatgactggaccgggctgg

SEQ ID NO: 271002 - DNA, 122 bp, Homo sapiens
acgtgttcctgtgctcccctcacccccaaccccgacacagcaggcgctcatgagtaggggcgaaatgaatgaatgaccagcagtacattcattccgtcctttggagtggggggcctcaggtc

SEQ ID NO: 271003 - DNA, 122 bp, Homo sapiens
agcctggaagaaaacacatccggtgccaaccagctttattctttactggggccctctaggcgccccggaaggacattctgagacggtcttccttcctcacttcccccctcttggaatgacag

SEQ ID NO: 271004 - DNA, 122 bp, Homo sapiens
ctcttgtgccattgtgtctgtcccttgagggtgtctttgagggaatcacgtttgcccagacgggctcaggggctgtctgaattctagcaggcttgacatcactttctccaacccctgccctt

SEQ ID NO: 271005 - DNA, 122 bp, Homo sapiens
ctaagccagaaatgccaagccaagcgatcactgccacgccaagcagccaccgcaaagcctcgcgggtaaggccaagccacgcgggtaaggccaagccaatccgttacacaccagtgcgcctg

SEQ ID NO: 271006 - DNA, 122 bp, Homo sapiens
gaagctgagggtgacggggaccacccgcattcagctggtaggacaagtgacccccacagacggaggccaaggagagacccagagagacactggtagacaagaagcagaggccgacatagaag

SEQ ID NO: 271007 - DNA, 122 bp, Homo sapiens
taagtagatgctaaactcaaatgataagatgtgtgaccgaaaaaggaggcacggactcagcgcctggagaaacacccggaatcgtgctcccagcaggatgcagccccctgagcaccagcacg

SEQ ID NO: 271008 - DNA, 122 bp, Homo sapiens
ccagggcggaaatgacgtcgtattcacgcgccggaagtgcatttgcagagtgagacaaagcggagaacgctggtgggcctgttgtggagtacgctttggactgagaagcatcgaggctatag

SEQ ID NO: 271009 - DNA, 122 bp, Homo sapiens
tcagctgaggccgccgccattttcttgctgtccgccgtctgcagagcgcgccaagctgcccggagctctccgagaggccccaaagagactgctttcgtgccggccaggcagggggtttgtcg

SEQ ID NO: 271010 - DNA, 122 bp, Homo sapiens
gagtcctccactgagctccgccgccacctgcagtttgtagaagaggaagcggagttgctccggaggtccatctccgagatcgaagaccacaaccggcaactgacccacgagctcagcaagtt

SEQ ID NO: 271011 - DNA, 122 bp, Homo sapiens
gggctcctggcccaccagaactctggataaatgaaaatgcaacaattgtcagtgactcaccgtgaaagaggaagcagatgttgattaaatgtagtcacagtgctgagaatgttagagtgggg

SEQ ID NO: 271012 - DNA, 122 bp, Homo sapiens
aacatagttggggcttttcactagttctgtgcctccagagtccgaaaggcctgcaggctccgtggcccagccggcatccgggcggggaatccaaggcgaggaatccgaggtcgccgtccccg

SEQ ID NO: 271013 - DNA, 122 bp, Homo sapiens
tttttgcaggtaaagtaaaaagaaagggcagtgctatggaaatccttgaaagacctctcacggatggtgtctgggccagcacacataggttgctggccaccaaactgcagggtgggctgtcg

SEQ ID NO: 271014 - DNA, 122 bp, Homo sapiens
atgtaaaagacaaataaatgatgacttcccccaaagctttgcttttcttcatttggcttgcgtcagaaacacaaggctcggcacagcgaaggcttgcacccgcctcccgggacccctcaggc

SEQ ID NO: 271015 - DNA, 122 bp, Homo sapiens
gtaacagctcgcgcgcgctgcttcacagcaggtgggtgagcctacttttagtcttcccatcgacacccttagatggcagttttaactttctccctacacacaaggagctgctatacatggtt

SEQ ID NO: 271016 - DNA, 122 bp, Homo sapiens
aggataaagtcaggcaatcacagagcgccagcccccatccagagttaagtgcttaataaacggtgactgatggcaggttctcagggtgtcccaggaacttccccttcgctggtggttctcta

SEQ ID NO: 271017 - DNA, 122 bp, Homo sapiens
gacctgcaatcaaattcagatgactttgtcttgcccttcttgttccgcagcattccacttcgtaaggcccattttgcaaagtcatgctgcagggactcttttttagattaccttcctcccag

SEQ ID NO: 271018 - DNA, 122 bp, Homo sapiens
tacagacccttatgccacgccttctatttcagagtcccacgctcagaccagtgtgcaccacgtaacaagtactgtcagagaaaacaagctgatttcactaatgctgtgtttccaagggaaac

SEQ ID NO: 271019 - DNA, 122 bp, Homo sapiens
ggaggaaactatcttagagtaagagtacaggatcccagtgaggggaccaccgcccagcagcgctactgcaaaatacatcactatgtcattaagaaaggtgtcagaacaggcaaggtggacca

SEQ ID NO: 271020 - DNA, 122 bp, Homo sapiens
ccgcaccccgcctcgctgggcggaacggggtagcgatggcaggagggtcaacgcctgggacgcccgaccgtccagctgcgtccgtggtgctgggcgtccccaccacctgtcccggggtgggc

SEQ ID NO: 271021 - DNA, 122 bp, Homo sapiens
tatgcggctttatgcttataagcctgtttccctcggctgcctttcagctttgctggagatcggtttggccacaggccggcagtgattaactggaagaatccaataaatcaccctgtcagcca

SEQ ID NO: 271022 - DNA, 122 bp, Homo sapiens
tacagacacagcctactcggtgggctcagagagggccgagcaaaccgcatctgctgtgtgcgcccaaggaatggaaagcaaggacttgaggtatctgcacacccacgttcacagcagcactg

SEQ ID NO: 271023 - DNA, 122 bp, Homo sapiens
ccccatcgacccaccctccgcgcgcggctccccgccccgcccccgaatcgggcggggccgcgccttccgctgtggatggagtttatccttagggtttcagttgagccaacttttattgacca

SEQ ID NO: 271024 - DNA, 122 bp, Homo sapiens
ctcagatgatccgcccgcctcggcctcccaaagtgctgggattataagcatgagccactgcgcccagcccagaatatttgtttttcagttagaaatgtatttggcttctagtaatggagacc

SEQ ID NO: 271025 - DNA, 122 bp, Homo sapiens
agctcaccatttttaaacttgaagggaaccgtggtatcttcaaagtctccgagttgccagcgacctcagcctctccactttctcgaacatcatccctgggcactgtctcccgacacagccag

SEQ ID NO: 271026 - DNA, 122 bp, Homo sapiens
cgcgtcggtcggggtagggttcgggggcgcccgcgggggtccgggcaggggcggtggagacggcggaggtcggggcaggggacgggggaggccgctggggacccggcaggtgacgggggagg

SEQ ID NO: 271027 - DNA, 122 bp, Homo sapiens
tgtgttcgggtgagtgtgggtgcccgtgtgtccaagcgtgcgtgtaaccgtgtccctgggcgtgggaatgcgggtgtgaaggggtcacctgcacacgggtggggacccgccagccctcttcc

SEQ ID NO: 271028 - DNA, 122 bp, Homo sapiens
tgctcgtcgatgacccggcactggcgcagatacggcgtgagcttggccgggttcagggcgcgagccagccgatgccggacgccctcgattcgctcccacagcgcgtcctcctccgcctcaga

SEQ ID NO: 271029 - DNA, 122 bp, Homo sapiens
gatgtggctcctacccccccaaagacccctgcccggaaacggggtgaggaaggcacagaacggatggtgcaggcactgactgaacttctccggcgggcccaggcaccccaagcaccccggag

SEQ ID NO: 271030 - DNA, 122 bp, Homo sapiens
tcaggtgccgggtaccgctaataaacctcaaacactttgcatgccccagtgcataactgtcgccctcagactcttaattgagaaacattctttcctcctttgtgacatcacatccactaacc

SEQ ID NO: 271031 - DNA, 122 bp, Homo sapiens
ccacccaggttctttccatcttgttgtttggcagttggccagggtgttgtgtcctctgtacgccgtgacccaatagagcctctttttttttttttttaaatttagatttttattttttgaga

SEQ ID NO: 271032 - DNA, 122 bp, Homo sapiens
gcggctccgcgcgagcgccgtggcaacgcgagcgggcgcccccaggaggccgcggagctgcggcgtgggacgcttgggtgaggctcaagccaaaaccaaacccaaaccatttctcctcctcc

SEQ ID NO: 271033 - DNA, 122 bp, Homo sapiens
aacagcaccccagactgaccacagcggccacgactgcacacaggggaactttgcctcgctcgacactacagggtgaaagaaacacagaagttgtcaaggaacgtggcccctcttcctctctc

SEQ ID NO: 271034 - DNA, 122 bp, Homo sapiens
gcacagcctcttagctcagttccgtaacttaggacaaaatgagcctcacatgccactcaacgccacttttccagattctttccagcaacccaacagccacccgtttcctcactctcccaata

SEQ ID NO: 271035 - DNA, 122 bp, Homo sapiens
tcagtggcttccctaaccgtctgcagaaggagctaagcagcatgtgtcccaatgacaccccgcaggtaaacgtgctgcctgaaagagacagtgccgtgtggaccggtggctccatcctggcc

SEQ ID NO: 271036 - DNA, 122 bp, Homo sapiens
aaatcaccctaactattttgctggggagaggggtgtgggggcgggatggcgggtcctgggcgtctcggctccgccattgtcattaattataaaattgggaggactgtaattttccacttagg

SEQ ID NO: 271037 - DNA, 122 bp, Homo sapiens
acctccagtgaaggccgccgtccatctgagtgccagggagagctgggcttgggaagcccccgttgtattcctgggagagcgcggctttttcctgaaaacgtgctgaggctccaaggcaaggg

SEQ ID NO: 271038 - DNA, 122 bp, Homo sapiens
ttcaaggaatgaagtgttactgcttgattagagaaaggtgcggacccaaagagtgtggggcggcaagatttattaaagggaaagcgaaagcgaaagtaaagcttcgccgatgaggaagggga

SEQ ID NO: 271039 - DNA, 122 bp, Homo sapiens
ggcttggcgccatctgctgggctggtgcctgtggtgccgccaagcgcaggagggacccagcggctccaggtctgtgggagactttaagttggggccgaatgtggtgctcgctgccgacgcag

SEQ ID NO: 271040 - DNA, 122 bp, Homo sapiens
ctattctgactggctgtccgtgggccacgtggacgagttcctgagctttgtgccagcacccgacaggaaggtacagtcttgggggctgcctcaggaagccatgcctccttcctgggtagacc

SEQ ID NO: 271041 - DNA, 122 bp, Homo sapiens
attgcttgccggagagacatgtgttgggtttgagggcagggtctggctgcaccgaacaggcgctgcatgggaagatctgggaggacgaggcttacggaggcgtggagggtgtcaccaccctc

SEQ ID NO: 271042 - DNA, 122 bp, Homo sapiens
tcctgtgaaaggaagtgctcctctgatgaccaatcagcggcgagaagctcttttaacgtccgtccttctttcacgcctccttccccgcgctttggttcgtgcgtccgcgccccagtgtcggg

SEQ ID NO: 271043 - DNA, 122 bp, Homo sapiens
tcttatttttacaaattttagaaaaatatataatcaaccggagatactagtaagtcttcccgggtctttggaaggcatcgtacaagggagggccctaattccaaagattcctcaactgcagg

SEQ ID NO: 271044 - DNA, 122 bp, Homo sapiens
tgctaggctagagtttctctacggcactgaacagttaccggaagtgcgaatattccattccgtttctcatctcacatggagtgaattctaagaaaaagcatcaaacacaaagaacccaatag

SEQ ID NO: 271045 - DNA, 122 bp, Homo sapiens
cagaggctcatctgcgggcctcagtggcccttttgaaaacgccagcaacagaggagtcctcgacgctgtccccacaaaaatgtgccaagcaagcctcagggtgggtgtgggggactcccctc

SEQ ID NO: 271046 - DNA, 122 bp, Homo sapiens
gccagcagccacctggggacagtgccagcacgggggcatgccgggggagcctctgggagccgcaggaggcactagggacacgcagctcgccggccctccaggaggacgacgttctgaaatgg

SEQ ID NO: 271047 - DNA, 122 bp, Homo sapiens
gggggagtctggctgtgaggtcgtcagcacatggcggtgctgccggctgcctcccacgcacgcaggctctgccagcctgccttgccaatctgccaggcaactgggacaggtgcagacatgac

SEQ ID NO: 271048 - DNA, 122 bp, Homo sapiens
cggccggttcatgccggtcagctcccgcccctcgagaaggatggcctggaactgctgagacgaggccagagcatgcatggggcttttcttcaggctgtttggacagccgagaagccgagcca

SEQ ID NO: 271049 - DNA, 122 bp, Homo sapiens
accttcccaattcttgtcatctcggttcaggaaggtgaacggtgttccgattccccgcggcgggggcctgtagtgggagctctgccccttccccgcctctgctgcaggccccgcccctcgcc

SEQ ID NO: 271050 - DNA, 122 bp, Homo sapiens
cttcctgtgtatctgattgtgggttttgtctctgccacgtgcagggatgggtgcagactccgtccaaggtcttggcaggaagagaaaactgccactgcagaggggctggctgaggggctggg

SEQ ID NO: 271051 - DNA, 122 bp, Homo sapiens
ccttctttccctcctccctctcccggcgcccgaaaggatcattgttagccgcccccgccccgcccaccccggctgtttatttatgcacacgtcactgggccggccccgccctccggcatctc

SEQ ID NO: 271052 - DNA, 122 bp, Homo sapiens
ttgggggcggagaggaggcagtggctgcccgggccgaggaggggcgcgctgactgctcaccgcgagtcaggaggggccggcgggctcacggagggagacagggtgggcgggggcaaaggcta

SEQ ID NO: 271053 - DNA, 122 bp, Homo sapiens
ccccagcccagcctgggccagaggtgctgtggtaggggtgcagctgggtcctcagaatggcgtgggctaaccagtgggtaggggtgcccctctgctctcttcctgggacctccaatctagaa

SEQ ID NO: 271054 - DNA, 122 bp, Homo sapiens
gtggccggtgcagccaactttggctggcttatatagcgagctccttcctctgtaatgggacgcctcgcctccagacatcctttcccactttttcagttggcgaattaaaggaacagccctcc

SEQ ID NO: 271055 - DNA, 122 bp, Homo sapiens
ggaagagtctgggaagtgctagggcacacagggtgcagtggggaccctggagcggagtaccggctctgccacagacctgcgtcttggcatcagacacaggtcttgctctcccaggcctgctt

SEQ ID NO: 271056 - DNA, 122 bp, Homo sapiens
cgcctcgccttggctggggagaacgtcggtgggcaggattcagaggggcttttggtttcccgttttccacactgaacccttctaactggtctctgaccctgattattcagggctgcaaacag

SEQ ID NO: 271057 - DNA, 122 bp, Homo sapiens
gtctctgcacgcctgacgtggagtgacctcggtcagagggtgggctgagaactctctcatcgtccagggtggaggctggataggcctccctgttcacactgtgctaaagtaaatagcagttc

SEQ ID NO: 271058 - DNA, 122 bp, Homo sapiens
atagaaaacagagtagcaaatatgacatatgaggcacttgtgctgctactcccccttctccgaccctcagcagacatcactaaatagttataaatgtctttcacactgagataagacctggt

SEQ ID NO: 271059 - DNA, 122 bp, Homo sapiens
tgcttttgtctttaatatacgttattcttaattgaagcaatcctgtccatatgattgtagcgtttttcttcaggaaataaaaaaaaaataatgaaaacatgagcactacattgtgaaataaa

SEQ ID NO: 271060 - DNA, 122 bp, Homo sapiens
gcgcggctagcggatgaggacgttaatctcggccacactggcctccagcacgttctcggccgtggtcttgccgtgttgctccttgaggtgccgcctaatggcaggcttgtgggcgaagcgca

SEQ ID NO: 271061 - DNA, 122 bp, Homo sapiens
cacctgaattggaacttctctggcatgccgggtgtgggttcgttcccgagcacctccacccgcagctctacagaagcacgcgcagaaggcactgtcacctccagcagggcctggccctgacg

SEQ ID NO: 271062 - DNA, 122 bp, Homo sapiens
catcgtcgtcctcatcctcattgccactgccgaggctgggatgagggccagggagtgggccgggccgtggggcaggtgggtaggcagtgcctggtgggccctcagagctgggctgactttcg

SEQ ID NO: 271063 - DNA, 122 bp, Homo sapiens
ccctacctcgccggagccggagctggagccagggccgagatgccgcaaagccaagcggggcgggcggcgggcgcagacacccccggtgccaagagagaggtccctttggagcccccaagagt

SEQ ID NO: 271064 - DNA, 122 bp, Homo sapiens
tctctcctccctggatgcatttatttcagtcttttctttccttcctgtctctgtttctcacggaggacgctgtgccagctctcaatgctgggggctctgctgaccttcctccagcctcattc

SEQ ID NO: 271065 - DNA, 122 bp, Homo sapiens
ccatagcaggggctccagctggcagccacttgggcaggtactgagctgtaggagtttctgcgtactctggtggctcgcagtaatccagtgaagcaggagatccatcaactcccatgagaaga

SEQ ID NO: 271066 - DNA, 122 bp, Homo sapiens
gtgcccagcttcggagacctgtttgctttgcgcctccagtccgggggtggatgctggaggcgcagggagccgcgggttaatggggctcggctgttgctgttcggctggcccagggggagacc

SEQ ID NO: 271067 - DNA, 122 bp, Homo sapiens
tgtaaattgtttaacacgtgggtagcactttattaacaacaaagactggttggaagcccccgtctgtgcttgcagctgccttcagccatggtccaccctaccaaggcatgtaggctcagaga

SEQ ID NO: 271068 - DNA, 122 bp, Homo sapiens
cttctgcagggccgtcttgttcttccactccttggggaagatctccttctcgggggcttccgactccaccagctttttccagcgcttggcagatccttcgatgtcactgtccagatttttga

SEQ ID NO: 271069 - DNA, 122 bp, Homo sapiens
tcgcagcccggaccgcgggactcaccgcgctggcggcggcggcgccagacgacgcggggccgggcacgtcctgcctcctcaggcgggacttgaggctcttcatggctaactcttgcctggcc

SEQ ID NO: 271070 - DNA, 122 bp, Homo sapiens
ctgggataggctcccctagctcctagttgtggggcctgcgttagcagaggacttggcgagcgctgagtccggtctcagagaaggtaaatttgttcaaactgaaaggattagccacccttcta

SEQ ID NO: 271071 - DNA, 122 bp, Homo sapiens
ctcgttcagtgtttttttttccctagacaatttcatgttccagtttacagatagctgttacgacattcaaacctaatgttcgtgggagcattatagagaggagggtgtagttattttatttt

SEQ ID NO: 271072 - DNA, 122 bp, Homo sapiens
gtgcccacctccagctttcgttgggcggctggtgccctgcacaggcctgtgagcgcgtgccgtgacactgtagctgaagctagtgtccttcctagcctagcgcccactgggtgccacagttc

SEQ ID NO: 271073 - DNA, 122 bp, Homo sapiens
aatcccagagccccgcccctcccctgaggggtccgtagtcccattccgagaccccagtaccgcggcgacccctgctccctcgagcacttgttgtgtgcactttagttatcaaaacagtctat

SEQ ID NO: 271074 - DNA, 122 bp, Homo sapiens
ctgtcctcctgcgcctggatcctcgagaaacggactgttcttagaagctgaaagtccagccggatttacagacatccaagtaagagtctgtgagaaccgaaattgaaaggacatgcactttg

SEQ ID NO: 271075 - DNA, 122 bp, Homo sapiens
cgcaaaaccccggaaatgtggcctctctttcgtggctcactttctaaactttccagaaggcgcaaagtttctcccagcgccgccctgcactggaggctgcgaagaacgcagaagcggctttg

SEQ ID NO: 271076 - DNA, 122 bp, Homo sapiens
aagtatacagtatgaggagtcttttgattgcaagtgactgaaaacctaataggcaagcatcgttagcttcccacacaaagtgctttcccttgcttctaatacactcctgatttttttggatg

SEQ ID NO: 271077 - DNA, 122 bp, Homo sapiens
cttaacggaggcaggcagcctgttgtcgggctttgctggcagtgcttggttgacaccttccgagggcgctgggacccaacaggtggagctctgtgtgctcagggtgtccctgggtgggtgcg

SEQ ID NO: 271078 - DNA, 122 bp, Homo sapiens
gtcaaatcagttaagttgccaacatttgttttgaatctacatttctctaactaaaaagcccgtttcttttttctttttttggttttgttttttttgtttgtttttgcagacagagccttgtt

SEQ ID NO: 271079 - DNA, 122 bp, Homo sapiens
gagaagggcgcgtcgtggtgggtggcattgggtggctcctttctgttggtggccccttcccggttgggaccaggcttgtgggagggagcggagccttcacagccagccgagcctctgaccag

SEQ ID NO: 271080 - DNA, 122 bp, Homo sapiens
gcggccgcgtcggccaatccgctggctgtgctactgtcctcgttctgcacaaagctaccacggggaaaactgggtgaagagtgcacaggatctgtgtattatttctcacaactgtatgtgaa

SEQ ID NO: 271081 - DNA, 122 bp, Homo sapiens
gtttgtggtaaatcgggaagcgggccgggactacaattcccataatgccgcgccagctggcgtggacatccggcgcgccgaatccggatattttaaacctgagtctttcgcgctgggcatgg

SEQ ID NO: 271082 - DNA, 122 bp, Homo sapiens
gtcttctggccagaatgtaaactccacaaagacaagactatctcctgcctctctggcacccgcataggggcaggcatggtgccgggcacagaaggactctgcagaggctgtccaaggcagcc

SEQ ID NO: 271083 - DNA, 122 bp, Homo sapiens
ggggggggtggcgagacttggcacagcgctcgtcgtgcggtgacggcggtgaagggtccccggcaccctgtgggttgcagcacttacaggctggattctccctggccccatctctgtctgcc

SEQ ID NO: 271084 - DNA, 122 bp, Homo sapiens
ctgcactcctgccctctgacttcagccgctacttccaatatgaggggtctctgactacaccgccctgtgcccagggtgtcatctggactgtgtttaaccagacagtgatgctgagtgctaag

SEQ ID NO: 271085 - DNA, 122 bp, Homo sapiens
gggatgagcgcacggacgggtgagcgccccggggggcgggtggggcctgttctggacagccggtgtctgcagcccccgggcccgcagcgcggtggccgccgtgccctccctgcccgcgggag

SEQ ID NO: 271086 - DNA, 122 bp, Homo sapiens
tgtagcacaagtgcagcctggcctctcaagctggtggttgccatggaagagttcccagtgcgaggcgagcttaacaaggggcagggtgtccttttccttacctgtgttgtgcaaatgcttag

SEQ ID NO: 271087 - DNA, 122 bp, Homo sapiens
ccccgccctcaggagagaaagcacaggagacgctggagtgctgtgaaggagactggggtacggggaccctgtgtgtgcacatgtatctgtgtgtgtgcatgtgtgtgtacaagtatgtgcac

SEQ ID NO: 271088 - DNA, 122 bp, Homo sapiens
cgcaattttccgcacctgcgtgttgttttttgccgccgggttttggcggagccatgcaggcgcggttcctgggacccgaatttattccaagagaaaacgcacaaaaatcagttgtggtctca

SEQ ID NO: 271089 - DNA, 122 bp, Homo sapiens
ttgggcctcaattttcttatctctaatgcggagttaaccatatctacgaaaaggtgaagacgaagggagaagtgtttggctcgcaagggaaatgaaggctagcttccaactcgtattcttcc

SEQ ID NO: 271090 - DNA, 122 bp, Homo sapiens
ccccgcccagcgggtatcccccgcccccgctggccgatcggcgatcgatcgcaatgtctgcgctctccgcgttcttccagcgctgtctttttagtaccacatgcgcaggcaggtgatggcgg

SEQ ID NO: 271091 - DNA, 122 bp, Homo sapiens
cgtgatggtgagtgccacggacagggcgcgcgctgggtcggggggacccaccgtgaggagcgatgctgggggaggtctgtccttctcagtcccgaacctccctggaaggacagcgaccccat

SEQ ID NO: 271092 - DNA, 122 bp, Homo sapiens
cccacgtccctgccagatacaaagtctccaagactcagagggacacaaatccttgggggacggggtggttctcatcccaggcccagggaggaagagggtgccttctggcccctcagagaccc

SEQ ID NO: 271093 - DNA, 122 bp, Homo sapiens
ttctactcaacgggagtaatgccctgacttccctctggtgccctttattctgtcagcctccggggcttaacatcaacgtcatctgcgttagctttaaagataaaaactggccgggcatggtg

SEQ ID NO: 271094 - DNA, 122 bp, Homo sapiens
catggatgcacagagctgagcctgccggtgagaggctggcttctcctcaccctcactgcacgccagagccctgcaacctctaagcttctcagatgcaccaggaaggcatggagagcagaggg

SEQ ID NO: 271095 - DNA, 122 bp, Homo sapiens
cgccagggctcacaggggttggtcccggggcgctcggatgtggccgcgcggcaggggaggcgggaaccggtccgcggggctaagcaggcggctgtgggggcctggggcagagaggctcgtcc

SEQ ID NO: 271096 - DNA, 122 bp, Homo sapiens
gactcaaaacacatttcaatattgttcctctttctttgctttggctgctgggagcaaatgcgtgggactttttttttttgagacggagtttcgctcctgttgcccaggctggagtgcaatgg

SEQ ID NO: 271097 - DNA, 122 bp, Homo sapiens
gctggaccgactcactgtttgagagctaaccaaaaaacatgagcaaagtgaaaaatccgacgacataaaactagcacatagacgtcattaaacagggaatcagctaggagcacactatttca

SEQ ID NO: 271098 - DNA, 122 bp, Homo sapiens
ttcctatgctgccataccaccagtcttcattatctttgaaaaacactcggataatgtctccgcgatggatggttagttcatctgatcgattcgctgtgtagtcataaagagccactacctaa

SEQ ID NO: 271099 - DNA, 122 bp, Homo sapiens
gtgttacttaaaagtattacctcgcacctgtaactccaggaaagagccggggcaaaaatccgtaaccaagacaacagggcgcgattccaatcaagatggccgccagcgcctctagacgccct

SEQ ID NO: 271100 - DNA, 122 bp, Homo sapiens
gctgatgctcgctcgccaggccgggggctcccgccgcagccttttgacaggcacatgagccgcgagcttccgaacctcgataatatcatctcgagcgcgaaagtcaatacggtgacagcgcg

SEQ ID NO: 271101 - DNA, 122 bp, Homo sapiens
cttatcatcatccaggctgcatttacaaactttcttattaatcataacaagacaagaatccgccatttatttaatgcattcagcactaggaggtaactaaaaagccatttgtgccgtaggaa

SEQ ID NO: 271102 - DNA, 122 bp, Homo sapiens
gaaccgcaaaaggtaccaactccgccatcctcccttcaccgcacctgcgcggctaaccctcgccccagcattgcgcctgcgcaaggcacgcccgcgcttttttaaaaagaggcgcatgcgag

SEQ ID NO: 271103 - DNA, 122 bp, Homo sapiens
ggagtgtcaatgtctaagaacatttctaacagtgtctgggccagcaatatttctatcaaacgttccaagtcatttaataagcctttatatctgtatcacacttcacaaattgcaaaagccct

SEQ ID NO: 271104 - DNA, 122 bp, Homo sapiens
cgtagaaatacgagggttgagatttcaaatgctcatctgcaggggagacaacatatcacacgtgtccaggttacagtcagatatgtcattctggaacactatgcgggtgctcaaatacagac

SEQ ID NO: 271105 - DNA, 122 bp, Homo sapiens
aaccttctgttactctcacttaggtgctcttttgggcctaaatataattagatccttcgccgttgttttgaggtaaatctaaacgaaaaggaacacctgttaacaggtagtgatgccgcagg

SEQ ID NO: 271106 - DNA, 122 bp, Homo sapiens
gtgcctgcgccccttcccaggcaccaaaagccttgcgctccggactaggggcttgagatccggggctgcctggaggctgggggctatgactcagagtttcaggggtatcctggggtgatgaa

SEQ ID NO: 271107 - DNA, 122 bp, Homo sapiens
tgtgggcagaaggcagcggacctggagggagccctcgggctctgagagtcacgcggggggcggcctgctctcccgcgccccctagcggagcatcggctcacacgcacctgagaggtcggaag

SEQ ID NO: 271108 - DNA, 122 bp, Homo sapiens
ctccagtcccttaggaatcctagattgggggtgctggggtgtagaagggtctcttcctagcgaagagtaactggcaagggtgcctgggcttggctccctgtggttctgaagtttggtcagta

SEQ ID NO: 271109 - DNA, 122 bp, Homo sapiens
cgggaactgttaggtctgttatccagaaatgtgaagtattccttctctctatggtctttgcgtgggacagatatatctggcctgagtatgtggcctaaacacagttgtgcttaaagcaggca

SEQ ID NO: 271110 - DNA, 122 bp, Homo sapiens
tctggggagaagattcctgaggccgagagggtccttgttctcttcttgccctcggctcagcgggcaccgggagaagaatgcgatcccggagactgcaccgtcttaaatatagcagcactgag

SEQ ID NO: 271111 - DNA, 122 bp, Homo sapiens
aataatgttgctataaacatttgtatacaagtttctgtgtggatatatatcttcatttttcgtgggtatatacctgggagtagaattgctggatcatctcatagataaacaaagccagacac

SEQ ID NO: 271112 - DNA, 122 bp, Homo sapiens
gccataaatgtcacatttgtgtgtgacagagcataagggattccattggtaactctggcccgggtgactggtgctggcctgaagctgagcctagggctaaaacatccatagtgagcttaaga

SEQ ID NO: 271113 - DNA, 122 bp, Homo sapiens
cggggtgggccaggggtcgaggtgatttgtgggtccaggacgggggttgggagctgcccccgctaacccaccctcgtctgagaggccgcgaggtttcggcctgagatcccgtgaaggcgaga

SEQ ID NO: 271114 - DNA, 122 bp, Homo sapiens
ggagattctgcttctgaaagtgtttcctgaacttcaggatgctctgaagaagtaaggagccgtatcaatcactgttgagttcattggcaggaaatagaccacagtcagggtgaggggctggg

SEQ ID NO: 271115 - DNA, 122 bp, Homo sapiens
ccccggcgtcacgggaccgggaaggcgctgtggtgctgcggggaattgcggagaagaaggcgggctccagtggaggtggctcatccccgcacggtcactgccctcgcccgctgttggggtcc

SEQ ID NO: 271116 - DNA, 122 bp, Homo sapiens
agggtctgttgctcccagcaaggacccaggacccttgcccgctccccggcagagaattaacgtccagttcaacaatggggagcacggctttgacaacaaggacatggacatgaagaccatct

SEQ ID NO: 271117 - DNA, 122 bp, Homo sapiens
cactgcttttgttccgagttctgagcctgcttctatttgcatcgtaacctctttgggggccgggactgtgcacttgctccctttctatacctctccacagttcctagtaccggccaaaaaca

SEQ ID NO: 271118 - DNA, 122 bp, Homo sapiens
agacggcatctaccatttcctctggattaaaactacggacgggggacaacagtattaattcgattgaatgtggctgatgatgcagttgcttagcttctttgcagttctttgccttttgtact

SEQ ID NO: 271119 - DNA, 122 bp, Homo sapiens
cttgtggggaggggagaacccgagcagcagctgcaaacggaagggctgtgagcgagcgggcgggcgggtggctggcagcgaggccaccagcagggggggcccgggccgaggccgcgccacct

SEQ ID NO: 271120 - DNA, 122 bp, Homo sapiens
ctcagtgatgtcttagagcacctaccttcctgtttaaacgagcgcctgacgctgcgttcacgggcagttttacaacgggatgccgcaaatgcatttcaaggcataaaacagagctccaccgc

SEQ ID NO: 271121 - DNA, 122 bp, Homo sapiens
ggaggctgaggcaggagaatcgcttgaacccggaaggctgaggttgcagtgagctgagatcgcgccattacacaccagcctgggcaacaaggcaagactctgtctcaaaaaaaaaaaaaaaa

SEQ ID NO: 271122 - DNA, 122 bp, Homo sapiens
ctcccatcagtccacgcacagcttccgtctcccatcagtccacgcacagcttctgtctcccgtcagtccggtactccagcagcggtgaaaatctcctcagttcttgtctgttccataaggcc

SEQ ID NO: 271123 - DNA, 122 bp, Homo sapiens
agagggcactcctgaacatcagtctcacctccccagcgctgtgcgtcctcgggtctgggccgggtactctgccagcggcctttctccgcagtggcattagactacccgggaacgggaagggg

SEQ ID NO: 271124 - DNA, 122 bp, Homo sapiens
gagaattcgcagtttcgtctggatttgggagggcagcgagaattgggcacctactgaatgcgtggagggcagacggcagaggaagacgactgacgcttggctccatcttgccgagacttagg

SEQ ID NO: 271125 - DNA, 122 bp, Homo sapiens
acagccaaagataaaactatcttcgtttatgcttgttggaaacagcataaacacagttctcggaaaagttataactctgacatacctctccttttattttttactttttcatctccacacct

SEQ ID NO: 271126 - DNA, 122 bp, Homo sapiens
aagatgcccgagggtactgaagccagccacgctgcgcccggccctgccccgggccttcctcgtgcctgggaggtcgttctagggatgctcctgacctccgtctcttggacctaagatggaat

SEQ ID NO: 271127 - DNA, 122 bp, Homo sapiens
gcagcatcccaggctgtggagccagttgcctcttgccgcatgtgattcaccagcaggagacgcatgcaccctgtggaaagggaagctgggcatcacagcatgctttttaattggctttaaca

SEQ ID NO: 271128 - DNA, 122 bp, Homo sapiens
gtaaatcaattacgcattaactttcatgctctggacaatgctaggcaagtagatggggtccgaagagcattgtctctgcatcatcctttcaataaacacaagacggaagaccagatgcacac

SEQ ID NO: 271129 - DNA, 122 bp, Homo sapiens
ttaagttcgagaagctctgctctaggcttttcctgaatgtggcgcatcagtgattcctcccggccccaaggcctctgtgcccaaccaggactgacttaccccggccttgcacagcacccgca

SEQ ID NO: 271130 - DNA, 122 bp, Homo sapiens
agccacctgtgagctctacctctataaacaccaacacatacacagcctggagaaactccacgcccggctcccatgaattatatactgaccagggcccaccagaggccatgtgctcagcaggg

SEQ ID NO: 271131 - DNA, 122 bp, Homo sapiens
tgggcgacagagcaagactccgtctcaaaataaataaataaataaaataaaataaacatccgaagtcaggggtgtccaatcttttggcttcccagggccacattggaagatgaaaagttgtt

SEQ ID NO: 271132 - DNA, 122 bp, Homo sapiens
ccaagttacgccaccggtcgaggacggcaggagacccccgagtgcagagaaagctcaaaccggcagcgaagtcggtcctagccaagctgaaaaaacgtctcggatttcgcggacagcggcct

SEQ ID NO: 271133 - DNA, 122 bp, Homo sapiens
gtaatggacgagtggacatcatgttcctcctgatacaatgcacccagggggatagagcatcgcttgcatgggattcctgccaaaagtgcaggactccaatcatcaggaagcattagacaaac

SEQ ID NO: 271134 - DNA, 122 bp, Homo sapiens
gctcaggacgggcgacagccttgtgaggagaaggcagagcaggggccattcttcccagagcggagctgaggatgctgggccctgacagctgccacccaagtctcaaaacctgccaaagaaga

SEQ ID NO: 271135 - DNA, 122 bp, Homo sapiens
aaactccttctctgtgtcttatcaactgcatccatctcactgaatgccactttgcagactcgggttacatttgatgcttttccaagttattgcaaaaacatttattgatccagccttctctt

SEQ ID NO: 271136 - DNA, 122 bp, Homo sapiens
cctcccaggctccctcctccaccccaaccccttctcactcatggagcccttgggactggtcgtgcatgggaaagctgaacctttttccgcagcactccgaagccttgtcaacaacccgcgat

SEQ ID NO: 271137 - DNA, 122 bp, Homo sapiens
tacattgcgccctgcaaaagatgccaacagaaacaacacagattgcaaacgaatgggaaacgtgtaggaacaatgaaagtctgggataacaaataataaacataatgatgcaattgcaacag

SEQ ID NO: 271138 - DNA, 122 bp, Homo sapiens
agagcagcggggctggggccggtggggggccgtttgggacgcgcggagaggtcctgagcgcggtggctctgcgtctcctagctctgatctccaggctacccctgtgattccgcgcagaggta

SEQ ID NO: 271139 - DNA, 122 bp, Homo sapiens
gggccgctctccctccaggccccagccacgccctctaacccaggttcccgtcctgcaccgcgccgcaagtccccccaccgttcagcgcaaccgggccctcccagccccgccgccgtccccct

SEQ ID NO: 271140 - DNA, 122 bp, Homo sapiens
gttgcatctagattttgttttctgtctctggattgtaaaaagctgctctggcggcccgcccgccccggcggggactggggatgcacgtacacggagaagtcctggctgccaggccagcagcg

SEQ ID NO: 271141 - DNA, 122 bp, Homo sapiens
tagtgtgttttaactagctaaacaaaactaagttaaatgaacatttaaaagtttccctagcgggccattccttagcaaaatgttggaatccctgttgctacattgactaaaaggtcatgatg

SEQ ID NO: 271142 - DNA, 122 bp, Homo sapiens
cccctagtctggagcccacttccctctggagcttgcggggtcctccccgggcttgaccgtcgcgtcctggacagggtgtttggccaccttcttgctggcggggtcttcactgggcctgggaa

SEQ ID NO: 271143 - DNA, 122 bp, Homo sapiens
atggagggtcccgggaatggcggatgcagaggaaccgtggggcaggaggggtggtgggcacggtgtccattccaggcaaagagccagccccaactagcacagggacctcccaaaacttcagc

SEQ ID NO: 271144 - DNA, 122 bp, Homo sapiens
cctctgcagagcctgcacctcagcagcacctcaggagcagccaaggcataaagcagtcaacgcggtgccctcagggcaaatgcaccaagcatggttccagcttattttgaggtgtttggttg

SEQ ID NO: 271145 - DNA, 122 bp, Homo sapiens
ttccccactgaacttggaactcctagagggcagggttgggtcctactcaaggggcatccacggagctgggtcagcaaacataacactggtcatctgagcctgcgcccgcccttcctcccagg

SEQ ID NO: 271146 - DNA, 122 bp, Homo sapiens
gagaagctggatgcaaaaggccgggctccattccgagacatccagcaaaggcagcatcttcggggccagggagctggcagcagggactgcagaggggcgaggtgtcctctgggggtggtcgg

SEQ ID NO: 271147 - DNA, 122 bp, Homo sapiens
gccagaaagcactgcatgttgcccaagacagtcacagacatcgcagttgcctgggagtcacgaaactctaccactacgttctcgctgctccatcgcgccgccatctcccactctcggccgcc

SEQ ID NO: 271148 - DNA, 122 bp, Homo sapiens
tgcagccatttctagataaaaaagaaacctggcatctcaaaggggccaccaagttctccccgagtctaccactgaaaggaccttttttggaaataggtttcttctgtacctctggaagggta

SEQ ID NO: 271149 - DNA, 122 bp, Homo sapiens
gggaccagtgtgaggcccattgtttgaggctggagctggtgggggccactaggaagcccacggcaatgcccttcatcccacttaccgcagctccagagccctgcgggaggactcagagtcag

SEQ ID NO: 271150 - DNA, 122 bp, Homo sapiens
gcaaaagcactccccgtcaggttcctcgctgtctcaccttgcgggccctcctgtgagcgtcgcgtcaatcacatggtcgttatccatgcggaacatgtacacaccacggttctgagggaaaa

SEQ ID NO: 271151 - DNA, 122 bp, Homo sapiens
tggggctcagggagaccttcctggaggaagccgcatctaagatgaacaatcggggcggggcgtggagaggacaagggacgcatggccagcggcttctaggaaccgggaatccagtctgaagc

SEQ ID NO: 271152 - DNA, 122 bp, Homo sapiens
gtgctcccccttgcggcgggaccgcgaagctcccactgcgtcgtcgactcagttgtctcgcgaggtttgttgcttggtcttggagccacaatttgagaatgacgtatctgagttagagtctc

SEQ ID NO: 271153 - DNA, 122 bp, Homo sapiens
gggcggcccgtgggaggggctgaggcgcagtttcctactcacccggatccgaatcctccgcggtgctgtttcaagagagccggattccagatcacgctccagcccggactcggaattcctgc

SEQ ID NO: 271154 - DNA, 122 bp, Homo sapiens
gtggcggcagcggcggcgggggcagtcaccggctagggcgacggctccgaggccgagtggcggtccgacagagtcctccgtgtcctcccccgcatgacccccttggtgagtacgcgtcccga

SEQ ID NO: 271155 - DNA, 122 bp, Homo sapiens
gcctccccgagcccctcggggccccttccctggcagctgggatgagggcagcgtgctcctcgcaggttacttggtcctgaggtcctccctcaggcgctgggcatgcctggggcgcagaaccg

SEQ ID NO: 271156 - DNA, 122 bp, Homo sapiens
aaaactatatactccacaaaatgtatgtgttcagtcttagtcacttatctgctcttaagacgtaaataaatgttcttaggggggaaaaccaattatccagtcctccccgcttccttatttgt

SEQ ID NO: 271157 - DNA, 122 bp, Homo sapiens
ccctccaatggctctggtcgcgacttcccgtccctagtatgagctcgggtactagaacctcgcgccccgcctacaacttcggctaacccccctcggacccgcccccttgtagttggcagcgg

SEQ ID NO: 271158 - DNA, 122 bp, Homo sapiens
catatggcatgactaaaaatccacttagcaaagttataccattcccactgcccataatggcgtcttcagtgtctgtatcatagacattgactctctgtgttctgaaagctttttccttcagg

SEQ ID NO: 271159 - DNA, 122 bp, Homo sapiens
aagatggaaattcaggagctgcagctcaaagaggccaagcacattgcggaagaggctgaccgcaaatactgggaggtagctcgtaagctggtcttcctggagggtgagctggagagggcaga

SEQ ID NO: 271160 - DNA, 122 bp, Homo sapiens
agcggcagcttgatcaccgcgggcaggatagatcgggaggagctctgcgctcagagcccgcggtgtctgataaatattaacaccctggttgaggataaaggaaaactctttggggtagaaat

SEQ ID NO: 271161 - DNA, 122 bp, Homo sapiens
ttgagcagggcgtctctaggcctggtcggctggcggcggtgagtgggccccaggcaagggcggagggcggaactttggggttcggcactgccgggcggccggaaggtacggtggggatagct

SEQ ID NO: 271162 - DNA, 122 bp, Homo sapiens
ctggcccagttgccccctggtcttttcgacgggctcctggctctgcgctccctctcgcttcgctccaaccgtctgcagaatctggaccggctgacatttgaacccctagcaaacctgcagct

SEQ ID NO: 271163 - DNA, 122 bp, Homo sapiens
ccagtgtagacagacccagagactcggccagtgtagacagagccaggctgggcagcccggcgacgctggccccacgcacacgggccaccctggtgctggtgatcgatacggcagggaggggg

SEQ ID NO: 271164 - DNA, 122 bp, Homo sapiens
ctcccccagccagagcctggctcctggggagggtgcccggcccagccattgcctccctcccgtacctctgcaccgcaaggctctgcaaggagagaagacgcagctctgctcactgggtggag

SEQ ID NO: 271165 - DNA, 122 bp, Homo sapiens
actgccttgggctgctgggcttcaagggtaggacataggctgtccaccatgtggttcaagcgttcattcattcatcccctcattaattcagctggcatttcctgagcacatgtgctgtgcca

SEQ ID NO: 271166 - DNA, 122 bp, Homo sapiens
tactacattattttacattcccaccaacagtgcacaagggttccagtttctttacaacctcgacaacacttgttattttgttattctggggtttttgtagaaaggatagtagccatcttact

SEQ ID NO: 271167 - DNA, 122 bp, Homo sapiens
ctccacgcgctcccgttcgccggggaacttagggtatccgggcttccctaaattgacaagcgggggccggcgccttcgcccgccttcgctggccgccgcttggtttgttcttcttctccttc

SEQ ID NO: 271168 - DNA, 122 bp, Homo sapiens
gcctctcgagctcctgtgtgagaaatccattggcacggccaacagaccgatgggtgctggcgaggccctgcggagagtgctggagtgcctggcgtcgggcatcgtgatgccaggttggggcc

SEQ ID NO: 271169 - DNA, 122 bp, Homo sapiens
cgttctcaagagggaagctgggaacctgaccaaggctacagccccagaccagaaaagtagcggcggcagggacagctgaccagaccacgggcagggcctgcctccgtgtgcccctcagctca

SEQ ID NO: 271170 - DNA, 122 bp, Homo sapiens
gctccctgagtcccctgcctgtgtccccccgcaccctggcacacagccagacttcccttccgcccgcgcaacccaccctccgcgagtggaggggtggacacctgctcaacagagaattcgat

SEQ ID NO: 271171 - DNA, 122 bp, Homo sapiens
cttttatttctgttttgggggtacatgtgaaggtttgttacataagtaaactcgtgtcttcggtgtttgttgtacagaatatttcatcacccaggtattatgccgagtacccaatagttctc

SEQ ID NO: 271172 - DNA, 122 bp, Homo sapiens
gggccatggcaccgcggactggagaaggcgcgcaggctgcggcgagtggccccgggcgggcgcgccacccatcttataggcggcctaccggccccgccccggcccgcccccgccccgccgcc

SEQ ID NO: 271173 - DNA, 122 bp, Homo sapiens
aagtagtatgatttgattcaccttttaaaaagatcattaactcctatgttgagaacagaccgcaggaggacaaaggtgacaaaaggagaccagttactgggctgttgcagtaaacggccaga

SEQ ID NO: 271174 - DNA, 122 bp, Homo sapiens
ggcagtggggaggagagtggcctgagttacttcacccccgcgtgctgctggttaatgtcccgcgtctctgcaccttcgggtgggagcggggactgatctactttcacattctcaagtttttc

SEQ ID NO: 271175 - DNA, 122 bp, Homo sapiens
ctcggcggagctcgggagatgtgactgcctgagggcggtggtggtgtcagcgtccggggccgggggagggggtgtctcgggcagagacccccgggcttggggcagctgaggcggccgggcct

SEQ ID NO: 271176 - DNA, 122 bp, Homo sapiens
gactccgtcccactgtgcaagggcaggggcctcactcacctgctgctggttctcccgctgcgagtggagccgcgcctggatgcactctcgggtctcctggaaagcctgtctctgggagacct

SEQ ID NO: 271177 - DNA, 122 bp, Homo sapiens
tcaccggcttcttccactttatattgagtcacttaacatcctgtgaagcggaaaggaggccggtactttcagcctgaggtcggccagggtgctgcaattccggacagagagatgtttttccc

SEQ ID NO: 271178 - DNA, 122 bp, Homo sapiens
attcacagtgcaaaacaaaacaaaacaagcctgaagtccgggccctgctcaaacttcagccgtgaagacactcggcagcctaaccaccgttcacgcaaacttagcgatctgcctggtaaaca

SEQ ID NO: 271179 - DNA, 122 bp, Homo sapiens
aacaaaaaacaaaaagcagcttgaaggttgtgctggaatcagatggaagggtgcctctttcgggcctgctactggtgccggaactcagagctccaagggtgtctgctcgtgtgcaggttcct

SEQ ID NO: 271180 - DNA, 122 bp, Homo sapiens
ggcagacacgggcgggtggtgggacacctgcgtgcagggaggcggctctgtaaacagccccggaaacaggtaatcccaggaagcgagagcccagcttcccccaaaaaacctgtccctgtccc

SEQ ID NO: 271181 - DNA, 122 bp, Homo sapiens
cgcccacctgcccctcaaagccacaacccacttgcacgccaccgtgtggacaccttaaagcgaccttctagctctgaaccccgctgagggaatggtcaccttcgctcctattagatggcttg

SEQ ID NO: 271182 - DNA, 122 bp, Homo sapiens
ggccgctcaatagacactgggagatggtagctgggccacccctcccaagagttcttcttgcgtgcagcgctttcatccagggcttgaattgtgttgtcaaagtttagcagacaagaggaggg

SEQ ID NO: 271183 - DNA, 122 bp, Homo sapiens
tgcccctcctgggactggggaccccccagggacagcctaagggaactgcatttatcttcacgtctgccaaaagataacacgaagatgttcaaagctaagcccccaggctggtaagagctcca

SEQ ID NO: 271184 - DNA, 122 bp, Homo sapiens
agatctctacctatttgcatttctgagacctctggggactctcttgctccttactgtagccgaccccacctgatgctcattcctggctcattctctcacttcctgtcacacctgtgaatttg

SEQ ID NO: 271185 - DNA, 122 bp, Homo sapiens
cacaaacatacaccacggacaagctcacgtgcacacacaggacacgcagacgctccaacgcgcacgaataccccgacccacatgggcgcggacacacgtccccacagccgcccgggcagctg

SEQ ID NO: 271186 - DNA, 122 bp, Homo sapiens
gaggtgctcatgcgtgcgatcgtgactagattctgaaactgccagccattttcccagctccgctttgtgcaatctaaaggaatgcatcccctctgaagcagtcttgccagagcctagtgagg

SEQ ID NO: 271187 - DNA, 122 bp, Homo sapiens
ctctgggcgccacagatttctagggccttctctccaccctgaacgccctttttcaggctgcggtcggctgccatcaccacagaagcggctgccaggccttcggcgggaggctggccctcttc

SEQ ID NO: 271188 - DNA, 122 bp, Homo sapiens
ggccagggcgcgcgcgcgcgcgcgagcccccagtgtgtggcagcggcggcggcggcgcggcgaggctggggctcttgtttaccagcattaactccgctgagcggaaaaaaaaagggaaaaaa

SEQ ID NO: 271189 - DNA, 122 bp, Homo sapiens
aatcgctgcgcaatagcggggcatgactcgggtgaggcccctggagaccggggccggcgacggatgcagggcggccctcctcactgaggatgcgccacaggtccaggcctctcgagcccctg

SEQ ID NO: 271190 - DNA, 122 bp, Homo sapiens
ctcaacctggacctgtccacccttgaagggctcatgatgcagcatcagggagtcccagatcgagccgctgacacctccaagtcggctgcagctgtgcatccgctcagaccacaagactcaat

SEQ ID NO: 271191 - DNA, 122 bp, Homo sapiens
gactttgtaatgagaggtgactacgtgctagcagccctccctccgctctcggcacctcctcggcctcggtgtccactatggccacacttgaggaacccttcagcctgtggctgcactgtggg

SEQ ID NO: 271192 - DNA, 122 bp, Homo sapiens
tctgtgtgttaactgatgggagagactgtttgtttataaatgtgtacagttttgttttctcgtaaggggagcatcatagggttactttataccagttgtaacattttcattgtttttggttg

SEQ ID NO: 271193 - DNA, 122 bp, Homo sapiens
actaggaaaaagatgcgggtttttttcactgaaaattacttgcaggggactgggtgtagccggctgaaaactgcagaaggaaaattttctttataagctcctggagggcagcgacccactga

SEQ ID NO: 271194 - DNA, 122 bp, Homo sapiens
gccacccactccacaggtacaaccgcacccaatccaacctggaactcggagggctgtgcgcgccgagctgggatcgcgccccagcgagccgggcctttggctgcgccagggcccaggccgag

SEQ ID NO: 271195 - DNA, 122 bp, Homo sapiens
ctgcccaccccggccgcgcgcaccacaacgcccccgccccgccgcccggaaccagctgagcgcagctggacccagcagccgctgtctccagtgccgcagcagcaggtaggggaggcgcgcgg

SEQ ID NO: 271196 - DNA, 122 bp, Homo sapiens
tgacagcactgatctaaaccaagcatggggctcttttgagtgctggatcccatgtaacagcgcaggtctctctgttcttggtttccctcctacatcactgaccactccttcagtctgttttg

SEQ ID NO: 271197 - DNA, 122 bp, Homo sapiens
aattccctgtaatctctgtatccttgcagtcatgccctcttttcccaagagctgattcgacggggtttctcttctttatgaccaaaagaccattgactagaacagatgttaagaacatgatc

SEQ ID NO: 271198 - DNA, 122 bp, Homo sapiens
agcaaactgaggctggcttagttttaaaatagatataaactcagcgaaacacatttgcatcgggcttataaatcatcacgagtaaatgtcttccatgcagcaggctaggtgtgctgactagg

SEQ ID NO: 271199 - DNA, 122 bp, Homo sapiens
ttttctgtgtgatacatagaatacctgctcactatagagacatttaaagcaacactgagccgggcgcggtggctcatgcctgtagtttcagctactccggaggctgagactagaggatcact

SEQ ID NO: 271200 - DNA, 122 bp, Homo sapiens
agttagaaagcgggtaaagggtcagactacaattcccggcagaccctgcgaatgagttctcgcgacttgcgagaagacacgtgcgcggaaggagcttgcagtagcgggcggcagagctggag

SEQ ID NO: 271201 - DNA, 122 bp, Homo sapiens
taaatggaaaagaatttagtataaaggtcagtccagagtaggaacaattaaaaagagggacgcaagctgttgccaactgtgaaaactaaaactcacattaaaaactaggcctttgcttagaa

SEQ ID NO: 271202 - DNA, 122 bp, Homo sapiens
agccctacccggctgccggcctgggatctcggcccaggccctctccccggcgctgggccccggctccgcccctcgcttgaatggggggctgctccccgcgcctgcttcttctcagggtcagg

SEQ ID NO: 271203 - DNA, 122 bp, Homo sapiens
ctgttggaagcctcggggcagtggtgaggaagaacgcatttgtcccttgatttccaaaaacgttcttggagattgccttttatttatttatgcgtccggattctccagagggaagagctgcg

SEQ ID NO: 271204 - DNA, 122 bp, Homo sapiens
cgccgcccctgagggaaggagggagggaagcagccgctgacccgtggcatgagctggatgcggtgtccgttgcaggactagggcgccgacatgaacctgcaccaggtgctgaccggggctgt

SEQ ID NO: 271205 - DNA, 122 bp, Homo sapiens
aaaggctgtgaattggaagcacaggctgcaggcagctggggcagctttgagcaggagctccgggaaatcttctctaacctggggtccctgctgtgagcagcggcaccagccaggtaacctgt

SEQ ID NO: 271206 - DNA, 122 bp, Homo sapiens
agctggcagttcagccaatgggctaccaggaaaccagatggcagagagcctggtagaccacggtaaggagtttgcagtttaagagtgatgggagatgttggagcactttgaacagggtgaaa

SEQ ID NO: 271207 - DNA, 122 bp, Homo sapiens
caacaaggacctgtggatgtccacttccattcccctgcaccaatcctccagaaggttcatcgccatggtcttggacatttagcggctctgaacctactatgtgtagtaaatagtctatcagg

SEQ ID NO: 271208 - DNA, 122 bp, Homo sapiens
actccgggccctggcggaggcgcagctgaacgaccactggcaggccatgcagatcctggacgagctggcagagaagctcaagcgcaggatgcgggaagcttcctcacgccccaagcgggagt

SEQ ID NO: 271209 - DNA, 122 bp, Homo sapiens
gttggatgacaagtgagcagatgctttggagttacttaacccatggtataactgaaacaccgacggacttacactcagaattcccaagtgctgatattggctgtgccacgtgacttcgaaca

SEQ ID NO: 271210 - DNA, 122 bp, Homo sapiens
cttcttggcatccaggaaaagcatctctccttatgggtgtgcactacaaatgtttttcttcgcttcttttgctgatgctgagtgccttatcctggcagcaatggcttatgaccgctatgcag

SEQ ID NO: 271211 - DNA, 122 bp, Homo sapiens
ggccccgcctgcccttccccgagccccctgccccacggtccgtggccccggcccagcgtccgccccgcccggcccggccgctcctcagtcagcaaagcacctgcttggatttggcctgggcg

SEQ ID NO: 271212 - DNA, 122 bp, Homo sapiens
aaagaggggcacaaaaggaagaaagaggaggcaaaggaaagccgagagagatgtgggggtcgctttacttgaacagctccaggagaacaaaagtttcctttaattgtattttgtgctggaat

SEQ ID NO: 271213 - DNA, 122 bp, Homo sapiens
ctgaggtatctgtagaaaaccacagcctcagatactggggactttacagtcccacagaaccgtcctcccaggaagctgaattcagcaagaacaatggaggccagcgggaagctcatttgcag

SEQ ID NO: 271214 - DNA, 122 bp, Homo sapiens
tagaatttggtcctcctgcgcctgccaagattgtctgagtattgatcgaacccaggagttcgagatcagcttgagcaagatagcgagaacccccgcccctccacctcgtctcaaaaaaaaaa

SEQ ID NO: 271215 - DNA, 122 bp, Homo sapiens
ttttttacataagtatgtttttcttccttccaaaagaaaccaccagggaagcctcattttcgttacattaatatggtgtgccattcttggcggggaactgtaggtgttgctgaagctacata

SEQ ID NO: 271216 - DNA, 122 bp, Homo sapiens
gggcagcacaggacttgagggagctgcggggactcctggagtctcatcaggccttccagtcgctgtggggaccccggctgcgcgcggatcgcctgcgccactgtccccactgacccgcccgc

SEQ ID NO: 271217 - DNA, 122 bp, Homo sapiens
cacgctgtgggggcggggcctcccgggttggccaatgaaaagctggcactgggtcggaggcgccagccaagtggggggcggagcttccaccaccggccaatggggatctggcttcgggatgt

SEQ ID NO: 271218 - DNA, 122 bp, Homo sapiens
gggagggtggggaagggatggtaatgcccttcctataggaactgcagcccgagcagggggcgtggggaggagggcgagcctgggaaaagcccggcgagggtggcgaggaggcgcgtgccccc

SEQ ID NO: 271219 - DNA, 122 bp, Homo sapiens
gcccgtcatcctggtccccgcgagggcctcagggtgggtgtcgtggggctgaaacaggcccggctcttgccccggggtcgcaggttccagggcacggcggtgtctgtgtcagaggctgagcc

SEQ ID NO: 271220 - DNA, 122 bp, Homo sapiens
cagacgcgggctttattaacatttggtagtgagcacggcccccagggcatcgcgggggctcgggtcccggtgacgcaacggttaaacctggctcgcgacttagcgcaggcgcctgggggaaa

SEQ ID NO: 271221 - DNA, 122 bp, Homo sapiens
aagcggagtagaagcccagggtcccagggacagcgggatgccgggtggtcagggccacagcgggacaaatccacacccatgaccaccacaaacctgtagaggaggcacctcagagacctctg

SEQ ID NO: 271222 - DNA, 122 bp, Homo sapiens
gctggttaaaatgccgttctgcggccctctttaattaaggccgagatgtaataaccaatccgctgctgcgaacttgtttttaaccatcagaacgcgaggtgaatgacatggagttgggttga

SEQ ID NO: 271223 - DNA, 122 bp, Homo sapiens
ggcatccaggtctgtggctcggttccggatcaggatctgggcaacagggagaggctcaggcgggtgctgggcagacgtacaccgatgcctcctgcccagaacgaacgcctggacgggaagcc

SEQ ID NO: 271224 - DNA, 122 bp, Homo sapiens
ggagcggggggagtcagcccggcccccatcccaccatccaccccacccccacccccaacacgcacaccaagtctcaattgctggcaggctgcacccgccactccaggtctggtcacgttcag

SEQ ID NO: 271225 - DNA, 122 bp, Homo sapiens
acaaagccctggaaaaagtcttttgtatgcggtaatacacaagggccaagcccccagtaccgaacacattgccgaaaaggaccattttttccttgaggcactggcatcctgctgcctggata

SEQ ID NO: 271226 - DNA, 122 bp, Homo sapiens
cagagaagctttccaaaacccccaaactagatcaagttctactattctaagcccttttagcgccctgtaattcttcttcaaaatacttaacacaattctaattatctttttaatatttgtct

SEQ ID NO: 271227 - DNA, 122 bp, Homo sapiens
ggtcccattctctcactgctcctgaccccgaggtctcaattcaaatgatttcagaggccacgcaggaaacagaagaggctaaagtgggcagggaggtggtacaggtggcaacccaggagcca

SEQ ID NO: 271228 - DNA, 122 bp, Homo sapiens
tggcatcacccgggtcggaatcacccaggttgctgattacaagcacggctgctgcaaccccgcttcagaccctctggcccggaggcggcccaggagcctgcacctcgacaagtgccccctgt

SEQ ID NO: 271229 - DNA, 122 bp, Homo sapiens
cctcctagagctgggcaagcttctgcagcttgccctcctggagcaccaggatctggtgggcgcgctgaactgtctgcagcctgtgagcaatcaccagcactgtgcgatccccacgggaattc

SEQ ID NO: 271230 - DNA, 122 bp, Homo sapiens
agccgcccaggtgcaggggcagggccagagggggcggcagcacgggcgggtggtgcacatcggagcgggcaatgaggccacaggctgggcacggctgcacgtggtgctggcaaaagacaaac

SEQ ID NO: 271231 - DNA, 122 bp, Homo sapiens
cccctgctctcaagttccaatggacacatgtaataatgactaagctcattgccagagagacgccccagcaagtgaaaatgaccacagggccccctgatcaccaaggggcacagatcatggag

SEQ ID NO: 271232 - DNA, 122 bp, Homo sapiens
cacagggaaaaagggaaccaagacctcagccttctggcgtcctccttgacaaagggcatgcgattgagaccttcccccagttccacagctggagctagagggacgtgggcaaaggagggagg

SEQ ID NO: 271233 - DNA, 122 bp, Homo sapiens
gacaacagcacaacaggagagtaaaagatgccccagggctgaggcctccgctcaggcagccgcatctggggtcaatcatactcaccttgcccgggccatgctccagcaaaatcaagctgttt

SEQ ID NO: 271234 - DNA, 122 bp, Homo sapiens
tagtcagtgcccggcatacagcatgtactcaacaaatgctatctcttctgccaagagctccggccacttgcaagtagcacttccaggctactagccttattagaaataaggctataggaatg

SEQ ID NO: 271235 - DNA, 122 bp, Homo sapiens
ttatgtcatgtatctaggtaccattgctaatatgagaatttataagagatgtctaagaaacggtggcataatatctcagaacacaagttgtctatataaccctgttagtgttttgaaagttt

SEQ ID NO: 271236 - DNA, 122 bp, Homo sapiens
cccgcgccctcggcttccctgttgctcagggttatttcttcctgccatcagctggagaagcgctctccgaatatttccccgggaacgcggacttgccggccctgcgaggcacccggcgggaa

SEQ ID NO: 271237 - DNA, 122 bp, Homo sapiens
aaaaaaatccaatgttacagagaaggactctaaaaaagcggtaacttttttttttaaagccgacattatttgagattgctgtttccaaggcgaaaaaccaatagtgtgttttttccatgcat

SEQ ID NO: 271238 - DNA, 122 bp, Homo sapiens
aactgtcctagtaactgttggcatgtttgtggaagctttaacagtgtgtctaaatgagcacgaatacagtcaacagcctgtttgagagaagacatagcaaagaataaagcaaagtgaatcat

SEQ ID NO: 271239 - DNA, 122 bp, Homo sapiens
tgacaagggggcgggattgctgtgaaactctcttctctgattggctctctgggagccagccgctgccacgagggaaagaagcttcagtttctcgcatgcgcagtgagtaaacatgagcctct

SEQ ID NO: 271240 - DNA, 122 bp, Homo sapiens
gtcatctttctctggggcttgattgatcagttcccactctgacaactggcaaataccaggcgttatcatcctgtatgcattaacgtactttcccctgaaacagagcaacccagtcaacacca

SEQ ID NO: 271241 - DNA, 122 bp, Homo sapiens
gttaggtaggcaaaggggttaaggtatagtagagtgggggagggaggaggaagcattccacgcagaggaagcatattgtgttcatgtaaattgaaagggcacataaatattcactgctgttc

SEQ ID NO: 271242 - DNA, 122 bp, Homo sapiens
cctggatgatctatttgatgtgtgactactgactagttttgttcttcttagcggaggagtcgagtagatgcctctgatcagacatcttgaagcctctcccattaggttgtttgagatatttc

SEQ ID NO: 271243 - DNA, 122 bp, Homo sapiens
ttccgtttaccgggttggctgcccttgcgcctgcgcagttaaagctccggtaaagccgggcggcagtcagagcagttcattctagagaagggagctggagccccgagtctttccaatggaac

SEQ ID NO: 271244 - DNA, 122 bp, Homo sapiens
ggctgacttttattttcctgcagagcatcttcctcgggagagcagggagccccaagtcatcgagttaagagcaggagaatccccttgactaggttggggtctgagcccagaggcagggccta

SEQ ID NO: 271245 - DNA, 122 bp, Homo sapiens
cccaggctgcagggcctgacctgcatccccgaaggtggccagaatgcacgtgggggccatcgccctgtgccgtcagctgcatcctcaggcgtggagacttagtggagacccaagggggcgaa

SEQ ID NO: 271246 - DNA, 122 bp, Homo sapiens
accctgggaggggggaggggaagtgcgttgggagctggggcgcaccgtagggccactggacgatctctgcagtctccccgcagaaaggtgctcaaggctgacctgtctcagggggcgcaccc

SEQ ID NO: 271247 - DNA, 122 bp, Homo sapiens
tctaaaacccaggggtccaaaggacccatgggaaggacaggtggctcaggggagtgacctcgctgcttggccagcgctttgaggccccggggacccaacggagagggcccgggtgaggcatc

SEQ ID NO: 271248 - DNA, 122 bp, Homo sapiens
aggagattgccgtcgcagacgggccttccaggtgaggtgcaaaggcccagcgttgggcagcggacatggtgggaggcaggagagaaaggcctgtggggctgtggatacctgactgtgaaaga

SEQ ID NO: 271249 - DNA, 122 bp, Homo sapiens
tgcgcgacccacccccagcccgtgctcccccgatggccgcggcctggcaccgggcagggccgcagagccggccacctcctccgaggtgccctttggctccgatccaaaaggcgtggagatcc

SEQ ID NO: 271250 - DNA, 122 bp, Homo sapiens
gagtccaaagcccacactctgtctgctatgtcacactattatgacatacagccattaacccgtgctaatcacctatttcacttgaatgacccaatataacaatgtgtggatttgagagacaa

SEQ ID NO: 271251 - DNA, 122 bp, Homo sapiens
actgttcttggagtagccgggcctacgaagagcacgttttaaagctgttgttccacgttgcggtggaacagtgctgttaacattgagggaaattgtccccgactaactgagttctgtctgca

SEQ ID NO: 271252 - DNA, 122 bp, Homo sapiens
gtcccgcccgagcgcccgcccggctgctgacacagagcccgacccgcggccgggcggttccgccccagtcccacactgccccgcgcggcgtcccggccctcttggcccgcctggtcccaccc

SEQ ID NO: 271253 - DNA, 122 bp, Homo sapiens
cacaacaggtaaccttgaatgtaggcagacatgcttccagaaatgtgagtggaggtagggcggaataaagaaaatgcaactgcaaaactgaaaattcatactagcacaatgatgtttaaatg

SEQ ID NO: 271254 - DNA, 122 bp, Homo sapiens
aacacagaactagccagacctgttcctctgcccctcatcgaggccatcccagttactcagcgaataccaaattccaaataccgggaacctgaagctgcctttactcatgaaactgcccccac

SEQ ID NO: 271255 - DNA, 122 bp, Homo sapiens
gcggcgcgtggcgtaaggggcgtggcgccagtgggcgtggcgtggcgcagtgcgaagggacgcggtgcgcatgcgcgtgagggctgccgcgggtgggtggtatcgaggcctgtcgggtcagg

SEQ ID NO: 271256 - DNA, 122 bp, Homo sapiens
gccccggtcctacccataactaccggtcccttaggctccagcccgcatccctcttgctcccggccctgcccccagccccgccccgtgactctggccccgcctcaccgccttcctccgagacc

SEQ ID NO: 271257 - DNA, 122 bp, Homo sapiens
gcttctccacagacgcgcgtcggttaggagagctccacttgaaccttcctttagcccgcccgaagcagaccagccaatccctgactcgctctcaccgtctccgtccagaagaaccaatcgta

SEQ ID NO: 271258 - DNA, 122 bp, Homo sapiens
ggacatcgatgagtgtgcatcccggccgtgccaccatggggccacctgccgcaacctggccgatcgctacgagtgccattgcccccttggctatgcaggtaacagcctgggccgccctggga

SEQ ID NO: 271259 - DNA, 122 bp, Homo sapiens
gacatcggaacagtcctggtgctgggcacgaaagcgcgctcaggtgagactgagtgtctccgccgggttcgtgtgtgtggacgcacacacgcatgcacgtttgtgcttatggatgcacatat

SEQ ID NO: 271260 - DNA, 122 bp, Homo sapiens
ggcctgggtccaggtgccgaggctccagagctgcagtgcacttgcggccctggacagctccggggcaggccgccctccacggggagcctgggggtgtgcacctgggtcttggtgtcctgcat

SEQ ID NO: 271261 - DNA, 122 bp, Homo sapiens
ttccactcataacttatcggccaaaagtagtcacatggctccacctaatcacaagtggagcgggaagtgcaatcctaccttgcctggggaaggtatagagatagaccagcactaatgactac

SEQ ID NO: 271262 - DNA, 122 bp, Homo sapiens
agtgcagcgcggactcacaattacaagcctgtttctattaagcagttccatggccctcggcgtgggtggtctgccgcgccataggcaggacctgtcagggtcacgtgacggatccgaaaact

SEQ ID NO: 271263 - DNA, 122 bp, Homo sapiens
tgcccgccccagtgcagcccctcctccccgctgtgtttattaggggaaggagggcggaggcggaggccagttccccagctccagccgccgtcgctgctgcctgtgtagttgcagccgcggcc

SEQ ID NO: 271264 - DNA, 122 bp, Homo sapiens
cttggcaacctgggggtggacagagcaagtatcccagctggagctcaccacgagggatgtcgccctagcagagccccctccctgggagccggggtgcaggctgcccccatgccggctccctc

SEQ ID NO: 271265 - DNA, 122 bp, Homo sapiens
tctgctccttctctgagctgaagtcctcctcccagcacttgtgcctgctggccccagtcccgtctcctggtgcctcacagagaccctggctcccaccctaggggagcccagtgggggctgtg

SEQ ID NO: 271266 - DNA, 122 bp, Homo sapiens
acccttcccaagttggtcataattatgtatttacctgtgggattattgtccctattagaccgaaatggatgtgagatgacagaggccttatttgttttgtatattgctgcctgacgcgcagt

SEQ ID NO: 271267 - DNA, 122 bp, Homo sapiens
attgtgcactgaaaatgaagagaaaatcactggccataaaggaatttcttgtcttgagtgcggtacagtctgccatcattggttggcaggggtaacaacctggggaggctggactgtggatt

SEQ ID NO: 271268 - DNA, 122 bp, Homo sapiens
tgtcgaggggagcatccagtgtgagaccggaagccccgagtgttgccccttctcctcctgcgcacccgcttcgccctcgccactgggaaactccagtctgccctacgttgcctgctagagct

SEQ ID NO: 271269 - DNA, 122 bp, Homo sapiens
cccctaacgagcatgcgctggacttcggtgaacactgcgcatgcggtccctcccaaacgccggcaggccactgcgcatgcggcaattaagccacagcccgctcaagggaagaacataaggag

SEQ ID NO: 271270 - DNA, 122 bp, Homo sapiens
ttgcgttcaatgaaaggatcaagtgtggccagggcagcccggccgacctcgagaggttcccgcgtcctctccccgccctgcctaggagtggggtgtcggggcctgggcgcgggagagcggag

SEQ ID NO: 271271 - DNA, 122 bp, Homo sapiens
acccaagaggtggttcaggggcagcgcctgcaacccccaacagtgattaaaataggctcacggctgctttttaataccattgatgtaagtttttaaaatagggggaaaaaatccatgctgaa

SEQ ID NO: 271272 - DNA, 122 bp, Homo sapiens
aagccagccagtgttgggtggaggggaggtttggggctacctggagatgcatagaattatcgacaactaagaaagacaagctcttagtgttgtgtgtgggtttgcaacatataatgattatt

SEQ ID NO: 271273 - DNA, 122 bp, Homo sapiens
ttgttaggccggtagttctacatctcgcctttcttagcccttgccaaaacggtgaggcagcgatgtgtcagctgccgacagcatcatgcgaggcaaggtccagccgttccacccggcataca

SEQ ID NO: 271274 - DNA, 122 bp, Homo sapiens
tggagtcccttcaaagtcatctggacctgcccggtcctccccaccactgcagcctggctccgctctggatccggtcaccagtgctgcaatgtcgtgtctgagccttgtcaaccacgccctcc

SEQ ID NO: 271275 - DNA, 122 bp, Homo sapiens
tcgcgtcttggcctgggacgccggccccgatcctcggctgccgcggcgcgcccgtgtgtgcgccctcgccctgtctgcacgacggtgcctgccgtgacctcttcgacgcctttgcctgcgcc

SEQ ID NO: 271276 - DNA, 122 bp, Homo sapiens
gggaacagaacacacgtctcttcctcctattgtttccagcccatgtgtttctttggaacacgaagcagaattattcttgggacagtgtataatatagggaaggggcaacacagcagcagttg

SEQ ID NO: 271277 - DNA, 122 bp, Homo sapiens
tttcctagaaatgcatctactgtgtaaatcaaggcaaaattcgtttgattgaaactttgccgagagttgtttgccatttcagacagccacaacaccagtgacactaccactcctgtatctga

SEQ ID NO: 271278 - DNA, 122 bp, Homo sapiens
tgagcctcattagtccctcgttcttatctgagaaggttcctattgcttggtgtattagtccgttttcatgctgctataaagatactacctgaattgggtaatttataaagaaaggaggtttg

SEQ ID NO: 271279 - DNA, 122 bp, Homo sapiens
ttactgtttttaaactctgggagcctactcctttaagagattaggcagtacgcctattctcgcctggtcccagcgtaccttgcgcggctcgccgtcccccactcacgtaccagggctcattg

SEQ ID NO: 271280 - DNA, 122 bp, Homo sapiens
gggaaacggagaacagcccctgcctgggaagactcgagcgacgtaggggcagggtcggagcggggccggtccccgaccccggccccttcagccggtacctacttgaggtcccggttgaccga

SEQ ID NO: 271281 - DNA, 122 bp, Homo sapiens
gatcactgctaggcttttacctctgctcagggttccatttccatgtgtttaagaggttatcgaggtttttttaattccaatgggttggcaggggaagttgtcgggcttttcagtgacgaaaa

SEQ ID NO: 271282 - DNA, 122 bp, Homo sapiens
tcctccaaatcacttagtcacttaccttctctccatgagggccgatggcaccctggggcccgggaagaccctacatacagggaaagagaagtcacaggggcctcccagggtctcttctatcc

SEQ ID NO: 271283 - DNA, 122 bp, Homo sapiens
aaattcaattgtctacaataaaattaaaaacataaagtcctcaaatccaaaggcttctatcgacagtttcctgtcatctggaaaaacaaacctcttgctgtgctggggagaaatacaatccc

SEQ ID NO: 271284 - DNA, 122 bp, Homo sapiens
gtcctcaaaacgaccttctgaggtgtctcctgcaaccctgctctgaagctcagagcgagacggcctcacatcccagggggctcagctctggcggggccgccacgcgcctccccgtgcctttg

SEQ ID NO: 271285 - DNA, 122 bp, Homo sapiens
agcacttgttacccaagaagggccagggcaaggacacgcgggtgcaaagccgagtgtgtgcgggctgtgctgggtgcaggtggctgagtgtcagctgctgccgaagcgatcaggggtcgtgt

SEQ ID NO: 271286 - DNA, 122 bp, Homo sapiens
tattgcagctgtgtactgctgaccccaaatctcactctgtgcatgaccatacacgtctaccgtgtgtgtgtgtgtgtgtgtgtgtgtgtgtgtgtgtgtgtgtgtgtgtgatgtttaaaatg

SEQ ID NO: 271287 - DNA, 122 bp, Homo sapiens
gtttctcttttctcctattaaaaatttatggggctgggcaaggtggctcactcctgtaatcgcagcagtttgggaggccgaggcgggcggatcacttgaggagttgttagggcagctaagtt

SEQ ID NO: 271288 - DNA, 122 bp, Homo sapiens
gctgccagacactgcaggctcaactgaggctcggaggtgcaattcaggctggtggagcagcgggggaaggcagggacaggcggggctagcgcggctctgcagctgatcacacgcaccaccac

SEQ ID NO: 271289 - DNA, 122 bp, Homo sapiens
tccttccttccttcattcattcactaggcactgattgtctaaatggcaccagacactgcacgacggtggacatacaaaaatggggcatgtggcctgcctgccaggagggggcgtccacttga

SEQ ID NO: 271290 - DNA, 122 bp, Homo sapiens
taatgtgactgggagcaagcagccttgggcagttgggctggatgtctggggcctggcacccgaactcttttggcctgcctcagtacccgaggctgcccgacacatttcttggccttagaaac

SEQ ID NO: 271291 - DNA, 122 bp, Homo sapiens
cgggccctaccgggctgtgcgtttgataggcagctggaagacccaggtgggcggttcaatcggtcacgtggacacgcagctcagccaattagaatctcgcggcagttgattcctagaggtgg

SEQ ID NO: 271292 - DNA, 122 bp, Homo sapiens
agcttcattcgtgaagtcagcgagaccacgaacccacaggcaggaacaaacaactccggacgggccacctttaagagctgtaacactcactgtgaagtctgcggcttcactcctgaagtcag

SEQ ID NO: 271293 - DNA, 122 bp, Homo sapiens
atcagcgctcaccacccctcccgttcccacccaccaccagcactgccaatgagagcccaccgccccgcccgggagagccccgcctctgccgatacctccaatcatcagcgccgccctgtggt

SEQ ID NO: 271294 - DNA, 122 bp, Homo sapiens
cccccgacccgccccagtcccccctagaggccgccgcccccgcccgccagcccgcccgcgcgccacggccccaccacccccggccccgccgccccccgcccgcacccgcgcccgcgcccccg

SEQ ID NO: 271295 - DNA, 122 bp, Homo sapiens
ctgccacctctgtataagcctgaaggaggattcaaaatgaaaacacaggtttaggaagaccggaacagagattccatccacatcatgcccagatttctgattaagaaactataaacaacaaa

SEQ ID NO: 271296 - DNA, 122 bp, Homo sapiens
cggccccagctaagcctcccgactggggtggggcagggggcggggccgcggggcgggaggcgcgagcccggagcggcccgggtgcgggggacaggggcgcatcgccgtctctgcacccccgc

SEQ ID NO: 271297 - DNA, 122 bp, Homo sapiens
acgagggaggcagggaggccttaggcgttccttcccatatctgtccctttattcacagagcggggaggggagtttcagtgtgcagccccttcatcaagaggccttgagccgctcccccactc

SEQ ID NO: 271298 - DNA, 122 bp, Homo sapiens
tcactggtttctggtgttgacagacccatctacctagagagcctagggcactgttgggcacgtggtcttaaccctgagctgagccccatctgttcccctccctcgccaggtgccagtgcccc

SEQ ID NO: 271299 - DNA, 122 bp, Homo sapiens
agaactggaggataaagccagatgggtacaagtgaagtgggtcactgtcaagaatcatcacgttttctggaattcgatgttttcaaattgcataatcctccttgttctcaattatcctccac

SEQ ID NO: 271300 - DNA, 122 bp, Homo sapiens
gcagatgccgtccctttggactcgcttcgtccaacgcccccacgagtttcggtggcccttcgccccacgctataagagcagtcacttccggaactgctgcccttcgcctttgccgcgaaaag

SEQ ID NO: 271301 - DNA, 122 bp, Homo sapiens
ttggacacggttttggttttcgggtgcaaacagtctacattcctctgaagaggcccgctccggcctcatcagagctggcgaaatcaacgagagaaacaggggacgtcggcccgcagttcccg

SEQ ID NO: 271302 - DNA, 122 bp, Homo sapiens
agtttaattccacataatacggagaactcacggaacatggcattacatttgatttgtactcgtggaatttggcagcctgctagctcttctctctgtgtacctgctgaagtcacagctgctat

SEQ ID NO: 271303 - DNA, 122 bp, Homo sapiens
tcaaactcctgacctcaggtgatccacttgccttggcctcccaagtgctaggattacaggcgtgagccattgcgttgggcctctgttcgtgttaattcgatgaggataatggcctccagctg

SEQ ID NO: 271304 - DNA, 122 bp, Homo sapiens
cggctgctctcacggctggtatcgcggctgcacccctgactcatgctgggtcgagggatacggctgctccgtgctagcgtgcagcatgaagggtttcagagaaggtgaacaagtttaatgaa

SEQ ID NO: 271305 - DNA, 122 bp, Homo sapiens
atttgtggaagtgaaccgtgacaggtagacggaatcctccgcagtcctccccggagttgccgcgatccaccactgaacgcagggcctgcggagtccacactcccctgctttcgtcaggcgca

SEQ ID NO: 271306 - DNA, 122 bp, Homo sapiens
aatgccctcctttacattagctataacctcagatggctgccttaacaaaaggaagtaacacggtctaattgttctggatttatctgtaacaactccctcttgagtaaggagcattctttcgg

SEQ ID NO: 271307 - DNA, 122 bp, Homo sapiens
gggcttattttggtcaaagagcagcgaggtggccagggcaccactggagcagagtggaggcggggtgtggaggtcagaaagcgaatatggtgcgcggcaggtcacgcagggccatgggagtg

SEQ ID NO: 271308 - DNA, 122 bp, Homo sapiens
cccctcaggctccgcccgcccgagcccggcagggccaacccctcgaggccccgtccgggtcggccctccgctgccaccgcctcccctgaccctacgctccgggccgcctcggcggcagcgct

SEQ ID NO: 271309 - DNA, 122 bp, Homo sapiens
tggaaccacgaaaaaccccaaatagccaaagcgcattatcgcttcttgactgaaaactcccggacagttggggctttttcctgcacagagattggccacttcctgcacatcaggagatcccc

SEQ ID NO: 271310 - DNA, 122 bp, Homo sapiens
ttcccactgctggaaagcttttccagtcaatgtgcccaataaactcctgccttttcaccacgatcagtgaaattttggctggcactttttaagggctcaacattagcctggttatcaccttt

SEQ ID NO: 271311 - DNA, 122 bp, Homo sapiens
tctatcttccttaaatcctcacgctgtgacaaagtggagggcgaaatcatgatgaatgatcggacacatttagccagtacctgtgctctgtaacgagcgtggcccgggaaaggggccctaat

SEQ ID NO: 271312 - DNA, 122 bp, Homo sapiens
gccagagtgcagtgcgctcacttcaaagggacccgggcgcgctaagctcggcccctgccccgcgcaggctccttgtggccccaccgccttctaggggtcttgcctgtggcgggagttgagcc

SEQ ID NO: 271313 - DNA, 122 bp, Homo sapiens
cgtgatccacctgcctccgcctcccaaagtgctgggattacaggtgtgagccaccacgcccggcctaggtttcacctttgaacccagtggagagctctgttcccaagctgtaccctcttcta

SEQ ID NO: 271314 - DNA, 122 bp, Homo sapiens
gcagataaacacatgccaaaccgcttggtgccagtttccatgcatcttcttatcataagccgatagcggggctcaaaaacgtggagtggacatgggaccgtggggaaggccatggcacacac

SEQ ID NO: 271315 - DNA, 122 bp, Homo sapiens
tggaggtttcattaatcccggggtccagggacttaaggactgatcccgattcagtgaccccgggatctgtcgactttgtgaccacaaaatctagcgatccaacaacctcaagaccctgcagc

SEQ ID NO: 271316 - DNA, 122 bp, Homo sapiens
cctggaaatcatctatttataaaacaggtctaggtttaggaccaagaataaggcaatccccgtacctttggcttcctgagaactttcaaattacttcgcctaaaaatggagaagctcctcaa

SEQ ID NO: 271317 - DNA, 122 bp, Homo sapiens
cctgcgccactcaaaccctgcagggtttgcggggactgaggctgaacacaggaagctctccggcctcctggcaagcgcggacgcactcctctcctgcactatagtgactgaaatttgcactt

SEQ ID NO: 271318 - DNA, 122 bp, Homo sapiens
ctgggcggcggggggggcaggggtagtgaggggcgaatgagaccatagggctgagatctgcggccgcctcggtgcctccccagccacctccgcccctgcctgcttctgattcaacagcgccg

SEQ ID NO: 271319 - DNA, 122 bp, Homo sapiens
ctggtccttggaggactgcctgggcaggcagtttaaactccttaagcctatattcttatccgtaaaatggcgataatattattactttaatgggttgttgagaagacgaagtcaaatagaat

SEQ ID NO: 271320 - DNA, 122 bp, Homo sapiens
ctccctagcagaggatggtttcgatccatcgacctctgggttatgggcccagcacgcttccgctgcgccactctgctacgcgagtcacaggtcccagagttaatagtcaccttttttctagc

SEQ ID NO: 271321 - DNA, 122 bp, Homo sapiens
ccagacagcgagcactcgtcattctcattggagggccggggccacaggaacaacttcacgcgctgacagcgtgacctgttgttttcaccctctggccaccgctgaagagtctgccgtcatga

SEQ ID NO: 271322 - DNA, 122 bp, Homo sapiens
ctcgatctcctgacctcgtgatccacccacctcggcctcccaaagtgctgggattacaggcgtgagccaccccgcacccagcctaggatgtgtattcttaaagaacagcatacataactgaa

SEQ ID NO: 271323 - DNA, 122 bp, Homo sapiens
tcaagagcccctgaggtccaacccctcctccatggagcctgggtcctcagctggcggatccgtgaaactcatctctggggagcattggcttctgtggtcctgcacctgctccttgcagccag

SEQ ID NO: 271324 - DNA, 122 bp, Homo sapiens
tttctttgtgtagaacagttgtcctccacaggggctgatttgcccccaggggacgtctggcggtgtctggaaacgtttttggttattacttctactacagggaaactgctggcttctagtgg

SEQ ID NO: 271325 - DNA, 122 bp, Homo sapiens
aaaaggcaagcagagaacaaggttgtgaaaagtgctctgtagcccgggcgagagagatgtcggtgactccgagtaaggcatgatatcagcattacagggaagggctctgactcagtgtgatc

SEQ ID NO: 271326 - DNA, 122 bp, Homo sapiens
gcccacagccaggaccccttcctcctccctgctcaccccattggtcttgacgattccacccgcctccagccttagaagcttaagggcacggctggggggctctgaaggcaaaccccagcctt

SEQ ID NO: 271327 - DNA, 122 bp, Homo sapiens
ccggaagcctgtgggcttcaggccggaaatgccctgcaggctctcatactccagcattcccggaactgcggagagacagggaggctgtgctgacacgccaggagacacacgcggaacgttcc

SEQ ID NO: 271328 - DNA, 122 bp, Homo sapiens
actggaacctcacagcctctctccaggcactcatttaattatagacaggttgtaatttggcgggttgggagatagccagcttgagttatggtggtggttgtttttgtggtgtgtgtggtgag

SEQ ID NO: 271329 - DNA, 122 bp, Homo sapiens
cagagatgttggggataaagtatactgtaataatttatctgtttgaaaattactataaaacggtgttttctgatcggtttttgtttcctgcttaccatatgattgtaaattgttttatgtat

SEQ ID NO: 271330 - DNA, 122 bp, Homo sapiens
cgcggaggcgggggtgctgcgcgcttgggagcacgtgggggaacacgcagggactgccggcgcgaatggcttcgaacgcatgcgccccacccgacatttcacagtcgccatgacgaccggta

SEQ ID NO: 271331 - DNA, 122 bp, Homo sapiens
cgctgcgccccgcggcggggctgggggcggggctaggtgtctcgcgcagggggcggggcgcggtgacgtcgcgggcgcctgggccgtgctgtggcggcggcggcggcggtagtggcggcggc

SEQ ID NO: 271332 - DNA, 122 bp, Homo sapiens
cagtgcggcgcacgcgcagtatatgtggctagagaattcgtgtggacgtcagggtggaagcgggtgtgagagggtccagcagaagaaaacatggctgccaaaatgtttgagttcatcggcaa

SEQ ID NO: 271333 - DNA, 122 bp, Homo sapiens
gcgaagcgccccgattccgggccgcggctcccggcgccctcgctgccccgtcccgtcccgcgcccgtcgggccgccctcgccgcctcacccggcctcgcctctcagagcctctcccctcccc

SEQ ID NO: 271334 - DNA, 122 bp, Homo sapiens
atgctacgaagtaggtatgatgcactgaaagctcaatccccagggagggaacatacaaatcgcacaaactcatattgctggaagcaggtgaggccaggagaaacatccagagtcagcttact

SEQ ID NO: 271335 - DNA, 122 bp, Homo sapiens
cgcccaggccacccaagaggccagccaatcccgaccgcccatgcaaataaggttcacaggcgcccaatccgggccgtgttcatttcagcattgcgctcttcacccgcctttgtaaaaccgct

SEQ ID NO: 271336 - DNA, 122 bp, Homo sapiens
caaagatatattttcaaaatacagatcacaagaaagcacatcccaagtgtgaaccgcagtcgtccgcccagtgggccctcaccggttgctcccctgcctgcaggctccgtgcttggtatctc

SEQ ID NO: 271337 - DNA, 122 bp, Homo sapiens
aattggaaagcagtcattggagaactagaacttataaacctctacttcaagtgtgtatcacgtaattgtttccatgaaaagcaataaatgtaacaaagggtttttctatgggagccatcttt

SEQ ID NO: 271338 - DNA, 122 bp, Homo sapiens
gcaccagacactcgatgggccttcattaggactgccataaaatcagccataatcacaaaacgaaatacatttaaaggatccttattaaacaaatattatatagtaactgatgtagtttggat

SEQ ID NO: 271339 - DNA, 122 bp, Homo sapiens
cagagtgcttcaagatgaaggcgcaaagcagcctctcagcctgcagtgatgctacgacaccggcagatggcgctgcaaagcttctcaaatgcagcgggaagtccatttaccaacggctgttg

SEQ ID NO: 271340 - DNA, 122 bp, Homo sapiens
gcatctcctgaactccttcacatgtaaagtacttagcatagtcacttggcaggatgtgagcgctcagagaaggttaggtattattatgatacaaagttattcatttaacattgagtctctcc

SEQ ID NO: 271341 - DNA, 122 bp, Homo sapiens
tgtggtgtcgggcctgaggtcggtgcaggtgcccctgatgctgaacatgctgcaggagagcgtggcgcccgcgctgtcctgcaccctctgttccatggaaggggacagcgtgagctccgagt

SEQ ID NO: 271342 - DNA, 122 bp, Homo sapiens
cgccacgctccgaggcgtcgctgtgcggacgcgggggaggcggtgggagcgagctgcgggcgctgcgcggtggccctgctgtctggcgtgtgcacgctagtgtccacacacgtgtgcgtggg

SEQ ID NO: 271343 - DNA, 122 bp, Homo sapiens
gggatgttccgctggccacgccccttaaataacactctgtgaagccgtggtcttcttgcgcgggatagggcacctgaggaagcgggctgcgcctgtggcacagtggtacggggccggaagat

SEQ ID NO: 271344 - DNA, 122 bp, Homo sapiens
tcgacttgagggggcgggattctggacgccagagttggcaaacccctgacctatgatggacgtattctctagccaattactagacggtattctcagacgggccgcctccattgccaatgaaa

SEQ ID NO: 271345 - DNA, 122 bp, Homo sapiens
cctccgaagcccatgctcctgccaacttctgcgtgaagccactaaacttgtagtacatgacgcccagagtccggcttcccgcatccgctgccaacgcgaccgccccagagaaggaccccgcc

SEQ ID NO: 271346 - DNA, 122 bp, Homo sapiens
gaacagtcccagctcctggcacagctctggtgatgcagctcgaaatgtgcacagaagtcacggaagagcagagtcacacggagctgcagtgggttacagagaacgtctggattatagacgca

SEQ ID NO: 271347 - DNA, 122 bp, Homo sapiens
gcccacacttcctccattacccttgctattgcttcctgctggagagctattcacagtccccgatgagcagtcagatccggccccattgtttccaccgtggccaaggaaccagggatgagaac

SEQ ID NO: 271348 - DNA, 122 bp, Homo sapiens
taatagggtggtcggttccctttcatctccctcttctgaaaggaaaaaattgaattggaacgttcaagtccagtttgtgttcagtcataaaactgggccagttgttaaccttacagaatgag

SEQ ID NO: 271349 - DNA, 122 bp, Homo sapiens
tcccggtgtggcgtggctataccaactctcataaaatctcataaaaggtgacggagctagcgtacaagaggtcgtctttagtggagaggcctgaggtctccgcagtgacgggggtggcagcg

SEQ ID NO: 271350 - DNA, 122 bp, Homo sapiens
gggggctcgttcccggtggggggggcgtcccggtgcggcgcggcccagcgctcccgggaacgggggatgggtaactggggcccccattttgtgttttgggtttggaaattgaggcgcagaga

SEQ ID NO: 271351 - DNA, 122 bp, Homo sapiens
tttgatcggaattaagtgggcagaaaagtctaggcgggctaagtcttgcctatgcatctgcgcccagctgctcagactggccaaacagacccagtcgtttagtctaacgcttctggaactcc

SEQ ID NO: 271352 - DNA, 122 bp, Homo sapiens
ccccctgaccgccggcttggcgcccttacctcccgatcatagtggagtgctgctgcaccgcggcttctagcagcctctccaagatggtccattcccccatcgctgtgcatccggaggcagca

SEQ ID NO: 271353 - DNA, 122 bp, Homo sapiens
ttcaaccacacactcctctgggaagcgcgcctgattgacagttcccacgaacccgccccacggcccttactggatacggcgtcaggtgccgcccctcgtggactgattgacagaagaagcga

SEQ ID NO: 271354 - DNA, 122 bp, Homo sapiens
tggctcccctcacttgcccacccacactcagcctggccgccagctgtggccgtgatccaccgcgtggcacgccatgagcagaggaactggctccttacggcttccatgagcacctcgggagg

SEQ ID NO: 271355 - DNA, 122 bp, Homo sapiens
gggagaatgaaaagcgtgcagaatgcaagagctgaccggggaatgtgggtcagagagaggcgggctgtggtgcgcggacaagaaaatacagttgtagtttttgcagcagctgcatccccgga

SEQ ID NO: 271356 - DNA, 122 bp, Homo sapiens
ggttgacgccgttgaggtactggtacccaaagaaggtgtcctctgcccagtgctcggccacgtactctgcgaggacggcgcgagggcgtcacaaggaggcccggcccccctcggggacggag

SEQ ID NO: 271357 - DNA, 122 bp, Homo sapiens
taaaaaaccttatctctgagagccttttctattcttcttaccacaggtccactcacaaatcgcagctggtatggactggtactgccccaaataagaggaacctaagagcttggctccaagac

SEQ ID NO: 271358 - DNA, 122 bp, Homo sapiens
ccattgttctcgggataaaaattgacacggtagttttcaaggctcagcatgatctggccccggtttaactctctggtcttgcgtcctgttatttccctccctcacttcagcaaccctggtct

SEQ ID NO: 271359 - DNA, 122 bp, Homo sapiens
aagggaatgttatgccatggaagccaagggaagagaacattttgagaggaaagtattcaacggtgttgaatagtaaagacaatgcactgaaaaacacccatttcattcagcaactagaaagt

SEQ ID NO: 271360 - DNA, 122 bp, Homo sapiens
gagaggcgggcacagaatgtcagcggggcagacccccgggaaaggcagcaacccggaagacgcgccgatcctcctcccagcccctatgggtgaccgagcccccaccagccgccccgggaagc

SEQ ID NO: 271361 - DNA, 122 bp, Homo sapiens
atagctctgaacttgggatcagaggaacagagtttaaatcaaagctgtagcacttaaaaacgtgtgcccttagacaaaattactaaatgtgtctgaacttcagattttaactatctgtaaat

SEQ ID NO: 271362 - DNA, 122 bp, Homo sapiens
cgaaggcgataatgaaacccagatgcacatgcacagccagcagcttccagtagaagagggcgaggttcacccccacgtcgcgagaggccttgtatctgggttgcggggtctggagaggctct

SEQ ID NO: 271363 - DNA, 122 bp, Homo sapiens
gaaatagaaagaggggtcctagggtattttatgcccagggcaacaaacgccaaatgctgacgtagatagcacttattcggttttgccaggagctgtgctaagtgattttcataaaatatgta

SEQ ID NO: 271364 - DNA, 122 bp, Homo sapiens
ccgttgtcccctggcaaaaagaggcccagggctgagccctgggcaagtgtctcccgacatcgctacccctcctccctttattagtttccctttcccaacagaaaccatttccttctgccacc

SEQ ID NO: 271365 - DNA, 122 bp, Homo sapiens
gaagctgtactaatgaagagaaatgcaggggtttaaataaaatcaacaaaatatgatgaccgaatggatatgtggcaaggaaaacaggcctcagaatgagccaaggtctaatacccaactaa

SEQ ID NO: 271366 - DNA, 122 bp, Homo sapiens
cgtctctctcttctttcccctgcaggaatcttccgataattctgccgccgcgactttaaccgtgcgcaaggcgagagctcgaaacaaacatcacatctaaattaaaaaaaaaaaaaaagcgg

SEQ ID NO: 271367 - DNA, 122 bp, Homo sapiens
tatgtgggatactcctgggccgccccggactgacacgtgagccaggcctcggtcacatcccggcccgctccacaactccgaagtagcggccgccgcccctgtcctgcagccggccctggagg

SEQ ID NO: 271368 - DNA, 122 bp, Homo sapiens
cccctttaactcgggtggccccaggatatcaacaacattagcatagccctccctccccagcgcgcctgcgccgtgacccgcgccccgattggcccacttccctacataccctcctctctcgc

SEQ ID NO: 271369 - DNA, 122 bp, Homo sapiens
aaggtgtgtcccaggctggaggttgtccaagtcccggaggcatccccagcaccaagactccggtcgtgatcgctggcagagtcccacgggggtggggggcccgggccacggtggatggttct

SEQ ID NO: 271370 - DNA, 122 bp, Homo sapiens
cggcggtgcagaaggagatggcggtggagagactaagatgggggccgcggacaggattaacggcaagagaggctagccacacttcaagtggaaggctaaccagagggacttgcaccagcgaa

SEQ ID NO: 271371 - DNA, 122 bp, Homo sapiens
tatcggaaattcaaatttaatggcagtcttgtatttttatctgccgattttgtcaacctgcggaaactgatagcctgtttctagctcctcagattttccttatgtgcactgccctgtggatg

SEQ ID NO: 271372 - DNA, 122 bp, Homo sapiens
ttacccctgacttggccaggtcccaagctcttggcagcctcccagactgcaaaggctgtgcgtaatggctttccagagagtgtgcagcaggcccgggaggcctgggctcctttcctttgggg

SEQ ID NO: 271373 - DNA, 122 bp, Homo sapiens
aatgctatgaaactgaatgttttaggatatataacaaaaaaattactggtaattgctcatcgctgaggcttccccaaatgtagaaaagttgtggagctctttttcaagatattttaaatccc

SEQ ID NO: 271374 - DNA, 122 bp, Homo sapiens
caccgaagagctaagcgacttctgaggagaccggaagatgggaggcggggctggcctcaacgcgcaaccaaccagcacacaggcagagaacttccgttctccgtcgtctccgcaggcctgaa

SEQ ID NO: 271375 - DNA, 122 bp, Homo sapiens
gattctctctagtcaaaacttctttgagacgatgctgtcggccttggccaatcggagaatcgaatcatctgactcacccatcctatcgccccgcagatagcataagttttaaactggccatt

SEQ ID NO: 271376 - DNA, 122 bp, Homo sapiens
acaaaacacagcagcacacactggcccctcctgcagacgcacattactgggtggacgtgccggtgttgagtgttggccgtaaacgatcctatgacggatcctcatttcgtttctgtaacatg

SEQ ID NO: 271377 - DNA, 122 bp, Homo sapiens
gcagtgcgagttcagcccgctttcttcgcgctccgcgtcaaatctctccagctctgttctcgcatcccggttcgtaaacttgcccagcccgggacccttttgttgccaaatctgcctcggtc

SEQ ID NO: 271378 - DNA, 122 bp, Homo sapiens
gcagaaaggggggcacttgggggtcatcaagtggctttggcaggaccggaacctcagctccgcaccccttgagaggatctttgttcctccttgggcctgcagcctgcttgggcagcgccacc

SEQ ID NO: 271379 - DNA, 122 bp, Homo sapiens
ctctcccagggcccccggaaccgggtgtctgagcgccagggctggcggggatttcctcatcgactcccctctaatcgcccctgaagctgagtccgtcggaatgaccggcctcccagcccaaa

SEQ ID NO: 271380 - DNA, 122 bp, Homo sapiens
tttggatggggatcctctaagggacagaggcctggggtgaaggaatctacaggagccgctcgcatgaacacagccctttacagttgtcaaagtgaggcggtcccaggctcttcacctctaca

SEQ ID NO: 271381 - DNA, 122 bp, Homo sapiens
ccgtgatctcccggcggagatggtccacttcacttcgcagttgtacaatctcgtcgttggcgccagaagcctcatcgagttgtttggacaagtagaagttttggttgttgagttcagcgttg

SEQ ID NO: 271382 - DNA, 122 bp, Homo sapiens
tctcaagtggaagctagtacagttgtactgagagacatgtggagccgaccaagtacaaaccgcagcttggagtcaaacctagctgacccacggacccaggagggtagaaaacaaaagttgat

SEQ ID NO: 271383 - DNA, 122 bp, Homo sapiens
agggtggggggtgaggctggactgttgggaggacatccctggcctggctcgtgctgaggtcgtagcgggaggaggtggggtgggtggcaggggctctcctcccgagaggggaggcaagaagg

SEQ ID NO: 271384 - DNA, 122 bp, Homo sapiens
aacagcttagccctcatgaataacatgttatcttccaccatctcagggaagcagtgataccgtggagtgagaaaagtgcattctctcaggatttctgccgtgttttcatgctgaggtgtgac

SEQ ID NO: 271385 - DNA, 122 bp, Homo sapiens
tgtctcttttctcttctcttgtctctctctttttctctctctctgtctctttctctttctcgcgatggcccctaggcgccgccggcggagcgtggcccccagccccggcaccagccccggta

SEQ ID NO: 271386 - DNA, 122 bp, Homo sapiens
gatctggggctgaagagaccctctgattccaggaccacctggtgtgcttcctgccagggacgctggctctgggcgtctaccacggcctgcccgccagccacatggagctggcccaggagctc

SEQ ID NO: 271387 - DNA, 122 bp, Homo sapiens
aacattttactgagaggggaagacctggggggagaacaggtggttttttgacaggggcagcgaaacaaatgttctgttttgaatgtgttcagcctgaggtgcctattagacatccaaattga

SEQ ID NO: 271388 - DNA, 122 bp, Homo sapiens
gacgaaatgcagggtaaggtgacagagtgacaagaaaggctatttagatataacctgggacgacctctttcatgcggcttttgaacagaaagagactcgaataaaatgaagaaaaagccaca

SEQ ID NO: 271389 - DNA, 122 bp, Homo sapiens
ccctggggcagagttggggtgagaccgtgacagactccgggggtccctcacccaaagccccggcctgtaacctccagggaacagagcccaagcccgtccccaggtcaccctgcccccgctcc

SEQ ID NO: 271390 - DNA, 122 bp, Homo sapiens
tcgcgatttcattcaacaaggaatttaaagagacctgctgccccgggcgggatgggagcgcgggttgggtgggaggaggcgcagctgcggggcgcgctggcgcaccgggagggccgggggcg

SEQ ID NO: 271391 - DNA, 122 bp, Homo sapiens
cgcgtgggctcctcctgccgcgtagggctcctcctgccgcgtagggctcccgggaggatccggggacaggatgcctggggactgcctggcctgctgcaaccctgcaggctcctaggcaacct

SEQ ID NO: 271392 - DNA, 122 bp, Homo sapiens
gctgtcataactcagaaacgtctgtaaggggatgacaaaaacacaaaaatcaagtaatagcgaagatggcaatgacagttaagcaaacaaagaaacagacagtactgggccgaacctccact

SEQ ID NO: 271393 - DNA, 122 bp, Homo sapiens
ccgggcggcaccgtggagggtggttggaaacattttcttactgaatcttcccagcagccccgggctggagcaggtaaattgttcctttcccagctgaggaatccgaggccccaggagcatga

SEQ ID NO: 271394 - DNA, 122 bp, Homo sapiens
gctgtagccaggaggaagtggaagggcaggaactcaagccgtgttactcggtcacagcggcggatacagtggagctcaatgccctgattgtcatagatgtggagccagcggttctgagcaac

SEQ ID NO: 271395 - DNA, 122 bp, Homo sapiens
ggagatggggctgggatcgagtcatggtaatatttaggacaaaacctggggcccacaagccgacacccctgcgagtcctgctcacacgcatctggccggctaacccgggcaggttcctttcc

SEQ ID NO: 271396 - DNA, 122 bp, Homo sapiens
gcttggggttgccttcggctctgcaggtgaagtacacggtgttccccgaggtcacatctgcgtcctggggctcggaggtgatccggggcctttctgtgcccaaccagaaaatggaaaccttt

SEQ ID NO: 271397 - DNA, 122 bp, Homo sapiens
atcttacgattgtgtctgggttaatgttttataagggactggctactctcgtctacctgccgggctttcccgatctaatatcgaaggaacctccccaagtcctagtaaggggtcccccctcc

SEQ ID NO: 271398 - DNA, 122 bp, Homo sapiens
gcctgcacaacctgaagaaaagatccattcgatgcagttctggccctttgcacagcagcacggaggagcaaataccagcagagcaaaacaccactggaaatgcaacctctgcttttcaacta

SEQ ID NO: 271399 - DNA, 122 bp, Homo sapiens
gattctcagtatatgctaatagtgttattattggacaggtaagttaatgaagacttgggtcgtacttgaatccttcacacttagcctgttgccaggtgcccagtgggtgattgataaacatt

SEQ ID NO: 271400 - DNA, 122 bp, Homo sapiens
aaccagaggcatctcgtgacactttaaactgaagcaaaggaaaggggtggggagaagcagcgctctgagcccaggcctaggggtgtgtcctcaaagctaacaaggttatactgaaggaggga

SEQ ID NO: 271401 - DNA, 122 bp, Homo sapiens
gctgaggcagcgaatcgcttgtacgtaggaggcggaggttgcagtgagctgaggtcgtgccgctgcactccagcctgtgtgatggagcaagacttcgtatgaaaaaaaaataataacaattg

SEQ ID NO: 271402 - DNA, 122 bp, Homo sapiens
tcaggtcatggaatacggtactagaactctttgttggggaaaatgccagtcaaccttacccgtcagaacgctgcctttaagatcagagatctctttccttcagcctaatccacccctctccc

SEQ ID NO: 271403 - DNA, 122 bp, Homo sapiens
gcggacccagctcgggctggtagtggggcgggggtcgcagggcgcgggccgggccctcagcgcgcatgcgcgacaagggggcggggccagggcggggctgcgcccggcgtctagagcggcgg

SEQ ID NO: 271404 - DNA, 122 bp, Homo sapiens
ttctccacccgactccagacctctggagttgaaatccctggagttggaaataaacgtgtgcgttgaaccagcaccctctggtgaccattttgtgcactagcgtttgaggaactctggcctct

SEQ ID NO: 271405 - DNA, 122 bp, Homo sapiens
agcgtggcctgaactgagctgcttcccccggtgccaggaagatgagcgtccccttgtctccgtcttagtctcagtggctcttgcatttcatgctttagaatcaaaggaaagaaacaggaact

SEQ ID NO: 271406 - DNA, 122 bp, Homo sapiens
tgttcaaagtcttttctctgacagcatctgtctctaaaggccgaacaacgggagatgcagcggaattggattaaaagactctgaaagtacagtcgttcatctttatattaagataatatttt

SEQ ID NO: 271407 - DNA, 122 bp, Homo sapiens
gccgcagagaagcagctgtgtccttggtgggcggtcccggggctcacctggctcctgcaccgcctggctctgggtggcctcgtcacctgtcagtcaaggaagagagctggtccgggactgtc

SEQ ID NO: 271408 - DNA, 122 bp, Homo sapiens
agatcttccgcggcctccatgaagacctacaaggggtgcccgagcggctgctgggggcggcggggaccgaagagaagaagaagttaatcagggattttgatgaaaagcaacaggaagcaaat

SEQ ID NO: 271409 - DNA, 122 bp, Homo sapiens
gtctgcgcaggcgccttgagcactgcgtcgcgacgggagagagctttacggcttctgttgcggctaacgggcggggcgtctggtcagcggcgggaaggcccttaggcgctcagagcgggcgg

SEQ ID NO: 271410 - DNA, 122 bp, Homo sapiens
ttgaactctaatagtcatcttcatgactacatggttaagtgaagccaaacgccttccccccgccccctattcctatgaatctggcttttctgctctgttttcatctttctctgcattcacac

SEQ ID NO: 271411 - DNA, 122 bp, Homo sapiens
gtggttttgtatgggtgtgtgcgcgcgcgtttcaactgtttcattttgagtttagttagtcgtagccattgataaatagttccagggccctcagcgctgttagagtgaaaagatcagcagtt

SEQ ID NO: 271412 - DNA, 122 bp, Homo sapiens
tgagcggctgctggtctctgacacacgttcacacatgcgtgcacacacacacgtgacctccgccacccccagtggaaggagggtttatttagctctgatttgtagctctggaagctgaggct

SEQ ID NO: 271413 - DNA, 122 bp, Homo sapiens
cccacaggctgtcctgggatggtcctaatttcacagaccctgagcggatcaagaatgaagcgggcccaggggtcccgcccaccggctgagtgcgtcttaggacgcagagacaagaccacgga

SEQ ID NO: 271414 - DNA, 122 bp, Homo sapiens
cagcctgtccctgtgctttctccttctctatgaagctgttcccaggaccacgacttccaccgagcccatctcctagaaatccctttgttcacatgccctggagagagttgtgctttgttatt

SEQ ID NO: 271415 - DNA, 122 bp, Homo sapiens
gtgtgagcgagcggggctgtgcggggtcatgcaggcaccctgttcccaggcagctcaggccgcgcccatggctcggtctgtggtgggcctgtgcggtggggctgggagaggcccctctgtgg

SEQ ID NO: 271416 - DNA, 122 bp, Homo sapiens
ttcacaccctccctaagaagttaataataggatctcatattatgcatgagaaaacaggctcggggtggaagtcatggaagtcacctgccgcatgagaagactgaggctcagggggtgtaagt

SEQ ID NO: 271417 - DNA, 122 bp, Homo sapiens
agaaaatgcgaggcctgtgactttggacattcagaggcatgagtcgcatgggtagtttggcgaagttggtctccaagtatatgagcaaaggcgcctgggatctgttaccccgtacagttaag

SEQ ID NO: 271418 - DNA, 122 bp, Homo sapiens
tcgcggcgcgaaggaggcgagcccatttcaaggtgcgttgaagtgtggcgagcacagagccgcagaatcatgcgcattgccggggagaaggtggtatagcgtctctgcccgcttctctctcg

SEQ ID NO: 271419 - DNA, 122 bp, Homo sapiens
acccgctcacggcactcctgcgacctggctaagccaccccacggacagacgtgctcccaccgtccagctcaccaaaagccagaagctgaaaacacccgatctggtgtcaccaaggttgctag

SEQ ID NO: 271420 - DNA, 122 bp, Homo sapiens
gaattcctttagcacccatcctttacagtgagcatgatattgagctgtctcagtagagggcgctggagggatactgcaacaggaaagggctctcctgctgtttgcagctgctgcaagaggtc

SEQ ID NO: 271421 - DNA, 122 bp, Homo sapiens
cctcgccatttccagggtgcagagctagacagaactggaccgacagcgtgggccggtagacgtcggcgtgtgtctacaccacggcctctgcacacccacttgcttcctccccacaccgcgat

SEQ ID NO: 271422 - DNA, 122 bp, Homo sapiens
gttcttgaagcagttactaaaccagaaaggaggtacacagcaaagattgtttctggcactcgtatttggaagagagctcattagtcttccttacagttgtagaaaggtggacttgggttatt

SEQ ID NO: 271423 - DNA, 122 bp, Homo sapiens
cgccggccggactgtgcagcggggtcgacccgcctccctcatgaatattcagcgagaggccgggtcgtggacatcctcgagggctcgctccacctatattacgagaccattggctaacctgc

SEQ ID NO: 271424 - DNA, 122 bp, Homo sapiens
taattattcccgacttcacttcccttttactctgcgttgcttcacaaagacgcacacacacgcacacagaaatgagtcatatgttcagctttctgaaagtcaaagagaataaacagatgcca

SEQ ID NO: 271425 - DNA, 122 bp, Homo sapiens
gaggctgactttgggagagcgacctgttgaggctcacacattgaggcaaggcactaccaccgcccggtgctcttgcagctctgtcacggagcaccctgccagcacctctcatggacagtctc

SEQ ID NO: 271426 - DNA, 122 bp, Homo sapiens
gctggccgtgggtgttcagaccattcctgctgctggtcaggaacgtcccttcaggaagttcgttcactccaaggtcgttctctttaggatttaatgaacaagccacaaaaatgaaggggacc

SEQ ID NO: 271427 - DNA, 122 bp, Homo sapiens
ttctagaatactcacccaccttccagcatttgactgaatctatcttcatgtccatgctaccgtatttgggcccaaaaagttgagctctgtgtgtcacttctcagctcaaaatatttctgaag

SEQ ID NO: 271428 - DNA, 122 bp, Homo sapiens
gcaggtacttcagctccaggtcctggaagtccaggtcagtctcaaagctgatgaactgctcgctccgctccgagtccacgttctgtggttcacagcggcctcgatacagcttgtagcccttg

SEQ ID NO: 271429 - DNA, 122 bp, Homo sapiens
tttgcaccacgcgggacccggcactcttcctgccacccacccctgagagggctgcgcggccgaccccagtactagaaaacactcgtcacctcactcaagacgggtacgaaggccaacggacg

SEQ ID NO: 271430 - DNA, 122 bp, Homo sapiens
cactttacagctgagggtaacaaggcccctcgcttgaggtgtgggccgaggctcggacctcggttttggcacttagggacatccttttccttcaaaatgttttctcttcattgctttttttt

SEQ ID NO: 271431 - DNA, 122 bp, Homo sapiens
caccccgctcgggcgccggccgcagcccggctctcaggatccgcgccagcagggccatggcgctcgtctgcatcggcttgtttgtctgagcaactttgtttcgggggctgctctttgggttg

SEQ ID NO: 271432 - DNA, 122 bp, Homo sapiens
ggcgggggcgcgcgagaagcggtgacgtcaaggggcgcgctgtggcagcacctccccgcgcgctagttaaaaagaagaagaaaagagggaacgaaacatgagaggctgtgtgagaagctgca

SEQ ID NO: 271433 - DNA, 122 bp, Homo sapiens
acgtaccgagcgccatttccacgcacgctcttccgctcctagctttcgttcagaagttgacgtcagcttcggagacagaaattacacactctacggcgaggggtcgggttcaaacttagtga

SEQ ID NO: 271434 - DNA, 122 bp, Homo sapiens
atccttactaagtgggatcattactaatctcacttcattgtaccttcagtatctggaaaccgtccctatggtcacacttaccacggctcattattattttaaaacatggggctgtgtcattt

SEQ ID NO: 271435 - DNA, 122 bp, Homo sapiens
gtggacagggaagagcaggggggcggcactggccgtgggggcacctgaagggttccgactcgtgcacatccagggccgcgccgcggatccggccctccttcagggcctgggccagcgccttc

SEQ ID NO: 271436 - DNA, 122 bp, Homo sapiens
aaaataggaaaaaaaaaattccacaaagtttcaaaaagcaaaacttcaatctgccctacacgaagcacttctttgaatccatgtgaatgaagtgatgtgtaggcctgtattatgtattctag

SEQ ID NO: 271437 - DNA, 122 bp, Homo sapiens
ctgtcccagtcccagccgtgagaccagagcaggtgactgttcagcagcccctagagttcccgacaccctctgacgggatgtctgagctgtcgctggcccaagagaaaagaggcctccaacaa

SEQ ID NO: 271438 - DNA, 122 bp, Homo sapiens
tttccccgcgccacccaacagctcccacgtctcatcctccgggagcggggcggggcgaagcggaagaggaggggccgacacaaccacgcccactagccgcgctccaaggccgcggcccactt

SEQ ID NO: 271439 - DNA, 122 bp, Homo sapiens
gccgcagctgcagcactcaggttccgcgtgcgcgccagaccgggacgtataaatgggaggcgcgacccatgctgactccctaggccgcgtctttcagccctcgttgaaggttattagatagc

SEQ ID NO: 271440 - DNA, 122 bp, Homo sapiens
tgcccctgtgggtagagggactttgcctatttgttcacactgaatcccagccctataacacggcctggcacatagaagagcttcaaaaatgcttgttgactcaaagacaaagcaaaccactt

SEQ ID NO: 271441 - DNA, 122 bp, Homo sapiens
taaaaccgcagtcttacctttcttggatttctccagaagatcctagcacagtgccaggctcgcccaagcttattgggttggagcaatcaagtgatagtacttgatagtacttgatcaaaatg

SEQ ID NO: 271442 - DNA, 122 bp, Homo sapiens
tatgactaaactactagtcaatacagcttgcaataatagtgcatgaatgataacaggcctcggctttatcacccaaaaaataacttgaattctatgtgaaatgtgttaggataagtttgctc

SEQ ID NO: 271443 - DNA, 122 bp, Homo sapiens
aattaaaaatccttttacacgaggcccgcttgtactgcttaatggggctttgcaaggaggcggcggttaattcctgctcgcccaaccgcccagccaccttcgcgggccacgggcaggctgca

SEQ ID NO: 271444 - DNA, 122 bp, Homo sapiens
tgggccctgtctcttgcactggcctggagacacctgggagtaggtgattcccctgagatccgcgcatgtctctgtgaggcgagagtgggtgggcaagcggggctgcggcggccgcagcggga

SEQ ID NO: 271445 - DNA, 122 bp, Homo sapiens
gcaatcccgtttaatactacctgatggtcagcatggtaacgatggcagcggcagcctgtgcgaagcagccgctgccatgacgccggctgcagtggggtacaggagtaggtcgcgggtcctca

SEQ ID NO: 271446 - DNA, 122 bp, Homo sapiens
ttctggggtgagatcaggaccctcaaagccgagaaccaagtgcagctgccgtccagaccgcgccaccttctcaggcagtcagcagcgtgggtctggttagccgcccagtgctgcaagtgcca

SEQ ID NO: 271447 - DNA, 122 bp, Homo sapiens
ccatttaaccctgtgacgtgggtactgtcagccttgcttttcaggcagggacagttaccacggtctctcagttgctcagtgcaggaccagaacccgtgtcagctctggagtctgggcctgga

SEQ ID NO: 271448 - DNA, 122 bp, Homo sapiens
cgccagtggcttgccagggatttgagcctggagagtctcactctctgtccgcatctcagtcgcgctgatctcggccacacgtaggtccataggctggtcctccctcacgagtggcctccgcg

SEQ ID NO: 271449 - DNA, 122 bp, Homo sapiens
gaccagggtgagaaaacccaaaaagctccaaagagtgctctcaaacttgccttgttctgtcgcctatgaactggcaaagggaaaagtgagagagagagagagatgttaagaaagggacaggg

SEQ ID NO: 271450 - DNA, 122 bp, Homo sapiens
agagtctctctctgtgtgcttatatatgtagtaaattggctttttagcctaattcattttcgatcactgggaaatatcatgactctcatccctgttgcaatggactgtactgggcactccag

SEQ ID NO: 271451 - DNA, 122 bp, Homo sapiens
cggtggcgcggcagtaacttccactagctccccccaccccccccagcggcgcggcggcggcggctccgggttccttcaattatcagctgagccgcagcaccgcgcccggcgtgcgcctccgc

SEQ ID NO: 271452 - DNA, 122 bp, Homo sapiens
gggaacattaatggggaagcagtgtctgcccaccttagagtaagccctgccaaactcaggcgtgctttcaaattttgtaaaagtgaatatatatataacatatatatattttatatatatat

SEQ ID NO: 271453 - DNA, 122 bp, Homo sapiens
tccttggtgctccccctctgcccacacagaagcaggctctggagttagggggttaagggtcggggtgcataccctcattccctttctttcctccccttcccaccccagctgctctactcgca

SEQ ID NO: 271454 - DNA, 122 bp, Homo sapiens
agcgaggtggaccggatgttccccggggtgcctttggacacgcacgacgtcttccagtaccgaggtgagggctgaggaggatcccttcgtgagacaccacactaagctcctcttagtgagtg

SEQ ID NO: 271455 - DNA, 122 bp, Homo sapiens
cacttcatctaggccagaatacaaggtgctgtctgcaagaaatgctgagcgtcggggggtcgttcggtggccccagcctacagatcgcacacaagcccccgccccatccctcattggctccg

SEQ ID NO: 271456 - DNA, 122 bp, Homo sapiens
agacggcagctgcgggccggcggctggctcctcagcccccagccctgcggggccgagcggcgaggaccccttcaccacctgcgtatcccactccatggaggtcgtaaaagaagcttggtcaa

SEQ ID NO: 271457 - DNA, 122 bp, Homo sapiens
tcgcaagcctctgccatgaggcaccctgagtgcaggagcatttgctcctctctggggcagcgtcccccctgcctgcatttcccggctgctagggaagccagaggaagccaggtgactttgcc

SEQ ID NO: 271458 - DNA, 122 bp, Homo sapiens
tctcacgagatccgatggttttataaagggcagttcccctgcacacaccctcttgtaagacgtgactttgctcctctttcaccttccaccatgattgtggaactgttgagtccattaaactg

SEQ ID NO: 271459 - DNA, 122 bp, Homo sapiens
aacatctcatgttgtgcttcttggccatgagggacccaaggaaactggggcttggaaagccggagacagctttgagtttgaggggagaagtaacttgctgcttacctggtttggtgggtggt

SEQ ID NO: 271460 - DNA, 122 bp, Homo sapiens
ttcccacgtgtgtcttagctgtctaggcagtacttcctgcaaccccccccccacaccccgcgcattttctaatcccgagccgaggactaaacgccagggttaggtatcatcctttttccaaa

SEQ ID NO: 271461 - DNA, 122 bp, Homo sapiens
ggcaggcttccagatttcatagcccatccacaatcgcatgccactgaagtcttctggctccgacttctctgcaatttacacagccctacactgccttcctcctaaactctccaacctcctat

SEQ ID NO: 271462 - DNA, 122 bp, Homo sapiens
ggatctgctgtcaacacaaaacatatgttctgaagtcttgctttggttactaatgatgcccgggatgattaagtctggaaggaatttccagctccggcttgcttggcctcttctccctcccc

SEQ ID NO: 271463 - DNA, 122 bp, Homo sapiens
accctccagaagcagagttgggcaggcccaagtgccaagcccagctccacctcttggtagcgatgtagttccctcatagaccctcagtttccccctctggaaaatggggtgaccagagagtg

SEQ ID NO: 271464 - DNA, 122 bp, Homo sapiens
ctacttttcatttttaaggatgcttctgattacattgatgccacctggataattcaggctcgttactttcttaaaatcagttgattagcaaccttaattccatctgtgacttcaattccccc

SEQ ID NO: 271465 - DNA, 122 bp, Homo sapiens
gtgtggctgtgttgggaggacgggagctctactgcttggcagtggacacaccaaggctgccgactggcccagtgggtggcgatgccacttacatgtgatttctcaatctccgtcaactgccg

SEQ ID NO: 271466 - DNA, 122 bp, Homo sapiens
ctgtcttggattccacatgtgagatcacgaggtatttgtccttgtttctggctcatttcacgtaacaggacatccatccacattgtcgcaaatggcaggattttccttgttgaagctgaatc

SEQ ID NO: 271467 - DNA, 122 bp, Homo sapiens
ttaacggcaattaagagggatagaaaatgtattccagctgataaaaaggaattccctgtgcgaaagggaaaggcagaaagcagctggaaaaaaaaaatagcaggcagttgtcttaataacgt

SEQ ID NO: 271468 - DNA, 122 bp, Homo sapiens
gtcagggccatgcaccaggtgagctgaggatgggccaggtgtgtcctgggagccgctgcccgagtgtctcctgttttccaggagggaggatcggtgcatccagaagaaaatcctgatgcgga

SEQ ID NO: 271469 - DNA, 122 bp, Homo sapiens
tttattcaaacatgaaggggaagttccaccccagtgagcactgggaagtgcgttctcagacggggatggttaagaagccacagtggtgtgccccagaaaccagtagcgtgagccacagctgc

SEQ ID NO: 271470 - DNA, 122 bp, Homo sapiens
atgcaggcatcactacctccattttattaaatggaaaatcaaggcttggaagttaacttacgtcctcaggttcacactgactcaaatagtggggctgggtttaaaactttgtttaaaccttt

SEQ ID NO: 271471 - DNA, 122 bp, Homo sapiens
gggccacgagggtgctgagaacctctctggtccccgcgcttcaaggggtgggcgctctgccggcgggaatctttaggatgaactggaagcacccctacactcactcctattctccgggctgg

SEQ ID NO: 271472 - DNA, 122 bp, Homo sapiens
gggcgctgcgagtgtggcgtcctcgcggggcgggggctgctggcctgtccgggctgcgcgcgtgaccaccagcgggctgggatgtgttagggtcccttgcctgcctgggtacgggaatctct

SEQ ID NO: 271473 - DNA, 122 bp, Homo sapiens
catactgggcatctctgcaggcgcgtcggctccctccacccctgctgagatgatgcactgcgaaaacattcgctctccccgggacgcctctcggtggttcagagcagggaaaatgttgcctc

SEQ ID NO: 271474 - DNA, 122 bp, Homo sapiens
aggaaagcgctgagtatagctcttgcgcgtccagtcacaaatgacgtcccttctgtaccccgccctgtaggcgggagcatccaatcaacttcgagagcgtaggccccacctatcgtgggtcg

SEQ ID NO: 271475 - DNA, 122 bp, Homo sapiens
aggtgtggaggtctattttgttttctccatacgatttgcgccagggtctcagccaatctccgattggttacgtaacgcttaaagtctaagatggagtttaacaccctccttggtgagttcct

SEQ ID NO: 271476 - DNA, 122 bp, Homo sapiens
aggtgtttcccaacctgggtcctataacttgtaccacctgttggtaaatggagaaacttacgtgacgctatgtttagtttagggagagagaatctagcaagctttttggctgctgtgcagtt

SEQ ID NO: 271477 - DNA, 122 bp, Homo sapiens
ccccagccccaccccccgcgcctgggctccctttctccctcccctctgggatgcgaaacgcgaggttttgtaacctttcctggcaattttagattttgtgtgggatttcctgtctagaagca

SEQ ID NO: 271478 - DNA, 122 bp, Homo sapiens
gaggaattcgctaagtgagttttctggcttctggatacactttcaaagggccagagggcacgaggcttccgccttggccgccacctccccggccagctgcggtgttcgcggccagtgttgcc

SEQ ID NO: 271479 - DNA, 122 bp, Homo sapiens
cgtgtagggaaggcggataggagtctttgaggcctagtgcaaagtttgcatcagtttctgcgggggcgacagtgtgacttcgtaaatctgccattgcgctcgggccctgccctccaaactga

SEQ ID NO: 271480 - DNA, 122 bp, Homo sapiens
ttgagaactaccggatgagatagatgcagctatgaagagttgaaggaacatgtactaggtcgaggttagagcagtgcccaagaagcaggaaaacttttgatttgttcaagagacagtaatga

SEQ ID NO: 271481 - DNA, 122 bp, Homo sapiens
ctgacaagcagaaggctgacctcaacctccataatgaaaaatcatgattatttaatcaaccgttgtcagctttttaatgcttaattgctgtgattcctttctctttctaaataaatattcac

SEQ ID NO: 271482 - DNA, 122 bp, Homo sapiens
gaacaaaggccaacattcatggtgtcaagcatcatgttaaacattttacctgcattatttcgtttaattttcacaacacccctttgcagtagatactgaggctcggagaggtgaagcaactt

SEQ ID NO: 271483 - DNA, 122 bp, Homo sapiens
ccatcctgctcgggcctgtgttctcatcgtcccaccacccggcagtcatgcagcccaccccgaccacacatgcagagtcgctgtccccacctgcacaagctgccccccacttccttccgttt

SEQ ID NO: 271484 - DNA, 122 bp, Homo sapiens
ggtgctgagtgcagggctgggacaggcggggctgcggcccagacagtgggctgagctcagcgtctgggctgggtggaaatggccggcctggggttttggggccaccctgctggacctctcct

SEQ ID NO: 271485 - DNA, 122 bp, Homo sapiens
ttgtttgggtgcagtgtatttcttactgtgctttaaagaggaacacgttttaagaacccccgcgcggggcggagcagggcggagtccccggcgggaagggacccgagacctcggctgcgcct

SEQ ID NO: 271486 - DNA, 122 bp, Homo sapiens
acccctgtgtgagtaccgactgcccaagagctggcagtagttttgtactctgagcctgagcgtgtggccccacgttccatgaggcctttggccggtttgtttgccagagtgtctctgagagg

SEQ ID NO: 271487 - DNA, 122 bp, Homo sapiens
ggccgttctggcctgtaatggttatttatacccctggaataacggggtaacagagcggctcgcagcggcctactttaaatacgcccctctctaagcactctgataattggagcagaggggtc

SEQ ID NO: 271488 - DNA, 122 bp, Homo sapiens
gtctgccagagtcgctgttgctaagtcctcttcttgcagcctggggatcccagaggaccccggcccagtccatcagctgggctgggtctttaatatttaaagagctctcccggacatttcaa

SEQ ID NO: 271489 - DNA, 122 bp, Homo sapiens
ctgcagtggaacactcatgagaagtgtggtgccgccaaccctgcagtggcctggagagcacgtggggaccagccccgcggtggcctggagagtacgtggaaatcaacctcaccgtggcctca

SEQ ID NO: 271490 - DNA, 122 bp, Homo sapiens
gatagggtctttcctcaaaaacctggagaacagacgcgcccagagacaggccgaaggcagcgcagaccccgcccctcaccgccccaccctctcttctctcgggtctcgcccatccctggcct

SEQ ID NO: 271491 - DNA, 122 bp, Homo sapiens
aagaacgggcgcgggccggcagggggcggggcgcaagtgcgtgggggcgtgcccagggggcgggcgagggggcggggcgaagcgagggtgcgcgccgctgttcgccgcgggctgctcgcgcg

SEQ ID NO: 271492 - DNA, 122 bp, Homo sapiens
ccctggcagagcctcgttcgcactcgctcctgcctccagtttggcaacacaacacaaaggcggtatggcttgtatacactttccaggctgagcccctattcagagggggctgcagcttgcgc

SEQ ID NO: 271493 - DNA, 122 bp, Homo sapiens
cagtgtatctctactcacatatctgacaggcacctcaaagtaaacatgaccagaacccaacgaagtccttcccttaaatctgttatttgttctatattcccttgttgatgacattaccatac

SEQ ID NO: 271494 - DNA, 122 bp, Homo sapiens
ttgctgcgtctagacagtgtctggtatgaggcctccctctccgcgcctcaccggcctccccgaggctcctattcccagccccgctggcccctgctctgcgccctctgtttcccacacccctg

SEQ ID NO: 271495 - DNA, 122 bp, Homo sapiens
aagtgagcgggctggggccgctggcgcgccctcctacttccccgtctgcgtccgcgttcgcggctcccgtttgcatcatctccagccggcggctgctccagggaggctgggcgcgatcctct

SEQ ID NO: 271496 - DNA, 122 bp, Homo sapiens
aacttgtctcacagttttcctctggctctgcccattccctctgctttcagaggccagcttcgtgctgggtgtggagaggcagagggagccggttgactggggctcctgggctggcctctgtg

SEQ ID NO: 271497 - DNA, 122 bp, Homo sapiens
atccgcccgcctcggcctccctaaatgctgggattaccgggttgagccaccgcgcccagccgagccatttccttttgtgagtcctcctgaacatccgaattggagacggggtttgaggttcg

SEQ ID NO: 271498 - DNA, 122 bp, Homo sapiens
ctgagggaccccgaccttccatggcccatagagggtgggggccagggtgtggggacatttcgcaggcctgtcctcctaggaggggtcagtccagccgaggcccagagggcgtggtgggttct

SEQ ID NO: 271499 - DNA, 122 bp, Homo sapiens
gggcaagggaggccagaagtatctagatggggcggggcaggttccctggaggccggcagccgggggcaggggtctcagcaggcacgggctccacctaccgggcactgtgatggtgagggtgg

SEQ ID NO: 271500 - DNA, 122 bp, Homo sapiens
gtatgtcactttccctgataaaactgtaggtcacttaacaaggaaggaagggagactggacgttgggcaggcagccggcagtgtctgccaccatctctgactggcatgccaacactgctcct

SEQ ID NO: 271501 - DNA, 122 bp, Homo sapiens
cacctggcggtggggttgtttccggagaagcgcccaggctacaaactgagttgtgaatcacggagggacttaggtccggaaggggcagcgcagcgccctccaggcagaggagaagccccgcg

SEQ ID NO: 271502 - DNA, 122 bp, Homo sapiens
ggagccagtcggcctcgcctctcaccaggtccttcacggtgtccaagtaatcgtcccactcgggcgatccaaactggtagttgctgcttatgatcatcctcagcaccagcatctgcttccgg

SEQ ID NO: 271503 - DNA, 122 bp, Homo sapiens
tgggctacacgtgaatggggtgggccacagtgagctcatccctggagttggtggcggggccgctctgcacttagaagactcctcatgggggctgcttgttagagcttggagatggtttggcc

SEQ ID NO: 271504 - DNA, 122 bp, Homo sapiens
aaattctagagaggcagaattctgtgagtgccccttactgcggcaggcatagtgtcagaacggggatggagccataagctgtccagtgtctgaggggtcttcccactaccgccccccaagct

SEQ ID NO: 271505 - DNA, 122 bp, Homo sapiens
caggccctttttatagccatgtgtgaccaggtgactcatttcttgacatttaaatgggagcgcaagtggtgtacataacttctggccatgtccttggaaagaaagctgcttacctccatttc

SEQ ID NO: 271506 - DNA, 122 bp, Homo sapiens
ccttgccctatccagcatggaaccagcattttggtcccaacacacctgacttggaacattcgaatctgatctacaatttgctcatggatggcagcagcccttgtgcccacactctgagggcc

SEQ ID NO: 271507 - DNA, 122 bp, Homo sapiens
agtaagttcaagattaaacttcatggccagcacctattctatgatgttagagaaagacaccgccaattgctgtaaaggtcagccaatctgagggaagagtgatatccgtttttgaaagctag

SEQ ID NO: 271508 - DNA, 122 bp, Homo sapiens
ggcagctccctcggcctccagtggaaggcggaagcacttgacaaaaagcctccagttaaccggggcaagcagcagggtggggctcaggccttctggccaagtccttgtctccctcgagtctc

SEQ ID NO: 271509 - DNA, 122 bp, Homo sapiens
cctagacgacccagcccaaccccacccacagtgcctggcaacctagaccagtcagggacgcggcaggaaatggaagagcctccgcaagaggctctggctgaacccttgaaacatgaaagccc

SEQ ID NO: 271510 - DNA, 122 bp, Homo sapiens
tactacttcataaataaaatgcatgctgttataccaataataaacggttactcactcttacggcctatgattggaaattcctagctaacggcttcaagcaaaagcagcaattcgatattatt

SEQ ID NO: 271511 - DNA, 122 bp, Homo sapiens
ctcagtgagaaggctcctccctggtcccaaaccatggaggaaaggagctttctaaacaagcgaatgaacaggtatggaaggaaaaagggccaccgcaggccagagtctctgtgctgtttaga

SEQ ID NO: 271512 - DNA, 122 bp, Homo sapiens
ctgtggggcgggactcagggttcccggagaggccgccccagctcctgccgcagcgctgggcgccctaccacgcctgctccctagggaccccgggcgtcccacgcacgcacccaccctccttc

SEQ ID NO: 271513 - DNA, 122 bp, Homo sapiens
ccctctgtcttccattttccgccccagtctccaaacagggaagtcacaggagaatgccaacgcatacacctgaaaggtgtcagaattagacacggatgcgtgtttattttaaatgcccacgc

SEQ ID NO: 271514 - DNA, 122 bp, Homo sapiens
acatttcaagtctccaaaggcacatgtgactaggggcagcacagggtgcacggtgcaggacgcagggcgcgctctagagtgaaggagtgacgagcaaagggaaggaatgggcaagcgtaggc

SEQ ID NO: 271515 - DNA, 122 bp, Homo sapiens
atggcttgtcctctctgctgcctactggaactttctgcaatgatggaaatgttcagtgaccgtgctgtccagagcggcagccactggccatgtgtatctaatgagcacctggtgaccgtgct

SEQ ID NO: 271516 - DNA, 122 bp, Homo sapiens
acctggccaatcaaagataccctaatgatttagggaagtttgagttggggtttctgttgtcgcaactgatgaaggggatttaattctattataggtgacaaagtccaggttgaagtagctca

SEQ ID NO: 271517 - DNA, 122 bp, Homo sapiens
tgccaggttgaatgagccgtggatgccttcccgcccgtgtctcctgcccagcgtttcacacgactctgcttagcctagaaactgccccaggaccttgtcctccaccagcttctgaccactct

SEQ ID NO: 271518 - DNA, 122 bp, Homo sapiens
ctttggctcaggtgttgatattataattcaaccctttcacaaactccttttaaaacctgacgtaaatcacaagattagtactactgatatttatgaaaaaccactggaaaaagtaatttgga

SEQ ID NO: 271519 - DNA, 122 bp, Homo sapiens
tgcaccagggcatgaaatgctcctgtgagtgacctgggccttgccagggcccttccaaagcgcccggtctgggttccgggaaatgcccgggatggggtggggggtggagtcttggcttgggg

SEQ ID NO: 271520 - DNA, 122 bp, Homo sapiens
gaggctctggagtggggcgcggctgcggcagaggggtgggcgcatgcggctgtgaccctgcgagctcctcagagaggctgcggtgagcgggcgtccgaagtccctgggcctggaacagcctc

SEQ ID NO: 271521 - DNA, 122 bp, Homo sapiens
agagggacgcgcagggaggaacccttggtggtatcctgattgtcatcaggcgcttccatgcgcgggcggtaggcgggacagccgggatttcccggagaagagtttccagggcatttgcggga

SEQ ID NO: 271522 - DNA, 122 bp, Homo sapiens
aggaggcgtgggagctggtgcagtctgcggcccggcgtggctgcggtcacacagaggatgcggtgagacctggcagcgaggctcgaggcagacagacgctcatgcagggcagagggcaggac

SEQ ID NO: 271523 - DNA, 122 bp, Homo sapiens
tttagctttccccagagcccccttataaaacattcagatatctactgcccaacagtgaatcgtggagctttttaataaaagataaatgagtacctgtttgggaatgtattttccattttccc

SEQ ID NO: 271524 - DNA, 122 bp, Homo sapiens
tcctcccctgccccgtcccgcccgatggccaggtggaaaccaggcaggtgagccagcacacgtgtcaactagcggaagacccccaggcccgccaggggtccctgaggggacacaccctccac

SEQ ID NO: 271525 - DNA, 122 bp, Homo sapiens
tggttcaatcagcctgctaaactatatggaacctcattttcatgggccacttatttaagccgggggaccttggaaagtctctcatgtctctcatctcaacggcctaatgtgacttctcttga

SEQ ID NO: 271526 - DNA, 122 bp, Homo sapiens
acgccgctgctcctcctcgtggaagacggccctgggcctctcgtcctctgactcgctgtccgagagtggctcattgatccaggcgtccaggtccaggctgcaccggacaggagggccacaca

SEQ ID NO: 271527 - DNA, 122 bp, Homo sapiens
ggcggcggctgcgggaactttcccagcggatctaatggctgcgcgcgggccgctgtgaggcgcggcggcgagcgacgggcgcggggccgcggagcagcgagcgagcgagcgagcgcgaggcc

SEQ ID NO: 271528 - DNA, 122 bp, Homo sapiens
ccaggtagcggtcatatgccatgacagccagcagtaagcattcagctgtggctagagagccgaagataaagaactggagcaagcaaccagccacagagatagttgcttcttgcaggaagccc

SEQ ID NO: 271529 - DNA, 122 bp, Homo sapiens
cgggccacacacccgcgtgtacacacagtccgagaacgcacacacgtacacacacacatgcgcaaggcacggcctggccttcaggcacagagagcccatccggtttcccactcagctcccac

SEQ ID NO: 271530 - DNA, 122 bp, Homo sapiens
ttcacccccgaagaggcccaagtgaacttcactggctacgtggacgagcatgcctccccccgcatccccatcgatgacctcaccatggtggtctacgacccggacaaggcaggcgtggtggc

SEQ ID NO: 271531 - DNA, 122 bp, Homo sapiens
ctaggaagatggtggcagaaaaagagaccctgagcttaaacaaatgcccagacaagatgccgaagaggaccaagctgctggcacaacagccgctcccggtgcaccagcctcactctctggtt

SEQ ID NO: 271532 - DNA, 122 bp, Homo sapiens
ctccctcccgaggtaggggcaccctctgggcctccctgccctgtccccttccccgccgcccgggaatacctggagccggcagtagcacagaacagcgatgatgcagagcaaaatcacagtcg

SEQ ID NO: 271533 - DNA, 122 bp, Homo sapiens
cgggtccagcctcggcggcccgggacgccggtaggcggggcctgagcctcgccccgcccccgctgcccgccattcgggtcacctgacccacccgcggctcacgtgatccgtccccagcgccg

SEQ ID NO: 271534 - DNA, 122 bp, Homo sapiens
cgccgccacaccctcggcgcagccccgcggcgcccccagcagcagcagcagcagcagcgacggcgacagcagcatcgctaaccactgggctctccgggagccccttgtcccgggagcccctt

SEQ ID NO: 271535 - DNA, 122 bp, Homo sapiens
cggcatggagaacgagcggctgggggtcgtgcgggactccatgtttcagaaccctctcatcgtcaaggtgagcaccccacgcccaccgcgctttcgctgtcgccggctccgggcacctgcgc

SEQ ID NO: 271536 - DNA, 122 bp, Homo sapiens
tccagtagaggagtccttgacttgccagatatttggttttgtagtatcagttctgaagagcgtctccatggcttctctggcctgtatcagcattgatagatacattgccattactaaacctt

SEQ ID NO: 271537 - DNA, 122 bp, Homo sapiens
agtgcacaactccatggtctgtctttttacagtagcttcattactggttcaattttatgtcgttagccttgttgtaccgtattcatttttacttcctttgacttatataatcttgcttcgtt

SEQ ID NO: 271538 - DNA, 122 bp, Homo sapiens
gttctcactgcgcatgtgcagttgcaaccgggatactagaacctacgcttggtgcgcctgcgcagaagcgaggcgcgctggggcgactggagcggttccctcgcaggcggcgccattttgtg

SEQ ID NO: 271539 - DNA, 122 bp, Homo sapiens
taatgagaggacattggggccttttcctgtgctgtggtgtgcttctgtgcacccgtacgtcgtctttggtggccattcagaactgccatccattaaatcgagttctgtgtttctgagtgcgg

SEQ ID NO: 271540 - DNA, 122 bp, Homo sapiens
acctcaagtgatctgccagcctcggcctcccaaagtgctgggattacaggcgtgagccaccgcacccggctagggatgggtttttcccatgttggcgaggctggtcttaaactcctgacctc

SEQ ID NO: 271541 - DNA, 122 bp, Homo sapiens
tgtttcataatccctctggcccctgtgcttcttccattaaaataaatccaaggctgggcacggtggctcaagcctgtaatcccagcactttgagaggctgaggtgggaggatcacttgaggc

SEQ ID NO: 271542 - DNA, 122 bp, Homo sapiens
tctggcagccccgagcccaacctttaggaaagatgagctgtgaggcgtcctcctctacgtcgccagcccgcggatcgctgccacccgccgccatcgccgcgccgcgccgcgcgccaccacca

SEQ ID NO: 271543 - DNA, 122 bp, Homo sapiens
tagtgggggatggctgggtaggaacgtgcgggctataaagccagaccccaggtgtcagtgcggttcagaaagcaactagcacagccatgcccaggccaggacccgtgacacagcgatgctct

SEQ ID NO: 271544 - DNA, 122 bp, Homo sapiens
tgggctctgcctctgagggccttacacgttagggaggagtgggtcaactgccacaaacgtcgctaggaaattaaaaggaaaattttacaaagtggcagttcttgtctgtcttcccctccaga

SEQ ID NO: 271545 - DNA, 122 bp, Homo sapiens
caccagagaaccagcaaggtcaaattgcttcggcttcagctccggaacatcgtctccctccgtccacggcaacgcgggagcctgaccagctccggaacatcgtctccctccatccacggcaa

SEQ ID NO: 271546 - DNA, 122 bp, Homo sapiens
gtgtgaggcgaaggaaatgtggacatgagagttagttctgttttgcctgcacggtgggagcggcgtattcggcacctggaacgagttgtgtttgcccaggagcatgcagccagccgcgccgt

SEQ ID NO: 271547 - DNA, 122 bp, Homo sapiens
ctctccgcccagcctccccattacctggcggacaaagctgttggatgtggtatccgaggacgtgctcccatctgaccgtttgaatcgccctttcctcttgctgtatttgccctgaagaggcc

SEQ ID NO: 271548 - DNA, 122 bp, Homo sapiens
ggccgccctgctggctgctctggtggtcggggatgtggactgcagtggcccaggtagaggcgtgtgcttccccgctgtgagactgcgtttcaccccgtgtgtggggctggtgatcgcagtcg

SEQ ID NO: 271549 - DNA, 122 bp, Homo sapiens
aggagctgctcttggaggggaagaaggcgctgcaactcggtgagtgacctgcgatgtccgcgaccctcaaccttggcccaggtggatctgacgctctgtggtcagctttctcctcagtcttc

SEQ ID NO: 271550 - DNA, 122 bp, Homo sapiens
tgaataaacatggtaaagggcatttttaattctgtgtcttacacctggcatacatatcatcgcctgttgtttgtgttgttgctgtggcccctgcttaacaagtagaaaacaaattgataaaa

SEQ ID NO: 271551 - DNA, 122 bp, Homo sapiens
cctcttccatctccagaaccttccaccttcttcttccccggaaactccgcacccattaaacgagttaaacgacagcgccccctgcccaccccccagcccggaagccctcgctttaccctcag

SEQ ID NO: 271552 - DNA, 122 bp, Homo sapiens
attcatttattcgtcataaacctcatggcgtaattcataatttcctctgggaatcatgtgcgaccttgacgtattggatctgtggaggaggagaaaatgcaagatcccagctgtatgctggt

SEQ ID NO: 271553 - DNA, 122 bp, Homo sapiens
gaatagcaaggaactttgcagctctcgctgacgtaactcaggcagtagcccagctagtaccgtaatctcctgctgctaccgtattactctacggcaacaggcacaagtgcgtatacagctgt

SEQ ID NO: 271554 - DNA, 122 bp, Homo sapiens
agagaagtgagttgaaatataccttttaaaaacagcaacttggcctggcccggtggctcacgcctgtaatcccagcactttgggaggctgaggcaggcggatcacgaggtcaggagattgag

SEQ ID NO: 271555 - DNA, 122 bp, Homo sapiens
agacaacacacagggcctttcgggccaccaaactagtagccaagaaggaaccatcaaagacgcgggcatgatcccctttggagctccccgatcttgactagtcatccatccctacagaaaag

SEQ ID NO: 271556 - DNA, 122 bp, Homo sapiens
aaatctgtccctctaaatgttcgggtgccaagccttcggggtgattctcagcatcaatcacgacgtcgcgcaaccctctcccctgccccccccgccgccctctctggctttgggggctccca

SEQ ID NO: 271557 - DNA, 122 bp, Homo sapiens
ggtcggctgagggccagcagcaaagccgtcttgggagactcagagagcgcagagtcaaggcggcggccgggatgggggccgtccgagcggatggcggtgtccctgaggatgactgtgggccg

SEQ ID NO: 271558 - DNA, 122 bp, Homo sapiens
ataaaaatgaaagtctacttttccctcacacaaagctaatacagctcagacatgggagttcgaatatccttagaaattccctctcacggccggcgcggtggctcacgcctgtaatcccagca

SEQ ID NO: 271559 - DNA, 122 bp, Homo sapiens
ggaactagggaaagcaggggctagatctgttagcaacgtaaacaaactcagccgcctaaccggaactgcgtttccagcagcaagggggaacttccgagatcaaaggtgacagcttccggcaa

SEQ ID NO: 271560 - DNA, 122 bp, Homo sapiens
tggaaggaagggatttgccccgggagagcaaacttctgactccgcctgggtcgctgactccgcgcggccgggcgggagggaggtcgaggaggccgctcgcacaaagccgcggagccgctgcc

SEQ ID NO: 271561 - DNA, 122 bp, Homo sapiens
ggccgccggggctgccggggctgagatggagccgcagtcggctctgactgcctgcgttgccgccgccgccgccgtcgctagccctccgcctgctcggcgcgcacagtgcgccaccgcgccgc

SEQ ID NO: 271562 - DNA, 122 bp, Homo sapiens
acacgtgcccgtgggtattccaccgtggcctggtgggagccacatctgacacattctccccgaccctgatgctggcgttggacacatgtccatggatgttccaccgtggccgagtgggagcc

SEQ ID NO: 271563 - DNA, 122 bp, Homo sapiens
cagcgcctccaagcccaggagagaggccttgggagaaaccaagcccgcccacagcttggtcgtggacttgcagcctccagaactgtgaggaaatgaacttctgtgtcagccacccagtctgg

SEQ ID NO: 271564 - DNA, 122 bp, Homo sapiens
ggcgccgtctccccactctgcgcgccctcggctgcggggtagcgggcagccctgcgctgccggccgcctagcctgcaccccccgccctgggagggaagcctcgctccagccgcgtcgtttcc

SEQ ID NO: 271565 - DNA, 122 bp, Homo sapiens
cagcctggctgtcgctgggcgctgcccctgctgccccccgccaggcagaggtctgccctccgcaacggggcccagtggcctcctggccctgctgttcctgctgctgtgcctccatctctccc

SEQ ID NO: 271566 - DNA, 122 bp, Homo sapiens
caggagcactgactaaccccagtgagccagctggaaacctcaatgtgctaggagtcatttcgagtggattctaggactgcacctttagagattcagaaatttggaggtggaacatgaggagt

SEQ ID NO: 271567 - DNA, 122 bp, Homo sapiens
gagaccccatctctaaaaataaaagaaaaaggaaagaaaataaaacagaaaggaggaaaacggttatagaaaaaggagaggaacatcactaagcgaaaagctgaatggaggtgagtcactgg

SEQ ID NO: 271568 - DNA, 122 bp, Homo sapiens
aacctggccctgctgtgccagaaccagggcaagtttgaggacgtggagcggcactatgcccgggccctgagcatctatgaggcactgggcgggccccatgaccccaacgtggccaagaccaa

SEQ ID NO: 271569 - DNA, 122 bp, Homo sapiens
ttttttttctttttagatttggtcaatggaaaccactccaagttacctcctgtgtcttttcgatgtcctaaaagaggcttaactttgtaccttccatgttgaaatggagactgagctcagct

SEQ ID NO: 271570 - DNA, 122 bp, Homo sapiens
gcctgctttcacccggagcactggccacgggcctcgaaaagtcgattctgaaccgcggcacgtcacctcccgcacattcggaggagacagcgatcagattcacgtgaatatgacgaatattc

SEQ ID NO: 271571 - DNA, 122 bp, Homo sapiens
ccactcccacccaccccgcccccacccctatacacacaaagggcaaatgaaaaaatatgacgaaacacatgcgggtcaatgctatggggattcctggaggggaaagtttcttcccttatcag

SEQ ID NO: 271572 - DNA, 122 bp, Homo sapiens
aatctcggctcactgcagcctctgcctccagggttcaagcgactcccctgcctcaccctccggagtagctggaatcacaggtgggggccaccacacccagtggtttgtttgtttgtttgttt

SEQ ID NO: 271573 - DNA, 122 bp, Homo sapiens
tggtggaggaagagaagtcagagaggtcacacatgtggccttagaacctgctaagtccaacgtcagcatgtgacaggaggggaagtgaggcaagacggcagaacccaggggaaaaggtggca

SEQ ID NO: 271574 - DNA, 122 bp, Homo sapiens
cactgaaatctccaggagaccacactgggtggcagatgtgacagcaaccctctgacctcacggggcgctgccgtcccagcacaaccagaacaaggtgtgccgatgccgggagcagtgcaaac

SEQ ID NO: 271575 - DNA, 122 bp, Homo sapiens
aggtgccaggagtgggaaaatagactctagttcttgatggtaggaactgcaaagtcacatcgcataaagggactggaggaattgggcctatcacatttggggaagcaaggaggcttcctgga

SEQ ID NO: 271576 - DNA, 122 bp, Homo sapiens
taggagcccaaccgctggacagtcaatcacgcagggccattaatattcatctgttgacagcggcagccctcggctgatgttaaaatacgtcgttacggcacgatctgattgtgcagaacaaa

SEQ ID NO: 271577 - DNA, 122 bp, Homo sapiens
gaccgtcactcgtgtcagcttcaaagtcagatagatttttctcccagcatgttctacttccgaggctgtggccgttgggtcgcggtttccttcaccaagcagcaatttccgttggcacggtt

SEQ ID NO: 271578 - DNA, 122 bp, Homo sapiens
tccggataggccggctcggggtggccatctgtttccgggtcctggtaggaggggtgcttccgcccatggtcccgcccattcttccgcctccccaacctgggtcccgtcaacggacgcgaagg

SEQ ID NO: 271579 - DNA, 122 bp, Homo sapiens
agggtggggcttgggaaggaaaaaggcgcggctcggaggagaaaccggctgctcacaatccgcgaagccagaagttacccggctcgtggaaccacgtccacttcccccagccagttccctcc

SEQ ID NO: 271580 - DNA, 122 bp, Homo sapiens
ggctggctaatcatcggacagacggactgcacacatcttgtttccgcgtctccgcaaaaacgcgaggtccaggtcagtaagtgtaattcctaactctgatcacctcctgggaacaagaaaat

SEQ ID NO: 271581 - DNA, 122 bp, Homo sapiens
ctcatttcgttaccacaccaggcctgagccaccagctcatttcctcctcacaagcccatgcggtgggcgctcgttaccacactaggcctcaataaccagctcatttcattactacactaggc

SEQ ID NO: 271582 - DNA, 122 bp, Homo sapiens
cctgttcttagctctctggaaggtcagagtgttaccgcgggatgtcgtcatccacctccacggggcaccagccaaagatctcacacgtcttcacagtgtcgttgaaggccacacacttgccc

SEQ ID NO: 271583 - DNA, 122 bp, Homo sapiens
tttgcagggcaggtattttcagctctcttggatgtattctggggagcagttgccggatcacgtgataactgcgtttaactgtttgaggaactgactgtccgttttctgcagcggctgcacca

SEQ ID NO: 271584 - DNA, 122 bp, Homo sapiens
gcacatccgtcatctcattgaccatttctaggtgttgggaaccttctggctgtttgaaaccgtattgttgactcccatcatctcgcagtgctgcagaacactaaacttattccttctgtcta

SEQ ID NO: 271585 - DNA, 122 bp, Homo sapiens
tagtgggaggtgaggtctgctttgctgagcggggaggccccagtggggctccttctggaccgtccttggcaaggagggggctgctggggaggagtggcgaccacaggaagactgttagcttc

SEQ ID NO: 271586 - DNA, 122 bp, Homo sapiens
ttcccctaatatctctttaattcctacctaaaatagcctgaggaaatggatatctgatgccgagtcttcttgtatgaaaagaacaatgcttaagacatgcaaatgtcaggagaggctaaggc

SEQ ID NO: 271587 - DNA, 122 bp, Homo sapiens
taagatgagacaggctagagatttccctgggaaggtattcgggggggtctaaggcattcacggcgcacctgaggcggtccacccagaggccccacaaggcaccgccctattcaacttaagtg

SEQ ID NO: 271588 - DNA, 122 bp, Homo sapiens
cctcctccatgcccgaggctgaggccagcctggcgggtgtcagcaacgcgtgtcagcagccgcggcggagggataaacactgggcctagaaagggagcctgggaaaggccagagatggcggc

SEQ ID NO: 271589 - DNA, 122 bp, Homo sapiens
ttccgccgcgtttgtgggctggtagcccggaatacatttcccagaggccttcgcggccgacgtgcttcgcgcaggaacgcagccgcctcccgactggaggacgcggtagcggagctgctcaa

SEQ ID NO: 271590 - DNA, 122 bp, Homo sapiens
ggaccaggccgggttttaggcgggcgcagatttccgggctaactttcctcgccgtctcagcgcgggaagggggaaatgggaaacccgggccagagcagcggagcttcccagccgcacacttc

SEQ ID NO: 271591 - DNA, 122 bp, Homo sapiens
gaatgtaattgatgatgatgtgttgccacagcatatctttaacaaggactcttctgagcacggtccaagtgttaactcattgaatgcttatttattacctcctgggaggtaggtaccattgt

SEQ ID NO: 271592 - DNA, 122 bp, Homo sapiens
gcagtagaaatggaatattctaagtgcagaagtttggttttagaatctgttaaggaaggacggcccaatctttgaaaaggtacagctttctcaactttgaacatctgggggaactcttcttg

SEQ ID NO: 271593 - DNA, 122 bp, Homo sapiens
ggcgactcactccggctggcagtgatggccgacgtcgtgggagtggttgtgtctgctttccgcttcacgccctttttctgcgacagtgaaataaccagtgaaccccggaaaccaggggcccc

SEQ ID NO: 271594 - DNA, 122 bp, Homo sapiens
cccctgtatctttccgctggcattctctgtatattttcttgaagtctctattctgcagtacgtcttagttaaaggaagattatctccaggtatggcgatggggctgctgtaggccattagaa

SEQ ID NO: 271595 - DNA, 122 bp, Homo sapiens
accacggaactccagcacccacctcctcgccccccgcggcgcgccggtccccgcaccccacggccctccctgagcctctcgccctctacctgctgctgcggctgcggctgcggctggttccc

SEQ ID NO: 271596 - DNA, 122 bp, Homo sapiens
caactgctttggtaactcagtgactctctgtgaaactgcagagtcagaggacttcccttccgtagttttcattctaagcggtcatctgtgagtcagaagatttcgccgtggcctgatttccc

SEQ ID NO: 271597 - DNA, 122 bp, Homo sapiens
cgggaggaagagctgggcccggagaggacgccgggacgctgcaggtgggtccggagaggccgacttgaggaggttctgggcctggcgaggccgccggaagggaaaaactgggcctggaaagg

SEQ ID NO: 271598 - DNA, 122 bp, Homo sapiens
atggctatgtgattgcaagatgacagctcccctgtgaggaccagagaggggatatgtgtgcgcccagttgcctcggagtcagcgtatgtccaaaatgtgagagtgtggggaacagagatcct

SEQ ID NO: 271599 - DNA, 122 bp, Homo sapiens
gccatttaaagaagtgcaactggcagggggcggggcagcgactccggggtggagggcggccggtccaacagaaccgcttccttccactcagctacagtcctcgctccaagatcgtcaccatt

SEQ ID NO: 271600 - DNA, 122 bp, Homo sapiens
tgcaccaggattacaatcacttccttataagtctgctgtcacactcaggccagtggatggcgtaaccacccatcaatataattttgttttcttttcttacgtgttgctcatttgggggcaca

SEQ ID NO: 271601 - DNA, 122 bp, Homo sapiens
gtacctgctgaggcctctgtcttcccctcttcaagatgggcataaaaatgccagcctcctcgcaggcatcctgtgaggcttccccccagattcttccccaggcctcccttcccagacctagc

SEQ ID NO: 271602 - DNA, 122 bp, Homo sapiens
tcgctttggtcgggaatgcgggtcgactggagaggcccgagcaagccccccagctccacccgcccctaaagggtgggcttgggcagtcacatcaggagcctcaacattcacatccggaaaat

SEQ ID NO: 271603 - DNA, 122 bp, Homo sapiens
ctgcaaaggatgttgatggattcctgaaataaaataattctgtccttcctgttccattttcgttaagtatagcctggttttaataattaacaaaatagaggtggaaggtggggacaaaaaat

SEQ ID NO: 271604 - DNA, 122 bp, Homo sapiens
cttctctgccatctttctccccgtgcctattgatcccacataggctcattctgggtacaccggctaaaggctttggtgcattgcagcgttttctcccagcagctgtgtgaaagatgcatttt

SEQ ID NO: 271605 - DNA, 122 bp, Homo sapiens
acagaaaattgcttgcccttcactgttaaggactagacttaatgatttcctgaattttaacgtattgagaaacgcattaataagcaagattcacagtatttgttgtggaggttgcacagaaa

SEQ ID NO: 271606 - DNA, 122 bp, Homo sapiens
tcctgcctcaggatgcgcgcccacgtgcttgccccggacctgtgcacccctagctctccccggacgtgcgcccacgtgctctttgcggagctctctggctccacccaacgctgggtgggaga

SEQ ID NO: 271607 - DNA, 122 bp, Homo sapiens
acggcttgttgaagtagcgacgcaccatgtacttgtggatggaggtgacgtctgagcccacgcacactcggtagctcagctctggcgctgcggcgcggccggcgggtggcttgtagggcgtg

SEQ ID NO: 271608 - DNA, 122 bp, Homo sapiens
gagttggtttttttccgatatacgcagtcttcagcagccagtacccaggagtgacagaggcggccggtgggagactctactcagcaaaggcacattggcaagctccaggagaggaaaacaag

SEQ ID NO: 271609 - DNA, 122 bp, Homo sapiens
cagctgctgtttacaaaattgttaacatattttctttgtttttgtttaaatttgttactccgtggatctctgattggcttatgttgaaatacttgtgacacattatgagcaatagtttagaa

SEQ ID NO: 271610 - DNA, 122 bp, Homo sapiens
gcaagcaagccccggttgggaactccaaaatgggagtagagtggtccttgatggaaggagcgtttaagagtgtcgcctagccatcacctgcagttcgcaatctgtgggtacactaacccgcg

SEQ ID NO: 271611 - DNA, 122 bp, Homo sapiens
ctgtgaatgaaggggacagggagccattgcacccatcagcagtgtcacttctggggctgccgggtgacaattgccatctctgcttcctccccggtggagcgtgtggctccagggcagcgagg

SEQ ID NO: 271612 - DNA, 122 bp, Homo sapiens
tgcagacaattctaactcgagcaactggtgactggggaaggagaacctggtcgaagacaacgtgaaggaacaaaattagtcaagaagtatttcatcaaactaaccaattgtaccaagtttgc

SEQ ID NO: 271613 - DNA, 122 bp, Homo sapiens
ataaataacccagtctcagacatgtccttttagtatcgtgagaatggagtaatatattagcggtccctaagaaaacattttcaccaggcttcagtataattacttaagattgaatatctttt

SEQ ID NO: 271614 - DNA, 122 bp, Homo sapiens
cccaactgtctccgccagaaatatgtgaaacaagaggtgaaccagctgtatgacagatgacggaactctggaaagcaaaagtttgtcaccagagaactctaagaacagcttcataaaccact

SEQ ID NO: 271615 - DNA, 122 bp, Homo sapiens
ggcactaccttcttgcctatgccaacataaagtggtctacaaaggagccccacagactcacgttgcattctcagttctcaaaattccaagtagaatgcaggttacctggcaaccacacacgc

SEQ ID NO: 271616 - DNA, 122 bp, Homo sapiens
ggttttaatccccagtctcccccttaggagtaacagctggcatttccagaaccctgcccccgtgccaagcgctagtctagacgctctgtgtgtgccgtgttgggcaccttcacagcaatccc

SEQ ID NO: 271617 - DNA, 122 bp, Homo sapiens
gcgttctggttccaggctgtccccccactgcctgcccctgccccgaatcgcaggttttgccgcaatggcaagtcccaacttggccaacagggggcgcccgcccgaaccgccaggaccgagac

SEQ ID NO: 271618 - DNA, 122 bp, Homo sapiens
cctgcagcgggccaagcaggacatgatggggcagctgcgtgagtaccaggagctgatgaacgtcgggcttaccctggacatcgagattgccacctacaggaagctgctggagggcgaggaga

SEQ ID NO: 271619 - DNA, 122 bp, Homo sapiens
tccggctcagaggagcgccccagacccggttctgtgaatggcatgcaggtagcagctgcccggtggtcccaccggtgtggccagaggacctggcagtgggcagggatgtggtgtggaggggc

SEQ ID NO: 271620 - DNA, 122 bp, Homo sapiens
gactaccgctttaataataataccagaaaagcgcagcagggagggggtggggggcggcaacggcgacgactaacctcgctgtttacgtgaccgactcactgtgactctctgggtaaaaaaag

SEQ ID NO: 271621 - DNA, 122 bp, Homo sapiens
gctgcaggatgaaaatctcagacctgggaggctgtgtgtgcctactgcaatcagccccaccgcagacccggagatcgaggcccggtctgcggagggtaaggcatttacgcaagatcgcacag

SEQ ID NO: 271622 - DNA, 122 bp, Homo sapiens
agatcaacattaccattatgcggctaccgaagtagagagtagatcaacattaccattatgcggctaccgaagtagaaagactggaaactgctgaattagctctgtccacccctactttacag

SEQ ID NO: 271623 - DNA, 122 bp, Homo sapiens
acacctggcccgcaggtagccggcaccaggagccttagagaagctgtagggcctgctggccgctcgtccgcctcgcgcccgggggctccgcgcctggagctgcgccggcggcagccatggac

SEQ ID NO: 271624 - DNA, 122 bp, Homo sapiens
ctttcgcattcgcatgggctccgaagctctgtccctgcgctgatgccctcctctgcaagccggacacagagggtcagggggatgagaaattgccctagctttggccctctgatttccctgca

SEQ ID NO: 271625 - DNA, 122 bp, Homo sapiens
acggcttcagtagtggggctgggggggtcccatgggctcagcagcaccagaaggcccccccgaggggctgttaggataggaccaccctgttacaacaggaccatcttgggaagccgaggcag

SEQ ID NO: 271626 - DNA, 122 bp, Homo sapiens
cgggacgaggaagggcggcggcgcgggcgggggttcttttcagaactacagcagggaaggcggcgggggtggccgcggggcgatccagggaaaatcggcgcctcacctgctcctcttgaggc

SEQ ID NO: 271627 - DNA, 122 bp, Homo sapiens
tctgcaggtaggaggcggctgtaaggtagttgacgatgtccctaacagcgaattccaaggcgcccgtgtagcaggagaggagcaagtcggccacgatgcgtgcactgtgcatcagggagacc

SEQ ID NO: 271628 - DNA, 122 bp, Homo sapiens
tttcatccccctgcttggatcccagtgctgttacctcttgaaaggaactgtacctttagccgaagaaacaaaggcctggggaggatagaagtcctcggaggaaagggccaagggatctggga

SEQ ID NO: 271629 - DNA, 122 bp, Homo sapiens
gtactgccgccatctcggctcactgcaacctccctgcctgattctcctgcctcagcctgccgagtgcctgggattgcccacaggcgccgccatgcctgactggtttttgtattttttggtgg

SEQ ID NO: 271630 - DNA, 122 bp, Homo sapiens
aacatagcctccctaacacacacccagaaaagtacagcaaagcacagggacgcagaggggcgcgctactcccaccctggtgcgtcactggaacctcacacatccgcgcgcacgtggcgtatg

SEQ ID NO: 271631 - DNA, 122 bp, Homo sapiens
cccaatttctgaccactttattcaacatgaatgtgatatacagtccctgggcaattactacgcaccagacactgtgctaggtacatggttccaccttgccatcttcttaagcctggaatttc

SEQ ID NO: 271632 - DNA, 122 bp, Homo sapiens
ggagccaagctggttctgcagcctaattatggaaagctcggctgccttttccgtgtgtttcgtttcctccgccgcctacgacgtgcaggcagcactctcaacatagccccttctttcaccag

SEQ ID NO: 271633 - DNA, 122 bp, Homo sapiens
gaggtcaacttccctcacccttttctctctcctgcttgccctccctccgcccggcccaggcgcttccagccccagactgtggccactggctgaggagtgcgagtcggctgcgctgccctgag

SEQ ID NO: 271634 - DNA, 122 bp, Homo sapiens
gaaggctcccagatgagggcacgtggcactcagggtttgcccacttaccatttgagccatcgacaggcacgaggatgggaagttgggcctcggtgaaacgccctggctggaaatgcctggtc

SEQ ID NO: 271635 - DNA, 122 bp, Homo sapiens
ccgggttcagcaccctacactcaataagcgtgggctttctagcaggactggacactcaggcggtgtgtcaatctttagacaatctttatagagtgcatagatgtttaatttcataaaattta

SEQ ID NO: 271636 - DNA, 122 bp, Homo sapiens
tgatgccgccggcccagcaaccacacttggagaaccgtgaagttagaagcacggttttgccgtcctggctgcacgctagactcgcctggaggaaattctaaaagacacagaccacactccag

SEQ ID NO: 271637 - DNA, 122 bp, Homo sapiens
gccctgcatgtggcgctcctcctcaggtgcctttggttggaacttttctgtctgcccaagcggcgtgctttggggcagtgtgttttgaaatccttcactggtaccaccatcttatggggcga

SEQ ID NO: 271638 - DNA, 122 bp, Homo sapiens
tttaatgtttgcggattattttgaagaaaataaacgagtgctgtggagagattcataggacgaaatttcagagagggttgttaggaatggtctttgtggaagctaagatctgatggatgaga

SEQ ID NO: 271639 - DNA, 122 bp, Homo sapiens
cagggcctcgcgtggggtgaccagatctgttcctgtctccaagggaccgctggaagccaacggaaactccccctgggaaaagattatatcttaggcctcagactgtttccaaaatctttcac

SEQ ID NO: 271640 - DNA, 122 bp, Homo sapiens
ggaggcacttcccttccccggcgactcggagaactcttgggaccgctttcacccgaaggccggcccagacactcaacggcgacttccttaaaacactggagaggcagccgggtgcggtggct

SEQ ID NO: 271641 - DNA, 122 bp, Homo sapiens
ctgggggggtgcagagttggggtgagatccaagtcagaccccagaggcccttgcagcctccgccaacagccagatgtcccgggggtccatggggggaacacagcctgtgggaagactgcatc

SEQ ID NO: 271642 - DNA, 122 bp, Homo sapiens
agtaccaaaccactttcttgctcatttttaataattctggtatttctgaaccctagttatcgaaggcatccataaacccttaagaaattacctgagccaggaaaaaactttaattaaaaagt

SEQ ID NO: 271643 - DNA, 122 bp, Homo sapiens
acacgcccctccctgccgtcagcacccacccgcgcggcagcggcggcggcggctggcgggcggccgcccttttaaatccccgggctcatttgcatggccccgccccctgagtgacacggctg

SEQ ID NO: 271644 - DNA, 122 bp, Homo sapiens
ggactctgcgagctgggtcgcttagattcatgagtgcttgggaggttcctcgtcgggccccggaccagaaaatagttttgaaaactaagtgaaatcggccacagataggctttttggcggcc

SEQ ID NO: 271645 - DNA, 122 bp, Homo sapiens
agggaggctacttttgcgcctctgctagttgtttggcaccagccactttgaagccaatcacgcagggagcttgtctatttgctgcagcagcgtctaattagatccaatcacaactgctttct

SEQ ID NO: 271646 - DNA, 122 bp, Homo sapiens
gatcttggacttccagtttctagaacagtgtgaaaataaatttacgttgtttaagccacccgactatggcattttgttatggcagccttagtaggctaatataccaatcatgccacaagtga

SEQ ID NO: 271647 - DNA, 122 bp, Homo sapiens
ggcccaagatgagggaaggaaaaagaatttgggacacttctcgcaggcaaactgggaaagcggtctgtttaaagggccaggttccaggcccgagagcacccgaattgctagcgggaaagggc

SEQ ID NO: 271648 - DNA, 122 bp, Homo sapiens
atttatccagtcccaggcactattccaagcagtttccaactgtttcctcatgcatcttcccggcgagcccgtggcatcctaggcactattatttgcccagggaaaggccaataaaaatcact

SEQ ID NO: 271649 - DNA, 122 bp, Homo sapiens
gtctttcaaatgcatgaatgggatcactgctccgcataaaacccttcaaggggccaggcgcggtggctcacgcctgtaatcccaggacttggggaggccgaagcaggcggatcatttgaggt

SEQ ID NO: 271650 - DNA, 122 bp, Homo sapiens
cgctggggaacacgaagccccccagggctcctgacgcctgccttgcccaccccctgggttcgaagcaccttggccttcccagcacccccacgtgcacccctcagggccttggcacaggtggt

SEQ ID NO: 271651 - DNA, 122 bp, Homo sapiens
agtcgtgccacaggcgcgcagggccctggaggcggctcctgccccccagtaacgcctcggcgcccttcgggctcagccccgagtgggcctagccgttaaaaaaaataaataaataaaaataa

SEQ ID NO: 271652 - DNA, 122 bp, Homo sapiens
gtccccaggagcggcagtggggcagtggactctcagggtcgcaggactgacgatgccttccgccccagggcttcatccaggccaagggctacccgacctacaccaacgtggaggtggtgaac

SEQ ID NO: 271653 - DNA, 122 bp, Homo sapiens
cgctcggacgccataccagggcccccttagtcgccccccagcgtcgtgcgcgcccgggggcggggccaggctcagcccccgacccctgcgcccccaggtcaaccccaaaggagagcggtctg

SEQ ID NO: 271654 - DNA, 122 bp, Homo sapiens
gcggctggcggaaggacggccacggtggcgcctgcgcgtccggctcgccgagttgccgcccgccatttttggagcttcttggagatctaggcaggaacccgccccgggttccttcaccgagg

SEQ ID NO: 271655 - DNA, 122 bp, Homo sapiens
ggctcagaaaaaaaagattatttttatttaggcattttcaatattaatacagacctcatgcgtgaatttacatttcaatatgtagttcctctataatttagctgtttgttggtctgcgcaaa

SEQ ID NO: 271656 - DNA, 122 bp, Homo sapiens
ggggttggaggtaacctgaggacgctcagcgctggagctccgagcaggagttaaagtacccgcagtggagctggcccgctgcctttccagactgcaaggcccgcagtgcaccgcgcgggtga

SEQ ID NO: 271657 - DNA, 122 bp, Homo sapiens
tgtggtttgtcctagggacatggaacttgcagcctattaacataaacatttgcacctttacgatatattagtattttcccataatgagcagctatttggagtgtaacaaaaaataaagggaa

SEQ ID NO: 271658 - DNA, 122 bp, Homo sapiens
ttcttcaaggctctgttcttcaagggacctttaagaggtgattagaccctctggatctgtcggttctggcacttgctctgtaattcaaccacctctccagcatccttcaaatacgcctcttt

SEQ ID NO: 271659 - DNA, 122 bp, Homo sapiens
ctagtgctcccatctcctcataacattatgcgctcaggttcaggccgcacgtgggaacaccggcgcaggacaactccgggacacccggagcatgcgcacaagtgaggggaagccccgccgcg

SEQ ID NO: 271660 - DNA, 122 bp, Homo sapiens
cgttcctccaggctcatccaatgaacttatccgatgcttttgcatccaccaatggggtttcgagtgctgtgtggccaggctggcccggccttgcgtcgtaagagaatgccaagcccggggag

SEQ ID NO: 271661 - DNA, 122 bp, Homo sapiens
cacgaaatatttactgagtcactacacacgttttgtgaataaaatagagtagaattgaagcgacagtaggtgaagtaagggtattatttcctgaagctcttgtttcaggtgtgtgagtgtgt

SEQ ID NO: 271662 - DNA, 122 bp, Homo sapiens
acccggcgtccagtgcttctttatggtaagccatgccatctccttcctcctccatggggccgcccctgtgattaatcggggttgggaaatgtacctgggggagggggaagccctggggctgt

SEQ ID NO: 271663 - DNA, 122 bp, Homo sapiens
ggagaactttggactatcatggaacatagaacttggatttgttccaatttaatcagacctcggaagggcagaggagccacccacagatggctttgggttatgtttgggttttacttgccagc

SEQ ID NO: 271664 - DNA, 122 bp, Homo sapiens
tcgactgcagggccatggccttgctctggctggtcagctgggacttgcttttactgctctcgcatgactgcaggctggccaggatctggctctggatggcttggacccaggcatcccgctcc

SEQ ID NO: 271665 - DNA, 122 bp, Homo sapiens
ctgcatattttggtgacctaattcgaagaccagcctctgaaacctaactatgcagcagtgcgaggacaaaagatcatggagtggtcaaaatattcagatgagacatttggcatgtcttcctt

SEQ ID NO: 271666 - DNA, 122 bp, Homo sapiens
tgatataataattaacggggtaaagtacatttgaaagtctaaattaatttttataagctacgaagaaggatcagacatacatttggtattcttttatccgcaaagtttattttgtttgtatt

SEQ ID NO: 271667 - DNA, 122 bp, Homo sapiens
cggctcgggtgggaacccgcagacgtggggcgagcagggccgctggctgtggcgggcgagcgccggggcgccacgtccgaggccgcggggtcggggctgcaggcacagctcgagcgctttcc

SEQ ID NO: 271668 - DNA, 122 bp, Homo sapiens
ctcgtagccgtcttctaccacctgggcgaggatgggagcagtcagtcccgagcgcaggcacggccctccccttcccctgccgcaggccggagccaccagcccacctggtgtgctcggcagat

SEQ ID NO: 271669 - DNA, 122 bp, Homo sapiens
actaaaggcagtagaggtactttctacaaatttagccgtgcaatctaatagcgagcaggccgagacgcccgcgattgaaggccggggtggagaaagtaataagggccctggaaattaccccc

SEQ ID NO: 271670 - DNA, 122 bp, Homo sapiens
tgctgagccttccccaagaccaggcatcttgtcagagacttctgggttgtcaggcagaaccgagcattcaagggtaataactcactggagtccctgaaatccttgatggacgcaccagttga

SEQ ID NO: 271671 - DNA, 122 bp, Homo sapiens
gaggggcggtgggtggggcggggctggcgggaaatttcggttttggcgcgctccctgcggcgacgctcatcgtgcgctctcctcttcccccggtggtctcctcgctcgccttctggctctgc

SEQ ID NO: 271672 - DNA, 122 bp, Homo sapiens
ctaaggagaaccggggaaggcagaattaaatagaaaggagaagatgcgggaagatttaagcgagacagaggaatttgaaagaaaaagagctaaagggataaagtaagatcctgtcagactct

SEQ ID NO: 271673 - DNA, 122 bp, Homo sapiens
tgtctccattttaccaaggaggaaactgagatgagccattccctaagttgcttgtgatcacgtgagggtagccactgagccgcctgctaatccagggctttgcggactgccctctgtctcta

SEQ ID NO: 271674 - DNA, 122 bp, Homo sapiens
gacgcgaagctctggatttaatcaaagttggagtttggttaggaaaatacagtgagggggcgggacaccgaaagtgaaggatgtatgcaagggagcgattagaaacacgtgcgtcagaacac

SEQ ID NO: 271675 - DNA, 122 bp, Homo sapiens
ttatttgcataaggagtggaagaactgaaaccgaagccccagttccttgactgtaaatcccgcacttgcttccaactgtctttcatccagattatgggattcagctgcctctgaaaacctgt

SEQ ID NO: 271676 - DNA, 122 bp, Homo sapiens
tgaggtatctgtagaataaccacagcctcagatactggggactttacagtcccacagaaccgtcctcccaggaagctgaatccagcaagaacaatggaggccagcgggaagctcatttgcag

SEQ ID NO: 271677 - DNA, 122 bp, Homo sapiens
gacctcaggcaactgcctgccttggcctcccaaagtgcagggattataggcgtgagccaccgtgcccagctggaacatcttgaagtttggtttagtggttctgattattgtgtcctcgcagc

SEQ ID NO: 271678 - DNA, 122 bp, Homo sapiens
cagcgctgtcccgtggaactttccgcagtgatggaaacctataatccatgctgtctgttacggtagcctctaggcacctgtggccatgcagcacttgtaatgtggctagttgagctaaggaa

SEQ ID NO: 271679 - DNA, 122 bp, Homo sapiens
ctcttcctgtcccctctttgctgatctggactcagcctggtattcttgtcacaaggtcatcgcctaggtgagctcagctcagcgtgaaacaaaacagctcatctgaaggcaccacacagtcc

SEQ ID NO: 271680 - DNA, 122 bp, Homo sapiens
cagaagggcagggcggggtgggaatctgttgtacccagggaaaggaattgcccccaggcccggagagtttgaagcctggggtactgtcaccaacagcccaggaccctcgcagctgggcctgc

SEQ ID NO: 271681 - DNA, 122 bp, Homo sapiens
tgaacccttggcaaaacctgtccatgtctgtccccggcagcttttctggagtcgagggtgcgattaagcatcaatctgagggtcgtggattcggagctgaatttctagtctcaatatttttg

SEQ ID NO: 271682 - DNA, 122 bp, Homo sapiens
gccccgcgccgcgccgcaccgcgccgcccccgccgggccatgcgagcgcgggccccgccgcgatgagctcgcacatcgccaaaagcgagtccaagacgtcgctgctgaaggcggcggcggcg

SEQ ID NO: 271683 - DNA, 122 bp, Homo sapiens
taaatacaacccgtgcaaaaagcagagtcggcagacctggagtgcattcgcagtatctcccgggggtgggggaaagaaatcacctcttcagaatgtccagaggggagttgccttgcttacct

SEQ ID NO: 271684 - DNA, 122 bp, Homo sapiens
tctcataggccaccttgccgggcttcacctcccccaggtaggggaactgtccattctcggcgccccccttcagttcaaagcccagctggccctccgggttcctgccaatgacactctcatgg

SEQ ID NO: 271685 - DNA, 122 bp, Homo sapiens
cttcttcagggggttctgtgtcaattcccgtggggacgccatcccggggccgggatgagtcggactgcgccgcttccaacccagcagccgggccacctcgggccacccgaggtcccgcccct

SEQ ID NO: 271686 - DNA, 122 bp, Homo sapiens
tatttggacatgtgcacagcatgctcccacatgtacaaagcactcacacaaatatcctcacgcatgcgcatatggccttgggtgtctggagggacacgtggcacattgcaggctgtggctcc

SEQ ID NO: 271687 - DNA, 122 bp, Homo sapiens
tacagggtaactgtgctgaatgctttagatgaggaaatgatccccaagtggtgaatgacacgcctaaggtcacagctagtttgagccagttagactagtccccggtctcccgattcccaact

SEQ ID NO: 271688 - DNA, 122 bp, Homo sapiens
cacagcgcagcagctggctgaagggctcctccagcgtggccagagcggacgccgaggaggcgccgagagcaagcgagggctgccagcacgttgtcacctctcacctccacgcccagctaatt

SEQ ID NO: 271689 - DNA, 122 bp, Homo sapiens
agatggccacatagtgattaacaggcaggtagtgtattcatcatggatctattggacaaacggatgattcacgtcttgggcagaacagcgtgggacagtgtaagattttatcacactactca

SEQ ID NO: 271690 - DNA, 122 bp, Homo sapiens
cagtgtccctggtctcaagaaacgcacgctggtctcttcaggaccaaggacagagcacaacgtgcgtggttgctatcacaatacttccaaagaaaggcaggatccccgccaggcgccgtggc

SEQ ID NO: 271691 - DNA, 122 bp, Homo sapiens
acataaggaaaagtcctaaaactatgggattgttagaatcacaaggcccttttgttctggcgatgtttgaattagcttcttcaggggccattgaactagtcggtaattgtgaaagccacttt

SEQ ID NO: 271692 - DNA, 122 bp, Homo sapiens
tccattcctcgtcttcgttcaggacatagacttttacactgtacctcaggcctgccatagcgtcctctggcctcgccccgtcaggtctgttctccacggcactgcttccggtacagcatgga

SEQ ID NO: 271693 - DNA, 122 bp, Homo sapiens
ggctgggtgatctgctgggagggacgttgacctgcttccaaaaagccggctggatggtgccgtggtggctgcctgcaaaggaacaccggcctatgggaaccagaccctggggcttcccgcga

SEQ ID NO: 271694 - DNA, 122 bp, Homo sapiens
attgccacgtatatggtgaggctgggtctgggtggcttggctcccggtgtttcttggacacgtgtgggcctgagcagagcgccacaggtcacatgtcgagcctggccttgtgtggaggtgtc

SEQ ID NO: 271695 - DNA, 122 bp, Homo sapiens
acccccggagagagcagagggaggggaggaggcagaggggtgaggctggggagggcccagcgaatccactttgcctctggagacacagaaaatccttccaaggtggggcaagtgagcaaccc

SEQ ID NO: 271696 - DNA, 122 bp, Homo sapiens
gcggctcccggccgcacctgctgcagacggcccgcgaggccccttcccgcgctacggtgacgattctggctgctggggaaaagagcaataagcagaaagccctcgtgcagaggggatccggg

SEQ ID NO: 271697 - DNA, 122 bp, Homo sapiens
ggtgatgaccacagccttgatccggcaggagctcagagatgcccgggaagatggggtgcccgaacagaagcagaaaaacacttgtggccgctgggaagttgggagagccaggctggggctcc

SEQ ID NO: 271698 - DNA, 122 bp, Homo sapiens
caggtggcctgagtcttcgccctctaccttttccaccatgccacactgccttccacccaacgcgtgaaaactttggcctgaaaatcgggtgatgtgactgtaagaaatgcacccattattcc

SEQ ID NO: 271699 - DNA, 122 bp, Homo sapiens
accagaaggagaacacgcagtggttgagaaacttagcagttacagcacctattctggaggcgagtaatccagttggagagggacagggcgttaaaagcaggaaagcccccgaaagctcatct

SEQ ID NO: 271700 - DNA, 122 bp, Homo sapiens
agaggggctatgcatttctctggctgtgctacttctggaaagttcctgagctacatgagccgttgctatctgcttacttaattgctatgactcccattgtaatgatggttaatttattccca

SEQ ID NO: 271701 - DNA, 122 bp, Homo sapiens
ggagctgaatgaccaaaccacaggacacccttggcccttctgcactaagactagcgttggcgaactacagcttatgggcctgatccagcccgctgcctgctttctgtacagcccacaagcta

SEQ ID NO: 271702 - DNA, 122 bp, Homo sapiens
accataagagctgacgcccgcagacgtcactcacacccacactctcaccaaaagagctgacgcccgcagacgtcactcacacccacagtctcaccataagaggtgacacctgcagacgtcac

SEQ ID NO: 271703 - DNA, 122 bp, Homo sapiens
atatgatacatgcttatgagacagatgcaaacgtggggttgcagaaatgcgagtcgggagcgtttgcctgatagggatttgtttcatacagagcttacagcggtactttccctcccctcaca

SEQ ID NO: 271704 - DNA, 122 bp, Homo sapiens
ggaggtggcagtgggcgcagggcggggcgagctcagcggagggcgggtttgaatgtgccccggcgggagagggaagctgcagcgagagcgcgcggatctcagcgcgggagcagtgcttctgc

SEQ ID NO: 271705 - DNA, 122 bp, Homo sapiens
ctcatggatgccgccacgtaccgttcttcctgcggcttggctcgtcctcaggtctaagggcgacctcaaagacccctttacccgcacccccaaggccccgcgctgctgcctaagttagtgac

SEQ ID NO: 271706 - DNA, 122 bp, Homo sapiens
cttggatcctagaactctgcccagcttggacagtctctctacacccagagaccggttttccgcttcttgtctgcgtcccttgtagcagtcacccacagggcgcttgccagaggacggccccg

SEQ ID NO: 271707 - DNA, 122 bp, Homo sapiens
tgcagctagtgaggacgggcgaacgggagggccgggcagaggctctgtcacgcggtgaggcgaggagtgtctcggcacttcgtgtctcttgcctggcaacaccacagggaccggacattctg

SEQ ID NO: 271708 - DNA, 122 bp, Homo sapiens
agaattgaaagcaggggttcgaagagctatttgtacatccatgttcatagtaatgatattcgtaataccaaaagttagaagcaacccgaatgtctattgacaaatgaatggataaacaaatc

SEQ ID NO: 271709 - DNA, 122 bp, Homo sapiens
cgaatgacgccctgctgcggtggcccttcaaccagaaggtgaggccgtccctgcaggcttcgctagggccgcacctgggagtccctctgggcagtgcagcttctgtggtgcagggttgtgcg

SEQ ID NO: 271710 - DNA, 122 bp, Homo sapiens
gtggtcttgatgcagttgtaagcttggggtatgaaggtttgggccacgcctgggcgcttccggctgcgccggatgctgtttcctttccgctcccaggggcgttgggaacggttgtaggacgt

SEQ ID NO: 271711 - DNA, 122 bp, Homo sapiens
ccgggcgcccaggcgctgccgcccgcctcgccgccccacgccgaaggaccacgcgcccgccgccgccagcctctcagcgctcccatgatcgcccggtgccttttggctgtgcgaagcctccg

SEQ ID NO: 271712 - DNA, 122 bp, Homo sapiens
ccgggtcctcagtggcgcgagggttgccgggatagcactttctcctgttcctcattctcccggtcctttatccctccgccgggtaccctttcccctgcccccctcccaccgcctcggcaaca

SEQ ID NO: 271713 - DNA, 122 bp, Homo sapiens
gcaaggaaaccaaggctcggggaagttaagaaatgagtccaagcttacacagctggtgagcgaaggagctgggacttgaacccaggcagcctgctgctggaacctgcattattttttccctc

SEQ ID NO: 271714 - DNA, 122 bp, Homo sapiens
gtgcatcctaagatattttttccccattcaacttccattaaatgcatgattccaagagatcgtttcatataagaccaagaactgggtgctgaaagaacagaagtgaaacagattttcaaaaa

SEQ ID NO: 271715 - DNA, 122 bp, Homo sapiens
gtaccccgttttgtgtgcatgtggtggttgtccggggagcaggagagacaacaggcagtccggcttctgagtgtgtctgctctcccgggagcaggcggcatgcatgtcatgtttacctcctt

SEQ ID NO: 271716 - DNA, 122 bp, Homo sapiens
gcagcccgacgttagtccggaatgctctgggagcagcgctcgggggaggttaccttggcgcgcccccaaatcttttggttcccccgctcctgccttccactgctctggctgacctggctcag

SEQ ID NO: 271717 - DNA, 122 bp, Homo sapiens
tccccggcaatgctacagacagggccacagggtcttgggctggcagggccccaggctgaccggggcagtgccttggggtggccatacccagaggtgggggaggctcctccaggcccttcttg

SEQ ID NO: 271718 - DNA, 122 bp, Homo sapiens
gcgcctccggggaagcccgtttttaacctttcatccattgggactcaaaactgtgagacgcgttcgccaaactgtgaccccagaccttggccccgccacacagaaacccctgacccagactg

SEQ ID NO: 271719 - DNA, 122 bp, Homo sapiens
gaaatggggagtgtgtcgaagaagatggggaaagccaagaacaaaacctgtggaacaccccgaagggcacacagcaatgaggaagggcacggagcagacctctcacttttccattttatctc

SEQ ID NO: 271720 - DNA, 122 bp, Homo sapiens
tgtccgcgcgcgcatgcaaatcccagaggagcagcccgacagcaggggcggggcaggccacgggagggcggcccagttccccagctctcccgggacgaagcgggcccgccagcgagtcgcag

SEQ ID NO: 271721 - DNA, 122 bp, Homo sapiens
gccaggctggaaccggaggcccttgagaactcgcgttggagagggacctggaccctcccccgttacccatctgtgaagggttggactggggaaaggctacagttctgaatctattagtttaa

SEQ ID NO: 271722 - DNA, 122 bp, Homo sapiens
aggacccaacacagcgtcggcagcatcgtgttatggccaagcagatgaaggccaggcttacgagggcagcgcagtcatcagagacgtcatttcattagccaattagcacagaaaattcagag

SEQ ID NO: 271723 - DNA, 122 bp, Homo sapiens
gggagaaggcggctcgtaggctgctgtgctgggcagagggtggatggcggggttgaccaacgatgaggccccaggaagagaggcatgggtggcgctgccggccgcttccccatcttacctct

SEQ ID NO: 271724 - DNA, 122 bp, Homo sapiens
tcagtacctgagtgggtctgaggctggctgcctccagctgttcctgcagactctggggcccggcgccccccgggcccccgtcctgctgcggaggcgccgaggggagctggggaccgcctggg

SEQ ID NO: 271725 - DNA, 122 bp, Homo sapiens
ccaatgatcctgcagtcaccaagttgtcgttagcaggggttcacggcagtcgttttcttccgtttgcttgtgtctttggaataaaacgtccaaaaatgggatgtatggaatcttgctatagg

SEQ ID NO: 271726 - DNA, 122 bp, Homo sapiens
tgtacttgatggagttctgaacgctctcggtccaagctgccagccacgtgacggtgttatcggagcgcacctccttccactggtgccccgccggcggctcggggatcttcgagtccctgcag

SEQ ID NO: 271727 - DNA, 122 bp, Homo sapiens
gtatcctggtgcgaagcactgggcatcgggctgggctgcatatggcggagggctgggctgcgtatggtagagcgttggactccaaggcttgagtttaagaggtagacaccgtctgggcgtgg

SEQ ID NO: 271728 - DNA, 122 bp, Homo sapiens
ttcgggcatgtaatatttacaataacaaaacaagacaccgctggcaaatcagccatctggcggggatcctctacatctctgggagttggagaaatgggagcagagcacacaggaatccagtt

SEQ ID NO: 271729 - DNA, 122 bp, Homo sapiens
acagctcagctctgtcggtggggctgccaggactcctggggctggggtgctgccgggggtcgggagggtgctggttcatcttggagccgaggcctgctccccaacctcactgaggctcccct

SEQ ID NO: 271730 - DNA, 122 bp, Homo sapiens
cattagaaatagaatcttagctttgcaaatagactttgagctttagaacctgaatcttagcgatagaaatgggatcttcgcgttggaatgaggacgtcggccacggagcttggagttagaac

SEQ ID NO: 271731 - DNA, 122 bp, Homo sapiens
ttcaacccggggccggccacggagcctcccgccgcccctaccctgcgcccccgggacccccggaccccagcgcccgcgtcacttactcctctgccgtcgccacctgtctgggtgccggtctc

SEQ ID NO: 271732 - DNA, 122 bp, Homo sapiens
ggttccgcctcccgcgggttcgccgagggagtcattttggccctctcggctcaccgtccgcgcagcctcctgaagcagccgtaaactccgccccttgcgcgcaggacggcgcgaaaacccaa

SEQ ID NO: 271733 - DNA, 122 bp, Homo sapiens
gagacattacggaaaccctctaagagtcaactggcgaagcccaagcatggcccagcgtggcggtcatctccctccgtgggtcaggcgtgctccgtggaggattgcccacggccagacgccct

SEQ ID NO: 271734 - DNA, 122 bp, Homo sapiens
aagggggtgaaagccgagggcgcggccggggtggaaggtgaggcagtgacctgtgcggagcgcgccctgcaaacttccctgctgcgggtgaaagaagctgcctgggaaagtcctccccacca

SEQ ID NO: 271735 - DNA, 122 bp, Homo sapiens
gcgcggctccccggcgccgcctcacttccccagacgagacccggactcctcggcggccgacggcccccgccccgcgcctcccacgccctccgcccggccgccacctgcccgcccggcccgcg

SEQ ID NO: 271736 - DNA, 122 bp, Homo sapiens
tcggcgtcgccaaggcaaccggcgccagccatggcctctggggcgggcggaagctggggtcgctccccaccgcagagcgcagtcccgacggtgagggctgagcccgggagcagatcctgcct

SEQ ID NO: 271737 - DNA, 122 bp, Homo sapiens
gtacgcccagagccagaccgtgtttcaaaatccagacgcacaccccgccaacagcagcagcgccccgatgcccgtcctgctgatggggcaggcggtgctccaccccagcttccctgcctccc

SEQ ID NO: 271738 - DNA, 122 bp, Homo sapiens
gtctggcgatccggagagccagtgagtgccccgccggcccagcccttaactcccactgggcgcttaacattttccaggagcccgggggtcctgttgctcctggaggcagaagactgcttttt

SEQ ID NO: 271739 - DNA, 122 bp, Homo sapiens
gggcaggcaggaagcccaggatctcagaaacctacaggaagcacagaatggacgccatgacgtcaggaagccctcagccctgctctccatctttagggtggcctctctggtttcccagcatc

SEQ ID NO: 271740 - DNA, 122 bp, Homo sapiens
ggtgctgccccccaggaggcggcccgtcccgcagccccacagcggcccctccctcccctccgggcccagggcaaccgccctgcatctgcgtcctgcctgctctccccactggagggtcggcc

SEQ ID NO: 271741 - DNA, 122 bp, Homo sapiens
ttctgccccattcctggacgtcacagccggtccccagagcaggattccttccggcgcctgcgcctgatcaccgctctgcgcttgagctgataaactcagctgatgggataagagtcttgttt

SEQ ID NO: 271742 - DNA, 122 bp, Homo sapiens
gtgaacattgagtagctgagtagctacttttttttctgcctcagcttgtggctgggaccccgggcgcacgccaccacgcctggctaatttatgtatttttctctagagatggggtttcgcca

SEQ ID NO: 271743 - DNA, 122 bp, Homo sapiens
aagtgactacaactggggctgctgtgctgtgagatctcagaagccccagacagctttgtccggacacagctgcagcaggtaagtgtcaggcgaggatcggcggcacgttccaaagcgggtgg

SEQ ID NO: 271744 - DNA, 122 bp, Homo sapiens
cacacagccaggcaccctttatttacatatatctgcatatttgctcaggcccccgcatttcgccattaaagtgcattcatgtgcacagcagaataaactaggcagagaaaagctcttcatta

SEQ ID NO: 271745 - DNA, 122 bp, Homo sapiens
gaggaggtgttgcggcatccccagtgttctgtttctctaagcatgttcatatgtgtaaaccgctgagattttttcttggggggaagacatttttatctatatggcttatatttctcccaaaa

SEQ ID NO: 271746 - DNA, 122 bp, Homo sapiens
atcgctgtacatatttttgtccccgccacctccctctgtctctggagtgccctacagccccgcaaactcctcctggagctgcgccctagtgcccctgctgggcagtggcgttcccccccatc

SEQ ID NO: 271747 - DNA, 122 bp, Homo sapiens
cagactgctgtgctagcaatcagcgagactccgtgggcgtaggaccctctgagccaggtgcgagatataatctggtggtgcaccattttttaagcccgtcggaaaagcgcagtattcaggtg

SEQ ID NO: 271748 - DNA, 122 bp, Homo sapiens
tctgcgcggtgtctagcctgttggttctcacgctgctgctgtacactgtgctgcggtgctcggcgatgcccaccgagggcgagtgcgcgcctggcaagccgacgctggtgtgttctagcgcg

SEQ ID NO: 271749 - DNA, 122 bp, Homo sapiens
catgtacacacatgcacacatgtatgtgctcacgtgtatatgcgtacatgtgcactcttacgtgcagccagtcaccatcagccttgcaggcacgcgcgcacacacacacacacatacttgcg

SEQ ID NO: 271750 - DNA, 122 bp, Homo sapiens
atcactgaggagggggctctccttcttgatgtaggggatcacccactgcagggcgggccccgtgaggcgggtgatgaggaacgtcaccttcagggcgtcgttggagaacgtgttctcgtcca

SEQ ID NO: 271751 - DNA, 122 bp, Homo sapiens
ggtctcccgtgactgctgcctcatcgataccccatttagctccagaaagcaaagaaaactcgagtaacacttgtttgaaagagatcattaaatgtattttgcaaagcctaaagttatatatt

SEQ ID NO: 271752 - DNA, 122 bp, Homo sapiens
cagattgccattatcaatattttgatgtcctcaaaacagtttcagtggtaaccacatgatcgtacaagaatacgcctccttcattctgttgccagagaagtacaggaatcttcagttctttg

SEQ ID NO: 271753 - DNA, 122 bp, Homo sapiens
ggtcacagagagtcacacgagggtcccctgtcggtggcggagcctgtgtccgcccccacccgtcctgctgtgtctgcccccagccgccgctgctggcttctcagtttgctgctccgtgctgc

SEQ ID NO: 271754 - DNA, 122 bp, Homo sapiens
acaatctctggtcccccgtagacgccgccgcggggaaggcggggctgtgcgagggcgccgcgctgcaaacccaagccaggcggcctggagttgctgtaaagcctcaagcaaggctgatatgt

SEQ ID NO: 271755 - DNA, 122 bp, Homo sapiens
agcaattctcctgcctcagctacccaagtagctgggattgcaggtgcctgacaccatgcccggctagtttttatatatttttatagtagagatggggttttgccatgttggccagtttggtc

SEQ ID NO: 271756 - DNA, 122 bp, Homo sapiens
ctcactgcttcgcccaccctgtactgactgtgtcgaaggtaaatgtgcagagtcactaagcgtgagccgtgaggggttcttcctttacccccatgtgtaacacacgggttcagtgaacgctg

SEQ ID NO: 271757 - DNA, 122 bp, Homo sapiens
ctgtgtccacatcaggtctcccggcttttcacaacagtgaccttgacagcgcccagagtccgcggcttccatccagtcccctcttcccctgcgaggccgagagggtgcagagctggtggctt

SEQ ID NO: 271758 - DNA, 122 bp, Homo sapiens
caaagctagtctaagcaccttggggtcaggggagtggagggagaagatagatggatggatcgcaaaattgagattgagatcaagatcaagatggaaatagagcgagaggtagatgcataaga

SEQ ID NO: 271759 - DNA, 122 bp, Homo sapiens
ccccgctccctcccagccccgccttcagaccccgcccccagccccgaacttccagcaagacgggccgcttcccgccctcgagccccgcccatttccaggagccttgagcccagagtctccgt

SEQ ID NO: 271760 - DNA, 122 bp, Homo sapiens
agcgcataggtcccctactctgatctactcctgcttgcttttttttgcagttgctctgctcgctaacctaacggacttgctcagacttaagcctctagtttccaaatgcaggccgtgagggc

SEQ ID NO: 271761 - DNA, 122 bp, Homo sapiens
aatgcatctttgcagcagacccagggagatctcagtgcctatgaagctgagctagaggctcggctaaacctaagggatgctgaagccaaccagctcaaggaagagttggaaaaagtaacaag

SEQ ID NO: 271762 - DNA, 122 bp, Homo sapiens
ctttgcccaaaatttctctatctctgtccaggtgacctcaagatggtcttccaggctgggcgcagtggctcttgtctgtaatcccagcactttgggaggctgagacaggcagattgcttgag

SEQ ID NO: 271763 - DNA, 122 bp, Homo sapiens
catttgataatgattctctgctggtatatctatttagtgtggtattgtagtgcaaatgtacgtaattcaaatctagtaaatatttaagttcctcacactgtgcaggcttttttttttttttc

SEQ ID NO: 271764 - DNA, 122 bp, Homo sapiens
tgagacacacttacctggcctcgagggactgcttgtagttaggctctccgttgctgatcgcgccccctggtggaaaggtctggaatacagcattcccaactgaaaggcttcgcgtggtttgg

SEQ ID NO: 271765 - DNA, 122 bp, Homo sapiens
taccctttgcaaacattacgcagcagtgcaaactcagccctgggcctcagaggagccaggcgtggccaggagagtgggatttggaacggaagtgcttttgtttttggcattcactactcccc

SEQ ID NO: 271766 - DNA, 122 bp, Homo sapiens
taatagttacagacccaggaacctagagctcccccactccacagtctagggcaaaggaagcgggtctgaattgttcctaaagtcattgataagttgcatgttgactgaaaagcaggcctgca

SEQ ID NO: 271767 - DNA, 122 bp, Homo sapiens
ttcacagagaatttccctagaccacaattgccaaggtgagaggagcaaattgaaggtgggcgtttgatctcctcaccagtctgggaatctttgcaagaagctcactctggtcctgtcccaca

SEQ ID NO: 271768 - DNA, 122 bp, Homo sapiens
gaagacaggtcaggtttattcaggttcctgtattttcctgtcgagttgctagctgcccgtcgtagaggactaaaaaaaattaatgaaaattgctaaatcaatgacgctttcagaagttccct

SEQ ID NO: 271769 - DNA, 122 bp, Homo sapiens
gattcgatgcacacaaccccacgaacattcagattcatggcttgacaaagtggggataaccgggagctgcagccccgtctttgaagcttttgtaaagacaaacggtctgcaatgttaagcct

SEQ ID NO: 271770 - DNA, 122 bp, Homo sapiens
ccagcgttgggagcacgtaggaggcgcccctcggaaaggagccggagacccagctgacttcgcacttgagctccagccccgtggacatttcctgttctgcctctggaaattcaagctgaaag

SEQ ID NO: 271771 - DNA, 122 bp, Homo sapiens
ggaggcccaccctacgccctgcccccgcggagcacaagccccgcctgcgtcccgagctcccgggtccgcaaagctgggccccaaagagctccaacgccggaaccaaggagcacggaatgccg

SEQ ID NO: 271772 - DNA, 122 bp, Homo sapiens
cccgcagtggctcatccgtgagacacgtgtccgcacactgagatcccgcagtggctcatccgtgagacacgtggctgcacactgagatcccggtggctcatccgtgagacacgtggccgcac

SEQ ID NO: 271773 - DNA, 122 bp, Homo sapiens
cacgcctgccgcagaggtgcacgggtgcgagtggggaactgaggcaagaagcagatggggcggcaccgagagaagagaaactacgctagaggaaaagctcgagctgttacccctcccaactt

SEQ ID NO: 271774 - DNA, 122 bp, Homo sapiens
ttgctctttgagattgacctgaggcacattttctctttctagaagccgctgcgtaagtgacggacccatccacggggggagattcctgctgatagttgcccctcctcccactccccagtcca

SEQ ID NO: 271775 - DNA, 122 bp, Homo sapiens
ttatgaaatctcacaaaaatgtaactaaaatttaaccaaatttgggcaaacttagagaaacgacatgagtagggatgtttgctgcaaaacatatggttttctctggttggtgctcaggcttt

SEQ ID NO: 271776 - DNA, 122 bp, Homo sapiens
agatcttcctccggctctttggtaagggaacagggtaccgtacgtcccgggacggctatgcgggccgagacgttccccggggagcgggcaggcgcgcagaggccatgggtcgagtatgtgtc

SEQ ID NO: 271777 - DNA, 122 bp, Homo sapiens
ccagcccaactgctgactgatggcggcaaccctgtggggtgacccatgcccagaccagagcgggcggcaggagcccggcctcggccggcacagggtggaaggtgggggtgacccacgcccag

SEQ ID NO: 271778 - DNA, 122 bp, Homo sapiens
gagacgttttctccgggcgtgctgggcgagggtgggagtgtgtgtgcgcgcgcgcgcgcccgcccgcacgtcgattccagggtgccaaagaacaaatatggcaactttccccccaagttctt

SEQ ID NO: 271779 - DNA, 122 bp, Homo sapiens
atgtgactatatttggacgtagggcctttaaggaagtagttaaggttaaataaggtcatacgggtgagccctattccaaaaggacctagtgtccacataagaagaataagaggcaccaggag

SEQ ID NO: 271780 - DNA, 122 bp, Homo sapiens
ccatggaccccaagctcggaaagcctctgctgaccaacctgtgcttattcatgataatcacgttttcccacgtgacaacagaacaagaggacacataggtgccgctgacatcaacagcgagg

SEQ ID NO: 271781 - DNA, 122 bp, Homo sapiens
tttagagagagttttacagactcctattgacataagtgaacaaaatggttccttggaaaccgtttagatgtccaatcacagtaagtgtggattacaggttcagatgcatattgtgtgcagtg

SEQ ID NO: 271782 - DNA, 122 bp, Homo sapiens
gattcagtttcaagaagcagtggtcaagcaccaacttccaggccacagacaatctgtactcggattatgaggctcatcagtaatcgtgaggtgtatctgttactaaatctggctacccaggt

SEQ ID NO: 271783 - DNA, 122 bp, Homo sapiens
atagccactgtccgggtttcacaaagtataggtgacagagtcagacaggatttgaacccacgcagttccggcttcctctccaaaccaacccagcacaggcgtccctccacgaaggtggaggg

SEQ ID NO: 271784 - DNA, 122 bp, Homo sapiens
ggtcccgagccctgccccgcgggaaggcagctaaggcccggctagaaattgagtgcagcgcgggtgggctggcactgctgggggacccagtacaccctccgcagctgctggcccgggtgcta

SEQ ID NO: 271785 - DNA, 122 bp, Homo sapiens
aaacagcagtatcttctaagccctgggggcttccccgggccccagccccgacctagaacccgcccgctgcctgccacgctgccactgccgcttcctctataaagggacctgagcgtccgggc

SEQ ID NO: 271786 - DNA, 122 bp, Homo sapiens
ggaaagaaaccaggatcattcccaaaacaacttaggccaaactaccaactaaattcctcacggaatatgttaacctcaattgctgttaagcatgacttggcagaatcctttcctttttgggc

SEQ ID NO: 271787 - DNA, 122 bp, Homo sapiens
tccccaaaattgagtctttgtggcttatgctcgcaaacagtggccttctcaagatttatacggtgagccctaaatttgccttctcacccagaagaaagtaaggtacaaaatttccctcattc

SEQ ID NO: 271788 - DNA, 122 bp, Homo sapiens
ggggcacacaatgtataaagatgtaatttttcaaatcctaaagggaggaggacagagatacgggagcaggattttttatattttggaagctaggttagtattaattcaagctatattaactt

SEQ ID NO: 271789 - DNA, 122 bp, Homo sapiens
gtgggtgggcccaggaagccggtatggggtcctgagtcacacgcagcgtggccgccttcgcgttgcccaatgtggcagctcccagggaggacggtcagtggtcctgctgtcagcctcagcct

SEQ ID NO: 271790 - DNA, 122 bp, Homo sapiens
ggagacagaactttccccttttttcccatcccttcttcttgctcagagaggcaagcaaggcgcggagctttagaaagttcttaagtggtcaggaaggtaggtgcttccctttttctcctcac

SEQ ID NO: 271791 - DNA, 122 bp, Homo sapiens
aggtgcgcgccttgcaagctgagatcgcggccctgcggcgagcgtgtgaggacccaccggcgccctgggaagagaagtcccgagtccagtacgtgaccaccccaagtcccccagggcccgct

SEQ ID NO: 271792 - DNA, 122 bp, Homo sapiens
tttgtttgatgacctggtgcagaggaatctgcggagtgggtgaggctgtgtaaggaagcacggcagggcattgggcaggtgggctccgcaggtgctcaagccagccttcaccgctcgctcta

SEQ ID NO: 271793 - DNA, 122 bp, Homo sapiens
catgtttgagcacagcagcatttgaaaacacatcagggagagagagaggcaggtggcaagcgcagagcccaggcgcctttctctgtggaagaggtgggacccttcattcctttcctttattt

SEQ ID NO: 271794 - DNA, 122 bp, Homo sapiens
tgggtcagctacctgtaagtggaaatagggggtgccaccttccgatgaaaacccggatcccgtactgtcaacggagggcccttgaattcacatccctcagcccgctagaaagcccctgaaac

SEQ ID NO: 271795 - DNA, 122 bp, Homo sapiens
aacagtgcacagggaatctggaaactataggagggtaattattgagagattatggtattgcggtcaagggtgtggactgtggagcccagtgatctatgctctactcttatctccaccactta

SEQ ID NO: 271796 - DNA, 122 bp, Homo sapiens
atgctaccgcttaaacgactcagcatctcgacttcccaaatcaaaggcccttttcagggccgcccacagttttccgcaaaagagctcatgacttgttagacgattggttggtctctttataa

SEQ ID NO: 271797 - DNA, 122 bp, Homo sapiens
tagctcgctcgctcaggcctggccggcacccctcgagcacagcgcacttggcctgtggaacgcccagcccgcctgcgccccctttatacgcgcgggccccacccccgtgcgcgcgggcccgg

SEQ ID NO: 271798 - DNA, 122 bp, Homo sapiens
ttttaggttctgaactcaattcatggtggctccttttcacttgccagataattacaataacgatgaagatggagccatagatgtataagggatatccaacttcccacagaacaaaagtaggg

SEQ ID NO: 271799 - DNA, 122 bp, Homo sapiens
tttgtcttttggggcattcacagattcctctcagataccagcccactttcccagccaccccgaaggaggagggtgctcctgagggagtgttcataccagaccctgttcccctttcagcttca

SEQ ID NO: 271800 - DNA, 122 bp, Homo sapiens
cgcccccggcgaccgagcaacagccgcctattggcgaataagcttcctgacgaagactctcgggcgtgcaaccgcaccgcccaacacgacgcatgctcgcaactgcctactcactccgctcg

SEQ ID NO: 271801 - DNA, 122 bp, Homo sapiens
gcccgcagccggcgagcttctcggctttcagagcaggagccggtgtgagctgggaggacgcgggttgcagacgtgaccggcgacagacagaccaccggatgcacagaaccagagagcaggcc

SEQ ID NO: 271802 - DNA, 122 bp, Homo sapiens
agcggtcgggaccctcgggcaatgagagcaaggtagagtccatccgagaggacacgtccgcggtttgctgcaaaaagccccctttggctgctgcgtggagggaggctccggagagcgtggaa

SEQ ID NO: 271803 - DNA, 122 bp, Homo sapiens
aactgctgtcatttcctaggaaacccgacttttaccgcgcggggagctggggatggagcccgtgcgcctcaccctgggtgatcggtcgctgaggctctcggggacctcgagcccccccgagg

SEQ ID NO: 271804 - DNA, 122 bp, Homo sapiens
ataggagatggtgtgatgccgagtctgtatattcaccagcatcttggtaactgtggaggacgttaaacccatgtcaacaaaagacaggttggccaagaaaaagtacatgggggtgtggaggt

SEQ ID NO: 271805 - DNA, 122 bp, Homo sapiens
tgtcccttccttaagcacttcctgtttgatctctatgatccatcctgttgggacttgattcgttcctcaaattttcaatttaccgtaaacaaaggggacgcgcgctgacccggaagtgaaag

SEQ ID NO: 271806 - DNA, 122 bp, Homo sapiens
aggggtcggtcttttctgtttagaggaggctccttgaaacctccccctcccgggttcaagcgattctcctgcctcagcctcccgagtagctggaactataggcgcccgccaccactcccggc

SEQ ID NO: 271807 - DNA, 122 bp, Homo sapiens
tcatgcccctcggataacaaataaccagcattctctctctcctgggtgctttggtgggaacggaacggtgtcacccctcaccgagtggctagaccaggaggagggggaggctggcggagagt

SEQ ID NO: 271808 - DNA, 122 bp, Homo sapiens
ctgtggaggctcaggctgggaaagttccttctgaggatgtggacagtgtccttctaacagcggccaggtgagagccgctggagaggcggcctggaaagagacacctggtggagggatgcaag

SEQ ID NO: 271809 - DNA, 122 bp, Homo sapiens
aaactccagcagagtcataacctataaaacatgaacactcagtcatcaccaggaagcacccgccttcttgacttcttttttcactagtgaaacgagtcctcccagctcctgcaggggcttgt

SEQ ID NO: 271810 - DNA, 122 bp, Homo sapiens
ttcctggctctgtttgagttggatgggcctgtgctcgaggctttgcctgctcttctgtcacgaaggatgtttacggggaagccaggactgaccctatggagacaccaggctggcttccacct

SEQ ID NO: 271811 - DNA, 122 bp, Homo sapiens
taaatcccgtcgctggcatccggggtctcttaggcaacaatgtgtgggctcctgattggccgcgagatccaggagggctggctacaaaattgggcacggggataaaattaacaagtgtggcg

SEQ ID NO: 271812 - DNA, 122 bp, Homo sapiens
aaagctctttgggactgaaatggctgtttatgaatccttgtcaacctcgttcgcagtcaacgaccagggaataaattattcgtggaatgacacagttcataattattataaggtattattaa

SEQ ID NO: 271813 - DNA, 122 bp, Homo sapiens
ttggctggtagctccatctccttaaacttcaggaactgagaccacaggatctgccagggacgaggctgtcggcaaccacgccgggctctcagggcaggcccaggaccccgccccccacggca

SEQ ID NO: 271814 - DNA, 122 bp, Homo sapiens
cgggtaacagcttttttagctcttcatattctgcaaagtagaaggagagaccctttgaaccgggatcctccagtaaggacagatacgtgactctttagcagacagacatgcgtacttggctt

SEQ ID NO: 271815 - DNA, 122 bp, Homo sapiens
agaggacgggcttggatgaagaagggaaagaaagagaaagagactgaagcagagaagagccgcagaggaagaaagtgaatgagcactcaagaaggacaaagaggagtagtcgggggtggggt

SEQ ID NO: 271816 - DNA, 122 bp, Homo sapiens
gacgtgccagtcaggccttctccttttccgcagaccgtgtgtttctttaccgctctcccccgagaccttttaagggttgtttggagtgtaagtggaggaatatacgtagtgttgtcttaatg

SEQ ID NO: 271817 - DNA, 122 bp, Homo sapiens
agaaagagttgattatttatttaatttcattcaccaagggagaattcggaggctccatcccggaggcactggggtccgggacgcgggaaaggcttggaaatgtgcgacgcggctgtgtgcga

SEQ ID NO: 271818 - DNA, 122 bp, Homo sapiens
cagcagctgtcagagggctccatgtttggccacggtctgaagcacctgttccacagccgccgtcggtctcgggaaagggagcaccagacgtctcaggattcccagcagcatcagcagcagca

SEQ ID NO: 271819 - DNA, 122 bp, Homo sapiens
ccatggcgacgcgtggaggccgggaggactttgtcagggcctgcagagcttggcttcctccgccccggcctcccttagccagcccttcctcctcagtggcaggaaggtgcctgctgtttgca

SEQ ID NO: 271820 - DNA, 122 bp, Homo sapiens
agtgggtgcctacagtttatttatgaaactgtaatcgaagttgagagcaatttcagaacacgcattaaacaaaaattattcagaagttagttgatgggtcttgaggacataatttttttaga

SEQ ID NO: 271821 - DNA, 122 bp, Homo sapiens
tagcgagagacacccttaactgtctcccgaggccgggattggccagagcggaagcggagacgcacttcctaggggcgcgtctggcacgcactgcgcagccgcggtgggaggaggcaccggcc

SEQ ID NO: 271822 - DNA, 122 bp, Homo sapiens
taactgaaagtgggtcggttcaaaccccctggagctgaggttgcctctcctcttcgagcacgcgctatcggacgcgcaggtccccaagaccgcggatcggcagggggtaccagggaagcctt

SEQ ID NO: 271823 - DNA, 122 bp, Homo sapiens
gacctagccgggtgaagccgggtcttcccggggaggcttccacccagcgtggggggtgggcggatggggatggggaagtgtccggttagagggggtggtcaagaccccaggattccgtggga

SEQ ID NO: 271824 - DNA, 122 bp, Homo sapiens
acaggcatttctgagcctcatcaagaagaccccactccttccaggagaagtaaacagccacgtcctcaaaggtcacaatgccctgccaggatggggacacatgaaaccacaaacggttcctc

SEQ ID NO: 271825 - DNA, 122 bp, Homo sapiens
tggacacccatcccggcctgtcactcagctgcgtgaccgtgactatcccacgcaacctcacgtgctatcacctgcaacatgagcgcccccgcactcctgaggacaggtgtgggaggactcgg

SEQ ID NO: 271826 - DNA, 122 bp, Homo sapiens
actcagtccgtttctttccacaccagggtcttcacaaatgctgttccctctgctggaattcgcccccactaccacttactgcctccttgcctagataactgagcttcagacaccaccttaaa

SEQ ID NO: 271827 - DNA, 122 bp, Homo sapiens
acaactttgacataatcgaaactgggacagcctgattccataaacacactaatatggcaccgtggattgtttgcagcctcacctctaaagtattctctctgactaacaaagaaagggaaact

SEQ ID NO: 271828 - DNA, 122 bp, Homo sapiens
attctttctaatcctctaaccctccccactcccccaactcccacaccctacccccaccaacgttcctggaattttggacttagctatttttaaaaccgtcaactcagtagccacctccctcc

SEQ ID NO: 271829 - DNA, 122 bp, Homo sapiens
gccactgcactccagcctgggcaacagggcaagactctgtctcaaaaaaaagaaaaggagcgaggctcccacacaggccacagcgtggatgaaggctgaggacatcacattcaatgacagaa

SEQ ID NO: 271830 - DNA, 122 bp, Homo sapiens
tcccggagtgcgcatgcgcagcggcgggggttgttccggctgcctttcactgaggggacccgccagtttctaactcagtggcgtttgccctgattcccggggcctggctttcagcgtagcaa

SEQ ID NO: 271831 - DNA, 122 bp, Homo sapiens
cttggggcggcgctctacttctgcggagaaggatcgacgagctttccggagaaagatccgcgagctttccggagccggagccggggcgagcagccaaaaggcccgcggagtcccgctgggcc

SEQ ID NO: 271832 - DNA, 122 bp, Homo sapiens
ggtgcctgcctgcacagccctcctcgcgtgcgagcattagttggctaaagtcgcctgtctcgacagtctcccctgcggggtatctggggaccctttctttgggaatccacgctctttgtcag

SEQ ID NO: 271833 - DNA, 122 bp, Homo sapiens
gatccaggcccaggaagtgactcagatgtggcaaagaagccatgttgttgaagaacatcccggggctggatttgggaaaggcacatattcgatgatgacataaattctggtcttgtgcacat

SEQ ID NO: 271834 - DNA, 122 bp, Homo sapiens
ccgcgtgccccagggcctgaagctgcgtggtcaggccccagctctgctgcccaccagccacgtgacctcggccacaacgctgtccaccgtgtcccggaccctcataagtgagcgtgatggta

SEQ ID NO: 271835 - DNA, 122 bp, Homo sapiens
gccggagttcctggaagacccctcggtcctgacaaaagacaagttgaagagtgagttggtcgccaacaatgtgacgctgccggccggggagcagcgcaaagacgtgtacgtccagctctacc

SEQ ID NO: 271836 - DNA, 122 bp, Homo sapiens
aggcgccgtgcgccgccgccatctgcgcccacacacccagcgtcgccgctgccccgcccccgcatgccccgcccctccgaccctggctccgccccacgcgccggtcccgcccccgtccgccc

SEQ ID NO: 271837 - DNA, 122 bp, Homo sapiens
tcctggagaaaggagctctgaattgaaggcggagtcctgcattccaacccttgtcctccccgggtggccctgggcaagcctttaagccgtgcctgccgtcaggcgccccagcttcgcgcctt

SEQ ID NO: 271838 - DNA, 122 bp, Homo sapiens
tgggactacaggcatgagccacagtgctcggccagcagtgtaatttttaactgtcagtctcggaacatcttttttgtatagccaagtgtgtgggtgtgtgtgtgtatccgcctcacaactat

SEQ ID NO: 271839 - DNA, 122 bp, Homo sapiens
gatcaaacggtggagagaggccagagccaagtgtcttggctcccgggctgggagaggccccggcgtggccctctggaggccgccgtctgcgactgcccgggcgccctggggcggcagcctgg

SEQ ID NO: 271840 - DNA, 122 bp, Homo sapiens
ccctggctcaggtgcccttcctcgtcccgttgccccgggccctgagccccgcccccgccacgcccctgaggcttccaagctccacccggtgcccgaggctcctgagccccgcccacgccctc

SEQ ID NO: 271841 - DNA, 122 bp, Homo sapiens
ggcgctccttcgcgtgacacgccccacccggctcctccttcctcccctcctcctcggaggcggggagccagcccaccgccccccaaccacaaagggaaggccaactactccgggctgaaggg

SEQ ID NO: 271842 - DNA, 122 bp, Homo sapiens
gcagcccagagcacagagcctccaatgaggaggacgctaaacagggcccgggagcccctgcgaggagactcggggcacacggggaatgcgggggacatgggaggacatgggggtcatgggac

SEQ ID NO: 271843 - DNA, 122 bp, Homo sapiens
gcaaggaattgccattcaggcacacgtgctcaggcggatcacaggccacacgtgctctggcggatcacaggccacacgtgctctggcggatcacaggacacacgtgctctggcggatctcac

SEQ ID NO: 271844 - DNA, 122 bp, Homo sapiens
acgcggcccaggtgtctgtgcgctgtgctgggtgggaagccacctctcaggtgtgtttcccgtctccacatcagcattttgttcatggagtctgctgcttctgagcactggggacaagtcgc

SEQ ID NO: 271845 - DNA, 122 bp, Homo sapiens
acaatgtcgggttattttcaaacattgttgaattaataactacaaggtcccatttggcttcgggggataactgacttactcaggagcattaatttgttcaatggctacagaacttgaagtca

SEQ ID NO: 271846 - DNA, 122 bp, Homo sapiens
agggatcagccggttttggcttcccgtagtgctagaattataggcatgagccaccacacccgtggaacattcgcattttagtacagaaccgctggacagtgggtgacccacacgctcaccca

SEQ ID NO: 271847 - DNA, 122 bp, Homo sapiens
agagtccaagccacccatactgctctgtgccactggccaaccaggcacgagatgagcgagcgtgagtgagcctcccatcaccacagccagaattaaggcacaagccctgcagagggaccccg

SEQ ID NO: 271848 - DNA, 122 bp, Homo sapiens
atgtcctaaccagcaggatggaagggcatgtggctccctcggataagtcagggctctccccggagaagacgacaaggacgtgtggtgagcacgtgctcacggcagcgccagagcccagcact

SEQ ID NO: 271849 - DNA, 122 bp, Homo sapiens
ttgcagagccttgttattcttcagattagacacatcatattttcttcaagctgtcttctgcgttatttaaccagtctacaacaaccatatctcaccatgagtcttacctagacatggatttt

SEQ ID NO: 271850 - DNA, 122 bp, Homo sapiens
cgtggctgccatgcagcacgggccgctgcccacgtggatggagacaccccggcaacgctccgaatctctcagcagccgctccacgatggtcaccagctcgggggccccccagaccaccccac

SEQ ID NO: 271851 - DNA, 122 bp, Homo sapiens
gtagcctgccgtgctggccagagaggattctaagccagtaggttttagcttgtggggttccgtgggagcaagacctcgtggatccctggcttcagctcccttcccatgggagtgggtggatc

SEQ ID NO: 271852 - DNA, 122 bp, Homo sapiens
tccgcgaacgacagcaggcgagaatccttgctctggacacggggaacagggtcagcatctcgtctcctatctccaccgacctgtctctggcttttcttagtccccagatgcgcccagaaggt

SEQ ID NO: 271853 - DNA, 122 bp, Homo sapiens
ccccccacatcggcttcgttggggagcccccgccctacgcgccgccggaccccaaggccgcgccgctgctgtacccgcccttcccgcaggtgcccgtggtcctgcagcccgcgccgtctgcg

SEQ ID NO: 271854 - DNA, 122 bp, Homo sapiens
tgtcgaaagcccgtctttgtccctgtagctgtcagacgtgaccgggaggagatgcatagtcggggcaggggccggtgggggcaagggaccagccaggctcagccagcggtttcggagagacc

SEQ ID NO: 271855 - DNA, 122 bp, Homo sapiens
gctgagctggtaactccctcccctgggctctcccagagccttccccaaagcttgtttacccgtctgaatctgacctggctgagctccttgaagacagagccctgccttatttattttcagtc

SEQ ID NO: 271856 - DNA, 122 bp, Homo sapiens
tctcctacgtgggatgtgagcgggtctgtgtcccacaccctcctcacccagggacaggaacgtgcttttacattgcagcctctgatggatgagaaacggcacctcatgattctttggctttg

SEQ ID NO: 271857 - DNA, 122 bp, Homo sapiens
cctgagcccaacactgctgaatagcaggactgactctgggcgccagccccctccatccagcgccctgttgaacatgtcttgcgttctccacgggtggctcacactcgcgtgtcaacccgcag

SEQ ID NO: 271858 - DNA, 122 bp, Homo sapiens
cccggccctagagaggcagctgcggaactggaccagtgccgaagggctgctccgcgtccacgcgcgcctccgggactccggccgcgcctacctgcccttcgtgccgccacgcgcgcctgcgg

SEQ ID NO: 271859 - DNA, 122 bp, Homo sapiens
ggtgggggataggcacagcgccccacaccgagtggaatcgtttaaaacagcggtcaagagcgtggcccctggagtcaggcaggcctgggtgcagatccctgggcctagccgctcggatgagc

SEQ ID NO: 271860 - DNA, 122 bp, Homo sapiens
ccccgagagccagataactgaggtcaagtaagggcaacggctgtctccatttggagggcgcgtgacttgtgaattcttccttatcaatctcattactccacctgaagcccgcccttccctct

SEQ ID NO: 271861 - DNA, 122 bp, Homo sapiens
tggagcaggagtgaggaagcgcctctcactcccccgcgaacccgcagaacaggccgccggcgctatggagaccggcggagcttcccgctccttcaccaaggggccctgacgcgcagttgaaa

SEQ ID NO: 271862 - DNA, 122 bp, Homo sapiens
ccaaagctgtctatctccgtggcccgctactacggcactgcggctctgtgccctgcccctcgcagcctggcaagtccagctgccactctcactgcggagccctgcccccgggcgcagagccc

SEQ ID NO: 271863 - DNA, 122 bp, Homo sapiens
gtgtgtgggaggttgggaggggactcccgctccctccattttctgttcctagccctgggacgtggctgtggacgggtttgggcttaggtgagctaattcctccagagagcaaaaggcttcct

SEQ ID NO: 271864 - DNA, 122 bp, Homo sapiens
tgtgcgtccaggacagcaatgtgtttgtctctcagccaagctcagtcctcacccaggcaccggggtcacggtcacgttcacgttccgtggacgccttggcacggcctcccaagggggcgggg

SEQ ID NO: 271865 - DNA, 122 bp, Homo sapiens
aagtcgagcctaatgctaactgaggtcttctgatctcttaagccccagtcactttcccttcgttttctcagagcgccttctgaatcttttcaaaactttccaccatctaagcatggaaaccc

SEQ ID NO: 271866 - DNA, 122 bp, Homo sapiens
gccccatccctgggtcacgggcccctgactgttccccgcccccagctcctccaagctctgcgacttcctgagctgttcttcggaattctgtgcgtctctgatgctttgtcctccagccccca

SEQ ID NO: 271867 - DNA, 122 bp, Homo sapiens
aacattccttcctcattcattcattcatttaaagaacatttacggcgtgcctcctgggtgcgcttgtatcatgagtttactagtccttgaaacattacacaaagaaagacccaagttggggg

SEQ ID NO: 271868 - DNA, 122 bp, Homo sapiens
cagctggagcacccagagctgggcgtggcaggcgggccgtcccacttcctcatgacaggccgggaagcagccacacccagcacccacaggcgctccagagcaccccggctcctcctgagggc

SEQ ID NO: 271869 - DNA, 122 bp, Homo sapiens
cctgaactgtggggacaggggaccccatctacccattcccccattccagtatgaggtacacgggagaggaagaatggggctgccccttcctgctctcatggaagatggggtttgggggtggc

SEQ ID NO: 271870 - DNA, 122 bp, Homo sapiens
agcctctgggtcctagtgcccccctgcttcacgtgggccagaaactaagggctgggcatacgccacagaccctcagcactcaactcttgaatacactgtcctagggctggaagcagtcttga

SEQ ID NO: 271871 - DNA, 122 bp, Homo sapiens
aggctgtggggtccatgcccacatgcacctgtcacagcccacttctgcctactcctggcacgtgacggagacccctgggtgactctgggtctcagcacacatccggccagaaagaaggagcg

SEQ ID NO: 271872 - DNA, 122 bp, Homo sapiens
ccgggaagaactttggggttcattcggagccttatggggcctcggaagttgatcacggggcgatgcaatttaagtgttttgaaggagtccttctggctgcttcctagaaagtaggggcgcgg

SEQ ID NO: 271873 - DNA, 122 bp, Homo sapiens
tgtctgtaagtgcccgaggctcaggagagctggggctcccactcgcggcagacaggcccgcgtccaccctgcgtccaccccggcccggcggcagcacggtgccagtcatctgcatgtgctcc

SEQ ID NO: 271874 - DNA, 122 bp, Homo sapiens
ccggcggaatgcgatgctgccgtcccagcagagccacacctgagcctgacccccgagccccggcccatgtgccccattcagccccttgctgccttgagcctctgagcacaaagggccggtgg

SEQ ID NO: 271875 - DNA, 122 bp, Homo sapiens
ctcatacatccttttggactgtatattgttgtcagtcagagtccgtgggggaacaaggtccgggactttccactccaccattgtgctgacatcagacattttatgtggagtggcataagaga

SEQ ID NO: 271876 - DNA, 122 bp, Homo sapiens
ccattgcatttattggacattgaaacgggagcagagagggaaaggaagtgtgtggggaggcggttggtagggtaaagccagacagctttggagagagctgctaaaatcgggaatattttgtc

SEQ ID NO: 271877 - DNA, 122 bp, Homo sapiens
gtccccagcaactagaacagggcctggctcattgtaagctctcagtaataatgtgttgaacgaatgaaaggaggttagggagggaatcgtggataacttgggggaagagtgtttaaggccca

SEQ ID NO: 271878 - DNA, 122 bp, Homo sapiens
aagccgccttcttccccctccgtgagtcagaaacaaaggcgggggggcggggggagcgcccgagctgcggctccgcgattcgccctttattctgaactcgcaacgtcagcggcccgcggatg

SEQ ID NO: 271879 - DNA, 122 bp, Homo sapiens
aagtactttataaatattaggtcatgtaatctgcataataaccctatgaggtaagtactacgattgtcttctgtcactggctcagggtcacactagtacatggcagaacaaaggtcaaactc

SEQ ID NO: 271880 - DNA, 122 bp, Homo sapiens
cggactgtgtatttatttactataatgttagcttacaagctgggaatataagtgcattaacggcccacatgagtcaatggtatgcaaaaagtctgtgttctcccaaataataatattaatcc

SEQ ID NO: 271881 - DNA, 122 bp, Homo sapiens
agagaccccgggcggagacgaatgaccagatccgccttttcattcttttaaatcaaatggcgggaggggagccttgcttatatacccaactagtatatgcttttagtcacaacgaagtggga

SEQ ID NO: 271882 - DNA, 122 bp, Homo sapiens
tccgaggctgctggctgcgcacagcccacatgccccgccgagtctcaacactgagcaacccgccgatcctccaccgagcagcccccatctgtgtccagggccggagctttctcctcggccat

SEQ ID NO: 271883 - DNA, 122 bp, Homo sapiens
tccgctggtgcgtggcctcgctctccacggcggatgagctcaggcttctgcatgagagggcggcggcgaggacgggctcctgagcaacagccgcggctgctgggaggacacgcacggctggc

SEQ ID NO: 271884 - DNA, 122 bp, Homo sapiens
ccaggccctctgccaggcggaaaaacatttcctgctctgagctcatcttagtctcctgggcgggcgaggctttggtgccctccgggagtgccgacccacccacgttccggatcagcgaaaca

SEQ ID NO: 271885 - DNA, 122 bp, Homo sapiens
gtggggccaaagccagctgctgcgcatgcgccggccggggccccgcccccatgcgccgcgcggctccagggccacgttccagggtcgggtttggtggattcctcagtccctgccgccgcggg

SEQ ID NO: 271886 - DNA, 122 bp, Homo sapiens
ctgtcgctgcgcctcgaggtgggagcccgcggctgcgggagctctcttgggacccatggtcgccctcagtcagcccacctgctctagggaccgcgacagggcggggcagggcggctcccgcg

SEQ ID NO: 271887 - DNA, 122 bp, Homo sapiens
ccggcttcgacgctcctctggttcccctctctgctcgggaggctaagtgctcgggagaggcgcgggagccaagacttatgcacccggagagggacgcggagccagcggtcgggcaaagccgc

SEQ ID NO: 271888 - DNA, 122 bp, Homo sapiens
aagtatgctctttatcgcaacctgcaacattccccctcagacggaagcttgtgtagaggccgccaagttccaacaaatgctcccgactgtagacgccaccaagtgctgggacttgctctcgt

SEQ ID NO: 271889 - DNA, 122 bp, Homo sapiens
gtgcggtccaggccccgggtggcgcacccacctctggactacatttcccagggggccccgcggccaaccttttccggccgaagaaggctagtcacctttccttggcgggtgttggaaagcaa

SEQ ID NO: 271890 - DNA, 122 bp, Homo sapiens
cgtaggggctacagcagctcggacaccggaaaaagatctagagctcgagggtgaccctagcgcggtgacttctgggaaatgtagtccacccggaataaccatgtccacggcgcccgccattc

SEQ ID NO: 271891 - DNA, 122 bp, Homo sapiens
tgcctgagttgcagtcttgggtcctttagaaacctggagatgtgcgtaaaattcagatgccggtattcccgaacttccccaggcctcagcatatctcggcggcctgtggacagatgggaggc

SEQ ID NO: 271892 - DNA, 122 bp, Homo sapiens
gggtgaaaggaaaagaagtcccgaagttggaaaacaaatgccctatttcaaggctgtgctcgggtcacagccccatgcctggaggccatctatttgccttctcttctgctagaggagctgac

SEQ ID NO: 271893 - DNA, 122 bp, Homo sapiens
ccactagccccggcttacagcggcctgagcgggagttctcggtgctgtaggctttcgggacgctgtgtatgcccggcaggggcttccagtgggggccaccccaagtcgcctccagcgggcgg

SEQ ID NO: 271894 - DNA, 122 bp, Homo sapiens
tttgaaattagcttgtagccatgaaagggccacccgattttccagtttaatgaaagctaacgtttattaagtactaaaattatatttattatgtataataaataagcacactgttataagca

SEQ ID NO: 271895 - DNA, 122 bp, Homo sapiens
aagcggcgacaactttacagactggaccccaggtaagggaactccctcccagcgttggaacgctgcaaaccagctgcttggacgcaggcagcccccgcctagagaatcaagaaaaggtgtcc

SEQ ID NO: 271896 - DNA, 122 bp, Homo sapiens
ggtgcgctaggcctgcgcacatccgtgcgtgtgcatgtgtcacccccacctcaggtcctccgagagcaaagccctgggcagggccaggcatttcgggtaatgctccaccctgttcacagggt

SEQ ID NO: 271897 - DNA, 122 bp, Homo sapiens
aagaccatgctgagaggaaggcctgctccagagcctctcgccagatccagaccaagcccacgaaagccggaggacagatccagaccaagcccgtgaaagctggagaaggttgagtcccaccc

SEQ ID NO: 271898 - DNA, 122 bp, Homo sapiens
agcagaaggatacatttttagtattttattgcctgtcaatgctctgcgccttgccagaaacggataacgataattttaaattatttatgtgtttatttttatgagacagtttcactctgtca

SEQ ID NO: 271899 - DNA, 122 bp, Homo sapiens
catgttatgatttatagaaatacctttcctgtagcttttatagtcattgtttttcaaagacgatataccagccctcacccaggttttaaaaaagcactggtaggcatagaataggtgctcag

SEQ ID NO: 271900 - DNA, 122 bp, Homo sapiens
cgccatccggctcccagccccggggaggcattggatgggggtggggacagcagaggtgagcgctcttacctgggaggaagaatgcggtcaagccgagagcgagtccccaccagcgtccagcg

SEQ ID NO: 271901 - DNA, 122 bp, Homo sapiens
gtcccttggtcagagcattgcccgtacaccctgggttttgcactcagccatgccagggtgcgccgggcggcacgcgctgggcgggccgggcagaggaaggaacattcctccccgtgtgccgg

SEQ ID NO: 271902 - DNA, 122 bp, Homo sapiens
caggcgccctgagacccgggcacggcgacggccgctctgcgtcgctcctgctctcactcccgtcccctgcgcggctctgacgctgctctgtctcccgtgtccagtctctagctctcttcctc

SEQ ID NO: 271903 - DNA, 122 bp, Homo sapiens
gatagggagcggggaaaggtactttaggtacaatgtcagaaatgcctcccccaggccaggcgagggggtgcaagcctggaatcctagcactttgggaggccgaggtgggtggatcacttgag

SEQ ID NO: 271904 - DNA, 122 bp, Homo sapiens
ctaaaagatgcagagcagtgggaagggaggaggaaagtagagggtggaagggtgcttcttcgggaaattcagggagtgaaggcctctgaactgcataaaaggggtcaaagatcatcagctga

SEQ ID NO: 271905 - DNA, 122 bp, Homo sapiens
cggggagaggaggcagcgcgcggcgcggagaggcgaggaccggtatctggagactggggacggaagcggggagctcagaccgggatccattctctcctcgcctcctgggaaaaaagggacaa

SEQ ID NO: 271906 - DNA, 122 bp, Homo sapiens
cacaaggttaaatgcaaatactgtctggggtgggcctgactcagctcagggaggaagccccgtctgaaaaggctgcagcttaggctgtcactcttccttcagtccagcatctgatcacatct

SEQ ID NO: 271907 - DNA, 122 bp, Homo sapiens
ctcaggggcattgctccagggtgcagaatttttacaagcagcacacagtggaaacattcacggggttttttttttctttccttttttccaaaatagagccccgtagactgtatgaatgtgta

SEQ ID NO: 271908 - DNA, 122 bp, Homo sapiens
ttctccaagcccgggttcccgcccacccctcactcctgcttgaggacagggcagacattgcgcatgccccgtatccaaggccgcctccgggagcacctcccatgccgctccgctccctcccg

SEQ ID NO: 271909 - DNA, 122 bp, Homo sapiens
cagcactgttgttattgttattattatttttatcacggcgcgttagggggccttggagcccgagagtgtggagcactaggagcctctgcactccgagaagggacagccaccgcgcagggaaa

SEQ ID NO: 271910 - DNA, 122 bp, Homo sapiens
tccctaaaataagggaagtgagccagaagctctgggcccagcccatgatctcaatcggggcgaatatccccgcctcctgacctcaattttcctaagctagaaaggacctttcgaccctccga

SEQ ID NO: 271911 - DNA, 122 bp, Homo sapiens
acccccggggctggggagtcggggaggcctgccccggccccctgcccgcggccgccatggcggagaattggaagaactgcttcgaggaggagctcatctgccctatctgcctgcacgttttc

SEQ ID NO: 271912 - DNA, 122 bp, Homo sapiens
gtgacattggcaggaagacggagtcataaactgtgccggtagagccttgggcagattaaacgaggtaaccgaaatgcggaacctgcaggtggtagacttgagggcctcgtgctcctcctggc

SEQ ID NO: 271913 - DNA, 122 bp, Homo sapiens
ttgttcagcacccaataacatctaactttcaagagcttatcctatatacatgtcaggcaccgtgctaggtgctttaaaagcatctgtcttttaattcccccagaaatcacaagatgatatta

SEQ ID NO: 271914 - DNA, 122 bp, Homo sapiens
cgcgcctgtctgcaccctgtcgcctgagctgcctgacagtgacaatggtgtgaggggctgcgttgcaatgtggtcatgtgatttcaggctatggatttcgtgcgtctttctctgctcactga

SEQ ID NO: 271915 - DNA, 122 bp, Homo sapiens
aggcgggggagggggggggaggtggtgggggcgagggggcgggggctcagctagtccagccgtctacaagaaaattgctccctttgaagctgccaggggggccgggaagcctgccccctcct

SEQ ID NO: 271916 - DNA, 122 bp, Homo sapiens
ttcaaaatgcgacagggcaataaacactgtataggaattttaaatcatgccatttagcagcgtacacttgagaacaaggggtccagcacatggatgaaattattgtctgtgacacttgaccc

SEQ ID NO: 271917 - DNA, 122 bp, Homo sapiens
cgggtgcgggcatgccaccctacgggagccggcatggtttgaaggtcttagccacatccccgggagccccccattgctggagcttgtctctgaggcagcaaagggccctcctaccttatctc

SEQ ID NO: 271918 - DNA, 122 bp, Homo sapiens
ggggggggcatgaagccgctggagaaatttctgaagaagcagacgtcgcagctggcgggccgaacggtggcgggaggtcccggcgggggtctggggagctgcggtgggcctggagggggtgg

SEQ ID NO: 271919 - DNA, 122 bp, Homo sapiens
gcccgggggaccactaccatcaagaagcggagacaggtagtggcccccaatggctgggcacgctcatatttattgtatacaagacaacggggcagggtaaggagtcttaatcactgagtcgt

SEQ ID NO: 271920 - DNA, 122 bp, Homo sapiens
gtccttctagggagaagccggatttcctgtagaacctgtgtcttctccaccctcagcctccggaggttcggaggcactcactgaccccgccatgcaggcgggcacacgaggcaggcgctcct

SEQ ID NO: 271921 - DNA, 122 bp, Homo sapiens
gctggttgccaagggaacggttggcaagcggaagtggggctgcgctggcgcttcctcttccgggtcggcgctcctgcctccctgcagggagctgcttatgggacaccaattcctgcgcggcc

SEQ ID NO: 271922 - DNA, 122 bp, Homo sapiens
tttctgatggccccaggtgctctcccacgaggagacagtctttcatttgaggttctgaagcggcctcacctcgaacccatgcgggatcttccaagagtgcaattcccacagctccacttgct

SEQ ID NO: 271923 - DNA, 122 bp, Homo sapiens
ccgctgccgctgccgccagccacagccgttcctgctggcctgcctgcacgggggtgcgggcgggcccgagcccctgtcccacttcgaagtggaggtctgccagctgccccggccaggcttgc

SEQ ID NO: 271924 - DNA, 122 bp, Homo sapiens
tgcccctcagctgggtacgcgcgccccactcccttccgcggggaagcccggggcggggagcgcccctgaaggccgggcccagaggtcctgtggctgcgcgtgcacacacacacgtgcacaca

SEQ ID NO: 271925 - DNA, 122 bp, Homo sapiens
tgcccggcccacatccactccagggtcctctgtgccctcccgcagctatctcatccgctccgaccccctggctcacgtggccagcagctcccagagccggaagagcagctgcagccacaagc

SEQ ID NO: 271926 - DNA, 122 bp, Homo sapiens
tgtgagctgcagggaggcatggtgagccccgggctgactcagaggctgggaggagcctcacggccacccaccctgtcggccgggaccgaggggagcccgaaggccacctgcgtctggaggct

SEQ ID NO: 271927 - DNA, 122 bp, Homo sapiens
ctgcacgcacggctctccgcagggctggtgaacctgttccctggaggaatttacacaccacgggctcacacggccagtgccgatgtgcactgctccccttacgtgacatgggacggtgacag

SEQ ID NO: 271928 - DNA, 122 bp, Homo sapiens
ttagacacagtgggggttgaatggatgcgcgcgatataagcaaattaaatggttcgtggccgcatcctagagccctttaattagagttaccatttgtagaaggcctgccgtgcacaatccct

SEQ ID NO: 271929 - DNA, 122 bp, Homo sapiens
gatggtgtaaactgagctttagagctgcaaagacctgcgtcaagcccccgcccccgcccccgcccccgggcactcatcgtccagcacaacaattgcaacaacacctgggcgttctctgccca

SEQ ID NO: 271930 - DNA, 122 bp, Homo sapiens
gtcccgcagccccggcgcggctcaggtgggcgagcgcgccgacctgcgggcgaatggcagcgagtagagcagcacggtacactccgccgcggccccgcgagcactaatctcactgccggtct

SEQ ID NO: 271931 - DNA, 122 bp, Homo sapiens
aggggctccttgaacggacaccaccctggatggctttttcctaggcagacctcccacccccggcgtttttgtttcgaatagcacctaacgggcggggttgcatttaccatctgtgtttcgaa

SEQ ID NO: 271932 - DNA, 122 bp, Homo sapiens
aggggctgctgggcagagttcagggtctgaacaggcccttgggacctctggacagaggatcgagggatggggagggaagtgggagtaagtgcgaagagggcatgcgctaagaaggccctgtg

SEQ ID NO: 271933 - DNA, 122 bp, Homo sapiens
cctgcccgttgttaaaggggactcttggtggtctcgctttattgtcagggaccccagaagcgccgctcattgtaggcgcttggcggagaggctgctgagaaagtgctttggaggtgcagaag

SEQ ID NO: 271934 - DNA, 122 bp, Homo sapiens
gagcctgggtgaaaagtccctctggctgctgggagggtcgggggcagcaaggagccagtgcggggatgggctgcggtggaccgggccgggatcggggccggggcctggtcctggcagtagca

SEQ ID NO: 271935 - DNA, 122 bp, Homo sapiens
tgataaccacatgcggactgtgcatcgcctgggcggtgcctgggctacatctgtgggagtcgcaggagtctttctccactgttgatgaaatgtgacagaaatgtttctgcttttttcttatc

SEQ ID NO: 271936 - DNA, 122 bp, Homo sapiens
ggaaaccaaccaaatgtccctccgtggagaaacggatacaccaaatgtggcacacccacacgacgggaggttattcagcgatcgagagaaatggaatgtggatagatgccacacaggatggc

SEQ ID NO: 271937 - DNA, 122 bp, Homo sapiens
aagcgggagccggcgcgggcggtggggcctgacccggacgccgcgcacccggctccgccccgcgcccagcgccccgctcactccctggccgcgcctgccttcgcgcccctctgttttctctc

SEQ ID NO: 271938 - DNA, 122 bp, Homo sapiens
ggagctgggattccctttggagttgtcctgcgttgaggtaagcgggctgagcctccggaccgactcccatgcggtttgtcctgagatgtggctgggcctgggagcgggcgtgacctcacaca

SEQ ID NO: 271939 - DNA, 122 bp, Homo sapiens
ctacggtggctctgggcttgccttcaactctgccgactgcttggattacaaggagcctggcgccgctgctgcttcctccgcctggaaactcaacttcaactcccccgactgtctggactata

SEQ ID NO: 271940 - DNA, 122 bp, Homo sapiens
ctgccaagtctggactctctcactctcccaggaacccctgacatgcatccatttatttttcggaaattgttttcgattgcggcaagtagatatgcaactactgtgtatgaaatgactggctc

SEQ ID NO: 271941 - DNA, 122 bp, Homo sapiens
atgattgatgttcagaggcagtataaaagcactgggtttctccccaactgcttgtcacaccgacctgcaccatctctcgcctgcctgtggggtttctgtcaactagtcgtggagggaaggag

SEQ ID NO: 271942 - DNA, 122 bp, Homo sapiens
ggtattcgcagaagtcctgtgatgttttccccttctcggcaatttacacgcgcgcacacacgcgcgggcacaggcatgaatctctatccacgggaccgcttcacgcctccccaggagagaga

SEQ ID NO: 271943 - DNA, 122 bp, Homo sapiens
gccgcctagagggccagaggaggaagcgcggtcagaaaagacccccgagatgagtgtcttcgactggatcctgagccaggaccagtcctgccttgggggccactggctgagtggcgcaagag

SEQ ID NO: 271944 - DNA, 122 bp, Homo sapiens
ccaaggaagatgtacccatgtaggaaaacgtgtctctgctaactggaggcgccggctccacgctcggcttcatgtgctttgcatacggctctgcgctttcatgtccatctccatccagtggc

SEQ ID NO: 271945 - DNA, 122 bp, Homo sapiens
ctcaggtgatccacctgccttggcctcccagactgctgggattacaggtgtgagccactgcgcccagccgaatatagtcattttttatggcatactgatgactctgaggtacactacaggtg

SEQ ID NO: 271946 - DNA, 122 bp, Homo sapiens
aaatggcagggaagctctcactgtcttggagcgatcttctctccttgggtaggtgggagccggctgctggctctgcagaaatatctatagctgccgctgccaatactaggactagggctgtt

SEQ ID NO: 271947 - DNA, 122 bp, Homo sapiens
actacatcatccagcatggagacgtgaggacatccaggctcccagagctcagcctacagtcggagcacactgtgtgctcagggcaggtgtttttctggcgcactctctgcctttcccacttg

SEQ ID NO: 271948 - DNA, 122 bp, Homo sapiens
gcggctgctgcccctgctgcggactgtcctctgggccgcgttcctcggctcccctctgcgcgggggctccagcctccgccacgtagtctactggaactccagtaaccccaggtagccgggcc

SEQ ID NO: 271949 - DNA, 122 bp, Homo sapiens
gatgccttcagtctgaatggtcaagtattaaaagtgataaaatgcaaagaaatttcatgccgcagacacctcccccaagaactgcttgttgacagcaaagctgtggaacatgttccacaaca

SEQ ID NO: 271950 - DNA, 122 bp, Homo sapiens
tctgggtcccaggcccagattctcgcttcatctttcaggttctgcccagctaagcccacacgacgctgagttattaaacaaattctgccaaatggaagtatctgccaccaagcacatttcac

SEQ ID NO: 271951 - DNA, 122 bp, Homo sapiens
tcttccctactagaccacaagcttcttgaggtctgatctatctctgtcctgtgtggtactcgtaagagtcagtgtctagacttatgcttctcaaaagtgagaggttctccacccagcaacat

SEQ ID NO: 271952 - DNA, 122 bp, Homo sapiens
gattttcaaattggagtcttgtaccctttctatagaaaaagtcactggcttgtcactactcggagcatgaatttccacgttactagagtttctttgatctttagagagaaagtgtgaaatag

SEQ ID NO: 271953 - DNA, 122 bp, Homo sapiens
tagggagacacagatggctgggatccctcccctgtacccttctcactgccaggagaactacgtgtgaaggtattcaaggcagggagtatacattgctgtttcctgttgggcaatgctccttg

SEQ ID NO: 271954 - DNA, 122 bp, Homo sapiens
ggtcaccgcactgtcccccgccggggaaggcaccgtcacagctcccgcacagccggtcaccgcactgtcctccgccaggaaaggcaccatcacagctcctgcacagctggtcaccgcactgt

SEQ ID NO: 271955 - DNA, 122 bp, Homo sapiens
cttaaaaacagtggtgttacttagggttctggaaccagttgaaagcctggaaggagagcccgtgtgctttatgatgcctcaggacaaggtgggaggaaaggggaataaaaggcttgcctgtt

SEQ ID NO: 271956 - DNA, 122 bp, Homo sapiens
ggccctgagcggggataaaccgagcgggtgtctgtgggcgcagacgctgaaacctgacttcggggagaccgacggtcggagttcagctcgaccttggcccctgcatctgactctgttccgct

SEQ ID NO: 271957 - DNA, 122 bp, Homo sapiens
actaggggggaggaaggaggcggggtggggaggttgttggatttagagccgggcggagaccgctgagactcattcctcaggaacaagggtcgggtgtcaaggagaccttttcacaccagctc

SEQ ID NO: 271958 - DNA, 122 bp, Homo sapiens
agcttctgcccaggcctctaggcagcaccacccgggtagccaccaggtggcgctgtggaccgctgtgcgttctcccagatggagccctaggggttgggggacacaagggagcctttttctgt

SEQ ID NO: 271959 - DNA, 122 bp, Homo sapiens
agttgatggataaatcagtcctctaaagggaaagaaaatggatattggagggtgaggattcgattgcagaaacaaagtagagaattgactctaaaattaatagattgttggggattccaggc

SEQ ID NO: 271960 - DNA, 122 bp, Homo sapiens
tccttcccccgtaagcggctgcgccggaattttactgcagagaccattgcccgccgtagccgggcctttgagcagtttttgggtcacctgcaggcagtgcctgagctgcgccatgccccgga

SEQ ID NO: 271961 - DNA, 122 bp, Homo sapiens
ggcgacccactaaccccaaatagagatccttatagagtctaggccgccacctccttgagccggtggccttaaaacctagcctctggccctcaggcacccagaatgcgatcctgatgtgggag

SEQ ID NO: 271962 - DNA, 122 bp, Homo sapiens
cttattaggcagcacaaagcatgctagagaagggtagccaggagtgtaaagtacatgaagcggcagcaatatgaacactggatggaaaaggggctgggtaggaaagcaagggctgggactca

SEQ ID NO: 271963 - DNA, 122 bp, Homo sapiens
gaccttgtaagaatgtgaacgactcctcatggccgagttgcaggcacagcaggctggggccgggtggaaaccgagggccagcagggccggaacagcgcatctccgcggacggctccccatag

SEQ ID NO: 271964 - DNA, 122 bp, Homo sapiens
ggctctgtgcatggcgtggtctgcaggacctggacagcccctgccccggggcatttgtgtcggccaccttggtttgcccccctgtccaaacgctgccagttctcgtcctccagggcactccg

SEQ ID NO: 271965 - DNA, 122 bp, Homo sapiens
gtaatgatctaaaacacacgtctgctcatgagacccgcatcccacccccgatgctggggccgctcttggattttcatgcctgctgccagcacccagggggagctccggaaatgtctgctggg

SEQ ID NO: 271966 - DNA, 122 bp, Homo sapiens
ggtggcagttcagggtcgaggagtccgcaccctcgggcgggaacacccggtgccctttatcgtatgggggaaatagagaccaggggccagttgttccttaaagggacctaagggagctttgc

SEQ ID NO: 271967 - DNA, 122 bp, Homo sapiens
tcccccttgctttctctacaatgggcacattgctcccacgacctgctgggtcaaaggcaccgcagtcaggggtagctggggagcaggagttgcgggggtggggcggctcagggcaggaagcc

SEQ ID NO: 271968 - DNA, 122 bp, Homo sapiens
acttggctttctgatggtggccgcgtgttgggcttcagtagcccctggagcccatctactcgaaataaatatttctcggtagccatggaagttggagctgagaagcccgggcgggggtgcct

SEQ ID NO: 271969 - DNA, 122 bp, Homo sapiens
tggcctgtccgtcctcccaccgcggtgccgcccaggccttcccactgcagggctggctaacggtgcatggaagagactcgagtccgtgttgtgtcctcatagcccaccgaggaggcagcagt

SEQ ID NO: 271970 - DNA, 122 bp, Homo sapiens
tgtgccagaaaccctgcaattctaagcagctcccaaataatgtcaatgctgctactggtccgtgaaggatctagggaagaaatcagcagactttttttctggaaagggtgagatagtaaata

SEQ ID NO: 271971 - DNA, 122 bp, Homo sapiens
cgccaaacacttgatgtcatcgtgcggggagggggtgggggaggagaacgccctgcccaccggagggctggcgccccagatcctaggtgagttgtagccttgacttcagcagcactctgcgg

SEQ ID NO: 271972 - DNA, 122 bp, Homo sapiens
agctcgttgtggtgggcggggctttctccaggtgggacccatcgcctaggcaggtttccccggccaccctcttccttctcccccactccctggcgcccaccactctgctggtggggaggtgt

SEQ ID NO: 271973 - DNA, 122 bp, Homo sapiens
tatttttcagtttgcctggagcaggccacgcaaattcccttcccttgaaggcccaaggagcgtctggtagattgctgattctctgcccatcaccgcttctggaagtgagtgaaggacacctt

SEQ ID NO: 271974 - DNA, 122 bp, Homo sapiens
ggggggtgactcatgctgcgggagctccgagaatgcaggaggcagctgtccaactgccaacgcccgggtgaccttcctaggagagtgggcgccctctccccagctctgcctcagggcccacc

SEQ ID NO: 271975 - DNA, 122 bp, Homo sapiens
tgagtcagacacgggtttcgcagccatgtttcctggctccgaggacacgggtggcaggcccgttgcagcccagagccactggtccctacagggcgccgccacaccagcaggaaggaggatgg

SEQ ID NO: 271976 - DNA, 122 bp, Homo sapiens
tttcagactttgcactaggctatgagggcagggggtggcgggcagggcaacgtcccataccgtctaaatcgcgcccatacgctgccacctgggaaagggggcagaaaggggcggcggtgctc

SEQ ID NO: 271977 - DNA, 122 bp, Homo sapiens
acgccagctctcacagacacccttaaccagattattggacagaccaaagcaccctgctcacgccagcaggtcagaaaaacgaaggaaagtctgagattgtagtgctttaggggaagggtcac

SEQ ID NO: 271978 - DNA, 122 bp, Homo sapiens
ccgagcatcagtggtgctctgaagcacagtgcaggccacaaaaactaccagggctctgaacgctagaaatccccacagggctcaaagaggggcaggaggtagcagccagctgggaggtggat

SEQ ID NO: 271979 - DNA, 122 bp, Homo sapiens
acctcctgggcggcatctctagatccccgaccctgtcctggcagacgccgagaagcgtagcgctcaccacacccgcgcgctactgggttccaggccgccgcgctcttagtgagcagcctgcg

SEQ ID NO: 271980 - DNA, 122 bp, Homo sapiens
cagggaggggacccggtgtgcgatgcgcgggggctgggctagcaagggcagtggcgcgagcgggacgcaggatacaaagcccggagccacgaggctggcggcggggcgggggccggagcgat

SEQ ID NO: 271981 - DNA, 122 bp, Homo sapiens
gcaagaagactgaaaggcccaaatgatgctgtgctcaagtccaattactatgaaattccacgggagttactggatatgaatctaaacaaatgaaagatgttaaaggcagcagtgaactggga

SEQ ID NO: 271982 - DNA, 122 bp, Homo sapiens
taattgacttgtgatgagaccctgcatccatgcttttaaaagctttgcggatcattctaacgtgtagccagggttgagactgaggatgaccaccttgagaagaaagacatcagatatctctg

SEQ ID NO: 271983 - DNA, 122 bp, Homo sapiens
caggccccgcctgtgagaccctggagctcattttcctgatcaagcttacattgtgtccaacgatttggccagcgctaacactccacgattctaaaacgcaagcctaggtcttctgtctgtac

SEQ ID NO: 271984 - DNA, 122 bp, Homo sapiens
gccacctgtaaaagcccaagcaccctgaagctgccatgctgggaggaagcccaggtcacacggggaggctacatgcagggtctccattcacagtcccagctgagcccaggttttgggccctc

SEQ ID NO: 271985 - DNA, 122 bp, Homo sapiens
gcttagagctgggggaacctcaggaaatgataaggtccgacctctcatttcctgttcttccgaaacagcaatgagtatggtatgtgagtcagccaggtggtgggacccacagaggtcccaag

SEQ ID NO: 271986 - DNA, 122 bp, Homo sapiens
tagggtcccgggcttggggcttggggacgggccgggcctagggttcggcgggctggggtccgcttgcggctcaaggaagggcggggagccccaggaactggggacgtgcgggctgagtcgtg

SEQ ID NO: 271987 - DNA, 122 bp, Homo sapiens
ccagcagggaaagagttaccattgggggccatggcaggcatcaccagggacatcttgggccgggaggtcttgttgtggctgatggctgggagcagcaggtggtcctggggaacagatgggcc

SEQ ID NO: 271988 - DNA, 122 bp, Homo sapiens
tcagatccctgctgaccaggtcaccccacagaccactgctacaagagccaccactgaatgcgctctctctgaacaggccgccactgattaggttccactgaccaggctgcgctgaccagggc

SEQ ID NO: 271989 - DNA, 122 bp, Homo sapiens
ataagtttacaatcatcatgcttcttaaaataatgcctcaaaccaacatttttgagaatacggctgttaaaaaaagctgccagcaaattggagccgggactgttttctgccttgcacttcat

SEQ ID NO: 271990 - DNA, 122 bp, Homo sapiens
ttagggccccaaataggaaagatatactgaataataattaagtaggggaacattctctaccggataacaagactttgtacaagctacagtaattaagacaggatgaaaaaaaaaaaaaagac

SEQ ID NO: 271991 - DNA, 122 bp, Homo sapiens
gatgatccacccacctcggcctcccaaagctctgggattacaggcataagccaccatacccgactgcattttggcttttataggaaagctaaagacagtacagagacttcctacctaccttt

SEQ ID NO: 271992 - DNA, 122 bp, Homo sapiens
tcctgggttggtgttgtagggcatttatttatttgacttgacggcgcctttcaaagcttgcgaggatcccttcctcttcctcgtgtgcatctgccaagcctgtgccccgcgcctcgcgggtg

SEQ ID NO: 271993 - DNA, 122 bp, Homo sapiens
gctctggtgaaaatgggaagggggatgggggctgaataggctactttgtgatgagactcccgtccctgtgacacttcagggtcctctggggatctgtcattcctcttgcaagctctcttgtt

SEQ ID NO: 271994 - DNA, 122 bp, Homo sapiens
caaattgtcattgccatcgaatttgcccttggtggagatctgtgcaacagaaatgcacatcgcactccaaagtcagaaaatcttttatttttgacaaacccccaagtctcaattgtcttaac

SEQ ID NO: 271995 - DNA, 122 bp, Homo sapiens
ttaagatcctctgagccttgggatcagaaaccctcttttccaggtgactcagtaataagacgtgactcagtaataagacggcccctcccttcctgctccttagagatgaggcctttctaaag

SEQ ID NO: 271996 - DNA, 122 bp, Homo sapiens
tccatctcaaaaaaaaaaaaaaaaaaaaaaaaaaaagtcccgcgtgtgtgatacgccaggcggtgcacccaactgacaagtcaggcacgtcctggtgctcacagacccctgctctgaagttt

SEQ ID NO: 271997 - DNA, 122 bp, Homo sapiens
tcacacgccctcagccatacctgcccactgcccggcggtggaggcgcgtctggaaccccccggctcgccccgcgcctccccacccggctcccagccctctgccgagacgctccgcctccagc

SEQ ID NO: 271998 - DNA, 122 bp, Homo sapiens
gagttcagccgcgctgccgagaagctttacctcgctgaccctatgaaggtaaatcgctggcggggccgctgctttgggccccagcccaggatgtcttcccgccatccactcggcccctggag

SEQ ID NO: 271999 - DNA, 122 bp, Homo sapiens
acactccacggcagcattcctgctttgacaacacgtttcccacttggagtgaaatcagtccgtgaaaatctctgcctgggactgcctgctctctgcccaagtgcagcagccgcagaacaagc

SEQ ID NO: 272000 - DNA, 122 bp, Homo sapiens
ttttgaggcttgatgctgcactctccaatctcgaaactgggtattatctgtcatcagcatcgtaagagaaagggtagccatcctagacaacagaaggcgaaatggagcatgggaggtcaaac

SEQ ID NO: 272001 - DNA, 122 bp, Homo sapiens
gcagggagaccggccttgtgcggaccccctcagctcagggttctgaggcctgcaggagcccggggcagcgccatcacggcggtgactcctaaataggcttcagcagatgggggaagggcgaa

SEQ ID NO: 272002 - DNA, 122 bp, Homo sapiens
taaacagtaataagctctctgtgtctttcggcctcatatagatagctctgaccaggtgttcgaaaaacctacaatccagaaacatcaacaagtgcatacaaaaaggcctggaaaaaagtgtt

SEQ ID NO: 272003 - DNA, 122 bp, Homo sapiens
agtgacatttgtaaagccaaacacacaccataggtgtctactacatgtttatttctgcctcggacttccttccccgtccactctgccgctctctgtggactgccgcagatctctgaacttcc

SEQ ID NO: 272004 - DNA, 122 bp, Homo sapiens
gaaaattttcgaactttaattttgccctgtgggaccctgggcaagatacttgcctctggtcgtcttggctgcctcccttataaagcagtgcacacgaaccagatagcttctacggcctcctg

SEQ ID NO: 272005 - DNA, 122 bp, Homo sapiens
ggccgccttgcccgatggaggcgctggtgggcagagcgcgggcaggcgtgggccaggaggcgggggcggccggaaggggggggccggggccggccgggcctcacgcagctccgccggagagc

SEQ ID NO: 272006 - DNA, 122 bp, Homo sapiens
gaggggccgaagctggctggtgggcggcgtgcgagggtgagggactgtcctcgggaggggcgtggccagacgggggtgctgggtgtcaggggcgtggccagcttctggggctgaggcgtgag

SEQ ID NO: 272007 - DNA, 122 bp, Homo sapiens
gggaaaggactgggtcagagagctgtgccagggccggtccgggtccagcctgaggggccccgagaccctgacgcgagggggccagcgcgattgcggggcgccgggtcccccaaggaggtgca

SEQ ID NO: 272008 - DNA, 122 bp, Homo sapiens
tcataagatgttgattcaaatctggtacaagtactgtctctattatttaataatatagaacgttgtacagacattacagtatagaacactgctacagatttagggatcaagggaggtcaaag

SEQ ID NO: 272009 - DNA, 122 bp, Homo sapiens
aaaggctgataccagggctggggctgtaaagtacaagatgaacctgttgtgccagagatgcggaagtgctcaaaaaatgataggaactggtcaaaggtccacagctgccagcttgaagggtc

SEQ ID NO: 272010 - DNA, 122 bp, Homo sapiens
tgacctggggcaccccggactttcttaatcgtagctccacccactcgagccgggtgccttcgcgtttcccgtttttaaatgagatagtggcacacccggtggcatcctcccacccgggctct

SEQ ID NO: 272011 - DNA, 122 bp, Homo sapiens
tcccacacgcccgcgccccacttacatccagcaccgaggccaggtgccgggttcggctggcgagttccttcagctgcacgttccgctccttgagcgaggcgatctcctcctgtttctgggtc

SEQ ID NO: 272012 - DNA, 122 bp, Homo sapiens
cctcgaagagctggtagtcgtcggtgaaacgggtgcaggtggcggtggtggccatgctggcgggcgggcggacgcggcggtgcagcccgcgccgacgtcggtgcacagtcaccgccgcccgg

SEQ ID NO: 272013 - DNA, 122 bp, Homo sapiens
ctggaccgtttcagggagaactctgcaacagaggaccatagagaatggcgtcccccattccgtgacatcccaagaccttgaataaactcagacatacccaggtggtactcgggatcctcctc

SEQ ID NO: 272014 - DNA, 122 bp, Homo sapiens
ggcgcaggatcgcaggcgcgcagcccgcccggcctcaggagcagggcctgtctggccgtgcggccccacttaatcttaatagcaaataaaactcagcagtatgctgtggtatattctataat

SEQ ID NO: 272015 - DNA, 122 bp, Homo sapiens
agagtcttttgggattcaggaagcaagggtgtctcaacagcagggcgctagggagggtctcgggggcaagaggctgggtacatttgctcgcatagcgtggcccagagaggcagctgatgagg

SEQ ID NO: 272016 - DNA, 122 bp, Homo sapiens
gaactcatgatggttctcctaggatggggctgtcccttccgcttgctgagacatgaaggacgggaagagacccccggccctcaccgccgcatcgcctgccttcctctgctgctccttagcag

SEQ ID NO: 272017 - DNA, 122 bp, Homo sapiens
accttctcctgcacaaagctaagcagctccgtggtgttggccatccacagcatgagtggccgcagctccacagacacagcttcaggagtcaggggcacctcggggaccccctcagggtggct

SEQ ID NO: 272018 - DNA, 122 bp, Homo sapiens
atttgaggtaattatcagttctgcaatttgtgtgcgtttgcattagaacgtaggcgttcccggtccacatcccgggagagagaacgcaggcgccgagaaaggtccaggtctcgggagagaga

SEQ ID NO: 272019 - DNA, 122 bp, Homo sapiens
agtcttaagtaggcagaacagtttcgattcgattcatttccacttgcagtgaaacccatccgcctcttcttcccccggaggatctttactgagagcaccacattttgagttttggggtccct

SEQ ID NO: 272020 - DNA, 122 bp, Homo sapiens
caggtggggaggcctctgggctgcatgtgccgcttcctgtgcagggcaaggtgggcagagcgcaagaaggcatggtggcaccaatggccctgaaatggccagtggcccctgtgcttgtggtg

SEQ ID NO: 272021 - DNA, 122 bp, Homo sapiens
tgtttaaggatgggcgcgtgccagcgttatagtagttagaggttcataaatctgttccatcggctgggtgcagtggttcatgcctgtaatcccagcactttgggaggccaaggtgggtggat

SEQ ID NO: 272022 - DNA, 122 bp, Homo sapiens
ggcctctaagggcggggggcagggctctctgtgtggcccttctcaggagagagccgcaaacgcattaagaaaacacgtaacagatgggcacggtggctcacgcctgtgatcccagcactttg

SEQ ID NO: 272023 - DNA, 122 bp, Homo sapiens
aattactggctagctactggctatgttgcaggcattttatacacacagcctcattttcaacgaaaccatccctgcagaaatctcaggtgagccagtgactgaggggaagctgcaggctctct

SEQ ID NO: 272024 - DNA, 122 bp, Homo sapiens
agcctccgtttcctcgaccggaattcgtgagctattaaacatgggccctagcggggcccacgccctgtcttcctttgctgacaaggctccgcggggtagtgggcgggagacaagggtctcag

SEQ ID NO: 272025 - DNA, 122 bp, Homo sapiens
gacatcaccgaggaaaaactaggattcacttttctcctttgacttctctatagagctgcacgtttccttttttagcttcttttcattaagactactatatagtttttaaacttaatttctta

SEQ ID NO: 272026 - DNA, 122 bp, Homo sapiens
tcgaaggccctcggggactcaggccgggggccggtccaggaaggagcgagtcccaccagtcgcagggcgctccgatccgcagcggcacctccacccacggctccgggagagccgcccagagc

SEQ ID NO: 272027 - DNA, 122 bp, Homo sapiens
agcccctgggtgcgctcaggagtcatacacagaggaccaacctgtttgcctggacacctgcgtgtcctcccctggatggcagaagcctttgatggctctccaggtgctgctaccattgtgca

SEQ ID NO: 272028 - DNA, 122 bp, Homo sapiens
ggataatctgcagctgctgctcaatggtcgaggtgatgttcacgtcatctgggatgtggacgtagcggacattgcggcctgtcacaaagaggtcatccagcttgacctgatgcccccaacgg

SEQ ID NO: 272029 - DNA, 122 bp, Homo sapiens
aggcccttttccctgaggagtgggcattctgggccagccggcgctggcttcgtgcctccacgtgggccagccccagctgctccgtgtttcctggcgttggcaatttactgtgctgctgagtg

SEQ ID NO: 272030 - DNA, 122 bp, Homo sapiens
gtcatgactggtggaggccagggccgctgcagtgcctctgcagtgcccagcacggccccacggtccagtgcccagagggggagacccagcccatcccagagtggtcagccctaatgtcagcc

SEQ ID NO: 272031 - DNA, 122 bp, Homo sapiens
cttccacagcccaaggtgccagagttcccagggcaagcagcaccaggaaggggaagaggccgctggacttcatggtgaaggcaggagtgactctgatggccaatgccaaacctcactattta

SEQ ID NO: 272032 - DNA, 122 bp, Homo sapiens
aaaaatagaaaacaaataaaaatcagtaccactgtgattttgctaaactttccaaacttacgctatcatgaagttttttccatttgagtattgctataaccagttttgattcaaacaaaata

SEQ ID NO: 272033 - DNA, 122 bp, Homo sapiens
gacctaaggtaaccacaggactcctggcccagtgggacccaaagcgaaaagccctggacgcgccgagggcgctctgcttaagactgagaaccgaaatgcttcctgaattaggatcattgaga

SEQ ID NO: 272034 - DNA, 122 bp, Homo sapiens
tcggcgcgaccctggtcctcaatggctcgtcgcgagctgcgctagctgctctctcggcagcgggttccccaggacacacccagtccccaccccccgagagctggcggccagctcaggatgcc

SEQ ID NO: 272035 - DNA, 122 bp, Homo sapiens
agagacttcagaatagaccgtcatggactgtcatcacataggtgaggttgtgtgatgcaacggggatttactgtgggttatctcatcataggtccatgtgaagaccccctctgcagcacaca

SEQ ID NO: 272036 - DNA, 122 bp, Homo sapiens
ggctctgctccagcccacaggggctaaaggggcgggtagggagtgtgtagggagcgtgtacgtggctttgtgtccttggctcctccagactctcacatgtgcgggcaccatatacttctgct

SEQ ID NO: 272037 - DNA, 122 bp, Homo sapiens
gtgctgtacgtgcaattcagggaccaccagcagtggttactgatgggtactcagaaataccgttttgaaacaggcagctgttatcctagtgctattcggccgatacatcctgcgttaaattc

SEQ ID NO: 272038 - DNA, 122 bp, Homo sapiens
ccgcccctttccgcaggcgcagtgagcgtcgacccgcccctccccgcccgcttccgcaggcgcagtaggacccgccctggtccgcgcctgccccgttgctttcctcaggctctaaggcccgc

SEQ ID NO: 272039 - DNA, 122 bp, Homo sapiens
ctgcgagctggatgtccaggctgcgggcgctgctgggcctcgggctgctggttgcgggctcgcgcgtgccgcggatcaaaagccagaccatcgcctgtcgctcgggacccacctggtgggga

SEQ ID NO: 272040 - DNA, 122 bp, Homo sapiens
accacctccactgccacattctgggagccacgccacatccaccctgttcaccaccacctccgacacgctcccagcctgcagctgccgcacccgcgcctggagcacctccagcagctccacgt

SEQ ID NO: 272041 - DNA, 122 bp, Homo sapiens
ccacggctgctcattggatgatccaggatgggtccttggcaattttcgggttctcgggtccgaggatggccaggccgtgtgtgctcttcccagtgccgaggtatctgagaggaaggcaggcg

SEQ ID NO: 272042 - DNA, 122 bp, Homo sapiens
ctcctagtgcaaggagtggaaaatgagggacagggaggggaagcattggtagaaggtgtacggaaccttcttggagttgagctttgatcttgaggaaaactggcagctgggttccaccaaac

SEQ ID NO: 272043 - DNA, 122 bp, Homo sapiens
aaagactcaggtttgacaaaaaggcgaagtcggagaaatagccagtcaagcgacttgcagcgaaatttcttcagttgtggtagaagaaacagaagcatcaccttcatcccatgataaagaca

SEQ ID NO: 272044 - DNA, 122 bp, Homo sapiens
ttggccgcttccaggagcagaaaagcagcagccagcgcacgacagaccataatactctcccgctgacgtcagttctcctccccctcccggcgctctcgctccctcccgcggcccccctcccg

SEQ ID NO: 272045 - DNA, 122 bp, Homo sapiens
attactacaaagaatgcacctaagtgctgagaaggcaagctgtggtggggcaatcagaggcgggcggcgccctccaggaagacttccgggaggagcaactttaccaggggaagatattgtca

SEQ ID NO: 272046 - DNA, 122 bp, Homo sapiens
agactcagctgcgcaagggatcagatcatcagcactgcctttgcatcgatgcaatcagaccgattgtcaccggtcagaaaagccccagaagcgccacactaacacgccccatgttgcaaccg

SEQ ID NO: 272047 - DNA, 122 bp, Homo sapiens
ccccagctctccaaacgtggcagcctcccagcctgcttctggcgcgggaagaatgtgtggcgctcccagggatgttggcagcggccccgctgcttggcttcaaaatcagaaccatctggtgg

SEQ ID NO: 272048 - DNA, 122 bp, Homo sapiens
ttaggagaaagtttgtttcctacagagactgcagttggcagctgcagccccagtcggttgcgagaaaagctccccacctggggaagcgaggccgctcccgtgtgcgctcggcggggaggacg

SEQ ID NO: 272049 - DNA, 122 bp, Homo sapiens
cgggagtgcttcttcgcccgcgcgctctcctccgcagcctttgcaagtgccctacacagccgcccctgccaggtaccttgccagggcaggatggttcactctcacttgaattatggatgcct

SEQ ID NO: 272050 - DNA, 122 bp, Homo sapiens
cacaggcgcttaaagaatgcctgctgaatgcagtgaatgtttctggtcagtaaaacgggacgaaggtagaatggagctctgctcgcccaacgagataaaccaaaaactgagaagggctcctc

SEQ ID NO: 272051 - DNA, 122 bp, Homo sapiens
tgtcctcagttgataaggaactggataaacagatcgtggtacatccacacagtgggacagcggtcagcagcccagaagagcacacagcatgactgacgccgcgccatggatgaagcttttgt

SEQ ID NO: 272052 - DNA, 122 bp, Homo sapiens
gcgccggcggttttatctccgggagggggtccacctattgacggtggcggcgcagtgcaccgcgccctgcagcacgccaatgcggaaccgcgcgggagggggcggggcgcggacgcgcgcgg

SEQ ID NO: 272053 - DNA, 122 bp, Homo sapiens
accacccctcctttactctcggcggtgctaccatggcaactggtgatgtcagggcggtagcgtcgtaacatcgcgcgagaactctctgcgcggttgactacgcttatcaatccatcgtattc

SEQ ID NO: 272054 - DNA, 122 bp, Homo sapiens
gcgccgcctgcgggagccgactcgttccaggggaggcagcgccacctgctggagtgtgcgcgtctgcgcaccgggccgggttccgcaggtcctggggctgcgcccgagacccccgaccgagt

SEQ ID NO: 272055 - DNA, 122 bp, Homo sapiens
ctcaagtgattcgcccgcctcggcctcccaaagtgctgggattacaggagtgagctaccgcgcccggcagaaataaacagagcagtgaaaatttttaattgcccaaagtgcagattcccagc

SEQ ID NO: 272056 - DNA, 122 bp, Homo sapiens
gccgcggtcctggggcggggccaggcgtcggtggccgtgactggagactgttactgagggcggcccgggcagtaagcagtctagagccaaggtgccggcgcgctgtccgggcggggtgcccc

SEQ ID NO: 272057 - DNA, 122 bp, Homo sapiens
gggccgggttcccaggcaatagccagggcgccccgaggcacgccacgcctccgcttgccgcgcgcagaactgcctcagcaagactctcgcagtcccctcggctgggccccaaaactcgagtc

SEQ ID NO: 272058 - DNA, 122 bp, Homo sapiens
agcaagtaataaagcacacctactccaaaatacaatacaaatttccccaggcaacaaatgcgtaaagaaaatattgctgatttttctattatctatcctgcttcttccttgtataaccatgg

SEQ ID NO: 272059 - DNA, 122 bp, Homo sapiens
tgcgtgggtctatggcctgggggcctggcaaatgtcaacagcaggcggtgggtggggccacgagaggaacaaacagcggtgggtggggccgtggggctcaagggcggagcaaacgtcagcag

SEQ ID NO: 272060 - DNA, 122 bp, Homo sapiens
tgctgtccgctgccaggcccggcaggaggccaaggtcaagcccaaggagaggaaccagggcgagaacaagtggttctcaggaactgcggttttggatatcttttgtttcaatcattaaatat

SEQ ID NO: 272061 - DNA, 122 bp, Homo sapiens
atcttcctggagagtaacacttccacctcccagtagaatggctagacgtttaatttccatcgtcccagagccgcgctctccagtgcatcctcaccactgcctgcagctggtttcctgcccca

SEQ ID NO: 272062 - DNA, 122 bp, Homo sapiens
cgtgctgattcaagctttgattggcagagccacccggtgactgacagggggtctccatggcgcccgcgccgccaatccgcccaccccaatagcggagccagctcgcctgccggcgtgcctga

SEQ ID NO: 272063 - DNA, 122 bp, Homo sapiens
cttcaagtcagggtctgtgcagtctgtaaccagccttggcaccaccatttctgtgcaggccgactgaatccaactgacagtccctgaaaagagcaaaggctctcttctccggtcatgcggga

SEQ ID NO: 272064 - DNA, 122 bp, Homo sapiens
ggaatatttaaaagaacagccgttggacacagctgtgctgtgacaccttcttgctaaacacgtgccctgttatctttcttgagatgctcgcctgccgtttggtaaaagctgtatgcgttgtg

SEQ ID NO: 272065 - DNA, 122 bp, Homo sapiens
ccgggcgcaaatacgaggaaggaaaactccagggaagcattgagagtagcctgagaaattcgtggaggcagagtaggtgatagctgtgtcctgatttttcagggttgaatactcatgaatac

SEQ ID NO: 272066 - DNA, 122 bp, Homo sapiens
ccaggaaaactttcagcactccgcgagtttcctcataaatgaggccagaaatacgcttgacgccgccgcggcgagccaggcggcggatagcgggcttggtgattccttggatattgtcacgc

SEQ ID NO: 272067 - DNA, 122 bp, Homo sapiens
ttttgagagctcctacaccagcttagcttgggagcccctacgcaacaaccatccaggtcccggaagatgccagctctgcctggcgcccgcagcccagatctcctgcccggagtacgggggcg

SEQ ID NO: 272068 - DNA, 122 bp, Homo sapiens
gttttggctcctgctttaatctcagctttgatgccacttaggcctttcctagctgattcccgccctcacccctgttacccgccatctaattacagctctctaaatgtgcttcaacagcacct

SEQ ID NO: 272069 - DNA, 122 bp, Homo sapiens
aggagggccttgtgtgtctgccaagggttggctcaccatcctgcaggccaaggcagctttcgggtgaagagtgcttcggtcacctttaacatgggtgttttgggctgcacggtgggctggaa

SEQ ID NO: 272070 - DNA, 122 bp, Homo sapiens
acacacaaacacttgcacatttgcacacacttgcacattcatgtgacatgtgcacacatacggacatgcgcagacatgcacgtgtgtgcacatgccgggcagtgtgaaggtgatagattatt

SEQ ID NO: 272071 - DNA, 122 bp, Homo sapiens
ggacggggctcaactaaccaactgggatctgcagatctcaccgtatgtccttggggtgtgcgccaaccccactctgccccagattttcctgggccagacccatggtctgctctgaccacatc

SEQ ID NO: 272072 - DNA, 122 bp, Homo sapiens
ccgctttgccagggggcttctgttttccaggataagtggccggtgccaggaggtgaaggccgtcctggagaaaactgacgagccgggaaaatacacggccggtgagtcccggggcctgagcc

SEQ ID NO: 272073 - DNA, 122 bp, Homo sapiens
agcaggacaagccgcgacaaaaccccacagacaccgagttaaagaacgaagtgctttattcggctgggagcttcggcaagactcacgtctccaaaaacgcagctcccgagtgagcaattcct

SEQ ID NO: 272074 - DNA, 122 bp, Homo sapiens
acggaacaactcagcctctttcctcagggagtaagtctaagacctggcttcgagtacattcggtgaaagaaagctcattgggagccgcaattttggctagctagtgaaaaaaatcaccgaat

SEQ ID NO: 272075 - DNA, 122 bp, Homo sapiens
agcccgcccaaggacccagctcccgctcaccttattgaagatcagcccgggcggctcccgcggctccgtgcaggccccctctggggttgcctccaccacctcctgggcctccgtggcctcct

SEQ ID NO: 272076 - DNA, 122 bp, Homo sapiens
gccgtgaggagaggtgattcctgggagagcgaaggacagtgccggtggaaacctccttttcggctgtcacgtttactggtcggacagtaataactggactgactccttcacctgaagtccca

SEQ ID NO: 272077 - DNA, 122 bp, Homo sapiens
tcccgcccctgccctctcgatccagcctcccgccccctccccgcctgtccctcccggccccgccccgcctcccgccccaacctagtgcccgacaggaaacctcccacctggcactgccccca

SEQ ID NO: 272078 - DNA, 122 bp, Homo sapiens
catgcccaccgcagtggcccagagcccctgtccggaccgctaacaagttgcttagcaacccgccgcccggccctcggccaccgctagagggcgagcgggcggggagacgtgcacgcgcgcgc

SEQ ID NO: 272079 - DNA, 122 bp, Homo sapiens
ctccccgaggcaccgcttccctgtgcggcgctgcagaggggccctcagtgtggcactcctcgtcaaagaaaaataaaggctagaactgcaccccggatcacgcgctttctttggggggaaag

SEQ ID NO: 272080 - DNA, 122 bp, Homo sapiens
gaagctcaggaccatcggcttcacgtgcctccgcaatctcgtgaggtgaggaaccacctccgtccccactccatgtcctaggaaaccgagacctgagaggagggggacttgctcaaggtcac

SEQ ID NO: 272081 - DNA, 122 bp, Homo sapiens
ccgcttccggttaaagagacccgaggggtcctgggggcgccgaggcggctgacagggcggcggccgcgaccttcccgtagccggtcgagaaatttgaccttcctctcgctgggaagtgattc

SEQ ID NO: 272082 - DNA, 122 bp, Homo sapiens
tcttaaatgctttcagctgggtgtttccatagtgctgtcgccatggcacccagctaagcacgcagccggtggctcagcggcgggcggggactggagggggccagccactgggactgcctgcc

SEQ ID NO: 272083 - DNA, 122 bp, Homo sapiens
tggatgctccgaatggagcctttcagagctttaaccacgggactacatctcccagaattccgctcgccggatcccaccgcactgaagggactgcgcgtgcgcgagtcaggtgacgacccgcc

SEQ ID NO: 272084 - DNA, 122 bp, Homo sapiens
gctccccggcgctctgggaagtcgtcgccgggagcggttagacggcgctcccaggaggagcggcggggtcgcgcgagtgcagacgccagcgccggccccggggtcgcgtgtctggcggggtc

SEQ ID NO: 272085 - DNA, 122 bp, Homo sapiens
ccaggagcagctgtgggcggggccacgcgcagggggcgggtctggggcggtgcggtccttcggccccgcccaccctccgggggtggggaaaggactccaaccttcgcttcccgcgcggcaga

SEQ ID NO: 272086 - DNA, 122 bp, Homo sapiens
cctgtgctcggtgaagggtgccttaaccattgtccgcatcctggcagcagcaggcactcacgaaggctgatatgcacctcattaaacaaatcagttgcttctccagtgactgccagctcagc

SEQ ID NO: 272087 - DNA, 122 bp, Homo sapiens
tgacggggctgctggagtttgcagagacacggaggaggagagagcctgtgctttgcctgccgccgcggctgggggagatctggcttttgcaacagcccaccccctttgagatcactctggcc

SEQ ID NO: 272088 - DNA, 122 bp, Homo sapiens
gtgcaagttttttttttttttttttttgaaagatctctgaaggccaggaattcaataaggcggaacacaccccactgaaccaagcagggcttgagtttgcagattattttccgaccagaagg

SEQ ID NO: 272089 - DNA, 122 bp, Homo sapiens
ccgaagcagtaaaactagaagaaattggacgaaaatgggggggaaaaaagggacaaagctcgagtctcctgaattttgtgcactgctactcggtggactatttcagttcctgatcttgtggt

SEQ ID NO: 272090 - DNA, 122 bp, Homo sapiens
cgatgtctgcatggagctggcatttgactggcaattgcccatcttgagcagggttttcatcgagggctcggagctttagaggtgcagcgtcactcaggttcaaggtgctcagcaactctgtg

SEQ ID NO: 272091 - DNA, 122 bp, Homo sapiens
tggtgagcctcggagggatcctcctccctgctagaatatgcatgatcctccgcgagtcttcgcccgccaggagcagggacgcgtccgagccaacacggggcgcgcgcccagacgcactttcc

SEQ ID NO: 272092 - DNA, 122 bp, Homo sapiens
acttggggatcgggcgcttgcccagcccgcgtcccagcgcggccacatggctccactccgcgcgctgctgtcctacctgctgcctttgcactgtgcgctctgcgccgccgcgggcagccgga

SEQ ID NO: 272093 - DNA, 122 bp, Homo sapiens
tccggcagcctggttaggggtggaaccaggaaagcgcaggcgtagcaattgctgcttactcgtaggtaggaggaggagtttctcagacctaggtgatggaggaagactgggaggcgctaaaa

SEQ ID NO: 272094 - DNA, 122 bp, Homo sapiens
ttagtattgatcttacccatcccagattcccaatggcgaagattgagaaaaacgctcccacgatggaaaaaaagccagaactgtttaacatcatggaagtagatggagtccctacgttgata

SEQ ID NO: 272095 - DNA, 122 bp, Homo sapiens
tagaagcccatctaaatatcaggtaagtatcaggggggttatggaaaatgctttggtacccgaaagatactgagtgaatgctatttgaaggaccaacaggagacagtgatggtgcaggggaa

SEQ ID NO: 272096 - DNA, 122 bp, Homo sapiens
ttctgattggagcagaacacttcagaagtatttttcaacgtatactgagaagttgctctgcgacagatgatatgccaagcagctgggaagcaaagatgaggaagacatgaccctgtcctgga

SEQ ID NO: 272097 - DNA, 122 bp, Homo sapiens
cagcgtgggagactgacggcctggcctggagtggcggccggggacgggctagagggcccacgggggtgagagggaccggggaacggtctgcgggctggctctgcagccatgcaaaagggcag

SEQ ID NO: 272098 - DNA, 122 bp, Homo sapiens
cgtcgtggctgtccctgacccagagcactgcgcccagaggctgcaccaagagcactgcaccgagaacactgcaccgagagcactgcacagagagcactgcacccagaggctgcaccaagagc

SEQ ID NO: 272099 - DNA, 122 bp, Homo sapiens
ccgtcctctctaggctgtctttggcgtggagggcccctgcggaatcgtggtctatatccccgatacgtattctgcctcactggtctaccttgttctcctgcaccctggttgtcagcaccctc

SEQ ID NO: 272100 - DNA, 122 bp, Homo sapiens
cccccctctcccgtgcccgcccgaagaaccaggcgccccagtgccctctccgggagaaagcgtgcccctgtcggcgagcctgttgccaacgtatggttccaagttcccaagagcagaggcca

SEQ ID NO: 272101 - DNA, 122 bp, Homo sapiens
tgagtggagaattcaggccggcctgcagagagggtcgtcctgccctgaaagggtcgttctcgagctgtgttgcccagtgaagtttccgctgtggcagaaatgcccagtgactatgcgtggct

SEQ ID NO: 272102 - DNA, 122 bp, Homo sapiens
tggatgtaaataaccgaggagcttgacatgactagagaaaagcgtgtccaagtgtgaaaacgggctatgtcctaagtacactaaggtctgggcagagcagaagtccttgggcagatctttca

SEQ ID NO: 272103 - DNA, 122 bp, Homo sapiens
aatgacagatatctcccctgaagatcaattttttaaataagtacaaatctctttcttaatcggggtgactactggactaaagtaaatgcaggtttgtgacgatattctcaagggttgcattt

SEQ ID NO: 272104 - DNA, 122 bp, Homo sapiens
actttctccctatttcccgcgatccttcctttttctatcaccgacccgtctcgcaggcagcggtcaagttactttgagcgacaaatagacccaccccttcaggagagtgcccgtccccgccc

SEQ ID NO: 272105 - DNA, 122 bp, Homo sapiens
aggaagtgaggtcctttgcccaacagcctgtgaagaagtgactgctatggacaatcactgcgtgagcttgggaagttgctccttcgtcagtcagagcttcagatgagactgcagacccacat

SEQ ID NO: 272106 - DNA, 122 bp, Homo sapiens
tccctagcacacgccctagcaccactctcctctgacgtccgcctccggatgtctgacgatcgcccccgcctgccgcccttataaaggggacttttcccaatactcgatcgattcccacctcg

SEQ ID NO: 272107 - DNA, 122 bp, Homo sapiens
gaaataacagggcaaaaacagtcccatgggagtaccgctatgaatctttatgaatacaaccgtgtactgtgcaatgcaacaaacaagcaacagacacaatcaagcttgaaactgcggggcag

SEQ ID NO: 272108 - DNA, 122 bp, Homo sapiens
aggatggactagtcctaccggataacagacatttcatcgaggtaggaagttagcactgttcgagagccatgaaccggtcagtggagccgctgcagtctccagaccacggtggagccacccag

SEQ ID NO: 272109 - DNA, 122 bp, Homo sapiens
ggagatacactcaaggcttcccttaagcaggagaggcacagcctgggacaggacgcactccgaagtctctcaggctgtctttcccatgggcttgcaaaaagccctgtggtccacggatgttg

SEQ ID NO: 272110 - DNA, 122 bp, Homo sapiens
ccctggggctcctgcctcctctgtctaggctgcaaagaatcaggcagttcgtcactagcccgagaaatactggcccctacaccctcccctgctcccataggctatgagtctgtcagcctggc

SEQ ID NO: 272111 - DNA, 122 bp, Homo sapiens
ccaccaggcagcgggcggaattaaccctgccgcggaggcgctgggcgaggatgagggcggcgagcgcggaggggaccgagtcacacagcagcccggcggcctctgccggcaggccccgctcg

SEQ ID NO: 272112 - DNA, 122 bp, Homo sapiens
aagtcacaagttgagagttcctaacatgaaactatttgtttgcttacacaaccagctgggcgcaatttcacgtctgagatatctatctgaaagcgcctctcatttattatctctccttgtca

SEQ ID NO: 272113 - DNA, 122 bp, Homo sapiens
aaaaaaaccctataatttgtatggaaccacgaaaaaccccaaatagccaaagcgcattatcgcttcttgactgaaaactcccggacagttggggctttttcctgcacagagattggccactt

SEQ ID NO: 272114 - DNA, 122 bp, Homo sapiens
tctctgtggaaaattctataacgttttcctgcctgatgaaatacacccttgataacatgtcgtatttttaattaaacaagtcttaaaactattcacctatttattagatagtatttgtctgc

SEQ ID NO: 272115 - DNA, 122 bp, Homo sapiens
agggcaagggactgaggcctggggacacctggcacctgattttgtgtcagcagggcctgacgctgaacccgcaggatgcctgcttggccccaggtaggccttgagacctctgagtcaccccc

SEQ ID NO: 272116 - DNA, 122 bp, Homo sapiens
ggctcgctccagtcgaggcctggcggggggccgcggggcgatgggtgctgctcgggctggcgggtcctcgccgctgggcgtggccggagtgctgcaggcaagcgcggggctctcggagcccg

SEQ ID NO: 272117 - DNA, 122 bp, Homo sapiens
ttatataaagcatcatgctcagcattgtgctttgtggcatttgattttttaaaaatcaaacgccctccaatcttaagcaaggatgatggccaaaaggtcggcttattacccaactgcaacaa

SEQ ID NO: 272118 - DNA, 122 bp, Homo sapiens
aacagggattagagggcttggctccctcccggaagctacctggcttgggcatccaatcaccgctctgtttgtacccttgcaggtaccctgtgagcctgtcgtcggacctggagtggcggcct

SEQ ID NO: 272119 - DNA, 122 bp, Homo sapiens
aaagatgaactttgggtgaactaattgtctgaccaaggtaacgtgggcagcaacctgggccgcctataaagcggcagcgccgtggggtttgaagcgctggcggcggcggcaggtggcgcggg

SEQ ID NO: 272120 - DNA, 122 bp, Homo sapiens
acatgttgtgtgtggtgaaactgaggctcaggagtgcaaatgggcttatccaaggtcatacggggaactagaggccccagacctccagcctgggccttaggcatctggccaatggcccacag

SEQ ID NO: 272121 - DNA, 122 bp, Homo sapiens
gttttataaacaatggtagaatgattttgtttaatggctaagactaaaatttctctagctcgcatatgcacttaagtgattgctgggtaaatgtctattgtgatggttttgttttaaagatg

SEQ ID NO: 272122 - DNA, 122 bp, Homo sapiens
tttttgtagcgtaagcatgctggcatggttccccaacctcttagggggatgctagtaacccgctcccccgtcaacgagccgcctttgtgctccgcggagggcaccgcctgcgttgggttgga

SEQ ID NO: 272123 - DNA, 122 bp, Homo sapiens
gagaggaccatgacgcccatgtttgcagctgatacttgtttgggcacacctccaagttctcgggattagaaggacaagagcactcccaggccccagagtctaagcctaagtctctatcgctc

SEQ ID NO: 272124 - DNA, 122 bp, Homo sapiens
aacctttgtttccctgtaaaagttcgttttgaaaaattccagtcttgtcctaggctgccgcggtgcaaaggactatgctcactcccatggcaataatgctggcagacaactttgcagactct

SEQ ID NO: 272125 - DNA, 122 bp, Homo sapiens
tacactctcgctccgcctagggccgctcgctgggcctggctccccggctgccgggctacgcgagctcagaggacaccatcgccctcttatggccgcggcaggactggaccgaggggctgggc

SEQ ID NO: 272126 - DNA, 122 bp, Homo sapiens
ccggcgcgctgtaggtctgcaggcagcaggctcagaggcaagcgatggcaaaggtccgagcgctgtcctgtcgcaaggggtccgggggcgtgtgaaccacacttgctgaccctcccaggact

SEQ ID NO: 272127 - DNA, 122 bp, Homo sapiens
gttggtcagtttcaggcggtgtttcagcatacaggagaacaagtccagctggggtttccccggggccacaggaggggccaggcgattaattcggtcccgaatatccaacaagaggagcatca

SEQ ID NO: 272128 - DNA, 122 bp, Homo sapiens
gcggtcggggaggacgacgatgcggatgtggatgcggaggatgcggttccagacgcttcgcggccgggcggggcgggggctgcagctgcgagaccgaggctgtggtcgccatggaaacgcgg

SEQ ID NO: 272129 - DNA, 122 bp, Homo sapiens
gagcagagaatgcagcccgggagaatccggggccagagcacctcaggaggttggggatctcgtcaggctagagccggggtccaggggagacgggggtcggcggggcggagcttgggatcccg

SEQ ID NO: 272130 - DNA, 122 bp, Homo sapiens
ccccgagatcttcaagcccgaataatttttatcaggcgcagtgtggacagccccgaagcgcggccgggtcccctcatgcatatgcagcagattgtgatccttactccgtgagcgctgggcgg

SEQ ID NO: 272131 - DNA, 122 bp, Homo sapiens
tccccggactgtgcccgcagctcccggcggcggcggctgaaatatggctgagttattattcgcctccttccaccgtgtgtgtgtgtgtgtgtgagtgcgcgcgtgtgagcgagagggagtgt

SEQ ID NO: 272132 - DNA, 122 bp, Homo sapiens
ggatttgagattagaggaatgaaaccaaattcaaaacagtgatcagcattttgccatatgcggtcccctaactccatagtcactgtaatgcaatagctgccattacttgagcacagccgatg

SEQ ID NO: 272133 - DNA, 122 bp, Homo sapiens
ccaccatggcgtctctgcagccacctgggcctgggtggcacaggccagtgttcccgtctgcgctcagaaccgtcccaccatcgtgcacagtgtgctgcatacagaggctgagaacactcaaa

SEQ ID NO: 272134 - DNA, 122 bp, Homo sapiens
cctgcctgtggtactgccttcatgcatctcaaactcctccaagcaattagttgccacagccggcccattttaagtgccatgatttctggctttccagctctagcttccatcctcctgccctg

SEQ ID NO: 272135 - DNA, 122 bp, Homo sapiens
ttggagatgcaacttgcattattcttcccgctctccatcaagcaaactcttgggttaagacggtgcagagggtcctagattctcatatctaaaaggcgcctcagagagcatcaagttaatca

SEQ ID NO: 272136 - DNA, 122 bp, Homo sapiens
gcctggcttccttatcaaccagctgaactccgaattgtgccttacaggatgcgaagaatccggtagggcagtggcaagactttaacagctgtggtttacaaccttcttattaaattaagtct

SEQ ID NO: 272137 - DNA, 122 bp, Homo sapiens
agtctgaaaccaaagctcagagggtttaggtgatgtgcccggcatcctggggccagtcagcggcagagcccgaactggcacccaggccagagctgtcccagcacactgcaccccggcccctc

SEQ ID NO: 272138 - DNA, 122 bp, Homo sapiens
ccatcatgactgtgttcctggtaaattacctatgtcttataaatcaaatgtttataataccggcttccagtaaaattggagaatttcattttcatttatggtcctcttcagttagtaatagt

SEQ ID NO: 272139 - DNA, 122 bp, Homo sapiens
aatgaacattttgtcaccggtttttgcagcaggggaggtccccatgctatgacttagccacgtgacagacagcagagcacgtcgtaatcacacggagggcagcccggtctgcttttctgcag

SEQ ID NO: 272140 - DNA, 122 bp, Homo sapiens
cgaggcgttggctctgcctccgttgcagcctgggacgaggggcggggccagagtcgtgggcggagaggggcgagaccaggaaacggggcgtggcggccgccgtggttacaggcggttggcga

SEQ ID NO: 272141 - DNA, 122 bp, Homo sapiens
ggagagagtttcagcaccaacactgcacagtgagcttctgtgtggatagaaggccaggcccgaggcctcttgtctccagagctaaggttagtgctgggttttctcccctgcacacagatacc

SEQ ID NO: 272142 - DNA, 122 bp, Homo sapiens
ctctgtgggagggaggagtcatcttgagcagacctggctgccagggtttctacgccaggacgcccccagtgggcggccagggaactgcaccatcacggtgtatcttaaaaagagttttttct

SEQ ID NO: 272143 - DNA, 122 bp, Homo sapiens
atctgaagattactcagccactgtctccacggagatcatcgttaacgggagagaaagccacgtaaaacaccacgttagatggagaagcacagaggacaccacctccacgaaaaagtctcaca

SEQ ID NO: 272144 - DNA, 122 bp, Homo sapiens
ggggagggccggggagaggggcagctgcttttctggcaggggcatgggtgccaggtaccacgcggaaagccgggccgagcatgctgagagcctgggggacccgacgccgccgggatttacct

SEQ ID NO: 272145 - DNA, 122 bp, Homo sapiens
taaagaattatgtcattagcaatctttaacctctgaaaagcgccacagaaatgtagagcacgtcttcctaatggaaccgagaaattttatgctgacaggtggaggggcttatgggacagcgg

SEQ ID NO: 272146 - DNA, 122 bp, Homo sapiens
gctgccatcttacacagcatcagcaatgtttatgggccggcagaggcatggggaagcaaacggtctgcaggccgtgtttggagaaaaggaagagctgagttccaaaggaatctccaccacag

SEQ ID NO: 272147 - DNA, 122 bp, Homo sapiens
ccgggcagcgcctgccgccgggtggcctccctctggggctgaccccctcgcgcccccgcgcgtctgtctgcgtttctgagcctgctctgacagtgatgtaacaaggccaggctcgcgccgcg

SEQ ID NO: 272148 - DNA, 122 bp, Homo sapiens
taatccattcattcaactacaaatatgtattgagcatccacttaataccaggtcccaggacggcactggggctgcagtggcaaatggggcaggtataatcttcactctcatggagcttagag

SEQ ID NO: 272149 - DNA, 122 bp, Homo sapiens
gaagagcgcctcggcccggcagtgaccccgtctgggaactgagaagtgtctctgccccgccgccacccactctgggaggtgaggagcctctctgaccggccgccccctctgagaagtgagga

SEQ ID NO: 272150 - DNA, 122 bp, Homo sapiens
gctccacttgctgcagagacacagtagatggcagtgtgcaacacagaagtgtgagattcccgaccgtctcagccttggatgggcaactgactgggaggaggttgaatctctgggcacggatg

SEQ ID NO: 272151 - DNA, 122 bp, Homo sapiens
agcctcatgtccaggcaaaggagagaagacacacacacctgagactgtccacctcacttccggctccagccacagactctgaagacatcaccccatgcacccaacccttgagtccaacctgg

SEQ ID NO: 272152 - DNA, 122 bp, Homo sapiens
ccccctgcagcctcagggacccctgagaagcgctgctgaccccagaccccattctcaggacgaagcagggattacagagaaccaggctctatctccactacagtgagggctagagttgggac

SEQ ID NO: 272153 - DNA, 122 bp, Homo sapiens
tgtggaaattctgcatgcagctgagatgaagcatcctgggctcgcagagatgccggggcccgaatgtgatctgctgctgatccaaagccctgagtaacaattacatgtgtctttgattaacg

SEQ ID NO: 272154 - DNA, 122 bp, Homo sapiens
ttagtgtgcagtagcttagggaaaaaaaaaatgtcgcccgggcaggaatgacaaatgcagcgcgataggctcgcaggcctcagggatctgtttgacttccacacacccccatgcacacgctc

SEQ ID NO: 272155 - DNA, 122 bp, Homo sapiens
gcgggactggcttctctcaggatgagcccttagagccgggctccggatctttctcagcctcgggcccctttcactttcaggacagaggccagagaacggtgatcatcacacaccccagccgg

SEQ ID NO: 272156 - DNA, 122 bp, Homo sapiens
aaaactccattaattacctggcctccgtatgcccctactttaactggaggaccacaatgacgatttgggtcccctggaatcaacatcagctcagagccaatgtccagtagcccccaaaatgt

SEQ ID NO: 272157 - DNA, 122 bp, Homo sapiens
gcggggcagtagggagcgggtggtgggatcagtgggctgacaggagctacctcaggaagacgcggcacgacggttgcctgggcaacgggcggcaggcgcgcgggtggccggcgcgcggctga

SEQ ID NO: 272158 - DNA, 122 bp, Homo sapiens
ccggctggacgccagtcttcggctccctttgtggctggcactctttgaggcttcttgagccggcacgtttgggaagaggtggcctgtggggaggaaagacccacacttgataagccccaggc

SEQ ID NO: 272159 - DNA, 122 bp, Homo sapiens
gattggctggcgtgggcagagcgtcttctcgggcctgggcggcgcagacgaggcctgaggcggcggcgcgaggcaggtgagctcccggcgggccgggccaagggcaccccggggcgggcgcc

SEQ ID NO: 272160 - DNA, 122 bp, Homo sapiens
agatctgcagttcctgggccagcgacggcatcctttgctctgacactccaagggtctggacgctgccacatgaccaacaccaaagaccccaaaagagccatggaatccacgctggcgacatc

SEQ ID NO: 272161 - DNA, 122 bp, Homo sapiens
gtaaattgtttctaaaatctttcaatagaccccatagactcagaaaaacgtcccaaagtccggaatcctggcccctgcctacctttccagtttcattgctgggtcagaacgcctcacctaag

SEQ ID NO: 272162 - DNA, 122 bp, Homo sapiens
ggcagggcttttccaggaaaggaagcgctgggcggaagtgcttgatctcaatggagcccgcggagcacagagcgcgcatccacctggcaccctacaggcaggcgctaagtggtttttgttac

SEQ ID NO: 272163 - DNA, 122 bp, Homo sapiens
gacttcagagtgccacattctaacggcaaaggcaaagcaaaagtaaatgagtactcatgacgactgcagcccgactgtaagtcatctgggtgacctagacaatctgaaaccctctatttaga

SEQ ID NO: 272164 - DNA, 122 bp, Homo sapiens
cagagggagtcgttgtccctgccagaggtgcagcactccgggaatgtccctcactctccccgtccctctgtcttgcccaatcctgaccaggtgcagaaatcttgccaagtgtttccgcagga

SEQ ID NO: 272165 - DNA, 122 bp, Homo sapiens
caacatggtaaaaccccatctctactaccaatagaaaaattggccgggcgtggtggcaggcgcctgtagtctcagctactcaggaggctgaggcagcagaatcccttgaacccaggaggcgg

SEQ ID NO: 272166 - DNA, 122 bp, Homo sapiens
ccgccgcagcccgtggctcctgccctgggtctacccagggctacaagggtcttttgcggtcgaccctgcggggaaccggtgggaaaactgaggtccctaaacacagattcggagcgccctct

SEQ ID NO: 272167 - DNA, 122 bp, Homo sapiens
gatctggggagggctgggctgtccccatgcctgagaccaggcaggcccgtcttggaggggcggtggccagcgtccaggtgctgccagcttcctaccccttcagcctcctgcccaccactgct

SEQ ID NO: 272168 - DNA, 122 bp, Homo sapiens
ccgccgggaatgggagggaagacgcggggaaggtggagaataggaatcatgtgtgttcctcgagtgtacaacccacatttgagtgacaaatcacgaggacaatcgacaaaaacaactaagcg

SEQ ID NO: 272169 - DNA, 122 bp, Homo sapiens
catcccactagctctgccatctttagctgtgtgaccttgggcaagttacttgtctgtgcccgagggtcctctgtaaagtggggatagtagtagctgcttcactgggttcccttcaatgagtt

SEQ ID NO: 272170 - DNA, 122 bp, Homo sapiens
aaagcacatcccgtcctcccatcctcagtcccaggagcatcacttgctgagggattgtcacggccgcgaggcttcagcccgagtgctggagttgagaacctggccttgggctgactcttggc

SEQ ID NO: 272171 - DNA, 122 bp, Homo sapiens
ccccgggtcgcggcaccccggctcccgccccgcgcctctggagggaggtaccgagggacgcgcagcgaaggggctttgctaattgccaaagcaggaagtgagctcgtggaagaagcgaagga

SEQ ID NO: 272172 - DNA, 122 bp, Homo sapiens
ctcggcagaggctgcatgctcagcaataaaggctgccacaaggacaaccgcaggcagcaccgggagccctgcggtctgtgtcaccaggtgtggccggaacaggagggacgacgctggcctct

SEQ ID NO: 272173 - DNA, 122 bp, Homo sapiens
tgggtagatagtctttagcttggaaattgctggtttaggtgacggtacattctctctattcgattcctttggtgacatttacgttggcacgctggatgatctatgaaaaccttttcaactcc

SEQ ID NO: 272174 - DNA, 122 bp, Homo sapiens
tctaacaggaagaaatcaggactcacgggagtaagcaaaatgaggcctaaatccggcaagcgaggaaatcaaacacttccatcttaatcacatattatagcgatgagcaaccgagtcagatg

SEQ ID NO: 272175 - DNA, 122 bp, Homo sapiens
tcctgcgcaggaacagcggctgctgaactgggctgcccacctggctgccaacatgatccccgtctctgccctgggctcctcttagctcagctgagcatggagacagcagtttccagagagtg

SEQ ID NO: 272176 - DNA, 122 bp, Homo sapiens
gtaaccctgaaatcccaaaactcagaaactgaacattaaagaactcagcttggccgggcgcggtggctcacacctgtaatcctagcactttgggaggctgaggcgggcggatcacgagatca

SEQ ID NO: 272177 - DNA, 122 bp, Homo sapiens
cacagccagcaactgtaaggagactcagttcccactatacctctgagcctctgtcttgtgcgtctccccctcagacctgcctatttctcattccttgtctttgctgcagctgagcccctgtt

SEQ ID NO: 272178 - DNA, 122 bp, Homo sapiens
ttcctgggaacaaagagagacaatgtaataaaccagcactgagacctgaaaaacctgtcccgcacaccccacccccacagtctgggtggtactcctgagctgagctgtgtgaagagctaaat

SEQ ID NO: 272179 - DNA, 122 bp, Homo sapiens
tttcgccgcaaaggggcttggcacacagtaggtctaaggcaccgaggcaggagcgtcccccgcggcctcgctccctgctctctgggccccaccgctgccgcctggagtctcccctcagcctc

SEQ ID NO: 272180 - DNA, 122 bp, Homo sapiens
ctgttccctgcgctcagagtgcctcaccccggctcgggcagtgcggaggcatctcccctgcgctcagagtgcctcaccccggctcgggcagtgccagtgcatctgcctgggtgagagcaggg

SEQ ID NO: 272181 - DNA, 122 bp, Homo sapiens
gggctggggacccaaggagacttcgactacaggcccaggcgaacggaaggaagaggcttgcgttcagagagacacgtttggagctgggactgttcattctttaaggaacaccagcttccagg

SEQ ID NO: 272182 - DNA, 122 bp, Homo sapiens
gggtccagggaggatttcgttaggattaggagatatgtggtcattgcaagggaatgaggccgaaggcacagtgcaaggatcagcttcgttggggtgtagtaaaagaaataactttctaacgg

SEQ ID NO: 272183 - DNA, 122 bp, Homo sapiens
gagctgtccacaccacccctcgccctctttgggacgctgcgcactctcgcagtggtagggcggagagctgtcaatcaaatgcagtgcctcacctcctgcggcaggattggacgttcggccca

SEQ ID NO: 272184 - DNA, 122 bp, Homo sapiens
tcctcagagcaggcctttgaggtgagcaggagtcagcagccctcaactcagtgtgccttccgcaccccccgcctcagtgcttctgtggcatgagactccacactttcacagccatttgtccc

SEQ ID NO: 272185 - DNA, 122 bp, Homo sapiens
gccgccagcctcccgaagtcatccaaggtagcaggcaaatccggcagcagcaaactagctcggattcggcttcggtttttctcctggccggcgccacaggcccctcctccggggcgggctcc

SEQ ID NO: 272186 - DNA, 122 bp, Homo sapiens
ggacccgcgcagccaataggcgaggacgcagtcccgcgtggccttgtgggagctgtagtacgctccctgtgcccactttcctgggccggggtagcgctctagggcagaagggtaaactcagg

SEQ ID NO: 272187 - DNA, 122 bp, Homo sapiens
gccttttgataaatagatatgagggtgcagaatccggacgtgctttcattataacctggtcgccaaactgtaaggaggatgcctagagcccttacctagctttaactgctggaggatactta

SEQ ID NO: 272188 - DNA, 122 bp, Homo sapiens
gtgcctgccagagaggaagtggggaggtggggagacagagcacagagagtgactcagacccgagggcgaaccagaagctgcccggagattcccactgtatggcttcctgcaggattcagctg

SEQ ID NO: 272189 - DNA, 122 bp, Homo sapiens
aatggttaatgcctggccatacagggggctttactggctgccacccttcccctcaggactcgtggttacatatgcagaatatcacccttcactcccccaaggtgatccagatgtttaccagg

SEQ ID NO: 272190 - DNA, 122 bp, Homo sapiens
ttatgggtgacgggccaggagcatggctcagcagcgccaaggccgtgtaggcgccagtctcgggcctcccagagttatattttgcaaagagttgagcaggcgtagcgctttgtccgagatgg

SEQ ID NO: 272191 - DNA, 122 bp, Homo sapiens
ccgaagccgcagaagccagtctctttgtagtccttacagatgtcgggctggtaatcccagcgcacggtggcacgtagatgctcgggcgctcggatggggcccttcctcaccatcccggaaga

SEQ ID NO: 272192 - DNA, 122 bp, Homo sapiens
acatcatgccagtaaactggcccacggtggggtggcagagggagagggcccaggtgggggcggacactattgcctgcacagttgatgtggaaccagaaagctgactctggatgcaggaaaaa

SEQ ID NO: 272193 - DNA, 122 bp, Homo sapiens
ccggccgcacaggagcccacggagcgggtgggaggctcaggcatggcgggctgcaggttccgagccctgcccctcgggaaggcagctaaggcccagcgagaaatcgagtgcagcgccggtgg

SEQ ID NO: 272194 - DNA, 122 bp, Homo sapiens
aggcagcagcccctattcaatgccaatcaattgttggcacagagaatgcaggccttatgtcgccaggttttccaaaatttcaaaaagaatccagaagtctcaattttactgtgcaattctct

SEQ ID NO: 272195 - DNA, 122 bp, Homo sapiens
caatcaagctgaaaagaaaaggtgaaaatctccaggttatctgcccaggtggcaggaaatcgacagccccgagaacgcaagtgctgctgtgccgccaggcccagggctatgatccaaagtga

SEQ ID NO: 272196 - DNA, 122 bp, Homo sapiens
ggcatgggaggtttgaggctccagtgcttatctcggtgagtgattctgggagccacctaccggttgagtggagcgaagggtggagacagagggcaggtgggggtgcaacgttggaagggcca

SEQ ID NO: 272197 - DNA, 122 bp, Homo sapiens
cagaggagggtttatggtgcgagattctccactctgggacaccggaagctctgaagacttcggaccagagcagcccttccgtgatggtgctggatcgacccctgttctgtgctggctacgta

SEQ ID NO: 272198 - DNA, 122 bp, Homo sapiens
cttccacttcatacaccagtttttttctaatgttatttaacatttgctgtcttcattccccgcccagtttctgccaatgctactaaacagaaacttatttctctatggttactcaactggaa

SEQ ID NO: 272199 - DNA, 122 bp, Homo sapiens
tgtgtgacactcagtcattctcaggcacttggaggagaggtcacagattgggagaggattcgggcctgaaggctttttgagctaatccaattcaatttggatatcacacctgtcatttcagc

SEQ ID NO: 272200 - DNA, 122 bp, Homo sapiens
tgcgcagacacgtgggtgcgggaggggcagagctggtccggcgcggggcttgccgcgtctcggcctcagtctcggagccaggacctcaggcctgaatggctgggtgtggagggcccttgtct

SEQ ID NO: 272201 - DNA, 122 bp, Homo sapiens
acagaaaagtaaaatgaaaatgtcttctaaccatattgaaaagctatccagggccgggcacggtggctcacgcctgtaatcccagcactgtgggaggatgaggcgggcggatcacaaggtca

SEQ ID NO: 272202 - DNA, 122 bp, Homo sapiens
aaaaaacctcaccccaacagcaaaaaggtacaactgccggaaagtcccgaggccctgctccgtcggcgacttcactctccaggcctcagtttcccgatctgcccctacctccctgcgtggct

SEQ ID NO: 272203 - DNA, 122 bp, Homo sapiens
acaatcccagcatgcaacgggagtggggttggtgaggacacctgggggggcagcgcggggcgcgcctcgccaggcatgctgggagaagtagtttcttcaccgctttcggccgttgttcgcag

SEQ ID NO: 272204 - DNA, 122 bp, Homo sapiens
ataagacaaactccagtcctcacgtctccaagaactacaaccctaacaaagcctgcccttcgctttgatgctattgcagcgctctgtccaaggtcaaagggcaacttaagaaatgttctgga

SEQ ID NO: 272205 - DNA, 122 bp, Homo sapiens
cagcgccgacggggacactcatcccgggagccagagccagcaccgagaggggacggtctacgcgggtgccggcggttccaggactgcgaaaccacgagccgagtttcggtcgcccatgggaa

SEQ ID NO: 272206 - DNA, 122 bp, Homo sapiens
cctcccacctcagccacccaaagtgctgggattactggcatgagccaccacgccctgtcacgggactttaggtcaaacacattattacatttgtagtgacaaatgaaatgtagagatatcag

SEQ ID NO: 272207 - DNA, 122 bp, Homo sapiens
aacccactgacaccctgagtgacgggggtgtcccgtgaagagccagtgctgagttgcgggcgggtggaggccaggctgagcctcgtgcgtgtggctgcacggcagggacgtcctgcgtgaca

SEQ ID NO: 272208 - DNA, 122 bp, Homo sapiens
cctcctcctccccccgctactatccgcggcccagagaactgccgcttgccgccattgacacgcacagatagaacccaaagaaaggcaaagagtcctgcccggcaccggcgccgcgtgggcca

SEQ ID NO: 272209 - DNA, 122 bp, Homo sapiens
ggcccacaaccctcctcggggcccgcagactgaggcctttcattggccaatgcggcgtgacgtcacggagacggggcctttctacaggcaggtactcggtgacgccataaagaaaactctga

SEQ ID NO: 272210 - DNA, 122 bp, Homo sapiens
ggcagcagtgacccagaaatgagtttgattcacatagtccttcctccataacaagccaaacgccagaccgagagtgcctccgtgcgcgagtgcccggtgtgtgcgcgccggcgagagcaggg

SEQ ID NO: 272211 - DNA, 122 bp, Homo sapiens
gatcccctcccaggttcgagcacttggagggctgctgaagttcctgggtcgaagaagaatcggggttgaactggaagactataatgtcagcgtccccatcctgggctttaagaaatttatgt

SEQ ID NO: 272212 - DNA, 122 bp, Homo sapiens
aacattcactggtcatttattctgtgccaggctcttggcccaggcactaggaaggaacaccgaaggcattataaacattgaactacaataaaaggcaaaataactgtgtgccaagaagaaag

SEQ ID NO: 272213 - DNA, 122 bp, Homo sapiens
ccccacgatgggcaatgcagtcccagatagcggatagcacccccaaccattccccagccgcggggtatgatgccctggatagcgcacccagcccgcaccccccgtggacggcttagcccccg

SEQ ID NO: 272214 - DNA, 122 bp, Homo sapiens
cctgggtgacagagcaagcgaggctctgtctcaaaaaaaaaaaaaaaaagaaagaaagtacgagaagctcactggctgtgctaaaccaaatgaatggaaagcgccaaaagtgattttatacc

SEQ ID NO: 272215 - DNA, 122 bp, Homo sapiens
acagtgacgtgaggcccagtagaggacgtgacctcctccaggccgacgctcttggttctgcgtgaaatgagccgattccaccttgtcctcaatggcggcttctgctccctcaaagcggcagg

SEQ ID NO: 272216 - DNA, 122 bp, Homo sapiens
gcatcctcttcaggacaactggcttagactctaaaaagtctaaacaaacaaaacaaaccacgggaactggtccaccttaaaagagatgaaagggagagaacaaaatgcaatgagtaaacttg

SEQ ID NO: 272217 - DNA, 122 bp, Homo sapiens
ctgttttgtttactaataaataacaatgtattcataatgttttccctctgtttagatttccgccaacttgtaggacaagcaccctgatgaagcaatatctgaaacttaaaatagcagttttg

SEQ ID NO: 272218 - DNA, 122 bp, Homo sapiens
ggctggggtcgctgggcccgcctcgggctggcagacgtccagactcacccagggtgagggcgccaggcttagggtagaacagagcttgagactccgcttcaccacttaagcagcgcggtgac

SEQ ID NO: 272219 - DNA, 122 bp, Homo sapiens
ccggccggtgcccgcaattcacttgtcctggtgaaggcagcttgacagctgcataaatcacgccgagataccactaataggttgctgcctgagactgtactggaccacccaagagcggctcc

SEQ ID NO: 272220 - DNA, 122 bp, Homo sapiens
tacttgggaggtcggggcatgagaatcgcttgaacctgggaggcagaggttgcagtgagtcgagatcacaccactgcgtaagcaacagagcaagcctgggcaacagagcaagactgtctcaa

SEQ ID NO: 272221 - DNA, 122 bp, Homo sapiens
tggtggtccctgctcccgggaggtcaccacaccgatgcggaacacagatgcgtgtcgccgcgcaatgggcacagcgcatacagcgcagagctcccgggctcaagcgctgctcccgcctcagc

SEQ ID NO: 272222 - DNA, 122 bp, Homo sapiens
gcggcgcactgggtgtgggccggggcgcctgcggtgtggcgaagagcagcaggtcagggtcgcaggggccggcggcgggcgccgcggggccggtgggagccggcggggcgctggcgtcctgc

SEQ ID NO: 272223 - DNA, 122 bp, Homo sapiens
acaccctccgcagccactggcccaggtgctaagctcttcattgcccggggccagaagggccggccggccactccgaatgtggggcctaccaagcccacacccacccagaactccagctggcc

SEQ ID NO: 272224 - DNA, 122 bp, Homo sapiens
ctctctgcgtggggagctgagtcccgggttgttgaggcgggggtcccctaagaccgctaccggcccctcggcgctgacgggcccgcgaggggctcaccctccgaaggcagcctcgccgaagg

SEQ ID NO: 272225 - DNA, 122 bp, Homo sapiens
ttcagcagtcagctactgacaggagctgtttcttccccagggcgcagccacaagtcgtcccgaacctgctgcagtgccggagagtcctcagggaactggagcgctacttctccacagtacag

SEQ ID NO: 272226 - DNA, 122 bp, Homo sapiens
ggtcccgcgcccacttccgcttcccgtgcgggggatggcggcagagccggtgggctgcggcggctccaggtacctgcctgagcgtggcactgcgcagtctgcccccgggtcgcaggggcgct

SEQ ID NO: 272227 - DNA, 122 bp, Homo sapiens
atgtatgtagagatcatggatactttagtattagcaataattgtatcttgcaatagaaaacggtcttcattataacaagaaaaataattgccagattctgctaggtgcagtcatctttatgc

SEQ ID NO: 272228 - DNA, 122 bp, Homo sapiens
gcacccccgtcccaaaaagaaaaaaaagcaactgggaagtgtctggtgcaggagagcacacgctgactgtgaataagtgtgtcagttcttaaggtccagcaacacaaagcgaaaagttagtg

SEQ ID NO: 272229 - DNA, 122 bp, Homo sapiens
cggccgttgtcttggaagcgctggttgacggccagcagccccagctggttggacatgttgcgcaggttcctggccaggggctcctcgctgccgtacaccatgctggcgtccacgaaggaagt

SEQ ID NO: 272230 - DNA, 122 bp, Homo sapiens
ctccatttctcaccgagccttagctgccttcccgcggggcagggcttgggacctgcagcccgccatgcctgagcctccgacccactccatgggctcctgtgcggcccgagcctccccgacga

SEQ ID NO: 272231 - DNA, 122 bp, Homo sapiens
gcttctgatttacatagggcacaaaatattggtcagaccaggtatgccatttacatagtgcgtgaagaagctggcctccccaccttaatcttttattatgcaaatgggttctttacctggct

SEQ ID NO: 272232 - DNA, 122 bp, Homo sapiens
agcagcaggctcaggagcagggtgtgcgctgcctttggagctccagtccatgcctcgcgtcgtatagcactgcgggcttcttgcttgcctggaggcagaccacaggccgtcttgaggaagac

SEQ ID NO: 272233 - DNA, 122 bp, Homo sapiens
tgtcctttctctgtcccagtcggtttcccagccctcacaggacgctggcctgaggagcctcggtccaccgaaggcccacggcccttcgctgttgtaggcgcctttccccaatatcccccacc

SEQ ID NO: 272234 - DNA, 122 bp, Homo sapiens
gcctctgggccgccggtgcctccgcgcggtcaccgcctccacccgcctggccgcttccctcggcgcatgcgtagcacaccgactccaggattgtttcccaaatcccacttccgccacttcct

SEQ ID NO: 272235 - DNA, 122 bp, Homo sapiens
cctccctcgaggttttgggcttcacgtctgagagctgctactttcctgtgggcccacctccgaggtagcgagatccaagatgcttctttgggggcaaggaaatggccctccactccctggcc

SEQ ID NO: 272236 - DNA, 122 bp, Homo sapiens
aaattagcttctcccccatgccttccctttcacgcttccgtcctgacgcaaacgtggggccgccttccgcactgcgggcttgtccttggccctgccctactcagtttcctgaagcatgcgca

SEQ ID NO: 272237 - DNA, 122 bp, Homo sapiens
gcttgcaagactgcattcttaggtgctagacttctcaatagataacttcaaggagcccagcgccagggagtgaggccctcaacaaaccttttggtggcagggcagtgtgagtttgcccacat

SEQ ID NO: 272238 - DNA, 122 bp, Homo sapiens
ttcagtagcaaaaacagccctggccatcctggcgctcagagccctctgcacaccttcgaacgggctgtgtgtcccttctctgatggcagaaagacaacaccagcagaaagacggctgaacaa

SEQ ID NO: 272239 - DNA, 122 bp, Homo sapiens
ggcccctctgtttggggcagcctgggtagcaaagggagcttttaatttccctcagaaatgcgcatttctcacttttatcctcctcttcataaagacgaagtaaaagagcaagtcacagtggg

SEQ ID NO: 272240 - DNA, 122 bp, Homo sapiens
agaatggtcgcaccttcaaagtgggcagcttcccagcctcggcagtgacgctggcagatgcggggggcttgccagccacccgtccagtccacagaggcacccctgcccggggagatcaacac

SEQ ID NO: 272241 - DNA, 122 bp, Homo sapiens
tcaatacactggcacattggtaaaacggtctcgctaaaatgttccatgagaaaaatgtctcgggggaggcggcggtagagctctccctctgtagtcagagccgtgaaaggcggcgtttactc

SEQ ID NO: 272242 - DNA, 122 bp, Homo sapiens
ctcacttcataaaatctatccctaaaaccttccagcaaggcctcacattttcacctatatcgaagacttgaaaaaattcatttttgtcactccaccatgaggcagaccctgccagaatgtac

SEQ ID NO: 272243 - DNA, 122 bp, Homo sapiens
actagcatttgtaaagagaaaaattaaataagcttatcattcttgatgcttaccttgaatcggttagtgaatagttccaatttggggaataattctctattggtatatagactctgcagagc

SEQ ID NO: 272244 - DNA, 122 bp, Homo sapiens
tcgggtccgtgcttgctgatgtgtggagagcagttggtccacgtgttcactgtagagtgccgtattccgtgatcccgccacagctgctcttccaggcctcttgcctgcagggcgttcatccc

SEQ ID NO: 272245 - DNA, 122 bp, Homo sapiens
acaagactgagtgcagggaggagggaaggaaggaaattagcatttcttctgtagcttccccggaacagacgccatgctggactctttacctacataatgtcacatgatattcaccgtggctc

SEQ ID NO: 272246 - DNA, 122 bp, Homo sapiens
tgtgtcccggtgttcaagtgaagaaagagacattacggaaaccctctaagagtcaactggcgaagcccaagcatggcccagcgtggcggtcatctccctccgtgggtcaggcgtgctccgtg

SEQ ID NO: 272247 - DNA, 122 bp, Homo sapiens
agaagcctagaaacaggaagaagagggggatctggactcccggttggtcagttaagcctgcgaggataaactgtgtcacgaaggaggaattctcagcagccattgtcatttaaggcattctg

SEQ ID NO: 272248 - DNA, 122 bp, Homo sapiens
gtgactgtgagcacagtatgtgctaaaatgtaaataacacagccacagcaccaaatgccacggtttttaaattaagaggactattctgagcagttatagacatatacatgtagagacgcatt

SEQ ID NO: 272249 - DNA, 122 bp, Homo sapiens
tgtcctccagcagcactcccagcagctgagaaaataaatccttcattcctgaagggggatcggggtgatatagcacaatgtttacataaggctgtcattggctaagacagcccaatactttg

SEQ ID NO: 272250 - DNA, 122 bp, Homo sapiens
agccacagtccccaagatgctactgaacatccaaacccaaacccaaaccatctcctatcccggctgcctggctcagatgtatttctgtatgatgtttgccaatatggacaattttcttctca

SEQ ID NO: 272251 - DNA, 122 bp, Homo sapiens
cgcggggcaggggcggtggctcagctccgggggtgctaggccgactctctagcgtgttggcgggcccgcgtcgcttttatgcgtgatgccggggacccccttgtaccgctctcggcggcgca

SEQ ID NO: 272252 - DNA, 122 bp, Homo sapiens
gtgcgccacgtgggagcagcggggcgggcgctgggcgctgttctccgatgggaggcggcgcgctggggcgcgggggctgggcgccggccacccggtgccgtccggcggcatcctggtgctgg

SEQ ID NO: 272253 - DNA, 122 bp, Homo sapiens
aattttccctttgatgaacactcacaatgctggtatctcccttttctcccaaggtaactacggatacccgtttagtttgtaatattgcagaccttttctgtacatttacatatgtattttct

SEQ ID NO: 272254 - DNA, 122 bp, Homo sapiens
ttcagttggctctactatctgccgccagggctgctccgaaccactccacaagtcaaaacgcgctttcactctgtctcggcatactctgcttccctgtaacacaggcggtggaaattccagat

SEQ ID NO: 272255 - DNA, 122 bp, Homo sapiens
aggactaggtatcttctcttatgttgaggaagtttctttttagtcctagcctgctcaacacggtttataactggtagtgcattttagattttattacatacgtttttggcacttctcaatat

SEQ ID NO: 272256 - DNA, 122 bp, Homo sapiens
gctgggcgtgggggcccgggtgtcctcgcggggatacgccgtgtccatgggttccagcgccgtctcttccacactcagactggtgctgggagggtgggcacccgctcacttatagccctgtc

SEQ ID NO: 272257 - DNA, 122 bp, Homo sapiens
cccagtaagctccatgtggccgagggcaaaggcacacatgggcttttgcgtgggtgtccccgtgtgtgtccgtgtgtctgggtgtgtgtggctgtttttttcctggctttgatggggaggat

SEQ ID NO: 272258 - DNA, 122 bp, Homo sapiens
gcagtggaagaggggctcccttccagcccccacgtgatgtctgagaatgtgacctgcccccgcctgcaggttccaggtgtcaaagtcacctcctgtcaccgtcctctgattttgttcttttc

SEQ ID NO: 272259 - DNA, 122 bp, Homo sapiens
acttcagatggaattctgtgttaattactcccacggttttttctggcctatggggtcctgcgggggacaggatggagcaggggcagactgagggacagaaggggcttgaaggagagcgaggt

SEQ ID NO: 272260 - DNA, 122 bp, Homo sapiens
tccccgccccaggatgatgtggccgcagggcccggggcgcccggctgccaagcgcacatgcggcggcacggtccagcttttcaggctgaagctggaaacgatgactctgctactcgctcccc

SEQ ID NO: 272261 - DNA, 122 bp, Homo sapiens
ctccgtccagttcctttggccagaaaccccatcgtcctcatctgtgttttcactcatgcccgtatccgacctcccgggaaatcctgttggctgtgcctccagaacagatccagaatccagcc

SEQ ID NO: 272262 - DNA, 122 bp, Homo sapiens
ggctaatggcaagcggcggcagcacggggggcggttccaggaccgggcgcgggctactgacgccatctctagaggcctagagttgcttggagaggagctggttgccaaggcaacccgccctg

SEQ ID NO: 272263 - DNA, 122 bp, Homo sapiens
cagggattaatattatttctaatgtttatgtgaggaaactacagctcggcaagatgaagtcgttgggtcaaggatacataggtaggagggaacagggctagaattgaagtcttctgaacctc

SEQ ID NO: 272264 - DNA, 122 bp, Homo sapiens
agtttgggcttgctgccgccggtgcagacaggaaatagctgctctgcggcagcccgaccccgtggccacagagcagcctctgttccttggtaatcgtcaacatctggcaggcacctccacgc

SEQ ID NO: 272265 - DNA, 122 bp, Homo sapiens
ccagggaacatcactcctgggccagcagccccacctcctgcaggctgcactgagccccttcgggcccatgccaaccgccggtgcagcctctgcccgtcctctctggtctccagggaaggcgg

SEQ ID NO: 272266 - DNA, 122 bp, Homo sapiens
catgaaatccggcgcatcgatcttcacaaaggagactacagcgtcctggtgcccggcctgcgcaacaccatcgccctggacttccacctcagccagagcgccctctactggaccgacgtggt

SEQ ID NO: 272267 - DNA, 122 bp, Homo sapiens
ccagccgcgcccaggtcacagtttatttggcccgcgctaccagtgggcggcctggctggccggctaggcgccctgcatgcgcagcccgcgtatgagttcgtgcaccgtcttgttgaggatgc

SEQ ID NO: 272268 - DNA, 122 bp, Homo sapiens
aactcacgcacagcccaggtgactgactgagagctcgttaggaagaaatcctaaatcccccgaggtgccagccaggaatgcgcctgcccccgtgggtggagagaggagggaggttcctcggg

SEQ ID NO: 272269 - DNA, 122 bp, Homo sapiens
gtaattagtcataacataggctgtttaatacctcttagatttagttttctgaaaagggatcgttgcatcttccacagactgtggaacatagaaaaattctagcgttcagcgagtcagtgcat

SEQ ID NO: 272270 - DNA, 122 bp, Homo sapiens
catgaggtctgtttatttccactttacgtaaacttttcaaaatgacagttatttcgtactcgctgtcgcccgaacgcagacgggaggacacttcaggagcaatcgacccgaaggaaaagcac

SEQ ID NO: 272271 - DNA, 122 bp, Homo sapiens
ggcgccagctccccgagcctgtccctgcagccgcgctgtgtgcaggcacgtgggccaccgcgtctcctccactggcactgctgggtctgggccgccaagcccacctgcccacctgcatcctc

SEQ ID NO: 272272 - DNA, 122 bp, Homo sapiens
ggattactctgagaattttagaaaacggaggagacatttggcaagtagcgtactgggaggcgaactggaaacaataaaagtggattgtgatagtcctggttttggagaatggaactactatc

SEQ ID NO: 272273 - DNA, 122 bp, Homo sapiens
cccgcacggtccaggagctgggtccaggcccccgatggcggctcctcgggatgctggttccgtcctcccagggccggtccccgcgagatccgaagcagcggggtcgcctcggggagctcctg

SEQ ID NO: 272274 - DNA, 122 bp, Homo sapiens
ccgcgtttccggttccctgcgccgccccgtgattggtttagggccatagagtccattttacgtaatcggcgttgattatggttcccactgaaaccccacccacaggaaattaatgtactaaa

SEQ ID NO: 272275 - DNA, 122 bp, Homo sapiens
gtatcgggaccagggccttagaccccccatggcaggccgctggggtgctgtgggaactggcggctccacctcaggcacctgggaggggctgggcagggcggggccaggaggaggtgctgtgt

SEQ ID NO: 272276 - DNA, 122 bp, Homo sapiens
tgctccacgccagggagcgggtgctgagagtcaaagcagccagtttacagggcaagcagccggaggaggctgctcagagaatcgctgtcaagaggagggaaagttaaacaaacacaccctgg

SEQ ID NO: 272277 - DNA, 122 bp, Homo sapiens
tatgcattcatggaaaaggcaaggtcatttgtggactgtgctaagaagctttaatgcgcccgccacatttccttctctacccctgctccccacttccatatgctaccattatagttaattcc

SEQ ID NO: 272278 - DNA, 122 bp, Homo sapiens
ggagtgcagcatccacctggaggtgatcgtggaaaggccgctgcaggttttccatgtggacgtggaggtgaaggacattaacgacaaccctccggtgttcccagcgacacaaaggaatctgt

SEQ ID NO: 272279 - DNA, 122 bp, Homo sapiens
ccatctccacccctgacctacccagagtgtcgcccatggtagccatcgtcctggactcgacgtccatgttgttgttcaagttggacaagaccatggcgaggtgcggcctccaatctccccat

SEQ ID NO: 272280 - DNA, 122 bp, Homo sapiens
tgaactaacaaaacaaagaagaggtttcgagtgcaagatgaatccaggctgtacttacagcgaattggcaaaaaccaagataaaaatgagaagatatccaagatgtttcagaaatttcaggc

SEQ ID NO: 272281 - DNA, 122 bp, Homo sapiens
cccaggttcccatttccacggcttattcggctgacccagccccttcccctgcaagggcggcgcgctccttgccgctgtccagcagctgtttctactgccaggtgctgcgtcccgcgatcgtt

SEQ ID NO: 272282 - DNA, 122 bp, Homo sapiens
ggaggaggggaagcggtcaggggtggagcggggccgggtcaggggctcggggggtcgggccggggtcgggggaggaggagacggcctgggcgaggggcgtccgggactaggagggggccggc

SEQ ID NO: 272283 - DNA, 122 bp, Homo sapiens
aaatgagattagaaaacgagagaggaaaatatttttaatggaatcagggaatgtgaaaagcggtacatgcgaagaggaaaagatactgcagtcctggagttcgacctctgcagaggacatct

SEQ ID NO: 272284 - DNA, 122 bp, Homo sapiens
agccacctaggagaggggcgagcctgctgtcacggcgccattggccagaggcaggctctgcggtgggtgccgcgtgcgttctgacatcccacttctctgtacaccggggctgtgacactgcc

SEQ ID NO: 272285 - DNA, 122 bp, Homo sapiens
agaagcagaaactgcagatgcccccgcagcccccaccgccacaggcccagtctgcgcccccgcagccaacagcccaagtgcaagtgcagacctcgcagccgccgcagcagcagagcccccag

SEQ ID NO: 272286 - DNA, 122 bp, Homo sapiens
atagcctgtcagtggcatacgtattgtagtttccaagaataatgttatagctgcttctttcgttaagttcaggatcagactttccttagtaagtaagtaggaagatgaagactcaatacttc

SEQ ID NO: 272287 - DNA, 122 bp, Homo sapiens
aggatgagaaggacgagaggggaagaggggaaggagggagggcagggggcaggccccgagcgggtgcgggaagaccggggcatcactgaaatgcatttttccacactcccgctccctcgcgt

SEQ ID NO: 272288 - DNA, 122 bp, Homo sapiens
tactgggttgccatagagacagcaaacaactcctggagcctgcgcagaagtacagctgggcggacttgcaggtggcggtggaggcaagtcctctgcggggcggaagtcttcagcctagtgct

SEQ ID NO: 272289 - DNA, 122 bp, Homo sapiens
ttcctggggaagtcccatgttgcagactcgaaggtattatttattgtagcctccaagttacggaatttccctctgctcctctttttttggtaatagtgaattaggtttcactttccaaaaca

SEQ ID NO: 272290 - DNA, 122 bp, Homo sapiens
atcaaaagagccacagaataaacacaacctcttttttcaacatccctcttcctatgctcacgtctcccatctttttcccttgtcttacagccaaattcctgaaattgttattgatattcctt

SEQ ID NO: 272291 - DNA, 122 bp, Homo sapiens
gctttacatacagagcctcatgacctgtactcatagctggaggcatcagtcattgcactacgagaggaagtgggctttgaaataccttggggttgatgtcccaagaacacccttcttccgct

SEQ ID NO: 272292 - DNA, 122 bp, Homo sapiens
ggaaaatagacacgctgtgtttgaggcttggcccctgcctctggggggtcctgagcagctcgggagatcccggaggcccctgcggtattgacggagaaccttccagctaggcacagaggccc

SEQ ID NO: 272293 - DNA, 122 bp, Homo sapiens
gtcatcatcttgtgaagttgtggtctcagatttggggaatgtgaactgagtagggaaaggcgagctggcatgccacactgagggcccgcaggaagcaagaccagtcagtatgactgtgtgtt

SEQ ID NO: 272294 - DNA, 122 bp, Homo sapiens
gttccttaacgtcagcacaaccacctggacccgaccctccctccctcggcctccccggcccgacactgacgctgtaagatcccctgtgtccacctggggaagagccgggaagattacagggg

SEQ ID NO: 272295 - DNA, 122 bp, Homo sapiens
catggcagcggctccgctcggcacccaggtccagtcccgctgcgcctacccggaccgacccgacgccagtagcaccgactcgctctctcggcgctcgattcctgcgccttgtgacgtgaggc

SEQ ID NO: 272296 - DNA, 122 bp, Homo sapiens
aacactaattgctcccattctctagctcctcgtgaggcagattgcaggggcctgcatctccggagaaagctctcctatcttcgcagcagctctcagcagagcaactcaagtgcccttaattg

SEQ ID NO: 272297 - DNA, 122 bp, Homo sapiens
tggagtggagtggataggggtagacttttcacacggggacaaattattacaggatatctgcgccccctgttccgagtcactcggggccatcggttacttcagcaggttctctgcatcacgga

SEQ ID NO: 272298 - DNA, 122 bp, Homo sapiens
gagaataaatgcgtgttgttttaagtcagcaagtatgtggcaatttgctacagcagctatcggaaactagtataatgtgcattgcgccactctgaaatctctgaagaattacagagtacagt

SEQ ID NO: 272299 - DNA, 122 bp, Homo sapiens
aactagggtttcaggtgtgagccgcggtgcccagctgcaagttgaaatgttgtggttcttcgtgtgtcaagcaattttgggctatattctagacattttgaatatgactttatgagatctgg

SEQ ID NO: 272300 - DNA, 122 bp, Homo sapiens
catgtctctgtctcgctcagaggagatgcaccggctcacggaaaatgtctataaggtgagcgccccccggcgccgagctgagcccgctccgtgtgcgcctgggtcgcgcgccgcccgcgcgc

SEQ ID NO: 272301 - DNA, 122 bp, Homo sapiens
cccgccatgcctgagcctccccccactccgtgggctcctgtgcggccggagtctccccgacgagcgccgccccctactccacggcgcccagtcccatcgaccgcccaagggctgaggagcgc

SEQ ID NO: 272302 - DNA, 122 bp, Homo sapiens
aaaaatattagctctgaaatgcagaggatgtgccgtgaatggacaattgcttttctgcagcgcctagtgggaaaacaaggactttgtgtgttgcaaacgcataactgcagctcctccatttc

SEQ ID NO: 272303 - DNA, 122 bp, Homo sapiens
ccgtggctggcacaccacgagctgtcacgcggcacgggtcataacacatctgggtgtcatcggacacctcacctcgcccaccctgtaggagcgtaaggagcctccatcctcagccacgtgca

SEQ ID NO: 272304 - DNA, 122 bp, Homo sapiens
cctacccctcagggtcacgtgaggagtcaactagatgacatgtgaaaagtagatcacagacgctgggcacacagttagccctctttaaaatgggagccagtaatatttcaataactgctggt

SEQ ID NO: 272305 - DNA, 122 bp, Homo sapiens
gacgggtttgaaatggcttcgatgttagccgggacccgactcaggtgaaggtctggtccccgtagttggagcagtgggcggccaagccgggtctcttaacatcttgtcgaatctgtggaagg

SEQ ID NO: 272306 - DNA, 122 bp, Homo sapiens
atatgtcatcttagtttctgccctcccaggaacaggcaggcccgggacaaagattcaggacgagcagtgtatttggtaggtgaccccaggaaacactggtaagagaagggagaatggggcag

SEQ ID NO: 272307 - DNA, 122 bp, Homo sapiens
tcgcagcatttcccgggcagcttgaccctcctcgggaaggggcagtcagggctgggcagacgaacgtccatgctgcacaggggcatgcagcccaccgccccgtccaggcacgtgcactggta

SEQ ID NO: 272308 - DNA, 122 bp, Homo sapiens
gtagaaaccataaccccgacatgagtaagttgtgaggagttccttgacttacagtggggccgcgccccaataaacccatcctaacatctgaaaatcattaagtagaaacatcaggaaccatc

SEQ ID NO: 272309 - DNA, 122 bp, Homo sapiens
gctgaggaccttccctccggaggatcaaggaaagggaagaattgttaacccacaagccaccgggatgctgttttctttgtagtcctgccccaggtggatggctcgcatagctccacaggctt

SEQ ID NO: 272310 - DNA, 122 bp, Homo sapiens
ggagagaacagcaaccagaggctgcctttaggtggatctgagccctcataccccaagtggcgataagcgcaccagtactctcagttggagaacaaaggcgcgtatcgatttccatctccgat

SEQ ID NO: 272311 - DNA, 122 bp, Homo sapiens
ttgccatcctcaacccccgccccctccaccactctcctgacttctatcaccttggattagcgttgcctgttccagaactacatggaaatggaaccacgcagctgtgctcttctgctttttgg

SEQ ID NO: 272312 - DNA, 122 bp, Homo sapiens
cctggtgacttcttacctgattcatcccacaccagtcagaaggggctgtgaaggcagcagcgaaggagccacacatggacgtggaatgggcacgctgaccatcatggtcacgactgcaagaa

SEQ ID NO: 272313 - DNA, 122 bp, Homo sapiens
ctggcatgccaaagccttctgagcaggtcaccctggtttttgcagaattaagaatgatatcgctgtacacattaaagtattttaattggttgccaaggcgatacggcagaatcacagggcac

SEQ ID NO: 272314 - DNA, 122 bp, Homo sapiens
cacagtctaaaacataccccttaccaggagctcttgtccctctctagccaagtcacatgccggacgctagaactatcctaaggcatagctaaaaacggagctgctaggagagtgtcagggga

SEQ ID NO: 272315 - DNA, 122 bp, Homo sapiens
tccacctggttgccagctagtggcggttgtggggtgaggggctgtcccaggggccaagctcggggccctgacactgtaaacaagcctcccagcctcagtttttccatctggggaatggtgga

SEQ ID NO: 272316 - DNA, 122 bp, Homo sapiens
tttgaagctttgactagaagttatctgggtactgcaagagcagacttctcaaccttggcacgattgacattttggggcctgatgtttctttgttgtagaggactgtcctgtgcaataatgta

SEQ ID NO: 272317 - DNA, 122 bp, Homo sapiens
atcgcgggaaaatagagaagagtttgtttgaaggtctcgcgagatcgagtgagtacggctcgccaagttggagcgctctcgcgatagacacagcaactattcagctgcgaggggacgggaga

SEQ ID NO: 272318 - DNA, 122 bp, Homo sapiens
ccgggggctgggaggcatggtgccagtttggcccacattagtcactgctgcatggggtgccggccatcacctctctctcttcttccctggagggcacaccctgaacacctgattctgtcacc

SEQ ID NO: 272319 - DNA, 122 bp, Homo sapiens
attggtacaaagcgtctaattactactatttcttttagcagtgcttcttatatttcaatgcgtatatgcatcacctgggaatcttgataaaatacagcatctggccgggcacagtggctcat

SEQ ID NO: 272320 - DNA, 122 bp, Homo sapiens
gtggagctggtatggggcctgactcaagcaaatgggaaaggaaattctgccaccctcagacgaaacatctggaacctgagctctgatgatgacggcctggccctgccgccttttagagacgt

SEQ ID NO: 272321 - DNA, 122 bp, Homo sapiens
attcatgtatttgttcattcattcataaattcattcatttatgtacttcctcattcaaagcgatacttagaaattaaatatactgaaaagtttcctgaggcagaaataattgtattcaagca

SEQ ID NO: 272322 - DNA, 122 bp, Homo sapiens
tgactgcaaagacatcttgggactgtgatctcctgcggggtcaggcggactctgcctgtgcgggcacacacaccgctggatgcttttccctaagcccccggagtgaaagcgatgctgcacct

SEQ ID NO: 272323 - DNA, 122 bp, Homo sapiens
gagatcttggggcgctgtccaatggcgcggaagagaacacatgagctggccaatcgggaacggcacgggggcgggctcgctcggcgcgaagttcgggcccgggaattccgaaggaggggtag

SEQ ID NO: 272324 - DNA, 122 bp, Homo sapiens
gcccctggcaaccttggtgaggcacctgaagcttggcagggacacctggctagagtggagcgtaggctgcagcccatgagggcagtgtccggccttaggcaggtgctgggtcaccagaaagc

SEQ ID NO: 272325 - DNA, 122 bp, Homo sapiens
tggagtgttctcatcaacaaagcagctaagaggtctgccagggctagaatattcggatgccggtctattgaaaattaacaaggaaaagatgttatcaatttagatatcaaaagtagagttct

SEQ ID NO: 272326 - DNA, 122 bp, Homo sapiens
accgcatccccacctgggttcagagaagcagattggatagtgggtagacggatggcctttcgaagcagataaacctgggctcagactttggcctccgttaactcttagctatgtgaccttgg

SEQ ID NO: 272327 - DNA, 122 bp, Homo sapiens
tcattaagagctttcactaaggtctgtgctgcttataagatattatttaggacttgaagtcgacaataaagcaacaagcgacagaaagaagagattagcaggcctggacaaggaggtatttt

SEQ ID NO: 272328 - DNA, 122 bp, Homo sapiens
aacagcccctgctaacatttggtgaacaacttgttcaccagttggtaggcacttactcagcgccaggcctggtgccaagctctttatcagctgcgaagcattcatcttatttactgctcaca

SEQ ID NO: 272329 - DNA, 122 bp, Homo sapiens
ggtgatttacttatccccattctaaatggagtgagctctctttgaggctaagcaaggaggcgttgtatgctagtttctagactttgcctggagacccctttggaaatctgtcttctttttaa

SEQ ID NO: 272330 - DNA, 122 bp, Homo sapiens
acggcagtgccctagaagagggctccgagctcggggtctgtgtctcgtcaactttcctttcggaggctgccgccgccagcgccgggaactcgccccagggatgccatatcgcctcggcaggg

SEQ ID NO: 272331 - DNA, 122 bp, Homo sapiens
aatagtcaggtgccaggtgctcctgtctttctctcagtccgtggctgacctgcctattgacgagtgtgaagggcccaagccagcatcccagcgtgcctgttatgcaggcccatgcagcgggg

SEQ ID NO: 272332 - DNA, 122 bp, Homo sapiens
cgagccagagtttccgcgcgaccactcccagtttggtttcgtaggcgcggggccgctctccgagggcgccctcagagcccgcgattgatataaatatgtaatctgtattgatgggccaggag

SEQ ID NO: 272333 - DNA, 122 bp, Homo sapiens
tccccagccccgtcgggggcaaacgttggtactgaaggtgccgtcctgtgcttgaagcggcgttcttccagatggtcctggggaacacactctttttccacaaaggcccttcagcggcgcct

SEQ ID NO: 272334 - DNA, 122 bp, Homo sapiens
gcaagattttttttaactaccaggcttaaaataatgaggtcccagagcacttactggcttcgagtacactttatttaagcagttactagtttaaaagcacctgtaataacactgagatcatc

SEQ ID NO: 272335 - DNA, 122 bp, Homo sapiens
ttcccttcccttcccttcccttcccttcccttcccttcccttcccttcaccgggaagcagcggccgcgatttaatatgcaaaggtggaaagtctggcattgggtgcatcgccccgcatgccg

SEQ ID NO: 272336 - DNA, 122 bp, Homo sapiens
aaggtcttttgcccctttcaagatgtttgtagaatttgtttcccaattatcccacatttgcgcgctgggacatcctagctaactctttgatggcacctctggaattgggcagtaattgacat

SEQ ID NO: 272337 - DNA, 122 bp, Homo sapiens
tgggtgcttccgcctccccttctcctgcttctccagcctcttcggcctcctcgcccgccgcgggaacccgagaccccagtgtatgccccacccctgaccccgctcgcgacatgtccaccccg

SEQ ID NO: 272338 - DNA, 122 bp, Homo sapiens
gctttcctgtttgactgcatgcaagttctggggagatgggggccagatttaagagacccgcgagtgtccagagagaaaagtttgcaaaagttcttttgtttgatgctccctgcggctagggc

SEQ ID NO: 272339 - DNA, 122 bp, Homo sapiens
acatcacggagacgaaagggcttggccacctgtggcagccatgataaaacctagggaaaacggagctcgaagtagcttattttatttattttttatttatttatttatttattaaggagtct

SEQ ID NO: 272340 - DNA, 122 bp, Homo sapiens
ccccgcagagacgctggccacacccagcagagccagctgctctcggaccagctcttcagccggatctgtggtcgcctctgaaaccgcaggctccctctgtgatgggctcgccaggccctgct

SEQ ID NO: 272341 - DNA, 122 bp, Homo sapiens
cacacaaaagagtggctgatctgcaagagacgttctgaatttaagtagcaaaggtagacccgatgaaaaacacagtgcttcaggttctgtaagaagcctgtgttacgggttttccatcctag

SEQ ID NO: 272342 - DNA, 122 bp, Homo sapiens
gatcattcttccatttctagacccttagctgacgtcattaggtagtttatcatagttctgcgagacatacagcttttcattaataggttagattaattaccgtcctatcattaaaacgcatt

SEQ ID NO: 272343 - DNA, 122 bp, Homo sapiens
cctgtccgggacctctggccaccaggaccacccacctaggaccgcaggctaaccccggggcgtcccctggcttccacccaggaccagggtggcgcccccagacaccaggcaggagtgacagc

SEQ ID NO: 272344 - DNA, 122 bp, Homo sapiens
tcctttgttggttcttttaacccagctaacacttctgttaatagtgtcttcagccagatgcggtggctgatgcctgtaatcccagcactttgggaggctgaggtgggtggatcacgaggtca

SEQ ID NO: 272345 - DNA, 122 bp, Homo sapiens
tttttatgggctgagtgaaaaaacctcgcccgcattggtttctgatggaacagctggcagcgccacggccccgggtggggtggcctagaggcaggggtgcttgggaggaacatctagcaccc

SEQ ID NO: 272346 - DNA, 122 bp, Homo sapiens
cggcggcagcggagactccgttcgcagactccgtcccgccgccgccatttcccgccggttcggatgaggcctccccagccttgggacgccctgcccccacactcaccatttccccacttcag

SEQ ID NO: 272347 - DNA, 122 bp, Homo sapiens
cgtcgctcagcgcgctcgccggctccctattggccgaggcactcgccaatcctggtgaagcggccccgtgagttggccctggttggtggagccggcactgagcccccctcctgctccggccg

SEQ ID NO: 272348 - DNA, 122 bp, Homo sapiens
ctaagggggagtgggcgcctaggactccctatgggagtcggtgggttataccttgactgccgttgatttttatttaactgtttagcttagtgactcaagtgttccccttttcttggggatga

SEQ ID NO: 272349 - DNA, 122 bp, Homo sapiens
gtgcgccctgctggctccccgacctctcccgcgatctgttcttgttaggattttgtttcgcgttgagcggagccacgcttgcggcttctgtcctctccgcgcctcgtatcgttcttttcttg

SEQ ID NO: 272350 - DNA, 122 bp, Homo sapiens
ctcgctgatctgtaaactgggcttacctcacagggtggttgtgaaacttcagtgagaaatcgtgtgttcagtggctgccctgcacctggcaacacaaaggagtccagcagatatctggtcat

SEQ ID NO: 272351 - DNA, 122 bp, Homo sapiens
gcctacggcctttcacgtctgcgtccgtgaggaggggctgtgtggggtgggctgggttcccgccaagcccgggctcaggagggtgtaggggtcgcaggtcacctcatcccagaggcagtggc

SEQ ID NO: 272352 - DNA, 122 bp, Homo sapiens
ctaaatgccaggcaggtcttcattgtggaattaaacagcggtgggagcaagcggaataaccgagttcccctcccgcacctgagtgccggcagcgagccgcgagccgggacctgtcacccgcg

SEQ ID NO: 272353 - DNA, 122 bp, Homo sapiens
actgatcctccgcgtatcacaggctttgtcgagttgtaaaacagaactctaactggtatccgccactgatatcatgcaacaccagatggtgtcatttgatcaaagaattttgctaacagaaa

SEQ ID NO: 272354 - DNA, 122 bp, Homo sapiens
ggggcatgggggggggggcttctggggtgctaaaggtgtcttgtttcttgatctggatgacggttacccagttgtatgtgtttgtggagtttactgaggcagggattggggagcacacagag

SEQ ID NO: 272355 - DNA, 122 bp, Homo sapiens
gtgggttgtgttgcatcttttctgctgaactgcggttttccttggaggcagggccgtgcccgccatggtgtggaatcctcccctgcgtctccccgtgcactgtggaccatcaaatgggatga

SEQ ID NO: 272356 - DNA, 122 bp, Homo sapiens
ctcccaggaccgcgtgtcgagggctgcttcccatgcagttgtttggaggaacagggcccgcgagggagggggcgggggcgggggaggggcgggggagggcgcgggggagggcgtgggggagg

SEQ ID NO: 272357 - DNA, 122 bp, Homo sapiens
taagtgcagaccctcctcccctctgttacaggtggccggccaagtagttacagtacactgcgtctagactaattctgaatgctcttttagtctctcttgcagggggtaaaaacccttcaaaa

SEQ ID NO: 272358 - DNA, 122 bp, Homo sapiens
tgtctggaagaaatttaaaatttaaaatgggcagccctattctctcctctccttggtgagcgagcggcctcctcgttttcgcctgcctgccccagtcccttggcagcccagcctggggcagc

SEQ ID NO: 272359 - DNA, 122 bp, Homo sapiens
gccttccctgcggtggtacaaacacacagaccctttcaagtgagggcttcattggcaattcgtccagacaatacaaaaggagggtcaataaggggaagggacgaaggctccaggaaggtcac

SEQ ID NO: 272360 - DNA, 122 bp, Homo sapiens
ccctgctggaagtggttcagcaccacggatagccccgctaatatccatcagaaccccgggcggctcaggccagaatggttcagcaccacaggcagccccccaggctcgcaggacagttcccc

SEQ ID NO: 272361 - DNA, 122 bp, Homo sapiens
caaagtcttaagcgcgaaccatctgttatctggaggcattttaatgtggtgtttggagtacggcccctgcagccaccctagctgggttcagatccccactgcatcacttcgtagatgtgcga

SEQ ID NO: 272362 - DNA, 122 bp, Homo sapiens
cccgcgacgtgagggagaacccaggagcgggctccggtagagaaagaagcttccggtcaacgaccacatccacctgaatcatgagcaggttttaaggcgtgtgtttcttcagctcctctaaa

SEQ ID NO: 272363 - DNA, 122 bp, Homo sapiens
agtggaatcacagcagccagcggggtatgagggttccatttcctcagtgtgcacaccaaccgctgtctttagtccagcagatgtgaagtggtatctccctgtggttttgatttgtgtttccc

SEQ ID NO: 272364 - DNA, 122 bp, Homo sapiens
acgatctgtttttcttgagagggggtctgcaggcagctggagcgcgcgcgttccggcccccgccggtgccactgagcgcctgcaaaacttgtcggaattaacctccggggaagtaggggaag

SEQ ID NO: 272365 - DNA, 122 bp, Homo sapiens
gagatgaaataacttgacctttgaagtatgtattgtatatatttgactcagtggagagctcgaaagaacgttctaaacagagaaaacaaagtgagcatttgtgcagtgacaaagatgtttat

SEQ ID NO: 272366 - DNA, 122 bp, Homo sapiens
tgacttcccagcgtggtggccccgcgaggggaccccggctccagggaggtcgcagaggtgcggggttgatggcctggcctggcatgtggtccccatcacaagagtcctgtggtggcccctcc

SEQ ID NO: 272367 - DNA, 122 bp, Homo sapiens
tgctagcctgccttatcatgtgtaaaaaatcactgttcatggtgagaaacagtataatcacgccttaagactccacatacaaaatcacatttgctattataatagagccagattttttattt

SEQ ID NO: 272368 - DNA, 122 bp, Homo sapiens
gggacgggcaccatcaccaccagtagcctcctcctcctcctcctccccagcatcaccagccgaacctgcctgcccagcccaatggactcctgccagcccatcgcagagttcttggcgcacca

SEQ ID NO: 272369 - DNA, 122 bp, Homo sapiens
gcaactgcaccccaggctgcggagcctcgtgagtccggcgtgccggggactgatggggggcggcggcaggacgtgggtgggggtgcggcggcccctcagcctttgcttgcctgccccccagg

SEQ ID NO: 272370 - DNA, 122 bp, Homo sapiens
cgtgctcagaccacacgaagcgggcagcatcgtggcgggcttagcccgggcactgcctctcgaagcttccaggagcttcctgtaactttccggatggtgccgcagctgcttccccggcaccc

SEQ ID NO: 272371 - DNA, 122 bp, Homo sapiens
gccgccctccctgccctgggctccatctcctggcatcatttacttcatgccctctgggtacgagtgacagtcagcatcactgcaccctggttagccatgtgtatgttgtggggcaccgtggc

SEQ ID NO: 272372 - DNA, 122 bp, Homo sapiens
cccactttctcctcgtctaccagctcgctgccaccaaaatgcaaatatgccatagaatcccgcatctcaaaaacaagacaaggccacctccctccagctgccacccccctccagctgccacc

SEQ ID NO: 272373 - DNA, 122 bp, Homo sapiens
tggtggcaggagagagaattgcaagcgaagggggaagaaccccttataaaaccatcatctcgtgagaactcacccgctgtcatgagaatagcatggaggaacttcgcccatgatccaatcac

SEQ ID NO: 272374 - DNA, 122 bp, Homo sapiens
acagtgagacaaagccttgccaaagggagggtaaaaatcatgaagtccagcatcagtgctcggtttaaatcatatattggtgacatacttatcacgaggacaagggggaaaaaaagtctaga

SEQ ID NO: 272375 - DNA, 122 bp, Homo sapiens
caacctggtggtggtggacaaggagagcaccatgagcgccgaggaggactacatggcggacgccaagaccatcgtcaacgtgcagaccatgttccggtgcgtccagtgtccggggctcggct

SEQ ID NO: 272376 - DNA, 122 bp, Homo sapiens
cagccattaaagaacaatacagctcagagggaagggagatacagcaaacaattacacaaacgcagtatgcacgctccttgccgacagggctgcccagacggcaaacctcttcatggacatca

SEQ ID NO: 272377 - DNA, 122 bp, Homo sapiens
ctttgttttgctcctagaagacaatggtcccatacctatttccctcgccctgtattttttcgtggactttttgggaagtccaggtcagttttcgtctgtagaatgttccacattctgggttc

SEQ ID NO: 272378 - DNA, 122 bp, Homo sapiens
tgcagaggaaaagtggcagaagcaggacaatgagccggcggcaggactctcccaggccagcgggagcgaggaaggactcgcgggtcccaggggccaggctggagactgcgctgcggcgggca

SEQ ID NO: 272379 - DNA, 122 bp, Homo sapiens
ccccccccgcccccgcgcccacatgttctggcgttcggcgggtggggtccgagcagctgacggttagtgtggcagttgccgggacctaacatggaagaccgcagaatcttagggaatggggt

SEQ ID NO: 272380 - DNA, 122 bp, Homo sapiens
tgcatttgagacttcatttgtgtagtagctattagggctatgccagtgcaattttctgaacgtctgaagaaagtcaggtgaaacaactgaactctggggaggctggtttctaatggactaaa

SEQ ID NO: 272381 - DNA, 122 bp, Homo sapiens
tcctgatactgcaactaccagatgctggactcttcctgcgtctgggttcccaaaccaccacggagagcaggacccctgctgaccctcacaggacatgtagcaagaggaagaagcatgctttc

SEQ ID NO: 272382 - DNA, 122 bp, Homo sapiens
ggattcttttgggttgaagactctattggcccggggggccatagtgaggtgtccaatggccggtatctcccacacagcctggcactccaaccgtaccctttatgagacctgcattgaacctt

SEQ ID NO: 272383 - DNA, 122 bp, Homo sapiens
gcgtgaagacggagacggcacccacaagccgaggagagagatctgggacagattcttctccgagggcctcagaagaaaccagccctgcccacacattgaccctggactcccagcctgtgagt

SEQ ID NO: 272384 - DNA, 122 bp, Homo sapiens
taacaacctcacaaacactacttagggaataatgccatgctgcagagaggtggacaaagacggggtctctatagctctgacacgtgggtcttgtgtagaaatacaaatcacccaggggcaaa

SEQ ID NO: 272385 - DNA, 122 bp, Homo sapiens
aaaaacaggacagaatagcaagcaaaaggggtctgatggtactcactgcttggcgataggcgattgtctcactgctcggcaataggcgatggtctcactgctcggcgattgtctcaccgctt

SEQ ID NO: 272386 - DNA, 122 bp, Homo sapiens
aacacattccttccacgtgtccgggattgacacttccataacacagggagcaaagagctgcgaggatcaccagggctggctgccgtcttggggaacaagagcagaggctcaatcaccaagta

SEQ ID NO: 272387 - DNA, 122 bp, Homo sapiens
gtggctttgtgccacttttcccagggcttgggcatcattctggacccatgttcggtgaaccggttactctcagagctgctttcgggcgcagctcctgctgcagccagggcccgttttaagag

SEQ ID NO: 272388 - DNA, 122 bp, Homo sapiens
gatgtttttcagacgctgaattccagcagaaagctgacaccaaccagtttgaagacaccccgacaggaaccgaatcagcatgagaatgcagtttcttcatctctagatcccatgacttcatc

SEQ ID NO: 272389 - DNA, 122 bp, Homo sapiens
gcaagagcaccaccgacaatgacatcgcactgctgcacctggcccagcccgccaccctctcgcagaccatagtgcccatctgcctcccggacagcggccttgcagagcgcgagctcaatcag

SEQ ID NO: 272390 - DNA, 122 bp, Homo sapiens
gttgagaaagggagacaacatcctaaaaccagagattcaggaacaaagggccactcacttcgtcttcactttctactcaagacaatagaggttataacagtaattaaaaacaattttttttt

SEQ ID NO: 272391 - DNA, 122 bp, Homo sapiens
aactgtgtctactggttgctgctgtgaatgattcaggtgaacgtaggcattttctgtaggcgctttccacatgattatggtagaataatttgattgtttcctaagcgtatcattcagttgta

SEQ ID NO: 272392 - DNA, 122 bp, Homo sapiens
caaatttgatcattttgtaatccaccttgactcatgctctggggatgctgaacattgtggcgtgaatgtgggatgacactgatgatatggatactgtccttttaggatttcttggtgtctct

SEQ ID NO: 272393 - DNA, 122 bp, Homo sapiens
aagaaactgaggcccagagagcccaaggacgcatcacagatgaaaacagcatctggaagccgactccttacagaagcctgagcccacgcaggacctgcttttatgctgcccccttgtggtca

SEQ ID NO: 272394 - DNA, 122 bp, Homo sapiens
ttccccattcctcaaccccccattcctctcccccctacgccgccagccccagagaaggaacgagaaagaaagacactagagaggaaagagcatcttcccgctcggagagggctcagcctgcc

SEQ ID NO: 272395 - DNA, 122 bp, Homo sapiens
gccgggtcgggggccgccagcaggccctttggctcctgctggagacactggaagaccaggcgaccaggacagcgggtcgggccagtgcggtgtgacacgagggctcgagcggcttcgcagtt

SEQ ID NO: 272396 - DNA, 122 bp, Homo sapiens
gctttctgctcaaggacgctcccgcagatcccagagcatcctctgcgccacgcgtgccggcgggacgtcgccgagccccagaccgatactctcgatgcccttcgcccccgcccccagcaggc

SEQ ID NO: 272397 - DNA, 122 bp, Homo sapiens
cagtgcggatcaggaacagcaggactaggctcatctccatggcccagactttgctttcctcgcagtggctcaagcggctgccaacccagcggagccgcgaaggcccaccagaaatttcctgt

SEQ ID NO: 272398 - DNA, 122 bp, Homo sapiens
tccgggccctcggggcgaaggggcgcggggcggtgcctcccacctccgcgggcgtgggagcgagccggccgttccctggtctcccttgagcctgccacccatttagcctgccaccccctcac

SEQ ID NO: 272399 - DNA, 122 bp, Homo sapiens
cgaaggagccttctgattggttgcgctgggggtgccgcggcggccttccccaagggtcggcggggatgcttcttccgcctggtcctagtggcagcggattctttccgcccccaacgctcgcc

SEQ ID NO: 272400 - DNA, 122 bp, Homo sapiens
tttcagactccggagcctcagcccttcaccccgattccattgcttcttgctaaatgctgccgttttatcacggaggttagaatgctgagcacgtagtaggtgctctttactttctaatctag

SEQ ID NO: 272401 - DNA, 122 bp, Homo sapiens
gagggcctgcggccctgcatgcatggcccaggctgccaaatcagttctgtcaccatggggcggcaaggcacaaggaggagcaagtgcgcgtgagacgcccaacaggagagatgcctgcactt

SEQ ID NO: 272402 - DNA, 122 bp, Homo sapiens
ggcgaattaaaataaccatcacctactgaatatttactataggctacgaattatggttagcgctttgcagtattttgtttaaccctcacaacaatttttggggggtgagaattatccttcct

SEQ ID NO: 272403 - DNA, 122 bp, Homo sapiens
gtcagcatgtggcagctcaaataatacgctccactagtgtgagaaagccacaacacagcacggagggaaccattcaccagaaccttctatcgcgtgtctgccgggcaaggtggccgctgcag

SEQ ID NO: 272404 - DNA, 122 bp, Homo sapiens
ttttgtcactactcccacatacaggacataaccacaccctcggccttggcattttgaagacgaccagttgcttcaccctcctgctttgccaaggctcttacccttttcccatgtgctctagg

SEQ ID NO: 272405 - DNA, 122 bp, Homo sapiens
gacctggagcctcctgggaaagaaaggaacagggcatgacaggcgcgggcgctgagagcgcgccccagagtgatgggagcctaggaactgggaggaagtttctctggaccttcccgcctgac

SEQ ID NO: 272406 - DNA, 122 bp, Homo sapiens
ttgtttttaattagagcctcaaccaaactcaaatacaatttgcatgaccacagctgaattcgcctatcatgtataccacaggacatttgcttttcctggttacagcatgactcagactttat

SEQ ID NO: 272407 - DNA, 122 bp, Homo sapiens
agagtcatgaaaaaactagggggaggaaagaggtccaaaataatcaaagtaggttattatcgggcctgacatgagcttcttggtgccaggtaataaagaaggaaagaattatagtgattaag

SEQ ID NO: 272408 - DNA, 122 bp, Homo sapiens
atttctgagtatcatcataccaaaacaattagtattctcttattcaaggctttagatgttcgattattccctacccttccatcctcacacacacaataattgcccagataaataataataaa

SEQ ID NO: 272409 - DNA, 122 bp, Homo sapiens
tgagcgcactgaggctgctactctggacagcgaaagctgcgcaagcccctcccgcatacccgattctttgactatggttagttgaatttccaggaggagagtctgcctccccaacctttata

SEQ ID NO: 272410 - DNA, 122 bp, Homo sapiens
ggctccctatagccccgctcctgttcctgtggggtcatggccagaggctaagtggcacggcggcactggcagaagcgcccactgttctgggtgtgtccctcaactgctttattgagaattgc

SEQ ID NO: 272411 - DNA, 122 bp, Homo sapiens
ggcgttttcggccaccacggcaaacacgaatcctatatataacgtaaccttgcttggcctcgcagcccagtcagcgcgctttatcaggctgggtggggcggagagccctgtggagagcagag

SEQ ID NO: 272412 - DNA, 122 bp, Homo sapiens
gctgcatgtggaagtgagcggggcggcagctagcttgccccgtgagtttttaacacagctcgatatgatgtttagtataattgcataatttaccgatatatctgagctggaactcagctgta

SEQ ID NO: 272413 - DNA, 122 bp, Homo sapiens
acctgactggattccgcagctctcgggacaagccccctggaaaagggctggggggaggggcggggaggcacccaattattctagaaggttctgagatctcccagggatttccgagaggctac

SEQ ID NO: 272414 - DNA, 122 bp, Homo sapiens
tgctccagccacactgatctccccatctttccctagaggtcccactgcagggcctttgcacgtgctgttccctctgttcggagcattcttcgcacagcctgctctttccaccacctccccgg

SEQ ID NO: 272415 - DNA, 122 bp, Homo sapiens
actgtgtgccaagaatgatggtggatgctttataagagtctccttacttattcgtcaccacgagccacagagacagaaaaattattgtcaccatgttatagccttttatatgaccctgaatt

SEQ ID NO: 272416 - DNA, 122 bp, Homo sapiens
gctccacttgtgttaaagggtggctggtgagggagggcaggagctgcaggagctcctgggcgctttaaactgcttagcatgcatttcacagcctctctggggccagctgttcctttctctgc

SEQ ID NO: 272417 - DNA, 122 bp, Homo sapiens
ggtcatttaaaatcagtattttagacactccactcgctctcagtgtagagagaatgtattcgattgcgtgttggaactacgtgtagacaaaacgatcgcggttaaagcttgcggctcagagc

SEQ ID NO: 272418 - DNA, 122 bp, Homo sapiens
ctggaggctgctgcccaaactccttcctgccccgccccttccctgctgtgatcgaggatgcgccaaattcattacagatcatctcccgagggatgggtggctgggggtgcagagagggcctt

SEQ ID NO: 272419 - DNA, 122 bp, Homo sapiens
cccccgcaggctcggggctgcgtccccaccagaaggcgcttggagtgaggctggcggtcccgcggtcccgggccggtcgccgagcgctcccagcggggacaggcccctccaccgctcccttc

SEQ ID NO: 272420 - DNA, 122 bp, Homo sapiens
cgggcgggtggtggcggagctgcgagcttgagcggcgcgaggagatgctagagggcgcagcgccgccagcaccatgcgccccccgcccgcgctggccctggccgggctctgcctgctggcgc

SEQ ID NO: 272421 - DNA, 122 bp, Homo sapiens
tcagttccacttccagttgtttctatgccattaaattctttccaggcgagataaggggcccgcccttcccacccggggcgtgtcacgtgtactggtggtggggggcgggggcggcgaggtga

SEQ ID NO: 272422 - DNA, 122 bp, Homo sapiens
gggcgcggctgaggggagcggaccgcggggggcgggagatgactgcgcccaaggcctttgcgggcctcagccggccccagaggaaggggaacccgtcgagcggtttggtgcgtgtgaagcgc

SEQ ID NO: 272423 - DNA, 122 bp, Homo sapiens
gtctccgtaggtactggccgacctgcaaccagaagggtttctagccagctcagggccctccgaacaaagcagcgctcggtgccggacctgcagctctccccacccggcagcagcgccctcag

SEQ ID NO: 272424 - DNA, 122 bp, Homo sapiens
gaaagcttggaaatgttctcctgctgtagtgagccgtcagctgcccttctatggcagacacgggcctgacaccttcctcaatagtcacctgacgttaaaaccagatgaaaatcccttgggag

SEQ ID NO: 272425 - DNA, 122 bp, Homo sapiens
cgagagggagtcaatggcatgcacgctccagggcccgccccgccctgctcccttaggcagcgcctcctcaactgccctcagtttcccaatcaggtagtgagagtggcacgaaccagccgttc

SEQ ID NO: 272426 - DNA, 122 bp, Homo sapiens
ggcggggccggagacgactccagggctgggtgaggcgctgacccccaggagctggggtgccgaggggcgcgggccacagcggtgcgagccagtcgggcgcccgcgcggtggggcgcgcggcg

SEQ ID NO: 272427 - DNA, 122 bp, Homo sapiens
aaaaaagccccacaaactctacagcttaagttagcctaaccacagctgagatatttcttccgaaagaactaaatgacaagttgagagaaaggccccattgtcaggtcagctgttcctgagaa

SEQ ID NO: 272428 - DNA, 122 bp, Homo sapiens
ctcggagggtcccggcagccgggaccagtgagtgcctctacggaccagcgccccggcgggcgggaagatgatgatgatgtccctgaacagcaagcaggcgtttagcatgccgcacggcggca

SEQ ID NO: 272429 - DNA, 122 bp, Homo sapiens
gccatgccgtgactctgtgctgaagagcactcctcctgcacgagtggagcctggctgccccgaacgcaccagcatgccaggcaggtaggggagcgtgcccggcaccaagacggtcccacacc

SEQ ID NO: 272430 - DNA, 122 bp, Homo sapiens
cgcgcccgccggctgtggctgcttctgcgcaccagcctccacgaagtcgtggaaaaggtgcggtgtgcctgtcctgcgcctcctggcctctttccggatctgggccttcccttaggggtccc

SEQ ID NO: 272431 - DNA, 122 bp, Homo sapiens
gagtgtcacacagacttccgaaatgggggagctggtctctggcacaggccagtaccccagcgtttgccctgtttgatttgaagggtgacagaaacgaggaggtcagagccgtgggccagggc

SEQ ID NO: 272432 - DNA, 122 bp, Homo sapiens
ggagctacagggcacaaggttgtgctccccactcagaagaagcgggcaccgagtcggggccgcgacgggaacacccaggagggccggggcggctgagtccagagcgcgcagaggtcgggcgg

SEQ ID NO: 272433 - DNA, 122 bp, Homo sapiens
ataaagccagaaagctcctgagaatttaatcaagggcaacgaaccatgagacttcccctacgggtagtcacctgagagaacttgggctgttttaactctgcaaagacagtattaacctgttg

SEQ ID NO: 272434 - DNA, 122 bp, Homo sapiens
cctacggtttcccggcatccgcctccctctccccaccacacctgaggaaaacttttccctcgcccctcaattcaaattcagcagtgcccacggttgccgcaaaccgcccggtccctagcaac

SEQ ID NO: 272435 - DNA, 122 bp, Homo sapiens
agaaaatgcagcactgtgtattggtctccagacaggttatattcctggctgaggtcacaacgtctggtgcaaaactgaataatgcgagggtgatatgggattcgtaagcatttttacactcc

SEQ ID NO: 272436 - DNA, 122 bp, Homo sapiens
tggccagaccctcgcctcccaggaaaactggatatccacacgcagaggagtgagccagaccgtcacctcccacccgagcgtgcgctgactcacagcgaatagcagagtggctggacgcacac

SEQ ID NO: 272437 - DNA, 122 bp, Homo sapiens
tgtgggggttcaagagatgagtttggagagggagacagaggccaagtcacaccccgccttcggaccaggttaataagggatatggcttttatccaagacttcggtggtgctgttggagggca

SEQ ID NO: 272438 - DNA, 122 bp, Homo sapiens
tggtgtcagttggggctagctgacaaagcttcctctctcagtctttccaatagcagtacccgattgggaggtgaggactctgctttgcctgcttttcttattgttggcagtgatggttgaca

SEQ ID NO: 272439 - DNA, 122 bp, Homo sapiens
ggcctcacccaggcgccggccgtgtgcggcacataccgaactgctgcagggagtacacggcgtcctgcatgtggatccagaagcgcagccgccccagtgagaccttgtcgtaggacacggtg

SEQ ID NO: 272440 - DNA, 122 bp, Homo sapiens
gcggggcggaggagagggttttccggagacagcaaggggtgttcagggtcctgggcttgccgcggggtggggtttctctatcctcctggaggaggagatgcttaaagaaacggcactgagct

SEQ ID NO: 272441 - DNA, 122 bp, Homo sapiens
cttgacgcgccctaatccctgactcagctcccacttcttgttaaaccaaaggtaaattttcggccggcggggcagccccggagcgggaagatccacaccgcggagcagccgtaggaaatatt

SEQ ID NO: 272442 - DNA, 122 bp, Homo sapiens
aagtaccgcaaagtgggtggcttagaaatttattgtcttggccattttcctccggaagtgcggatcccagcggcggtcctgtagctgagcaggcctgtggcttggttctatgtccctgtggc

SEQ ID NO: 272443 - DNA, 122 bp, Homo sapiens
gcggcgctgccgccccgcccggcccgcagagaggccctggcagcccagatcgtcccagggcggccccatcgccggcgctgcgcggtgcatctcaatgcagaaccccaatccgcccgcaggga

SEQ ID NO: 272444 - DNA, 122 bp, Homo sapiens
cctcccatttccccacccatcaccctcatatccacctctgtccagggtgccgccagctgccgcaccagcccgaacaccattgagggagctgggagaccctccccacagtgccacccatgcag

SEQ ID NO: 272445 - DNA, 122 bp, Homo sapiens
cagcgagcttgcaagcctgggctgtccaggaggtgaacattaaccttcccagcgctgacgcgggcgccgcccggggcttggaaattgtcagcaccgcggtagccgggctcgctcgctccatt

SEQ ID NO: 272446 - DNA, 122 bp, Homo sapiens
ggctaacagaaaatgctgactattccttaaagaggaggtgaatgctaccactctgacctgcgtagctctttatgtgtaagtaaaatgaacaaataccttacaataatggtttctcactccaa

SEQ ID NO: 272447 - DNA, 122 bp, Homo sapiens
gtcagacctcggagcgcacgctgcgggcgggggctcggtccacgggggagggtcaggggacgcgggactcacccttgaaggagtcggggagccgctgggcttcggagtcccgtgtgtgccgc

SEQ ID NO: 272448 - DNA, 122 bp, Homo sapiens
tgaaaaatcttttttcaaattttatgagaaagtgaactggatatttaactgattttctcacgaattccttctgaggctcagaagtgtgaaagaagcccaaatgaccaaggttctttaacaat

SEQ ID NO: 272449 - DNA, 122 bp, Homo sapiens
ctaagttttgtatttttagtagagatggggttttgccatgttgcccaggctggtctcagacgacatcaggtgatcttcctgcctgtgactcccaaagttctgggattacaggcgtgatccca

SEQ ID NO: 272450 - DNA, 122 bp, Homo sapiens
gatcacactaggggcagacccgcttcctgagcattttccacaggcagacatggccctgagcgctttccgtgttttgtttcatttcatccatcccaaggtttccaggaggcaggcaccattat

SEQ ID NO: 272451 - DNA, 122 bp, Homo sapiens
cccctcgcagtgtgcaaaatgatggcgaatgacaaagccacatgcttccctaactctgcccgtaatcctaaaatcccagcggccccttttagcttcctggtaacaaatggatttgattaaac

SEQ ID NO: 272452 - DNA, 122 bp, Homo sapiens
ccttagaaaccagaagagccatacagtcagtggaaggcgggggggccctggcctctgcaccgggatcccagtgggaaccttcatgccttatttatttctaatgggtaaaggggttttcttac

SEQ ID NO: 272453 - DNA, 122 bp, Homo sapiens
tgcctgccaactgaggggatacagtctctcagtgcacagagccccgcaaagccacggggccgtcagcagcgagcatgccccagcgcgaggcgcagcccaggcggcgtggccaagccagccga

SEQ ID NO: 272454 - DNA, 122 bp, Homo sapiens
gttagaactacgggtggtttctgtctcctgagtgaaccctgaagaatatagcaggagatgcgaagatgtgagctagaaatctgactcctcgtaagtctctatattgcctctttttggaaata

SEQ ID NO: 272455 - DNA, 122 bp, Homo sapiens
aggcagtttgaagcaagacagggctgctgcacatagccccttgaccgtcacggcagcacacgtatcacattcctcccacaatgtttatcctcagagaagaggttgaaggcatgaatgtgtgc

SEQ ID NO: 272456 - DNA, 122 bp, Homo sapiens
ttccctcaaactggagccttctcaccagcacaagcccaccttatgcttctggctccatgtcgctattcagattgttccctccacctgaacaccattgctgctttctgtgtccttcaaaccct

SEQ ID NO: 272457 - DNA, 122 bp, Homo sapiens
tcgtttcatcgtgccttacagatgagctcattgaaaaacgtgttttgcagcggtaccatccgctgagtatgtccagaggacatttctggccatatacgtgtcttaattgctatcgcaggctt

SEQ ID NO: 272458 - DNA, 122 bp, Homo sapiens
cacagctgtagttaaaacaaagtagggttctttgtttgagacttttctttgcctgtcctgcggtgcctaacaaagtaaccttgtaaaatatttgttactaactgaactgaatgcccccttaa

SEQ ID NO: 272459 - DNA, 122 bp, Homo sapiens
cagcctccatgctttcaattaaaacgagcatcatcgatacaataagttatttagcagtttcgagtgcgttaatatttacttacgacctctgcggctttggccaaattacttaatgtcctttt

SEQ ID NO: 272460 - DNA, 122 bp, Homo sapiens
tagcactgcttctgccagtcagctgagctcaggggcctaccttcctgagaaggaactggccgtgactggcagagccagtgagatctgattgggcaacaagataattgtgatttttttttaaa

SEQ ID NO: 272461 - DNA, 122 bp, Homo sapiens
aaggctcggtatgtgaccaggattagggctcaatgtgtgaccagggttgggggctcagcacgtgatcaggattagggctcagaggtgtgtgactatcaaggctcaggacgtgaccaggatca

SEQ ID NO: 272462 - DNA, 122 bp, Homo sapiens
ggctgaagtgttcatggtggctaggtggggctggggttggagagccccttcctccaggcacgctacagggcttcctcaggggaaagtcatcacctgaaaagagaggacatgggctttggttg

SEQ ID NO: 272463 - DNA, 122 bp, Homo sapiens
ggagggccacaggcctcaacctggcatggcccactggcatccacaggcatgtaactcacccggggcagccctggcaccatgtgcccagtagcctgttggtgccatgcaggggtgagggagac

SEQ ID NO: 272464 - DNA, 122 bp, Homo sapiens
atggggatttctgctgttttgcactgcacatggaggaccatggagaaatatgttattgaacgttattgaacaagtggaactgccccttaaatttttcctttgatcatagagtggggaggagg

SEQ ID NO: 272465 - DNA, 122 bp, Homo sapiens
agagcgagggcaggagagctcccggctgcagacagcagagaagctgatgctcgctctcagcggctcccattcagccttcacttaaggagcagagagtgctcacataacgcgatgctcaggca

SEQ ID NO: 272466 - DNA, 122 bp, Homo sapiens
agatgccagggagatgtttcttaggcacgtaagtgagaaatgggggagctacttctgagacgtgagacagctgaaattgaatgatatactggaggaaataaatgataacaaacctccccaca

SEQ ID NO: 272467 - DNA, 122 bp, Homo sapiens
aggcaaaggcagggctctggagaacccagggaagcagcagactgtccaggaggctgagggcggctgcaggaattattttttttttctttgagatggagtgttgctctgtcgcccatgctgga

SEQ ID NO: 272468 - DNA, 122 bp, Homo sapiens
agaactccaaaccacccaggtggtcccagaagcagagctggccaccctttccttgcttgacggcttccaaacagaagcagctggttgccgtgcacaagtccagggagctgataaggaggggc

SEQ ID NO: 272469 - DNA, 122 bp, Homo sapiens
gccctcatctaagagctgaacacaagtagtaacaagtgctcaatcaaaaggaaagccagacgaaggcatggagagtgatgagaggctaccttaggtaggtggccaaactcagcctctccatg

SEQ ID NO: 272470 - DNA, 122 bp, Homo sapiens
gccctcttgcgagtgtcgggcagagccatgcttctttgtcacccctctttcaggctctcacgttcgccggctcatcttagagcttcctgaatacacgggaagctttcgcatcccacagtgtt

SEQ ID NO: 272471 - DNA, 122 bp, Homo sapiens
ctgggttccaagtgactgacttgcaaataaactttggtaagacagtccatttgtagtttgcgaatggcctttaggccatatagatagaaaagcatattgggataagcatggatctcaatgtg

SEQ ID NO: 272472 - DNA, 122 bp, Homo sapiens
attagccacgttttatctttgataggtagctctaaagtcaagaaaacccaggcaagatcccgggcaagatcccagcactgccaactgtcatttgtagaccggggataggaacacctgtctca

SEQ ID NO: 272473 - DNA, 122 bp, Homo sapiens
gccactcatgatgggaggtgcctgagaacagaggtcctcattgtgaggggaggcggccagcgactcaccacaaagcaggcaagcgggaaggctgtgaagcaggtgccaggacgctgcctggg

SEQ ID NO: 272474 - DNA, 122 bp, Homo sapiens
cattccccctttttcgctttatgggactgagttttgacccggttttgttgctagtgggcgcgtccggtggtgagaaacttttctggggggttcctgccaggttatcagcaaataatttgtcg

SEQ ID NO: 272475 - DNA, 122 bp, Homo sapiens
ttgagtagcaactaaaaattgcttgctcctttctgaagtatagagaaactaagaatcctgcggtgacccagggtcttggagtcccacaatactcattgtcttatcatccagtagacctccag

SEQ ID NO: 272476 - DNA, 122 bp, Homo sapiens
gagcggctgggtcacaccagcccagccctgtacctgtagacagccactaaacaggcccctcgccctctgcacctatggggaccttggctggacctcactggtgtctgagcctgctgggaaca

SEQ ID NO: 272477 - DNA, 122 bp, Homo sapiens
tggggtcatcttatgctgggcaccgcctctccaattatctgcaaaaagtgatagcagtcgcgcttttctttaggaggcgatgtgatgtgtaatggtggaaaagacgttcaatgaaaaggcac

SEQ ID NO: 272478 - DNA, 122 bp, Homo sapiens
tgacagccatgtgtcctgcaccctcaggtccactggctgcccaggcagtgctgggaaagccggggttcacagctccaaacagtagacccagcccccagagcaggtggggggaccaggaggca

SEQ ID NO: 272479 - DNA, 122 bp, Homo sapiens
atgactggagcttcacagaaggtcaccgtgcgacccatgcagagccccctagccccagcccgtgacctcaagtccccagaatagcaagctagcaggaacaggaatgaaaagggcggcctcgg

SEQ ID NO: 272480 - DNA, 122 bp, Homo sapiens
acaattagatcgggaggtggaagctggcgagggcgttacttgcaggatgcaggagtgatgcgatcagagccagccggaaccgagttccgttacgcactacaggactgacctgggcctgacaa

SEQ ID NO: 272481 - DNA, 122 bp, Homo sapiens
ggggcgccccctggtggggcacggaggtcgagggggtatcctgagagcaccgcggggcttcggggccgcgggggagctcccaagacagccggccaccgggggacagtggatttggggtctcc

SEQ ID NO: 272482 - DNA, 122 bp, Homo sapiens
agtcctcccctcaattgtctcattcaccaactgtcttcttctctcgactaggtatggttccgaccggcgtttagccgagctctctgattaccgccgtttatcagagtcgcagctttcgttcc

SEQ ID NO: 272483 - DNA, 122 bp, Homo sapiens
tccttgtcactgctgtgtgtccccagatggacaactcctcaattgtctggaggtcgggggcgtgttggacagtcctggtcgctgagtcatgctgaagcactctctttttgactcactctttg

SEQ ID NO: 272484 - DNA, 122 bp, Homo sapiens
gacggcctcggggcaatcaggggtcagtggggggcatagtggggctggtgctgcccggctcgttggagaggcagcgcggggaagtgtctgcccggtcccagggcaggacgggccgcccccac

SEQ ID NO: 272485 - DNA, 122 bp, Homo sapiens
tacatgctgttgtgttttccctccagccccagcggattggacacattcagaaggcgggtccgcctctttcctacttgctggttggcgaagctgacctccaagggcggtgcccggccatagcc

SEQ ID NO: 272486 - DNA, 122 bp, Homo sapiens
aatttgaatgaaaaggagccagctccgcaaagatgagtttccccctccaggctaatggaacggctagtacaatgcctgaagtgagaaaaatccacgtatttgaggaataagaactaggacag

SEQ ID NO: 272487 - DNA, 122 bp, Homo sapiens
ttgggtgcccttaacccttaaaatgcctgcactactgctgtgcagacgggcaccttgacccgcatccttctgcaggaaccttcatagaaataccagccagtcccggcgttcagcactgctgt

SEQ ID NO: 272488 - DNA, 122 bp, Homo sapiens
tgccaacatctgcaccagtactagtcctctcatccagtaccggtcagggacccgtcgcagcgagagcacttgcaggccaacacgagaggggagcctgtacaaagcaaccacccggagaaacg

SEQ ID NO: 272489 - DNA, 122 bp, Homo sapiens
ggcggcccgattcgctcctgccctcccggccgcttcctgggtctgaactctgggaggcggcgccgctgctgccgctactgcgggtccggctcccggctccgcccccctcacggccccgcttt

SEQ ID NO: 272490 - DNA, 122 bp, Homo sapiens
tgaagatcccgagtcctgcgattctcgcctctggctggagggggtggggtgagaggcgggcgatgggctgctgcctctcgacgccccccttgcccgctacaatcaaatatacgcgtatctgt

SEQ ID NO: 272491 - DNA, 122 bp, Homo sapiens
acatgatactcacagcccacccggactctgggactttctctgtgaataagctagtgagaccggaggccaagcagatggcaagctgtggccctctccatcatcttcctcggaggccaaattcc

SEQ ID NO: 272492 - DNA, 122 bp, Homo sapiens
acaatcccggttggctggctgcagagttgatggaggaacggcttcattccgaggtgccgccgtgctctgaaaggagccgcgaccatgcgaggcatttgttagggcagcggttctcaaggggg

SEQ ID NO: 272493 - DNA, 122 bp, Homo sapiens
tcagggaaaatgtttccagattcttgttaaatagctctactgagaactagcaaatgcaatcgtagggatgctttcaggctttacagagaggtaacagaacacaacctgcagggacgcttcct

SEQ ID NO: 272494 - DNA, 122 bp, Homo sapiens
ctcaggttcttggcccaaagtatacagagttttgaaggcctgactcctgcaagagttgttcgtcagaaactcatgtgactgatgtcatgttcagctgataatttctaactatgcatgcggag

SEQ ID NO: 272495 - DNA, 122 bp, Homo sapiens
cctgagttcaaatctcaaatctgcttttctcctttggtttcattttcctcacctgtaaaccggtggagatgggagagacaggatacttggactttataggattactgccaggatgaaatagt

SEQ ID NO: 272496 - DNA, 122 bp, Homo sapiens
tctcccatgcattactatgttttgaaagaatagggaaatagggataagtagggaaggtaccgtgatataatcagtaaaaaagggagaggaaataaaagtacagaaactgaggtcagctggga

SEQ ID NO: 272497 - DNA, 122 bp, Homo sapiens
cccatccgggcccgtcccaccccaccccgggttcctcaccccccacccctacttgtggcgcgcgggcccgctacctggaagttgctggagtacaccagccccttgatagagccctggcggct

SEQ ID NO: 272498 - DNA, 122 bp, Homo sapiens
tcttggagggctctgcagcttgtatcagccacagacagtcaatgaagacacagctagaaccgtccatcccggctgcactgcagagcaagttcttgtcactgtgctgaacttctgggttctca

SEQ ID NO: 272499 - DNA, 122 bp, Homo sapiens
ggacactgactgaatgttcgcccctaacttacccggaaaacacgagaactagttcgatgtcgtttcaaccttaccaaactctgcggaaacttaggaaattatctttagtgtctagatagggg

SEQ ID NO: 272500 - DNA, 122 bp, Homo sapiens
gtgatgaacaatttgtgaatcgggcggccttctcagccatggtaagctcagagaccccagcgcagccatgcgggggaagatttatggaaaaaggaacatgaggaacagaaaacagaagtgag

SEQ ID NO: 272501 - DNA, 122 bp, Homo sapiens
agcatttgcaaaagaatacattaacctcacaaggaacgacccccaccacccatcctccagcgcccaaggtttcccacgaagaggtcgccgtcgcccttctccaagttgggtagaacctataa

SEQ ID NO: 272502 - DNA, 122 bp, Homo sapiens
cccggcagcagcacaaaacttaaccaggatttctcacttcggtcaactcttgaatcaccgcgcccagtctggctggctcggcagcagatggaatgagggcgccggcgccaggaagtggcgct

SEQ ID NO: 272503 - DNA, 122 bp, Homo sapiens
aaggggtggagggatgcaaaagacctttaggatttcagttcccaggtctgtatcgggtgacgtgagaaaacaaagcagaaagggctgacctgtaccctagggctttttctaccagcttctta

SEQ ID NO: 272504 - DNA, 122 bp, Homo sapiens
ttcggggccgttttggcggctatgcaggattggcaggagctgcgatgctcacacttgcctcgccgaccgccatttcacatccagcagaggaggcgggggcagccgctgagacggtttttcac

SEQ ID NO: 272505 - DNA, 122 bp, Homo sapiens
tttcatacatcctctaaaatctaggcagagcttcttaagcctcaactcttgcattatgtgcgcccgccggcttcacagcttatggaagccaccaaggcttatgcctggcaccctgtgaagca

SEQ ID NO: 272506 - DNA, 122 bp, Homo sapiens
tgcataaccacaatgttattgctatacctttaaaaatttaggagtgggctgcagcctgggcgacaaggcttcccccagctgacctctgtgccctagaaaccgtagggacccaatgggtcagc

SEQ ID NO: 272507 - DNA, 122 bp, Homo sapiens
ccagcgttttctaaccgcgctgaggcagtcgcctctccgggtcgctccactcccggactccggcagcctgttggccttcctgtcaccacctcgcatggagcaccctgccctaagccctggaa

SEQ ID NO: 272508 - DNA, 122 bp, Homo sapiens
catggcttacatggtgagtgctaacatggaccagggagccacggacttccagatagaggccgccatcagcaaaatctttggctcggtgaggtcccaggcatgctgggagggagtccagtttg

SEQ ID NO: 272509 - DNA, 122 bp, Homo sapiens
tcctcccgcctgtctggctgccctgcctctggatcagcctggcacagagccctgggctttcggccagctcctcctcccctccccgcccccgccccctttctcagctactgccatcctgaagc

SEQ ID NO: 272510 - DNA, 122 bp, Homo sapiens
gaagtagaattagacaatgttttacaccgtgccagtgaaagcaaactgtactctctacggcgctagtagcaaaagcaaagaattattaacatgcctaataggagccctaaaaactaatccag

SEQ ID NO: 272511 - DNA, 122 bp, Homo sapiens
cgccttgcaccttccagagccagctgccggctctcagtaccccttcctgaacccctgtcccgggccccttggcagagccccatgagatctgtgatgaggacaactttggtgctgtgatctgg

SEQ ID NO: 272512 - DNA, 122 bp, Homo sapiens
acctcaggtgatccacctgtctcagcctcccaaagtgctgggattacaggcgtgagacaccgcacccagccagtcaatcaatttaaaatgggctgtatacttggcatcagagatggaagtgc

SEQ ID NO: 272513 - DNA, 122 bp, Homo sapiens
gcgccctgcagcggacctgaggtggtttgtctagactaagtcccgataaggcggatggggcgacgggctggctggccgcgacgtcggccgtcccggcggaggtgtgacgggcttatccgctt

SEQ ID NO: 272514 - DNA, 122 bp, Homo sapiens
ggggttggtcattttatgagagaattggaggaaaaaaaatcccttccgacgctctaagcccgggccagagtgcctggagctcaatggagcgggcataatttgtttgctttgcaattctctcc

SEQ ID NO: 272515 - DNA, 122 bp, Homo sapiens
cgcagggggcgcagagccggcgctggccaatatgcgccgcatgtgatacctttgagggcgcggcgggggagggtagcgtcaaatttcaaaaaaaaaaaaaaaccaaacccacacagccccgg

SEQ ID NO: 272516 - DNA, 122 bp, Homo sapiens
aatgcctttaattaaattacccatacttctcttggaggctttgtttcgtaatttgtgaaccgggactattacttgctttccttctctcatgaagttgagttatgagaatataggatgatggt

SEQ ID NO: 272517 - DNA, 122 bp, Homo sapiens
gataacaagcgaagggaaaagtggcaccgtaaacaagccgcgtcttttccctccgcagagcgagccgtgtgtctggaggcggtgtctgtgtgcagcttgactcctaatccatatcgcaaaca

SEQ ID NO: 272518 - DNA, 122 bp, Homo sapiens
tgaggaccatctcccacctgcccccaatacacccctgaatactcttccccatactccatccggatttccaccacagaacgtggccccttcagatgtgcaaacacacctggggaagagtgacc

SEQ ID NO: 272519 - DNA, 122 bp, Homo sapiens
tgatccggaggtggggaagtcagcggcgggtcttcgatggcggtaaacagcagtggtggacggcaagcgaaaactcagctccggccgagctccagccgtaacaaacacgaaccagaagagtg

SEQ ID NO: 272520 - DNA, 122 bp, Homo sapiens
aaaaacagccgaggcctggtctggaaagctcacaacctccacccagatgctttccagcctcggggatattcgtactagcagtgacactagccagcttcctctaggctggctctgatgttgga

SEQ ID NO: 272521 - DNA, 122 bp, Homo sapiens
aagaacttggtaacctcgagtgggcaccaacgacttactgattactcactgacttgaccgcgtggtccttcttcaccttctttttcgggggtccatcgcgttcttcacacttccttcacagc

SEQ ID NO: 272522 - DNA, 122 bp, Homo sapiens
cgggcgggcggtgattaagcggctcaggcaggcagcgggcggctggggcggggcatggggcgatcagttacccactaaatgggcgggctgcgtgccctgcctgtcccgaaggccgagccctg

SEQ ID NO: 272523 - DNA, 122 bp, Homo sapiens
cttctaggatctagcatttttaattatctaactctaatgaggggtttacgtagagggcttcggggattttcagtatggctctctatttgactgagtttgaaggattcctgaaaggaaatccc

SEQ ID NO: 272524 - DNA, 122 bp, Homo sapiens
ggactccaaggcatgtcaatcttttaagaaggaggctgtgttcagttggagatttttcatcgtattactgaattaaaagtcacatatgacttctatcagaggtgaagaagctgcaatacttg

SEQ ID NO: 272525 - DNA, 122 bp, Homo sapiens
cccagcatagccccagcgccctgccaggcggcgctagcggggatcacccggctgcaactgcgaggggcttggaagaatcacctgcgcccggttccctcatctcacagctgtaggcgaccagg

SEQ ID NO: 272526 - DNA, 122 bp, Homo sapiens
ctgaggcctgcagaagttaaggctgtcttgccagtttgtgccaaagctgggacctgacaccgggtccgggcctggtgctgtgcgcgttcgttggagcagcggttcccagtgcttccctccac

SEQ ID NO: 272527 - DNA, 122 bp, Homo sapiens
caagtgtgctggagggtccggaggaagatgggaccctcgaggggtgacaagctcgctggtcgttggcttagacactgcagcagtgcccaccacgcagcctgtcctggacttagtcaccccca

SEQ ID NO: 272528 - DNA, 122 bp, Homo sapiens
tgctctcaagtacctgaaataaggcttgtcaggagacatggtaatttgtaggacttcactcgtcatatccaattcagaaaatgcttcacggagcccctctgactgcagaataattttattaa

SEQ ID NO: 272529 - DNA, 122 bp, Homo sapiens
ttcccgtgggctgtacatctggcctcccccgaggttatccccatagccccctggccccatcgagtgtcggagtgattccacctgcaggcagcagaggaaggtatgacagtgaagagaagcct

SEQ ID NO: 272530 - DNA, 122 bp, Homo sapiens
ctgcatggtgatggagccctaatgaacagcactcaaggactctcggccatgtgtgctgggcgcagggcccgctgtgcaggagcccgtggacggacgtgtgcccttctcccccagcttggata

SEQ ID NO: 272531 - DNA, 122 bp, Homo sapiens
cgagggcagtctctgatcctccagctcccctctaagaggctccctggtgcattgggcgaacgcggtgcacgcaggccggctttggcgttgtggggccccaaagcggccaggggtcgcgaggc

SEQ ID NO: 272532 - DNA, 122 bp, Homo sapiens
aaggcagcgacactcaggctccccggcaaggagctctggggctgctgctgtggtaggacccgtcccttcttcagctctggtacccacctccatcccgtctgtaggtggcgtcccattctaga

SEQ ID NO: 272533 - DNA, 122 bp, Homo sapiens
aagggcagtttgagagaagtaaaatctattgaggcaccttggacacaggagggggtcagacggcatcagcctttgagggtgctgcagttacacggctccagcagtctgagccttatcaagac

SEQ ID NO: 272534 - DNA, 122 bp, Homo sapiens
ctcctggcccaaggatcgggacagtgccctctcccttcctctcatccccacgcaggtgcccgtccagctcgcactgatctgtgcgtatccgtgctgcaagtgcttgggcctttgctggcacc

SEQ ID NO: 272535 - DNA, 122 bp, Homo sapiens
aaaatagtaaaacaggcccatcaggccccagagccacaaggccgcagcaccacaccaactcgcaagtgaccttccttgggccgggggctcctcagctagtccctgactcaaggctgtgtcat

SEQ ID NO: 272536 - DNA, 122 bp, Homo sapiens
ggatgcaggtaagcagggggtgtgcacagccgctgaaccatgactgggcattgaccctcccgccaaggccacactcccaggctggaatcactgtggttgcttgggggctgtgtcagctcata

SEQ ID NO: 272537 - DNA, 122 bp, Homo sapiens
gctcaggagttgctgacactgtgaacaaatccccagtccagccccaagtccccgaaaccccgggcccctgaccatcagctccaggcagggcagatgacttgactaggaggatgctgagtctg

SEQ ID NO: 272538 - DNA, 122 bp, Homo sapiens
ttcccacggcagcgcgcctcttctggctacaaagctgctgcgcgtccgagctctgcagggcggagactcacctacacagcggtatccgaggatgaccaccttcctgtagcggactagcggca

SEQ ID NO: 272539 - DNA, 122 bp, Homo sapiens
gaattgggccctttctgttgaccagcgccagctacaggcattgctgtgttcgatgcatctcgcggatttgctgagcatacttctcagatgtaatggtttctcagggattcagaaagctataa

SEQ ID NO: 272540 - DNA, 122 bp, Homo sapiens
gggcagttgtccaagctccagggagggtcgtgtccggtagggcgtccggtggccggggcccgggccgcgcgcgctgcgctccctgcagccccgggactggcgcgctgggggcgcgagcacag

SEQ ID NO: 272541 - DNA, 122 bp, Homo sapiens
ccacaaaattacatacaaaaattcccttttccaacgcgaagatttcctggcatctctctgcgattgggggtcaagccgctggataattaacagtactggctaagaaaactcacgagatcaac

SEQ ID NO: 272542 - DNA, 122 bp, Homo sapiens
ggggtgagttttaccttgagctctccgtctataccctgtgagctctccaaattccagctgcggcttgatctatgtctctgattagtggatgtcatggtttatgatctgctgagccacatcta

SEQ ID NO: 272543 - DNA, 122 bp, Homo sapiens
ttccagcaaagcctcttttatcgatggcttctgtgggtgtagttaacctccgccgtcccccgtctgatctcattatttcagatcctcgcatcctggctggctttgccttctctctctcctcg

SEQ ID NO: 272544 - DNA, 122 bp, Homo sapiens
ctctagttttatccaaacctgctgttggacctgaaatccattaccttgtaacggtatacacggatggctgaaagagatacacagaggaggtggtggcctaattgcctggcactccgcgggcc

SEQ ID NO: 272545 - DNA, 122 bp, Homo sapiens
tagggagcttgctagggtgaggcagctgcaggttcagagagccaggaggcagcccagcagcgcacttttaacccccgcccacttcggcaggcccagccgtgccacctttagggatctcgggt

SEQ ID NO: 272546 - DNA, 122 bp, Homo sapiens
cgagggggtggctgtgtggatctgagccaaccgcacttcacaaaaggaagcctggtggaccggctcgcggatgagcccctcggggcggtcgcttcgggccctgggcacgtgaacccctcaca

SEQ ID NO: 272547 - DNA, 122 bp, Homo sapiens
gctctgtcagctccagggacacagggaccgtccccgggcccatcagcgcaatcgggagggcgtccgtgtgcccacaggcccagctacacctccacaaagctgggaaagacgaacacgggcca

SEQ ID NO: 272548 - DNA, 122 bp, Homo sapiens
aatcacacttctgtcctgtgcagcttcccttttgttttaggtaacagactttggcatttccgaagtcagatcttagtggtatttttttttcttcaggtaaatattattttattatttaaaaa

SEQ ID NO: 272549 - DNA, 122 bp, Homo sapiens
tccctccccgcctcgcaatcccgcggcgccagggtcgcttttgggggcggggagcctgtacgcagccaccgttagggtcactcggctctgatctaggtcccatccgcctcctccacgccatc

SEQ ID NO: 272550 - DNA, 122 bp, Homo sapiens
gattgggttaggctcctcctgtgtgctgacttcattgtctctctccaacattgcttagaacgctaagttgcaactttatgtctaattgattgctccactagtccataaaatctaggaggaaa

SEQ ID NO: 272551 - DNA, 122 bp, Homo sapiens
ctccctgcgctggggtcagaactggtatctttctcctcctctggggaagtcagggcagcccggagtggcgtcgtgggtccgaaaaatccgtctcagaaacccaccaggagaaaaggctctgg

SEQ ID NO: 272552 - DNA, 122 bp, Homo sapiens
tgtgtgcatgtgtgcgtgtctccatgtgcgtccatatttaacatgtaaaaatgtcccccccgctccgtcccccaaacatgttgtacatttcaccatggccccctcatcatagcaataacatt

SEQ ID NO: 272553 - DNA, 122 bp, Homo sapiens
cgtcactgccacggatgacgacgccccaggcccccggccccgcctccgcctctgcctccgcggccagcactggggagcgtcctggcctgcgcttgctccccaacccctccttgccccgctct

SEQ ID NO: 272554 - DNA, 122 bp, Homo sapiens
ccaggagggtgcgtccgtccgtgtgaatgcacttgcagatggctgtaatcaccctaaccgcgcgacttaacatttgtaaagagcttagcacggtgctggctcatagtaagcgctgcgcagct

SEQ ID NO: 272555 - DNA, 122 bp, Homo sapiens
ctgcatggttcttccggccctgccagcaccaaaacccacaagtatttatcctgtgccgcgcgaggaggccctgctgctggcacctgagccagtcgggccacgctcatcgccagccagactga

SEQ ID NO: 272556 - DNA, 122 bp, Homo sapiens
cgccccgccacccggagggactgtaacttcggccaggccctgcccctgggacggggacatcggcgaagcccctcctcccacccgccagcaagtgctgggcctcggggcgtgcagcgagccgg

SEQ ID NO: 272557 - DNA, 122 bp, Homo sapiens
ccgccgcggcgactagcaagctgtggccgccggaagccacgcccccggcgcctgccatgacggagtcgggcaattccgggttcgtgacactttcctcacaccgatcgcgacggtggatgggc

SEQ ID NO: 272558 - DNA, 122 bp, Homo sapiens
tggttcctctttgcctggtgcctggccctgggatggttaaagcaggggaatactgctttccggggtaagggccaaatagaagaggtatggctccttctactactttgcataacaaaggcatg

SEQ ID NO: 272559 - DNA, 122 bp, Homo sapiens
agaaaaacaagcaagtttctgagctcaccctatacccgctgaacagaatgactgcggtggcgccccagaacctctcacaggcctctcagctgctgctaatgcccgccgaagccccgacgccc

SEQ ID NO: 272560 - DNA, 122 bp, Homo sapiens
ctctcctggggatgggcaggatggggcacgtagggcggaggaagaggctcacatggtgtgcgtgtttgggagcaccctgggcagcctctcgagtgtccagagagaggacaccgtcttgagcc

SEQ ID NO: 272561 - DNA, 122 bp, Homo sapiens
atttcatagaggggtaagctctagagagctgaagtggcaacacttgattctatctcaggtcggcctgatctcaatcctggtatttagtgtaagacccagataggtggccagaactgaagacc

SEQ ID NO: 272562 - DNA, 122 bp, Homo sapiens
acacagaggaagcttgagctgggtgagcaaaataaaccacccctgcaagcatccttcacccggccccacagttcaacctgctcttgtccctgggagcacttacatggtttcaccccctgtct

SEQ ID NO: 272563 - DNA, 122 bp, Homo sapiens
acatgacaggagtgggtagcccacgggacactggcacgagcgccatgatgggcggagacgcgcggaatcggccggcccggaagtgccagctgcctgcgtcggccggaagtgccgcgcgggag

SEQ ID NO: 272564 - DNA, 122 bp, Homo sapiens
agccagcaccggctctgctattcacacttggttacaggtgggtgcccatcccagcagcctcggagcagagtgggtcgggctccggaggtgggggcggccactaacagcaggaggtcgtggca

SEQ ID NO: 272565 - DNA, 122 bp, Homo sapiens
taaggctgagaggagactcgtgggcaggctttgcaattgaatgaactatcagtgtggttgcgaggctattttgaagacattttagattgtttctggttcagtaatcttacaaaaagtatgat

SEQ ID NO: 272566 - DNA, 122 bp, Homo sapiens
tccttccaagtgtttaccctttccaaattcatcttggaccccataagcacactatttatgcgtccccagtttctttgttcaatttcaagctgttgatattccccaattctgtataaggccct

SEQ ID NO: 272567 - DNA, 122 bp, Homo sapiens
gggacgcggccaaggctcgctgttgcctggcactgtgagctggacaggcctgggccctcccggggcagtggcgggaccggctctggcccgaccccgtgcaggtgctgccgcgaaggggcctg

SEQ ID NO: 272568 - DNA, 122 bp, Homo sapiens
ccgctggaagtgagggtggcacaggctggagtgacagtgtgcctggccttggaccgaggtcggtcctgagaccccaaactgcgattttccctgcctgtggcaaaggggcgggtttattgagt

SEQ ID NO: 272569 - DNA, 122 bp, Homo sapiens
cttaaccacaaagcaaccctgcccagtctgtgcttcctccttctttttatatcactgcgacgatcttggcaggggaaaacaaagcagaaacagaacccagcatttcacattaatgtaacagt

SEQ ID NO: 272570 - DNA, 122 bp, Homo sapiens
ccatgcaaactgcggctgcgagctcaggggctcactcatgtgtccccagtcactgtcatgcggactgtcatcgtatttgccaaaaacgcttcacaaggggagctataaacagcagtgtccac

SEQ ID NO: 272571 - DNA, 122 bp, Homo sapiens
tcctatgtcccggcccacgtggtcaggggtcacaccaggtgatcagaagcccccacgtcccggcccacgtggtcagggtcacgccaagtgatcagaagcccccacgtcccggcccacgtggt

SEQ ID NO: 272572 - DNA, 122 bp, Homo sapiens
aaacgctactcaaaaaaccttcaagtaaagccattcaaattatgtgaaaaaaaattaaggcggagaaaagctatattttcaatttggtcttgcaaatgctaatcagttcagataggagatca

SEQ ID NO: 272573 - DNA, 122 bp, Homo sapiens
ggaggaaacctgtgagggcaggacagaccccggctcccactagatggcactgttgcaggacgttttcaccccggagctcttctccgggtgtgtgtgtgtgtgcacgcgtgaatacctgagct

SEQ ID NO: 272574 - DNA, 122 bp, Homo sapiens
atgctttgagtaaaatctcacaggaactcagagctgtcctttgctgtagttcttcagtctcgagcagtgtacaggatctatctgcagagggtactgttatttcccctaagaagcagtaccat

SEQ ID NO: 272575 - DNA, 122 bp, Homo sapiens
cagtggtgacagtcaaagtgatctttgttgattcctgtctcaggtttgactcctgttgggcgttgagtcccgtgccaggagggactgtgtctgtctcctttgtgagctccctgtgttttagg

SEQ ID NO: 272576 - DNA, 122 bp, Homo sapiens
atgatccaggcgcccagaggctgtgggtgctgcagccttaattattattatgaccaccttcggcacggcgtctggtacacagtgagtgctgagctccccgagccgcggtttctccaccctaa

SEQ ID NO: 272577 - DNA, 122 bp, Homo sapiens
tccggctgagggtgcgtggatcagactgggctgagcaggcaagtcatcgtcgggtcacagcgaggcgacccaggagcgaacttccagggcagcctcccttttgttggcgctgggagagaatg

SEQ ID NO: 272578 - DNA, 122 bp, Homo sapiens
ctatctttgggcatttctggttactagaatgttcttatcccatttaaagctcacatcccccgcctttaaactcccactcagatatccttgtatccccagtgaccaagcagaataattctttt

SEQ ID NO: 272579 - DNA, 122 bp, Homo sapiens
atcgcagaagtatacgatatcctattggttattcattcatccgaaaaaacattgacttagcggtgcctgcaggataattttcaaactctttgttaggttctgggaatatagaaacgaatacg

SEQ ID NO: 272580 - DNA, 122 bp, Homo sapiens
cccaccctcgccgccagacagcaagcccacatgcgggctcatttgtgcaccgaaggggtgcgctttcttctgctgccctcctttcagacaaactgctaccgcacagagagcgagaaagagaa

SEQ ID NO: 272581 - DNA, 122 bp, Homo sapiens
agctccccgaggaggagaaagttgtggaacagggacaccagggagctgccacagccttcccggtggccccgggaggtcttcgaggccctccagggtgggcagttttgagagaatacagccca

SEQ ID NO: 272582 - DNA, 122 bp, Homo sapiens
ctccatccgcccaaagtgccaggagctccggcacctctgtgaccagttctctgcggagatcgcaaggaggagggggctgctcagcaagtccctggagctgcaccgccgcctggagacggtag

SEQ ID NO: 272583 - DNA, 122 bp, Homo sapiens
gcggtacgtggggacttgggggagtcgaggcttcagagagcggcttcagggctctctgcacgtggtccaggcctcgtatccctgtgtgtgtaactccccgcgggacccagggcacttcgtct

SEQ ID NO: 272584 - DNA, 122 bp, Homo sapiens
gcattgttgctcttctccaatatactccgcctgcaaaaatgggccaggtgcggtggctcacgcctgaaaccccagcactttgggaggccaaggcgggcagatcacgaggtcaggagatcgag

SEQ ID NO: 272585 - DNA, 122 bp, Homo sapiens
ctttctggggttccagagacgctggttgtgatgagcagcaaagggcctcactgtctaagtcgcccagcagttcccttgtcctcgggaaggctgcatcttaatggagaccaggaaaggtaatg

SEQ ID NO: 272586 - DNA, 122 bp, Homo sapiens
aataccaatcatcttctctttaaaattttaagccacctaacaacttagagtcaaaatcaccgttaaccaaagttgtaatatttcagtatttgttattgtgtcctttcatggacttttttcca

SEQ ID NO: 272587 - DNA, 122 bp, Homo sapiens
gtgtggataaaagccaacttcccacagtctttgtcggtcttttcaacttttctctgctctcgctcaactcccagagggccgggtggcgccggccagccgacgtcccagcggtggcctccccg

SEQ ID NO: 272588 - DNA, 122 bp, Homo sapiens
tctgagaagtgtcctcctcgctctcttataaaaacaggacttgttgccgaggtcagcgcgcgcatcgagtgtgccaggcgtgtgcgtggtttctgctgtgtcattgctttcacggaaggtgg

SEQ ID NO: 272589 - DNA, 122 bp, Homo sapiens
ttgggctagcaagcatgtggagatgatgcgtgttgtgggagctgcctctgtgccctaatgcgctctctccaagaaccgggtctcaggggtcccacgggcaccgtctcccaggcagtccatca

SEQ ID NO: 272590 - DNA, 122 bp, Homo sapiens
ctacgctgcgtgaaacagccagtcaccaaaggacagacactgtgtggggttccactcgtacgagacacctagagcaattaaacccgtagaggcagaaagaatggaggtcgccagcagccagg

SEQ ID NO: 272591 - DNA, 122 bp, Homo sapiens
cagagatatgaggcaccctttgctccacccacagcagggccccgtcagactctgccagcgcgtcctgcccgcttccctcggtgacctgctcagacaatggagagggatgggccaggttcttg

SEQ ID NO: 272592 - DNA, 122 bp, Homo sapiens
gtgcagctcgaagagaactgcctgtgccgcttccactggtgctgcgtagtacagtgccaccgctgccgtgtgcgcaaggagctcagcctctgcctgtgacccgccgcccggccgctagactg

SEQ ID NO: 272593 - DNA, 122 bp, Homo sapiens
accagtcctgttcctcacctctggctgcgggaagggtttaaaggtgagcgggaccactggcgcagcggacggaccatctgcatcaagacgcacgaaagcggccagaaagagatcgaggcctt

SEQ ID NO: 272594 - DNA, 122 bp, Homo sapiens
ggcaggacttcgggagccagagcctggcggcgctgccgcagcgggtcactcccagggggccggcacccagacttggcatcgttagcgcttgggtgctctgtcaactagcgaaggtaattttc

SEQ ID NO: 272595 - DNA, 122 bp, Homo sapiens
atttgatgctctgcttattcagttatactagatgtgtttctcagagttatccagtccatacgtatttgaagagacaatttggtgtagaattgttagtgtccaggctcttccaagcaaggtct

SEQ ID NO: 272596 - DNA, 122 bp, Homo sapiens
aaaaaaaaaaaaaaaaaaaaaaaacacacaattaaaccagttatttaatagaattacaagcgacacttggcctctccgtgggctgacccttggggcctcactgaagaaagctttgcacagtg

SEQ ID NO: 272597 - DNA, 122 bp, Homo sapiens
caggacacccagccgtggtcacacgcggggacacgcaggacacccagccgtggtcacacgcggggacatgcaggagtcccagctgtggtcacacgcagggacatgcaggacaccccgccagg

SEQ ID NO: 272598 - DNA, 122 bp, Homo sapiens
gggtgccgaacagcggagtcaggatctccacgcccacgtggtcgcggaactccatgtccacgtccacgcacaccaggtaatccacctcgctgaggaagcgccgctcgcagaagtcactgatc

SEQ ID NO: 272599 - DNA, 122 bp, Homo sapiens
gccgggatggcccgctggggacaccggagaaagcctgttttaaatttaatccgaacttgacggtgtggattgaaccggagggaatttaaatcactaaaaggaaggcgcggggcagggggagg

SEQ ID NO: 272600 - DNA, 122 bp, Homo sapiens
cggaaagagttttctccatttggtacaatcaccagtgcaaaggttatgatggagggtggtcgctgcaaagggtttggttttgtatgtttctcctcaccagaagaagccactaaagcagttac

SEQ ID NO: 272601 - DNA, 122 bp, Homo sapiens
gtctgatgcccgcctgggctcaggcacggacggagtggagccaggtggcagcaggcagggcgcgccgccagagtgcccagctcccggggctgcccacagggtggggccgccctcgccgccgc

SEQ ID NO: 272602 - DNA, 122 bp, Homo sapiens
taggcaaaaagggttccaacaaagggaacagcagtacaaagtgtagagacagagtctgcacggcatatttgggaaagcaagacagctagccttgctggagcagcatgagaaagcagaggaaa

SEQ ID NO: 272603 - DNA, 122 bp, Homo sapiens
cctggcctccaagccccagccctccttcctaagtactcatcaaattcaaattcttcagtccgtgtgttatggctcatcttggccggccgtggggtccatgttctaggcttctgtttccaact

SEQ ID NO: 272604 - DNA, 122 bp, Homo sapiens
atcctggcaacagccctcctcatcctctgcccctttggcctcatcctgggctcctacgggcgtatcctcgttaccatcttccggatcccatctgttgcgggccgccgcaaggccttctccac

SEQ ID NO: 272605 - DNA, 122 bp, Homo sapiens
ctcaaccgaagtctgcagtctcctctgctgcacaactgcagcaggactgaagtcacctgacgtcttctgggtgtggaacagtctgacgcagtgcaatctgtaactaggctactaatactcca

SEQ ID NO: 272606 - DNA, 122 bp, Homo sapiens
tttcttctttcatcatgaaacctggtggttttgtgtcatgtgatatgtttttcagagattcggcaggaagcttgcaccgagtgaaggatttataaagattataggagataacacaaagctat

SEQ ID NO: 272607 - DNA, 122 bp, Homo sapiens
aggggtcctgaaaggcttgccttatggctaagggagagtggcagagctaggattacaattcgtgtcttttgaatccacggttccctgtaatgtgctgtggatggaaggtggtaatagtttct

SEQ ID NO: 272608 - DNA, 122 bp, Homo sapiens
catcagtggcagtggccagaatgtaccagaaccctgaaaactgcgcagcggatgtgtgggcggggacaggagctgccaccgggggctgtccccacccccgaggttcccagctagagaaccca

SEQ ID NO: 272609 - DNA, 122 bp, Homo sapiens
tcttgcgcaggcgcgagaaaaccccgagagaggccagtgcctctgtgcatgcgtcagtggcgagcgcaccgcccccacccgcaccccggcttggctttcccccgtgggcgcttttcggcgca

SEQ ID NO: 272610 - DNA, 122 bp, Homo sapiens
caagagctgcaccttcatggcctcatctaaccctcgttatctcccaaataccactgaggccgtcctgctggggcgagggcttcagcgtgtgaattctggggcaggggcacggtgacgtgctt

SEQ ID NO: 272611 - DNA, 122 bp, Homo sapiens
ggcggcggcggcggctcggttgacgcctcctccgccagctgagcccgcgggagcccaggacgccgcttccccgcccatccccgctccccgaggccggccgcctggtcatggcgcagccgggc

SEQ ID NO: 272612 - DNA, 122 bp, Homo sapiens
aaagcaaaggagaaagtctaacataaactcaaaatgcagacacaataaagaatacactaacgagtctgtttgggctttttaatcagcagaattcattatggtaaatgtgaatggctttgtag

SEQ ID NO: 272613 - DNA, 122 bp, Homo sapiens
cggggcgtagggggaggtgggggtgcatccgcgagccctaaaggtcatgaccctatggggcgtctctgggtcgtcgtgggggatgggcgggggggggggtctccccgccacgggaggtctag

SEQ ID NO: 272614 - DNA, 122 bp, Homo sapiens
aaccaacgtgtgccaaagcgcatatattcattcaatagataatgaactctactgtcagagcgtcgccaagcgctagccttgaaagctatcccctactgaggatacatgtattacgcagcaca

SEQ ID NO: 272615 - DNA, 122 bp, Homo sapiens
tgctggctattagttaggcttcatttttttttgccatgggggcctctccatagggctactcgcaacctggtggcctgccttccccagagtgaatgatccaagagaaagcaagccagagggca

SEQ ID NO: 272616 - DNA, 122 bp, Homo sapiens
tgttgatcattttagcatctttggccaaaaccaatattccacttgcaaggtggtaactttcgataccttttagattccttctacattttttagctggtgtttttctgtaaatagagctttct

SEQ ID NO: 272617 - DNA, 122 bp, Homo sapiens
aacagggccctcgggcctctggtgtcccccatggtgcagggggatgacaaggtgtttcgccgcgcgccctcctggaggaagcgcttccggccgcgggagcaccacggtcgcggcggcatgct

SEQ ID NO: 272618 - DNA, 122 bp, Homo sapiens
gtcctgtcaccagttccttatcttcttcctgggagtaaggcgtctatttctgcagcagttcggaaaccttcaaaatttacaaaacaaaaacacagattcgcttaaaacacgggtgggccatg

SEQ ID NO: 272619 - DNA, 122 bp, Homo sapiens
tggacataacctctctacctgagatagtcatgctcctgtattcttctaccatttgaatttcgaggtgtttatctagttatagtaatggatttatgctagacttatgatggatttatgccatc

SEQ ID NO: 272620 - DNA, 122 bp, Homo sapiens
ggagcaccacccacagaacctccaccaactgacagtttctcttcttgacttgccacccatcgctggatgttgtccactttatccaccatataaaacagtaagcagctgctaaaaacaaaaaa

SEQ ID NO: 272621 - DNA, 122 bp, Homo sapiens
ccccggaggtgtctagggaatgcaccaggtagggtgcggggccgagtagctggtgcccgacgggaagcttgcaagacgctcggcttcctattgcaagaccgcacccctgccccgaagcgttg

SEQ ID NO: 272622 - DNA, 122 bp, Homo sapiens
aagacatttgggtgtgcagcgctctcatgttgtggacgctgctgtgccaggctgggcgtccgtgcggagcgcgcccagcgctggagcgcgcctaagaggcgccctgcagtgtggctccgggg

SEQ ID NO: 272623 - DNA, 122 bp, Homo sapiens
acacctgcggaccctccctctcctggcttcccgtctggtcatggcgagattctgggtctgcgtagccggtgctggcttctttcttgcatttttggttttgcattcgcgtttttgtggctctc

SEQ ID NO: 272624 - DNA, 122 bp, Homo sapiens
ccagttccaagccgagatgaagggatccaggggcacttcaaagggcttctgggcatcctgcgcccctcagccgctccagccccgtctcggcctggcaccgcgcttctcctgctccctcgccc

SEQ ID NO: 272625 - DNA, 122 bp, Homo sapiens
aatgttttccacaccgcgtgtgaaatgacgagagcttttgtgtcacacatgtagctgctacgagacagacgctcttgttccggatcagagcagcagacagaaccggcacttttagggtccaa

SEQ ID NO: 272626 - DNA, 122 bp, Homo sapiens
ccccggagaatgtgttaaaaccagaatgcggggcagccagggtttctgattcagtaggttcgagatgggcctgaggatgtccatctgtgacaaactcccgggtgatgctgctggcccggggg

SEQ ID NO: 272627 - DNA, 122 bp, Homo sapiens
gacgggcggtagaagctagagggtgagctggtgaaggtgccttctcaactctgatcctgacgcctctgcctgcagcatggtttcccacgggtcctcgccctccctcctggaggccctgagca

SEQ ID NO: 272628 - DNA, 122 bp, Homo sapiens
catgtagaccagatctgcttcctggggtctactggcggaaacttcctcatagactggattcgcgactgcgctgttcccgtgatccactgcgcctgcgcgggcgcctggctgggctcggcggg

SEQ ID NO: 272629 - DNA, 122 bp, Homo sapiens
tctgaagattaggatgtggacatttttggggggctataattcaacctaccacagaacgtgcggaaaggcttattaatgctggtgcaggtattagaacagatctggattcaaatcttggcttc

SEQ ID NO: 272630 - DNA, 122 bp, Homo sapiens
aaccaaaaaacaaaaatccgcgtatgtactaggcagtagcacgttagctatagagtgtgccgttggcttccaccaatatgtttcacgaaggcaacagagagtatcagtcaatttgcattatg

SEQ ID NO: 272631 - DNA, 122 bp, Homo sapiens
atttgcttacatcaataatttctggtttcacttgctacttcatgccagaataaaagccaacgcatgtagaaatcatctctagagaaagaaactgcctctgtttaactactctgggttcatca

SEQ ID NO: 272632 - DNA, 122 bp, Homo sapiens
tgatcttcctcctgagctgggcgtccatggacgcagaacataggaagctttcgtgagatacgcaaagggtgccactgtccggttgccctcccacctccgtgtgagtccctgcattcacctca

SEQ ID NO: 272633 - DNA, 122 bp, Homo sapiens
tgtcatcatttcctcagttataatttttgcaaaggcagtttcatggggggtaaacccaaacggccccctgcagtcctgggagtggcttcatgaaggggaccacgacagttctcctctcccta

SEQ ID NO: 272634 - DNA, 122 bp, Homo sapiens
aaacattgtgcttttctgtctgcaaagtcattattccgtgagttaacgagtcgtcacccccgcctgggaactcaggggtcccgggtgctcctgggtgtgggaactcaggggtccagggtgct

SEQ ID NO: 272635 - DNA, 122 bp, Homo sapiens
ttccaaaaagcctatttttgtgtccaatttcttcatcttaagaaataccgtggccaggcacggtggctcatgcctgtaatcccagccctttgagaggcggaggcaggcgatcacctgaggtc

SEQ ID NO: 272636 - DNA, 122 bp, Homo sapiens
gttctgggtagaagcacgtccgggccgcgccggatgcctcctggaaggcgcctggacccacgccaggtttcccagtttaattcctcatgacttagcgtcccagcccgcgcaccgaccagcgc

SEQ ID NO: 272637 - DNA, 122 bp, Homo sapiens
gctgggaggaccaggcgttgtggctgggatctgtggcaacccaggaaggagctgcaactccgaggagttggggtgtgaaaacaatcgtccactgtgggctcaggaagagcagggcctggtgc

SEQ ID NO: 272638 - DNA, 122 bp, Homo sapiens
gaagtctggctgatggtctgcagcctgtctgcattgaccctactagtccagaagtgatatcgggccatacacataggactcctcatcaaagtgggatttgggattggaacagagctctgggc

SEQ ID NO: 272639 - DNA, 122 bp, Homo sapiens
gctcggaaatgttaacaggctctacccacctgcaagctcccgtttccatcaccgctgcctcggagatagctccagaatttctttgcatgggaggagcctagggaagggccacgcttttggaa

SEQ ID NO: 272640 - DNA, 122 bp, Homo sapiens
cccctactgcccagcccgggaactccattcatacagctctcaggaacagctcggagggcccgggcagtgccgtgctgggaatgctcttcctgcaccccagctggagccccttccagcaggct

SEQ ID NO: 272641 - DNA, 122 bp, Homo sapiens
gcttgagagggcaaacccaaaacctcatgacagccagagcctgtctttcagcattcagtccgcctggccggctccagtttccccatggggctgcgggacagaggaccattacaactagatca

SEQ ID NO: 272642 - DNA, 122 bp, Homo sapiens
tatcagaatagtgattctggcttccaccccaaaatcagaaccacagttctgtaaataggacggttcttaccaacatcatgggataggaaaaggaagtgagggcttttctcaaaacaactgtg

SEQ ID NO: 272643 - DNA, 122 bp, Homo sapiens
ggctgctggacagcaccggagcggccgctccagccagccccgcaggatgaagggaggacacgagggtcggtgtagttctagaagcccgcactcacactagcgcgtcctccgtcccgagccgc

SEQ ID NO: 272644 - DNA, 122 bp, Homo sapiens
ttgacaaccatacaaagtagggctcattccccttgtttacagatgagaaacttggggctccgtgaggttcgataaatggctcaagttcacacaggtggtggatgatggtgacagggagaaac

SEQ ID NO: 272645 - DNA, 122 bp, Homo sapiens
ggccgggaaccaggtccccgggaggagcgcggggcggccggggcaggggcgagggcggggcgggagcccccaaaaccctcccgaaccctcccggccccagcggccgcgccgagcccagctgc

SEQ ID NO: 272646 - DNA, 122 bp, Homo sapiens
atctcagctcactgcaacttctgtctcccatgttcaagctattgtcatgtctcagcctcccgggtagctgggattacaggcatctggcaccacacccggctaatttttgtatttttgttttg

SEQ ID NO: 272647 - DNA, 122 bp, Homo sapiens
tttctatctggttcatatatttgccattctcaattgactctaaaaaggtatgagcagcagcgggacaatcttgcccaacagtcattcaacatggaacaagccaattataccatccagtcttt

SEQ ID NO: 272648 - DNA, 122 bp, Homo sapiens
cattttgaattaatttttacatatagggctaggtatggatcaaactccactttcctttctcgttctctctttccctcaccacctctgcatataaatatccaattgttccagcatcatttgtt

SEQ ID NO: 272649 - DNA, 122 bp, Homo sapiens
cctgcatcagctgctgcttcagcttctggatctcagagatgttgagctcactgagtaggtcggagacgaggctgggggagggcggtgcgaggccctccttcttgggcgtggaggtcttgttg

SEQ ID NO: 272650 - DNA, 122 bp, Homo sapiens
gaacgcaatggcagaagcttgagaatgaagactaggtgggtgggccctggatgggaaggacgaggcggcctatgtttcaacacctcccgtgacaggaacttcatttcatttcattgtctctt

SEQ ID NO: 272651 - DNA, 122 bp, Homo sapiens
tgctgggaccgagagggcaaagcgtgcagagaaggctgcacaccctgcagcctcagccagcgcgtgataggggagctctgggcagggacaaagctgcagtccctgtccctgaatgtcggggc

SEQ ID NO: 272652 - DNA, 122 bp, Homo sapiens
gctgggaggcagggctgggcctggacatgccgatggcgttgaccgcgtagacgcgcatctcgtacaccacgccctcgatcatgcgccgcgcttcatgactcagctcctgaatcaggtcgaag

SEQ ID NO: 272653 - DNA, 122 bp, Homo sapiens
ttgttatggccgatgctgttttgaatgctgtcaaagtaccagatggctcccaccccccaccgcttacttctcctcctccagctcgttgctgcagtcctccactacccctgggtcttagtgct

SEQ ID NO: 272654 - DNA, 122 bp, Homo sapiens
ccatgcgcgccgctggctgatgccccgctggtggcagaaggtcccctttcgctctggctgcggtggcttcctggaaatgaacagctgtcgagatctggtcccgctctcccacccgagagccc

SEQ ID NO: 272655 - DNA, 122 bp, Homo sapiens
aaagttttcctcttcctgtgatccccacgatggtgaattcagcaacataaatagctcctgcgcacacgccaggcagggatggcgaagaacacacaagaaccctcactgcctccaccaaaagg

SEQ ID NO: 272656 - DNA, 122 bp, Homo sapiens
aggtgctgggattacagcagcaccgcggatgtgacgtttggtgttcctgtgaacgtggggcggggcggggccgtttgcttgctcagtgcctagacgatggtggtggaaagacgcttctgtgg

SEQ ID NO: 272657 - DNA, 122 bp, Homo sapiens
gtggggcgatctcagctcacagcaacctccgtctcctgtgctcaaaccatcctgccacctcgacctcctgagtggctggaaccacaggcatgtgccaccacccccagctgatttttgtattt

SEQ ID NO: 272658 - DNA, 122 bp, Homo sapiens
cttgtgtacaaaaaaggaagtgccaagaactttatgaacactgattgcaactttaaaacacgctctgcatgcaaaatacaggaagggaatgtgcactacacacattgttattaatgccggca

SEQ ID NO: 272659 - DNA, 122 bp, Homo sapiens
cacccacacttccagcacttctcggacttctctccggaactgactcagccgcttccctctcgcactctgggaggtgacttcaggctggccctcattctgacccaaatcctgaattctagctt

SEQ ID NO: 272660 - DNA, 122 bp, Homo sapiens
agtcttggcccatttcactaccacctaactaaagtgtcctgggccctaaataaatgtgaacggtaatcaggccatagggactgcagtccttgggcaagacttggacatgtggacacggggta

SEQ ID NO: 272661 - DNA, 122 bp, Homo sapiens
ccacgcagccccagtatccactgccttcccccagctgcaagagtttgcaaaaacattgggcgtctcatttggcgagcgttttggcgcggacagaggccgaggccggccggggaagccggacc

SEQ ID NO: 272662 - DNA, 122 bp, Homo sapiens
acactccctctggtggaccttcactttcattaaccaaatgttttccaagaggctataagtcggcctggcactgtggctcgcacttataatcccagcactttgggaggccaaagcaggaggat

SEQ ID NO: 272663 - DNA, 122 bp, Homo sapiens
cccagggtgcggtaaatgatgaccagagcgacggcgaactggccagcgtcatcagggtgtcgcctccgcctgctgatcggggcctccctctcggtgccaggccccgggcgcgtggtctgcgg

SEQ ID NO: 272664 - DNA, 122 bp, Homo sapiens
gcaggtgagccaggggccttcgcagtggcgtagtcggccttctgagtcaggcggatctcacgctgcagcctgtggggagtggggcctgagacctctgagcgtgtggcaccctccctgccctg

SEQ ID NO: 272665 - DNA, 122 bp, Homo sapiens
tcctgggaggaaagtttcagcctgagtgacaacgacgtggagaaatccgcctcccccaagcgcatcgatttcattcctgtgtcaccagcaccgtcacccactcggggaattgggaagcagtg

SEQ ID NO: 272666 - DNA, 122 bp, Homo sapiens
tcacttccggtctcgaaaagtttctacttccgctatcaggagatctacttccgggccctgcgtggcagttgaaagagtggcgggagaagttgcaggtgagcgtccccggtcgcaggcctgcg

SEQ ID NO: 272667 - DNA, 122 bp, Homo sapiens
tggagggagtaagactggcggggagagctggcattttcattccttgttgagcacagccctcgcccctccccaagccctcctgccgaccccctcgggctggccaaaagcagcaagttcgggag

SEQ ID NO: 272668 - DNA, 122 bp, Homo sapiens
atttactcattttcttttctttcctgcctttcacatattctcttgtcacattgaattactcgactctcatagatgatgtgtttcttaagggcagagcccgtgcccagatcacggtacctttg

SEQ ID NO: 272669 - DNA, 122 bp, Homo sapiens
cctttctaaccgttttctctacccccacccgttctttacaaacgcgctttttttgctttacgctaaaatggtgcacaggcttcctttaataaagaactgaagtttattgagcgtcctagtgg

SEQ ID NO: 272670 - DNA, 122 bp, Homo sapiens
gccagagactataagtgggcttgagctcgaccgcgcgcctgtggaagttctttctctactcgaaaaagggaaagcatttccttgagtttgcgttttaagggaaacttacagcattgacactt

SEQ ID NO: 272671 - DNA, 122 bp, Homo sapiens
tagctttattgtgtctattttaaatgcaggctttggtgatcacaactctataaacccaaccgaaaattacccaaggaccacagcagttggtgtggtgaaaacagctcccagctggcttctgc

SEQ ID NO: 272672 - DNA, 122 bp, Homo sapiens
gtttaaaagtgcaaagtgaatagtagaagcccctctcctcgtcactaggggtacatttgccgttttcttatcaacagcctctcaagtacaagcatctgggacaagaactagaaccgtgcttg

SEQ ID NO: 272673 - DNA, 122 bp, Homo sapiens
cacacggccgccctagctggaaggagccgggagctcagccaagtatatagccttccagcccgagaggggaggaagctgaggggcagggttaggagcagatgtggcgtggccacctgagtgtg

SEQ ID NO: 272674 - DNA, 122 bp, Homo sapiens
tgacctaaagtgatccaactcagcctcccaaagtgctgggattacaggcacgaaccattgcgcctggccgtggttttcaagaataactgaagagccaggcgcggtggctcacaccttgtaat

SEQ ID NO: 272675 - DNA, 122 bp, Homo sapiens
aaagctgcatggtttaaatacaatagaggtgactcagctactggaaggatgcatgtaccacgtctgaaacactcagcaagctctgtggagttgatgaagcagggaaattgggagtgaaagta

SEQ ID NO: 272676 - DNA, 122 bp, Homo sapiens
acgtttgaggaatgaatatacgtcatttgaggcaagacagggcagtcggctgactgcctccgggcttagctcttcccctccttgcaaaagccggagccctaagcagcgtgtagcccgggagc

SEQ ID NO: 272677 - DNA, 122 bp, Homo sapiens
gccagttaagaggagaattggctgactgttagatacaagtatctggataatagtagtatccgtcccacaagatggttctgaaaggaaggttataattgacttaagccgttttctgctgcctg

SEQ ID NO: 272678 - DNA, 122 bp, Homo sapiens
tctacaacactcttctacgcaccacagtttctggctgaggaggaagtgtgaacaggctggcgtgggcatgtcactctcactgggcctggcagagctggccagctgcaccgcccaatacaggg

SEQ ID NO: 272679 - DNA, 122 bp, Homo sapiens
ctcccttcatgatacccacaggctgccccacactgagctcactggcttcactgcctgggccgccctgtcctccaagaagggctgtggtctgcgcagtaactctgctccaggggagccctgct

SEQ ID NO: 272680 - DNA, 122 bp, Homo sapiens
accaaaaccctttcaaggatctgtgagccacagggtgccgcccattctcctctgacctcacgtcctgccacccacccccttgctttctctgctgcagccacccgagcctccagactcttctt

SEQ ID NO: 272681 - DNA, 122 bp, Homo sapiens
cttttgctattattataaacgtgcgtgcgactaaaccttcggatttttagactttcttctcgcttcctctgacccaggctgagggagcccccgaggctactgcggggcggggccggggcggg

SEQ ID NO: 272682 - DNA, 122 bp, Homo sapiens
ggatcgtgcacgtgctgtttcgccactgccctccggctcctccttaacaaagatgtcaaccgtgctaaatcacaggtggtgcctttgtaagaccagctattgtcccctcataagtcaagata

SEQ ID NO: 272683 - DNA, 122 bp, Homo sapiens
cgcattataagccgtgggtcccggagaatcccgagaggctgcgcttggagcccagactgacgcgcttctctcatggttccgggccgctgccctgcagagcccaccttactcttactctccac

SEQ ID NO: 272684 - DNA, 122 bp, Homo sapiens
tgagggagctgagtcagctacgggcaagcgggcagctgaagatgatgaggatgacgatgtcgatacccagaagcagaagaccgacgaggatgaccagacagcaaaaaaggaaaagttaaact

SEQ ID NO: 272685 - DNA, 122 bp, Homo sapiens
ccgcgcaggagggctgggtttgggggccccagccgggagttctcactgcgctcccgagcccgcctgcccacccgcgccgctcaccaggtcaatggccacgacgtcccgcagagccactaccc

SEQ ID NO: 272686 - DNA, 122 bp, Homo sapiens
ccccgcctctacaaaaacatgatggcgcgcgactgtttcccatctactcagaggctgaggcgggagaatcgcttgaacccggaaggcggaggttgcagtgagctgaaatcacgccattgcgc

SEQ ID NO: 272687 - DNA, 122 bp, Homo sapiens
cggagaagaaaagaaggcggagcctgccgacctggaggcggggttttgtcagagctggggcggtgcttatagaggaggcggggttttagggaccaaaccgaggttgctcggttgggggcgct

SEQ ID NO: 272688 - DNA, 122 bp, Homo sapiens
taactggaattacaggtgcctgccaccatgcctagcttatttttgtatttgtaatagacacggggttttgccatgttggccaggctggtctcaaactcctgacctctggtgatccgcccgtc

SEQ ID NO: 272689 - DNA, 122 bp, Homo sapiens
cgcgcataggccgcaacgcccgctggcgttccaggatcgccgcgctttcacccctccccgcgccactctctcaggtcagggcccacccaccattggaatgcctcattctgcactctcttgac

SEQ ID NO: 272690 - DNA, 122 bp, Homo sapiens
tgggagagccagagaggcccaggaagctttggcgaggtgctgggggacccctggcccacccgacccagttgcacaacaaaagggtagactcacattggagttgaggcagctaatgcaggaac

SEQ ID NO: 272691 - DNA, 122 bp, Homo sapiens
gatcccggagctgggctcagggctcggactcagtcctgcagcgcctctaggctgcggatccgcgcttcaaccacctgctttgcgctgcgtccggggaagtggggaggagacgggagggaggg

SEQ ID NO: 272692 - DNA, 122 bp, Homo sapiens
cgtctgggccagggagataatggtgctgaacgcaagggcaagtgttcgcgttgtaggcggcgggacacagtgccggaaagcaatctgatgccgtgcgcccatggtgtgctctgtgcgcctgg

SEQ ID NO: 272693 - DNA, 122 bp, Homo sapiens
caaagtcacaagcgccccagatccgaccaggatgccgctaccggctacagcccagaggcccgctcctgcggcgcaagcccgccttcctgaagaaaaagcccagtcccggcagcgttcttctc

SEQ ID NO: 272694 - DNA, 122 bp, Homo sapiens
ggaaggtttgttcttttgctctttgtggtgaatcttgctgctgctcactttttgggtcggcgccgcctttatgggctgtaacattcatggcgaaggtctgtagcttcactcttgaggccagc

SEQ ID NO: 272695 - DNA, 122 bp, Homo sapiens
ggcgccaggcaccgtgtctgctggagtggcggcttccgctggcgaccgcctccgcagccccgcctgctccctgcatcggggacactggggctgagatctaatgacttaatggggggtggggg

SEQ ID NO: 272696 - DNA, 122 bp, Homo sapiens
aggatgactgggacaaagtcatagctgtcaacctcaaggtggcgatctctgaacctgcgacgtttggcccccttagcctggggagggagttggaggagggctgtcaccccagctgatctttt

SEQ ID NO: 272697 - DNA, 122 bp, Homo sapiens
tcccagtcctgctgtggaggcccatcgggtacagagtgcccgtcaagggtggaatgggggcgaggactcagaccctctgtaagggccagcaggggatctttctgaagctgacctcctcgctg

SEQ ID NO: 272698 - DNA, 122 bp, Homo sapiens
ttagaaaaggcacattgtcagaatgccgaatgcccaccgtggtctcatgtcctcacagcccgtaggaaagtaactaccagttacccactggtggttgcccctgagaggagggtaagggaggc

SEQ ID NO: 272699 - DNA, 122 bp, Homo sapiens
tctctctcactccctctcccccttggttgggctttgccaacatatcgagatgcttttcgccggcttccatcactaacctcccggaggtcatcaagccaaatttatgagtggccgctcgagtc

SEQ ID NO: 272700 - DNA, 122 bp, Homo sapiens
ttatagtggccctaatgtatcatggccctaatttattaccactgtcctcctcctcactcacgctccccagtgccatggctgttccttatacaagcccctgccagggctttgcacaaacatgt

SEQ ID NO: 272701 - DNA, 122 bp, Homo sapiens
tccttaaggccaggacaacactcccaatccctctgctctcctctcttcccccgctcatatcgtattgtaattgtccatcttggagtttctcagtctctgcactatagacatttggaccagat

SEQ ID NO: 272702 - DNA, 122 bp, Homo sapiens
ttctggatcagtgtctgaccgcccccgccgggagaatgtcaggattctcgcctctgtaaccgccttccatgatccctcattcagtttagaccagtaatatgcctgtgacccctcacaggttg

SEQ ID NO: 272703 - DNA, 122 bp, Homo sapiens
cctcgcatctaaaaacgagtgcgcccctctccagccatgagctgggtggggctcaggctgcggaccctagtggggcctggggagcggcccaaccctggtcctggagagcggtcggcattcct

SEQ ID NO: 272704 - DNA, 122 bp, Homo sapiens
gcccgctgccctgggcagatgacccccagtgctgagctctgagcctcgagtcagggtttgcgaacagatgcgagaactctctgtgcgcttcagacccgtggggaaaccctgccgaggaaagg

SEQ ID NO: 272705 - DNA, 122 bp, Homo sapiens
agcgcaccacgcgggcgtgggggacgcgctccgcagtcgtctccagctcttgcctgtgcgcgcggccgtggctcccctgcctgcgcgcttcttcgtatctttgccattacggcgctaatgca

SEQ ID NO: 272706 - DNA, 122 bp, Homo sapiens
tcccaggtagataggaggaaactagcccgggctgggctgttggctcactctcagatgaatcgtgtctcccaaggacatatccacttgagtaatgtatttctacctcccggcgtcttcccctt

SEQ ID NO: 272707 - DNA, 122 bp, Homo sapiens
taaagctactacgaacagctgtgtaccagttgtcatgtgaacgtcagtcttcgttttctccgggatgaacaccctggcccgaagttgccaggtccgacagtggttgcatgtttagtttgtta

SEQ ID NO: 272708 - DNA, 122 bp, Homo sapiens
cagagcgggaagcgagcgaagtgcggcgtctacgccgccgggagcccccgaggcttgtgtcggatctgagcaggggccactctcgctgtgtcctggcacccttagcccctggtctttgcagg

SEQ ID NO: 272709 - DNA, 122 bp, Homo sapiens
agctccgggcagaggcgccaggagctctctcgccccattccctgcgggcacaggtggggccgttaggggttgaccttggaagtaaaacgccttcaggaattaggtagaaaaggaccatccgt

SEQ ID NO: 272710 - DNA, 122 bp, Homo sapiens
ggaacacaccggcctatggctgcagatcctgaggaaggaggggctcaaggacctctagaacggcactgtccccgcctggccgctggacgcgtctccctggatgtgaccagggataagggtaa

SEQ ID NO: 272711 - DNA, 122 bp, Homo sapiens
gccggggcttctgtgaacacacctgcccggctctctccacgggctgcagatcaggctgcccggatcaggaggtgagcagcacttcctgcccaccccagcaaactaacaggagccggctgagg

SEQ ID NO: 272712 - DNA, 122 bp, Homo sapiens
gaaagtgatgtcagaatagcttccaataaagcagcctcattctgaggcctgagtgatccacgtgcctggtatcctggcttcatgaggctgggcaggggaaaagacgggactagagaaggcag

SEQ ID NO: 272713 - DNA, 122 bp, Homo sapiens
aaaccacttctgaaggcagtctcccacttagaatagtgactgtttcattaattaattttacgaggactcacagtgaacttaacagtggtagaagatgtcattaataaagaccggcatatctt

SEQ ID NO: 272714 - DNA, 122 bp, Homo sapiens
aatcctgccttaaagtgattctcaggctaagtttgtgagaaaccctgccaaagaggtggtcgacttcataatttggaggaactttagaattattggttggaatttttagaccattggttcct

SEQ ID NO: 272715 - DNA, 122 bp, Homo sapiens
gcctcttccggccacacctccattaagctgtccaatcggagagccaatatcgcccaggggcgtggcctgggcgcccgacgggctgcaggggtacgcgggctggagtaggttgggcagagtag

SEQ ID NO: 272716 - DNA, 122 bp, Homo sapiens
ggggcgtgaccttgtttcctcaggagtgtggcggtggtcttactactatgttcgttatagcgcggtacgttctagacccttctataggaaatttaaaacctttaaaatgtgtatttccttcc

SEQ ID NO: 272717 - DNA, 122 bp, Homo sapiens
caggaaacgtgctgtggggacacgaaccatccggtcacagggcggcctcctgagaagacacggacagcgacgccaccatccggggctccctgagcggggtgcgggcgctggaaccttaaccg

SEQ ID NO: 272718 - DNA, 122 bp, Homo sapiens
ttttatttccatagatgaaaactttattctgcaaaactgaggtagtatgggaaatggttccgggccatttgccttcagtcagcattattgaaataaatagtacaacaagcactaattgagca

SEQ ID NO: 272719 - DNA, 122 bp, Homo sapiens
ccgggctcgggtctgagtctcaggcacgaaccaataaaatcaaagggcgagcgaggttgccgccctctgtctttttcaccaatggcacgacaagatggcaaagaggcgtggttgagtgatcc

SEQ ID NO: 272720 - DNA, 122 bp, Homo sapiens
accagtaaatttttttctgaaaacatctttaccttagaaatcagagttttctaggaatagcggggaacgttaacaataaatttgcttaaaccttcttgaaggattatggtttgcactctcta

SEQ ID NO: 272721 - DNA, 122 bp, Homo sapiens
gtcgtttttctatcctcctttcttgtctcctggggaatgcagttactggtataaacccttcgtctgcctatggatgcttgtagggaaagttggatactgtaactgacaagatttgataattt

SEQ ID NO: 272722 - DNA, 122 bp, Homo sapiens
gctacacgattcagaggtaaccctaactatccgcaatcccaaccaaagtcatgttcatgccgctgtcctagtctggacaatcatctgtcactcatccaacacagttatatacagaatgcgca

SEQ ID NO: 272723 - DNA, 122 bp, Homo sapiens
gctatcttgacaaggagagggaaccggaatgctttgcgagagtgcatgatttttggcgggcgtgtgggaaggctgcttgtctttgaaaagaaagcagcgcgggtctgaccatccccaggagt

SEQ ID NO: 272724 - DNA, 122 bp, Homo sapiens
ggggcttgtcctgaccaggctcctccctgcagtatgtggtggcgcgtcctgagcagggagcgcttcttcggggcctgttcctgccctcgtgcccgggctgcggccaccccgagctgctgcag

SEQ ID NO: 272725 - DNA, 122 bp, Homo sapiens
tgcgaggtgcgcccggggacgtggagacgtgcgtggagcgccccctggcggtccattagccgccggcctttcagaacccttgatcagcaggcggtccaccccattctaaattcagagcttac

SEQ ID NO: 272726 - DNA, 122 bp, Homo sapiens
cggcggcgacagaggcagcgctgctggtgcaagaggccagcatgcgggtaggtgagcggtcgcccccactgctgctgccggccaccatggagaactggtaggagccagaggatgtcccgtag

SEQ ID NO: 272727 - DNA, 122 bp, Homo sapiens
aggctgacctctctctgccccaggcggagaaggacattctggagcagagcctggacgaggcgcgggggagccgacaggagctggtggagcgcatccactcgctgcgggagcgggccgtggct

SEQ ID NO: 272728 - DNA, 122 bp, Homo sapiens
gacaactttgccacatgtttaaatgagcactactgctcctcctatatgctgcagaattggcgatttatctccttctgttcaatttgctttctgcagatcattttcagaaaccaatttagagg

SEQ ID NO: 272729 - DNA, 122 bp, Homo sapiens
tgaggccgtcagcgctggtgaagagctgctgtgggatgagcccgtcctcaggcacgtagccggtgcagcagttgctcagatagtccgccatgctgcgggagaccccgcgaccccacgtaaac

SEQ ID NO: 272730 - DNA, 122 bp, Homo sapiens
tggtcctctgtttccctatccgtagaatggagacggctactctgtgagaagcccgaggtgcgcaggacccaagtgaggagccggcaacctgaagtcctcaggatggggagggatccgaagga

SEQ ID NO: 272731 - DNA, 122 bp, Homo sapiens
agagccgtccgccgtctgggaggctgcgctcctgcgcttcttctcggggagagcaggtggcgtatctgtctgctgccctggggccagaggtccgtctggctggggatggccgccaagaggca

SEQ ID NO: 272732 - DNA, 122 bp, Homo sapiens
ctacctttcttcacctgctcaattccttcagttctcagttaaagcaataactgtttttagcgaacccttctttcacctttctcctgagcaaatttaatcaccccactctacacccttacagt

SEQ ID NO: 272733 - DNA, 122 bp, Homo sapiens
cgacagggtgagtcgcagggcacagtgtgggatgagtcaccgacagcaaggcatggactccgggaagaaggggagacgagccgggaaagacttgcatcggggatgtgagctgagctgcaccc

SEQ ID NO: 272734 - DNA, 122 bp, Homo sapiens
caggaaaccgagcgagacaccaggtgggcacactgaggattaaagagggcctcgcggttccgcactgcggccgggagacaaaccagtagccactatcaccagccccgggcagaccactaaga

SEQ ID NO: 272735 - DNA, 122 bp, Homo sapiens
ctcaaagcagacactgaaaaatgtgaggctgctgccaagccacagggctcagggagtatccgctgtctccacacaaaggctgaaataatgagaatcctctggtcggtatcatgtagcagtct

SEQ ID NO: 272736 - DNA, 122 bp, Homo sapiens
tgtggcaacctcaaggtcatcattatgagcagcgcgatgaaaacaaaactttagctggtccgatcctctcataattcccgttactttactgaaagttttagtgctttaactaaaaaaaatta

SEQ ID NO: 272737 - DNA, 122 bp, Homo sapiens
ctggggccctagagtagtaattagcgatgggcttttcctcccagccttccttttgggaaacgcagtgtgctaaaaaagtgcatgcagcccaggctgtggcctaggccgtcggttcccggcca

SEQ ID NO: 272738 - DNA, 122 bp, Homo sapiens
ctcacatgcatagcataatttcatattcacattggaggacttctcccaaaatatggatgacgttccctactcaaccttgaacttaatcaaaatactcagtttacttaacttcgtattagatt

SEQ ID NO: 272739 - DNA, 122 bp, Homo sapiens
ctgggcagggccaggcactcaagtgaggccaagtcctggagcgaaccagttcctggtggccgttggacagctcacacagctccctgccaggtcacccgccatggtcctccctctgccctggc

SEQ ID NO: 272740 - DNA, 122 bp, Homo sapiens
ggtcatccaccggcctcggtcgcccaaagtgctgggattacaggcgtgagccaccgcgcccggccgccagtgccttttaataaagaacgttttgagagagagacggttatttaatgaaatct

SEQ ID NO: 272741 - DNA, 122 bp, Homo sapiens
gaaagttcaagttctcttagtgtatagtcatgagctgcgctttctttgacgttcctaacacgcatgacgccatattcttttaaagcatactcatcaggccagtatttgacacatttactctt

SEQ ID NO: 272742 - DNA, 122 bp, Homo sapiens
ggtgaagtaagcctttgaagatctgttgaaagctgttgactcattcacttctcaggaaaacgcacatgctgactaccatttcagagaatttgcatcagggttctctggggaggagttctgag

SEQ ID NO: 272743 - DNA, 122 bp, Homo sapiens
tcagaggtgccttttctcgagatggggtaggatattaagaagcaggttagaacatcatgacgcatggaacatttttaatctaaggtgaatgctcttgacatattcagacctaatctatttca

SEQ ID NO: 272744 - DNA, 122 bp, Homo sapiens
gtctccctcctcatccctttggagttaagacagaaaagtcagaggcaggcagaatgtccccgaagtataagatggaaaagggtggaaggagaaacctatagcacttaccctcctgcactaac

SEQ ID NO: 272745 - DNA, 122 bp, Homo sapiens
aattgcgctgaagagtgtgtgcgtaaattaccttggacttgttacagagtagtcgtaacacgttcaggccttgaaccgtgttttcacaacctcttactgccctgttagggaatttgtttttc

SEQ ID NO: 272746 - DNA, 122 bp, Homo sapiens
acaacaacactgttaatcaacaggaactaatcagcatttatgtaacaccgcaaacgcagccgaatacacattttattcgtgtcgatgggacatttagcaagatatgaagtaacctgggtcat

SEQ ID NO: 272747 - DNA, 122 bp, Homo sapiens
atcatgtttttccacttccctcagtaatctagccaaaaagcacacaagctgaaagcgcctcgcttttgtcatttgtaagctgagaaggctggctctggtggtttcagaacttgcctccagct

SEQ ID NO: 272748 - DNA, 122 bp, Homo sapiens
ggcatttactgcatcctgtcttgggccactaaagcacatctgctgggcccagcccaggcccggctcggcgtttttggagccggcggaaggaagaagacttggcccagggcagcctcataaag

SEQ ID NO: 272749 - DNA, 122 bp, Homo sapiens
agcaaaaggtgagagaaaattaaaagtctccacataaaattaatttgttctcaggtgggacgttttctcccatgcccagcaaggagcagaggtttttgtgttttatgactttgatgaagaac

SEQ ID NO: 272750 - DNA, 122 bp, Homo sapiens
caaaactagaggctgaacgtccagtccctacaaacaccattaacctgactctttccatcacgcacccctccagtccaagacattgcaggtggcgagggtcagagctgaggctctagaatcag

SEQ ID NO: 272751 - DNA, 122 bp, Homo sapiens
atctcagcccataagaaaaacatgtcatgacagtaaatcaataaccccttggagatgattcgtttctgaaatatccctgattaattatgccagtccatgcttggcaagagtactttgctcca

SEQ ID NO: 272752 - DNA, 122 bp, Homo sapiens
atcgtaggacttccgaaagcagcggcggcgtttgcttcactgcttggaagtgtgagtgcgcgaagatgcgaaaggtggttttgattaccggggctagcaggtgaggctcctttgtgttggca

SEQ ID NO: 272753 - DNA, 122 bp, Homo sapiens
agcactgtcagcagctccacacacactgggtggcgcaggtgggagaagagtctgagagcccggggagacttcagggccagaggctcgcccagccccagcacatggtagtatacctaagagag

SEQ ID NO: 272754 - DNA, 122 bp, Homo sapiens
gttctctttctaaacacaatctgatattccacagaactcccaccttgaagccttcagtgacgttccatctccctcaagatagagtccaagcacctttggccaggcttgcaggcctctctgtc

SEQ ID NO: 272755 - DNA, 122 bp, Homo sapiens
cctgacggccccttggatgtgcgactggtagctccgacagcacccagtcacgatgggcagcgccagtctcataaacaccgtggcctccacggtcagggcccgaacacttgcccgcaccacct

SEQ ID NO: 272756 - DNA, 122 bp, Homo sapiens
atgcacagacagttctgcgtgatctcactcatatgtggaatctaaaaaagtggaactcatcgaaacagagagtcagtggttaccaggggccgggggtgtgggagggggataaagaaggaagg

SEQ ID NO: 272757 - DNA, 122 bp, Homo sapiens
cataccccatgcagcaccgggtttctgacttgcaactggcgtgacttctagtgaatgtgccgcccagaaacactcgacggagactacactgctatcactaagttgttttttctccttcttga

SEQ ID NO: 272758 - DNA, 122 bp, Homo sapiens
cagcactcagcacaggctgcctgactacttctctgagcctcagttgtctcatccctaacacgggctagtcatagggttgttaggaggactaactgggaaacaaaccgaccgcagtcagcacc

SEQ ID NO: 272759 - DNA, 122 bp, Homo sapiens
tagcagaacccacgtcagacattgcagtaccgggtgtccctttgagatggtgtggtgtgccggctggagtcagctggcgactctgactgtggccaacacattaccactgccttagttgcttc

SEQ ID NO: 272760 - DNA, 122 bp, Homo sapiens
cctagcaggcagtcttacggattatgaatttaaaacatgaccagtcagtaagcatggttacgctctttttgttttttcttcagccctgtagggctgccggggtgcaggtggaaagtagggta

SEQ ID NO: 272761 - DNA, 122 bp, Homo sapiens
tttactcagactacagattccaaaacgccaagacccggctgaggcttcttctggtctaagcgggaagatgcggctatacactggactttacgtgtctgggccatctcttcccttggcatttg

SEQ ID NO: 272762 - DNA, 122 bp, Homo sapiens
gactgaacccatgcaagtcacgaggacacacacgactccaccactgctgcttcatctttccggtctagtgtcccgtgcccaggagtggaaggaatttctgcaaggttttgagcctcacgcgt

SEQ ID NO: 272763 - DNA, 122 bp, Homo sapiens
gggaactcatctagaactgctgacaaagagaatactttacagtgtccaaaaacacctttgcgccaggatttagaggcaaatgaacaagatgcaaggccaaagcaagagaaccatcttcactc

SEQ ID NO: 272764 - DNA, 122 bp, Homo sapiens
cgtttccagctgccgccatggtgggccacgtggcacacgggccagcgatgcatgcagcagcggagccagtagttctcactgtctatcaggttggcggtcacagccagtggtaggtcagggga

SEQ ID NO: 272765 - DNA, 122 bp, Homo sapiens
cttggagaacagcctgagggaggtcgaggcccgctatgccttgcagagggagcagctcaacgggatcctgctgcacctggagtcagagctggcacagacccgggcagagggacagtgccagg

SEQ ID NO: 272766 - DNA, 122 bp, Homo sapiens
ccactgcagcctggctgccgtgaaatcggggcccagctctccgttctcccactcctgcctcgagggaaggggattcctgggccttccacgtgcctgactctgtgtttggaaacggcccgtgg

SEQ ID NO: 272767 - DNA, 122 bp, Homo sapiens
tcccgacgcctcctgggagttgtagtttttcctgggctccgttcccggcctcttcggggacgcacggttggaagttgtaccgtgacgtgatggtcagatcggatgatagaattttggtgcgt

SEQ ID NO: 272768 - DNA, 122 bp, Homo sapiens
agtgattttagtctggagtaatggtagtgttcgcagtgctacttcgggtgggggtccccgcgtgcctgggatccagcaaaggtcccgcgtgtcccccactactgagttcatgcggctgacca

SEQ ID NO: 272769 - DNA, 122 bp, Homo sapiens
acttgctcataggcgagctcgatctcctcatcatctggacaggtggaagcgaattcttcccgggcgtaggcattgctcaagtaccgatgcactccccggaaggcctcggggatggtgaatcc

SEQ ID NO: 272770 - DNA, 122 bp, Homo sapiens
tcagtatcagtaactatctttgaacactatcctttattccctggactttcctttccatggcgctcttctgatgaaaagtttccaacttcttaaataagaggatgaatctaactaaattcttt

SEQ ID NO: 272771 - DNA, 122 bp, Homo sapiens
tactgtccagagatcgtctttgacagccctgcattcaaacgccgggctgtgggtcggcggcgtggtgcctgctgctgccgccgcggcagctgagatcatgctgttgatcttgttttacacag

SEQ ID NO: 272772 - DNA, 122 bp, Homo sapiens
gtgagcgctgctgggtgaccagctcaggcagcaggaagctggtgcccacgtgcgtgccgtcgagagtgtgagtgggttcagcctcagggtcatttggtaacttaagtatatatgctccgacc

SEQ ID NO: 272773 - DNA, 122 bp, Homo sapiens
gcagttgcccccagagactctgctggtgacgaggccgcctttgcttgggtaatgaatctccggagctgggcctctaggttgtgagcaaggctgaagactccttgccccggtgactgagaaac

SEQ ID NO: 272774 - DNA, 122 bp, Homo sapiens
agggaccaatagagactcgcagagtgccttacctccattaggatttgaccaatgagtggccgaaagggagccgcctacctcccttgccaaatccctggggctgatagagatggcgggcggaa

SEQ ID NO: 272775 - DNA, 122 bp, Homo sapiens
acggtggaaatggaaggtgtctcactgagggtcccggttgccttctgcaaaggtgaaggtcgtgccggccacgcgaggaaatctgcctcgctcacaactcacaggcacacatcaacactgcc

SEQ ID NO: 272776 - DNA, 122 bp, Homo sapiens
aacttgattagggactcatacactggaaattgtcagtgatccagggacgggagagtctgacgtctgcatctcatccgccagcctgagctccagtcgacgctcactggatgagggttctcatc

SEQ ID NO: 272777 - DNA, 122 bp, Homo sapiens
gtccagctggagtggggagtgctggtgtagggtggggaaggaaaggttggcaagaagtcacgcccttctgcccgactgaggaattggttttcatcatctataggaacttttgtaagtttttg

SEQ ID NO: 272778 - DNA, 122 bp, Homo sapiens
tgaaacagtttttcttgctccacccacttggtgaccaaatttgaaaaaaaaaaaaaaccgcgccaactcatgttgttttcaatcaggtccgccaagtttgtatttaaggaactgtttcagtt

SEQ ID NO: 272779 - DNA, 122 bp, Homo sapiens
aacagcaccagcaagaatagtcttacaatgaagtgtgcaccacgggagcgccgcaccagccggcatggaggagcgtggcaatttcaagctgacccctggctgcagtggcctgggtctgtgtg

SEQ ID NO: 272780 - DNA, 122 bp, Homo sapiens
ctaaaagcgatcttggggctctggccggtgttttataagccagccgactgaggcgtgtgacgcaagtcctgagagccctgttgaggagtgcgcaccccacccattcccggaaagagcagacc

SEQ ID NO: 272781 - DNA, 122 bp, Homo sapiens
aaaggaagcaggaggcacagagggagaaagctgtgcctagagaaaatcaagtttggcactcgtcatgaattgaagaatgaaaagccatagtcacaagtctgggagatggactacaagaagag

SEQ ID NO: 272782 - DNA, 122 bp, Homo sapiens
gtgtatcaggaatacaaaacccccacaggctgggacagaatacctttcactacccagattcgtttcattcatataaattttacctgaggttagtttttaattttttgggtagctagactgtg

SEQ ID NO: 272783 - DNA, 122 bp, Homo sapiens
tgatgttgggtgattcacctaccctccctgggcctcagtttcccttctgtgtcatcaccccggctagcttaagcaataagcatatccttatcctaagaataacatacggcatgcctctcaca

SEQ ID NO: 272784 - DNA, 122 bp, Homo sapiens
aagctaagagaatgaaccgcagcctaaaaacattcattgccaagttgtgtcaagaggctccgttgaaatggactcaggtacttagcattgcactgctccctgtaggtgggattaaaataagt

SEQ ID NO: 272785 - DNA, 122 bp, Homo sapiens
acgagacaacagggcttcccaagagctgcacaaattgctggagtgggagggtgctttgaccgcgcaggggccccgaccctctggctatgctggaggcattccagcaaggctggcccggagcc

SEQ ID NO: 272786 - DNA, 122 bp, Homo sapiens
gatttcagcttctcccagagaggtgtcaccggcgagctaggcgggggcctagcacagccgcgcgtctccggcttgggtccgccgcccgccgaggcctggccgtgcaatggcggggcccagct

SEQ ID NO: 272787 - DNA, 122 bp, Homo sapiens
atttaataaacagtggaaaaacagataaaaagaaattcaaatcaggcatttacaaaaccccgaggcactgctggaagcctaaggtgtagttaaaactgttttaaaaccactgccataggtgg

SEQ ID NO: 272788 - DNA, 122 bp, Homo sapiens
ggctgtgctgcccacctggctttgagtccaggatgacggttactgcatggccagcaggctcgcggggaggccacgacccaaggtcgcgctgaggaaaactgcgtctggctcatttgagggtg

SEQ ID NO: 272789 - DNA, 122 bp, Homo sapiens
agctccgaggtggcatcgcagggcacacaaccccccactcttcagccggcggctaccagacgcaccaccagggttccctgacactgtgagtgcatctgctcccgccccacctgcaaattggg

SEQ ID NO: 272790 - DNA, 122 bp, Homo sapiens
aaggccgggagctgtgggggctgccccaacgtggctggtggggggcctggccattgggctcgccccgcccctacccggacgtgagccccataccggggtcccttagaagggcccttgggccc

SEQ ID NO: 272791 - DNA, 122 bp, Homo sapiens
gccctaaggagcagacctgagcgttgtggagcctctaccttgtggagcacatggcatacccggcctgtgtggggtgcgccgcgtccccagccgtgtctccgagggtcccgctcccacagcct

SEQ ID NO: 272792 - DNA, 122 bp, Homo sapiens
tgaggggttgacagataaccatgctgccttctggaggtcggcgcttccccagccttgaggcgtatgttccaagggaagtaagcctgcaaatgagccttctaccatgtgatacctatttttct

SEQ ID NO: 272793 - DNA, 122 bp, Homo sapiens
tacagttttgcacagtgggatagttttatgagccaaccctctcatttttatgagggttcccggggtaaagcagttatacaatcttacaccagcacaccaacttcagtgaagaacaaacaata

SEQ ID NO: 272794 - DNA, 122 bp, Homo sapiens
cacagccagaggcaaatggttccatgtccctcctattcctctttgcgcctggatgggatccggagggctctaggcttggctgctgtggccaccagatgaggctctatgaggtctgcaggggt

SEQ ID NO: 272795 - DNA, 122 bp, Homo sapiens
gttctgctttcaggagctggtgcctgtgcttcctgcaaggaggggggacaagaaggcccccggggtcactcgaggccagcagaggagtccagactccgatcccagctccactgctgcctccc

SEQ ID NO: 272796 - DNA, 122 bp, Homo sapiens
tcaatgccacgacgccatttcctactacgacttccatcatgctccgcgccgctccgggggcggtgacccctcttggcccacgtcttgtcagtgacgcacttcctgtcagtgacgcacttccc

SEQ ID NO: 272797 - DNA, 122 bp, Homo sapiens
cttaaacatatcgatatacaaatatgcaagctcattttctgttgctgtctgtcttacacacgcagacccacatactcacttcttccacacaaaactacacatttcctcccaatataattata

SEQ ID NO: 272798 - DNA, 122 bp, Homo sapiens
cttcagctttgcagaaatggttccacaattctgtgatgggacgtcagtgctaagacatcacgtctgccttgaccctgacagtgttttttgctgcatgatttcatcctcacactcctgtttgt

SEQ ID NO: 272799 - DNA, 122 bp, Homo sapiens
gcgctggggcgggatttaggagttctgcctctgtgtggggctttatggaggaaatgccttcgcctccaagcagggacatctgcgctttcctgtctactttctggtagcctgtaatgctgcct

SEQ ID NO: 272800 - DNA, 122 bp, Homo sapiens
cttgattcttaacttggtttcactactgggccttctccttccctaaatcactcctttcttcgctcccccaagtgcatttctgctgtggtagagagatgaaggcagtgaatgatcctcagtgt

SEQ ID NO: 272801 - DNA, 122 bp, Homo sapiens
tcaaacatgaggaagggatggaggggaacatcatagaagttaaagagtttgtatcagctacgacagcatccccatactggacctagtgttgaaatgccacagcaaactcaaggggtgttcaa

SEQ ID NO: 272802 - DNA, 122 bp, Homo sapiens
cgcgctgctaggtcgggtgctaggcggccaccgcgcgccaccgccgccgccaccgcccgccgcccgatcctggacaacaatgcgcgcccccgcccccccagaaagccagggacgcccccagt

SEQ ID NO: 272803 - DNA, 122 bp, Homo sapiens
cagttgcaaaatctggggtttaagtaccctttaggggtttcctattggttacaccctatgcgccaccaatcggaggccgaagtgaaggctcccagtctccagactcttattctcctagctca

SEQ ID NO: 272804 - DNA, 122 bp, Homo sapiens
atatttttctacttctgaaaaatggagtttcctttccccatcaatgagttcaaactgtctcgctcataagttaccttagagatgtctgaagtggggaggggtgtgttggaaagtaaaattat

SEQ ID NO: 272805 - DNA, 122 bp, Homo sapiens
ccagcaggaggctctgcacatggtctgctccaatccggtcaatgttgctcagcacagggccgtccagcacactgcggatccgctccccttcctgctgcagccggggcagaatcagagtcttg

SEQ ID NO: 272806 - DNA, 122 bp, Homo sapiens
caccatgtctggctttttggccagaagtcctttgcagagctgaatatccccttgccagcccgccagctctggctgggaggacttgctcttgggtctgcagcctgcatcaggagcctccactt

SEQ ID NO: 272807 - DNA, 122 bp, Homo sapiens
taggctttgtcctcattgttatgaaataactgctctatctacaggtatttcattaccattcgaggcagggagaggaaaggtgaagggtaaaatgcgcatgcaagctgagtctgtcctattct

SEQ ID NO: 272808 - DNA, 122 bp, Homo sapiens
cgtgtaaacccttcaccgggtttttatgattcgggaaacggatttcatccgtggcctgggcgggggtggggtggggagggaagtcaatgtcgtttcctcaaatagttctccctttcatcctc

SEQ ID NO: 272809 - DNA, 122 bp, Homo sapiens
cctgggagaaacctcgcccagcggcggttgattagtcaggcctcagaaagatggcgtcctcggagcaggcagagcagccgagccaggtaaggggagtgggactgccccgctgtgcggcggag

SEQ ID NO: 272810 - DNA, 122 bp, Homo sapiens
tgaaggaaacatggagtggtttctgtatcgccagacacttaaacatttttacttaattctcgcaaaggcctatctggttgtcctacaccaccctacccttctatgagataggcaggggactt

SEQ ID NO: 272811 - DNA, 122 bp, Homo sapiens
cccagctggacatcacagcaccaactcccactcaggagccggccagagcccgagccgcagcgcagtgggcagctccccgcgctctccgccaggccctcggccagccagccgccactcggccg

SEQ ID NO: 272812 - DNA, 122 bp, Homo sapiens
tgtccaccctgcctgggtgcccggctctggaccctgcgggagcggggaccctgtgcccgccgcctggcgctgctgagcctgctggcccttgagcttctggggctgctgctggtcttcacgcc

SEQ ID NO: 272813 - DNA, 122 bp, Homo sapiens
cgccgagaggtgaggggccgcccccttgactgggcttctgctagagtcagctgcggcaatcggggcaacaaaattcaggcttaacgtcagcgtgggcatctttggacttcaggatgtattct

SEQ ID NO: 272814 - DNA, 122 bp, Homo sapiens
tacctggatgccagcgtgactacacaggtagaagtcgaactcggtggggtgggtgattttcgtgtccacagtcgtgcctgctggaatgtttccacttttcccaaccttcggcaacacaggca

SEQ ID NO: 272815 - DNA, 122 bp, Homo sapiens
ccagatttgtcaccagacactccctgcagcctgtccctgcgatgccactgccggcccacacggaaccacgctgtggcctgcggttccgccaaggtggcagcagcatctcaccagggagctcc

SEQ ID NO: 272816 - DNA, 122 bp, Homo sapiens
tttatgaatttgtgttgggccatgttcaaagctgtcctgggcttcatgcagcccatgggccgtgggttggataagtagctgggactgtaaacatgagccaccatgaccagctccgttaccct

SEQ ID NO: 272817 - DNA, 122 bp, Homo sapiens
gaggcccaatcagacccgcggagctggtggagttccgccctcgcggaggaggtggtgttccgccctcctagtcgcagcaagcgcggaactggggttgcggcgtctaagtgtttccggtggat

SEQ ID NO: 272818 - DNA, 122 bp, Homo sapiens
caaaaatactaacagcaatgggaccgtaataaatcaactcggagtgggtacaggcggttccgggacaacccacacttagtctaggagcccggagatccctcatccagctttccccggggcaa

SEQ ID NO: 272819 - DNA, 122 bp, Homo sapiens
aggaggcgctctgctccggccgtgccctggatcacactgaggcaggaccgcgcctcctcgcggcctccccgatgacattgagcccgcgccatctagcgtccactggtcagcactgctggacc

SEQ ID NO: 272820 - DNA, 122 bp, Homo sapiens
ggcacgtgacctggtgacagtgctgacttggctgtacagctcgatctaggttctgcggcacgggatggcggaggcgcctcctgtctcaggtattgtcccggcccgagcgggactgggcccct

SEQ ID NO: 272821 - DNA, 122 bp, Homo sapiens
tctggcccgctgaggctggcgatgaggccgcagggagggttactgcgtgcttgtgacagacgatttttaaagtcagggcttgaaagaacaaacaaaacctggggaagagtcaggaagacact

SEQ ID NO: 272822 - DNA, 122 bp, Homo sapiens
cagtcccggtgcgcagcgcggcagctgcgccagctgttgacaactgtctcattccaccgccgcagctaccacgccttttgctgcttgctacttgccgtgggagtctgcgagccgggagcccc

SEQ ID NO: 272823 - DNA, 122 bp, Homo sapiens
tgtcatggcagcctccaggtaccacatgtacagggatcatggccgcctccaagtggaggccgtatttgcataataaaagactagggtgggagggccagtcttttcaggggctatgtaaatga

SEQ ID NO: 272824 - DNA, 122 bp, Homo sapiens
catctacgaacgaggaggctgcgtcacgaatccgaggctgccgtccaactacaggggacccgtctcgtctattctccgagtgccccacagatgccgccctcctatcaggggcttggtacccc

SEQ ID NO: 272825 - DNA, 122 bp, Homo sapiens
gcgtaggaccctccgagccaggtgagagatgtaatctcgtggtgcgccgtttttttaagccggtccgaaaagcgcaatattcgggtgggagtgacccgattttccaggtgcgtctgtcaccc

SEQ ID NO: 272826 - DNA, 122 bp, Homo sapiens
cggacacccctccccaggggctatattagccgtgtgagtcatggtggaccggctgggaggcggcaggctggcaggcacagtgtagggttacagtccatttatgggcgcagccgaaggcagat

SEQ ID NO: 272827 - DNA, 122 bp, Homo sapiens
ccccatgcctggtgttcaaccttttcttcacccttctcccacccccggcctcttcacacacgagtctgaaataaatgaaggcagccggagtacaggggtctgagcttcccccaggcctggga

SEQ ID NO: 272828 - DNA, 122 bp, Homo sapiens
cgtggacagtattaattcagctctttgtgccaggcaggaagctaaatgttttaagggcatcgtcttactttctattgaaggactgatggatgtgccatcccaaaaatatatggaattggtac

SEQ ID NO: 272829 - DNA, 122 bp, Homo sapiens
tacagcccctgaccctgcccaccacctacagacccctcctgataccctgaccactgcagccgtcccaacctcccaggtagatgagctctgtgaggccacttggttcctcccgtgtcaaggca

SEQ ID NO: 272830 - DNA, 122 bp, Homo sapiens
ttctgagggcgcaggttcgacgccctttcccgggagggggccctgcccggccctccctggcgccccagcccagtgccccccgaagggccaaatgccaagtccactgaggcccggaccccgga

SEQ ID NO: 272831 - DNA, 122 bp, Homo sapiens
tcccgacgctcctggcttcctccgtgcccctttcctggcagcgggtcgccgagattcggccggagcccattgctttgtccttgctgctctccaggcaaacgggcggctcctcctcaccgact

SEQ ID NO: 272832 - DNA, 122 bp, Homo sapiens
agggtgtattggcattcctagtgtctaacaggtagtaggctggcaaatgaatcaatgagccggtgaattaatgaatttatctcaagaatttgagactgatcctatctcaattcagaggcaga

SEQ ID NO: 272833 - DNA, 122 bp, Homo sapiens
tctgaggagactctgagtccgggtgggtgcgtggggactttagaactgggaccgcggcgacgctgattggcttctctagatatccaatacccaatgggagtgggaagtggggacgcgtcacg

SEQ ID NO: 272834 - DNA, 122 bp, Homo sapiens
cgggccggaggcccctgccgtggacactcaccccgcaggacagacagaaggacggatggacggctggacaggctggaggcccctgccgtggacactcaccccgcaggacagacagaaggacg

SEQ ID NO: 272835 - DNA, 122 bp, Homo sapiens
atcctgtcgttcccgcccctttggccccgcccctcggccgtccttccccgcccgtggccccgcccccctccggcgtccgtctgccgcctcaccgcttggccccgcccctcgccacctgcccg

SEQ ID NO: 272836 - DNA, 122 bp, Homo sapiens
tctccctagtgtccatgggttagggccatgctggggaaaacgggccggtatttacacacgcgcaaaacacccagagacggcacaaggaggttgaactcatgtttcagttcgcgaacattgac

SEQ ID NO: 272837 - DNA, 122 bp, Homo sapiens
gggcttttggaaacggaagtgatttgagggtctttgttccaagaaaggcggtgctgggcccggggactggaactcggtaggcgaggatcccctttgacgcccccctacagtttcccttcaaa

SEQ ID NO: 272838 - DNA, 122 bp, Homo sapiens
tgccctgggactttgaaagggggaagaagggggagggtttacaaaagaaaagggggggggcggtgagaaaagagtctcaaattaacccccctgagcccttccctggacccgggcctctgcca

SEQ ID NO: 272839 - DNA, 122 bp, Homo sapiens
gggcgcccgcgcggagctcccgccacgcccaccggacgtcacccgttacacaacgccccccgcccccagcttatgcaattctgccctcccgcggttcccaattgtcccggtgacttttgtgg

SEQ ID NO: 272840 - DNA, 122 bp, Homo sapiens
gtggccagggccagggggtgtgtctgatgatggagacagttggagccacttcagcactggcgccgagtttatttcatctgctgatatttagattgtggtggggagggcagaatgcctgatga

SEQ ID NO: 272841 - DNA, 122 bp, Homo sapiens
ggccgcctcccccatcatgcccctcagttaagcaccctctccgcagcccccgccccaacccgcactacccaacctacgactctctaagcgacctgaaccgccgggtgcccggccgttgcgcg

SEQ ID NO: 272842 - DNA, 122 bp, Homo sapiens
tcggctcccaatgactctttgcttcttccgtcgcgtgctagggcccggaagccctgttcccggcccgacacccccgcctcacgctgccctctgcccgcaggtgctggcagaggagcgcaccg

SEQ ID NO: 272843 - DNA, 122 bp, Homo sapiens
ggaccctgcctccctgcccatcccaccttgtacctgagagtgacagcagcacgttgttcacgcagtagagccaggagcagcgatgtgaaatcagctggaggccacagagggacagatggtca

SEQ ID NO: 272844 - DNA, 122 bp, Homo sapiens
ctatacacaactccctatttattttaacctctgtttccccatgttcctttaaaggtattacggggagcaatccactggagaatcccttagagcctcctttaagttgaatattgtcaggagga

SEQ ID NO: 272845 - DNA, 122 bp, Homo sapiens
gggttcccatgaagaatggttatgatggtggactgtggagctgagatgggactggggcgccgaggtcactgcaaggcagtggtccagggaagtccaaacgtggctgtaagggggctctgcct

SEQ ID NO: 272846 - DNA, 122 bp, Homo sapiens
tgtgtagaagctttgttgcagctggaaggtgctaggatgagaactcacgacaaagagctgcgggtgggaagagcccagccaggtgctgtctgcgattcagtatcctctgaacatcagctcca

SEQ ID NO: 272847 - DNA, 122 bp, Homo sapiens
caattcttcagacatccttttttccttgtctgtagaaagagcagtgatggacccatacagcgctttgacaagtgcctggaagagttctatgcactctgtgaccagctggagctgtgcctggt

SEQ ID NO: 272848 - DNA, 122 bp, Homo sapiens
aagaattcctggggtttccttttcttgcacgtgtgtctgcagctaagcggtacatcgagacggacccagccaatcgggatcggcggacgcccatcaccgtggtgaagcaaggctttgagcct

SEQ ID NO: 272849 - DNA, 122 bp, Homo sapiens
acagggacaccaaggcaggtgcagtgtgggcggggctgggtcctgggctttatctttgagcgtttgcggaactggggcaggggctgccaagtgcacggccccagagtccttgcccagagcag

SEQ ID NO: 272850 - DNA, 122 bp, Homo sapiens
ctgggctccagagactgctggaagcttctgaggcttggaagggctgcgaggcccagcacacggggtagcatgggcaagctcctcccttcttctggggactcagagtccccatgtgcaaaatt

SEQ ID NO: 272851 - DNA, 122 bp, Homo sapiens
tgggtaccttcgtgggcggagcgcggcctgcccagagtgccttctagatcctgggtcaggcgccaagctccccagcatcatgcaggaagctgcagccccgcagagttaggacagctcatttg

SEQ ID NO: 272852 - DNA, 122 bp, Homo sapiens
tgcatccgcggagcggtggcgacctcagcctgagcagaggagttgcagtgattcctgcctcgctttcagcggactgcggagggaatcccccaccccaccccactggggatagggtggcacgt

SEQ ID NO: 272853 - DNA, 122 bp, Homo sapiens
cctatctgcctacctgtctgcctgcacagagtgtccttccaacaaccttagcagggcaggcggagaggctgcaggtagccagctgggctgcaagtgtcactgaagcaagcccttttggccac

SEQ ID NO: 272854 - DNA, 122 bp, Homo sapiens
gttacccggtttcattttcagccaaaatccccgcaggttggtcctggcgagggcggggctcggtgggcggggctggccgcgggggcggggccagggtctcacacccatctagaggatgtctg

SEQ ID NO: 272855 - DNA, 122 bp, Homo sapiens
ttcgcccagtctcagaaggcagctgggggcctctagggcctatggtcctgctcccctcaacgcaagcaaacacacagaaaaagccgctctggttgcctcattgtgaaggaaattgtaggcag

SEQ ID NO: 272856 - DNA, 122 bp, Homo sapiens
gcctccagcgagaggcagataggacgtgggagaaaggaggagaaggggctgcgggggcggcgggggctgccgctttcccaactcgccctgcccagcgaccttccccgggtcggatcaccctc

SEQ ID NO: 272857 - DNA, 122 bp, Homo sapiens
agactatttgaagaaggtctaaaggaagaagtgggatgaatagataaggcaccctggagacgcaggaggagttgggaggacaaaaggagaaaatgaactagttgggttaccctggagaatta

SEQ ID NO: 272858 - DNA, 122 bp, Homo sapiens
tcaaggccactggagaggagatagcccttcctctttccctaccctctaccacttcggaatcggggtgctcttatcaacagggggctaaaactgcaaggatgcacacaaatgtgtgctgcgaa

SEQ ID NO: 272859 - DNA, 122 bp, Homo sapiens
gacccctaacttctattttggttcactatttggtatttccagcaaaacctagcccactctcgccacctgcatgccagcgctgtcctggatgtgggcaagagacatagcagagaacaagacag

SEQ ID NO: 272860 - DNA, 122 bp, Homo sapiens
catcatgctcctggcaaagcagtggtggatcccgtaccccgtcagcctgtggagacataccgagcggcagtgggtgggctgcccccatgccaggggctgcgctgcctcctgggagttcgtgc

SEQ ID NO: 272861 - DNA, 122 bp, Homo sapiens
tttatcaaaatgagtaatttttgtggtttcgaggacaccatccggaaactgaacagccaacgtagaggatgggagaaagtattttcatatcaaatacctgtatgtatccagaattcataaag

SEQ ID NO: 272862 - DNA, 122 bp, Homo sapiens
ctcgtgggaattcagccccatctgcaagtgcagtggcagggcggcccccttctcccttgacgacgcctgtcccctcggaatgcaggcctcgtgggaattcagccccatcggcaagtgcagtg

SEQ ID NO: 272863 - DNA, 122 bp, Homo sapiens
tccgtgtgtacatcacatcggttacatgcggatccgtgtgtacatcacatcggttacatgcggatccgtgtgtacatcacatcggttacatgcgggtccgtgtgtacatcacatcggttaca

SEQ ID NO: 272864 - DNA, 122 bp, Homo sapiens
tacagttccacctggctagggaggcctcacaatcatggtggaaggcaaggaagagcaggtcgcatcttacatggatgacagcaggcaaaaagagagagagcttgtgcagggaaactcctcct

SEQ ID NO: 272865 - DNA, 122 bp, Homo sapiens
gaattctgcttttcccagggtggcagctcggtcttggccggatgaatcttcgctgctggccgtggaaacagctagagcagctcgttagttgatttttaaatttccaagtgttgtgtttaaag

SEQ ID NO: 272866 - DNA, 122 bp, Homo sapiens
tggcattgggtgcatcgccccgcatgccgtatttcaaacaaagaatacacaacaaagggccggccggcgcggggatttgtcagaattcggcggtgggagagatttatctaagctgagtggag

SEQ ID NO: 272867 - DNA, 122 bp, Homo sapiens
tcctcctccctcctccctcctcctcccgctcctgaagagcgcgccgcgtgggggacggcccggttacttcctccagagactgacgagtgcggtgtcgctccagctcagagctcccggagccg

SEQ ID NO: 272868 - DNA, 122 bp, Homo sapiens
agccgcgggcggggcggcggcccttcccggtgactgcgtaggagtccgagctcccgaggtcgcctaagtgcaagcagaagtgagcgtggcttccgggcagcgccctcctcaggggcgcggct

SEQ ID NO: 272869 - DNA, 122 bp, Homo sapiens
tctggttcatctgatctcaactctcagactttttctatgcaatgcactccctaagacctccgcccattcttaacatgtttttacattgtctaatacacttggtttaacagataagaagcctc

SEQ ID NO: 272870 - DNA, 122 bp, Homo sapiens
gaaccccgcatgacgatacccatgaacacaagggctcattccagtaacagctcgcggagacgacagacaccagcactgccgacacacatggacgaggagcatgctgcacagcttccttctac

SEQ ID NO: 272871 - DNA, 122 bp, Homo sapiens
ctccttctacccaaaagagaaacgctgggccttactaattaactgaagactctgctagctcgagccttccaaaactccatgccacaattgttcaaaccattttccagaatacatcttttaaa

SEQ ID NO: 272872 - DNA, 122 bp, Homo sapiens
ccccatagccagcatatgtttcttgtctcctacgcactttagcactggctctggggaatgcgtgtatttctgaacgtccctaaacacagctctgactgaagcacttataatttaccctccat

SEQ ID NO: 272873 - DNA, 122 bp, Homo sapiens
gtttaagaggaaatgtttctctctctcccctcccccctcctctctataacttgcagagtgcggaacaagggtttccacccaaatctttccggggcagggtgtagtgggaagataggatgttg

SEQ ID NO: 272874 - DNA, 122 bp, Homo sapiens
gggtctgtagtccacgtagtcctgaggctctatgtactcttttcactgccctgacacctgcgccgatggtgctgaagcaccggagggtagacggcgggcagggaacagcaccagggcgtgtg

SEQ ID NO: 272875 - DNA, 122 bp, Homo sapiens
ttctgctccattctgtgtgtgggatagatagatagtgtttctttaacagccccctccccccgcaagagagaagagtctaaaatgtcatctttctggagaatggtggaacgaagaaaggaaat

SEQ ID NO: 272876 - DNA, 122 bp, Homo sapiens
gcagtaatataattttctcttcacttgaatattacgaacaatgttgcagggggctgtacacgcctggcaatatggggagtgacatcatcccctccccccatggatattacaaacaatatcgc

SEQ ID NO: 272877 - DNA, 122 bp, Homo sapiens
tgttgtaaggattgaatgagttaataaacagcaagtgcttagaagaaagggcctggctcacgttaaatgctctgtgagcattagctattagtattgttgttgctgctgttgttgttgttaca

SEQ ID NO: 272878 - DNA, 122 bp, Homo sapiens
acgcaggcctccacgtctgcggcggctccatcctcaatgagtactgggtgctgtcagctgcgcactgctttcacaggtaagcgggcgccggcctgggatggtgtgggtagctgggcctgcac

SEQ ID NO: 272879 - DNA, 122 bp, Homo sapiens
ccgtcgccagtcctcgccgccgcctctaccgctgctgcctccactgacagagaacagctgcggtctccgtgcaaccgaacttgctgcagtcccggccccgccttacggacttcctattggcc

SEQ ID NO: 272880 - DNA, 122 bp, Homo sapiens
caccgccgcttgcttcctcggaggagcaacgcgactggccagcaaagggtggctctgctccgagcgccaaagttctccccgcctcagccggcgcctccctgttgctgagccctggcgcctgc

SEQ ID NO: 272881 - DNA, 122 bp, Homo sapiens
caaaacacttcagggctaagaagacacgaaacggtggcatttgccatctgacccggcaggcgctggggcagatgaagctccagttggaagggctactgctgaattttttttttttttttttt

SEQ ID NO: 272882 - DNA, 122 bp, Homo sapiens
ccagtattatccccattttgaatttgaggaaactgaggctcaaagagttgaatgatttgccgtggctgtgtgactaggaatatcagacccaaatctctgaactcctaactttagagctcctt

SEQ ID NO: 272883 - DNA, 122 bp, Homo sapiens
acccagattcctggccctcagaaacatgagatgagaaacacttgtcttaagctgctgaagcgtggaataactccctacctggccggagaggcctggagagtaactcccaatgtggctggaga

SEQ ID NO: 272884 - DNA, 122 bp, Homo sapiens
tataggaaaaaaatttaccaccgatgattccatttgtgtgctgggaataagcaaaagaaacgttatttttcaacctgtggcagagctgaagaagcaaacggattttgagtaagttggctggg

SEQ ID NO: 272885 - DNA, 122 bp, Homo sapiens
tgcggcgcccggcggggatccgaatagggggcagccagcgtacggtgtgggaactcgggccggcgcgggagcctgcggtcaagggggctcagcactttgtaaacaaggagtgggaagcgtta

SEQ ID NO: 272886 - DNA, 122 bp, Homo sapiens
aaggcacatgtacagaaggcgcttctccacgatgaacagacgagaccctcatgactcacccgcagtctcaatcctgcccaagcagagatccagatggatgcctcagtgtggctgcttctcct

SEQ ID NO: 272887 - DNA, 122 bp, Homo sapiens
cgcactgccctttctcagcagtcacttacttaatgcacttaatccactcctccttctcctcgggcgtcggagctgagatccggtaaacagtgtggttcccctccaccacccgcccgtcagcc

SEQ ID NO: 272888 - DNA, 122 bp, Homo sapiens
cattggcttctgtctccagacggccctttttattggcttcagtggaactggaaggcgggacggcgagtgcgggagaaggtctccattggccgaccgctctagctgtagcggagacccccaag

SEQ ID NO: 272889 - DNA, 122 bp, Homo sapiens
acccgcacggtgtctggaacgcttctcaatgccgatctagagaactgaccgtcgagcacccgcacggtgtctggaacgcgtctcaatgccgatccagagaactgactgtcgagcacctgcac

SEQ ID NO: 272890 - DNA, 122 bp, Homo sapiens
ggacagaggagtagagggcagtactgcgcagtagactgcacaggcgcagtcgaggagctccgctcctttctcctcagccccgccccgccccatttctgccgaatcacagaagttcaagagcg

SEQ ID NO: 272891 - DNA, 122 bp, Homo sapiens
tcctcgggatccaggagagacccttccttgcaagggcctcgcctcccctcatgctccacgcgctgcgctggcgtcacagggagtctgtttcttgcaagtcaaggccccccggccaagtctga

SEQ ID NO: 272892 - DNA, 122 bp, Homo sapiens
tggccgctgtccacctctccgggaggcagggcccgggttctccacggaacgatgggaacgcgcctcaactcgctggctcgttgaccttgggccagtcatcccctgctcccggcctcagtgga

SEQ ID NO: 272893 - DNA, 122 bp, Homo sapiens
ttcagggtcccaaattcctcctccctgtctggactaggcatcaggcagttgaagaaaaagcgtcaggagatccccatccttcctcactgctgtatcttgatgacagtcaacatctcttaccc

SEQ ID NO: 272894 - DNA, 122 bp, Homo sapiens
cccccagcgcctgcagtagagccaggctcggtgggggccgagagcactgggctaacgccacgaggcctcacgaggtgatgcttgggcgggcggaggaggaggacagagagagggagggctga

SEQ ID NO: 272895 - DNA, 122 bp, Homo sapiens
gtgtgcttctgggactggggccttggggagctgctttgagagccgtgtggtcgtggtatgcgagaagatgatgagccgagcctgctgggcgaagtccaagcacttgatccactcaaagactt

SEQ ID NO: 272896 - DNA, 122 bp, Homo sapiens
tggcctcctccgcggtgacctagggacacagggccgcatgagcctgggcggggtcagggccggcaacccgagcgaaagctgcgcccggcggccgcctacccggtggaacttgcggcggaggc

SEQ ID NO: 272897 - DNA, 122 bp, Homo sapiens
tttcctgtgcagtcacgagtgcattttacctaatttacacatgaaaatgctcttagaaaacgcaaagccatcaggcaccctcaaatcagtgctcctggccagccctcccagtgggacattac

SEQ ID NO: 272898 - DNA, 122 bp, Homo sapiens
ccacgcgcccacagtctctctgcgcatgctcacacgcgacctccccacaaagctactccgcgggcctgcctggctactgagtcgcgaaaatatatcgtagtgccgcaatgacttctgggtac

SEQ ID NO: 272899 - DNA, 122 bp, Homo sapiens
cgtctgcagctatgtgcagccaatgtcctctccatgagctgtgccacaggacaagtttcccggcaaacaccacgccccgcgatatggcaggattcatgccgactaatggaaaacacaccaga

SEQ ID NO: 272900 - DNA, 122 bp, Homo sapiens
cgcaaggagaccagcccacattttagcccctcctactcaggataagactttctctaagtccggagctgaaaaaggatcctgactgaaagctagaggcattgaggagcctgaagattctcagg

SEQ ID NO: 272901 - DNA, 122 bp, Homo sapiens
gccggcgggtggggcggaggggtgtgcagagaggccagtggtgtcgtgccacccgatgcccgggggtgtccactcccctctcctgggtcacgtgaccagggcccctgccctgcggtgttgtg

SEQ ID NO: 272902 - DNA, 122 bp, Homo sapiens
gtgagataaagccaggcaagccaatgggagggaccgcgtgagtgggttgaggccaagcggcgcgagctccagagctggtgaggcagctggtttgcgctggagccccagccacgaggaggccc

SEQ ID NO: 272903 - DNA, 122 bp, Homo sapiens
cctcgtgatccacccgcctggacttcccaaagtgctggggttaacaggcgtgagccaccgcgcccggcctgggtgatggttttaatgcacggctcttacctgagaacttagggtgctaagct

SEQ ID NO: 272904 - DNA, 122 bp, Homo sapiens
ggagccacctggggaaacggaagttcagggagggcgaggccgtgccccacatccaggcagcgcaggccgcgggccgctcccctagccaggaagagccgccgtccgcaccgggaccggagagg

SEQ ID NO: 272905 - DNA, 122 bp, Homo sapiens
ctgcatggagatcccaggacagtgacagctgaacaaacccttaccaacacgctcgtcccgcgccggcccaagtctcccccggcctcctgcaggcgcacagacctcatccgctccagcttacg

SEQ ID NO: 272906 - DNA, 122 bp, Homo sapiens
gttttacatttccctctcagctcctcccacattgcccccgactaccgtgggtgcgacgggcgctgtgagcagtaccgatgctactgccattgctgccaccaccgaagccacaacagtcccca

SEQ ID NO: 272907 - DNA, 122 bp, Homo sapiens
cacgctcggattggtccgaggtgagattcgcccttgtgccctcgtaggccttcggaacagcggaagagcagtgtcgggccatggccagggcccgcaggctggagctggccgaggccctggcg

SEQ ID NO: 272908 - DNA, 122 bp, Homo sapiens
catctggcccaggtccacggcattgccgtgcgagaagaggaccgtgtacctgggacaggccgagaagggccgttcacatcctcgctcccagcgcccagctgcagggcaggaggatgcgtagt

SEQ ID NO: 272909 - DNA, 122 bp, Homo sapiens
gaggcctgagtcccgccacagccacttcccaccggttccaaccagcggctgccactctctcgggatgtcggacccggctgactcaccatttctaggcttccgggggtcctggcgacttagtt

SEQ ID NO: 272910 - DNA, 122 bp, Homo sapiens
ttccgcggccggcgagcttctccacctccccgggccgggtctccgcccctcacaggcttccgagacactcactggccctgggttgtcaggatcttcctagccacaaccttattccgacccca

SEQ ID NO: 272911 - DNA, 122 bp, Homo sapiens
tcaattagctgggtgagcccagtgttaaccatgagggtccttaaaagtggaagagggctgcggaggagagagaaccatacagagggcagcaatggacggactctggctgaggttgctacttt

SEQ ID NO: 272912 - DNA, 122 bp, Homo sapiens
cattcatttttaggactcttaaaaatgccatgtggggcttctgtaggtacagggaggaggcgtgacattgctaaagagtgtgagtttgtgtgacacaggccatagacacctgccttaacaga

SEQ ID NO: 272913 - DNA, 122 bp, Homo sapiens
ccaaactaacattagcgagagggtacttagggcatactggtactcgagtttgctcctgcccgcccatcttctgcaaaagctctagtaatttaacctgaaaccacagacccgcctctccgtcc

SEQ ID NO: 272914 - DNA, 122 bp, Homo sapiens
agtggaaagaagggagtaatgcagggactctccagctgaaatactagtacagagcagcagcgggtggtgactcaggcctcaaactgccaaatgcaaaatctactttgattcccacttccaca

SEQ ID NO: 272915 - DNA, 122 bp, Homo sapiens
acccaaggaagacctgaatggggacccatatgcctccttcacccactgtgttgaggtctgcggatggtggatttgtctgcccctggggttcctctgtgccctccccacttgggaccacatgt

SEQ ID NO: 272916 - DNA, 122 bp, Homo sapiens
aaattatttcaaatgtttattgattttactcttcacagcataaatataaagtgaatgggacggttgcgaaatgggtaggacaagtgtgattacttattttagaaataaaattatgtcttgga

SEQ ID NO: 272917 - DNA, 122 bp, Homo sapiens
gtcgggcttggagggaccggctaggggcccgggggagtagcagaacgggtgcggcaatagcgtgagactggtggcagggacgtagacccttagctggccggtgaccccatgtcccaaaatag

SEQ ID NO: 272918 - DNA, 122 bp, Homo sapiens
acctcaacctgcagccggaagggggaagtgaaactcggctgggggtgggggctcagaagccgccccagaaagcactgaaagccacagcacgtacacccactccagggatctgccagcaccct

SEQ ID NO: 272919 - DNA, 122 bp, Homo sapiens
tgtcctttgtgtcttgagcggatggtggggccgtggaacatgaaggagtatctttgtgtacgttcacaacgttcacatcggtgtaggccaggttgctggactctgactcaaagtgttataga

SEQ ID NO: 272920 - DNA, 122 bp, Homo sapiens
acctcaaagcggcgggtgccgccgagtcgctggagcttccggaccccaggcccgccccgccgccgagcatgctcagtgcgagccgccgccgaaagttttctggaacaaacacccgcatctgg

SEQ ID NO: 272921 - DNA, 122 bp, Homo sapiens
aagagttggtggcctctggtgacaccatgtcctgaccaagggcttggcaggtgacagggacggaagacaccaagaacagcaacaaaaagcagcagcagcagcagccgggcaggtggggaaag

SEQ ID NO: 272922 - DNA, 122 bp, Homo sapiens
ctgaggtaatgggggcggcagcggggccggacagagcgggggcgggggcatcggggccttcggggaccagggactgcacggggggaaaccggagaagcggggggctttccgagcagggcggg

SEQ ID NO: 272923 - DNA, 122 bp, Homo sapiens
agaacatttctcacccaggattggtagaaacctaagagcgcatgcgcactgagaggataccgctaaaaatcgccttcaaaattgcttaaaaggcaaactttaacaatgcgatctaagagtcg

SEQ ID NO: 272924 - DNA, 122 bp, Homo sapiens
aggagggtgctgggctaggagtgtgctgccctcgctaggcatgcccttatccagaggcaacggatacggtagggcaggccctacccccaaatcacaaaaaggccccgagtttgtgtcactgc

SEQ ID NO: 272925 - DNA, 122 bp, Homo sapiens
acaagtgaataatttgatcctttggttcacgtcgcaaatgagcagtggtacatcatttagcgaggaagcccttatccgtgatccacgccgctcttcccacaccctgaccgcatctcctgtgc

SEQ ID NO: 272926 - DNA, 122 bp, Homo sapiens
cgcccgggcccgcccgcgtcccttgtagttttgggaggtgatcagcgatgagcacggcatcgaccccacgggcacctaccacggggacagcgacctgcagctggaacgcatcaacgtgtact

SEQ ID NO: 272927 - DNA, 122 bp, Homo sapiens
aactatatagtaaatcaccagactagagattgacaaaacactttaccatattaaagtccccgaaaattcccacagcaaagagaatctgttgaactttgctgatacccctacttcccccccaa

SEQ ID NO: 272928 - DNA, 122 bp, Homo sapiens
tgtggaggggatttttctcttgtctcctgaagctatagaggatccttcctggaagcagggcgtctctctggcactaggctcatccctgcctcagagcctttgcacctgctgctccctctgtc

SEQ ID NO: 272929 - DNA, 122 bp, Homo sapiens
tcacagactgtcaccttgtccttagctgctgccttcatttcagtccttttttctacctatcgagactcattggcaaccaccatgtggtccctccccagttatcccactgctctctgggggca

SEQ ID NO: 272930 - DNA, 122 bp, Homo sapiens
gttgcgctgcccagggaccgatgttgcgcgaggaaaatgcgggacgcccaggtcggtgctcggcccagacttatgcccgtgttttcacagcccacactcgtgcccgaagccccttaccccgc

SEQ ID NO: 272931 - DNA, 122 bp, Homo sapiens
cttctgcctcccggacactggctgctctggatgatgacgaggagagaaggcccggcgctacgagcagccaagggcagcttctctgagtgcagcctgaaaatgagatgttaacaacgattggt

SEQ ID NO: 272932 - DNA, 122 bp, Homo sapiens
cagttgtacccaacccctatactgtgctctctcaaataccagaggaagcagaatggttcacggttctggagctcaaggatgcctgcttctgtattcccctgcactctgactcccagtttctc

SEQ ID NO: 272933 - DNA, 122 bp, Homo sapiens
tagacgctgtcttctggaagcattccctgcagcttgcatcgcggccctgagtgcgtgtcacggcggcacaccacttactacggaacaatctactcctttatttattttattttattttatga

SEQ ID NO: 272934 - DNA, 122 bp, Homo sapiens
ccctgggacaccccccaagacctccacccccagcagccctgggacacccacctagacctccgcccccagcagccctgggacaccccccaagacctccacccccagcagccctgggacacccc

SEQ ID NO: 272935 - DNA, 122 bp, Homo sapiens
gaaggcgaaagcgaccagcccaatgcagcaaagctagcaagggacagccgaaccagggctcgaacccaggtgcagttgcaaacccatggcctggccaccacgccagctgcctccccaagacc

SEQ ID NO: 272936 - DNA, 122 bp, Homo sapiens
tttcacactccaccctcacttcacactggcccacccactccttgttctgggaaatgaggacgcagcaggagatacctgtagctaacacacacacaccttgccccccgcgatggccagacttc

SEQ ID NO: 272937 - DNA, 122 bp, Homo sapiens
actgtggcttttcccagcaggagcttgtagcacttggccggtggctgtgcttgctttgtccgtagagaacaaagtgaagaactcttattccatctccagcagacattaatgttgttcagaga

SEQ ID NO: 272938 - DNA, 122 bp, Homo sapiens
tttattattctttattggtcctaccaatgtgactctttacccaggcccactgttcctatgcgcactggctttgtaggcattcacatcatatgtctgtgtcctgaaaatctcaattaatttct

SEQ ID NO: 272939 - DNA, 122 bp, Homo sapiens
ggaactgtccggccctcccgtctcaccttcactacctgtcacgggtatgtgccgtgtgcacgggaatggactttgtaccaggcctaagcagtgttaggtgggggctttgctagggggccgct

SEQ ID NO: 272940 - DNA, 122 bp, Homo sapiens
cccacaggagtcccgagttgcggtcccggggcggcggggctcccgccccctccccgcccccgcggatatccccacgcaccacgaagatccccacgcgccctgcgcaacgcggctgctccgcg

SEQ ID NO: 272941 - DNA, 122 bp, Homo sapiens
ggccgtggggtggtctttgccgtgggcaatgactttgaccagcagggagtcgtagtggggcgagatgacggctccttggaaggcggaagcattatccaggcggatgcccatgccctctccgc

SEQ ID NO: 272942 - DNA, 122 bp, Homo sapiens
gctggccaaggcacgctggagctggggctggggctggggctggggctggagctggcaggccgaggttcccaccccacaggcaccggagatgagttggtaagaaaagggcaccctctggctgc

SEQ ID NO: 272943 - DNA, 122 bp, Homo sapiens
aggcctggccgctacaataaggctggcgaactcgcagcgcttgaatacccgtggcctaaccgtccactcggaagaccggtcccgctcgggaggctctgcagtcgcgcctggggtcagggccg

SEQ ID NO: 272944 - DNA, 122 bp, Homo sapiens
ggctcagagaggtgaaatgaccccaaggcacaggctccaaggtaggctttgagcctctgacgtatgacttggacaacaccctcaaccttgctttgtgttttccgtgagtctaaggaggggtt

SEQ ID NO: 272945 - DNA, 122 bp, Homo sapiens
gcttactgacatggtgaatcaaatgacagaaaaagtaggcttggttcacgggctgccttacgtagcagacagacagggctttgctgccaccttagagcaggtgagtatggtggttataaatc

SEQ ID NO: 272946 - DNA, 122 bp, Homo sapiens
acaaagcgtctcccaaacatcgcttccctggtaacatccggcatcctggggctgccaaatcgcagacaaagacgcccatcagcgcggggggtgaggagactaagggagagacaagaccaacg

SEQ ID NO: 272947 - DNA, 122 bp, Homo sapiens
ggttttagttttttgatgttattttttcctttctgcagtgaccctttgttttctgctcagcgccttccccctcatggctacccattggaacacccgtttaacaaagatggctatcggtatat

SEQ ID NO: 272948 - DNA, 122 bp, Homo sapiens
cagcattccctgccctgaggtcagccgcctcctcaccccagcccgggctgagcgcccagtcggccgcagcagtagctccagagtgtggtctaatggctgtcagcagcctggccttgaggctg

SEQ ID NO: 272949 - DNA, 122 bp, Homo sapiens
cgccgtggggcccatctctttccccggcttcacctccactggggctctgtgttgccggggcgggtgcggccagctctccatctcagagcagtgaacagtcctgggctccagctccagtcatg

SEQ ID NO: 272950 - DNA, 122 bp, Homo sapiens
aatgcataggctataaaactatatggtagttttgcttaaagactgcttaaataaccatctcgttggtcaggaaggatgcttacctctaagaaaaccttactagcaactcatcctcttgtcag

SEQ ID NO: 272951 - DNA, 122 bp, Homo sapiens
ggaattgagaaagaatgggcacagtccgtgacggcagccagctgcctgcctctgtccacccggccaccaagcacccttggcaccccacttagcccaagggccggctgtgcacacagcctccc

SEQ ID NO: 272952 - DNA, 122 bp, Homo sapiens
agggactgtcctctaggccatggggtggggaagagggggacagagccccacaccagcccccgctgtgtccatcctctgcctgtggctgtttgcctgattgatttgtttggtggcctccctgg

SEQ ID NO: 272953 - DNA, 122 bp, Homo sapiens
aggggatgatttcacagcagcccactggtaaatggtaatacacgccgtccccggcacgctcgagggacttagaaaccacaccctcctgtgtcattttgaggttgcctgcaacatttgctgtg

SEQ ID NO: 272954 - DNA, 122 bp, Homo sapiens
ccatataccaggggtgtacaagcctgtccctagctgtctctcctgtgtacgactgccaggcgaagtttcctaaaacaccacttttttttttttttttttttgagacggagtctcgctctgtc

SEQ ID NO: 272955 - DNA, 122 bp, Homo sapiens
agggtggttcatctctacagaaatggcaaggaccaagatggagaccaggcacctgaatatcggggccggacagagctgctgaaagatgctattggtgagggaaaggtgactctcaggatccg

SEQ ID NO: 272956 - DNA, 122 bp, Homo sapiens
tctgtgtgtatctgtatatagcgtgtgtgttgtgtgtgtgtgtttgcgcgcacgggcgcgcgcacacctaatattttcaaggctggatttttttgaacgaaatgctttcctggaacgaggtg

SEQ ID NO: 272957 - DNA, 122 bp, Homo sapiens
agggcagcctactacagggtgaaggccagttcttctctaaaatggtcactcatccaacatcgccacccgagggtgggatttggcacggcagatgggaacaggtgtttccagacctgttagct

SEQ ID NO: 272958 - DNA, 122 bp, Homo sapiens
cactttttggcacatatctcctccctcagtttaattaccattttcctttgacagatgagacgtgcaggtaccatcaggaagcagcgggataagctgataaaggaaggaaagtacacccctcc

SEQ ID NO: 272959 - DNA, 122 bp, Homo sapiens
aaccggggctgctcatggcgcttgtgggccagcacgagttccgggtgggcgtgggctcggcggccccgcacccggagtggccagctggccccaccggccccaggcagtgaggggcttagcac

SEQ ID NO: 272960 - DNA, 122 bp, Homo sapiens
agggccaaagcctgtcccggactggtctgctgaagttattaaaactgaataccagctgggcgcggtggctcacgcctgtaatcccagcactttgggaggctgaggcgggtggatcacttgag

SEQ ID NO: 272961 - DNA, 122 bp, Homo sapiens
ttccactttgtctttaggtgggcgtgggctcctccccggtactgctgggggtctgcagggcgtctggggcctgggaatgtggttccagcgctgtggccagccggtcacgtctttgtctctgt

SEQ ID NO: 272962 - DNA, 122 bp, Homo sapiens
aaggataattaggtttttgttttttggcagggtacctccccttgaccctcaaagtcacagcggtgtgtctaacctgtccagactgtttttggaggcaagagtggggagtggaaaaaggtggg

SEQ ID NO: 272963 - DNA, 122 bp, Homo sapiens
gtcggcgcccgggcacgcggacgcgggtcctcctttacttctctgcggcccttccaacctcgtccccccacgccaacattccaatccccgcggcgcgcgccgccacccacgtggccgtcact

SEQ ID NO: 272964 - DNA, 122 bp, Homo sapiens
agcagggaggaggaggagagagaaagcaggaaactttgagcttgcctgaggaagaccatccgcatggattgtgaaggatggctcatattgactgtattttcattcaaatgtgcaaaactatt

SEQ ID NO: 272965 - DNA, 122 bp, Homo sapiens
aaacctgtaattttgttcagcagtgtcccagacagtgtgtgctgtagtcggggtggctggcgggggtggggggatagcaggtaggcacagtggccactataatcccattatttgttatataa

SEQ ID NO: 272966 - DNA, 122 bp, Homo sapiens
tgaagacacgcactctccccctagcaatcccaccccggaattgaggacacagggtccccgcgctcagcccttggtgccagcacttcttggacacctcaaccccctcagctaaacctgagatc

SEQ ID NO: 272967 - DNA, 122 bp, Homo sapiens
acactgagtgttacaaaaatagttcagtgttttaactgtcttttaggggtttgttttacacgtggaggcaaaatgatcataaaaaatatcaaaggcaacctctctgaactatttttttctgg

SEQ ID NO: 272968 - DNA, 122 bp, Homo sapiens
agcctaggggcttcttagtctggctcaatgtcttcaacccagaactcttcccagtacatccgggagaaagttcctgggggtcggtgtcatgattgtttccctctccaaacctctttcagcat

SEQ ID NO: 272969 - DNA, 122 bp, Homo sapiens
aggccaaagaacttgacgctgaggccatccacggggtgcaggacggggaccaaggtgatgcgggggaaggtccgtgtggccagctcaaagcggctggtgctagccagctccaccgccagcac

SEQ ID NO: 272970 - DNA, 122 bp, Homo sapiens
tcccagggaagaaaaacggatcctggctccgacatggggcaaaaaggagggaccaactgacgtaatgcagccctgaaaagcaacgaagagtataacaggtagaaggcacttacacaacccag

SEQ ID NO: 272971 - DNA, 122 bp, Homo sapiens
gtgcgtctgcagcgctctcctggaggccggctgcaggttcattagtgctcacaataggcacgcagcgcaggggaatatgtaaagaaagtggaggacatcggagtggcattcaaagcggcagg

SEQ ID NO: 272972 - DNA, 122 bp, Homo sapiens
tccgaaccagcgcagcgcggggcggggcagcgggaaggtagtcggaggcgcagggcggagcggagcggggcggggcccgcgagccgaggtgggggcggggcacgcgcgaggggcgctggcga

SEQ ID NO: 272973 - DNA, 122 bp, Homo sapiens
acagaaatcccgtgtcttgtctgccgggcacgcagggagctccgagaacacatcagtcagcgcccagagagccgacgtcggccagaggacgcagggtaacggctttcctgaactccgcttcc

SEQ ID NO: 272974 - DNA, 122 bp, Homo sapiens
agtaccttctcagatgcatagtttgcaaatattttttgatggttttttttgttgttgttgcgttccttgtagattctgggaattagtactttctcagatgcatagtttggaaatattttctc

SEQ ID NO: 272975 - DNA, 122 bp, Homo sapiens
agacgccggctccgggacacacgtggaagccgggtcctgcagcaagaggaagtccaggatcgcggcgaggagacggcggggcccgggcgcctgggctgccgtcccggctctgggtgggtggg

SEQ ID NO: 272976 - DNA, 122 bp, Homo sapiens
tccggctcctcctgctcctcctgctgttggtgctgctgccgcggcggctgctgctgtgatcgcctgggtttgttttctgcacttttatttcacgaggtcctttaaaaagagaagacgtgggg

SEQ ID NO: 272977 - DNA, 122 bp, Homo sapiens
cgcaccgctcccgcctttactagtttggggctccttcccctcccaagaacagactaaatccgtttaaagaaaagcaacgcaccaaatactcgtggaaccaaattctgctctcgccgggactg

SEQ ID NO: 272978 - DNA, 122 bp, Homo sapiens
ggcagggtccctggggttgtccctggccccggggtccttcactggagcttctgattctagcgcagcttctccgccccaaacaatatggggagaaggggtctgctcagtactccatcctgctg

SEQ ID NO: 272979 - DNA, 122 bp, Homo sapiens
gaaggtgtgggccccgcagaggcagccagatcctgccttgccagagcgctctgtcattagcgtagccccctaagtctgctcacagatggaaccataggcaatacttcataacgcgctggaga

SEQ ID NO: 272980 - DNA, 122 bp, Homo sapiens
ggtgcgggcaggagctctgatgcgatgcgatgcgatgcgatgctgcccccctgtgtccttcgacgatattgctgcgggaagctttctgtgctcaagacctcgtccatccctccatcagctca

SEQ ID NO: 272981 - DNA, 122 bp, Homo sapiens
gcggggccggagatttggggaagtttgtccagcaaggggcgggtgacgtaagcaggggggcgggtcccgggcatataaatacaggctggcgggtctgtgcttcattcataagactcagagct

SEQ ID NO: 272982 - DNA, 122 bp, Homo sapiens
cgcccaccccgcggggattggctgcgaacgcggaagaaccaagcccacgccccgcgcccgcgcccaccaatggaagcgcccgctcgtcttgatagacgtgccaccttccgccaatggggacg

SEQ ID NO: 272983 - DNA, 122 bp, Homo sapiens
ccaccgctctttaattatttgggcgaaacattcttttctggttttgcacttgtggactcacgggaagcgtgacttgcagcgaggcaggacccgatcccaggcttctttagaaagcggacgct

SEQ ID NO: 272984 - DNA, 122 bp, Homo sapiens
tatgatcatgaccaaataggcacgatagcctcacttcatactgttccctgaaatacgtgtcgagcattgccatctgctgctactccttatggccttggagacaatgacacagaaatttttgt

SEQ ID NO: 272985 - DNA, 122 bp, Homo sapiens
cttggcaggcttattgtgctcccattccaggcgtgtttggtgcacacgagtgagaccatccgtgtgtgctacttcatggagcggttgatggcgcggcagcggcctgtcatgctggtgggcac

SEQ ID NO: 272986 - DNA, 122 bp, Homo sapiens
aaagacccggcgtcgctcccggatctgccatccggaccccaggctctgggcgcgccgggacgcctttgttccaggtggcgagatatcgtccccttgccgcgggcccgcttcgcgctcgcctg

SEQ ID NO: 272987 - DNA, 122 bp, Homo sapiens
actgactcagctgggcctctcgagggtcgctgaatctggtagatggaggtgatccgttcacgggtctcagtgtgaggcttaacagggataaccaacatttactgagtcacatatttattgaa

SEQ ID NO: 272988 - DNA, 122 bp, Homo sapiens
agacgaggcggggtgaggtgggttgggccgggccggttgctaagacttggcgaagcgctgcgctcgcgcccggatccctcaggtaagcgcgcggccccgaggtctcgggttctccaggctca

SEQ ID NO: 272989 - DNA, 122 bp, Homo sapiens
ccggcgccacatctctcgctctggatgtgctctccagatgttcttcttcctcttctttggcgccacggagtgctgcctcctggcagccatggcctatgaccgctatgcagccatctgtgaac

SEQ ID NO: 272990 - DNA, 122 bp, Homo sapiens
ttttctgcctctgacacattatgagacctgtctaatccctttaggagacagtgtggagcccgagttcataacagccccattgttgatgcaactccttcactccatgtaagcggtaagttcca

SEQ ID NO: 272991 - DNA, 122 bp, Homo sapiens
aaatcagctgcccagccctcacttctccccagcatccatcccacccagttttcccaaaagcgtggactttcatgtaactgttagtcaccatgaaggggtagcctgccctggcacgagatgcc

SEQ ID NO: 272992 - DNA, 122 bp, Homo sapiens
gaagggtgggcttagggccaggggtgcaaatccctcggtaaaagccggcaaactaaaagtcgcacacatcccaggtcccggtccaggccccggcggggcagggtccccgaagtcccggggcg

SEQ ID NO: 272993 - DNA, 122 bp, Homo sapiens
acatgctccctccaggagccacacagagacccaaggccaggattttgagcaggggggctccgtgaaacagccggtgcggcctgtgtgtgaccccacactgccggggcccgcaggccagcgct

SEQ ID NO: 272994 - DNA, 122 bp, Homo sapiens
tgtttctccaaggcgaggtcaaattccatacacttttataaccgtagtcgatttttctttcgtgtgaatatggttttcgtgtcattagtttgcgatttgatttgcttacgtatccagcctgg

SEQ ID NO: 272995 - DNA, 122 bp, Homo sapiens
ccagggtgctgtagggctgctgctggtgggcgttcccagggtgctgtaaggctctggtctcggtgggtgttcccagggtgccatggggctctggtctcggtgggtgttcccagggtgccatg

SEQ ID NO: 272996 - DNA, 122 bp, Homo sapiens
gcagcggctgaggcgcaggaaagaggagagcacacggggagtggcccttggaaccaggcgcgcaaaacctcagcccctaggctccatttccaggttcgcgggtgacctccccaagatggccg

SEQ ID NO: 272997 - DNA, 122 bp, Homo sapiens
cccaggctgcgactttgtagggcagtttgtcagacatgctggtggcgctcgtgatgggcacgggcgaagggggctgggcctcagtctggggacaggcactgggcggtcggcgccgggcaggg

SEQ ID NO: 272998 - DNA, 122 bp, Homo sapiens
tcggggttgattgcatagctggtcaagtctctgcactcagggcccggcacgtggaccttgcgctgctgctggtaggagcgcctttgctccgtgtcccggcgccggcagcgctcatccagttt

SEQ ID NO: 272999 - DNA, 122 bp, Homo sapiens
ccagctgcgtgcatggggacgcgctcaggagtgctgctcacaacagcaaaagactggcaacgccccgggtacacggcccagaggatcccactgaacccgcaacggtgactcccaaccgaagg

SEQ ID NO: 273000 - DNA, 122 bp, Homo sapiens
aagttggtgagaagggaaccagtatctaaactcagacctgtaagatcccaccccagaacacgcatgagaaaacactttgcaaactaaggttctacacacattacctcttgttgtaatgcata

SEQ ID NO: 273001 - DNA, 122 bp, Homo sapiens
agacaccggagacgcggggcccacccctccggcccccccccgaccaagaaacgccaactccgcctcccattggctgcgccgcgcgtcatgtcgactaagttgggaactttgctggagcgacc

SEQ ID NO: 273002 - DNA, 122 bp, Homo sapiens
ggatctagcaggttcatgtcatacgggtccgcaggttatgcactgcacaaggcctgggagcgccatttacgtagacgttcacgtgaaccgtgcccccttaagttgtgcgaaatagtggccac

SEQ ID NO: 273003 - DNA, 122 bp, Homo sapiens
gactcccagcggggaggggctcctcggccgtcgcagggcccagcggctaatcccgccggccgcaaggaagcggagaactcaccggacaccagcactcgcgactccacaaactccctcagcct

SEQ ID NO: 273004 - DNA, 122 bp, Homo sapiens
gcagagcctccaagctcatggcctccttaggagcgaacccaaggaggacaccgcagggaccgagacctggggcggcctcctccggcttccccagcccggccccagtgccgggccccagggag

SEQ ID NO: 273005 - DNA, 122 bp, Homo sapiens
gtcgaatgaatgaattcagtctgtatcctcaacacccaatgccgcgcctggcaccataggcgttcacatgcagccgtgccgaaagactgagtgaatgctggactgaatgaatgactgcctgt

SEQ ID NO: 273006 - DNA, 122 bp, Homo sapiens
tttatattaaacaggaggctggagcaagtcaccgccaaggtccttctaatctcgactctgcggttttatgggactttgtttaataattgtttctagggctggccgatgagcagggtactccc

SEQ ID NO: 273007 - DNA, 122 bp, Homo sapiens
aaggaactgagggtgtcctccagccaacagtcagcaaggcaatgagaccctcagcacaagcgtccataaggaaccaaatgctaccaacagccatgaacgtgatcatggaagagggtcctgcc

SEQ ID NO: 273008 - DNA, 122 bp, Homo sapiens
ggcgtgaacgacagggttccagttgggggcagatgacagaagtgacacgcaaaatgaaaacgaaccacgagggagttctggaattattacaggacctggcttgccgagaatgcttccctcag

SEQ ID NO: 273009 - DNA, 122 bp, Homo sapiens
ccgggctgcgggcgctctcaggccagcgagagttccgggtgggcatgggctgcacgggcccgcacttggagccgccggccggcgctgcaggccccgggcagtgaggagcttagcacccaggc

SEQ ID NO: 273010 - DNA, 122 bp, Homo sapiens
gtgatgagccgtcctgggaacggtgtcgcaggctgaggatgtccaagacctggcgagtctcgggtcagaggagccggagggggcgacccgaggccccgcgccccggctctgcgctggggggt

SEQ ID NO: 273011 - DNA, 122 bp, Homo sapiens
ccctacaccgcctgcgacctggcgccccccgccggcaccaccgacgccgcgcacccggggcggtccgtggtccccgcgttgcttcctctgctggccgggaccctgctgctgctggagacggc

SEQ ID NO: 273012 - DNA, 122 bp, Homo sapiens
cgcttgcagagtcctgggtttaagctctgatgtctggagagccccggattctttgtttcccggagctgcttatctggagaagggaaagcgggggaggggggagaggagaaaaagggaaggaa

SEQ ID NO: 273013 - DNA, 122 bp, Homo sapiens
tatattagcaaacatctctttccttgacctaaatatgctgtttatttaatcctgcatcagcgggaaacagagaagcaaaggaaaaaaaaaagtccaaaaaacgagtgaaatctctaagatga

SEQ ID NO: 273014 - DNA, 122 bp, Homo sapiens
gcggtgagcgccaccagggggcaccgcgtccgaactagaagccccgggtgccgccgactccggcctcagagtccactgccctcgcccgcactttcccgcggcgttacgaggggccaactccg

SEQ ID NO: 273015 - DNA, 122 bp, Homo sapiens
aaagatggaaagcagcttagatctctgagctcctgggtggtggtgaaggaaagaagacaacgtggttagtttccagggagtaaagatggaagaacagcgtcatcagtactggatctctttag

SEQ ID NO: 273016 - DNA, 122 bp, Homo sapiens
agcaaagccctggttcctccagtgagacccaaagcatctcctgaaggaaggtctcttaaacgaccctcagaatcggatttcgctctgcatcgagttttctgaaacttgaagatcaaatgctg

SEQ ID NO: 273017 - DNA, 122 bp, Homo sapiens
gtggccgccccgccgcggaggaccgcgtccccagagcgccgtggtgtctgcgctgccgggcgcgatctgttattatcccccgtcagcgctgccggcctgtgtacattcctccgtaatgagtc

SEQ ID NO: 273018 - DNA, 122 bp, Homo sapiens
atgttagaagtcaatgtgatagttatcaaaacttactgattatgtatgtactttacagaacggtctttccaaatcatacagtgaagagagtggaggattccagtagcaatgggcaggcacat

SEQ ID NO: 273019 - DNA, 122 bp, Homo sapiens
tctgctgtccagcgcctgggccccggccctccctgggacaccatcctgccctgcccgagtcgtggctctccagtctctttcggggactcgcccctggcacccactagatggcgctcccggcc

SEQ ID NO: 273020 - DNA, 122 bp, Homo sapiens
ggctgcgtttcgcatctctgctcccatgaataaatgtatttactctaaaaacgtgtggctcgtgtgttgtacgtgaaacagccaccagcctcgtgctgagtagccgtaaaatctgtggtgta

SEQ ID NO: 273021 - DNA, 122 bp, Homo sapiens
cctgagaagcagcgagaccctgtccaggtcagcgggaccagcaccgcatcccaggccacccgtgtgtcagcacataacctttgaaaacaccgtgaatgccggctttgatgataatatgtggg

SEQ ID NO: 273022 - DNA, 122 bp, Homo sapiens
gaggcggcaccacaataggcagcaacaactgtgtggaaagctggatgaactggtcagtagcggaaaatgggagggggcactgggttggcctcttggggaggggtccaaccttggcttggatg

SEQ ID NO: 273023 - DNA, 122 bp, Homo sapiens
tcgattttggcctagctattgctgactgtacaggtccattttaatacaccactgattaaacggtatgttcatggctgaaggcactacagcaggaacaaacagaagcagctgaaggaaggggg

SEQ ID NO: 273024 - DNA, 122 bp, Homo sapiens
ctctgcatctcagtgttcaaatctcctctccttataaagacagcagtcacattggatgagcgccacctagtggccgaagtttaacttgaggacaactgcaaagaccctccttccaataatgt

SEQ ID NO: 273025 - DNA, 122 bp, Homo sapiens
ccagcacttgtgcactgatgaggaaagggagggacggcccttgtcctcctgtctgtgaaccgggactaaagcccaaggacccagcagggcacttcaccatgaagtggcgggtgtggtccagg

SEQ ID NO: 273026 - DNA, 122 bp, Homo sapiens
gacgcactgagcatgtgcagatcagctcggtggtggctgccgcggccggaggcgagggcccggtgctgatgcgaaccgccggctcggcctcagcccgcgcgtggtcggccccccaggccggg

SEQ ID NO: 273027 - DNA, 122 bp, Homo sapiens
gatgtccccaacaccgccagacgtccccaacaccgccagcgcccaccctggctcaccgtgcggatctgcctccgcagaaggtaaatgaagaagctccagagcttggcggcgaaggccacgaa

SEQ ID NO: 273028 - DNA, 122 bp, Homo sapiens
tggtaacccatttgagcagctgtatgatctgaatagtctggaggggggtatgattacttacggctacattagtcaccataaataatccagttgccctgcagagtaacactcttggctgagca

SEQ ID NO: 273029 - DNA, 122 bp, Homo sapiens
ctgggaccccgcaaagcggcgatggagcggaggtcgcggaggaagtcgcggcgcaacgggcgctcgaccgcgggcaaggccgccgcgacccagcccgcgaagtctccgggcgcacagctctg

SEQ ID NO: 273030 - DNA, 122 bp, Homo sapiens
ctgccagcagacacatatgcacttcattgaggctcctctgtgacaagatgaagctgtgagcgatgtggcagaatgataacagtgcaacactgagaatctaacaggcattccctgcccttagc

SEQ ID NO: 273031 - DNA, 122 bp, Homo sapiens
tggacaatattgtttattcatctctgtgtttatagtgcatggtatttactaggtactcagcgattattggctacagtgggccattgaggaatggctggaagtccttacctttaagatccaca

SEQ ID NO: 273032 - DNA, 122 bp, Homo sapiens
caagtcctgggattccttggggcccagctcactcctcaccaagagcctccccctggttcacgctgcttcctctgagctcagacagtcacaggaatgacatcatcgagcccctccttacagta

SEQ ID NO: 273033 - DNA, 122 bp, Homo sapiens
ggctccgggccatatcatcagcaccctcccctcatcctgccccgctgctcatcgctcgcacgccacaggcgctgccggcatgggacgcatgctggcttcctgtctgctactcagtacttgtt

SEQ ID NO: 273034 - DNA, 122 bp, Homo sapiens
aataaataaaaataaataaaactaacaagcagcacgactccaaaatcagaaaacttgtaacgaccaaaaaagtgcaaacgtgccttaaatcagtcatgtgcgacaagcagctatagctaggg

SEQ ID NO: 273035 - DNA, 122 bp, Homo sapiens
ggactggaacctaggtctggccactgggaagctgggtgcagtaagttaggtcctcgccagcggatgtgggccagtgagggctggggtcctagtaacagaacttttacctctcctaaatcgtc

SEQ ID NO: 273036 - DNA, 122 bp, Homo sapiens
aagcaggcagaaggagaatgctcaacattttgaggcattgggctcaaagttctcctcccccgaatattggagcattgagtaaatgcttgtagtaatgtcctaacataaaggccaggtcttca

SEQ ID NO: 273037 - DNA, 122 bp, Homo sapiens
accttgagatctgtaaaatgtacacagtattattcctgaaccatgactgcttcccttgcccggtctagtgattttaagcacacaatacaagatcttcccatattgttgcaatatggaaggaa

SEQ ID NO: 273038 - DNA, 122 bp, Homo sapiens
tttgtcagactcattagataccctacaagtttcatcttcttgaagaagcctccaccaagacgttctgagacgtttcctatgaaggaaagatcttttgacgccatacaggtgttgtcttggga

SEQ ID NO: 273039 - DNA, 122 bp, Homo sapiens
agttggtgttgggacccagttgggccattcagtggatgctcaagtggttaagccgtcttgcgtgggtgtagttggccaaagtttgaatcaaagttcagtgttgacatctggaagtgtgtaga

SEQ ID NO: 273040 - DNA, 122 bp, Homo sapiens
cgactagactctcgctttcctaccttagtaagcaacagacatgtaccccaagagggaccccgcaggccacacccgccaaccggccccagggctccgggccggcgtctcgccaactccacctt

SEQ ID NO: 273041 - DNA, 122 bp, Homo sapiens
cccagccaggagtggagggcacgcaggggctgggcgggaaaagcagccccaagagccctccgggtctcccctcctgcaccgaggagggggcaagtgagccctgcctgggcacccaggccatg

SEQ ID NO: 273042 - DNA, 122 bp, Homo sapiens
ccggggtccccaggccgcgccggcccagccctgcgatgccgcctggagcggcgcgcctcgcgctgcaggtggctctcttaaggatgcgcgtcaccgaccgcaaattccctcggactggtgca

SEQ ID NO: 273043 - DNA, 122 bp, Homo sapiens
caaatctaaaccattagagtctctgtggcgccatcggttagtgccttcggctgtttgaaccgaaaggctggtggttcaagcccacccagagatggtaccttttacttaggcaagattcacgc

SEQ ID NO: 273044 - DNA, 122 bp, Homo sapiens
gtaaaagcttcctgggttaatgtaggggtgggttgcccctccacacctgtgggtgtttctcgtaaggtggaacgagagacttaggaaagaaaaagacacaaagacaaagtatgctgaaccag

SEQ ID NO: 273045 - DNA, 122 bp, Homo sapiens
ggtggagtcaacagtggagggacggcatgagcaagtgccactgtcacccatcctggcgtgcggccacatccaccagggagaggcgaagcccaggaatgacacccagaagacacaagagatca

SEQ ID NO: 273046 - DNA, 122 bp, Homo sapiens
gaggacagagcgaagggcggcggggaggggcccagaggggctgcttcgggcaggggcgggcgcctcctcctggccgcccgccaagcatgcccggatccccttagccgcgtcccaacacatgg

SEQ ID NO: 273047 - DNA, 122 bp, Homo sapiens
gggcgcgaggccgccgggtcgggggcggggccggcgggggcagcggcccccagcgccccgcgctcccctttcagccgcctgttgttgggccaacagctcgggccgcagccgcctgaaaggcc

SEQ ID NO: 273048 - DNA, 122 bp, Homo sapiens
ccccagagctccccgcttccgttccctgtcccgccttggccccgccccctcccatcaccccgggctgccagcgcctgtcacctctcccagagccgagacaaggcagttggaggcagcggtgg

SEQ ID NO: 273049 - DNA, 122 bp, Homo sapiens
tgggagcggctgcagcggctcaccatcccgttgcctgcagcagaggccggcgtcaggcagcggtcaggccccaggcttgcgcccgtggacccccccaggcggctcctctgccaggcttggcc

SEQ ID NO: 273050 - DNA, 122 bp, Homo sapiens
gggggcacctgaccctgggcatgctgggttgctgttgatgacttcaactcagaggatgctcggtcctggctgtgtaattgctaggccacagatggacctgagagatgcagatgcgggcacag

SEQ ID NO: 273051 - DNA, 122 bp, Homo sapiens
tgccgaccgtggcttctttggctgcgagacgccggatgacaagacacaggccaaactcaccgtggagagtgagccgcgggcgggaagggcggggcatcgaggaggagtgaggagggaggcgg

SEQ ID NO: 273052 - DNA, 122 bp, Homo sapiens
ggacgggtcacagaggcaggaccagggtcctggaagtatatgttagtccctctctcttctcgttcctaaggagtcgttctccggacccagcatcctttctccttctttcttgtccttggcag

SEQ ID NO: 273053 - DNA, 122 bp, Homo sapiens
agggacgaggaagagccagtcatctaaaaagctccagctgtgggacctcgaagagcgcttcgtaaagggcttcttctctgcccggcaccccaaggaagctggggagaggtctttgctgtgga

SEQ ID NO: 273054 - DNA, 122 bp, Homo sapiens
aaatgtcaatactacccaaaacaatctacagattcaacacaatgctgatcaaaattccaacgtcttttcccaaagaaatggaagcagatcctcaaattcatatggagttttaaggggccccc

SEQ ID NO: 273055 - DNA, 122 bp, Homo sapiens
gcggacgcttgagggcagggggcgctcgggctgctgcctggtcggccggtcaaccggagacgctctacccgaagcgcagctctcgatgagccgcgccctgcgtcctcacgccgaggcggctg

SEQ ID NO: 273056 - DNA, 122 bp, Homo sapiens
acaagaagagggaatccctgcagaccaacagcgggctatattgacgacggtgtctgagatcggggaccgtcttttgaagagtcagtccctccttagttgcccgcctcagctgaggccgccgc

SEQ ID NO: 273057 - DNA, 122 bp, Homo sapiens
aaattacattagactcattatatacataaaatatattgtcacattcactagctaaacaaacgttacttccattttaaaagacatacttttgtaccttgaaagtttaaagccccaccttgcaa

SEQ ID NO: 273058 - DNA, 122 bp, Homo sapiens
atctcctacgctcccctccccgattcaccacattgctgccctgcctgcaggctcccacctcgaggcctttgcactggctcctcgctctgcctggaacactcttgctccctcacttcattccg

SEQ ID NO: 273059 - DNA, 122 bp, Homo sapiens
tggaggacagaacaaaatcagcctcactcacaaaacatcagaaaacgttctactggaatacgaacaaagggatcaataaaaataaaatctgaggccaggtgcggtggctcatgcctgtaata

SEQ ID NO: 273060 - DNA, 122 bp, Homo sapiens
tcgtttggggacggaggggcgagccccgcggccggggccagtggagctgggctcggagcccgcccaccatcctcccgcccaccaccgcggccgggcgcgcaggctcacaccccttcctgggg

SEQ ID NO: 273061 - DNA, 122 bp, Homo sapiens
cagccctgcttaactctttccccttaggggtggactcttctgtcaaccctgacttcccctcgctcagggattgtcagggctcagagtggaaccgaggtcatctctgagggatgtggaaatgt

SEQ ID NO: 273062 - DNA, 122 bp, Homo sapiens
ttcctcccgctgaaggcagagagcagactgggacactgcggttcccgagagccgcagccccgccgcctccgcccacgctggccctcgggaggcggaagactagctgacggcggcccccacac

SEQ ID NO: 273063 - DNA, 122 bp, Homo sapiens
tcttccctttccggacggagctgctcttcctctaggatttttctgtagcgttcttggcggcgcagctgctcttgctccgtttcttggcgcagctgttcctcctcacggaattttctctccag

SEQ ID NO: 273064 - DNA, 122 bp, Homo sapiens
tgaacgcctgggctcaagagatcctcctgcctcagcctcccgaatggctgggactgcaggcgtgcaccaccatgcctggcttgaatagcagagttttaaaggtagaaatgctgttggctggt

SEQ ID NO: 273065 - DNA, 122 bp, Homo sapiens
tgtcacctctgacatgttttgttttgttttgttttgttctctctctctctcccattagaacgtcagctacagaagaggaggagtttgggggtgttgtgtcattgctttacacctgtgggtta

SEQ ID NO: 273066 - DNA, 122 bp, Homo sapiens
ttggtagtctttgcgagaacggcaaatggcggttgcagaggctcgtccgaattctcggctcgctgctccctggctggcgcgtgtttgttcattctgggctaggtgagcagggacaatacgtc

SEQ ID NO: 273067 - DNA, 122 bp, Homo sapiens
aaacaagtgaggagagtggcccaccacagtctaagattctattgggttacctctgaaacgcgaagacatgctgctcacagaagagaacaatgggtacaaggactgcaaggctgcaaagcttc

SEQ ID NO: 273068 - DNA, 122 bp, Homo sapiens
agtccaactacattagttattctgcttgtggtggtgaattttaggggtcagcttgattaacgaatgctcacatagctgctaaggcattattcctgggttgtctatgagggtgtttccagaag

SEQ ID NO: 273069 - DNA, 122 bp, Homo sapiens
tggctgagcctgatttatcaggtcaggcagtgtagcaattagccatgttaatcacaaaagcgtgtcttaaatttaatctgatatgttctacccatgaatacacacaaggaaacacccttgta

SEQ ID NO: 273070 - DNA, 122 bp, Homo sapiens
ttctctgtatataaaccaagggtgaaaagtcaggtgtctgagctaagaggaaagctcaggcgacaggcacagtctcagcagtgttaaaagccgacactgactggagctaaccctgagcgaat

SEQ ID NO: 273071 - DNA, 122 bp, Homo sapiens
tcgatcgcgctttggaagttctcctccatctttaggccgtccagcatgttcgggccgggccgggaggacctgtagaggagaagaaacgatgcgtctgacgtccgtgcccgctgggactcggc

SEQ ID NO: 273072 - DNA, 122 bp, Homo sapiens
agccctcccgagggcgacccccgcccgcctaagccgagggtcccgctgcagccgagatcgcggcaaagggaccttttccagcggcacctgaagggcggacacccctgaatttcccccattgt

SEQ ID NO: 273073 - DNA, 122 bp, Homo sapiens
tgagatgtttgaagctgggcatgttgtctaatatttatgggctttggtttctgcctgtgtcgagtgggtaggctggaaactgcttcacagaatgtctcccttgacctcaagccagtaatata

SEQ ID NO: 273074 - DNA, 122 bp, Homo sapiens
cgggggaggtggcagcagggctggccctgaggggcgggaaaggtcctcagatgacccttgcgggcgcgcacctccaacgtcaaatcccagtggcttcagcctcgcgccctgagtggggtctg

SEQ ID NO: 273075 - DNA, 122 bp, Homo sapiens
tgtattcccggcttcatctgcatgataacaccttggtctccacaactccttcatgcaacccggacattcccttctactgagtccaggtctttagatgataactctcaaccagttgccaatca

SEQ ID NO: 273076 - DNA, 122 bp, Homo sapiens
cttgttctttggacaaagtgtcaccttgtaggaagtctacaaacctctaagtgctcccagcgtattagctaagtcctgagctccatggagttggatgccctaattctgctttagaaagtcct

SEQ ID NO: 273077 - DNA, 122 bp, Homo sapiens
catagttttctttctttgaaaaacagttactttcctgctcaggttctcattagcccctatcgtctatgggataaaatctaaactcttaagcattacctaagacccttcattaaatcagtctc

SEQ ID NO: 273078 - DNA, 122 bp, Homo sapiens
tagagcaggcaaatggaaatgcagggctcattaggagccacctgggatctcctcccatggcgcccccaggacttcatgctctcagcctcctgcccccggcccctaagcctggagttacagac

SEQ ID NO: 273079 - DNA, 122 bp, Homo sapiens
tggcaggattttcgctaacaccagtagagcttgcctctatgactggagtttggtagtactcgctgccacatagagtaaacttgagaagaatgtttgcacagccaggtcaagtgttacaaatc

SEQ ID NO: 273080 - DNA, 122 bp, Homo sapiens
accagtagactttcgtattatgacccacttctgttaccggggtcgccggtcgcggccccacgcccgagtttctgaagccaccggagcgctgggcgccacagttcctccttcctctcctggca

SEQ ID NO: 273081 - DNA, 122 bp, Homo sapiens
ggggccaagcggacgggcggcggggcaggcctgaaggaggcactctggccagggatgtctcgcttctgcgcactctgggggacccctagccctggccgaactttcttgaccgtccctgcatc

SEQ ID NO: 273082 - DNA, 122 bp, Homo sapiens
aaatttaaacattcaatgggcttttgggccagagggtattcaaagtcctatacaacggcccgagcccctgtgaaatgattttattttggtaagtccctaatggggacaaagaaaaacttgac

SEQ ID NO: 273083 - DNA, 122 bp, Homo sapiens
cggggggctccgccttctcagctcttgcggcgagttggggttcgggcgctgaggcagagacgccaccctaagtcccatcagtcctggggatcggaccagtggactttctcttaagatttcct

SEQ ID NO: 273084 - DNA, 122 bp, Homo sapiens
gcttcaggaaaaagaactggttgacacctgagaggttttaagccacaagaagctgaggcccgttgtgaggagggcagggacagtggggccaggccacacgcgacgcgtcacccacctcctgc

SEQ ID NO: 273085 - DNA, 122 bp, Homo sapiens
gacgcaggtcagaggtgctcttttcaggagcaggtgtggctgggcatgcaagggctgaagcggaggagggaggtgacaccatgcacacagcccaggaggctgcctcactcacaccccacttg

SEQ ID NO: 273086 - DNA, 122 bp, Homo sapiens
tctgaggaaccgagtccaagatagccgacctaggctgttttcacccagaccctgcgtccccgacccgctggagtgaatctgacactgccaggttctctctcatggcatggagtgaatgaaga

SEQ ID NO: 273087 - DNA, 122 bp, Homo sapiens
ggccccacctccattggctttggcttttggcgtttgtgctgcccgaccctttctcctgtccggatgcgcagggcagggcctgagccgtcgagctgcacccacagcaggctgcctttggtgac

SEQ ID NO: 273088 - DNA, 122 bp, Homo sapiens
ctactcaggaggctgaggcacgagaatcgcttgaaccctctaccgggaggcagaggttgccgtgagctgagattgtgccactgcactctagcctgggtgacagagtgagactcggtctcaaa

SEQ ID NO: 273089 - DNA, 122 bp, Homo sapiens
atgctcgaggtgagaaacatgcctttcagtttgggctactggtttacttaattaatcagccggcagctccgtcgatctattttcgtccctgtcctcttgacgagcccgggatggtttggagt

SEQ ID NO: 273090 - DNA, 122 bp, Homo sapiens
tcctcactccgccctcccgccgttggatttgcgcccggggcggcccccgactttgcgccccgtagttgagttccgtttatggtctgatttccggcctctcgcctgctcgccccgccgcccgc

SEQ ID NO: 273091 - DNA, 122 bp, Homo sapiens
ggtgtcagaaaactgacaccgaatctggagtttacatgagcagcgtggaagagtctcttccgcagagctgcatggaggaagctcctcctgactaccgagcattgggcatgggatgcatcacc

SEQ ID NO: 273092 - DNA, 122 bp, Homo sapiens
cacgccgtgtccaatgcgtgtgccctgggcaaactgaaggcctgtggctgtgatgcgtcccggcgaggggacgaggaggccttccgtaggaagctgcaccgcttacaactggatgcactgca

SEQ ID NO: 273093 - DNA, 122 bp, Homo sapiens
tgggtgaactaccgttgcacactggagtttctggtgtctttgcttggaactgacctagctcgtggcagggggaactcggctagcggccccacagcccctgctgactcaaaacaactgtgagt

SEQ ID NO: 273094 - DNA, 122 bp, Homo sapiens
gtagggggagcccaggctggcccagggagcagttggcggtggaggccttgggcaatttcccgtgttcccactgagtggggctgtccctgggcctgggcggggacgccaccaactgccaaggc

SEQ ID NO: 273095 - DNA, 122 bp, Homo sapiens
ctcctcagcccctgggtggtggatgggaccaggcacagcagagcagacggtggcgctcatcggggatgctccggccgtgcaggagcccactgcgggggggaggctcgggcatggcgggctgc

SEQ ID NO: 273096 - DNA, 122 bp, Homo sapiens
aggccttgccctcctaaactctcaccttccaggaagggctgtgtttctatgcacctgggccgaggctagtctttaaggcaactctcaacttgctgataataaggttggcttcatacaaaagc

SEQ ID NO: 273097 - DNA, 122 bp, Homo sapiens
aatgctaaatgaagagcacggctattttcgggagctgccgggtccaaaggggtgtaaatccgataagcctcctggaggcgctctaaaaacgttcttggtgacttatcgggcctttggacaac

SEQ ID NO: 273098 - DNA, 122 bp, Homo sapiens
ttgaggggccagtgccactgaagctggtgctagccaccatgccctgcaggagctagacaccgaagaagccagagtgctgcaggagctttgcccagggagcaggcaggactgggaagcaaacc

SEQ ID NO: 273099 - DNA, 122 bp, Homo sapiens
tgcttctggaccgcccaggtggctgcttgggagtttaccgtcacggcagtcctgtgctgccgtggaaacgcggggttgccgtgtggccgccgtggaaacgcggggttgccgtgtggccgccg

SEQ ID NO: 273100 - DNA, 122 bp, Homo sapiens
tgaacgcccgcagcctcagtcccacccccggcccagccccagcgcccccagtcccacccccggccccagcttcagcctcagcgcccccaggcccagccccagtcccacccccagtcccaaca

SEQ ID NO: 273101 - DNA, 122 bp, Homo sapiens
gcctccagaagccagtgagctgagccatcggagcctcgacaagccagtgagctgagccgccggagcctccagaagccagtcagctgagccgccggagcctcgagaagccagtgagctgagcc

SEQ ID NO: 273102 - DNA, 122 bp, Homo sapiens
agctcacaccgcgtccatcagtccacccaccatggcgagtgatgtccgtatagctcacaccgcatccatcaatccacccaccacagcaagtgtctgcgatgtctgtagtgtctgcgatgtct

SEQ ID NO: 273103 - DNA, 122 bp, Homo sapiens
cctagccaggtacctgtggggacttgcttcccaagaaattaacttcctgggtgccggggtcgggacaacaggttcgtatacaaatactgggtcccttccagccaatcctgagctctcagctc

SEQ ID NO: 273104 - DNA, 122 bp, Homo sapiens
acctgtgatacggttcttaatattcagggtggaagaggatgatattactcccaatacagacgggtgtacaacctctgcacaccgagggtgtacacccatctgtcaaacagcacataatttcc

SEQ ID NO: 273105 - DNA, 122 bp, Homo sapiens
ctcctctgtctgccctcctggaaccacgcgtcgggtcacaggccgctgggcagaggtctccgtgggcccccagccaccctaccctgtccgacctggggctacctggcagctcctgatcccac

SEQ ID NO: 273106 - DNA, 122 bp, Homo sapiens
tgtgactcatcggctggcaggcttgctgagcagatcagggggcatggtgaagagcaacttcgtgcccaccaatgtgggttccaaagcctttggcaggcgccgcagggaccttcaagcctgag

SEQ ID NO: 273107 - DNA, 122 bp, Homo sapiens
cggcatactcattttccccatgcctctttgctgtttgtggaaaataaagcattctataggcggagctagtgaacgcctcttttaaaacacgagtctccacacttccctgttcactttggttc

SEQ ID NO: 273108 - DNA, 122 bp, Homo sapiens
tctaaaacggacacgcgacaagggttcctaggaataaaccataaacaggcccgggagctacgctaacgccaaacgccgagcagtgagacgcgcagcacccgccctgcgcctcggtggcagcc

SEQ ID NO: 273109 - DNA, 122 bp, Homo sapiens
gaggggagggggcggtgcaggcatacgtcagacgaaaggcgccgatgcgtcagaaaagcgcgcctcgcggtcttccgagctgctgggccgggaggcgctgagggggcggggccttgaggtcg

SEQ ID NO: 273110 - DNA, 122 bp, Homo sapiens
cccggggtaaagcccagtatgaaatgtcaccttcaggggcagctcggatcttcccacgcccgcgcggcgcacaatctttggatcagcgccacgtggagaccttacccgcccgtacgatcaat

SEQ ID NO: 273111 - DNA, 122 bp, Homo sapiens
acccagtctcaactgcccccgtggccgccccggcagctagcgaggcggtcaggttcacggcgtctgcacccacgcctccacccccgtctatccaggtttctgctgctgggagagtggccatc

SEQ ID NO: 273112 - DNA, 122 bp, Homo sapiens
ctgccacccgcccacccgccttgtgagatggaattgtaataaaccacgccatgaggacaccgccgcccgcctcggcgcttcctccaccgagcctgcttgtcctgcccggtcgtccctcccat

SEQ ID NO: 273113 - DNA, 122 bp, Homo sapiens
gcgttgacgacagaaggctacttccggctgtggtgcgtatgacgtcagggcgagtcggaccgacccagccaccgagaagccgaggaggcaaggctcgcgagagttcagggaggccgccctga

SEQ ID NO: 273114 - DNA, 122 bp, Homo sapiens
gttgggacaggggaaagggtctgtgcgtgggcaaagctgaaggtgatgaggaagaagagacgaacattaaagatgtctatttactatgagctcactgtgttgtttcataaaaagaaaataaa

SEQ ID NO: 273115 - DNA, 122 bp, Homo sapiens
tgcaaacccaacccaggagcaaaagtctggctctgacaagaatcaacgctgccaaggaaccgcccccaggctcggcaccgcctctggtccccaggactagggggaggcgggtataaaaagtt

SEQ ID NO: 273116 - DNA, 122 bp, Homo sapiens
gccacctcctggattccgggcatagctttccttttaaagggagtaaagttataataaacgcgaacaagcacccccacccccacagccccgccgggacgccccgcccggcgccccctctgcag

SEQ ID NO: 273117 - DNA, 122 bp, Homo sapiens
gctagagcggagaagccgggcactgattgggcctttcaaacaaatttgcgtcccaccttccggccaatccactcccgagtttccagccacgccccaatgtccggcggaagggagggagggtc

SEQ ID NO: 273118 - DNA, 122 bp, Homo sapiens
ggggcgctgagcggcatcccggcggaggggtcccttgagaacctttatctgcaccgagtccgctcctcagcagtgacccctctgggcagttcctccgacgccctgcagagggcagtagaggc

SEQ ID NO: 273119 - DNA, 122 bp, Homo sapiens
gtcctgttatgagctttctctgatgtgaattcaaatcacatttcagaggcacatttcaggcgggctctaaataaggcatccttggtttttgcattttcattaaaaagaagccatggttttct

SEQ ID NO: 273120 - DNA, 122 bp, Homo sapiens
ccaggcctagggtgtggaggagccttgccatcgggcttcctgtctctcttcatttaagcacgactctgcagaaggaacaaagcaccctccccactgggctcctggttgcagagctccaagtc

SEQ ID NO: 273121 - DNA, 122 bp, Homo sapiens
gtttcttggtttcttttatcaaaggaccctccctaacacctagaagttgaccttgggagccggggaaggggtgggaaaacattgaacctactgtaatctgctcctgggaagacccaaaattc

SEQ ID NO: 273122 - DNA, 122 bp, Homo sapiens
tccaatggatctttaaacaaatgtgttgtgaaaatatttagatggagcatacccaagtaccgctttaaccaagaggaagaagacaccttactcaaaggtgggtgcttcttgagtgactgctc

SEQ ID NO: 273123 - DNA, 122 bp, Homo sapiens
tggcaaatgttgctgaaaggggagaaatcggggctgggggcggcggcggggcccggcgggcggcgtgtgcgtacggtgccaccattgcaaaaacttgtaaccctgtttttttctaccccccc

SEQ ID NO: 273124 - DNA, 122 bp, Homo sapiens
acaacaccaatgttcagaaacaaggagactattcttgtcgaggctgtcataactcagaaacgtctgtaaggggatgacaaaaacacaaaaatcaagtaatagcgaagatggcaatgacagtt

SEQ ID NO: 273125 - DNA, 122 bp, Homo sapiens
gtcgcaaggaaccccacaggggaaaacgtggtgggagctcagggtctcccagcaccctgccgccctctgctgggctctgcctgacaccggcgaggctcagtctgggaggaggtggagcccag

SEQ ID NO: 273126 - DNA, 122 bp, Homo sapiens
ctaacgcagttataacccaggcaccaacccaagttcccaaaagggctagataggtactatcggtactatttacagcaagccagctgtaaatgcatgtggaatctctcaagctttgaatgttc

SEQ ID NO: 273127 - DNA, 122 bp, Homo sapiens
aagttggagaagcagaccccttacaataagcatatcctcatttaccttgtcaccaacctccgttgcccactatagattcctagttttgtacccagcttctgccatggtcatcctaattccat

SEQ ID NO: 273128 - DNA, 122 bp, Homo sapiens
cgtgatccgcccgcctcggcctcccaaagtgctgggattacaggcatgagccagcacgcccgaccaagaaaggagacttttcttaagcaaataagaataaaactgtaagaaactgaaaggag

SEQ ID NO: 273129 - DNA, 122 bp, Homo sapiens
cacatgacacaggaagtgaggcaattgcagccatatttctaaagggcaattggcttcctccgagttgttacagattatacaccctataaaattctggagggtatatgtgaatgacaacttta

SEQ ID NO: 273130 - DNA, 122 bp, Homo sapiens
agccaggctcccaacctcagctcgccgcctggagccgggaaccgaggagagcagggccttcgccctccccgatggacactcggcaggccccgcccagcgcccctgattggacgaagcgccgg

SEQ ID NO: 273131 - DNA, 122 bp, Homo sapiens
gtctctgctgtggtgagcagggtcatagaggtagccaggagcagaggcaagcgtcaagcccggatgtagcctgctgttagcttcttatccatttttgcctgaggtcacgcaggggaacttgt

SEQ ID NO: 273132 - DNA, 122 bp, Homo sapiens
accattcccggcaagcccgcgaccaagcaggcagcggaggcggcgcaggccgagagctcccgcccctctgacagtgagagaagggtcgcagcgcccacggctgcctagaacccgaaagaaga

SEQ ID NO: 273133 - DNA, 122 bp, Homo sapiens
agtgatcttgattgcaatgaactctcattgactacacaagaaacttttaatttttcctttcgtagcacttggcagcaaaacccccttaagaatcctgctcttttatcttcttaagctacaca

SEQ ID NO: 273134 - DNA, 122 bp, Homo sapiens
gttgctgagccggctccaaccggctggaaggcgggaagctgtttcgcctggaggctcgcgcgctttttggaattcagttatcaagctttagagcctggctactcacagttgaagcctgattg

SEQ ID NO: 273135 - DNA, 122 bp, Homo sapiens
gaagctcaaagacaaagttaaagataaaaggaccgtttattataaatcctgttttagagccgctggagagttggaaatggggtaatcaccacacagtctgagtcgctgaacttttaaatgga

SEQ ID NO: 273136 - DNA, 122 bp, Homo sapiens
tggtgggtgcttccaggggtctgtgagctccgttcccaagactggaggggcctgtgtctgcggagggggtggcttcctgggctctggaggggaggggaggctaaaagcagggttggggagcg

SEQ ID NO: 273137 - DNA, 122 bp, Homo sapiens
cttcccctgtcccagacacgtgtgccaatattacggctggactctccataggagacttgccgttcttgaatctggcccgtgcccttcagaaagctacagcgagtcacttccaagcatcctag

SEQ ID NO: 273138 - DNA, 122 bp, Homo sapiens
ccgcgccccccacgccatgacgaggggacgccgggggaaatcctgcagccgtgggagggacggatgtgctgggggaccgagaggccgcgggaagaggcactcgcatccagaaggcattttag

SEQ ID NO: 273139 - DNA, 122 bp, Homo sapiens
gtgcctggacgcagcgccctcttgcgacagggaggaaataatgcgtcgagggggcatcctcggccaccgccctggtcctcaggctttcctcgtacctggtgcgtctgctgccactctgtaca

SEQ ID NO: 273140 - DNA, 122 bp, Homo sapiens
gccccgtgactgcctccccctccctgtaccctgcactgcacgtgtcataattcaagttctcggctcagccacccattctcggctcagccactaatgtgtgctggaaggtgtccaggaagccc

SEQ ID NO: 273141 - DNA, 122 bp, Homo sapiens
agcgccctagggccgagttgctgggccggggacccgagccgcgagctggggacttggaggcggccggcgcaggggccgcgagaggcttcgtcgccgctgcagctccgggggctcccagggga

SEQ ID NO: 273142 - DNA, 122 bp, Homo sapiens
accattctggctataataagtcaatgtcgctttctacagctgtgaaggttaactttgtgtcgacctgactgggcaaagagatgcccaggtagctggtaaaggattatttctgggtatgtctt

SEQ ID NO: 273143 - DNA, 122 bp, Homo sapiens
gaggcctcaacccccagagcttcagaagggaggacagaggcctgcagggaatagatcctccggcctgaccctgcagcctaatccagagttcagggtcagctcacaccacgtcgaccctggtc

SEQ ID NO: 273144 - DNA, 122 bp, Homo sapiens
accctcacctgcttcagagcccgaaccctctggagctgcaggagcccgggagagcacagacgcctccccagcgacggccttgtctggagctcgaaagccgaggggcgggtgatgaatccagc

SEQ ID NO: 273145 - DNA, 122 bp, Homo sapiens
gcctgaattacaaggggaacgctactgagaactgtgttaagcgctagttagtctttctttcgcactccgaggagcggaatactattcgcctccacttgttatagaaacggaggctcactgac

SEQ ID NO: 273146 - DNA, 122 bp, Homo sapiens
agcctagattgcgtcttcacatccacaggtgagtctggcattgtggagtgcttctcagtacgatctggaggatgccaccaggaacatattattttactccttaagcacctcagtttttcaag

SEQ ID NO: 273147 - DNA, 122 bp, Homo sapiens
ggaacataccctagaggtcacctccaaagggcacccctctccttgtgggcccctggcatgcgcccttgctgtctatcctgtgaagccttggtgtggaatctggcaggcctgactttaattct

SEQ ID NO: 273148 - DNA, 122 bp, Homo sapiens
ccacagagtgtccatggagcagcatgacttctggaagggcgtctttatggaacacctccacgtttccgtggagagatttcctgtagcccgtggccccggcatccacgtttccgtggagactt

SEQ ID NO: 273149 - DNA, 122 bp, Homo sapiens
agttctccgggagcgccggtcggaggcggtcggcggaggtgtctaccccgccggtgatggcgttgaacgccactggcttcccggccttccgtccgctgcctccgtccgattctgcgtctgct

SEQ ID NO: 273150 - DNA, 122 bp, Homo sapiens
tttaatgcaatgcaaagtcaggaagcacaataaacaacagagagaacgtgcacgcggatgcggcagcacagttcacccggtccggtctccgtacgggagacaactctttctcaaaaaggtta

SEQ ID NO: 273151 - DNA, 122 bp, Homo sapiens
gggcggtggccgctcagagaataccttccttccggcaggagaccgtttggccctgtattccgggcctgcggttgggcctccaagctgagttgggcaacttcccagcaccgcaagaaagggcg

SEQ ID NO: 273152 - DNA, 122 bp, Homo sapiens
cttcctagggtaccaggaaatctcccctgctttcccaagagcttgctgaagaaggtgtaccgcagtagacttctgcatccagacaaatccagtggctcatgtgtacagccgaataaatccgg

SEQ ID NO: 273153 - DNA, 122 bp, Homo sapiens
ttccgcgggtttccgactccctgccctagattttctgcttagcgacttggggtcccctctcgtttgcttctggtaggagtcgcaatcccagcagcaatagcccagaagaggacacggttccc

SEQ ID NO: 273154 - DNA, 122 bp, Homo sapiens
agtgcattcccggcatctggatgtagcctttacttgtccctgtgcagcccgagggacccgcgagactccagtgatcatagaggtgccagcggcacccggctccaatcagctccctctagagg

SEQ ID NO: 273155 - DNA, 122 bp, Homo sapiens
tcatagcttccacataccatatgggcaggaaggcgtaaggtgcatcttggtgtacagacacggtgactgggccgccaggctcccaagagaagagatgaacgagcctggggggcagatggagg

SEQ ID NO: 273156 - DNA, 122 bp, Homo sapiens
tttgtggcgatgtcactgatatgcaatctgtggatgctcccggaaccgagggggaatggccgcatgaacccagaatgaaggcggagcaggctggccctccgccggcccccagaataaaccgc

SEQ ID NO: 273157 - DNA, 122 bp, Homo sapiens
ccatctacttgtctttgatgctgaccagagccgaccgcggtgccgcccccgagggcggctcggggtagagggaggccactgcttgcagtcctataaacactggggttctggtattcccagca

SEQ ID NO: 273158 - DNA, 122 bp, Homo sapiens
ctgccgaaagcgtggggcacgtgactgtgacggcatgggttggcgcatgcgcttcgttcccggagtggctggcggcggagttttcgctggctactacgaggccggagcgcccttggcctctc

SEQ ID NO: 273159 - DNA, 122 bp, Homo sapiens
tccacactcccacaaatgttctgagcgtccagtcacagcccctacctggccaggcgcgagcgccaggttctcagcgctgtcagaagaaccagcctgctctgggacacagggcagctcttctg

SEQ ID NO: 273160 - DNA, 122 bp, Homo sapiens
agagtaatggacttcacaccccttgaacgttgctgctatggaaacagtattgttgccagacgcaatatgcttcctcccacctggcaccacaactcttacctgctcccctcctgctaagggtg

SEQ ID NO: 273161 - DNA, 122 bp, Homo sapiens
ctccactctgccccttgcagaggccagcactgccatggatttaatgtgtgtgtttccagacgatttacatgcatttatgtgtgtgtttgcaaggagagaaatatgtagttttatttgcattt

SEQ ID NO: 273162 - DNA, 122 bp, Homo sapiens
cggtgcaattttacctgcgtaaacaagcgaaccttcttccactgagcttctgccttgagacgtctgtgagtgccgcctgatcacttggtgagcagctgtttcagctgcccggatggagggca

SEQ ID NO: 273163 - DNA, 122 bp, Homo sapiens
tggattagtgcaatattgtttcatagccatggagtgtaccacaaggagttctgggatattcggaggcacttctagaacaggactgagatagaagtaattttggatgctgcctggagagctct

SEQ ID NO: 273164 - DNA, 122 bp, Homo sapiens
gccgccagctcctcagcctcagcctgctgcttccttttttaggcaaagtcgagtgctggccgtccgcacggccccgcggtgtctcacctgcctgaaagggaggaaggaagcctgtggagccc

SEQ ID NO: 273165 - DNA, 122 bp, Homo sapiens
ggggaaagggaaatgatcctttccttcgtagatgatcccaaaacatatgcgactgtggatcgcagctggggatgtgtcgcgtcccctcggtgctcagcctctgcgtatccacggtgcccata

SEQ ID NO: 273166 - DNA, 122 bp, Homo sapiens
ctgctgaccacctacatcaatgattatttctgtgaccagtctctatcaactcccttccaccggtgagggggaggtggccctggacagggagccagaggtcacaagtcagccaggtggtggga

SEQ ID NO: 273167 - DNA, 122 bp, Homo sapiens
ttgcccggcccatttccccggttcaagtggcatcacctccaggcctgtgtgtgctggagtcgggaggtgtgggcggcgcgagtttttcgtgcagggccttgagagtggcaggaggactttag

SEQ ID NO: 273168 - DNA, 122 bp, Homo sapiens
ctcagagcaaggcaacatctcggcgcctgatccgctgtgatttgatctgccatgccacctcggagacagacagagcaacccttcattccggtcacactcccagcactttgctgggtcagccg

SEQ ID NO: 273169 - DNA, 122 bp, Homo sapiens
tcctagggcactggtcgcaagagcagatggtgccacacgctccgggcctacaaacttcagcggctgccgggcccgggcccctcgtcttttgttgggtttcctcttggtgccaggtctcagcc

SEQ ID NO: 273170 - DNA, 122 bp, Homo sapiens
aagttagcactgttcgagagccatgaaccggtcagtggagccgctgcagtctccagaccacggtggagccacccagaaatgcagtggccagaaaggtgccctgctcactgcagagggggtcc

SEQ ID NO: 273171 - DNA, 122 bp, Homo sapiens
tgtttcattaaagatcccccgatgtcctccacattcttatgcatgagatcatgggttccccggaacacagactactgggggctttgcccactggagagattactgaagaaactaaatgcaca

SEQ ID NO: 273172 - DNA, 122 bp, Homo sapiens
aggggcaaaaatgtttcagaacatgaccccacccgacggtctcaaagcaacttgctgtgacgttaacaagcacttcgaggggtgcctggggctgccgaggcactgtggagcagcaggaggag

SEQ ID NO: 273173 - DNA, 122 bp, Homo sapiens
atcaggcacgcaggtgaagcggacagggcggcttccgggtttggcggggcctttgtccctcgctgtggcctgagctccaggtctcgtcttcagcgctctgtgtcctctgctcctagaggtcc

SEQ ID NO: 273174 - DNA, 122 bp, Homo sapiens
tgtggccgttagcgtgtccccgtggttcatgactgtcgcattcagcatctggtcccccagcgccaggtagacctgggcctctgaggctggaaaaagcccgtctagggtgcagtccaccggcc

SEQ ID NO: 273175 - DNA, 122 bp, Homo sapiens
actgtgggccgggcccagaccagcactgggatccctcgtcctctgggttcactctcaacccgaaccgtaaggcacacagcagcctcactcaacaaggttctgcttattctctggcctgcatt

SEQ ID NO: 273176 - DNA, 122 bp, Homo sapiens
ggcctgcaggagaaacagccccttgcccggcacagatctccgtcgggtccaagcagcaggcgtgctctgcccacgtcttgcacagtgcccagcatggtgctctcacaggacaagttctcaga

SEQ ID NO: 273177 - DNA, 122 bp, Homo sapiens
tgacggctacaggatgggcgcgaacaatggcaaacagtacggcagtgagggtgagtgggccgcccgtcctcagactcccggatcgcgtccctcctcccctttccctcgccctcccgactggg

SEQ ID NO: 273178 - DNA, 122 bp, Homo sapiens
ttcatcagttcaaactagctaacatccaggttcacttttatcaagttaaagacttctcttcgctgtcaggcgtgtacttggaaacatatgcattgacatgtggaaaacacaaaaacaacatt

SEQ ID NO: 273179 - DNA, 122 bp, Homo sapiens
ggggcggcgtgtgctctcatttcactcccataatcagctttggcatatgggattcagagacgcagtgcttggtcttctgagatgttttgtgcagcagctaggtgatgtcccagttctcctgg

SEQ ID NO: 273180 - DNA, 122 bp, Homo sapiens
gaagaagactttgccttgtaataaacttgtgaaatgaaagagggtccatctctttgccagcgatgttcattttgcagcatagtttgagagcaatctttttcaagtaaattgaatatgaatgc

SEQ ID NO: 273181 - DNA, 122 bp, Homo sapiens
actgccccaaacaggcactcgagggctgcgaggagtccacgccatgcaccatcactggaacgttccaccacggtgacgagagaattagcacagattcttcgggtctcagtgttcctcgggct

SEQ ID NO: 273182 - DNA, 122 bp, Homo sapiens
caggactggtgtccggggcaagaccacgccctcagaggcggggcggcgaggtggagtgagcgccccgccaggcatccgtggctgttagggactgccctcccacctcggggagcctggccatg

SEQ ID NO: 273183 - DNA, 122 bp, Homo sapiens
agggcgaacaaacgggacctccgagtggtacgtccttaaggcggggcgggaatacggcaacgggccgcgggggctgttactgtcgctaccaatcaagagtcgagatggctttgatggacagg

SEQ ID NO: 273184 - DNA, 122 bp, Homo sapiens
accccacgcacgtgaggctgggaccaggggtggcactgacacggctggggagcccactcccgaggttcgacccggggatgtgcacagccacattccaaaggcgcacgggatgagatcagccc

SEQ ID NO: 273185 - DNA, 122 bp, Homo sapiens
gcctcccgtcgcacacggccaccaacttctccagccccatctcgccgcccagccccctcacgcccaagtacggcagcttcatcagcagggacagctccctgacgggcatcagcgagttcgcc

SEQ ID NO: 273186 - DNA, 122 bp, Homo sapiens
aagcgttttgccgacgcagcttctctccttctgtccttgatgacgtctcggattgcccctcggtctttctggatgactctgctgacagacgccttgccccttttggaacagaaacaggtgaa

SEQ ID NO: 273187 - DNA, 122 bp, Homo sapiens
gaactcctgcagacagaggcaggttcagtgggcacgtgagctggggaagccggggacccgcgcatgactctcgccacctgcacactgcctttcagacgtctgagggctgcgagaagggacca

SEQ ID NO: 273188 - DNA, 122 bp, Homo sapiens
acgagggctgccgtccaacacaatccagaggctctggtagaaagggctgccccagccagtcgtgatcttcagaccaggagggcgccataggacctgcagcacaaagctcagcttggcttcag

SEQ ID NO: 273189 - DNA, 122 bp, Homo sapiens
tgtgtacaggtaggggcgagcctggatgtggcctgggattggctgtggagtgtgactcagcgcgcactggctgtggggtcccccgcgattggtgatcatactacatctcacctttaggaggg

SEQ ID NO: 273190 - DNA, 122 bp, Homo sapiens
ttctccagtgccccccatggtgaatgtcacctgcagcgaggtctcagagggcaacatcaccgtgacatgcagggcttccagcttctatccccggaatatcacactgacctggcgtcaggatg

SEQ ID NO: 273191 - DNA, 122 bp, Homo sapiens
ccaggccaaaagtcctaaagataaacctaacgcattcttgggctcagtggcaaagctgagcgtcaccaaatcccaatcgctccaaactataagccgcctcagcaaacaagccccaaacaaaa

SEQ ID NO: 273192 - DNA, 122 bp, Homo sapiens
gctctggcgctccgctgtgccactcactctggctgggatggagttgagtgggtggctgtgcgcagtgggggtggggaagcagggtgaggcaggagggttatttaagtctttcatccggttgc

SEQ ID NO: 273193 - DNA, 122 bp, Homo sapiens
cagctcgggccctggtcgtggcgcggctgccgcacggtgcccctcgacgccctccggacgcgctgcctctgtgaccggctctccaccttcgccatcttagcccagctcagcgccgacgcggt

SEQ ID NO: 273194 - DNA, 122 bp, Homo sapiens
tgtgttaactaggctggctatgctttgcttgggaaacagtatattcacatgcaaaaacatcggttgacctagttgtcaattgtgatagtgtatatattccactcctgtccccctacctctaa

SEQ ID NO: 273195 - DNA, 122 bp, Homo sapiens
tcttattctgcaccggctggcccgggagaactaaggctcccactgggcctggtgaaggagcgtgggctgcctgtgagaatgttgagggggatgatgccggggagctcaggcagggaagggat

SEQ ID NO: 273196 - DNA, 122 bp, Homo sapiens
ccagagcccttcccctccggacccctttcccccaggctgctgctgtttaactgtgaatgacgtccagagtttacctttcgatgtttctccaagtgttcttcataactgcggatcttgacaga

SEQ ID NO: 273197 - DNA, 122 bp, Homo sapiens
ttccccgcagctcgcagaggtcagcacagccccagcccagactggaggaactgaccgcggcgttcctaccatttatatgtcagggagcggcgggaacctgcaggtgggaccgcatgattcct

SEQ ID NO: 273198 - DNA, 122 bp, Homo sapiens
tctggaccagacgccgcctgcacgggtggggacgctggtcgctgccgggggcaagtctgccgactccagaaagaaaggcgaaagaatgtgtgtagacccgggcatccttggtcgtcagcatg

SEQ ID NO: 273199 - DNA, 122 bp, Homo sapiens
tccagcgcccccgaaatctgcaaattcatcgctccctttcgtcttcaggcgaagccctcccgtccggagtagggccagccccagttatgcatctccagcctttagctgactactaaggcgga

SEQ ID NO: 273200 - DNA, 122 bp, Homo sapiens
aaacagcagcctgatcatcagccgtcttccctcccactggcggagcagaaatggtaagcccgctgcttctgaggggccttcctcattcctgcagtttagtctgtgttggtttaatcggaaag

SEQ ID NO: 273201 - DNA, 122 bp, Homo sapiens
aagagtggtggatttggaatgaggaaacttagaaatgaatctgttttctgggtgaccttgcgcaagcctttgctaaaatttggttttctattttgaaaaacgcagctggctgtttaaggaag

SEQ ID NO: 273202 - DNA, 122 bp, Homo sapiens
tgttcactatgcttgcataagcttgaacttgaaggatgactagatgtgggggagccaggacgaaggtcattttgggctgagagagaaatatgtgcaaaggcccggatgagggagaaattatg

SEQ ID NO: 273203 - DNA, 122 bp, Homo sapiens
cgggacgggaggccctgggagcttcctgcagcgtgggggcggctcccgaggtgggaattccgcccccgaaccggcgggctacgtgcgggggtctcagaggctgcggctcctcccgtcggtgg

SEQ ID NO: 273204 - DNA, 122 bp, Homo sapiens
atgtggagaaagacctttctgctcaaaggcagattgtgggtggacagcaaccagcttcaacggttatcacagatggattatctgcttgctttgctgtctgtaaaccagaatgattgctctct

SEQ ID NO: 273205 - DNA, 122 bp, Homo sapiens
cccaaccccatgactgctctggaacacagagccacaatttctctgcacacacatgcacctcggaccccagttctgcgaacactctgcacatgcccacactccatacctagctctatggctgt

SEQ ID NO: 273206 - DNA, 122 bp, Homo sapiens
tacagcgacttccggtattgggggcttggcggggagggcagggtacatcaatcccaccctcgcgggcagcgacaccgggacccggcccgccccaccctccacggtcacttcatttccagccc

SEQ ID NO: 273207 - DNA, 122 bp, Homo sapiens
ggcgatgcaacttccggacgggactcccctctgtccgcgcctcacatctccccttcctctcgcctagtcctgtgccgttttccgtccgcgactcttccggcccagagctttcggagtgcggt

SEQ ID NO: 273208 - DNA, 122 bp, Homo sapiens
caaggagatggtgagtgggtgggcgccgggccagctgggcggggggctgacgcggaggaacgcaggggactgggacaggcggcctgggtctcagaggacttgcaggcaccagttgggttgca

SEQ ID NO: 273209 - DNA, 122 bp, Homo sapiens
attgtactcttatgacacttaccatgtagtaattaactcatttacttcaaattgaagtcccggaaaaagcaaaatttttttaaactttttattccaattaccttcaagcattcaacttgcaa

SEQ ID NO: 273210 - DNA, 122 bp, Homo sapiens
tcgaggccatggagccacttcctggccccgtgggccgctgcttctggccgtgtcgcgtggcggcttccgtgtctggcttccacttagcaccacgtcctccaggcctggccgcgtcgccgtgc

SEQ ID NO: 273211 - DNA, 122 bp, Homo sapiens
cctgtagagagccaagtggaagggaaaacattagctggagagcaggaaagagaggcacgccgctgtggcctttcaggagggtggcctggctatattggtgaaaatatgaagctggtccaaag

SEQ ID NO: 273212 - DNA, 122 bp, Homo sapiens
cagacagtaggcgcaggtcagtgggtgcatgcagtgcgccatgcgcgagcctaagcagggcgaggcattgtctcactctcgaagcgcaagggatcagggagttcctttcctagtcaaagaaa

SEQ ID NO: 273213 - DNA, 122 bp, Homo sapiens
ggagcacagaatatgacaccaagtcaggattgcatagtgctcaggcagagctttgtccttcggaaatgccgctcactcatgagacaagatggatagttcaggtctggactggcccaggagtg

SEQ ID NO: 273214 - DNA, 122 bp, Homo sapiens
gcttctcctgtgcagggctgtcaatcagacacacgaggaagcacgtttaattcattccttcgaaggaatgacatcatcccccttctgatctcaccatttgctccgagtacctgctgcagggg

SEQ ID NO: 273215 - DNA, 122 bp, Homo sapiens
ggcattggggtcaatcaacacccgccctgttattatacaccttgtgggcacaggtggctccggccccacccagggccctgcatctcctctcatgccccgcgtccccaggctttccggcagct

SEQ ID NO: 273216 - DNA, 122 bp, Homo sapiens
cattacaaggagacacaatcagcacaggggcagcacccaggaagagaccaaaaccaactacgatctctgtcccaagaccagcagtctcacccaacttgtggtggcttactttgtgaaaagcc

SEQ ID NO: 273217 - DNA, 122 bp, Homo sapiens
cattttcaactgtttgcctcccaatattatctcaattaataggtaacgagagttcgaagccgggtccagagctatcttctgtaacattcttctgggtcgagtccctgccccgctacggtatg

SEQ ID NO: 273218 - DNA, 122 bp, Homo sapiens
gaggaggctccgtcccgacctggggtcccccgcggtcctcagcccgggggctcgggtccccgaagagatccttggcaatggcagaggtcccaaagcctagatgccaagccccgcgatggggc

SEQ ID NO: 273219 - DNA, 122 bp, Homo sapiens
ccacataggcatccccctcatggaactgcccgatgctttgtttggggagcctgctatagtcgaattccaggatgtgccagacatccacggaaacgctggtgatctcaaactgcctcctgtcg

SEQ ID NO: 273220 - DNA, 122 bp, Homo sapiens
tttccggcgttgtttatgcgcagcacgtctggaacagggcccttggtgattaaaacgcctcgggacagaaaagccgaactgaaacattggtgaaaatacaaaaaggaaaacaaaacagcggc

SEQ ID NO: 273221 - DNA, 122 bp, Homo sapiens
aaagtgtggagggagagacacgggtgggaaccggggctgtgcagggcactcatgggccagcgtgagttctgggtgagcacggactcggcaggccctgcactccgaacggccggcgccactgg

SEQ ID NO: 273222 - DNA, 122 bp, Homo sapiens
atgttgagaagaggaaggacagcagagacgagtcaagggccgggatagccagtgtgccgccgggagagctcacgttgcacagcagggcttgagcgtgtgttggaatggaacctgcgcctcta

SEQ ID NO: 273223 - DNA, 122 bp, Homo sapiens
atatgtgtctcccaggcaacgcgccgcgctcggttcagggctccgcccagggactcactccgcgtcagcgcgcgcccacctaggtgggctggcaaccagccaccagtttccaactctttctc

SEQ ID NO: 273224 - DNA, 122 bp, Homo sapiens
agaaacccgtggcaactgagaatgatagagatgcaaagcctcctagtccctcctccccaccgggggctcaggatgtggtgggatttacagtgtagacaattactctcctatgagagggtttg

SEQ ID NO: 273225 - DNA, 122 bp, Homo sapiens
actggccccgcccctccatgcctcccccgctccttggcccggccccgcccctccaccctccgggttccctccagcctcagctttgcccaggacctcacctggaacacgtggaagccaacggt

SEQ ID NO: 273226 - DNA, 122 bp, Homo sapiens
gaggtggcccatgtccttggacactaagttctatgccctcctggctcaccctgcccttcccgatgtcactctgcccttggttgggttttctgtgtgatgactcataatatttcttacccaca

SEQ ID NO: 273227 - DNA, 122 bp, Homo sapiens
cccttccagcagccttctataaaaatgacggggtccttctccagacaggaaaaccaggctcgctgcgcctcgcccgcacccccggagcgctctcgcagcgcccgcccagaccaggccttcga

SEQ ID NO: 273228 - DNA, 122 bp, Homo sapiens
caatgcctgtacttttaaaaggatcccaagcagttcttatgtgcattctggtttgaaaaccgtaatctgtattgctcattttggtcctgacataaactatgtggtatggtgatttatctctt

SEQ ID NO: 273229 - DNA, 122 bp, Homo sapiens
tcgggtgatccgcccaccttggcctcccaaagtggggaggattacaggcgtgaaccaccccgcccggccaattacaggtcttttgtcctgtctggttgtctgaaccttttttttcagggcag

SEQ ID NO: 273230 - DNA, 122 bp, Homo sapiens
ttgtatgagatgcataagtgttgcaaacctctctgaggcctacatgcatatatgtactcacgatcttacatattaccctaaacacagacatgacaaccgacatttctcctataggtttgctt

SEQ ID NO: 273231 - DNA, 122 bp, Homo sapiens
gcaaaaaactgaggagctaagggtgggagggggaatgaaaggatctcagaatgtgggcgtcgtgggtgggaaaagggatgccaggacaccagaagagcaatacaaaacagctcccgtgagca

SEQ ID NO: 273232 - DNA, 122 bp, Homo sapiens
cattgcagacagaacagcgacctatcccgccgtaagccaaagttgcctgttggtaaattgcgtcttttttctttttcttcaacatctttatagtaccgcgagtgtacccagtgttattaaat

SEQ ID NO: 273233 - DNA, 122 bp, Homo sapiens
gcgggtgtctcggattacgtacaaatgacgtattcctaccccttttggcaaccagatttccgttggaagatgcaacggttccggtgacggtagcaagttctcgcgtccaggcatctccgctt

SEQ ID NO: 273234 - DNA, 122 bp, Homo sapiens
ccctacttcggccgtaggggcaaaaataaacctctcctccccgtcgccgggcggtccacacgaccccaaagacaaggggtggggagtgtccccacgcccctggaacctcaggtcggacttgg

SEQ ID NO: 273235 - DNA, 122 bp, Homo sapiens
gatgattgagaactggtacggagggagtcgagccgggctcacttaagggctacgacttaacgggccgcgtcactcaatggcgcggacacgcctctttgcccgggcagaggcatgtacagcgc

SEQ ID NO: 273236 - DNA, 122 bp, Homo sapiens
cgcccgtgccgggggatcaggtgattgcgggccaacacggtcacgtgaccggggcgcacccgccgattgtggccatggcggccgcagtctctagtgtggtgagacgagtggaagagctcggg

SEQ ID NO: 273237 - DNA, 122 bp, Homo sapiens
tgcacaatcccagagtggtctcccccctgcaccgcttggcctcaaactctctgacaacatcgctgtgtccagtgagccagtgacccgtgaccacggatcagcagctgtggcaggaggacgtc

SEQ ID NO: 273238 - DNA, 122 bp, Homo sapiens
tggctggcatataacaggagtgcaatgagaagtagtccttattatctccccctctatactcgcccatacagcagagagctgggcaataggaccagcttgatcctgagtgcagaaataaccac

SEQ ID NO: 273239 - DNA, 122 bp, Homo sapiens
tacataggagactgcaacgcatggaggtggccgatgtttatggctggtataacgcagcaccgcccagcagcagctcagccttcttgaggccggtgcctctccaccctccctcactcacagaa

SEQ ID NO: 273240 - DNA, 122 bp, Homo sapiens
cggggctgggggccgctgctgggccctccaaatctgggtatgctttgttcttggtgcaaacgagagaagcggtggcggatggtggagaaccggctttgggacattctcattggataaaactg

SEQ ID NO: 273241 - DNA, 122 bp, Homo sapiens
cactgtaccgaacaccagggccctccttgcacgcggacgccgtgcggggaggcctgatgtcgccgcacctttaccatcaggtgtatctcaccacggactcccgccgcagcgacccgctgctg

SEQ ID NO: 273242 - DNA, 122 bp, Homo sapiens
tccacgctcctgaggtcctcctcaaactccactcccacatcaaactgcacagtgtagtttcggaaggtgctgagcgtcctcaccgtcatgtggttgccctggtgttcgatctccttgtccgg

SEQ ID NO: 273243 - DNA, 122 bp, Homo sapiens
cttatgaggggtaagtatatggcttgctggacacgtgaattgaactacaagcatgctgcacgcacgtgcggatgcaaacacacacgcaccagcataaacaatgtaaacacaagtggtatatt

SEQ ID NO: 273244 - DNA, 122 bp, Homo sapiens
tggccagttctaaccatagacttgactgcatgttgacaagggtttccaacctagcttccccgaggtactgcatgaatcagtccttgctcagatggtggttgctgtaaatagctgcaatttcc

SEQ ID NO: 273245 - DNA, 122 bp, Homo sapiens
atgagcacagcatgaggcctgtgggctcgagtcggggcctgagacggggcctcctagacacggcatcactgagcgaggggagtggctggacaggacagtgacgaatttcctctcaatggttc

SEQ ID NO: 273246 - DNA, 122 bp, Homo sapiens
gggagctactgtttcagcgctgcaatatggacacttcctgttcgccgcctcctttggggccgtggttacctttgccttttagtcctctttcctggcaaggtgagaggtctgcggtggaagag

SEQ ID NO: 273247 - DNA, 122 bp, Homo sapiens
agatattccaagttgaagcagcctacaggcactttagcccgtgtaaatgttcaccattgccgtttgtagagtagagggaaggctgttagaaacaggcagaatcctctgttagtttcttccat

SEQ ID NO: 273248 - DNA, 122 bp, Homo sapiens
gcccccttgtccccgccccggctcagacgccgctccccggtgcctctcggcaccggctcacgctctccaggcccacctgcccggtctccacacgtgggtagccagagcccggccgagagccc

SEQ ID NO: 273249 - DNA, 122 bp, Homo sapiens
ctggccccgcagggagaggctgtggctgtcgccagcaagcagccaggttggtggactggacgctgacctcgggtgagatgggctgaggcgaggtgtggatactcgcagctacccctcagctg

SEQ ID NO: 273250 - DNA, 122 bp, Homo sapiens
gatgcgccaatgccaggtctctccagcccggctggccttttcagcagcagcagcagcagccgcaggaaagcggccagacaaatcccacccccggccccgcccgtcacatccatcttgctccc

SEQ ID NO: 273251 - DNA, 122 bp, Homo sapiens
aagttgtttgcttcagaatctgaattgttttaaaagattctgttggttgcccctgctttgcggacgccttttgtacgttcttcctgatgtagcgctgcgaggggcgactttacctcggcgtt

SEQ ID NO: 273252 - DNA, 122 bp, Homo sapiens
agatggggtacaactggtgttccttctgaagctgacatctggcctcagctgggactctggcgccagcgggcccgcagggggctcacccgcgacaccctttgttctggctgcctccccaaccc

SEQ ID NO: 273253 - DNA, 122 bp, Homo sapiens
cgtgtggctctggatcacctttctgggcgatcccaagatcctctttctgttctacttccccgcggcctactacgcctcccgccgtgtgggcatcgcggtgctctggatcagcctcatcaccg

SEQ ID NO: 273254 - DNA, 122 bp, Homo sapiens
cgaggaggtccgaatcaggctgtgggggcggagctcgggaagcggagccaggtccagaggcggggctcaggcgggactgagttgatctatgggggcggagccaggtcaggaggcgggactcc

SEQ ID NO: 273255 - DNA, 122 bp, Homo sapiens
agtgtggcgtcttctctaactcgcctgggtacaacaacaggaaactgcccaccgcagtgccgtgatcacaatggcgaacaacatgaaggaccattggtaagaaaatcgctaggtgcgttatg

SEQ ID NO: 273256 - DNA, 122 bp, Homo sapiens
ggccacctgctgctgtgtctgcaactccatgatcagaggcagtaattagctaccaaaacacggatccctgatatttagggaacagggtcctccttatcgcccaccttgctcctgcaagctgt

SEQ ID NO: 273257 - DNA, 122 bp, Homo sapiens
cctcccggggctggccggctgtggggagccaggcggccgcaggtaaacggcttggggcggcgccggcggcgagggcgctgcacggagggaagcgcggcgccggaggggttaaccgcgggagg

SEQ ID NO: 273258 - DNA, 122 bp, Homo sapiens
atctgccaggacccctgcgtccaaattccgagacatggcgaccaacggcagcaaggtggccgacgggcagatctccaccgaggtcagcgaggcccctgtggccaatgacaagcccaaaacct

SEQ ID NO: 273259 - DNA, 122 bp, Homo sapiens
attcactcctcctgcaaaacaaggatcactccatgtttctgtccagcaggatatgaaatgcgctatggaccaatgggcactctgtgttgcttcttattgttttttaaaatggaaatttgtat

SEQ ID NO: 273260 - DNA, 122 bp, Homo sapiens
ccagcccggagccgcgaagagcccggccgaggcagccacagcccttgctagcccgaagagcgaggctgcctccgtcagcaccacaaacccttcccagggcgaggactttaaaatggacgaag

SEQ ID NO: 273261 - DNA, 122 bp, Homo sapiens
cagacacagctaccattggctgtcagtcggatccgagaacgacgattggctttccttgaccgtccctcaagcgcctctccggagatggtctgaggtgggagaagagctgaagagacctggag

SEQ ID NO: 273262 - DNA, 122 bp, Homo sapiens
cccgcggtctggtttgcggctaggtgtgtgtccccggactggcgtgggtcccgggccaggcgtggtcctgggcggcgcggcccgtgacaggacccgacgcctcctggtgggcatttcgctcc

SEQ ID NO: 273263 - DNA, 122 bp, Homo sapiens
gagtcaaaggattgagaaaaagacagtttgagagataaaagtgggacaccagggggtcatcgccatcatggaggctgcgaagaccctgagctctgggagcccacggtatttatttgtaatcc

SEQ ID NO: 273264 - DNA, 122 bp, Homo sapiens
atgctagtgtggcccgtcacgctggcagcagcagcggagtcctgcgaaggcaatcccatgcgggtctgccaccacagcagcagctgcaggctctccaggctgccagactcggctcagtagtg

SEQ ID NO: 273265 - DNA, 122 bp, Homo sapiens
agggcagagagtgtgtgcttgcgacccgagtacccgcagcccctgggagacttagccctgcgctgcacccgtgcctgcctcctcagccctgccgccagctcggcgatcctctggagcctaga

SEQ ID NO: 273266 - DNA, 122 bp, Homo sapiens
tggctcttctccccttttatgagcaagccactgctaaaaagcaataatatgcaatccaaccgcagcctctccacaaagcacttgtgttaataatctgtgtatggatttggtcttgacatgca

SEQ ID NO: 273267 - DNA, 122 bp, Homo sapiens
gtgcctgctgtctcagctgccacgcctccacctgcagtaggtattttgagcaaagcttcccggcacttctccgcaaaatccgctgagtctgtggttttctcaggtcagcaaaagaacagaga

SEQ ID NO: 273268 - DNA, 122 bp, Homo sapiens
tgcggggcagcagcttcggctggtcctaagcggaccggaagttcgtcaagtttcacgctccgcccctcttccggacgtgacgcaagggcggggttgccggaagaagtggcgaagttactttt

SEQ ID NO: 273269 - DNA, 122 bp, Homo sapiens
tgtctgtggtgaggtgctgtgccaacactgcagctcagttacctgtaaacacagaccccacggctacccaagtaaggtgacagtgacgaaaagcacttacaactgaatcattctcattgctg

SEQ ID NO: 273270 - DNA, 122 bp, Homo sapiens
gaccatttctggggaccaaagcaatccctgcattccactcttcctggactgcagaggagtcgccgatcccacttgggtccggagtcagggccttcaggggtccgggaacgccgccatcccgg

SEQ ID NO: 273271 - DNA, 122 bp, Homo sapiens
gagaagatgccactactttggtgctggcaattttctgagtgtctcagaagatgctttggccgtccatatatacagtatctcccaggaactgagctcatggcagccaatccagagagccatgg

SEQ ID NO: 273272 - DNA, 122 bp, Homo sapiens
ctggatgtcgggcacctcagaccatttttgcccatttttcgacaaaaattgtctaggtctcgtaggatggagaaatcaaaagtgccattttctggccatttagaaccattgtcgagtttgta

SEQ ID NO: 273273 - DNA, 122 bp, Homo sapiens
gttcccagaggcaggccttgggcctcgtcttacctgtggtccagcctcctgggccgctggcgctgggtagcccgtgagcctcgtgagcctgggaggagcggtggagaactctctgagccggg

SEQ ID NO: 273274 - DNA, 122 bp, Homo sapiens
ccagcccaacccatctcatcagtgtggggtcagcacagagccaagggaccataaccccttcggcgaggcacaagggaaggtgggctccggatcgggggccgccacataccgtggacgccaga

SEQ ID NO: 273275 - DNA, 122 bp, Homo sapiens
gagacgtttttatgcagctgtgtatgttactatccagaaggagtcgggggtagactttcccgtgtaagctcagtccataaactggttacttctgatcctggaacgtggacttcacatgatag

SEQ ID NO: 273276 - DNA, 122 bp, Homo sapiens
gagctgctgctgtgcggagaacaacgggtacagaagattcttccctcctgccccagaccccgggagcctcaggacccgccgccttccccagctggtttgcaccttgggacgcccaccgagcg

SEQ ID NO: 273277 - DNA, 122 bp, Homo sapiens
ccagggtcttcctgaatcgtcatacaccatgctggctgccaaggcataaggtgacctaagcgaagctttcacacaggccatgtgcacagtcataaaatctcgagagaatgtggcaacagaga

SEQ ID NO: 273278 - DNA, 122 bp, Homo sapiens
gaaacttaagacatatctgcccaatcagccactctgtgttttaggcattcatctctggtccgtttgatctcaggcagcgtgctgaaaaggatgaaccgggcagctggagttgtccaggggca

SEQ ID NO: 273279 - DNA, 122 bp, Homo sapiens
gagttatagaagtctggctccagaacccaaaaatgtcggtccccacttgccctcccgggacgacaggactcgattcccctggcctcagcccagcgcccttgtaacctgcctggagccggaaa

SEQ ID NO: 273280 - DNA, 122 bp, Homo sapiens
aggtagagacagcagtcactcaggactctcacaagaatagtctctattgtgcagggaactcggctcaggtacaaggcactccctgtcagccccactttaatctgaagatccctccattctca

SEQ ID NO: 273281 - DNA, 122 bp, Homo sapiens
ctggaaggggcaggagtcagcactgtccagaccacagggcctgagtgtggggagggcagccgtctaggaaggtggtggagggttgttaccttgaggcaagagggctgcggggcagaaagaca

SEQ ID NO: 273282 - DNA, 122 bp, Homo sapiens
gatgaggaggaaaaggggccactcggatcttctcaggctgggaggagccgtgctgggcagcgctgggtcgccaggactactccgcagtccccccgccccgcctccaggccccgtcaggcgct

SEQ ID NO: 273283 - DNA, 122 bp, Homo sapiens
acactactggtcttgggagtagagtagccagaatctcctcccatcaaggttgatctgagccgtagtcagttgtcctgctggggaaggtaggccctggctgaagggacacatacaggcctcct

SEQ ID NO: 273284 - DNA, 122 bp, Homo sapiens
agcggcctctcagtcccgccggcttaggtaacccaggtcgctgcggtaacgcagtgaccgcgctccaggtccgcgtctcttgcgatgcttcccccactcgcctgagggctcctgcgcgactg

SEQ ID NO: 273285 - DNA, 122 bp, Homo sapiens
ggcagagtacagcctgcctctttgaggtggggttatatgtgttaccttatccagacatagcgatctcagataacaggccaggagcacctcttgttaacagttctatgtatatggagaggtag

SEQ ID NO: 273286 - DNA, 122 bp, Homo sapiens
agctgaaacgtcgttcaactgcctcatgtggagatgtggctcctcccagagcactttgcacgcatctctgctatagcagttgtcttgttgcttttaacatttgtgcgacaggttataagagt

SEQ ID NO: 273287 - DNA, 122 bp, Homo sapiens
ctgcctgtcaagagccagctcaacaaccaaacccagattccaggtgtggtattccacagtcgttctgtaatttgtaatcatagaaacagaatgttcctcctcttatttcttccctgccaaca

SEQ ID NO: 273288 - DNA, 122 bp, Homo sapiens
caaactcccgacctcaggtgatccacccgcctcggcctcccaaagtgctggaattacagacgtgaaccaccacacccggccaaagaccagactgttaacctcacactgtcctgtttaaaggg

SEQ ID NO: 273289 - DNA, 122 bp, Homo sapiens
ccttccctccggccgcatacccgctgctgtgcgcccctggcggcggtggagtggggatggcggcgctggatttctgagcagttcttagacttcttaggagcccacgcagccgctctttggtg

SEQ ID NO: 273290 - DNA, 122 bp, Homo sapiens
cgccgcgagccaccggctgtgctcgggatcaccctgggagccgcgggcgagggggcggcgcggctgctgcagctgttgcctctggtgccaacacccgcgcggccgccctgcgccgccgccgc

SEQ ID NO: 273291 - DNA, 122 bp, Homo sapiens
cctcactagcgtcttcctgacccaccttcaatagcttcatctccaaaacaaacattcccacgagagtacctcactttacacagagggaatccttaccggggatgacctcctgagggagagct

SEQ ID NO: 273292 - DNA, 122 bp, Homo sapiens
ttagctatgaaacccaggcatggggcagcttgagccagataccttgtgcaaacacaaactcgtgctgtcttctctgaactccattgtgaaaatcaaacacttgtcagcccctcaagagcctt

SEQ ID NO: 273293 - DNA, 122 bp, Homo sapiens
tcaggttcctgggcatgtggatacctgcagagtgggttcctgagcacgtgagggcacaagcgtgcagtctcggacaaggtggagtctcaatgtgtgagcttgctgaggccagggcagtgtct

SEQ ID NO: 273294 - DNA, 122 bp, Homo sapiens
aggctggagtgcagtggcgcaatctcggcacactgcagtctctgcctcctgggttctaagcgattctcctgcctcagcctcctgagtagcaggaattaaagtttttaattttggtgaagccc

SEQ ID NO: 273295 - DNA, 122 bp, Homo sapiens
acccaaaggaaaagagagcgctgaacagtttaggaaagggctcgcgtctaagacatcaagcgacatacagagatgtgcaaaacttggtgagaattaaaattgacctttgggagagggtaggg

SEQ ID NO: 273296 - DNA, 122 bp, Homo sapiens
gacccacagccctattcctagagaagctgaccttgagcctcaagattggccaccagggagcgccagcgtgcaggtggctcggtctccctctcggtggctcccggttcacgcgagttcctcgc

SEQ ID NO: 273297 - DNA, 122 bp, Homo sapiens
ttatcccgctgatgattatgagtctgaggtaaggtggccgtaagggcgcggtgggctccacgacggggtgatctctgggaccactggatgtgggtcccggcgcgaggcagcttccgggtcgc

SEQ ID NO: 273298 - DNA, 122 bp, Homo sapiens
tgtgaggtctgggccgctgtcagagcagggcgagtctgcgcgctgatggcgtgagtcagacgaaacaggtgctctgctcagacacagcggagggcatgtggcgccagcaccatgtggtaaaa

SEQ ID NO: 273299 - DNA, 122 bp, Homo sapiens
ctggctgcgcgtgtgaccggcccgcggggctgggctgggctgggccggggcggacaggggcgcgcagaggcgcggggcgggcgcaggggggccggccccgcccttccttcttccctcccttt

SEQ ID NO: 273300 - DNA, 122 bp, Homo sapiens
ggaagcccaggaggcagcgcattgggcattctgcgcccatgactgccgggcaggctgaggcgcggggcagccgcgggaggctgctggcggggatggcggtcccgggtggtccatgcctttct

SEQ ID NO: 273301 - DNA, 122 bp, Homo sapiens
ggcgagttcgtcgccctctctgggcttgttccccacatgtaaaaggtaggtcatgatggccgtgacgtgccatactttccgtctcctgtctgctctggaggacttgtgctgtggaagctgtt

SEQ ID NO: 273302 - DNA, 122 bp, Homo sapiens
gatataagaaataggacagaaaatgtcagatcgtatgtgcgttctagaccgctgattcgtcgatttgtaaaacaagagaaggataagatggtttccagatgtagctgcctgggggtccagtg

SEQ ID NO: 273303 - DNA, 122 bp, Homo sapiens
gccgggatccgagaacccaaagccccgcaaactgcgcaggcccagtaggggctcgcaaaccgggggccccagggttctcactggccagcatacttgtgtagaactttgttttttctttttgg

SEQ ID NO: 273304 - DNA, 122 bp, Homo sapiens
aggccatcattttaggccatcacttacataggccaaggtacccaaagtgtaaatctttaacgaatatagtagtttgttgtgatgccactaagatgtaaagtgtcacttatctccatgtgact

SEQ ID NO: 273305 - DNA, 122 bp, Homo sapiens
agaggtgacttatatttccaagagatattccaattcaatcagtgaataacaaactttaagcgtgcgggaaatttaacaaaacccagactctcagagctgcaactgcgcagttttaggtcagc

SEQ ID NO: 273306 - DNA, 122 bp, Homo sapiens
agcttccctggcctccgcgggttcggagactgggacccccgggccaggagtgctggggggcgcggtcggccagccccggcttccttcatggagcggcggagctccacctcctcctccgcact

SEQ ID NO: 273307 - DNA, 122 bp, Homo sapiens
tttcagacgcagaccccaccgcagagtctgcagcagcccgccccgcccggcagcgagcggcgccttccaactccgggtaacctgccctgctctgggtttggcaggaagccaggcccaggcat

SEQ ID NO: 273308 - DNA, 122 bp, Homo sapiens
gcccccgccggcctccccagcccggctccaggctgcgtagtcttcccagctgggtctcagcgtcagccgcgttcttcatccggggcctccggcgcctcccaggcccctctttatctcagacc

SEQ ID NO: 273309 - DNA, 122 bp, Homo sapiens
cagcgagattccgtgggcgtaggaccctccgagccaggtgcgtgatatactctcgtggtgcgccgttttttaagcccgtcggaaaagcgcagtattcgggtgggagtgacccgattttccag

SEQ ID NO: 273310 - DNA, 122 bp, Homo sapiens
cgcggatcccgagtagagaacgcaagcacccacgcccgcctgcaagctcccgggcgcccccggcctctcctgctcggcggaacgaggataacccagtagagccggacccaggggtgggtgga

SEQ ID NO: 273311 - DNA, 122 bp, Homo sapiens
gcccacgctccagcgccacgtcctccgcaagcgcggtgatatggctcatccttcccttctcgcctttctcacagcccaggtgctgcacccaggcagtctgacgaagctgttcccgctcccaa

SEQ ID NO: 273312 - DNA, 122 bp, Homo sapiens
aggccaaccgcatgcagggggacccggggtgagtggtgtgggagctgggacatgcctacgcgtggtgggaagcctccccgccggccagccagaggacacttctctcctgagctgggggctga

SEQ ID NO: 273313 - DNA, 122 bp, Homo sapiens
ctgagtaactaaatgagcccgaaagtcctcttaactgctgagtggaaagcactctctccacgttgctgagagagtgccacccctgatcctcgcctcgcctcacggagagacgggaaccctgc

SEQ ID NO: 273314 - DNA, 122 bp, Homo sapiens
cgcgcggcttcccgcttccggctcccagctgctagctactgtggatctgggggggccggacggaggcatcggaggcggctgcgagagtggcagaggagctggcggagagcggcctgcgggcg

SEQ ID NO: 273315 - DNA, 122 bp, Homo sapiens
ggaggggatgggaggaaggacagagaaggataaggagtcttggaaaccctccaccagcttcgcctttcttcagagttggatactagcttagttaagattgttgggtgctaatctgctctgtg

SEQ ID NO: 273316 - DNA, 122 bp, Homo sapiens
cagggcctagtttatttcccacaagcagctatttaaaacatgtctcatccaaggcagggtcggggtggggaacctcagaggatcaatgatgcagcctgtattgtcaccagggctcatcccaa

SEQ ID NO: 273317 - DNA, 122 bp, Homo sapiens
ccccaactggcagttgatggggagtgtctgctggcacaagctgatgggtccccattgccccggactaccctctcttcccctgccactgatcatccccatcacagcctctcaccaccctctct

SEQ ID NO: 273318 - DNA, 122 bp, Homo sapiens
aaggggcttcagccccgcagggcactgggtagaacgatgcatctctgggcagctcctcctcgtgcccgttccccagggcttcacgcggagaagccgagcaccgcgccggagcgccctcggcc

SEQ ID NO: 273319 - DNA, 122 bp, Homo sapiens
agaaaactcgccgccccggcagcttgcaagcgtgccgcgaggccggagcgccgacggtggcgctaactactcctggcagcacgggaggaggcactgacgtcaagccccggactgggacccga

SEQ ID NO: 273320 - DNA, 122 bp, Homo sapiens
atatatagaagcaaggcgatgcccccgatgatctcaatggctttgttgcacatccgttatcgtggctgcttgatttccgtagaaatcaatctaaagaacccgcggtcctgtggcgtgatttc

SEQ ID NO: 273321 - DNA, 122 bp, Homo sapiens
atcacggggtgacaggcaccaggtatgcctgcgggaggcccccctccaaggctccaggtacgccactcggaagagtgtgcacgccccactgacagcctgcaaccgcctcgctgtcctcaggc

SEQ ID NO: 273322 - DNA, 122 bp, Homo sapiens
acacacacacacacacacaaattcaatcaatgtcactcaatggaaactcagttatttaaacgccacacctaagctaaattaggtgctgagaattcagtactgaataaataagaattaattac

SEQ ID NO: 273323 - DNA, 122 bp, Homo sapiens
cgccgagccccgccctcacccagcacccaccccgctcctcgcgccctccccgcctgttcccgccctgtgctgaggctgcgcagtcggtgccatcttctacgcccctgggagcgttgtggctg

SEQ ID NO: 273324 - DNA, 122 bp, Homo sapiens
ttgtcagtaacaaaccctgacctactgaacaggataaacctgcagacagaaacgtgcctgcggagggagcaactccagctcctcagacagttcagggagcgctgaactgagccctgaacgaa

SEQ ID NO: 273325 - DNA, 122 bp, Homo sapiens
ctgtcctccgactctttcgcccgcctggtggagctgttctgtagccgggatgacagctctcgcccaagccgagcatgccccgggcccccgcctccttccccggagcccctggcccgcctggc

SEQ ID NO: 273326 - DNA, 122 bp, Homo sapiens
tgcagctccagtgatatctcacttcatatttacagtctgaggccctgtgtggcttgggagcgctccattgctgcctgtcagcctgcccagctgagcatcagcagccttgggtttgctttctt

SEQ ID NO: 273327 - DNA, 122 bp, Homo sapiens
gtttccttgaatttggaacatctcctcagcctgtctcccttgttaccctgatagttttgacgattacatggtggttattttaaagactacctcccagtttgggttgcctgattctcatgact

SEQ ID NO: 273328 - DNA, 122 bp, Homo sapiens
tctccgcgggggtccgggagaggggcgccggggttcctgtcctctcttctggccgggaaacgggaacccccggccacttccgcttttcagccggagtcggctccctacctcctcccatcctc

SEQ ID NO: 273329 - DNA, 122 bp, Homo sapiens
cacacctacacccgcacggagcgcacggagatcagcaagacgcggggcggggagacaaagcgcgaggtgcgggtggaggagtccacccaggtcggcggggaccccttccctgctgtgtttgg

SEQ ID NO: 273330 - DNA, 122 bp, Homo sapiens
tatatgtgtgtgtatatacggtcccagttttaatttacttattaaaaggtcagtattatacgttaaaagttaccggcttctactgtatttttaaaaaaaagtaagcaaaagaaaaaaaaaag

SEQ ID NO: 273331 - DNA, 122 bp, Homo sapiens
caaaatagacctctaaatattgatggagacttgcctcagacacttttctgggttacaacacgcatacatacatatacacatacatactacatatacacatccgtatctatacatgcacttat

SEQ ID NO: 273332 - DNA, 122 bp, Homo sapiens
agatctagtgttggtgagaatggagcaataggaacacattcactacttttggagtaaaaacgggttcaatttgatgatgtctaagaaagtgaggtttgcatactctgtgacccaacaattct

SEQ ID NO: 273333 - DNA, 122 bp, Homo sapiens
cttccctgcagccccctccaaatgacaaaactacccacatcccatggcccacccccaaagcggcgggattcagagctgcgagaacactggaagctccccctctgacagcagcggcgacacct

SEQ ID NO: 273334 - DNA, 122 bp, Homo sapiens
caagggcctcagaggcaagttctgccagggagggtcctgaatcaggggacccccacctcccgcctgccgcaggagcttgacttctgcctttgcatcacccagatgtagtgtcacctgtcttt

SEQ ID NO: 273335 - DNA, 122 bp, Homo sapiens
ttgttttgagttccctttcattgtaagattctgagagctcttcatcaccgataagttactcgtcctcaaaatagaagtgcaaaagaaatcaagtgaaatgctgaaatgtgcatatttgtgag

SEQ ID NO: 273336 - DNA, 122 bp, Homo sapiens
cagtaaggggaggagctgaaattcactgacagccttgtatctccctctgagcaagagctgcgacttcagcccacactaaattttgtcctgtacagactgccttgattttcatcttcctttct

SEQ ID NO: 273337 - DNA, 122 bp, Homo sapiens
gaatccacccaagaacaagcttcaggagccacactgacaaaggcccagtgacacacattacgccagagtttcctggagaaacaggcgggtccaggtctggggcagaaggcccatggggtgag

SEQ ID NO: 273338 - DNA, 122 bp, Homo sapiens
atggagcagctgtcgcagcacgagcccaagaccccagtagcagctgcagggagcagcaagcgggagccgagcaccaagggccccgaggagaaggtggccggcaagcgggaggggctgggcgg

SEQ ID NO: 273339 - DNA, 122 bp, Homo sapiens
gcaagcagggctgcagtcacggggcggcgcggagggccccagcccagtcaggggtgtggccgccgccaccgtaaggctaggccgcgagcttagtcctgggagccgcctccgtcgccgccgtc

SEQ ID NO: 273340 - DNA, 122 bp, Homo sapiens
gagtccctctgctatgcatcccagcaaaagggcaccttaaatatctaacccgggagagtacgaggttattcctggagtctggaacagtgactatcataggtgctcaataaccgtttagggaa

SEQ ID NO: 273341 - DNA, 122 bp, Homo sapiens
ccacccaccactccgttaaaatgtttcttctcataaggcaagcatcccaatttaggcctccgtgtcatctgggatgacagaagccagatgctggatgagtgttccttttttctctttccttc

SEQ ID NO: 273342 - DNA, 122 bp, Homo sapiens
ggagccgggactgcggtgtcgaggccctgcctctaactggactgcaggcctgtgcggtttcgtggcttcatgtgtgtgtggagtggccatgtgtgtctagtttcgtgcagattgatgccctg

SEQ ID NO: 273343 - DNA, 122 bp, Homo sapiens
ttccccaacccccttcccttctcctccagatagatgcaaagctgaatctcccgccctgctcgctcagctgatctgtggcttaggtagtttcatgttgttgggattgagttttgaactcggca

SEQ ID NO: 273344 - DNA, 122 bp, Homo sapiens
cgcccagtgaccaggtggcaaagcatccacatggcgggcggccaccaaagtccccaggggcgggcgtggctcacctgcctccacaggagctcgaagttgccgatgtcacagctgcggtccac

SEQ ID NO: 273345 - DNA, 122 bp, Homo sapiens
caaagcatccaatacggagattagaaaacatagttcacacagcctagagcatctttccttcggccctggcaaaaggtgggcagagtggcacagcggaggctcgggcggctcccatggcaggc

SEQ ID NO: 273346 - DNA, 122 bp, Homo sapiens
caacacgcgagctggcgctttccgtgcgagcccagcatcaggcggaggcccagggccaaccggactctgaacaaagggagccgacaaatgagaaagcaaaggtacctcagagactacgaagc

SEQ ID NO: 273347 - DNA, 122 bp, Homo sapiens
gggtaaggttgcccaatgagagcaagacggtgggaccttgcgacagtctgcggatgcttccgcgtgggcccggcgagcgcgggtatccgcggatgctgagggcgggaaaggcgaggacaagc

SEQ ID NO: 273348 - DNA, 122 bp, Homo sapiens
gtgaaccagtaatgcccagggtcgcctgggacccgcgactgcgcggtggggaggcacttacgtccttgtgcggggacctctgcctggccgtttctgttttccgtccacaacacaggtgcctc

SEQ ID NO: 273349 - DNA, 122 bp, Homo sapiens
gtcctgcagctggcgaggcgccacggatggagacccgcagccttctccaggctggaagagcgcccgcttcaggcccggcggtttcgagtgaccgccagaagagggagaggcgaacaaggact

SEQ ID NO: 273350 - DNA, 122 bp, Homo sapiens
tcattaatataactagcagggttctctgcagaaacacccaactccttgtttctccctcctcgggtattagcttaagttcttcccagagcttgggcctcccctagacattccgggggccacag

SEQ ID NO: 273351 - DNA, 122 bp, Homo sapiens
aagcagcgaggcccggggtgatgtcagccaaggaaagcccccgtgagaggactgtggccgcgttttacagatgagaatgccggggcccagagagggctgcagtcctggcctaaggatgcccg

SEQ ID NO: 273352 - DNA, 122 bp, Homo sapiens
aaggaatgacatagtaaggggacaaagtggtatccgtttagtgctgtgcagtttacgaatcgcgttctatcgcctcaatccctcagtaaggtacaggggcgtagtccttttccgtttcacac

SEQ ID NO: 273353 - DNA, 122 bp, Homo sapiens
tgcgcctagcccggcgtgtggacctggggactcaccagaagggcccgatgtggagtctcacggagcgtcggcggaaggcgcacaggatgctaaagctttacaacggcctttgggaaggggag

SEQ ID NO: 273354 - DNA, 122 bp, Homo sapiens
ctcattaatctgattttttaaaatctcagagcagagcaattcaccagcaccatcatcaagcgagctacaaatctatcctttaccaaagcaaggagacacttaagatcaagtcaagagaagag

SEQ ID NO: 273355 - DNA, 122 bp, Homo sapiens
cggcgacggcttcgagcggcaaatccggcggcgggggctgtggaggcggtggcagttactcggcctcctcctcctccgcggcgttaccggtgaagaagtcgaaaatggagcacgtccaggct

SEQ ID NO: 273356 - DNA, 122 bp, Homo sapiens
accccaaggataactactgtgtcattgctagaactaagaaggattcaaattcctagaaaccgggcaagaagttgaaattaagatgtaaaacaaaaatctgacattgtgtatttttccctttg

SEQ ID NO: 273357 - DNA, 122 bp, Homo sapiens
gaaatggagggtgttgggtgagggtgctgcgtgcgggcccaggtgctgcgcgcgagggtgcggagttgctggcatgcagggtgcttgcgctgcgcggaggggagggtggcagggtgttgctg

SEQ ID NO: 273358 - DNA, 122 bp, Homo sapiens
ttcccgcgggccgctacctgcccacccgccgcaggggggcagcagggagcggaaaaaccccgggccccagaccccctgcgcctgcccactcgggtccacctaggcacagaatggaggcttgg

SEQ ID NO: 273359 - DNA, 122 bp, Homo sapiens
tgggaggaggacgctgggtgggagggctgggagccaggcgttgcagtggcaactctctgccgctagatgccgctccctcccaacgggagccgggcgcgggttcgtggccgacagatggcgcc

SEQ ID NO: 273360 - DNA, 122 bp, Homo sapiens
tatgatgtatttacatgtattctctttacacatccataaaaacaaagttcaggctgggtgcggtggctcacgcctgtaaaccgagcactttgggaggccgaggcgggcagatcacttgagtt

SEQ ID NO: 273361 - DNA, 122 bp, Homo sapiens
ccgaggtgcctttgggcctgtatctttgcccaccttctgattgttttctggacaaatccccgaggaagacaccaggtcacagagcacacttgtttaacattgtgaaacctacaaggatcggt

SEQ ID NO: 273362 - DNA, 122 bp, Homo sapiens
tgaggcgaccttcaaagagcctggagctgagcgcgggcagcaccccgattcccactcacccgcaaaacttgatgaaaatgacatcatctgagcgtgtcagagagcagagagcctttagagcc

SEQ ID NO: 273363 - DNA, 122 bp, Homo sapiens
ctcccgggccgcctctccgctcgggcgctcctggactctcggagggagtgagcctcaccgcgtactgccacccccagccggcgcccattcactttatggcagaccagggcgcccccagcccg

SEQ ID NO: 273364 - DNA, 122 bp, Homo sapiens
agcactttggaaaagaacagagttctcagccgaggtgaccacatgtcattattatgaagacgtttgtaattattatcatcctgcctcttccctacctccttttgccaccccactgggtctgg

SEQ ID NO: 273365 - DNA, 122 bp, Homo sapiens
cacaccccgtttcccttatttcctccctaatggccttcttcactgagttctctcgggccacgcacccctcactcccgccccttcctcgccgtgggcacctgccacctttccgagggcgtccc

SEQ ID NO: 273366 - DNA, 122 bp, Homo sapiens
agggcccactgagcatgcccgatccccaggccccctccagaagcacaagttcatattcaccgagattgccaccgcaccagtcaagccctgaatcacgcgtgtgactcacttgtcagccgatt

SEQ ID NO: 273367 - DNA, 122 bp, Homo sapiens
tggcaggtccggcctgtctggtgtctgtggagggcagtgcgctccgtcacatcgaacacccgcacgtactccctgttgggaacgcaggaggtacagacctagaggcaagagggcacagtgag

SEQ ID NO: 273368 - DNA, 122 bp, Homo sapiens
actttcactctaagcatttagttcccaggggacagagacgacttcttcattagaagaccccggggggtccccagcccggaagggctcacagttggagctcaaacatttgccactgttcaggc

SEQ ID NO: 273369 - DNA, 122 bp, Homo sapiens
tgcaagaactggagcctgggatctaccaggacgatattctgttcagtcacagaagcaagtcggagagtggccaagacttgggctttctgctcctgcaaatctgattccatacggattggggt

SEQ ID NO: 273370 - DNA, 122 bp, Homo sapiens
aaaaaaaaaaaaaaagcattcgctggtacccagatttccacaggagttaaacatttcctgcgcagctaaagcaagtcttaccagtaggaaaccggaacttgctaggactaagaaacttgagg

SEQ ID NO: 273371 - DNA, 122 bp, Homo sapiens
tgagagttgcacttctgcccggctcccccgaaatcgctgggtcccacccggaggtggctgcgcccccgaccccctgcgcagatgtttcagggaaggggctgagaccccctccccccgagcag

SEQ ID NO: 273372 - DNA, 122 bp, Homo sapiens
cactcagaagctcagggccgcctcgcgaccctcacctacccctcccggcaccgccgctgtcggaactgcagccagccccttgccagctggccagctggttcctccggggtccggcccggccg

SEQ ID NO: 273373 - DNA, 122 bp, Homo sapiens
tggggtctgcggtggggcgggtgctcaccaggcctgcaggatgggcatgttggaccctgacgggcagagcagacccgcgctgagcctggtccaggccatgctgttctctgcgtcctgctcgc

SEQ ID NO: 273374 - DNA, 122 bp, Homo sapiens
ttttaatctcaagaatttttgccttgaaggaaaaatgtagtggagaatttgatgtttgaacgtaagtattgttaaaagcacctgctgtgtcaatcattgctttttgtcactagatttcattc

SEQ ID NO: 273375 - DNA, 122 bp, Homo sapiens
gccaaagatgcacatcagaccagatgttcctagaggtgccatgtatgtgtctctaaagctcgacagacacaggcactcatggctcagggcacctcctgttatcctttcctctcccagcttgg

SEQ ID NO: 273376 - DNA, 122 bp, Homo sapiens
tggtgaaagacctttggccgacggctgatgtgagtatgttctttggagttctgtgtcgcacgtcacgtgcgagtaaatttaaataccctgtgatgatgatgtgtcggctagatccacacaga

SEQ ID NO: 273377 - DNA, 122 bp, Homo sapiens
ctcagggaccctctgcctgtccttgcagatgggcctctggaagagtgggcttcctaggcccgggatgccaggtccccttttcccgagagctgtgtgttcacctgcgtagacaggttgcccca

SEQ ID NO: 273378 - DNA, 122 bp, Homo sapiens
cgcgcccccgggcgccgccccgcccccgcaccttggcctagcgcggtggcgtcacagtcgcgcagtcctgactacggcctccgggccctttgtccccgctagcggcgctcggggtgggggag

SEQ ID NO: 273379 - DNA, 122 bp, Homo sapiens
cattctgcagctttccacatagcttcatgtggcacagagaaggtgggtctgtcccttgcacgcaggctgttttcatcctagctattttctaatgtgagatagaacacagaaaccaccatatt

SEQ ID NO: 273380 - DNA, 122 bp, Homo sapiens
aaaggtggcgagtaacaaaaatattacccaagttgatcatccacatcgaaactggggacacgcggaggtggcgaggatgaagtgggttagaggaggctaaaatttcaaagaccaaaccgccc

SEQ ID NO: 273381 - DNA, 122 bp, Homo sapiens
aatggaagtctgggattaatcgtctctacaaggagggtgcgtgggaggcaccaaagcaggcggtcacagctcccgcaaaggcagccggctctccttccccgcctgacgctcagggactactc

SEQ ID NO: 273382 - DNA, 122 bp, Homo sapiens
cacagccagggtggactccaccacgataaaggcgaaatggcactgaccatgcggagccagcgccggaaaagatggcgattgtgcgctgacgtcacttccgctccgagcctcgggccgggcgg

SEQ ID NO: 273383 - DNA, 122 bp, Homo sapiens
tttagatttcgaatgaagcaagtgaacattgttgggccgagcccctacagtccgtcttcccgggtcatccagaccctgcaggccccacccgacgtggctccaaccagcgtcacggtccgtac

SEQ ID NO: 273384 - DNA, 122 bp, Homo sapiens
gatcaagaataaatggtttcacaaatcgaagggattgtctcttgagacgctgattatgtacgtattgccagttgaatgggcagtattttcaaatacttgatctataggcaacagacgttctt

SEQ ID NO: 273385 - DNA, 122 bp, Homo sapiens
cggcctccgcaggaagccggggggcggggaggtaggcgccgggccgggcagctgacggcccgcccgctgccgggcaccgactccccaccctccggagcccgaaactgcccgggcgtggctcc

SEQ ID NO: 273386 - DNA, 122 bp, Homo sapiens
agccttgccagaggccgatggaaacgggggtccctccttgctgtctccagtgaggttctccgtgaggcactcacgtcggtagctggcaggaccctccagggctcccacctgcccttaaggcc

SEQ ID NO: 273387 - DNA, 122 bp, Homo sapiens
gtggaggccgcgtgtggaggccgtgagtggaggccgcgagtgaggaaaactccccggcagcgtcgctctgactcacacgaaacctgccaaagccataggcccatgcatttggaataagtaat

SEQ ID NO: 273388 - DNA, 122 bp, Homo sapiens
tcagcaaactccccaaacctagcagagtaggcagaaggctccaaaaagctagggagaagccggagctggcaaggggccttacagacccaggaagccctccccatgctctgggcctcccttgc

SEQ ID NO: 273389 - DNA, 122 bp, Homo sapiens
accccagggcgggacactcccagggacttgtttcccattggtttaacggaaggagcggggcgggaaaacccgtgtcggcttggctgcaacacctattgaccaatgttcaagcctattggtaa

SEQ ID NO: 273390 - DNA, 122 bp, Homo sapiens
atattactaccaatatcgcaggttgtgtaaacatcccctgtgatattgtttctaatgtcccgtgaaagagaaaacattactcccaatattgcagggggtgttcacctttttgtgatattgtt

SEQ ID NO: 273391 - DNA, 122 bp, Homo sapiens
ggggtcagggaattccctatcctagtcaaagaaaggggcgacaaacggcacctggaaaatcgggtcactcccacccgaatactgcgcttttccgacaggcttaaaaaactgcgcaccaggag

SEQ ID NO: 273392 - DNA, 122 bp, Homo sapiens
gtaggggctgtacggtgcaggttcctcccctggttcctcataggcagagtactatagggtcgcagtcttcctggacgttccctattggttgttgggcaggggctgtaggtattttctttagg

SEQ ID NO: 273393 - DNA, 122 bp, Homo sapiens
ctttgatgctcttccaaatcacacggaatgaatgcatgcgcaccaccaggcagggctgcccgggtgcaggcggtatctctggcagtggccagaatgacttccaccagcctacccacctaccc

SEQ ID NO: 273394 - DNA, 122 bp, Homo sapiens
agtccagaacatggtgtcccacacggagcgggcgctcaaagctgtgtccgactggatagacgagcaggaaaagggtagcagcgagcaggcagagtccgataacatggatgtgcccccagagg

SEQ ID NO: 273395 - DNA, 122 bp, Homo sapiens
tgggtgctccacttcacaccttggggaacagtagaacagcaagagcagataaacaagtcccgtcacatggagcagggtagtcctacatcttctgcctgtctcctgaggaacaagaaatgata

SEQ ID NO: 273396 - DNA, 122 bp, Homo sapiens
atgtcaacacctaaaaaataagtctgggtgtcaaacctcaaaacagatcataaggccgggcgtggtggctcatgcctgtaatccgagcacttcgggaagccgaggctggcggatcacaaggt

SEQ ID NO: 273397 - DNA, 122 bp, Homo sapiens
gaagctgcagaccctcgcggtgtgtgttacagctcttaaggcagcgcgtctggagttgttcgttcctcccggtgggctcgtggtcttgctgggctcaggagtgaagctgcagatcttcgcgg

SEQ ID NO: 273398 - DNA, 122 bp, Homo sapiens
ggtcttggtcatgtgggcacacaggtgagctccggctagggtggagggatgtgagtgactcggagtgtggaagctgagcccagggcagatggacaaatacatcctttgagctcctatggagg

SEQ ID NO: 273399 - DNA, 122 bp, Homo sapiens
agccgccagccataactcaggtccatcggcagggggagcgtcgcagggagctggtgaggtcgcagacgctgccccgcacctcggaggcgcaggcccggaaagcattgtttgagaagtgggag

SEQ ID NO: 273400 - DNA, 122 bp, Homo sapiens
tttttatagagatggggttttgccatgttgcccagcttgttttgcactcctgagctgaagcgatctggctgtctcagcctcccaacgtgctgggaccacaggcgtgagccaccgcacccagc

SEQ ID NO: 273401 - DNA, 122 bp, Homo sapiens
caagaaaatcaaggttctgagttgcagatgggctgagaaaaggctcaccaaccacatgtacgcacaagagattaggaaagaaaactgccattggagccaggctccagtaagcactgagtatt

SEQ ID NO: 273402 - DNA, 122 bp, Homo sapiens
atgtctttactaaatcccggttctacctgacagaaggaactaacttgtccatgtatttcacggccccagttttgggagattcttccttgactgtgatgttgcatggctaaatccaaagcaat

SEQ ID NO: 273403 - DNA, 122 bp, Homo sapiens
gcggctttgtgtgcgcccgggcggtcctcggtgcgctgggagaagcgcggcgcgcccgggcgggagaggacgcgccgctcgcacaacaacctcgcctctactctcgccgccgggcggcgggc

SEQ ID NO: 273404 - DNA, 122 bp, Homo sapiens
ccagcaccagcccttggacactcaccgactctccaggcagccctcgaggcccaatctccccgtcatctccctggaggaggaggacacggtaaagctgctgtgccttctagacctcccctgca

SEQ ID NO: 273405 - DNA, 122 bp, Homo sapiens
cacatatttagagacatcgtgcagtttccgtaatcggcgctcacgggcagagaatataaccgcgcccttatggtgtttatttgtgtgggtcgccatctttgatgcgtatcgattccgtacag

SEQ ID NO: 273406 - DNA, 122 bp, Homo sapiens
gcccaggtgcagcactatctcctttctttttcttggaagccgtctcaggggcctgagtgacgggcctgaccgtccccgctaccgcctgctgccatgcgaccagatggctgacccggcccggc

SEQ ID NO: 273407 - DNA, 122 bp, Homo sapiens
gagaaggcaagtgacttgctcaagccatacaggaagttagggtcagagctgggagtggagcgcagggctcctcaccccaggagctgggctggttgcaggacagtgaggctgctgggcttgag

SEQ ID NO: 273408 - DNA, 122 bp, Homo sapiens
ctaaatgaactgagtgcattacgtggatctaggcagatgggtgcacagctgcaaaggcctcggggtaagagcacacttgtgtccagtgtggtgcaacagtacggtgagggcaacaaagtgat

SEQ ID NO: 273409 - DNA, 122 bp, Homo sapiens
cccccccaatgaggctcaggaatttggggtgcaaggcccgctgcggggaggcgcggggggcggggctgcggccgggcctggagcctctcgcgctctcccccctccccggctcctgggtgggg

SEQ ID NO: 273410 - DNA, 122 bp, Homo sapiens
gccacacgctagcgctgttgtgtgcagcggaggtgccggggccgtggttggggagacccccggccctgaaccactgacactggactcgtaccaggccccgggccccggggatggaggcaccg

SEQ ID NO: 273411 - DNA, 122 bp, Homo sapiens
tcttgagcgacttctaagcagctgtccctgctgcccttcagcctgtctcctgttctttcccgtacaccatggcttctgtttcctggggaagggcccctggaagacagaaatcgagttaatgt

SEQ ID NO: 273412 - DNA, 122 bp, Homo sapiens
ggaccgatgccatctgagacgcacgcgatgctggcgacgctggcgagggtggcagctctgcgcagaacctgcctcttctccggccggggcggcgggagggggctgtggactggccgcccgca

SEQ ID NO: 273413 - DNA, 122 bp, Homo sapiens
atcatccgtttggttatagagaatacctttccttgtgtgtgatggctggcaagagtagttcggggatggggaggggagaagcaatgcccactgtcttcgctcagtacctcatgtacactggg

SEQ ID NO: 273414 - DNA, 122 bp, Homo sapiens
gtatctgagacaggtctcaatcaatttaggagtttattttgccaatgttaaggacatgcccgtgacacagccttagaaggtcctaagaatgtgtgtccaaaatagtcgggacaccacttgat

SEQ ID NO: 273415 - DNA, 122 bp, Homo sapiens
agacccactttccagggaatgagccctgcgcctgcgcgcaccccgccaccccctccaggccggagtccacgcccacttgggggaggagccccgcagcctccacctacaggggcgtcccctaa

SEQ ID NO: 273416 - DNA, 122 bp, Homo sapiens
agccgggcccgggcgggggaaccagagctgccacaggtcgcccgcgatcctggcgggcttcgccgcgctgggtccccgggagtgcctggaaaaaaacagcattactttcaactccctactct

SEQ ID NO: 273417 - DNA, 122 bp, Homo sapiens
tcccgtctgatgtcccagtgttagtcctcccggccgccctcccctcctctcctccagggacggctgggaaaacagtcctgcgggatgaagacttcaccgcctccgatttgaatttgaaagta

SEQ ID NO: 273418 - DNA, 122 bp, Homo sapiens
caagcaagagagtgaatgaggaaaaatgggtgtaaggaccttggagatcaaaatgcccagcgatgcagaccgttgctgaaactagacctttaaagtcatggacatcagcagctacaagattt

SEQ ID NO: 273419 - DNA, 122 bp, Homo sapiens
agaaatgatgacctgcagtcttaaagagctgttgattgcacctggggctcccgtggccggcgcccatcgagcagcccatcctggctgttcccttgttcagctgattttcttttttatcttga

SEQ ID NO: 273420 - DNA, 122 bp, Homo sapiens
agcacactggctcagaggctgacccagaagcaggctcgctgctctaagcacaaaggcgtgcggtggatttccaaagtcagaatttcaggagcaacgccagacaccagtgtcagcggtctcag

SEQ ID NO: 273421 - DNA, 122 bp, Homo sapiens
atgctgctccatgaggtggggattttgtctgcttgttcactgctgtgtgcccagggcccacgacagtgcccgatacagcaggcgctcaataagtggcgaatgaaagacagggcaaggcggag

SEQ ID NO: 273422 - DNA, 122 bp, Homo sapiens
atgatgcatgggcccttttgctggtccttgaccttctgggcgggtttctgctgagctcggcggaaaatgctcagcacggtcatggctcccacgtgtgggggtggaggggagcggaggggagg

SEQ ID NO: 273423 - DNA, 122 bp, Homo sapiens
tccgggcctcgccgctcagtacgggggcggggctagccggctgaccccctggcctactcccggcctccggctccaggcccttcccggatccccgcccccggattcccaggggacggggaagg

SEQ ID NO: 273424 - DNA, 122 bp, Homo sapiens
tgtataattatgtacaggcgctggcagtgtgtagagtcatggaaatcagctaaggaatcgcggtgcagtctcaggaaccagctggataattgcaccaggagctcccaaaaccagctggataa

SEQ ID NO: 273425 - DNA, 122 bp, Homo sapiens
gagtttgatattccttaagctaggaaaagtgttttttatttgtctagtgtgtcatgttctcgtggaagaggaagcaatgttaaaaaacttgttttaaacatttttgttataaaataaacaca

SEQ ID NO: 273426 - DNA, 122 bp, Homo sapiens
gcctgactttcttcagttaggagaagggagaggacggtgggatggccggccttcctcaggcgccgacacgctcactggcagtggtgacagctgagtaccccttgaagtcagtcttcgtggcc

SEQ ID NO: 273427 - DNA, 122 bp, Homo sapiens
gatttcctgtggcctcagaaaaatccacgcagtaaccgcaacagagagatgacaaagagtcggttgcaggaggcctctgcccagggagggtggccacctaccctgtgcagttcaggcagagc

SEQ ID NO: 273428 - DNA, 122 bp, Homo sapiens
ggtctaagagggaattgtgcgtgtcggtgtggggtggcgcgtgcgattcccggaggaactcggagatggagggtgtgagtgcaggggctccgagagacccctagcggctaagccgcccggat

SEQ ID NO: 273429 - DNA, 122 bp, Homo sapiens
cccttcacagcccagagcagaacagggtctgctctactctcaaggtgagtgacagagagccggtactgtttctgcccctggcataccctgagaacccatgtgacttctgtagtgctcagccc

SEQ ID NO: 273430 - DNA, 122 bp, Homo sapiens
gggcggcaggctcggaggccccaggcactgggtgcagaggcccggctgtgtgacgcctggcggtggccaccctctctggggccagggccgccccggctcccacaacccctcgctaacgggct

SEQ ID NO: 273431 - DNA, 122 bp, Homo sapiens
ggctcagggaactgcaactcccagcagcccccaggtacggggcgtggcgggagagctgggcgagccagaggcgaccggaaggatctttctagtccagcccctcgctttacccggacgaaaga

SEQ ID NO: 273432 - DNA, 122 bp, Homo sapiens
ccctttgttttggagccgtagcccggcccagacgccgttaacagccttggagcgcggcgccggccaatcagcgcgccatgtcgccagcgccccgcccccatcctgcctccgttccgccccgc

SEQ ID NO: 273433 - DNA, 122 bp, Homo sapiens
aaatattataatgaataattctactataattctactatgatcaggtcatttttgtttcttcggttggaaaggcagggcaggatatgttgtaatgctggtgtttatttcctatgaggctgagt

SEQ ID NO: 273434 - DNA, 122 bp, Homo sapiens
gaatgtcccgatactgcgggacgtagggcaccacccctccgaagaccatggccgcggccgcgccccaggacaccagctggtgcagtggcaccaggagccagtccaggccctcggcctccatc

SEQ ID NO: 273435 - DNA, 122 bp, Homo sapiens
ccagggctccgtctccagggggcagctcggggccaggctggggctcagttgaggggtagtcgaggaaggaacccggctcggccaggccccgccggcttggcgcacgctcctcggcccggacg

SEQ ID NO: 273436 - DNA, 122 bp, Homo sapiens
gggggccagttggatagggtttgaatcccaagtctgacatctgtttttgggatggccttccgcaagtcacttaacacttatacacctcatttctcttttgtaaaataaagaaaggagaatct

SEQ ID NO: 273437 - DNA, 122 bp, Homo sapiens
cgccgcgggcccggctgagccatttggggccctctagatgccctgcagggcgcctgtctccggacgaccaccacgcaggagcagcgggggcacgcgcgtgttttcttgtggataactgcctc

SEQ ID NO: 273438 - DNA, 122 bp, Homo sapiens
ggtaaatggcagcaactgtgagcccttttctcatctcgcaggacagcatatcctggataccggaggtcactctgtaagtaagagtgtgtggtaccatcagtctcttctttatcagtcttctt

SEQ ID NO: 273439 - DNA, 122 bp, Homo sapiens
ggtagtgggatatttagatgcagatatattgtggacagtggtgtgtaaaagtctagtactcgagttatgtttggacttagagatttggaagctagaagcagttaggttttaattatagctgt

SEQ ID NO: 273440 - DNA, 122 bp, Homo sapiens
cacaactcaccttctctttgtggctcaggtgctacctagcatggacatttgcatagccaacggctgcagcctacagcctgcctttgcttctgtggtgctgtccccatgggatttcctgccgc

SEQ ID NO: 273441 - DNA, 122 bp, Homo sapiens
cgctgggctgtgacccgggcagtttcacttctggatcctgctcgggctgtgataggacagcgcgggggcagcgggggaacacgcgggcacgccgagatccggcgctcgggaccccgatgagg

SEQ ID NO: 273442 - DNA, 122 bp, Homo sapiens
tcctggggcctcgcagccttgcttccgaacgccaaggtcgcggtgcgccggggtagcgaacggccaggcccgaaaccccgccccgcagctaaacgcccggcccgctaccctgcgcccagctc

SEQ ID NO: 273443 - DNA, 122 bp, Homo sapiens
tccatcataagatcctacctggtttggggagtgtgaatggattcttcctccgttcctccacgctagtagaaaatacggcgcactccctccttttaaacagctcccgatcaggaagaggtcgc

SEQ ID NO: 273444 - DNA, 122 bp, Homo sapiens
tgcgtcgctcacgctgtagaccggagctgttcctattcggccatcttggctcctcccccccgtgtgaactatttctaaggacgttttggcaactgagttttagagatatttcaaaaaaactt

SEQ ID NO: 273445 - DNA, 122 bp, Homo sapiens
atgacctctgccaagtccaaaagctgtggacaggggtaggtgtaaccgtggccagagctgcgctcagggactggacgactgccagtccgtcgcccgcacaatcctgctccaaaccgcaggcc

SEQ ID NO: 273446 - DNA, 122 bp, Homo sapiens
tttatgtaaagggccagacagttaatattttaggcttcgtggaccacatggtctctgtcacgtggtctctgtcatgactattaaactctgccattgtaacacaaaagcagccataatcaaga

SEQ ID NO: 273447 - DNA, 122 bp, Homo sapiens
ctcaaaccacctccagtggttgttcctgggcctccaatgactccctaccgcctctgcccacgtggcccctgtggttacaactgtggccctccctgactcatttgtaattcattctcccactg

SEQ ID NO: 273448 - DNA, 122 bp, Homo sapiens
actaattctgattgggcaatcattcaacaaggatcgtgcgttaaggagtgaaccagaaaccgcgtagggggcgcgcctgagagcctgaaaacttcctggttagcaaatactgaggctggaaa

SEQ ID NO: 273449 - DNA, 122 bp, Homo sapiens
caatgctagattaagaaactcttattttactgccaaaatgtataaaatatatttagagaacgtgtaggtactatgtgatttgatactcacaggtgtttttcattaggtaagtgtattttctg

SEQ ID NO: 273450 - DNA, 122 bp, Homo sapiens
taaaagcccacattgtaatgccttggaggggggctgcctttccctgcaataccccgggaccgtcggtaaagcaggctttgtcatcgtctgcgttttcgccgcggcgctgtcctgtctcagct

SEQ ID NO: 273451 - DNA, 122 bp, Homo sapiens
ctggtagaggctgggcagccacaggaaggccagcaccgtgaccatggcccgctgcccgcgcgccatctcctgcaggtcacactgcaccacagtacagggcgccgagtcgcagctctgagggg

SEQ ID NO: 273452 - DNA, 122 bp, Homo sapiens
tggtcaggctgggaatagaagctggtctgggccactccctcagtgacagtttggccgttgcgcagccaggtgatattgatcacaggggggaagatgttgtccacgatgcagatgaggatgtt

SEQ ID NO: 273453 - DNA, 122 bp, Homo sapiens
ctgttgccacgcgatggcgctgtcgcaacaggaacggtagctttcctggccagctcgcctcgcgggcccctaaggtgctctacctggtattgagcgtaacatgcctgaatgaaacatgtcat

SEQ ID NO: 273454 - DNA, 122 bp, Homo sapiens
aaaacacactcgctctgagaaaccgaggaacgagccagacgactggaggcaggttccaggcggggggcgtggcctcgggcgactgccggatgtcctcttccagaaccgggccgtgccccgga

SEQ ID NO: 273455 - DNA, 122 bp, Homo sapiens
gggtcggcccgggagtgttccgaacggagctggctccgccacgcccactcctacccctcgcggcaacaaaggaccgtcccaacgctagcacacccgcggaggacgaaggccgatacagggcg

SEQ ID NO: 273456 - DNA, 122 bp, Homo sapiens
tttctcactgctctaattgtgtgcatcccggcgcccaggggcttgtgagcagcaggtgcgcgttccaggcagctccagcgacccttaaacctgaccgcgcgcacgtccggcccgagggagca

SEQ ID NO: 273457 - DNA, 122 bp, Homo sapiens
ggtgctgcccgggtgggtcagcctgggctgggaggcagccccgggacacagctgtgcccacgccgtctgagcaccccaagcccgatgcagccacccccagacgaggcccgcagggacatggc

SEQ ID NO: 273458 - DNA, 122 bp, Homo sapiens
atggccttgaggttcattctaaggaatttcaaattgatccatgagagttaacggcagattcgagactaagaagtgacccaacctaggtgacccttcagctaggtcactctggtccttctgtg

SEQ ID NO: 273459 - DNA, 122 bp, Homo sapiens
ggcttcccctccaaagtccctttcattccaatttggctaatcctttccaactgcaggaagcgcagagatgtgtaagacctcccccagcaagttgatctctgctgactgcagcctgccaggtc

SEQ ID NO: 273460 - DNA, 122 bp, Homo sapiens
gccgcagcagccggaaacctcttaggctgctcgtgccaaagaaggccgcccttctggcggcgtgatgacagctttaccacatcggcaacgttggcataggcatgaaaaaataaagagcacga

SEQ ID NO: 273461 - DNA, 122 bp, Homo sapiens
ctctcctgacatcacttctgagcgtatttcactgccgtgacaggccgtcatgattggggacgatatcgtgggcgacgtcggcggtgcccagcggtgtggaatgagagcgctgcaggtgcgca

SEQ ID NO: 273462 - DNA, 122 bp, Homo sapiens
gggcccttcatttcacagcaggaagctgaagtcaccggaggtctaaccggagggtggcagcgggcccgggcgaggtgtggaagagaagtgacatttattgacacctgctctggtacgtcagg

SEQ ID NO: 273463 - DNA, 122 bp, Homo sapiens
ccctcccacctctggctcttaggactcacattgcaagtgggggaggcatcctccgcgaggcgcggactgagagccagcccctcttccccccctggctctagggacccccatcgcagggggtg

SEQ ID NO: 273464 - DNA, 122 bp, Homo sapiens
aagccggtggagaagtccaggcctagtgtagggtctctggccggggctgtagccttcatccgcgtggaaccttcccatggttcgcaggtcgcggtcttcggagccttcagcctcgtgagccc

SEQ ID NO: 273465 - DNA, 122 bp, Homo sapiens
ccccagtgtttgttatttttcgggttcagcttgcttttgccccgtctccgtcgacgcaatcgccaccagtcaatggggtggtcgttttgagggacaagtggtaagagccaatcttcttggcg

SEQ ID NO: 273466 - DNA, 122 bp, Homo sapiens
gtgcgcaccgcgtctcttcgcactacgccacgcccactggcgccacgccccttcgcgccgcgcgacgcgccgctccatcgcacacgctctctgggccccgccccactcacgacccgcccgcg

SEQ ID NO: 273467 - DNA, 122 bp, Homo sapiens
gaggttccccaaggatagttttattaggaccacaggactttactaaccactgaggtaacacgctgcttgtgcagcaattattttgaggtggaggtatttatgggacaagtttataattccat

SEQ ID NO: 273468 - DNA, 122 bp, Homo sapiens
tctcacaggtttttggtgtggctgactggggaaaatgtctctctttctttgaaagacaaacgtgatggatttcacagcttgagccacttcctgcttgaaatttactaaatggttgatcagtg

SEQ ID NO: 273469 - DNA, 122 bp, Homo sapiens
gatccaaaccatatcagatgccttacaatcctaaccaaaataccaattttgttggtggggcgggggggcaggtagaactagattctagcatttatatgaaagagaaaaagtcagatatagcc

SEQ ID NO: 273470 - DNA, 122 bp, Homo sapiens
taattaccttgcccaagggcacacagtaggttaagacagggccggggtcagacactagggcggcctgaccccctcagccttgctcctaaccactccgccatcctgcctccccgggccaggac

SEQ ID NO: 273471 - DNA, 122 bp, Homo sapiens
gcgtacccggcccgagacgggaggagacgctcggcggcccccgcccgccggcccgccgggcgcacacactcgcacccgcgcacgcaccgccagcaggcagcggccaccgccgcgatgctcgc

SEQ ID NO: 273472 - DNA, 122 bp, Homo sapiens
cgggcctcgcggactgctgcgctgggggagtgggcggtcgggcgtgttcccgccacgcgccgccaccgcggcccctggaggtggttcactttgaggcctggatgctgcttcacggccccctc

SEQ ID NO: 273473 - DNA, 122 bp, Homo sapiens
ggccagctggagttccgggtgggcgtgggcttggggggccccgcactcagagcagacggccggccctgccggccctgggcaatgaggggcttagcacccgggccagcggctgcggagggtgt

SEQ ID NO: 273474 - DNA, 122 bp, Homo sapiens
cttcacaaataacttaggattcttcccctaacctttgactactttattagtttagtttagcgaatgtgacatcactgaaaagtgtatatcactgtaggtatttaaaagttcctaaatcagtt

SEQ ID NO: 273475 - DNA, 122 bp, Homo sapiens
actaatgagtacgtattatataattcaattacataaacaagcaaactaatgtatgctattcgaagtcaggctaatccttagttggtggacaaaagtggtgactaaatggttcagaaaaagag

SEQ ID NO: 273476 - DNA, 122 bp, Homo sapiens
gagcttgttcccaactcggggctccgggcatttgctcttccttctgtgtttgtgctctcccggccctctttgtgggatctatgcgctttgggggactggggacacagggcccatgtgtatct

SEQ ID NO: 273477 - DNA, 122 bp, Homo sapiens
gaccccgggactcgggtagccgggctcagcccaggtcggaaggcctcagaagcggggaagcggatggtgtggccctcagcacgacccaccccaaatcatgccttgccaggtttctgggaatt

SEQ ID NO: 273478 - DNA, 122 bp, Homo sapiens
acggacactcctcgggcctcacaagctcctgtgggtgaccaggctgctccccaccgccggcgtgggctgttgctaccctgcacatccctcgggtgggcagcggtgcttgaaacgccagctcc

SEQ ID NO: 273479 - DNA, 122 bp, Homo sapiens
cggggaagaggggcgggtcggcgtgctgctgaagatgcaggagctgcggcctgctctgtgcgtgctgaaggtgtggtgagaagcacttacaaaaagaaatggactgtgttaggattgcacat

SEQ ID NO: 273480 - DNA, 122 bp, Homo sapiens
tcttgaaggcaggtcccttcgaaggtgttcaccctcctgtgctctggtgctctttttgtacgtgactcccagaaccaaactgagtgtacatggtgtatcctgatctgagcagtacagctgta

SEQ ID NO: 273481 - DNA, 122 bp, Homo sapiens
tgctcttcttcgggatgctgttcaccttggggctatcgaccatgttcgggaccgtggaggcggtcatcacacccctgctggacgtgggggtcctgcctagatgggtccccaaggaggccctg

SEQ ID NO: 273482 - DNA, 122 bp, Homo sapiens
ggtggcaaaactgagctttgaaggttggttgtatgattccaaacccagagtgtgttttcacgtcattacagttggagagctgatcaatatgaggcactgttatcattattagtaatcagcat

SEQ ID NO: 273483 - DNA, 122 bp, Homo sapiens
gtgtgtcctgctcttgggggaggagggtactgggaagggggaactaacaggtctttctttcgctcggatcaggactggactccttctgactccacgcggccccagctcctgaaccagcgcag

SEQ ID NO: 273484 - DNA, 122 bp, Homo sapiens
gcccgggagaagcgacgtctgggtgggcaggaagccgagccggctgcggacgcgggagggcgcggcacgggccgggagtcacgccagcacgcggcggcggcgggagcgcggcggtcccaggc

SEQ ID NO: 273485 - DNA, 122 bp, Homo sapiens
ccaagacccctagccctgcccccatccccccaagccctagagctccctccactcttcccgcgaacatcacaccgttccccgaccaagccgtgtgcaatacaacagagggaggcaggtgggaa

SEQ ID NO: 273486 - DNA, 122 bp, Homo sapiens
ccgcgagcccaagcgttgcgtttccgcggcgggatcttcatgctctctgcggctggcgcgcgggctctgcagcctggaaggcaatttccaactgggcgcttctgactgcccacatttctgcc

SEQ ID NO: 273487 - DNA, 122 bp, Homo sapiens
ggaggctgcctgcggagcggagccggcagagccctgagcagcgcctgcaagaggagctcccgttgcgggaccaagcgagcccttggcccagctccacagcaggctgcacccccggagccccc

SEQ ID NO: 273488 - DNA, 122 bp, Homo sapiens
gtcacgaacctacctttaaagagttaagcccaaatgccggcctgactggctcttataacgcggccgcctgggaatagcagcctcccattggctattggtgctgtccttcaggcagctctcaa

SEQ ID NO: 273489 - DNA, 122 bp, Homo sapiens
gaaaaacagaatttcaatgactcagaaactataccacagttgataattaggccagtttctcgaaggtaccttaatcttcttacttccttaagcatctgtctacagtttgtccatgttatacc

SEQ ID NO: 273490 - DNA, 122 bp, Homo sapiens
tgcagcaaaaccaccaagcaggaaccctttgtactctgactaaggcttgcagtaaagtgccgccggtcacggggtactggcaccctcgtgatggcagggctcatctcagactgatatcagcg

SEQ ID NO: 273491 - DNA, 122 bp, Homo sapiens
ctgagaccaagcgagcagtttgcatgatcccagttcgcggacaagtgggtgtgtcagggccgttcccagagggccggggctccttcgcttggtcaaaccctagactcgtttactggggcctg

SEQ ID NO: 273492 - DNA, 122 bp, Homo sapiens
tggactgtgaggtctgcaacagctggtggggttcgggtggggaacacactctaagcccagcgccagggctggagccgtgggtggagccgctgcagccctgggccgggggcgtcaggaaactc

SEQ ID NO: 273493 - DNA, 122 bp, Homo sapiens
ggaagagagtattgattctgcaatgacagaagggctttgagatcaggttggggctgaggccggaaaatcattatgggaagttagagagtggaaaggtggggccctgttgtcaggcgcttgca

SEQ ID NO: 273494 - DNA, 122 bp, Homo sapiens
ttctttcttgttcaaggcagagtcgcggctgggttgttaggatgctcgcgcccctgtacccggggcgtgcagggaagtgtaagaagggggcgaagggcgagaaacgctgaattctagcctga

SEQ ID NO: 273495 - DNA, 122 bp, Homo sapiens
ctgtgctacttccgctgaacgaggaactggcagcctaatcttgatccacactttcaagggcgaggtggagaggccaccttcccaacaccttaggactgggctgaacattaaacgcgggggaa

SEQ ID NO: 273496 - DNA, 122 bp, Homo sapiens
ttccgcagctgcttccagggtgctgtccaccccgtggtgctgaagtgccccacgcccctccgccacctaccggaagccgcgtccgcgctacagcctccactcaggattcgacccgaactcca

SEQ ID NO: 273497 - DNA, 122 bp, Homo sapiens
atctaagcaggacctcttgccctcccagaaagagcggaccttctccttctgtggcaccatcgagtacatggcccccgaaatcatccgtagcaagacggggcatggcaaggtaggttggcagg

SEQ ID NO: 273498 - DNA, 122 bp, Homo sapiens
gaaagtcgggagcggggccacattaatggcccatgggtgggggcggggccagaagtctggcgggaaaggcggggccagaaagttttttcccgagccgtgggcggggccagagcggtttccag

SEQ ID NO: 273499 - DNA, 122 bp, Homo sapiens
tgacagacacaaaaatgggctttcttcggctggctggtgttcccagccttttatgtggtgcgtctcgggctgtgctgcttaattcattcctgattctactcaaaggaagtccagcctggcga

SEQ ID NO: 273500 - DNA, 122 bp, Homo sapiens
cgccgccgcctcttcgtcgcctcagcctggcgttttgttccgagagacgggagaggcgagcggagctgacagtgattttgacagtgatttaaacccgcttttgttgttgttggcttttcgtt

SEQ ID NO: 273501 - DNA, 122 bp, Homo sapiens
cgccaaatggaccacaaccacgccaaatggactacaaccacggcaaatggactacaaccacggcaaatggactataaccacggcaaatggactataaccacgccaaatggactataaccacg

SEQ ID NO: 273502 - DNA, 122 bp, Homo sapiens
tccctggttacaacttttccataaaggtaactatttgagagtttctgcttcggctgctgacgtcaagaaatgaaatgtacaagcttacttagatcaaatcctgaagaaagcctgtaaataag

SEQ ID NO: 273503 - DNA, 122 bp, Homo sapiens
agccaggcgcgcctctgcaagcgcgtcctcgcggacccagatggcgcggcccctgcgctccgctcccgggccctgctgcctccgccgcgccccctataggccgccagcaccgaggaaccgag

SEQ ID NO: 273504 - DNA, 122 bp, Homo sapiens
gtgtactacatcgagatgctctctcagtgtcccgctgtgttaagtcacggtgtactacatcgagatgctctagctttcagtgtcccgctgtgttaagtcacagtgtactacatcgagatgct

SEQ ID NO: 273505 - DNA, 122 bp, Homo sapiens
tgtgttattccacactgtttaaaaaaaaaaaaaaaatgagctccagctcctggatgcacacgacacagatgcatctcacagacatcatgctgagtgaaagaaggcagacacgaaatacatgc

SEQ ID NO: 273506 - DNA, 122 bp, Homo sapiens
gcttctgggctctggtgcctgggtcaggagtggatgggtctctgtgtgctgggctggcctcggctcgcaccatcggctgccatgagggagtgatgtttacagcacacgacttcaggagcctg

SEQ ID NO: 273507 - DNA, 122 bp, Homo sapiens
tgcaccagtctgaagcctgacgcaagcaaaatctcgaaaaaacaatgctagctttcaaagcgttgaggtgcaggcctgcagacggacggacggaccgaccgacactactttgggagtaggaa

SEQ ID NO: 273508 - DNA, 122 bp, Homo sapiens
gtcacaggcgcgggccctcggcgacgcaatagcgccaggccttccgcgtcgtcagagtgacggtacagtgcctggagctgggctgttttgtcttcagagtggtgcctggtaaccgcgacttc

SEQ ID NO: 273509 - DNA, 122 bp, Homo sapiens
acgccgcgtggaaccagctgggtttctctcaccgttctccagcactgcccagaccagaggcgcagggagaggaggggtcagcggttccgcgaccactcctcccgctgtccctgctctccagc

SEQ ID NO: 273510 - DNA, 122 bp, Homo sapiens
ctgccttcccgggcgcatatgcgagcgcagcacccggcgctgccgagccacctcccccgccgcccgctagcaagtttggcggctccaagccaggcgcgcctcaggatccaggctcatttgct

SEQ ID NO: 273511 - DNA, 122 bp, Homo sapiens
tgcctgactctgtccctttctacatcctcagtcacccagaaatacctggggatctgacaccgatggccctcttgcactagcgctgcacttgatgtcctctcttaagtcacagccttcctctc

SEQ ID NO: 273512 - DNA, 122 bp, Homo sapiens
tcgtgctgtgtatccgtcaggtaacatctgccggcacctgctgccccgggtccagtgccccgccttgattgtgcacggtgagaaggatcctctggtcccacggtttcatgccgacttcattc

SEQ ID NO: 273513 - DNA, 122 bp, Homo sapiens
agggaggggacaggaggagatcttgcccccactgcatctggctctcctgccctcaccatccgcagcagggggtacactacagcttcggctttacaaacacagggaaaaagctaacacaacct

SEQ ID NO: 273514 - DNA, 122 bp, Homo sapiens
tggctcgggcagagcagctccgctggcgcaggcaggaggagcaggaggattattaaataacgcagctggactctgtgcaactgggagtggagaggagcccaacagccgagaaggggagggag

SEQ ID NO: 273515 - DNA, 122 bp, Homo sapiens
ttcacatgtttccatcaaatacagacacagatcagggaagattaaaccctactaatttctcgtcggatgcctcacaacaaggtgccttccaagaactaatggccaaaatatccacccacaac

SEQ ID NO: 273516 - DNA, 122 bp, Homo sapiens
agtttcagaacaatcagtgatgacagctactgtgaatccactattcaacaggcgccccatcgcttgctcatgggctcctcaccatagctctaagccacaggagctattttcataccccatat

SEQ ID NO: 273517 - DNA, 122 bp, Homo sapiens
gtaaggaaaggcaacaggtgtaagcagaggtggtaatgcggagtgagaaggcaagcaggtcgacagaggaggcagaagttctgcaccaagggaagcaattctatacatgaagagggtcccag

SEQ ID NO: 273518 - DNA, 122 bp, Homo sapiens
ctttgtttttcttggctgactttccagcgtccttcttctcgtcgtccttgggcggcattgcgaagctcggagagtagcagcagacaccgcagccttgcaaagatgtcggacaaaaaagctac

SEQ ID NO: 273519 - DNA, 122 bp, Homo sapiens
cggcgccccgagccagacggcgtccccaggcgggggccgggtcctcgcagaacagctgatcgggacccttattttggccacagccacagttgggggcgccacccagtccgtgccttcgacct

SEQ ID NO: 273520 - DNA, 122 bp, Homo sapiens
caggcgcgcagtggagggggccgcggggttctctgggagatgtagttcaacgatgacggccgtggcgcaaagcgttctggggctcgtggttcgcggggtccatggggaacgcggtgtcgctg

SEQ ID NO: 273521 - DNA, 122 bp, Homo sapiens
gatgaaggtagcaggcggcttggcttggcaaccacacggaggaggcgagcaggcgttgtgcgtagaggatcctagaccagcatgccagtgtgccaaggccacagggaaagcgagtggttggt

SEQ ID NO: 273522 - DNA, 122 bp, Homo sapiens
gaagattcagactcagcgagccggtaccattcgtctagggacacacagccaggaaggaaccgaaccaggattctaacccaggattacccaagttcgaattctaattgaacataagtccttag

SEQ ID NO: 273523 - DNA, 122 bp, Homo sapiens
accagccagtgactggaaaggaaaagccctcagggccatgcatgggttgggggggaggggcgtaggatagaggaggaaggatgacgtaatcattccagagtggaaaagtaaaacccactaga

SEQ ID NO: 273524 - DNA, 122 bp, Homo sapiens
agttctcttaccacaatttcgaccggagccggcacgacgacgacgacatccgaggctgtgcggtgctggacctggcctccctgcagtgggtggccatgcagtgcgacacacagctggactgg

SEQ ID NO: 273525 - DNA, 122 bp, Homo sapiens
actgcaataggaaagccacggagtggggtgtggggttcagtcacattggacccccggctccgtgttcctgtcccctgtagtgtttttgttattagaccctttttcctccttggtttaggaat

SEQ ID NO: 273526 - DNA, 122 bp, Homo sapiens
aacaaagaaattacgaattttaagatggtgatagcagagcactaaacccagagtggggcccgtgtgactgcacattttgcccacccatgaagccagccctgggtgcgtccaacttcaggatt

SEQ ID NO: 273527 - DNA, 122 bp, Homo sapiens
agaacagtgcccctgtccacagaggaaaagaaagcaggccaaatgtgggaatgactagagcggtgggtagctgtacagaagtgattgtggggctgaattaaactcatccacagaacagcctt

SEQ ID NO: 273528 - DNA, 122 bp, Homo sapiens
caaccccgttttgtagctgtgcccacaatcacccattaccttccccaagcaaatgtggcacgtgatgggcagagtgagcgacaatgtaacattctgcacggtctgagccatggcagcgttca

SEQ ID NO: 273529 - DNA, 122 bp, Homo sapiens
ggtgtcacaagaaggatctgaagtggagcttctagtatccccaggagcgcgaagtgaacacggaaggtacctgcaggatccaattgtgtccattgatctctcagagtggctgaggataatag

SEQ ID NO: 273530 - DNA, 122 bp, Homo sapiens
tttctttgtttgagagggctgactatgaacttgtgagtttagtgattgttttacctggctcgcttctcttaaagatgcatggatattggcaagcaagcagcctggaacttaccccaggagaa

SEQ ID NO: 273531 - DNA, 122 bp, Homo sapiens
gcaaccactcctagcttcagctgggccccgaggttctggggaaatactgcccctgatgtacggcttccgctcctgcaaactgtagcaagaaaaggaaaaacccacctctccttccctaccta

SEQ ID NO: 273532 - DNA, 122 bp, Homo sapiens
ttgagggagtcggactcgggaccggccgagagtgtgcggagcttacctgcaccagcgaagcgcctgcggcagccggaagcgaaagtctctggcttctctgcgtccaggtcggcgcgcgagca

SEQ ID NO: 273533 - DNA, 122 bp, Homo sapiens
gccagatgtatggcatttatgcaactaatacttgttgactaaatatcaagggctcccagtcgtgtgtattatatacacgtgttatattaggataacctcttaggataaagtcgtgttatatt

SEQ ID NO: 273534 - DNA, 122 bp, Homo sapiens
agaacaaatgtttatcaaacccagagccatccttgctaacatatgtacactcacttctcacgatccccactcccccctaaaaagagctctctaagaacaacaacaaaactctctcgtttaca

SEQ ID NO: 273535 - DNA, 122 bp, Homo sapiens
cataaacctctgtctgtgagtgcccgtcttgccctctgccacgtttgttccgggaactgccgccttgctcccttgcctgcatttctctgcgtggttcgctttcaccttcgtctggcgctctc

SEQ ID NO: 273536 - DNA, 122 bp, Homo sapiens
cgccagggccacgttgctcgtttctcatccatcctccaacccggtcaagctccaggagaccggcatgccccccacttgggacgcttcccagggccaggcggcccaaccccgtgccacgcaaa

SEQ ID NO: 273537 - DNA, 122 bp, Homo sapiens
cagccacaggtgaggcggcctgatggcctggggcaaaggccctcggtccagtctcttccccgtccaccccaagtctgacttctctcaggagggactcatgaacacgtgccctgagcaccccc

SEQ ID NO: 273538 - DNA, 122 bp, Homo sapiens
ctgggattacaggcgtgagccaccacgcccgcccagaaagtgctttctttcagagggttacggtttgagaaaagcagcattgaagttgacgctgatcttggtaatacatttgcagagcatgc

SEQ ID NO: 273539 - DNA, 122 bp, Homo sapiens
cccaagggccaaggctttcgcaatatgacccacattttggattcctccatcagcaatgaccggaacaccaaagcgccgtgcatactctgacaccttgtacactgctgttgcttggggccgcc

SEQ ID NO: 273540 - DNA, 122 bp, Homo sapiens
gttgcagccctgctgctgcctgcctggacttggcccctgccacctcctgcctcaggtgtccgctatccaccaaaagggctccctgagggtctgggcaagggacctgcttctattagcccttc

SEQ ID NO: 273541 - DNA, 122 bp, Homo sapiens
aatttagtaacaggactgacgtgtgaacatggccggaaacacttgccgtcttcctgttaccgcgtccggaacttcacggtgatacccagaaatgggatcttaacctcttacacattccaggt

SEQ ID NO: 273542 - DNA, 122 bp, Homo sapiens
tgaaatccatgtttttccttcctattccagctcttctattctgtattttaagtgggacaccgatggtcacctatttcaagttctcattaactttcacctagaacttctgcaagtctcatcat

SEQ ID NO: 273543 - DNA, 122 bp, Homo sapiens
aacgtgcccgcaggatgcagaaagggcgcgtgatgagcacaggagagtttagagtggccccgcgcctgcttcccaagctccagagacactttctgcagcagccgcactcctgacaaatggga

SEQ ID NO: 273544 - DNA, 122 bp, Homo sapiens
aggacaggtgccaggaaaaaccaggcatagagaaaggcccacacagaagctgaagccatacgttctgcattcttacccatggagcaaaggagggaaatgtcaatggaaggcttgaggtgctg

SEQ ID NO: 273545 - DNA, 122 bp, Homo sapiens
gcaagatggcgtctccttttcaggcttgctgtggtgggctgagccgtaaccttacatgggcggatccaggcttcatttcacataattcacattcttggcttcctgagtcactgtcatcatct

SEQ ID NO: 273546 - DNA, 122 bp, Homo sapiens
gtgcggcatgtggcaggtgttccgtgtgcgcatcaggtgtgccatgtggggcgtcaggtgcgcagtgtgtggcgtgtggtgtcaggtgtgtggcgtcaggtgtgtggcatcaggtgtgcggc

SEQ ID NO: 273547 - DNA, 122 bp, Homo sapiens
aactgccttggcctcattccgtgggtgtggatgctcctgcttgaaacgcattttccagcccgccaaattcttgggagagtttcttccactctccaggcgctgagagctacaaagttcaatct

SEQ ID NO: 273548 - DNA, 122 bp, Homo sapiens
ttcagtgaggtaggagacttcggcagcattggccgggctctggtttgcttctggtgctaacggaacatggaagagaggacaaggtagcgtgtcctgaagatcacatatttcctttttgcagg

SEQ ID NO: 273549 - DNA, 122 bp, Homo sapiens
caggtacctccgggagcacaccctcggctcatcccactgcttcctccgggctttctgcatcgtcttctcgtcaaagtccagcacctgcgaggcggccatgaacacctcctggcccttcttcc

SEQ ID NO: 273550 - DNA, 122 bp, Homo sapiens
gttcattggctgtaatctagaaccttctggttagctaccaccactcagatgtcgatgaagcgagctatgttgtgtaaataactcagttatcttctctatcgttactagtccttttcctctta

SEQ ID NO: 273551 - DNA, 122 bp, Homo sapiens
gggcaatcgcataacctctctgagccacggattccccacactcaaaacgggcagggaggccgtgggactggcccgggggatgcaggcagagcgcccagccccagctcggcacagcgtgggtg

SEQ ID NO: 273552 - DNA, 122 bp, Homo sapiens
acccacctgccaggctgcgcggggaggctggtcccgggctgggcaggcgggctggcctcgcgccctcgaggcacccggcggcgctggctgtgcggaggggcgccggcgcggccgtatttgta

SEQ ID NO: 273553 - DNA, 122 bp, Homo sapiens
tgggtgctgcaggctccgcaactgtgtcatcagctgacacccagggggacaacggatccccgcctaccctgctcctgtcagcaggaacacagctggggggacatgaggccacaacctattta

SEQ ID NO: 273554 - DNA, 122 bp, Homo sapiens
tggcctccctcagccgtgtggacgcctcctctcagcatctaggatctaggcccatctccacgccgtctcaaagacgctgggctgctgcccactgtgagacaggagccccctctctgttccac

SEQ ID NO: 273555 - DNA, 122 bp, Homo sapiens
aactacatcacacagcaccttatagatcatgacaaggagtttacattttgtatctaaggacgttgcatgctctttgcaggatttggggcaggggtgtataacatctgattgatactgaaaaa

SEQ ID NO: 273556 - DNA, 122 bp, Homo sapiens
taggccctggtggccctggctctcctggctgccccgactctcctttctctccacgttccccgcgtggaccctgcagaacaagcggaggacacagatggcccagggaatcttgaagatcaggg

SEQ ID NO: 273557 - DNA, 122 bp, Homo sapiens
cagcccggggccgagtgagaggggaaatggaagagatccgggctcgggccccgcgcagaccgcaccctacccatgtccctgcctcctgtgcgctcgacagcgaacctgcagcaagggcagca

SEQ ID NO: 273558 - DNA, 122 bp, Homo sapiens
tttttttttttaaataccaagaaattacagccctgcctacgcggaggcccagcccctacacgccccctttgcatggtatcctgggagatggagttctgtcctggccccagtcatgcccccat

SEQ ID NO: 273559 - DNA, 122 bp, Homo sapiens
tctttttgttcaagacctagcctgtaagaatcaatagatacttattgccaggttattatacgtgaggcagagaagtgaaaaatcaaaagctcatagattaaggcaggactgacctcacaggt

SEQ ID NO: 273560 - DNA, 122 bp, Homo sapiens
ctttaggcccttccagctcttctgtaccatgattctttgaggtaaagttatatcaacaatcgggtgtttggagaagattgaagaaatagttccattggtacatttgtttttaaaatttagag

SEQ ID NO: 273561 - DNA, 122 bp, Homo sapiens
catgttccaagaagaaagcaaggcacagagtaaggttaaaacagcgctcaaaattgcttccgataagtgaaaggtagtactagaatttgaacccatgcaatctcatcccagagtgcatgctt

SEQ ID NO: 273562 - DNA, 122 bp, Homo sapiens
cggcgtccccgggagtgtgactcccgcagcggggtgcagctttcctctgggatgagtgaccggagggaacccgccttcccgggcacgtcgccagcctcttcctcttcttccctaggctatca

SEQ ID NO: 273563 - DNA, 122 bp, Homo sapiens
ttagatcagtctgcacgcaaataccagccacaccatctcccaagctagtgactggaactgcggttttcaagtcagtttcctcattgcggaatggagataacgatgccttccttgcagggtca

SEQ ID NO: 273564 - DNA, 122 bp, Homo sapiens
cctttctggacccgagctgcagtggcgagatggcagggacaggattcaggcttgcctggccggaatgagggtgctggtcccacgggagggcggctccggcaggcgggggtagggaagctggc

SEQ ID NO: 273565 - DNA, 122 bp, Homo sapiens
agtagctcacccatgcttcatcccagctcttggggttcaccgtctgaaggctctctcctccggatccctctcggtcctgctgctcgctccgattttgcaacctcccccactcccctttcctg

SEQ ID NO: 273566 - DNA, 122 bp, Homo sapiens
ggccacccaagttgacgctaaacacagtcatggcagcttttttggtgaaatggacagagacggtctcagaatgtgtgctgggaatgcagtcggaacatctgctcctgtcagccggagtgcag

SEQ ID NO: 273567 - DNA, 122 bp, Homo sapiens
ttcagcagcatgtgattttgtatgctagccaggggccctcatatttctcacatttatttccgtctagtccaaggttcatgcagattagcttgggttacctttattataggctgcagaggttt

SEQ ID NO: 273568 - DNA, 122 bp, Homo sapiens
aagccttcggaagcagcaacatctatttattcctctccctctggcagaagcatcagacttcgcagatcagtcagataagagggacacgagaggaggcgaggaagacataaaaacaaaagtag

SEQ ID NO: 273569 - DNA, 122 bp, Homo sapiens
ggcaagcctctttcctcttcctctgaaactccgacttcttccggagggcttcgctcgttccgagggtcctgcgactggaggaggcacatccctgagcagccactccctccccgcagcggcct

SEQ ID NO: 273570 - DNA, 122 bp, Homo sapiens
gggtcgggacgcgggagaggggcactgggcacggggccctggtttgcttgctctgttcatcgttggcgagtgaggccaggccttccgaagcttgctgggatacttctgtggcaggcttcccc

SEQ ID NO: 273571 - DNA, 122 bp, Homo sapiens
tgattaagtttctactgaactgctttaagtgaaaacgatctgcccaacagaggaaaagagcgatagctttggtacaatagtaaatagaatgatgcgtcagtgcaatacatggttagagtcag

SEQ ID NO: 273572 - DNA, 122 bp, Homo sapiens
caaaattagcaacgaccccctatttttcccattagcttctggctcacctacatcctttcacgcaggcccgcctgactcactcagctaagtgcttgctcttgctcacctctcgggttcccgac

SEQ ID NO: 273573 - DNA, 122 bp, Homo sapiens
agcggggagcgagtagggtggcgtctccagggatttaacctcctaccctcagttccatgacgccaccccctccctccaaagactgggacagcgcctccatttttgttttggggaggaagggc

SEQ ID NO: 273574 - DNA, 122 bp, Homo sapiens
ctctcgccaataacatcactgattcactataaagtttctctggctgtgtgctattcgctgcgtccacagcagtgaagaagacagacgcagcccctgaccaacctcgccaagcccgggcgccg

SEQ ID NO: 273575 - DNA, 122 bp, Homo sapiens
caacatcctagaggttttgtaagaattaaaagtcgtaagagaacaaccagctcagcatggcgcctggtacatggctggcaagtgcaggcaactccatcacctctcctggcttggcacaaaca

SEQ ID NO: 273576 - DNA, 122 bp, Homo sapiens
ggtaatactcttttgaaacttctctttgtgtcttaaacctgtgtcttggacttccgttcacgatggctctcactgactggctgtttctttccacatttgtctggcggttgtctcctagggcc

SEQ ID NO: 273577 - DNA, 122 bp, Homo sapiens
tattgcttttccggttccaaaggaaggggctgggggtgggagacggaggggattgatgtacgaggattggaaattcagcgggtcccctaagtggggagactaataggacggggagccccagt

SEQ ID NO: 273578 - DNA, 122 bp, Homo sapiens
atggggcatgacctcctctggaatgagggtcttatgacccacaatcagattatagagtcccgccttgggtggatgaaaggagggcaaagaaggccagagaaatattctgtttcctgaggcct

SEQ ID NO: 273579 - DNA, 122 bp, Homo sapiens
ggaagggacagatgagcaatgtagcccgaggcgttctttcaagagcagaggaatcgggagcgaagtgtttttgttcatttagcagactaggatcatgggcgagtttcctctaatagcactga

SEQ ID NO: 273580 - DNA, 122 bp, Homo sapiens
tactatgtgtcaggcactgttctaaacactttccatttattcatttaatcctcataacaacgacgataataatagctaacatttgtatagtgcttaccctgtgccagggaacgttctgattg

SEQ ID NO: 273581 - DNA, 122 bp, Homo sapiens
agaagccactaaaatgtgattggaatgtgagatggtgctcagaaaccagctccacaggcccgagtggggattgagccctgaagatagaaggctggacttggctgttctcccccaaacccaca

SEQ ID NO: 273582 - DNA, 122 bp, Homo sapiens
atcatgttggccaggctggtctgaactcctgacctcaagtgatccgcccacctcggcctccgaaagtgctagaattacaggtgtgagccacggtgcctagcctgtggtttttattaaagaaa

SEQ ID NO: 273583 - DNA, 122 bp, Homo sapiens
acgcacgtgcagtgtgcaaacctgatgtcagcctcactccctggctcttctgtccacaaacgctgtttctttaagtaccactttcagttcctccaaagaatctacttaaactcttaaattcc

SEQ ID NO: 273584 - DNA, 122 bp, Homo sapiens
ggatgtttcccaaacctttaaagctgcctggacatgtgaagttttctgtttagttactcccgtttgtcactggaaaaacagtaaccttttaatctcaaaactcacagcggtccatgtaaatt

SEQ ID NO: 273585 - DNA, 122 bp, Homo sapiens
ccgaggctgcgccaagagccgcagcctgagtttggcgcgtaattggggtggcctgttacacggtctaagggagtaaatgctaaggcttaggagtcacctacgtaggactcttgagagggcaa

SEQ ID NO: 273586 - DNA, 122 bp, Homo sapiens
tctttgttgtacagtcacactgcgtatcgattggtcaacgacaacggacagcatagaatacgataggctatagtatgtagcctaggagtgtagtaggctataccatatagatttgtataact

SEQ ID NO: 273587 - DNA, 122 bp, Homo sapiens
gtccttcctggacgcgcacagccgctaccacacggtgcacgagctgtcggcgcgcgagtgcgcctgcgtgtgaccctacctcactcggccggcgcggcggccactccccccgcctcgacggc

SEQ ID NO: 273588 - DNA, 122 bp, Homo sapiens
ggggaaaggagctcctctgccctcctgtggtgcctgagggcatgggggcagctggcctcccggccaggggccaaagtccagcttacaacctgctccgggtgggatccagtgccctctgggcc

SEQ ID NO: 273589 - DNA, 122 bp, Homo sapiens
cctcaagtgatcctccagccttggctccctaaagtctgggattatcggcatgagccactgcgcctggcccatatgctagtcaaaaagctaaaaaatagataataggtacaacaggagcaaac

SEQ ID NO: 273590 - DNA, 122 bp, Homo sapiens
agaatgtgcgcaacacacacctaaggagaacgcgtgcaacacacacctgaggagaatgcacgcagcacacacctgacgggaagtgtgcaacacgcacctgaaagaaggcacgcaacacacac

SEQ ID NO: 273591 - DNA, 122 bp, Homo sapiens
ctagaaagtagaaagaggctggtcatatgttgggtatggaaaaccaagtatggggaagctcggtcttggatcacattcttcagcatcaagatgcgtgagaaatgcacaacctgtgcaaatac

SEQ ID NO: 273592 - DNA, 122 bp, Homo sapiens
tggaatgctgactgcacagcttactacgtgtgttctgtgttccgtgctctcacatgcatgcggaattctgacggcacagcttactaagtgtgttcggtatgccacacacttgtgtgcatgcg

SEQ ID NO: 273593 - DNA, 122 bp, Homo sapiens
ggtcctcacttggagtatgcagtgctggaatcttcttagtttcagtcttactttgtcccccgaggtatgttttctctgcagcttcccttgccaaggacatcctagagatggatgatggaact

SEQ ID NO: 273594 - DNA, 122 bp, Homo sapiens
aggtctctgtcccctgccagccccagcagctgcctttatcttgctggctagtgggtgggccgtggtgggggcgggtgggagaggctatgttccgagtattaagtggttcggttatttttagg

SEQ ID NO: 273595 - DNA, 122 bp, Homo sapiens
aggcagttcttttaggctttgacacgcagcgttattctacgggtgctcataggggtcacccggcgagtgcagttcatgcagctcctgtgtttccaacacactgtcaccgggacagcatgagc

SEQ ID NO: 273596 - DNA, 122 bp, Homo sapiens
ttctcgcgcaaatctgcagtgttcttgcagggctgctgatgggtggtcctgttcttttcgcggtcctgtttgcgcagagatgaaacggggaacttagcgtatccctaccgctctttttgatg

SEQ ID NO: 273597 - DNA, 122 bp, Homo sapiens
tgagcgaagccggagactctagtactgagggggcaagaacggggcacagacactacgtcacgccggcggaaagcgcgatggaggggaggtcccagcctctcccgagtctccgccctgcctcg

SEQ ID NO: 273598 - DNA, 122 bp, Homo sapiens
ggccaaagccgaggtgatttctgactgctcactggcgggcctcgcgtggctgaaggtctccgagcccctcggttcgccccggcaagccagaagtgcagctgtcgcggggcaggaagctaatc

SEQ ID NO: 273599 - DNA, 122 bp, Homo sapiens
cggcgggtcccaggctacggcggggatggcggtaaccctgcagcctgcgggccggcgacacgaacccccggccccgcagagacagagtgacccagcaacccagagcccatgagggacacccg

SEQ ID NO: 273600 - DNA, 122 bp, Homo sapiens
ctcgcctagcctcgggggaggaagactgagcccggcgcaggcggcgcggcgctcggggcccgtttcctccgcgcaatcagtcccctcgcgtcccggcgccttccccgcgatcgcgcgacccc

SEQ ID NO: 273601 - DNA, 122 bp, Homo sapiens
attttattagagatggggttttgccatgttggccaggctgatctcaaactcctgtttgcccgggagctggcataatttcaagtcatctgtgagacattcaaggggaatcttaagtaaataat

SEQ ID NO: 273602 - DNA, 122 bp, Homo sapiens
gcctgcctgcccagcccgcggaaccccggcggccccgcgagctaggatgaggggccaggccgccgccccgggccccgtctggatcctcgccccgctgctactgctgctgctgctgctgggac

SEQ ID NO: 273603 - DNA, 122 bp, Homo sapiens
acacacaccgtgcaccctcagtgcacaggctggctaacacacacgagccgctttccaaaccgaagtcattccagccccatgcctgtagctggcgccacatgaaaacaccactgtgttcttat

SEQ ID NO: 273604 - DNA, 122 bp, Homo sapiens
cgctgccttcctggggtgacgcagcagcaggaagagtttccggatcctggaatccgtgggcggcccgtgggaggggctgaggctcatttctctactcacctgtctccgaatccgtcgtggtg

SEQ ID NO: 273605 - DNA, 122 bp, Homo sapiens
actgatacatctctcttcactactttgtttgcgtttttataggtcagggtcttcctctgtcgcacaggctggagtgcagtggctcgatcacggctcacggaaacctccaatccctgggctca

SEQ ID NO: 273606 - DNA, 122 bp, Homo sapiens
ggccggccgggcagggacaggctgccccagacactaccgccttgtctccagcctgggaggcggccacacagccacactctgtccccgggtccggtctgagcggccacctgcctgccgggtgg

SEQ ID NO: 273607 - DNA, 122 bp, Homo sapiens
cgaggactgggttgctctcctcccttccccggtcccgcccccgtctgtctgtgtcgactgcggacgctatcgataaagttgctgttttgacaacatggcggcgcccatggtccgtggcccgg

SEQ ID NO: 273608 - DNA, 122 bp, Homo sapiens
ccccccagcggtgccaaggctttcctgccacaggaagtgggccttcctcccgcaggggcccgccctgcctggcgggggtgcccgaggggagccctgctacctttcttgccctcagaggccct

SEQ ID NO: 273609 - DNA, 122 bp, Homo sapiens
ctgctgaagttgtgaggctgctccaggcagagccatcatgtgagtcatatgaaagctccacgctgctgacctctggcaaaaagggagagaacaaggataggagaggcagtgggggaaaggtt

SEQ ID NO: 273610 - DNA, 122 bp, Homo sapiens
agggcctggggcgaggggaccctctgggatggggaggagccgggagggagccggcaccaacgttaagggggctggtgcacccaagcgcactggtgggtcccaagacaataggtcggtcagtt

SEQ ID NO: 273611 - DNA, 122 bp, Homo sapiens
tagcgtgcgatggcggcggtgggaacaggagctgtttaacacgtgatcgctgtgtgtgtgcgtgtttgtgtgtaggagtggtttgccttaaccacctatcactaggcttcacagatttggaa

SEQ ID NO: 273612 - DNA, 122 bp, Homo sapiens
gcggagcgcggcgctggttattggaagctggtggggctgcttgagtgcccgctgagcctccgccgcggggcttgaaaactccgcactccagaaagcttgaccgtacagccctgggggtgctc

SEQ ID NO: 273613 - DNA, 122 bp, Homo sapiens
gcaggatatgaattaccatgcactttattgcctcctcttggaaacatccttatgtcattgcgctatggccagagccctgaaggacatctgctctccttgggagctgctgagccagggtgccc

SEQ ID NO: 273614 - DNA, 122 bp, Homo sapiens
gcaggcactcgacaccctcgttgttggcctccagctcaacgtagaactcggagaagttggcgatggaggcgaacatgaccgccacacactcacaggactgatagtagagctcatcattgcgc

SEQ ID NO: 273615 - DNA, 122 bp, Homo sapiens
agttctgctgggctcgaatctcagctgtgctttttattaaccgtgggaccttgagctactcggctctcctttctgaatgacagtttcctcctctgtaaaacaggaatggttaattcaacgaa

SEQ ID NO: 273616 - DNA, 122 bp, Homo sapiens
tcacggcacgtgtgtgggtgtcttgattgacaccacacaactccctgcttttaaagggcacgatcccgtggtttttagtgtattccgagttgagcaaccgttatcacgattgacgcgagcat

SEQ ID NO: 273617 - DNA, 122 bp, Homo sapiens
gagcactccccgccccgtccccacttattccagccgcgctccccagtcgcctccccgcaccgctgtggccagtccagtttgtctcccccgttcaggccgccagccccacattctgggttggt

SEQ ID NO: 273618 - DNA, 122 bp, Homo sapiens
tctgcctttgatgtggctgttggtgcagggcctgtggtgccttccgcagcggaaatggcgcgccgcccggggagggcgggagcagcgtcccgggtgcccctgtgaggatgagcgacgagatg

SEQ ID NO: 273619 - DNA, 122 bp, Homo sapiens
gggcgcccagcgggatgcggtgaagggcgagcggcgcggcggctgcgatgagtgcctctgcggccaccggggtcttcgtgctgtccctctcggccatcccggtcacctatgtcttcaaccac

SEQ ID NO: 273620 - DNA, 122 bp, Homo sapiens
tccccatgccaacaataatctgaggagcaggatgagctgggactgagacttcgggagccccgtcagcctcctcgtcacggctccgacatccaccaaagtcctggcagctgctgggctccaga

SEQ ID NO: 273621 - DNA, 122 bp, Homo sapiens
cttggagggtgggttgagctgtttctcatcgtctcagtggcatttttcctagggctgttccgagagaacagcggggattgaagggacggaggcaaggagatgcacaatccgggcagctctcg

SEQ ID NO: 273622 - DNA, 122 bp, Homo sapiens
acagctgccctgctccacgcagatgtagatgtcagcccccgcctggtgcacttctctgctcgccggggaccccatcactatgagctgagctccgtccaggtggacaccttccgagccaacct

SEQ ID NO: 273623 - DNA, 122 bp, Homo sapiens
atttaggagttcagaaatggcctatcatatattcagacactaaaagaaccaatgagaaaccgaaactcagccagcctcatttgcatatacacgaggtaaataatgagggcgtttgggctcac

SEQ ID NO: 273624 - DNA, 122 bp, Homo sapiens
acagctaacatgaattgcacttcactgcagctttagagatcggtttaggctgagacattgcgcctgccttaggttgctgacttctttatttcagagctctggagacacctagtttgaaaaat

SEQ ID NO: 273625 - DNA, 122 bp, Homo sapiens
agcaatgatcaacataggcagaggctctaacagatgccaggagccagctaggcatttgtccggctatcttatgataatattatagggagggaggtgctcccataccccaagtgggaagagtg

SEQ ID NO: 273626 - DNA, 122 bp, Homo sapiens
ctcaaccactcccaggtgcgcgccgtcctcagcgcgcggggcctcgcccatgggccgggacgcaagcggaggctgcccctaacggccgcttgtattgaaggtttatgccgtgaagactgtgc

SEQ ID NO: 273627 - DNA, 122 bp, Homo sapiens
gctattattattaataactaagggaagcccagggaaaactcagcagaaatcaaggactctcgtgagaaaaaaggaaccgaaatagcccagactggcgctccccggactctgcagcgggcggc

SEQ ID NO: 273628 - DNA, 122 bp, Homo sapiens
tccagctctgggggcggctgcagctctgggggaggtggctgctgcctgagccaccacaggcgccacaggtcccaccgtcacagactccagagctctggctgctgcagccagccctcgggagg

SEQ ID NO: 273629 - DNA, 122 bp, Homo sapiens
taggaaactagaaataacatgtcttccccaagtcacttctaacaaatatcccatggttatcgtcagtcctgccatctttccactattctgcttccaactcctttctttctttgacttccact

SEQ ID NO: 273630 - DNA, 122 bp, Homo sapiens
ggttggcagacaacacactagcattttcacgggtgtgggcacatgggtgtggcacctggacgtgtgcagcatgtggcggtctgtgtgaagccaccgtgcttctctttggggggccgcgagat

SEQ ID NO: 273631 - DNA, 122 bp, Homo sapiens
gaaagtcggcgctggaacgcagtagctcctctggcggcagcagcactgtgagcaccagcacgccgcgggccagcagggccggcacctcgctggcacaatccagcccatcccagccgcactcc

SEQ ID NO: 273632 - DNA, 122 bp, Homo sapiens
tgggtgtgtgaatactgtattctgttacgcagtgctgcacctgtgccgccatgcctgtgccgtcggcaaatgttactccaccatgtgctccatacataaccatctcaggttattggaaaaat

SEQ ID NO: 273633 - DNA, 122 bp, Homo sapiens
gggagcgcaaagccaccagcgcggcggagctggtgcgcctccggcccgcctctccggtaacgggtcgcgccgcactgagtccttgcagcaaacctgccgaatcccgcccgtggacctctaaa

SEQ ID NO: 273634 - DNA, 122 bp, Homo sapiens
tgtgctaccgggtgctctataggcagcttgtgttaaccagctcagtcagactctctacctcgtcacaaggacagagggctttctgtatcccaggttcttgccctggtgtacgggaagaatcg

SEQ ID NO: 273635 - DNA, 122 bp, Homo sapiens
tgtaaaagctcccaccagatataaaaactcattataatggcatgcgttccgtcacaacttcggacagaagttgggtctttgggcaggaagtggaagccatagaggaagtcatggagcgagag

SEQ ID NO: 273636 - DNA, 122 bp, Homo sapiens
gagctcaacagggacctaattaactgacagttggtctgattgccaagctgaggggcggggcggggaggggggcggtcagttgctgcttggctcacgtagcaaggagggcaacttttcatttc

SEQ ID NO: 273637 - DNA, 122 bp, Homo sapiens
aggaagagggcacgcaggcggggtgtgctgaggaaggcctcggggcccacgtggccgatgcggttgccctcgaggtgcagctcctctagggcctcaggcaggtccgggggcacaaaggacag

SEQ ID NO: 273638 - DNA, 122 bp, Homo sapiens
tcgcttcccggtgcttaaatgtctgctgcttttttctcggttttggatctcactcacttccggcctccctcagtttccctccaaggaatgaataacctctagggtcgccagctgtgagggga

SEQ ID NO: 273639 - DNA, 122 bp, Homo sapiens
acttgtgaggtaggaggatcccttgagcccaggagttgaaggctgtagggagctatgatccgggcactgcactacagcctgtgccacagaagtgagaccctgactctatttaaaaaaataaa

SEQ ID NO: 273640 - DNA, 122 bp, Homo sapiens
gaggtggatgtggagactaacaaggcgataaatgttaaaggtattcgagagagagaagcccgtgataatgaatgactacgatttttaagcccacagccaggttattcccagaagttggccct

SEQ ID NO: 273641 - DNA, 122 bp, Homo sapiens
caatagatctcattgttctgccaatgtattattcatcagggtcacatggtcaggccagaccgagcttacaaggcagctggaaactctgcccaattcaattatctgtttcaccacagctacaa

SEQ ID NO: 273642 - DNA, 122 bp, Homo sapiens
tatcacccctctgggctcccgaagaccggctggctggaggctggagatagtctcaatgctcgaaatgccgtaaccgaagctccccgcggcgccggcactgggatccagggagctgctgctac

SEQ ID NO: 273643 - DNA, 122 bp, Homo sapiens
gcccgacgggggcctggggcgagctagtctgcagaggggctgcaggcgaccgggccggggcggggaacgggatccgggagaggcagacgaacctggggcgcgccgcctccctcccacccgct

SEQ ID NO: 273644 - DNA, 122 bp, Homo sapiens
atgtgttcatggtcacgagcttcacagcctgggcagggagggtgctgactgtgaccctgccggaggccttaaggtggccagtcctcctctcaggagggctgcctccattcaacggctgtagc

SEQ ID NO: 273645 - DNA, 122 bp, Homo sapiens
ctcaccccaaggctttcaaaggcctcattgtgactctggctctactttccaggaaatggccgggacacaaaggggcttctctgttccagcgcttgagggctctgattcccccagggtggtgg

SEQ ID NO: 273646 - DNA, 122 bp, Homo sapiens
ctcgggtctctgaggacatctgggctgtggggaatcctggtgcgaagccggcccagtactcgcggagtaacctggcagcctctggagggtgtggagggcccggggccctgggttccgaagac

SEQ ID NO: 273647 - DNA, 122 bp, Homo sapiens
ttaggcttcatggtggtattaaaagatgatatgtacacacagctcctggggtgcaggcggcgcttttagagctacctttcataagataagattttaagttcaggaaactgtagtttgtttcc

SEQ ID NO: 273648 - DNA, 122 bp, Homo sapiens
ccattctgtttccacttttggaggttgtgaatagtgccgttgtgaatgtgtctgtccaagcgtttgcttaaacacttgttttagtttctcttgagtctgtctaggagtgggattgctgggtc

SEQ ID NO: 273649 - DNA, 122 bp, Homo sapiens
taccgtcgcccctcccggccgagggaagggtcctggaaagcgcgaagggcggccaaagcccggattagggccaagggccgcatctcgccgccaccgtgggaaactatctttgagaggaggga

SEQ ID NO: 273650 - DNA, 122 bp, Homo sapiens
tcccctctctcccgggggctggagtaaggcgggtggtccataagtcatgaagaagggggtcgcactcgtgttgttactgaactcccgctgccctctcaggacgcaggttagcccttggctct

SEQ ID NO: 273651 - DNA, 122 bp, Homo sapiens
atggaggcggggtagaggcggaaacacaacctgcagggccagagcgaggcgcgagaaggacggcggcgtgagggggcggggcgcgcagcgcgagaaggcaggcacgaggggcgagcgcgagg

SEQ ID NO: 273652 - DNA, 122 bp, Homo sapiens
gggaccaagcgcttggaactagctgggtttgggcagaaacaagaaggcaaatgacgggaccgccgccggagtccggacttccatccctggagttcactgtctctcccagggaacagaggagt

SEQ ID NO: 273653 - DNA, 122 bp, Homo sapiens
ccaggcgcttggggaacacgcgagtggtaggttttggggctccctaaggccccttggtgccgctgctgggaaggcggaggctcaggagggcaggcaaccacagggttagtccagacccacag

SEQ ID NO: 273654 - DNA, 122 bp, Homo sapiens
ttggcagagacaattcttgactctgtcttcattctcagctctttggatcagtctcagcctcgagggcaactttatttgtctttcccactccttcaaaatgaggaacccatttacgagaaatg

SEQ ID NO: 273655 - DNA, 122 bp, Homo sapiens
tcgtgcggaagcgtggctgaggaggggcttgacaggctcttcgtcactgtgcggagccttcgaaggacttggatgtgcttgagaccccttcccctaattgctgtgtagggcaggggtggaca

SEQ ID NO: 273656 - DNA, 122 bp, Homo sapiens
agctcctcccccagacggggttttgggggacgctttgttccagtatcatccatagcactccgggcttctgagatggagacacggagaggaaacggctgagctgtttctggaagactgggtga

SEQ ID NO: 273657 - DNA, 122 bp, Homo sapiens
aggtttcgccttgttggctaggctggtctcaaactcctgacctcgagtgattgatccgcacgcctcgggcacccaaagtcatgggattacaagcgtgagccaccacacccggcctccttcag

SEQ ID NO: 273658 - DNA, 122 bp, Homo sapiens
atactcgtcatcgctgttagactcggggttgatacccgtcatcactgttagactcggggtcgatacccatcatcactcttagactcggggttgatactcatcatcactgttacactcagggc

SEQ ID NO: 273659 - DNA, 122 bp, Homo sapiens
tatctagttaccagttgcatctggctcagcctctgtgagctggtctgggagagagggtggcggtcaaaagtgagtaaaagtggaaagagcagtttccttaaagactctgttgagggcagtgt

SEQ ID NO: 273660 - DNA, 122 bp, Homo sapiens
cacgtattcgggcgcgaagggtggggcactgacgccagacgtcgccccgccctctgtggtcgctccgcccccggccccactccaccttcctcccaccccgggaacccggaagtggaggagga

SEQ ID NO: 273661 - DNA, 122 bp, Homo sapiens
ataaaaagatatctgatataccagattaagctgttccatccactaagatttgccactggacgcaacatctatttttattcccttaccatcctaccatcgcaacaaacacgcacagacgctgc

SEQ ID NO: 273662 - DNA, 122 bp, Homo sapiens
ctctttgtcttgtgtctttatttattacaatctctcctctccacacacggggagaacacccgctaagccctgtagggctggaccctacagctggtaataggatttgatctatattttgagac

SEQ ID NO: 273663 - DNA, 122 bp, Homo sapiens
gtgccccagccccctgggtttgactattacctgccacacatctttatagaagggtggctccgccgccgctgccgccgccagcgcggccggctctccgtccggctgcgcgccgagcgtgccgc

SEQ ID NO: 273664 - DNA, 122 bp, Homo sapiens
aacacttcggcactataaagggaaaaatgacagtgccatattcttctgtgaagtgtgagtcggttttcttcaagagtcttcccaaagaaggccttgtgggttgtggctaactcagttttcca

SEQ ID NO: 273665 - DNA, 122 bp, Homo sapiens
ttagaggcaagcctcgaaccggagctccgggatgcatgccaatctccggttgcgcctgcgcgtcgggctcccgtggggtccacgcatttcctacccggcccccgcgaacaggcgtaaagctc

SEQ ID NO: 273666 - DNA, 122 bp, Homo sapiens
gtaggtatatgtagatagatgtgcatgtatgtgtttgtatatataattttataagtttcacgcataaattaatacatgcctgtgtgcatacatatgtatgggatatatttgtatatatatgt

SEQ ID NO: 273667 - DNA, 122 bp, Homo sapiens
ggcgctgcccactgggtacggatcaacaacaagatggcggctagccgagggggcgggggccgggcgtcatagtaaccaggactgcaaagaacccgcccccgagggggtgctatccccaatca

SEQ ID NO: 273668 - DNA, 122 bp, Homo sapiens
cactgctccttagttcaggccgggtgaagggcggtgctggcagaacacggcacctgcggacgcctctgcatggccaccggccctcagtcgaggaacttgggtgagccacgccaggggcacac

SEQ ID NO: 273669 - DNA, 122 bp, Homo sapiens
gtgggttctgctacataaggcgggggcgcggcctgcgctgcgtaatgcaacttttgggggcgaggagcggtttccgattgctccggggcggctgggaacgaggcgagctttgtgacgtcagc

SEQ ID NO: 273670 - DNA, 122 bp, Homo sapiens
atatagaaacagtctctctacctcgtctgactttttccatggtccagttgctgaggtattcggggaggatctttcccatatttcctttctcggggaagagttgaatcacttctgtgcccaag

SEQ ID NO: 273671 - DNA, 122 bp, Homo sapiens
tgatcttgtgatctgcctgcctcctaaagtgctgggattacaggtgtgagccaccgcacccggcccaatttatcattttaagaccaacaatgggccaggtgtaatggctcatgcctgtaatc

SEQ ID NO: 273672 - DNA, 122 bp, Homo sapiens
cagccttcgccggcagggacgcgcgggacaaccgcgcaggcggctctgcaggggtgggcgcgccatcacccctctcggtccctgcctgcttggcgctttccgagccccagccgcgctcaggc

SEQ ID NO: 273673 - DNA, 122 bp, Homo sapiens
cgtactcgcgcttcatgtccgtgcatgcctcccccacactgttcatggcgacagtggtggcggcggcgacgacggcgcactctgatgtcatcactctcaggcgcgtcgctcggcgttacgcg

SEQ ID NO: 273674 - DNA, 122 bp, Homo sapiens
ggggccgggagtccgcagccccgaagacctacgctgccgccagccacacccctgggggtccgaccctcctgggtcccactttacagatggaggaactgaggcggtgactctaatcttcgccc

SEQ ID NO: 273675 - DNA, 122 bp, Homo sapiens
acgcctggcaggagctatataaggcggcgtgaggcaggcgaggggggcagcgcagccgagcggagcccaggagagcagagagcgagcctgagcgagagacggggaagcacggaggaggaagc

SEQ ID NO: 273676 - DNA, 122 bp, Homo sapiens
ggaggctgtgcctgcctttcctgctttttataaaaggtgtctcctgcacggggatagccccgaattgtcccaggaggtggtttgtggattaggagttattaggcccaagggggctgcagaca

SEQ ID NO: 273677 - DNA, 122 bp, Homo sapiens
ctctaggccctgcccacctctcgggatgtccgtgtgaccacctcctgtctcgtgacaacccggggttgggtcagttaccctcctggatgaactgatgctcaggccctgcagcaggtggactg

SEQ ID NO: 273678 - DNA, 122 bp, Homo sapiens
tacttggaagcttggagaaagtgattcagggctcttacccgcagtgggcaggactgctgacggctcccagctggattttcctgcaactgccctcaatgaagcaagctgttccacccaaggtt

SEQ ID NO: 273679 - DNA, 122 bp, Homo sapiens
accctttctgagccagtgcagtccgcatcacctgtttaaagtcctccaatagcttcttagcgcacttggaataaatgtgaagttcctaggagggtctgcgagtccctacatactttggattc

SEQ ID NO: 273680 - DNA, 122 bp, Homo sapiens
cactgtccatggcacaggaggtggccctggtgctcaggcctccaggctggggtcatcaggcggcaagtacatgggctcgatgtgggcccacccacgggcctgctcatcggcccaggcgagca

SEQ ID NO: 273681 - DNA, 122 bp, Homo sapiens
atgccctaacgcagcgttatcttcagagctaccaccagcttccgaaacctttcggaggagcgcttcgccaccacctgcacggcgaagcggcgcgtaaacgaacctcgaacgccagcctttgc

SEQ ID NO: 273682 - DNA, 122 bp, Homo sapiens
tgctgtggctgcctggggctggggccaggcactactgtcctgtggtctgaccctctaccccgcttcagggcccatttatctccctcagccccctggggtgggagctggtacatgcttcctgg

SEQ ID NO: 273683 - DNA, 122 bp, Homo sapiens
tgaagccgaaagccgaggcggggccagcaggcctcccgggcacagagccacagagcccagcgtcacacgcaccgtgcacgcaagacagacgtgcacgagactgacgcacacacggccggagg

SEQ ID NO: 273684 - DNA, 122 bp, Homo sapiens
gcggccagcatatccaaaggccccaggaggacctggggtggctggaacaggacctggtgccgggagcaggcggggccggggattcccgacaaaggcttgatgtgtacttgaagtgagcaaag

SEQ ID NO: 273685 - DNA, 122 bp, Homo sapiens
ggggatctactccaagcccagggcaagaccccacacccactccctctgtccttcagttcccgtatgtgtcttagactccctggccctgcaaaggcaaggagtgacctgaagtccagagcctc

SEQ ID NO: 273686 - DNA, 122 bp, Homo sapiens
acgggaggagggtggcgtggtagctggctgcgcggggcctggtgacgggaggggccggaccgcatgcagcattcaggaccagcgtggccctgggtgttcgcctgttctgaccgtgtggtcga

SEQ ID NO: 273687 - DNA, 122 bp, Homo sapiens
ttttggttttgggaaagggctctcccatccatccaggtgctcaggccagagacctggaagcgcacgtgacaactctctcctttgctcatccctcatgtccaattcatcagcaaatcctgttg

SEQ ID NO: 273688 - DNA, 122 bp, Homo sapiens
aggggctcggggcccgccgggccgcggggtcgggggagggggtgcaggctcgcggggcgccgcagcttggcgcccacagacgtgcggcttgggtgcaaatcctgtttctctgggcagaggcc

SEQ ID NO: 273689 - DNA, 122 bp, Homo sapiens
ccgccatccctttgtttctgagctagactaaaccccaactggctctagatctcacccaatcgtttaatcgggactgctttcccatggagggaggtgcttttggatgtccactctctgtccct

SEQ ID NO: 273690 - DNA, 122 bp, Homo sapiens
cacagacctagtcacttcctcagaactcctgaaaccgggaaaattgcagagcagtggcaacgtggtaaagcagaaaccgagctatgttaacttgtacagcatttcacatgaacattccaagg

SEQ ID NO: 273691 - DNA, 122 bp, Homo sapiens
cagaaaaaactgtcttttttaaagctcattcagccgggtgcaaaccgccttgctggcgggcggcacctgaaggtgacctggccttgtccccccctccatccccccagtttcctctctgtggt

SEQ ID NO: 273692 - DNA, 122 bp, Homo sapiens
tgtcttggttctggtcttttgtttttacaggtttaaaggaatctcatgatattacatacacgggaaagtatcacttgtgactgtttgcactaggtgcaaaagacagatagttttctgggcat

SEQ ID NO: 273693 - DNA, 122 bp, Homo sapiens
aaacagcaccaaagcaggttctacaacagcttcccggagcaactaggccaggggatgcgacgccgcgcatctccccccgtcacaccaggggcccgcggaggtctggtggggacgcggagctc

SEQ ID NO: 273694 - DNA, 122 bp, Homo sapiens
tctcggccgccctcccggtttaccgccccctgtgtccagagtaagaaaaggctagggttgcgcttccctcccaagttgactaggggtgggcgcgagtaaaatcatgacatattcgaattcca

SEQ ID NO: 273695 - DNA, 122 bp, Homo sapiens
tgaatttccgtttccggcggtgtggaagcggacctgaggagtcgcaattgtgaacaggttcggtgctgcggctggggtaggcggcagtggggtccctggctctggggcactgggaagatcgc

SEQ ID NO: 273696 - DNA, 122 bp, Homo sapiens
gctgtgcttccagtcccttccctggctcagggctggctggaaagacagagacgtttcatgcggggctccgcagatggcaggcgttccacacccattccctcacttctctggaaatagccccg

SEQ ID NO: 273697 - DNA, 122 bp, Homo sapiens
caggtgccagggccctcggattcaggcctctctcctcactggggtcagcaagcgttgccgcggtacatggctggaaggacaagtgccacgttggtgcatgtggacacattcgtggtgggagg

SEQ ID NO: 273698 - DNA, 122 bp, Homo sapiens
gagccacctcctctgctcccactgcccctcttcttcctcctcggcctgctgcaagcctcacgtctgagctgtttcctgagtcacacaatgtcctggacaccctagtaatggggggcggagga

SEQ ID NO: 273699 - DNA, 122 bp, Homo sapiens
ggcggggccagaactggcggcaggcggctggcccgcccggggatggggcagaagctggggcggctgagagcgcagcgcgggctcccgggagacgccggcccactgcccgcccgctcgccgca

SEQ ID NO: 273700 - DNA, 122 bp, Homo sapiens
cacactgacgtcagtctgcagatgtgcctgggctgcgtcgggtgcgcatgtgtcctgggtcgtcacgtggagggggaggggaggtagaggtacaatcggggtaaccaactaccagccattca

SEQ ID NO: 273701 - DNA, 122 bp, Homo sapiens
taatggagttaataaaactatggcacattgggaatcaggggcagaggtactgttcccagacggaaaactgggataaagggagccatgctgacagggccttattccagtctaggttgttagaa

SEQ ID NO: 273702 - DNA, 122 bp, Homo sapiens
cactaaacccccgctcctgagtcctgggaacaccagagcaccgggcagagaatccccgggcgatgccaacaggaagccagagtgaccagtcccttccgccaacccagtgtgtgtgtgtgtgt

SEQ ID NO: 273703 - DNA, 122 bp, Homo sapiens
gaaaaaaatgaattggtatggtccctgaattcactgaatttataatttttaggaaagtatcggctataaaaagaaaacatcctatgcttaactagagttcatatgtgtactattaagaaatg

SEQ ID NO: 273704 - DNA, 122 bp, Homo sapiens
ctccaggcgcaggccgagtaggagctgggcgggcagcggcgtcgggcaggcccttccagccgggctgacaggccgctctgacccagccatctgactccgcttgcgtcctggcagcgcggacc

SEQ ID NO: 273705 - DNA, 122 bp, Homo sapiens
ttgttttgctaatgatcctctctttaaccatctggaatgcaacccattcaacctgaagctcgtgttaactccaaagcttgcaaaatatattttgaagagtttcacaaaacatagactattgt

SEQ ID NO: 273706 - DNA, 122 bp, Homo sapiens
cattcagaagtggaagccagccacagcctgggactgaagaggttaatgtgcatctgcctccgaatgttaatgtgtctaggtgatgtcagtgggagccatgaagaagggagtggggagggcag

SEQ ID NO: 273707 - DNA, 122 bp, Homo sapiens
aatctaaagcaacagcccatggtatattgtaggtggtgtttacttaccaataataggtaacggtgatgccaactaatacatgagggatgatcaatcagaccaattgagcatatacattaaat

SEQ ID NO: 273708 - DNA, 122 bp, Homo sapiens
acaggccacagaataatttgatttgggctttctacggagtgcgcgccgtctctgagctttcgtgatttcatcttccggaaggcgaaaatcatccctctgctgaattgggttttgatttgctg

SEQ ID NO: 273709 - DNA, 122 bp, Homo sapiens
ctttgtttgctgtgattcctggtggaagaatgctggttctagctttggctctgccatccccgtgtagtgtggcaggaagcaatgcatttccctttctgggcctcgtctcctgccctgtgcac

SEQ ID NO: 273710 - DNA, 122 bp, Homo sapiens
ggttgcttgtgacttcctggcctcccattaaaatgagctagagagagactttcaggcaagcgtaaagaaatcctggaaacatggctcctatcctgtggattcagctttacggggatcttcgc

SEQ ID NO: 273711 - DNA, 122 bp, Homo sapiens
cggtggctatggaggcggcggcggttgatggttgaccgttggctccggggtgggggtcgccgttcgagtgatctgctcagacccgaccagagggcgcgggctgctgatgcttggcttggagc

SEQ ID NO: 273712 - DNA, 122 bp, Homo sapiens
cccagcgagtggggacgcgccccgaaccaggcagcaccttcgtaagtaggggtagcgccccgggggaacgcggcccccagtcacaagccctgcctcaactccgggccaggttgaacctgggc

SEQ ID NO: 273713 - DNA, 122 bp, Homo sapiens
actcaggttcagggcccgagattgccggggtgtctggggtggacgacctgcccccacctccgctgagctgtaacatgtggacttcagtgtcgccgtacaccagctatagcgtgcagacgatg

SEQ ID NO: 273714 - DNA, 122 bp, Homo sapiens
aagcaaccctttgctctgaaaggcgccaactcccggatgttggcaagctctgctccacagcgcctgtttctgagtatgtttacttgctctccctcttctctccctcccctttaaggatggcg

SEQ ID NO: 273715 - DNA, 122 bp, Homo sapiens
cgccagtggtcactgttaatgagcaggaggggtggcggttgcaagggcgtccagctccaccggcctccagacccgcgcgtgcagcctgggccccgcaccagcaagatccggttccgtccaag

SEQ ID NO: 273716 - DNA, 122 bp, Homo sapiens
agagtccgcgccgccatccctggcgggaaccagggaccgaggactgtgcggggacggggacgtggacgggctccgcgccggtgatgggggaggggttccgaacgcccgcggattgtgggagg

SEQ ID NO: 273717 - DNA, 122 bp, Homo sapiens
aagcttacatagccattggatggaattggatgagccattggatgattcccaaggtcagcccgaaagattttgactgggatgctagagacattttcctattttcctaagaaacagtatggttt

SEQ ID NO: 273718 - DNA, 122 bp, Homo sapiens
gggtcattctaggatttatttttgaagacctagcctggagcttgctcctacctaaaatgtcgtaaatttctaatcccgtgcattaaatacctttgcttaaaatatctagtttatgtttctgc

SEQ ID NO: 273719 - DNA, 122 bp, Homo sapiens
aggcccgccctccctgccttggcccttccctcttactatttttattttgagcgagagtctcgctgtgtcacccaggctggtctcgaactccccctcccaaagtgctgggatcacaggcgtga

SEQ ID NO: 273720 - DNA, 122 bp, Homo sapiens
ttgggttcctgaaatgaattctctcagacagtagacaaatgactcaccaactttggccatcgaggcgggctgagtcatctaaagtcagctgaatcacctgctttcagctctgttttataaga

SEQ ID NO: 273721 - DNA, 122 bp, Homo sapiens
attgttttaacttaaaatgaacaaaaatacatttaatttattctatatatatttattgagcgcctactgtgtaataggtaatataaacttctgggctttgtatcatatttctatatttccta

SEQ ID NO: 273722 - DNA, 122 bp, Homo sapiens
aaccagtagtagtaccacatgggttctccgggggtgaagtcatagattttatgcagtccccgtatcagattattttcttagtgtaactggtgcactgtgtcttcacaaaatctggtggttcc

SEQ ID NO: 273723 - DNA, 122 bp, Homo sapiens
caatttctgtaattctgttatttcacaattgttaattgatagaacaatgaagtatgtcaccggagagttttaatcagagcaaacaataatatgaataatatattgtggtaaattctatagtg

SEQ ID NO: 273724 - DNA, 122 bp, Homo sapiens
atgggcttgttttgcagtgctgtcgagcatgtgtgagtgaggtgtgagttagcttctgcacgtgagagcccagagttgtcttcctgtgtgtatttattcacggtactgaaacattcgaagga

SEQ ID NO: 273725 - DNA, 122 bp, Homo sapiens
tcagtctggctctgcggggcctgatacccagggcttcagctgtcactcagatgtggggggcgggacctagtatttcatccaatcagaggtgctggggcgtggcactgcccacagttcatccg

SEQ ID NO: 273726 - DNA, 122 bp, Homo sapiens
agtttggttgctggttaattctggattgtgaatctccatgtatctttgggacctgtcagccgtggcagtctcccttcctagccatggaagagcatatccttgtttattggcaaagctgtcac

SEQ ID NO: 273727 - DNA, 122 bp, Homo sapiens
gccctttaaacaatctttctgcttgtgctcacctttaacttcccctcaagggttcgagaacgcttgaagcctgagttcttggtctcagccttgatggcactgatggctcctgacttcaccag

SEQ ID NO: 273728 - DNA, 122 bp, Homo sapiens
gggcccgggcgtgggagtggggtgggggcagcccggttggcactgaccgtctatgatcagcgaagccctctgggtgggtttcttcccagacttgatgcggttctcattgattgcattttcaa

SEQ ID NO: 273729 - DNA, 122 bp, Homo sapiens
aacagctgggaccgcttatggtggtggcagagcaggaacagaatccagctcacccagccccgaagtcgctccctccttcgttctctgcctgaagctggctttgacaatgagctgcagcggcg

SEQ ID NO: 273730 - DNA, 122 bp, Homo sapiens
ctggtccaaaattacatgtttatcagcagtgattaatatacaagcacatcaacagacacacgcatagcacacacatgagcatgcacacgtgtgcgcactccctacacatctacgcatgcaca

SEQ ID NO: 273731 - DNA, 122 bp, Homo sapiens
gggtgaggctgctggcctcttggtgcctccatggggacgggtctagacctgcctcagaggcggctacagggatgggagggatcctccacgagaagtgcttggagggttccctggacccagca

SEQ ID NO: 273732 - DNA, 122 bp, Homo sapiens
tcccgcactgccgagaccacacagtctcctctcttaggagccttgacatggccctcttgacgggtggttgggggaccagggtgtgtgtatatgggggacagttggtcaaaagtggctttttg

SEQ ID NO: 273733 - DNA, 122 bp, Homo sapiens
agcccttcagcccaccgctgcattgtgggagcccctttctgggctggccgaggccggagtcggctccctcagcatgcagggaggtgtggagggagaagtacgggagggaacccgggctgcgc

SEQ ID NO: 273734 - DNA, 122 bp, Homo sapiens
ttatgttgagagtggccgataacaataaatcaacaaagaaaattaagctctctgagggatcgagggacgtatggtgttaacatcagctagtgcatctgcatagaagcagcacggggcggggg

SEQ ID NO: 273735 - DNA, 122 bp, Homo sapiens
ttctgagaatgcacccggaatgggggaaacccagcaagcagcagagagaaaggctcttcccgggagacctgccgcctctagggtggtcagagaatagcagctgggattttggagagggagag

SEQ ID NO: 273736 - DNA, 122 bp, Homo sapiens
tcgggtcccccaccgtgtctctagaaggaccgaagctacgggagaggcgaggctcccgggcggtgggagtcggccaacttccatcattagctgaggacctgtcacagccggggactgggctg

SEQ ID NO: 273737 - DNA, 122 bp, Homo sapiens
aggagttgtgagaatgccctgcctcgctgggaactgatgggggcttttctggccatgggacgtgcaccatggggcttgggcgatggccccagcggctgcaagaggggtgtgtctctgtgtgt

SEQ ID NO: 273738 - DNA, 122 bp, Homo sapiens
cctccaagaataggtcaagattctctgggctctgggagcctcatagcaagatggcggaggcgggggagggggagttgtatgaaatgatctggaagctttcttccaggtcaaaaatgccacat

SEQ ID NO: 273739 - DNA, 122 bp, Homo sapiens
tttctcggcggcttcttgaggatgaggcatttctaggttttctcctcctcgagcaaatcacggtctgcgccttccgcggctctgggaacaggtgagccgtgcggcggcgcccgcgggacgcg

SEQ ID NO: 273740 - DNA, 122 bp, Homo sapiens
ttgtggaataaatgaagggagacatttctcctgtgattcatggaccataagtcaccaccacgattcagtgtctattgcttttggctacacactaaagtcactggtatgcctgatagcttcac

SEQ ID NO: 273741 - DNA, 122 bp, Homo sapiens
cgccgccatcttccgttcgtcgccgggaacggtgcgcacgcgccacacacccagggccgccgggaaatggagtccagagcacagcccgaccccgcccatgcctcgtcccgtgcgagcggcat

SEQ ID NO: 273742 - DNA, 122 bp, Homo sapiens
gatttctctggctctgctcccttccactccaatgcaatcattgcttctttcctagactctcgtcctggccttgcttctatccttactcctcctagatttactctgcattatcaaccagagtg

SEQ ID NO: 273743 - DNA, 122 bp, Homo sapiens
cctgacgaagcaggatgcgaaaaaaaggccccaacgcagcctatttatagggtgggactgcgccgtgattggtgcccgtcagtgcccgcccctcgcgccctagcgccccctgcgcgctgccg

SEQ ID NO: 273744 - DNA, 122 bp, Homo sapiens
cttgctgttgttggtgaactttcactagtatactttaacacaagcacagcaacagtgagacgctgtctctacaaacacacacacacaaaaaaacacacaaacagaacatgataaatgggtgt

SEQ ID NO: 273745 - DNA, 122 bp, Homo sapiens
tcaaatccaaaacacagtttttacggatagggaaactgagggccaaggaggggcagggctcgccgagtttcgcctcctctgaccgcgtagaatggttgcactaaagcagattcctcgtgctg

SEQ ID NO: 273746 - DNA, 122 bp, Homo sapiens
gaatcctacggggggaagcaggggagtcgggaggaagccgaaggaacctggccctcaaagcgactgtgccacagccaagaaaactgggagcttctgcaaatcgttcttcttgccctcagatt

SEQ ID NO: 273747 - DNA, 122 bp, Homo sapiens
gtggggagcgctgtgcctgctctcctgccagcgcgcccagctgtcccggccgccgccacgcgggactgcctgccatgtcgccaccggctgctgacctcattaggcctcatgtcatggaggag

SEQ ID NO: 273748 - DNA, 122 bp, Homo sapiens
agagcgatttgacggcagagatgagcccatgaccaaagctctgcttgcctcttagaaaagcggttacaatgaaaaagagggagctgatgggctcatccctgagatcaccccaaggcccctac

SEQ ID NO: 273749 - DNA, 122 bp, Homo sapiens
agatgctgctggctggtggaggaaccctggaaatgcccactgcgggatacactgtggcctcgggactgtgatacaccgcggcctccggacagcgaaacaccgcggccccgggactgcgaaac

SEQ ID NO: 273750 - DNA, 122 bp, Homo sapiens
gactgcttttatctaaatagttccttactgaggaaggaccagctaatttcctagcatggacgagatgatccctacaggatctttaagagctgttatcttatgagcttcaaaaaagccaatat

SEQ ID NO: 273751 - DNA, 122 bp, Homo sapiens
atctaagtggatgctaaggaacatccccaggatgctacaaagagttttcctttgttaagacgtcttttacaaactagctcggtgtcatgagcactgtggtgaggcacagaaagtaaaaacaa

SEQ ID NO: 273752 - DNA, 122 bp, Homo sapiens
attatgttacttttcttgcctagattttttttttattctaccaagtgtcatttgacctttcgtcttatagctatttctagtgttggctcatttggagatggggtgtgtgtgtttgtgtgttg

SEQ ID NO: 273753 - DNA, 122 bp, Homo sapiens
gttaccctgaagcctaaccatatggaaagcacatggcctgctgactctaggtgcagggggcgctttagaaaaccaggcgagaagctggcaagaaaaggaacaaaagagaaatcttttccttc

SEQ ID NO: 273754 - DNA, 122 bp, Homo sapiens
ccctgtgggaatctgctgggggccaagtggcctggagtcctcaggctcccgcagctgctccggagggagaggtgagctcagggcagcctgcctgcagccagaggtgccgggagccccgggcc

SEQ ID NO: 273755 - DNA, 122 bp, Homo sapiens
ggaagcaggcggggcgcggagaggaggtagaaacgcggagctccttcgcaaagagggcggcggcgccgcgtctgccttggactcgccccttcagggacaaagtgactcgcccgtcccgctgt

SEQ ID NO: 273756 - DNA, 122 bp, Homo sapiens
ttgaacttcctcagaaaagccaagccagggtttattttcatagttcatacaagtacttcacgtggttaaagaagcccatcccggctgtgagaatagcgtgcagtagctcgcgcgttaagaac

SEQ ID NO: 273757 - DNA, 122 bp, Homo sapiens
tgccatgagccccatggagaccacccacccggcaggggccagctccaggtgctgctgctgcggcgaggccgtcaccaccatccacgcgtccagcaggaagagcggattcctcgggcgtgagg

SEQ ID NO: 273758 - DNA, 122 bp, Homo sapiens
agcggcgctgtgcttgccgtggatccaggacaccttaggcttggtggcggggtcaggtggcggcggtttcctgcgctcgggcgatggcgacagcgacaggcccccaatctcgccccgggccc

SEQ ID NO: 273759 - DNA, 122 bp, Homo sapiens
gctatgcactgggcattgtgctaaacagtttatacgaattgtattcttttatcttgacaacggctctgggaggaagatacaatttttccccaatctccaggtgaagctgagagaagttaaag

SEQ ID NO: 273760 - DNA, 122 bp, Homo sapiens
caagctccgaaacccagaggaggtggggaaaggaggtcaccgcgcctgcgtgttaggaagcgtgacccgggtgggaaaaccctccgcgtccgccattttggctgcctctgtcggtctgttca

SEQ ID NO: 273761 - DNA, 122 bp, Homo sapiens
cagtcttgatgtctcagaataaatgccggtgacctgcaatcatcattaagacgatactggcgtacttcaagaggtggctacagggtaaaaatatgaaaacaattccaaccaatttagaatga

SEQ ID NO: 273762 - DNA, 122 bp, Homo sapiens
ctggagttctgggtgggcatgggcttggtggaccctgcactcggagcggccggcctgcaccgggcagtgaggcgcttagcacccgggccaacggctgctgagggtgtactgggtcccccagc

SEQ ID NO: 273763 - DNA, 122 bp, Homo sapiens
cttccctcctagacggcaggcgaggggcccgagaggccggaggccaggggacaaggtccccgagaggcggcgcgaggctccggcggcccagaaccgcggcggggtccgggtggggtcccggc

SEQ ID NO: 273764 - DNA, 122 bp, Homo sapiens
ccccgcctacgatgtctgtcactgtcacataggagggacgcatgtaggcgggactccacacgccatggccaggccaacccccgccactccacccccacctacgatgtctgtcactgtcacat

SEQ ID NO: 273765 - DNA, 122 bp, Homo sapiens
agtgccagcccactccccagccccaacacatgctttgctttaagccctcaccctctcctccgggggcagcaagtcagctctgaggatgtggtaatacacacacttgttgcggagccacaggg

SEQ ID NO: 273766 - DNA, 122 bp, Homo sapiens
tgcaatttctggtcggcttcagttcagactcagccttgcgcgcctggaagtcattcctggcgggcttcctccaccttctttttcttggccagacgtggccagtcataaactgacagggaaaa

SEQ ID NO: 273767 - DNA, 122 bp, Homo sapiens
gcggggagatgtctctgtgcccaagatactcactgcctctctgggtgagcacaggagccccgtgctgagggtgggatctcccagagtctaagtaaagactttttcccccccaaaataattgt

SEQ ID NO: 273768 - DNA, 122 bp, Homo sapiens
gcttgcacgaagatgctgcaagtggcgacacgcgcgaatccagggtctgggctaggaagtcgcgctacgctcagtggaggatgaccctttcctcctccttgtcccccagccccgtgcaaagt

SEQ ID NO: 273769 - DNA, 122 bp, Homo sapiens
ctttcttcatcttggaggatcccggttactggtggaatctgccagctggaactgtggagacgcacatttggtcaggcagcgttccttcccctttccccacgggtgtcctgcttgtatctcag

SEQ ID NO: 273770 - DNA, 122 bp, Homo sapiens
gtcctcccgcccgctcccgcgcagcgctagcattctccagtccctcagtcccttcccgcgcggtgcgccgcagccgaggcgatgcgcctcattcagaacatgtgcaccatcgccgagtaccc

SEQ ID NO: 273771 - DNA, 122 bp, Homo sapiens
agcctcctatgagatatccgtggtctgtgttttcactaaatggcatcttcatcataaagacgaggcaatcacgaggattttagaaagttaaagctagaaaggactttagaaatcgtctagga

SEQ ID NO: 273772 - DNA, 122 bp, Homo sapiens
tcattattccacatattctggagcttgattccgtgactcagttttaaaacatttcctgagcgttgaccatgaacttgaataattaagaatcataagagctattttctttcttctctgtcaac

SEQ ID NO: 273773 - DNA, 122 bp, Homo sapiens
ggcagtaggtacatgtgactaataaactgctgcttatcttgtctgtccaatgccaggtgtcgttgtttggccatcctcataactctgggatgagaatctctccatcaccaagggggaaaata

SEQ ID NO: 273774 - DNA, 122 bp, Homo sapiens
ggcctgctctttctggaagaacttctcctgccacgccttcaattcttggcccagctcctccgcacgctcagcctgtgaggtcagctcctgccgcaggttctctgaagccacccgctgtttct

SEQ ID NO: 273775 - DNA, 122 bp, Homo sapiens
catcccgcgcccccatccctctgcccgccagattctgcggagtctgcgaaacaaaaccgccgttgtttccagccgggctgctcaggaaaaacaacaggtttttccactttggggcctttgta

SEQ ID NO: 273776 - DNA, 122 bp, Homo sapiens
gggacagtctggctgtggcaggggtctcggaaaccatgggttattgcagtggcaggtgcacgcttatctttatctgtggcatgcaactggtaagtgacacttgggtccccttattctgtaat

SEQ ID NO: 273777 - DNA, 122 bp, Homo sapiens
cagatccgacaaccgccagtcacctcgacggtccacgcccaccgctagcctccagtttcccgcagaccggaagcccttttgccccggctcgcaggtccacgtcttattgacagcaggaaccg

SEQ ID NO: 273778 - DNA, 122 bp, Homo sapiens
gttgaaatctaattctgaagtgcacggattgtgttagggtcaaaccatttccactctctccgagtctcagtttcgcatcggtaaatggagataacacctagcttgcataaaggctgtgagtt

SEQ ID NO: 273779 - DNA, 122 bp, Homo sapiens
gcacttaaaattgttagcattgcaaatttccagcccatcccagacctactgaatctgaaacgccggcgttgggcttccacagtatgctgtttaacccaccctccgcatgattcctttcggct

SEQ ID NO: 273780 - DNA, 122 bp, Homo sapiens
ctgggaatttcaacttccacctcacttacctgtagaatcaaaaaggacccaggggccaggcgcagtggctcacacctgtaatcccagcactttggaaggcctacgcaggcggatcacttaag

SEQ ID NO: 273781 - DNA, 122 bp, Homo sapiens
ccttcccgggctggggccagtgggccctgcctaggggagatgtggacagctccggcagctcgtgttcgcagtcaccctgaacgccctcctctgaactcccacgtgtctccattctcctaagc

SEQ ID NO: 273782 - DNA, 122 bp, Homo sapiens
cttagggagagcttgtggcctaaatggcagttctatgacatctgctgcctcctcagtcaacggaatggagggctccctccaggtggctggcacaggcaggcagtgggtgggggtcctgaggc

SEQ ID NO: 273783 - DNA, 122 bp, Homo sapiens
aagggtgagggtctagattgccccgaggagactcaggttgaccaggtgccggccaagccacggagcagctgagcagcagtgaacacgtctccctgagaagccagcagcttgcaccgggtttg

SEQ ID NO: 273784 - DNA, 122 bp, Homo sapiens
gacggctcgtcccaggaagtcctgggtgggtagacgtcgcacccggaagtaaagcggctccgtgacggagcggcggtgcgcgcggcagggcccggagtatcccgctttctttggaggaaacc

SEQ ID NO: 273785 - DNA, 122 bp, Homo sapiens
gcctgtctctgtgggccccggcttctgagcatctcggcttccctcgagtaccccccaggccgaatgtctgtgtctgtctgtctgtctgtctgtctgccagaggccaggatcgctccccttac

SEQ ID NO: 273786 - DNA, 122 bp, Homo sapiens
atgggattcaactgtggaaactgcaagtttggcttttggggaccaaactgcacagagagacgactcttggtgagaagaaacatcttcgatttgagtgccccagagaaggacaaattttttgc

SEQ ID NO: 273787 - DNA, 122 bp, Homo sapiens
tttgccccgcggcttgttggggtctcctttacccatgttgacagatccgcgtccacctgacggggccgaggggggagaggggaagccggagggtcggcgcggagcccgcagctgccagggcg

SEQ ID NO: 273788 - DNA, 122 bp, Homo sapiens
ccctctcaccctcacaccgggagcgacgcacaccccacccgcccctcagcttcgcaggcccggccccttaaagagacacacacgggccaccgatctgccgccagtcggcgtgccttgcagct

SEQ ID NO: 273789 - DNA, 122 bp, Homo sapiens
catagggtgcacgccaggcagcagctagaggcaaggcttgaaaaggtggcctgggtccagcgtgggaaaaccttgactgctgcactctggagatctgctggtaccaagaagtcagtggtttt

SEQ ID NO: 273790 - DNA, 122 bp, Homo sapiens
tggggttttagcaaacacaggtctaatctcttttgtgtttttgtgcaccaggcccggctgcgtagcagttgagtgatgctggttagctattaaggtggcctgttgcagtgcagagtgctgag

SEQ ID NO: 273791 - DNA, 122 bp, Homo sapiens
ccatcaccccccagcccggcacccagcatcaaatctgcatgtcttgtatgttggggaaaacgcttgtttatgcttacgtttgaggtctgcgacctcacgggcccctctccccagagcttgga

SEQ ID NO: 273792 - DNA, 122 bp, Homo sapiens
gctgcctctctcctgagaggcttgggcagatcccgaactggagcccgatcgttacagtttcgcgcagaaaaagagcgtcagccttgctggtcttttcccatggggcagaagacgaaaggcag

SEQ ID NO: 273793 - DNA, 122 bp, Homo sapiens
ttatgacaggattactcatactgattattcctctcacctcaggctccaagatggcctcggcgacactgttattgatctcattttttattttattttatttttagacacagggtctccctctg

SEQ ID NO: 273794 - DNA, 122 bp, Homo sapiens
tctcgtggtgtgccgtttttaagccggtcctaaaagcgcaatattcgggtgggagtgacccgattttccaggtacgtccgtcacccctttctttgactcggaaagggaactccctgatccct

SEQ ID NO: 273795 - DNA, 122 bp, Homo sapiens
aggcggtgccgtgacggggcgatgctgctgcaggagacgtgctccggggcacgactctgacgcagcttagaagagctaatgcttgacaccatctggatccccttcatgctttctgtttttat

SEQ ID NO: 273796 - DNA, 122 bp, Homo sapiens
ctaaaaactgcagccagctgggccgcagagaaacgtcagctctgtgggagaatgagcgcccggccgggccgcgaggagactgggagctctgtctctcgcgccccgcgcgggattacagcggc

SEQ ID NO: 273797 - DNA, 122 bp, Homo sapiens
gccaggggcggcccacactgtgggctcatgtcccctgtcctggaggcagcaaccgtgtgccgggacccacctcaggggaggctgtcgggggcaggggggtagggctttagatgcaggtcgag

SEQ ID NO: 273798 - DNA, 122 bp, Homo sapiens
agccgatcaaacatagtaaccagagtttctttcagattctaagaagccatccccactgcccgagtcgccgaccgaggggaacctcccccaacccgccaccccttccccaagccttcttcaat

SEQ ID NO: 273799 - DNA, 122 bp, Homo sapiens
attgatcttgaaaacatcttgcaactgtgaaagttaaatattttcctttcatcaagctttcgtatttgaaatcacattgcaatttgggttatagaattgctgaaagtgagggaaaactaatg

SEQ ID NO: 273800 - DNA, 122 bp, Homo sapiens
acttttagtcacctggccaagatcatgagaccagttagcggacaagctgaggtttgaaaccgggtctgcctagaaagcctgtgctcctcccctctgtgacagcccgtgctttaattagactg

SEQ ID NO: 273801 - DNA, 122 bp, Homo sapiens
tgcagctccttggggttcttgcgagttctgttgggggcccctgtctgacaaccaaatgctcgtgaaaatatgagtatgcacctcactgtcaggcctggctctccatcctatttctctgctct

SEQ ID NO: 273802 - DNA, 122 bp, Homo sapiens
tgtagaccgtctcaggtgcgtcttcgttcagctctactgtcctcagccccagcttgggctcgccctcagcctgctggagctgttggatgtgttcaggcctccaggcaccctggcctcccccc

SEQ ID NO: 273803 - DNA, 122 bp, Homo sapiens
tcagagccgcgggcggttgtgggggttggggaggactgagaggggctgggccgactgagccgagggacctactgtggtgacggctcccggaacaatgagactgctcctcctgcctccgcgcc

SEQ ID NO: 273804 - DNA, 122 bp, Homo sapiens
cccgatttcctctttacttaataaagtgaaatgacaaacaccaaaccggtcagaacattacgaggagctgagtgtgagctctctgaggcgtggggaagtggaaggcattggcccggggccct

SEQ ID NO: 273805 - DNA, 122 bp, Homo sapiens
cgctcgccgggctgagcgtgcgtggatggaggcggtcggcttcagcacgcatgcgggttccggagcgggaggcgggaggacgccgcggctctgactcaatgcgcgtgcgcgcggttgggggg

SEQ ID NO: 273806 - DNA, 122 bp, Homo sapiens
gagaagaggagggagtccccaggctctgccagccttaggacagacttggagttcaggcttcgcctaagtaagggacacctctgatgagccactggcccagagcaggcctcagcctcctggtg

SEQ ID NO: 273807 - DNA, 122 bp, Homo sapiens
tcgacccgttcaattacagcaacgaagaagccactgctgagtgtggtctcaggggaggcccggaggcagtgctcggcacccgggaacgtgctcaggcctcggtggggccaggcaggcagggc

SEQ ID NO: 273808 - DNA, 122 bp, Homo sapiens
cgaaagaccggaactctgggcagaaggacaggcctgggtgggaggagaagggggcgttctcggaagacaccaaaagcccccataccagaaataacagtgcgtgctgggccgggcacccgggg

SEQ ID NO: 273809 - DNA, 122 bp, Homo sapiens
gctcgacttgtctccccgactgcccgtccttagtccaggttctcctgcgcggcccgggtgcggggtctcctcgtcatctcgggcgacactctgcaaacaatatggcggtcgggcgtcgaccg

SEQ ID NO: 273810 - DNA, 122 bp, Homo sapiens
gttttaaaaattctttcaggcaacagtgataagagaggaagcaaagagcacgcagacccccgcccagcccgcacccgtgttcccagtgtctggagcacacactctaaacacatcgggacccc

SEQ ID NO: 273811 - DNA, 122 bp, Homo sapiens
ggatgaaaatctctctgctgattcacagagatcgggaagtaaacagtccactaaccctgccgataactatcatctggcccggaggagaaccctgcaggtggttgtgagctccttgctgacag

SEQ ID NO: 273812 - DNA, 122 bp, Homo sapiens
agcccccacgggaattcttccagccctggctccagatcctttccacttacggagcagaaccggccccaaggctgggtgacttggggtcagtgtcctccatctcagctccagactccacgctg

SEQ ID NO: 273813 - DNA, 122 bp, Homo sapiens
aatcgcataaagtgcttaaccggaccatggcatgtagtaggtgctctatcaacggcaggccgagcgcgatttcattttcccaagttttcagctgggatgtgaaacaggagggagcagggtta

SEQ ID NO: 273814 - DNA, 122 bp, Homo sapiens
tgaccctgacctctcccggtgatcctgattgtcaacaaaaccctaaagtccccacccccccggggctggcgctcctgcaggacactgtggtctggtgatagcctttatttacattactgcag

SEQ ID NO: 273815 - DNA, 122 bp, Homo sapiens
tcttctcaataaaattgtacacaaatgtgaaattcctgttacctgagttcctgctgatgacgttgagtaaggatgaggctcaggggtggggtgtctggttgctgttgccaggactggcaggg

SEQ ID NO: 273816 - DNA, 122 bp, Homo sapiens
caccgtgcgtcctggccaggctccggcggcatgccctgggattgggtgcccgccagccaacggctgcgactggcacacagaagcccagtgtccacccccgcccgctcgcagcgccgagcaag

SEQ ID NO: 273817 - DNA, 122 bp, Homo sapiens
tcagtaatattgttttttaaataagacttcagatttaggggtggaggaggaacaccggatcgcactgtgggagaaacgctggcctgatgatttattataaataaataatgtgccctactgct

SEQ ID NO: 273818 - DNA, 122 bp, Homo sapiens
ttggatgcctcaggcaccgcctaccttttttcaacaactacttccgtcgccttatgagaacgttcaggaagtgctatttaaccttattagagtcttctgctagctctgcttgctacagtcca

SEQ ID NO: 273819 - DNA, 122 bp, Homo sapiens
aagcccggagccgcacgctcgcgtcagggccggcctttccataccaaggggcggcacgtgcggcaccgcctcccgcccaggccccaccccgcatgccgagcttggcccaacctctcctccca

SEQ ID NO: 273820 - DNA, 122 bp, Homo sapiens
tgctggcggtccagggtgcgtcccgcaccacaaagcctctggaaggtgccttggcctcttcgtgtgctgggggtttcatgtatacctgcagcgcctcactgtccaccacgtcagctagctgc

SEQ ID NO: 273821 - DNA, 122 bp, Homo sapiens
tggccacggcgcgcagcccttcctcaggcccagctccctccgcgtctccaccagtggccacggcgcgcagcccttcctcaggcccagctcccccgcgtctccaccagtggccacggcgcgca

SEQ ID NO: 273822 - DNA, 122 bp, Homo sapiens
gccagggccaccctgcacacatacaaggaggaccggggaccgcgcggcatgccttccagacgctactagagctcacactcaggagccaaggggccggtttgctcccccatgtgtctttgacc

SEQ ID NO: 273823 - DNA, 122 bp, Homo sapiens
gaagatgggtgatttctgcatttccaactgaggtactggcatcgcttcacctgggaagcgcgtggggtcggggaattccctttcctagccaagggaaggggtgacagatggcacctggaaaa

SEQ ID NO: 273824 - DNA, 122 bp, Homo sapiens
cagagcgagaccccgtcttaaaaaaaacaaaacaaaacaaaaaaaaaacctttgctttcccgccttccaagaggaaggggcgcatctctgaggaaacaagcccggggaacccgcagcccgga

SEQ ID NO: 273825 - DNA, 122 bp, Homo sapiens
caggagatgggggaggcttacagacttaagatgcccagcacatgaattaacagtggcatccgcagggaaaattgaaaacagagagccgctctccgttatgtatgtttaatgttctgtttgaa

SEQ ID NO: 273826 - DNA, 122 bp, Homo sapiens
ctgaggtgactgcatggggggtagccaagcgccctccacgagcgattgcccccatcttgacgagacgcccccagctggtcaaggaggtgtgactccaggaaagcacaggttcaaactggtgc

SEQ ID NO: 273827 - DNA, 122 bp, Homo sapiens
cctggactcaactcagggtccggctgccgtggtggaggggagaggatagtgtttcaggatcgggatgcccctgccatccatatcagctcaataaacatttgccgttatttatattgttgttg

SEQ ID NO: 273828 - DNA, 122 bp, Homo sapiens
acgcgctcgctgcgtctttcagggctgcaggtacggtgcgggtttctggtgcgctgaccgcgctggggatgagcaccactgtcatcgcggggaccctcgggctgcgcctctgcccctcggtc

SEQ ID NO: 273829 - DNA, 122 bp, Homo sapiens
gtccactcgggaaagaacgaggtcaggagtcggtcctgcacatcgcgtagagcgaagagacgacacctacctgaccatagacgctccccatccgcccagcaaccgtggtccatgctgcctgc

SEQ ID NO: 273830 - DNA, 122 bp, Homo sapiens
acccacagctgagatgggcatttccaggttttgagcaaacacagatgaatgaccgtgttacgggaagtgaagccagggccctggtgtgggctgagcaaagcagccttgccctggtgggtttg

SEQ ID NO: 273831 - DNA, 122 bp, Homo sapiens
atgcttcacatgcatgtggaccgagatccccaggaacaagtcacccccgtgaaatatgcccgcctctggtcggagattccctcggagatcgccattgacgagtgagcctggcacctgaaaac

SEQ ID NO: 273832 - DNA, 122 bp, Homo sapiens
gctccaacaccagcccggtacccagagaccgagccgccctgagcggtgggaaaggccacgcgtcccgggccccacaggccccctctggctctcaggccccccgcccagtggccaggaaggtg

SEQ ID NO: 273833 - DNA, 122 bp, Homo sapiens
atctgaatagtttctgccatcccactgacaggccagcatctaaaagagatgtgcgctgagcgtccgttatgtggtggcgtcgctgtggtttcttaaccagaacgcaaaatcctgtgaccagg

SEQ ID NO: 273834 - DNA, 122 bp, Homo sapiens
agctaaaacaaagacgatgccagttagtccggacttcctagctgcagccatgacaacctccgcggttttacaggaccctctgtctccggccgtcctccaaggggtgaaggcgagaaaggagc

SEQ ID NO: 273835 - DNA, 122 bp, Homo sapiens
cccctcccaggcgcttcctgcctggaaacaaaagattggtccccagtagcccactcagggcgattttagttttatgctcaccatctgattggcctaggtaaggtgcagagctcgggtgacgt

SEQ ID NO: 273836 - DNA, 122 bp, Homo sapiens
aacctgcagatgcagaatggcaactgtaagggccttgagcatctgcagattttggtatcacggggatcctggaaccaatctccccaaatacccaggtacaactataattatttttgctgatt

SEQ ID NO: 273837 - DNA, 122 bp, Homo sapiens
gaccgttttgaggcagaagcccgatggggcccgtgtccgagcttagggaggggccggagacgcaaacacaggtctcccaggaagcaggcggcgtcacaggtcgctctgcaggcgcccgctgc

SEQ ID NO: 273838 - DNA, 122 bp, Homo sapiens
tgtgtgctctggagtcacgtggattcctgcttgccagtagcgcgccttggaaagtcaccccgcctggctctgccatttccttctctgtacatacagtgttgtctgcggtgagggtgacacag

SEQ ID NO: 273839 - DNA, 122 bp, Homo sapiens
gtgaaacacacacttttcagctaatagcacatcctgatctttagttcacaaatctcttctcgttttgttttctattttatcattcaccctccaactgccccccgaaccatgggcagccattt

SEQ ID NO: 273840 - DNA, 122 bp, Homo sapiens
taaaggtgaagggtgtggggttttctgtgcatacgctcaggaagttgagtcccggtgaaacgtgtcaggttgccatttcccaggctggaaagattttcccaggacgggtatgaatagacgat

SEQ ID NO: 273841 - DNA, 122 bp, Homo sapiens
gagcagcctctggacattagtcccagccccagcacggcccgtcccccacgctgatgtcaccgcacccagaccttggaggccccctccggctccgcctcctgggagaaggctctggagtgagg

SEQ ID NO: 273842 - DNA, 122 bp, Homo sapiens
aatagacactgctgtcctgtgacgcttcagagcctgctggtcaacaaaaaccagagagaacgttctacacgccgttttctaggaaacgagtgggatctgatcaggtggatcctgacctcgcg

SEQ ID NO: 273843 - DNA, 122 bp, Homo sapiens
attacaggcacccaccaccacacctgtgagctggacactcttaactgctactgtaactgccgagagttactatgaagttagcaaaacattgttacatcagagcagcgttgtcatcataatta

SEQ ID NO: 273844 - DNA, 122 bp, Homo sapiens
aaaaccattagtccacctctttgaacagtgcttatagaaagaggaaaaagaagtcaccttcggtaccaaaatcttggaggcagcccctttcggcagagtttcccaaaccagtatatccagga

SEQ ID NO: 273845 - DNA, 122 bp, Homo sapiens
aacaaaaaatccacgatgctggagcaagaagatctcaggctgtgtccctctagagggaagcgctttctgttgtctgaaagaaaagaaaatggttccctttagagtgttacgctttgagaaaa

SEQ ID NO: 273846 - DNA, 122 bp, Homo sapiens
tggatcttactgtctataataaagggaaatagacaaataatagtcataaagcatgatagacgctttgatgggggaatttcaggatataaggggcaaatttctgccctctgtgggggtaatta

SEQ ID NO: 273847 - DNA, 122 bp, Homo sapiens
aaatttcctggatgttcaaaacatgttgaattctactctcacagaacctccagtagcccacgaattggtctgaaggcccttgctggatgaaccagaagtgggtcctctctacctagctacat

SEQ ID NO: 273848 - DNA, 122 bp, Homo sapiens
tggcccggtgtgctgctggggaacagctgggctgcagtaatcgctcacactaatggctttcgtttgaaggaagtggcctgggctgcgaaggaaacatttatttggcataaagactcatgaag

SEQ ID NO: 273849 - DNA, 122 bp, Homo sapiens
gctgggcgaggcggcggccgccttccgcgtggagcgccctgactaccgcagctctcacgccggatcaaggccacgtgttgtggcccacttctatgccaaatctctgacgctcgagcagctgt

SEQ ID NO: 273850 - DNA, 122 bp, Homo sapiens
aattaggaggcacacgatgtcgttcttagctggcgtgtgctcactgaattaggaggcacacgatgtcgtcgttcttagctggcgtgtgctcactgaattaggaggcacacgatgtcgtcgtt

SEQ ID NO: 273851 - DNA, 122 bp, Homo sapiens
caggctgcagtgcagttacacaatcacacctcactgtagccttgacctccaaacttcaaacgatcctcccacctcagcctacagagtagctggggctacaggtgcacaccaccatgcccagc

SEQ ID NO: 273852 - DNA, 122 bp, Homo sapiens
tcccagccgagtggattccccagctgcaggcgggagccgttccaagagcttcgcggggcgcggcttggcagcagagccccggctgctcggcccccgcagacggcaccttctcgctcgcggtc

SEQ ID NO: 273853 - DNA, 122 bp, Homo sapiens
gtggagtgagaacagggacccgaccacgtgaagcacagagaatgctcagggatcggcagccgtgtatccagccaacatcaccagggtgcacgcagagcctggcccgggccaggtcctggggt

SEQ ID NO: 273854 - DNA, 122 bp, Homo sapiens
aagtgagttttcctcctgaaaagtaccccagggacctctactgatgttgggagctgccatcgagaaccagctggcaggctgggtgtggtggcttgcacctgtaatcccagcactttgggagg

SEQ ID NO: 273855 - DNA, 122 bp, Homo sapiens
taagcggggtccgggttgtggagggtgcggggccttgatgccaagggcgtggccaacgtccgcggggccgggccacgacgtgggcgggattaaatgggcctgcggccacgtggctgtcgtgg

SEQ ID NO: 273856 - DNA, 122 bp, Homo sapiens
tctataatcagaaaaaattatatcaaatatccagtttgggccatttcctgggacagtattcgatgattaacttgagcctgaggagactatataaaatcttaacattaggggcaactgaaaag

SEQ ID NO: 273857 - DNA, 122 bp, Homo sapiens
cgaccttgggtcagggccaggaaaggcacttccagccaagcgctggcgccgggtgcgcctcgctttacggaaagaacgccccgcgaataaatccggagcggatttgcatcacagcagccgcg

SEQ ID NO: 273858 - DNA, 122 bp, Homo sapiens
cccccggctcctctgtggactcacgaagacaaggtccggccgctcgggccgcgagagtcgcgccatcaccaccatttttctggatgcccaggtacaggagagagtcgcgcgcttatgacgtc

SEQ ID NO: 273859 - DNA, 122 bp, Homo sapiens
gccccatgggcgggcgcggacgtgtggttgctccagtgtttcctagagcactctcagccacgcccccgccaccccagcggcgctgcaggaaccagcccgccgccagcgcgaaggtgagaccg

SEQ ID NO: 273860 - DNA, 122 bp, Homo sapiens
actcctgaccttaggtgatcgacctgaagtgctaggattacaggcacgagccactgtgcccggcctactgaaaatttttttaaagaaaacttgagcttttggagcatggcaacctagcctgc

SEQ ID NO: 273861 - DNA, 122 bp, Homo sapiens
tggagattcttgcctcatttattttgcattggaagtcacagtaaaaatggttcttagtttcgcttgagcactgacctacatttaaatagaaagaaaccaataacagttatacttaaatcccc

SEQ ID NO: 273862 - DNA, 122 bp, Homo sapiens
tcccgagctgtccagctccaaatccgtgctgcccccttcctcacatccacagacaccacacgcttttctttgagccgcatttgttcttctcgagggtccctacatctgggagacgtcagaag

SEQ ID NO: 273863 - DNA, 122 bp, Homo sapiens
cagttttaggagaaatgccaccagcttctgcgtttgaaggccaaggttagctgttcatggcgtgagcaccttcctgcttccaacctccggttatctgtaaatacccaagtcctctaatttag

SEQ ID NO: 273864 - DNA, 122 bp, Homo sapiens
ccactccataccagacagccccctccgctcttgcccccgtcccctcctccaccttccgcacggagcacagaccaccaccacattgaccatcttccaagtgcccactgtcctccagaatgtca

SEQ ID NO: 273865 - DNA, 122 bp, Homo sapiens
gagaaaggaagagaggagtctgggccaaggcagaggtgtctccctagggagtcctcagagcgggcagccggacgtcgctccatccttcccgccagatggatgggtctgctgcgcaggcacaa

SEQ ID NO: 273866 - DNA, 122 bp, Homo sapiens
agcaccttaccaagtcggccactctgcataaggaatccgagagctcatcgaagatcagcacggtctggggcccaggtggggtggaacatgcacggtccacaagcaattctgtctttctcaag

SEQ ID NO: 273867 - DNA, 122 bp, Homo sapiens
caggtagaaccgaaagaagcgagtcgcgccgaggatggcggcgacgacggcggaagagaacgctgacgtcaacactcagctttttataggcggacgccggttgggcgggtcatgtgactgcg

SEQ ID NO: 273868 - DNA, 122 bp, Homo sapiens
cacggtagtgagtctgggacagtttaccctcctgtccgagacgccatctctccatcctttcgcctcaagtgtgtaggggcaagattacgaatttttgatccaaatagattttgtttgaactg

SEQ ID NO: 273869 - DNA, 122 bp, Homo sapiens
tctgaatgttagtccccatatgggcagtaagtgtgatgttgggtgaatcatttaactagccgtaccttgctttcttcatctgtaaaataagagaactaaatataggttacttcttaaggtca

SEQ ID NO: 273870 - DNA, 122 bp, Homo sapiens
gatatggtggtgatggtgtcagggaaatccccgtatgcatgggaagaggcgtgcgcctctcgccactaattaaaatcagggatgaccctcccttctcggacccctagggggaaaaaaaaaat

SEQ ID NO: 273871 - DNA, 122 bp, Homo sapiens
gggccgcgggagaactggggccgctgcattctgggttctggcggcaggtgccaggcagggcgcgagtgatccgctgatcgaggcggtggcagcgggaggacacccgctccgggcgaccggcc

SEQ ID NO: 273872 - DNA, 122 bp, Homo sapiens
caattaaggagactgacttgcccttcaccagaggctgctgtcttggaactgctcccagtccgcagatgcctagggagtcccagacggtccccggtcctcatttgcacgaggcgaatcagttt

SEQ ID NO: 273873 - DNA, 122 bp, Homo sapiens
gtttcttctgaataaaattccgggttgtgtttatcttgcagtttaaatcactgggagcttcgagagttctttggctccttccctttctggaattattgtgtgatataatcaagacatttacc

SEQ ID NO: 273874 - DNA, 122 bp, Homo sapiens
ttaacttcttattagatatgggggcagatgactctgtcctgattcaatacgatgggctcccgtcttctcatgatggacaagtcggaaaacactgcttttcttatcttctaagttgttctcca

SEQ ID NO: 273875 - DNA, 122 bp, Homo sapiens
ccaatggggaactgacacctcacccctcccatcctcctcccactccctcctccagggccccgaagatgccacgtgggcattgtcctctagctggaccctggctccagccatctcagctccat

SEQ ID NO: 273876 - DNA, 122 bp, Homo sapiens
gagatattttatatcagcacgaccccaaggcttgcctctgagcagcagcagcaggagcaccggcccaccctaggcagagccagggtctgttctggctctgacactttacagccatgtggccc

SEQ ID NO: 273877 - DNA, 122 bp, Homo sapiens
ccgccctccctggcctcagtttccttgttggtaagaagcgggcctcagtgtctgaggccccgcgcccgggtcgatagagtccctgacggcccagaccgggctcccgggattcggatctcatt

SEQ ID NO: 273878 - DNA, 122 bp, Homo sapiens
tgacagctcctggcggcagctcccagcggctcctggaggcctgtgctcagggtctcaactcgtggtcaagcttatatcctagaatattacacattaactccctcaaggtcctaggtgaggac

SEQ ID NO: 273879 - DNA, 122 bp, Homo sapiens
caattcttactcaagtacccaaatgtgacgtttccttttacaaatttgtgctttggcaaacgctgctccctattttggaatgcacttccattttttgccagacaaattatgactccttcctt

SEQ ID NO: 273880 - DNA, 122 bp, Homo sapiens
acaaggaaatggagttagtctgtgtctcaaaatagatggtatagtgtctgtaggtgtttacgtggcctccttagtggccttaatgttcaactttttaaattaccacgctggatttccaggtt

SEQ ID NO: 273881 - DNA, 122 bp, Homo sapiens
ttttcttctggttgccggatgctggacaccggaagcgagccctagaattatggcgacctccgcgacgtcgccgcacgcgcctggttttccagctgagggtagatgcggttactatgtggaaa

SEQ ID NO: 273882 - DNA, 122 bp, Homo sapiens
aacggattgcaaaaaggggaagagcatgaaatggaccctcttaataattcttttaggccgcgaatatcgctactggctaatattgttagtaatgctgttaagtgaatggttgcttagcccct

SEQ ID NO: 273883 - DNA, 122 bp, Homo sapiens
tgcgtgaattactctctctctattgcaatttccgtcttgataaatcagctgtctagtcagcgggctgtaaccttgggcggttacagcctggcctgtcccatcccatccaatagttcccatct

SEQ ID NO: 273884 - DNA, 122 bp, Homo sapiens
tatgttaaaaactctcaataaactacatattgaaagaacatacctcaaaataataacatccgtatatgacaaacccacagtcaatatcagactgaatgggcaaaagctggaggcattcccct

SEQ ID NO: 273885 - DNA, 122 bp, Homo sapiens
agatgctgtgccaaggaaagtcagggatcctaggttcgaatcctgtctctgttcgcaattcgctccgcaacctcaaacaaacgacctcagtttcatctatgaaaagctggtaaccatcgtca

SEQ ID NO: 273886 - DNA, 122 bp, Homo sapiens
agccttactacgtttcccagaattcagtgaggccacgaagacaggctccctgggcgcggacggaagactggccgcatgggatttgtaggtaggatccgcgccccgcccgacggaggcgtcca

SEQ ID NO: 273887 - DNA, 122 bp, Homo sapiens
taccattgctgagcttgccattcaagtccggccccttcttgccaccctcccgccctttggcgagtggaaccgacagctgctaaggtgagcacttggcatctgctctccttgctgctctctcg

SEQ ID NO: 273888 - DNA, 122 bp, Homo sapiens
ccctcactcatttgggagatctaacactgcacatataaatattgaaacttccaggctgggcgcggtggctcacacctgtaatccaagcactttgggaggctgaggcagttggatcaggaggt

SEQ ID NO: 273889 - DNA, 122 bp, Homo sapiens
gggggcccagctccaaggtgaggtgtgtcaggcaagagcgggggcagagctccggtgacgcggtgctcacgtgacccgcccggcgcctacgtgggcaccagcccccgcgcccgcccgccagc

SEQ ID NO: 273890 - DNA, 122 bp, Homo sapiens
agtgaggggcagatggacatcttgagccttgacttgtgatacactaaggcaacagcatcacgtatgtcattttcttgctgggaattcatgagaagcatcagacagattcaaaatgagaaaca

SEQ ID NO: 273891 - DNA, 122 bp, Homo sapiens
gctgccggggctcagcactgccctcctcgggggcgggggcgtctcgctgccactgggccccgggccgccgccgctcttcatctcgttggcgctattcatgatcaccaggctattgagcgcat

SEQ ID NO: 273892 - DNA, 122 bp, Homo sapiens
cctcaacttagtacctaatgcactgtgagagctcggcgagttttagctactactactgtgcgcatgtgacccaaggagggcaagagaaagcccgggaaaagcgaactgtaacacacgccaga

SEQ ID NO: 273893 - DNA, 122 bp, Homo sapiens
ctcttgaacagctacaggctgtgctatggtaatgcccacccccgactacctcccttcctgcgcttctgagaagctgacagccccgactaaatcaccccacgtgcagattcaaccactggccg

SEQ ID NO: 273894 - DNA, 122 bp, Homo sapiens
cattgacacatttcacccgctgcctttcccgctcattccttttccgggtgaaggctggcccgtaggagtactcgcaccctctgtaatttggataaggcatcgggaaagagaaggggcagggt

SEQ ID NO: 273895 - DNA, 122 bp, Homo sapiens
agcatttttgaaaacccaaatcgaggagataaccgtttttgaatgaacggcagtgcaaagcgtggtcggggttagcagcaacgtggctgggcgcctttaactcggcgtgacctccgggtccc

SEQ ID NO: 273896 - DNA, 122 bp, Homo sapiens
ggaaattccccagtggtagaaagaaatggagtgtttattaaaggttctgaaaaattgtcccgtgttgagggctgcagggaaatggagactcacctttaacaaagaaatgtcagtggctcctg

SEQ ID NO: 273897 - DNA, 122 bp, Homo sapiens
ccctcccctgcctggaccccgtcagctcaaggcccctctcagcctcatcccctgtgcctccgctctgtcctcctaagctgagcccagcttctaggtttgctcctccagctgggctctttatc

SEQ ID NO: 273898 - DNA, 122 bp, Homo sapiens
ggctcgagctgcccatggccccgtggcgtgggccctgctgccagggtgccgtgctctgcccgcccgccagcccagcagcggccgcactcggaacctcagctcctccagccggcccctccttc

SEQ ID NO: 273899 - DNA, 122 bp, Homo sapiens
aggtcagcagtccacaaccacagtgtgggccgggcggtgctcctgccaaaggctctggggcggatccttcctgctcttccagcttccgggggcttctggcgctcctcagctgtggcctggtt

SEQ ID NO: 273900 - DNA, 122 bp, Homo sapiens
ttcactgcggtgtcgggcgggcgcggggctcaggacccatagcggctggtctgcagcccgcgcccctgccgcgccccgcggcagtccgtccacctctgtcccccggcccctttcggcgagcg

SEQ ID NO: 273901 - DNA, 122 bp, Homo sapiens
tattaaacatccatggtatcttttagacatgcttgtgatgtgttcaacatttgttaagctcggtaatatgatcctgtttctactggggaagagctatagtgatacagatagattgctcagtt

SEQ ID NO: 273902 - DNA, 122 bp, Homo sapiens
agagggcagaggagcttggtggaatgaccccaggccacacggaggagtcgccaggtggggcgcggtgggtggatgttcaagctggaggccaggacccactgtccgggagcgaggtcatgaag

SEQ ID NO: 273903 - DNA, 122 bp, Homo sapiens
ccctgcccacttcctctccctcctcccaatcccggaggcttccaagccatctgacaaccacgtctcccccttgggatctgttccggtgttggttttaccggacagtgaccaaaaaggagggg

SEQ ID NO: 273904 - DNA, 122 bp, Homo sapiens
aaccaaaaaaatgctttaaacttcagataggcaaaacacacttaactgatggctgggacccgctttgaaagcacccccacccattctcaccccagtgtattgtgggaagggtagtcccatgt

SEQ ID NO: 273905 - DNA, 122 bp, Homo sapiens
cgtcggagacatcttctcggctgcgcgtgcccgccactgcgctgcggcgcctgccgatgacgtcaagccaggagcaacgagactgcggtctctctgagcccggctagagtggcctgtgaaca

SEQ ID NO: 273906 - DNA, 122 bp, Homo sapiens
accagtcatgccagaaagtcatcacgatgatttcagaactgtattgtgatttatgcaaagcgcgccgataattacagccgggcgcacagaacacaggatgcatatgctgcgggtgtgtgcgc

SEQ ID NO: 273907 - DNA, 122 bp, Homo sapiens
cctgggctcaccgtggctctgctgtgggttaagcaaccccttgttagtaggctccccgctcgggtggaatggctgtgagctgtggcccggccccgtctgtggccagatctgcacacagcccc

SEQ ID NO: 273908 - DNA, 122 bp, Homo sapiens
tcagcttgcagggaagctgggggctctccgaattgccctgctccggggcccctcctgctgcgtgactcacaggcacattgcagagagaagctgccgctcccagtaagtgcttaaagaaggtc

SEQ ID NO: 273909 - DNA, 122 bp, Homo sapiens
ttggatcagcacagcaggctctgatgtagacgcctgctgttactgagcctgtgaccagcacggaaagggtgtttaccaagaaggcacaagttgagtgacaccatctgttgggctgaaaagca

SEQ ID NO: 273910 - DNA, 122 bp, Homo sapiens
atctaatgcccaggtcaaagcagatggacacaaagtctatggagccattctggtgagtaccgtccccttccagcctcccttccctgcatgagcttagcagccaagcaggcttactttggaat

SEQ ID NO: 273911 - DNA, 122 bp, Homo sapiens
ttgttccgcatggaattgcatgtgagaaaagcgctttggaagctgtttggtgcacgcgggcgtcagagggcaccgtaggtcactgagcggggtctcacccagggagagaatgcgacttcatt

SEQ ID NO: 273912 - DNA, 122 bp, Homo sapiens
gcctgccgggaaatgcagtccctggttcgggacgctggggctccggaggaagcggcgagtcggcggggcggagggggcgggagcgcgaaccaggaacgcccgcggcagctagcgtctggacg

SEQ ID NO: 273913 - DNA, 122 bp, Homo sapiens
ctttcttatgtacatcttaaggactggggttttaaggggtgtggcaggaggttttggactcgatgagtttccaccgaaatgtcggagaagtcaggccagagcacaaaagcaaaggatgggaa

SEQ ID NO: 273914 - DNA, 122 bp, Homo sapiens
gccggcgggaccaggagcggcaggggtcagctcaggaatcccggggagccgggaccaaagcgtggggcggcagggggccggggtggcgaggtctacggtctccggagttggggctccccctt

SEQ ID NO: 273915 - DNA, 122 bp, Homo sapiens
ctagttgttcgagcctttgagcctcagttgtctcatctatacaatggtaatggcagagaccgtgcagggttataagcagtgtagcattgtagacggcctctgtcagagttagctcttaggct

SEQ ID NO: 273916 - DNA, 122 bp, Homo sapiens
acgagtacatgagagctcaaatagcatcaaaatccttagtatcccacttaaagcaaacttcgtgtcatgctatgttgctttatgagccactccgtagccatgtttataataataaaagtacc

SEQ ID NO: 273917 - DNA, 122 bp, Homo sapiens
ttttctgggaaaagattactaccacagtaattgagctgtgaagcggagacaaattgctctcggtggtggttcaaagtactgcaattgactggaatagcaccgcgcagttttccttcctctcg

SEQ ID NO: 273918 - DNA, 122 bp, Homo sapiens
tggatatggggggccaattgtattttgtatgatctcaagccaagtttctatgcattgtttcgtggaattctgaacatcgtcatcataaattatgccattgtccagaagcgtatttctaacac

SEQ ID NO: 273919 - DNA, 122 bp, Homo sapiens
acagccctgctctggaagcgcgggtctgcttagatgtcctaagcaacttcttgcaccaggcgccgccaatgaggagttcggtggatttctaaccaagtcccatttcaccgagagcggagtcc

SEQ ID NO: 273920 - DNA, 122 bp, Homo sapiens
accaacctgcctgcagcagattcttactccaattgaagctgacttgacaataatctaccacgtgttccctccatcatgttgtattatttatattagctttggcaatatccttgagattttac

SEQ ID NO: 273921 - DNA, 122 bp, Homo sapiens
gtcacccctccacggggttcacacctctccaggccctgtcacctcaacaatgaagggtggcggctccgagctctcttcacagggagcaccgaacaggagctagagagagacacagacacacc

SEQ ID NO: 273922 - DNA, 122 bp, Homo sapiens
ggagaacagagcctctcaatgtcctgggagtattgttttgtctcaggcaaaagttcctaacgtggtgactcatatttaaaaccatcagtcttgtagcattaactcatggttagtaaaaacag

SEQ ID NO: 273923 - DNA, 122 bp, Homo sapiens
gtcatacatcaaatgtgcccctccagagcaggctgagggctggggcagctttgtgttcgccgttcagtgactcttggaataagagccggtgaggtatccccgagcccccggcctgtactgct

SEQ ID NO: 273924 - DNA, 122 bp, Homo sapiens
gagtccatgctgaaatggaagtcccggctctgcagggcgtccccttgcaggccaaacttgcgcaggcttcccggggtgttggtggagctcgggggttcgtcccccagcaggtcgtgctcaga

SEQ ID NO: 273925 - DNA, 122 bp, Homo sapiens
ccctgagagtcggggtccccaccccccggaaatccgggagagggcgggcagccccggaggcgggcgggggtccgggcaccgcctcctggtccctgacacattccagatgcctgggccgactc

SEQ ID NO: 273926 - DNA, 122 bp, Homo sapiens
cgcacccccagcatgaggcaggaggagcgctacctggtaagtcctgtcgcatgcaaaaggcggtctccccactgcctgaggagtgggccctccaccagggaaggttcactcttcccttccca

SEQ ID NO: 273927 - DNA, 122 bp, Homo sapiens
agtgagccgaccggcggatgcagttgaccccattcgcgtccaaacttcacttcgagaaaacgcagccctgcgcgcagtccacgcaggacgcgacagcgccaccctcgtttgtacggctgcgc

SEQ ID NO: 273928 - DNA, 122 bp, Homo sapiens
cccagtcttgctgttttggtttttggttttttgtcttgttttggagacagagtcacactccgtctccgaggctggagtgcaaaggcatgatcagggctcacttcagcctcgacctctcaggg

SEQ ID NO: 273929 - DNA, 122 bp, Homo sapiens
cgatccagcatctctgtgaaagggctgtccttgccttttcatgattatttaataaacacacgcaaaacaccaaactcagaggactccctggagatgagggagggagtgcaacccagttcctg

SEQ ID NO: 273930 - DNA, 122 bp, Homo sapiens
taccctcctggctgccgcacaggggaccctttctcacactcccatcaggacacctgtcctcgggccctgcccctctgtgccaccccgcaggcgcccgctcctggctgccttgtcatccctcc

SEQ ID NO: 273931 - DNA, 122 bp, Homo sapiens
gagaatacagggaagaacgaaatcgcctctgatcgtactttctccacggatgtaagtgtccgggctctagtgggggaatgatactcttcgtgcgaaattcacttttaaaaaaggcttagaaa

SEQ ID NO: 273932 - DNA, 122 bp, Homo sapiens
gccgcttgacgtggtccaccggcttggacatgctctcgccctgccgcggctgcagcccgccgcctcccgggccctcgccctcggcccggaggaaatcaatgttggctgcccgcggagacccg

SEQ ID NO: 273933 - DNA, 122 bp, Homo sapiens
ctctctctctctcttttatttacttattttctgggcagctttgacattgtaaaccacagacgaattggagcttggcattgaaaggaggtgttctgcaatgattttttttcttgtttagagaa

SEQ ID NO: 273934 - DNA, 122 bp, Homo sapiens
ctcacctgctccctgggtaagtagcgggcggccaggcgcgcaagggcgaggcgtggggttcgcgggcacagtcgcccgtgccccggtcggcgcggggagggaggcgcagggcggcccagccc

SEQ ID NO: 273935 - DNA, 122 bp, Homo sapiens
atctcatgtttctcttcatatgaaaccgtgtgcaaggtgtagctgtacccccacccaggccggtggagagaccccgtcttgttttggaggttacctgtgaaagtcaatgatgccagctacag

SEQ ID NO: 273936 - DNA, 122 bp, Homo sapiens
tactctggccacttgcaaagcattgcaaagggcccaatccactttgtattataaaccaggcgccaggccactgccaggggtggtgctctcagaatgacacaacttcctgtgtcttactaaat

SEQ ID NO: 273937 - DNA, 122 bp, Homo sapiens
gtgccgggggcggggccgggcccagccgtgacaggaaggggcgtgtgcgcggatgggaggcgaagaagtgtccggcgcccggctcctggcattgtgagcccgccggcctccgccggtaacgg

SEQ ID NO: 273938 - DNA, 122 bp, Homo sapiens
tcattcggggtaccacgtggtcggaagcagcctcccacaagcggctctgactccgccctccgcttcggagcggctcacctggcctcagaggtgcagcgctaactccacctggggcttcgttc

SEQ ID NO: 273939 - DNA, 122 bp, Homo sapiens
ctgcacagtgagataaagctggaccggagctagaacccagaatcaaagccttgccctgtgcggtttctcatcgcctacgcagtcgggccctggcctggcatctccaggcaggtggccttgga

SEQ ID NO: 273940 - DNA, 122 bp, Homo sapiens
agcatcccggtgagcatcccggagcctgcgctctgcgcacccggctttccctgggatgagcggcacaggggctcctcggcaccgtgtagatgtgcatgctcgcccctcagcccccggaaaga

SEQ ID NO: 273941 - DNA, 122 bp, Homo sapiens
acgaggaggagcaggaggtgggggcctcgcggggtcgcgggtgtgggggcgccaggaccgcgctgaggggcccggggcatcgcggcgggaacagggcgcacgtggcgcgttccggtgaccgg

SEQ ID NO: 273942 - DNA, 122 bp, Homo sapiens
ttctggtcatggggaggaagtggtccaggatcaccctcctgcagtagacaactagagaaccgaacacacaaaaagcacagctgtcagacaatgaacaacacacagcacaggagaaagggcag

SEQ ID NO: 273943 - DNA, 122 bp, Homo sapiens
cggggctgaatgggagagatcttgagggcaagagcctcagagaccttcaggcaccgagctcgtgaaggtttccaagtgcccctctctagctgctcccagggggaattagtggttgctacagt

SEQ ID NO: 273944 - DNA, 122 bp, Homo sapiens
ctcggcagggagttcgtggatagttacatcccactaaagtgagaaactcagcagggagttcgtggatagatacatcccattgaagtgagacactcggccgtgagttcgtggatagataacat

SEQ ID NO: 273945 - DNA, 122 bp, Homo sapiens
atgagcttaaaaaacggcgcagcacaagattatatcccgcacgtggctcggagggtcctacgcccacggagtctcgctgattgctagcacggcagtctgagatcagactgcaatgcagcagc

SEQ ID NO: 273946 - DNA, 122 bp, Homo sapiens
ggaggctcaaatccatacgctccgatgggtcttcccgctttcctccggcccagtacccagcgatgctctcgctcacccggcgtccacaaaatggcagtccatttttatttttatttaagtca

SEQ ID NO: 273947 - DNA, 122 bp, Homo sapiens
atagtaaatgtgtttggaattgtggtataggcaaggatgtaatggaaactccctagaactcgaacagtcagagattttgtggttatttatactggtaaaagtccagtatcttgaaatttaat

SEQ ID NO: 273948 - DNA, 122 bp, Homo sapiens
tcgccaccaccatcctaggtcaggacttccccaggaagaatccaagtggctggagagatgcgggggttaatgccggtaccaccgcggttttaaacggggccgtgtctgagccgtgttcttga

SEQ ID NO: 273949 - DNA, 122 bp, Homo sapiens
catttggctattctatagaacagggatgagcaaacccagatctgtaggccaaatctggcccgctgcctgtttttgtaaataaagttttattcgaacagacacactcctttgcttatgtacag

SEQ ID NO: 273950 - DNA, 122 bp, Homo sapiens
gtactgggtcgagacgtgtgtaggtgtagggaggtggatagcccttttccgagccgtaggcgtcacccctacgcccaggcccaggcccagtgctggatcctgcactttcccaacctccccct

SEQ ID NO: 273951 - DNA, 122 bp, Homo sapiens
accagggttccctaagtggacccgggtaggagctttagagcgagagtgcgaaggatccgtcgcggttcctctgccgtcgtgctgctttggggccactccaggcagaagacagacaaatatgc

SEQ ID NO: 273952 - DNA, 122 bp, Homo sapiens
tacctatagcaagaaaatagggaaccgatgtggaaatcctgtccccgaaggcaggtttgacgggatcactgacttggctgagaattcatcgaaagccatcttttcagaaggctgttcccttt

SEQ ID NO: 273953 - DNA, 122 bp, Homo sapiens
cggctgccgccgccgactgactgctgtggcaactgaggcacgagcagggtgcagagccgccgctggggggcgcgccggccgccgccgccgaggaggccgcagccgctgcggctgccgcggct

SEQ ID NO: 273954 - DNA, 122 bp, Homo sapiens
gtctgtgcttctggacaggaaaacaagcccctcgtctaccttcaccgtcttccagctgaacgttggtagcacctccacccacagacgcggctgcaaaccccacggcgtgagcccacctgacg

SEQ ID NO: 273955 - DNA, 122 bp, Homo sapiens
ctggaggacagccagttgctcagcctgcctggccccacaggtgacattccttggagatgacggggccaagctgtgctgggcagggacagccctgtgcccctgcccccaccttggcagtcagg

SEQ ID NO: 273956 - DNA, 122 bp, Homo sapiens
accccaaaaccctgtcccgctgacgattcggggtgcatctcagcccgcggcgaggcgggccgagacccttggctcggggcattcaaggggagtccccccatgaactgcgccaagcctgggtc

SEQ ID NO: 273957 - DNA, 122 bp, Homo sapiens
ccacacaccttgtgggcactcatggcttgcgacgctttaagccagagaccgcagatcacccgccactcacctgagcgccgagcctccctcccacgtgacaggctggcctaggaacttccgcc

SEQ ID NO: 273958 - DNA, 122 bp, Homo sapiens
attggggggtctcacttttccttcagtagttttcaaccagccacactactggatgtcacccgcgcccctgccttccgatgggcctgctgtcaccgaggctctggcccgggctgagccctcat

SEQ ID NO: 273959 - DNA, 122 bp, Homo sapiens
tctttgaggggttctgtggactgagccgcaacaaattcatatgttgaagccctaacgccccgagtgactgcatttggaggtcgggattttaggaagtaacgaggtcttagggtggggtcctc

SEQ ID NO: 273960 - DNA, 122 bp, Homo sapiens
accacttgaatagtgagcatctcctagctggctgttactttgctttgcagcttggtacaacggggcaggctggagagtgagggaaatgtggccccagtgcggatcagcgagaggcttcatct

SEQ ID NO: 273961 - DNA, 122 bp, Homo sapiens
cagatcagtgggaaggtccaatacttaattccaaaaaaaatcaattgcgcatacacaagccggggtcctctggctggcagcagcctgtgttacaggactgctttgggttttcgctgactgta

SEQ ID NO: 273962 - DNA, 122 bp, Homo sapiens
gcctgccaaaccacacagtggggacccggctccaggagggcggatgcgggccggggacgacgtggcgcccagaggggcaggccgagcgcgtggagaggaaagcgcctccaaggggggcgtca

SEQ ID NO: 273963 - DNA, 122 bp, Homo sapiens
gggccatatatttgtgccacctgtcccaagaatacactatgcgccagccctctctctccacgacagaattccactggtccataccttgggcatcctagtcatgccacccacaagaatcactt

SEQ ID NO: 273964 - DNA, 122 bp, Homo sapiens
atggcacttagagcattagacttgaatgagaaagtaatcagagctatctattttctttatcgttatgacacttggtacctaacactatggctacataaagagctgatcaagaaatatttatg

SEQ ID NO: 273965 - DNA, 122 bp, Homo sapiens
aaaaatgaggattgtccttgtgcaggtagttatcaaagctcccgtggatgtggttaagatcgcctggggaatatgtacagagtgaaaagaggctctcagtacaaaatgcagagaacaggaac

SEQ ID NO: 273966 - DNA, 122 bp, Homo sapiens
attgtatggcatcaatacaaattaataacaaccagccaattccattgtccttgtatgcatcgtccaccctcaactgcctgaattattgcactggccagagaagttgcctccaccggaatact

SEQ ID NO: 273967 - DNA, 122 bp, Homo sapiens
ttaggccagcattaccctgatgtcaaaaccagacaaatactgaaaacaaaaaccaccctacgtaacaatatctctcatgaatctagacataaaaatcctcaacaaaatattagcaaacggtg

SEQ ID NO: 273968 - DNA, 122 bp, Homo sapiens
tgctgtcggtgatccgacagaaggagaaggatctggtgttggcggcccggctgggtaaggcgctgctcgagaggaaccaggacatgagccggcagtacgagcagatgcataaggagctgaca

SEQ ID NO: 273969 - DNA, 122 bp, Homo sapiens
ggaatgtgatgagatgatgcatttttggcacctctttgccaaagataacaccttgctctccgtgcttacagatgtacaagggcagccgtggggctggcaacagcttcgtaatcctggcttcc

SEQ ID NO: 273970 - DNA, 122 bp, Homo sapiens
gacaaggacctgtttaccaaaagcacctagaaatctccagggggcagggatcttggggaacggacattcattctacagcaagagttcaggttaatccaaagaaagccacagaccatgagaag

SEQ ID NO: 273971 - DNA, 122 bp, Homo sapiens
ttatttaacatgctttaacccagaaaatgaacatttgccagcgagcaccaaacaactgtgcgccgcagtgcttgagcgagtcaggtcctgaggccactctggcgatcctccttacaattcat

SEQ ID NO: 273972 - DNA, 122 bp, Homo sapiens
agctcacactctggtatactgtccctttactcaactctcttcagttatcccctttgagtgcgccatctgtttcttgctgggaccttgaccttggccaagccagaaagtccagggttcaaatc

SEQ ID NO: 273973 - DNA, 122 bp, Homo sapiens
tctttatttttgacattccaaattaatctgtaattagccatgatcagtcttaaacaaatgcgaaaagtggggaaaatgtctctgcattgccccccgactttgatttgtattacctgtttttt

SEQ ID NO: 273974 - DNA, 122 bp, Homo sapiens
aggagttcgaggctgatatagtgcaccatgatcccatctgcactccagcctgggaaacaccgcaagacaaacccaccccacacacacaccccaccctcgtctcaaaaaaaaaaaattaaacc

SEQ ID NO: 273975 - DNA, 122 bp, Homo sapiens
gtaatttacaaattataagcacttacaacacaaccagtgacttccaggacattaaaaaatcgacatggatgcccagctctcatcattccacaactttttctacggactttaaatgcaaaact

SEQ ID NO: 273976 - DNA, 122 bp, Homo sapiens
tgggtggaagcaatagactgtgttcacctgagactcagcaagaagaggcgtgtcccaccccgagtacttcccgttgaccccgcaaccgcccctgcaacgacggggatggaaggggagggcgg

SEQ ID NO: 273977 - DNA, 122 bp, Homo sapiens
agcgggcctgggtggggctccaggagaggtcacggggagacggccacctagagcattgggcggggcagagccctgagggccgctggccaattggcgcgctcgtctgaatggcgtttggcgcg

SEQ ID NO: 273978 - DNA, 122 bp, Homo sapiens
tcttatgatcaagccatccagctatggtcccttttcatgacagcaaaattaagcctatgtcgtggtgtctccctgttttgcaactaggaataaggacttttgcatgtcagatagactgcagt

SEQ ID NO: 273979 - DNA, 122 bp, Homo sapiens
gttctttttaccccactccccgcagcctctcctccagccagggctacaggcccccacccacggcccacccttcggggacctttgtctctccactggcagccgctccccccacaccctgcacg

SEQ ID NO: 273980 - DNA, 122 bp, Homo sapiens
agagaagacataatagtgggaatgtccttgataaaaaaagagttgcaggtgatagcagatcggcagccagatgggctagcattcttcagacagggatgaagcagatctggtatgagggtggc

SEQ ID NO: 273981 - DNA, 122 bp, Homo sapiens
cgtgtataaggagtcaatataggaaacgcagggctggaacctgaatgcaaatccatcagccgcccccaaatcgcgcaccaagggagcggcgctcgggagcccccagatcagcccatcgccgg

SEQ ID NO: 273982 - DNA, 122 bp, Homo sapiens
taaaagtccagcctggcttggtggctctgccctgcaaagccatcagagcttcgcggtgtccggcccagggtctctccacccttgagtccctgatctgtgcagcctggcgcttgtcggctcca

SEQ ID NO: 273983 - DNA, 122 bp, Homo sapiens
gaggtttcctccagattcgcttttctaactacggaagtaaggctctgggcagctgagctccggcgctcacgatccctgcccgggagattacgctcaaagcaaagctgtatcaaaagccaggc

SEQ ID NO: 273984 - DNA, 122 bp, Homo sapiens
tgagccactgcgcccggctgccctcacctttcaataacaagcacctatagtgtttctcagcgaaacatgtcattaaaaaaaaaaaaaaacatggccaggtgctgtggctcaggcctataatc

SEQ ID NO: 273985 - DNA, 122 bp, Homo sapiens
cagccccactatgcagaccacacggggaaacaccagtgccattcagaaagcagaaaagaacgaggggaaggcagaggccaccgcctttactgtgttttccgtaggaaaggcaaggcgagtca

SEQ ID NO: 273986 - DNA, 122 bp, Homo sapiens
tggcggcagaacgcttgtggccgccgttacgctcgtgtggaaacagcgccatctgccgaacgttctgtcacattgctgattggcccacacagattttgtaaggatttttccttctgcttgct

SEQ ID NO: 273987 - DNA, 122 bp, Homo sapiens
gaaaagtaatttacatcccaatcgtggttctgtgttttgtagaaaccaccttagttcacacgattgctctaggttgagaaggtaccaccagaattactatttatgaaagggtcttttagtct

SEQ ID NO: 273988 - DNA, 122 bp, Homo sapiens
ctcctgtggaagtcacatacaagaacatgagatttcttattacacacaatccaaccaatgcgaccttaaacaaatttatagaggtaagatttgatatgttttagtagcttaaattgattgca

SEQ ID NO: 273989 - DNA, 122 bp, Homo sapiens
gggggtgtggggaggaggcggggccagggcaggggcggggcagagccgggccaagctgggcgggtcatgcgccctggccttcgcgcatctcccaggttagctgcgtgtccgggtgctaggct

SEQ ID NO: 273990 - DNA, 122 bp, Homo sapiens
ttataaaattgtttcactgaagatgttatgtatatctttcaactaatattttatgacaatcgtgatataaaagatttggaaattcttatgtgacagtttctgaggtacaacaataatgattt

SEQ ID NO: 273991 - DNA, 122 bp, Homo sapiens
gaaagtggcctcgggaggggcaatgcaacctactcgggcagaaggtgggcttcctcctcccgctgctgctccacatcaggtgtgcccagtgatccatagccgaacagtgtccctaagattgc

SEQ ID NO: 273992 - DNA, 122 bp, Homo sapiens
ctgtgcaggatgccccgcgatgtctgggggccccgcgctcagagcaccccgggcgctctgcgccactgcagagtgtgcagccctggcaggggagccgtgcctccctctgctacccacactcg

SEQ ID NO: 273993 - DNA, 122 bp, Homo sapiens
actgatctcggtcataatcattattgtgtagcaaggtactaaatacagtagatagaagcacgagatttggagtcggacccacttgggttggaatatcaaccctctttcaaacttgccatact

SEQ ID NO: 273994 - DNA, 122 bp, Homo sapiens
cttttggacagtatcttttggatggcagctcccaaaaatagacgcaccattgaagttaaccggtgtaggagaagaaatccgcagaagcttattaaagttaaggtaatgcattgatttttgtg

SEQ ID NO: 273995 - DNA, 122 bp, Homo sapiens
aaactgccctcatcttaagtgtacagccagtcatttttaaacatcttgatatccatgaatcgtcacccagattgagatataaaacatgtctagcaacctagaagtttgtctctttggtactt

SEQ ID NO: 273996 - DNA, 122 bp, Homo sapiens
gcccctgagctctggtgttgtccacccctgggggctgcctggtggcaggacggcacttcacgaggggagatggaccccagtgggaaccacactcaatccctctacgcccaggccgctgtcag

SEQ ID NO: 273997 - DNA, 122 bp, Homo sapiens
ggaaaccaaaacaagaaagcagctacaaaaaggttactccaggctgagtcggtccccggccgtggcgcattcttttgggtgaagtggaccacccctcaccttcacctcctggaggtctctta

SEQ ID NO: 273998 - DNA, 122 bp, Homo sapiens
acagtgtcctccacctctgagcccggggctggctcaggaaacagcccccctctgcctgtgcgattatctttgtccacagtgtttggtgtgtgtttgtggggtgtgtcaggtgattttcctgc

SEQ ID NO: 273999 - DNA, 122 bp, Homo sapiens
gcaatgtgaaaacgaattcatacagaaggtattatatttacaggggtttccacaatgggtcgcaggcagatgaacagagttgacaggatctccataagatctttccctttgatcccttagtt

SEQ ID NO: 274000 - DNA, 122 bp, Homo sapiens
atagccccccaaaatacatcagcaagtaatttaaacctttattgtgtattgtatactgcacgtatgtaatatgtaatttttgtaaagacaagaactgtcttaaatgttgtgttagatttatt

SEQ ID NO: 274001 - DNA, 122 bp, Homo sapiens
ccagtctcttatctctgacttgtccactagacctcaagacttagggtctatttttggagccgtgtcccaagtcttcacctggattcttcactggactccttttgcctggataggtccagtga

SEQ ID NO: 274002 - DNA, 122 bp, Homo sapiens
ccagccactttctacatctttagtagagtttgctggccgaggctttgttatgggttagtccgtgtttcagctcactaggaagaagggcagcaatttcctttcagggtggaagttgcatacat

SEQ ID NO: 274003 - DNA, 122 bp, Homo sapiens
gggagaagccgctcttcctattccactcgcagtctgcgtgtgggggaaacgagtgcccggcgtatgaaacgcctaacttcgcgaaataaagagagacgtataaaagttcaagaattctgtcc

SEQ ID NO: 274004 - DNA, 122 bp, Homo sapiens
ggctcggcctcagcgggcggggaactctttgggggtcgagatctccctcgttctctccgacgcctcccaccctgggggtcgcctgagctcacttggggctctgtgaccctggccctacggcg

SEQ ID NO: 274005 - DNA, 122 bp, Homo sapiens
tagctctcagcctatgatggaggcagaagggagatggttttcccctcgcgtggggccgctcggtggccccggccaaactccgcctcgtcctgccagtggatggccaccagcgtgctcctccc

SEQ ID NO: 274006 - DNA, 122 bp, Homo sapiens
ggctccaccggttcgggggtctatctgcgtctgaaagatccagacaaaaagaattggaagcgcaaaatcattgcggtctactcagggcaccagtgggtggatgtccacggggttcagaagga

SEQ ID NO: 274007 - DNA, 122 bp, Homo sapiens
gacctccaaggactttgtacatattaacctagaagctgcgaattacatggagaatggccacgcatggctcgggggcaacggtcccgcaacagccacagctgtctgtggctgccgagcaaacg

SEQ ID NO: 274008 - DNA, 122 bp, Homo sapiens
cccagttgtgtttctaattcactttgcctggactccctgtaagtcttctctaagaagaaccgtccagccttttctcagggacagcattagtccaatattgtaatcgtccaatgttacaacat

SEQ ID NO: 274009 - DNA, 122 bp, Homo sapiens
ccattacaaaatgccagacactgaggccttacaaaggcagcctaatacaaagactaaggacgtggatcctggagtttgactgcctggggtgcattgtaatgattggctacttattagggagg

SEQ ID NO: 274010 - DNA, 122 bp, Homo sapiens
atttgggaggcctgcaataaggcccagacgcccatttactttaagctatccagtgatttgcgtatgcgtctagggctgagaaccgctctcctaaatatttatgtagacattccttttgctat

SEQ ID NO: 274011 - DNA, 122 bp, Homo sapiens
catttgctgccttgatacctttccaagtgccttcatgctcagatgctatcttgcagatgccgctgtcatgcccacttttctgaccgggacgcaaacccagacgttagtcagtggcagaacca

SEQ ID NO: 274012 - DNA, 122 bp, Homo sapiens
ggagccgttcacgccgtgatactgatactggtaggggttgagagctttgccataggaagccgaggtaggagagcagtagccgtgcggggctccccccgtagggctgtagtagtcagaatcgg

SEQ ID NO: 274013 - DNA, 122 bp, Homo sapiens
aatggcataactttagaagaaaaaaatttttttaccttcctgaactagttcccaaagattcgtgttctcctccagaagggtaaaaggcagggacttcagccacttctatttatactattctt

SEQ ID NO: 274014 - DNA, 122 bp, Homo sapiens
gtcccgcacggtcgccgtcggcctgcgctgctcggagcttccggagcacccaggctgagccgcgcccgccgcaaccacctagaagaagcccagcctggccctggcacacggtgaaccttaat

SEQ ID NO: 274015 - DNA, 122 bp, Homo sapiens
acagaggtttgctttccagacctcctgggttctgtgactggcaactgcacaagcagggcacgctcacatgccatcttcccacagtgacccgtggggaagtgacgaaagaaggctgcttctgt

SEQ ID NO: 274016 - DNA, 122 bp, Homo sapiens
tgtcaaagactcaggagtttgacttgattcccagaagtttaaccatcatctccccaggctcgggactcccagcacccagacccttctgctcacacccagcagtccaggcccccagaccctcc

SEQ ID NO: 274017 - DNA, 122 bp, Homo sapiens
gaggcgctcagcacccagggaaggcgcgtgtgtccccgatgctggctcctccctgagccccgacggctctcgaggttctgagcctgtggcctgcacagggaacttcctctccgactgcattt

SEQ ID NO: 274018 - DNA, 122 bp, Homo sapiens
ggccctgcagcacacggcagaggaaggcgcgatgggagccatgctgggcccggaaggtgccgccgcccggagctgtagccatcactccagctcttcttttaagtgttcccagaaattgtgac

SEQ ID NO: 274019 - DNA, 122 bp, Homo sapiens
caccttctcacccccttcagccttggggcccaggtttccctctcggatctgggtccagggcgcgctcttgcacctcccccaccatggtttagaagctcaggcctcctcgatttccccctccc

SEQ ID NO: 274020 - DNA, 122 bp, Homo sapiens
ccacttctcccggcttcttggaaactgaggacttggcttttttcctttttcggaaaccgccgaaccttatcaaggcctctggaagtagtctcagataccggtgttttttcccgggcttcgag

SEQ ID NO: 274021 - DNA, 122 bp, Homo sapiens
acttggggctgctaccagacccgcagcattgatctgagccgcggttgtcacgtttcggcccgctttgtccccagctccgtgcagcgtccagggcggatccacccccgtccccaccccagccc

SEQ ID NO: 274022 - DNA, 122 bp, Homo sapiens
gaagaaggcccaaaagtgagatcgccagagcagccgcggccgccgctgctgtggcctccacgtcagggatcaaccctttgctggtgaacagcctgtttgctggaatggacctgacgagcctt

SEQ ID NO: 274023 - DNA, 122 bp, Homo sapiens
aaagcgcgtgggtacttgggagctgtcctggttggttttgcgtctaatcccgtcagttctcgcgatttaagctctgagactgagaacctacttaaagctatggcaaaggcactggaggattg

SEQ ID NO: 274024 - DNA, 122 bp, Homo sapiens
cctgaaggtgcatagggaggctcctgggaagacagggagactttaagaaggagaaaggtgcgtttacaggatggatttgaaagaatcacactttactggtctgcccaagacacctcacaccc

SEQ ID NO: 274025 - DNA, 122 bp, Homo sapiens
tatgcaggccccctcccttccccaggcgtccctgagcacctctgcgggcctgacgaggggcgactgggggtagggagtgtgacccaccctcagtgagaaagccttctgtagcgatccaagag

SEQ ID NO: 274026 - DNA, 122 bp, Homo sapiens
ttcccctccccccttcagcaacgggccgtgaggcggtggcggtggtggcggtggcggcggcggtggtggtggtggcggcggcggcggcgaagggggcggagaggaaggagcgcggcgggacc

SEQ ID NO: 274027 - DNA, 122 bp, Homo sapiens
aatgcctggtcgagctctttagggccttagcatgcctcgccttgatgggtagcaaaggcacgtgtcggaagcaggtggcctttctgggagtgcgcaggctactctcgatgtttggctggact

SEQ ID NO: 274028 - DNA, 122 bp, Homo sapiens
tttcagggccattccttactggatggtgactcattttactcaaggactcgccctagacggcgtgcaaccaaccctttagaaacacatcaattgtttaaacaaactatgcctgtattcatttg

SEQ ID NO: 274029 - DNA, 122 bp, Homo sapiens
gtctttgaggaagagaggttcgggctctccagacggcatccacgcttccaggtatgtctgcggacgggaaagcccgggctcccccgggctcgcccctcttcttcccggacacagggggcgaa

SEQ ID NO: 274030 - DNA, 122 bp, Homo sapiens
tgtggagtttgttcgttctgatgtttggatgtgttcggagtttcttccttctgatgggttcgtggtctcgctggctcaggagtgaagctgcagaccttcacagtgaacgttccagctcttaa

SEQ ID NO: 274031 - DNA, 122 bp, Homo sapiens
agggtgaggcttttctggaaggcccctgcttcctggggtctgtccctccatggctagaggcggcagaggggtggagagaaagcacagtcttcacgctttcctccctaagttctcgatatcct

SEQ ID NO: 274032 - DNA, 122 bp, Homo sapiens
caggaaaggagcagtgcggagatgccggccaccaaggtctgtccccggacagtcctgccacgctggctttctcagtcagtaagcttctgaagcacagctcccaggggaccccggtccctggc

SEQ ID NO: 274033 - DNA, 122 bp, Homo sapiens
ccctttcatcacaaagaaagccctctttccagatcatctaagggtcattgtgccaacatccgggcgtggagagtttctgtagggagaaggacgaagaggggccccctcggcggggacgcggg

SEQ ID NO: 274034 - DNA, 122 bp, Homo sapiens
ccccctgcaggccgtcggcggccgcgggcagtgcggaccaggcgggggccctgtggctgccggccacatcccggagcaacagcagaaacaacggcagcagcagcagcagcagctggggcccg

SEQ ID NO: 274035 - DNA, 122 bp, Homo sapiens
agtttcctcagctgcttctttgggaaagcacatctgctctctaggttgggcctcctccctcgtccttcaaagacctattcttggggcctgggccctgtgaaacctctggctctcggacgcag

SEQ ID NO: 274036 - DNA, 122 bp, Homo sapiens
ccaccggagccgcgcacgcgcggccaggcgctcgggatacagaagtgatgtgagtgtctgcgagcgtggtctcgcgggcgggtgacgtcatcgaggcgagagaggcggagccgtggacagtg

SEQ ID NO: 274037 - DNA, 122 bp, Homo sapiens
agcgtcaatacagagtggcgaccagatgattccagcgtccatacagagtggcgaccagcccggcctggcgggggattgtaggttcccgtcacgacggccatggaaaccagcttcccgtggtc

SEQ ID NO: 274038 - DNA, 122 bp, Homo sapiens
ttggggtgtgtcctaactgtgaaccctgaattgtcttagcaatgaatagatagaggatggcgctagggtacaggaaaataaatactaggaacgcgtaatattgttagcactaaaatccatct

SEQ ID NO: 274039 - DNA, 122 bp, Homo sapiens
actccagaagtttcgtgaactccctggcttcgtccgcatcccgccctctgcctcttcgctcgggcttcaaaactgcccctccgacgcccgcctgccccaggccgacctggcctaggcgcccg

SEQ ID NO: 274040 - DNA, 122 bp, Homo sapiens
gtcctccaggcccctgttcctccagaccctcgtcctccagaccctcattctccaggcccccgtcctccaggctccatcctccagggctcctctgggtccgggtcaagtacctccaggctctc

SEQ ID NO: 274041 - DNA, 122 bp, Homo sapiens
ctggaaatttggctcacatccctagtatgttactgcatagtctggctttgttcaatgggtcgcttttaaatattaaagctagatgtaagcaaggtttgcaacaaagtccataagaaactcag

SEQ ID NO: 274042 - DNA, 122 bp, Homo sapiens
ctgtgggccgggccctgggcaccaggatagggccagcagaggacaggacacactccatgccggttaggagctcacagacaccctaaaggagagttgcacggtgtgacatttgctacagccgg

SEQ ID NO: 274043 - DNA, 122 bp, Homo sapiens
ggcgacaaagcataaatgaagaaactctgtcaggcagaatgctcatgccaggtgccctcccgatggagctgggcatctgtgcagtggtgacagagacctgcccctgagaatggagctggagg

SEQ ID NO: 274044 - DNA, 122 bp, Homo sapiens
cggctcccggttcctgtgaaggtagaaagctcgaagttccagtgtgctttctgcggttctcggggagacactggaaagaagtgccttactctagtgggaaggggatacttcactgtaactag

SEQ ID NO: 274045 - DNA, 122 bp, Homo sapiens
gcagggagtccaagtcggagccgccgcggaggccgcgctcgcgggtatataggcggccgccgcgccccgccccccgattcctggaactgcgcggccggccttcttgtaatgtttagtcacta

SEQ ID NO: 274046 - DNA, 122 bp, Homo sapiens
tcgtgcccttcccggctcggggattacctctctggctggtcccctcctccgtgctctgcgcgcctccaccctagcgcttgtcttggctcctagaaccaggggcctggacgctgctcagggca

SEQ ID NO: 274047 - DNA, 122 bp, Homo sapiens
ggtagtcgccagggtagttgggggactcgatgtagccggtgtagtcaccaagctcgccgccgcagtgctggtctgtgggcacagtggcccgagggcctcatcaggctctgctgggcaggggc

SEQ ID NO: 274048 - DNA, 122 bp, Homo sapiens
agggaatacagtgaaaagaattggttctcactctcctatccttcaaggctcctagttcttcgcctcagaggaatttggtgttacctgtttcttttggaatggcctgtccatctagaagcata

SEQ ID NO: 274049 - DNA, 122 bp, Homo sapiens
tggcagagccaggcagatgctgaccctttttctctttcccagacccccactttgaggagccggggccaatggtgagaggggtgggtgggactcctcgggactctgccggggttagtcccttt

SEQ ID NO: 274050 - DNA, 122 bp, Homo sapiens
gagttttccccacctgctcagccatgaagagccccaggcagctcctagagggcaccttaccgtgcccctgaatctggctctgtggctgctctctgggtgagcgatacccggggagcagatgt

SEQ ID NO: 274051 - DNA, 122 bp, Homo sapiens
actcctcccgcagcctgggggacctcgggccttttccgcgggaggtagggcgcggggctccgctagctccgggcgcccggaatcccgcgacggcaggggcgagccgaagccagggcggcggc

SEQ ID NO: 274052 - DNA, 122 bp, Homo sapiens
ttattaagtgtgtgctgggcactgattgaatgctttacaggtgtcaccttctaagaccctcgtaactctagcaggtagtactattatcttacccattttccagcgggagaaatagaggcaag

SEQ ID NO: 274053 - DNA, 122 bp, Homo sapiens
gtgtccagatggatggcgactgtgagtcagcaacgccagccaagacttcctcgcctttaccgtggcattggggcagtttttcaggctctctacggagagagaagtgggccagtaagggagag

SEQ ID NO: 274054 - DNA, 122 bp, Homo sapiens
gcttggatggctgtgctgagtacctggaacggagcctgcgccgcggcggggcctaaatgccgtctggccttttccagagaaagcgtgcccgccctgccctgctctggctgggcgtctgcggg

SEQ ID NO: 274055 - DNA, 122 bp, Homo sapiens
tagtaaaggcaataagagactaaatctaaaccaagacgcttgactccgtagctgctgcttcgtgaatattaatgaggcttcgttttagggggacgtcctcgcatgccgccatttgtgcggca

SEQ ID NO: 274056 - DNA, 122 bp, Homo sapiens
cgggtttgggcctggctctgtgactgaggcggcggcggtggcggccaagcgggatacgggcggcgggagctggggaacaggcatggacgtttccgggcaagagaccgactggcggagcaccg

SEQ ID NO: 274057 - DNA, 122 bp, Homo sapiens
caaaccaccctctccttccttacatcatactttctcttggagttcttgctacgttgaccacgctggtctcaaactcctagcctcaagtgatcctcctgcctcacatccttaagtgctaggaa

SEQ ID NO: 274058 - DNA, 122 bp, Homo sapiens
gaaagggcaaagggacgagtatacgcatgcgtctattcctaggctgctggctctcagacccgcagtgaggtctgacgtcatttcctgccgtaagtatacagtgcctccgggtcgcggtcatt

SEQ ID NO: 274059 - DNA, 122 bp, Homo sapiens
gaggtgctcagcatcatcggtgacatcaacacaaccaccatcagcacgcacatgggggcccgtggacaactcctggctgcaggtgcagagcgtccttgccagacgcaggtaccagggctggc

SEQ ID NO: 274060 - DNA, 122 bp, Homo sapiens
tttgcccacccagcgtcatctctgtcactccaagcaccatttcagaggtaacgggcggcgcgcatcacctctgggcccacagttgcctcaagaagttgccctggggccccagcagtcgacga

SEQ ID NO: 274061 - DNA, 122 bp, Homo sapiens
ctggggttctaggctggagcaggctttgtggaccccagcggcctggtggtgagcagtacccgccttccacttcctaaatcgggatgcagagattctagtggacaggccttgtggtccgggga

SEQ ID NO: 274062 - DNA, 122 bp, Homo sapiens
tgggagcccaatgacttgtttcttaagccaggcatccttgtgagccacatgttgttgagacgctagaccaggggtcggaggtgtggcctatgccagtccggctgggagcgtggccctgttgg

SEQ ID NO: 274063 - DNA, 122 bp, Homo sapiens
ctccgtggaatgcaggagacccagcagggggtgccggccagtgtggacggaggggcggggcggggacacgggtgagtcactgcggcaggggcacaagcacctccacgtagctgagcgggaag

SEQ ID NO: 274064 - DNA, 122 bp, Homo sapiens
tgaggtgaaagagcggaaaaacgcgagaagcggtgttccttctacacagaggctagagtgcggatcggctgagtcggctgcaggcgcccctgcctccgtcagcgtccaggtgaccgccgttc

SEQ ID NO: 274065 - DNA, 122 bp, Homo sapiens
cggatcgccggcccctttcgaccgctccctgccctgaacccctctatgctcaggtcgcatcgttcctccgcctgggcaaaggcatcgagggtaccgcaagtgcgcccacccggcactggggc

SEQ ID NO: 274066 - DNA, 122 bp, Homo sapiens
attggactgagggagaccgggttaaagtgtccccaaagagcctctggtcagaatgacagtcgagggtggagacattgattttcttgtagataccggtgctgaacattcgctagtaactgccc

SEQ ID NO: 274067 - DNA, 122 bp, Homo sapiens
tggggagagctggggcctccactgtgatgtcctctctcctgtaggagcccgagcaccttccggggcttcatgcagacctactatgacgaccacctgagggacctgggtccgctcaccaaggc

SEQ ID NO: 274068 - DNA, 122 bp, Homo sapiens
atctgaccactctctatggatcctctgttgggtcgggggctaggctgctgtgctgtgggacggatgctgtgtctggtctgcctgcacatctgaaacttacctctgtagctggctggctcctt

SEQ ID NO: 274069 - DNA, 122 bp, Homo sapiens
cgccgcaggcctcagaggaccctcaaagccttggttttccctccctcggaagacaggaaacggggttgggagtttgtcgcagtatcgcagcccaagagcccaaattgtcccaagcccagtcc

SEQ ID NO: 274070 - DNA, 122 bp, Homo sapiens
ggcacggggctcggggctgagtccctggagcagcggtaatcctggaggtccacgtggtggcgctgcaccacgctgtagcgaggctcggtgggggcgggctgcaaggccgcttccggagggga

SEQ ID NO: 274071 - DNA, 122 bp, Homo sapiens
gccgcggctggaccggccgagcggcccgggcggaggagtcgagcgggcagagacggtgggcggctctccaggtgaccctagttccctaagatcgccgccccggcagccggcgcccacgtgtt

SEQ ID NO: 274072 - DNA, 122 bp, Homo sapiens
gttttacagaaaccctcctgaatgtcagcgagcataagccgtcgtggcatgggcagctctcggtgagcagcctggccttggtccagctcggcacagaaggaccagcacagggagggaggaag

SEQ ID NO: 274073 - DNA, 122 bp, Homo sapiens
tcatccccagctgcgtctggtcggcttggcggccaactggaaaacccagggcctccatggcgctctggacagaggaggccccgatcccagccccggctgccagccaatgccagcctgtccac

SEQ ID NO: 274074 - DNA, 122 bp, Homo sapiens
ttcacagtgacaggaaggaaagttcaggcttcttgcctcgaaggagtaggcaccccctgacgtcagtcagatcaggcccccaaggaagatttgaagggggcgactgcatagtcggggtatct

SEQ ID NO: 274075 - DNA, 122 bp, Homo sapiens
tggctcgccgccgggggacggcgccccctcccttggcgcgcaggacgcgcgggggacgcccgggcctcccgggacactcccttggtggagcctgcaactttgtgcggcctcccggccggccg

SEQ ID NO: 274076 - DNA, 122 bp, Homo sapiens
cacccatcactgtcttgactgcactgacatatgaaagagatgtgacagtgacagcttcctcgctaattttgaaatctggctctcgagaagaataggctgtgccattctctgtcagaataaca

SEQ ID NO: 274077 - DNA, 122 bp, Homo sapiens
caaccccaaccagagtgacctgattgagcaggcagccgagatgctttatggattgatccacgcccgctacatccttaccaaccgtggcatcgcccagatggtgaggcctctctgctcctacc

SEQ ID NO: 274078 - DNA, 122 bp, Homo sapiens
cccccgccgctttccggatccccctccagctctcgtcctctctgtctccttgggatcctgcgttctctggagtcaccaccccacccggctcaaccgcggctccccggacctgcgcgcgaccc

SEQ ID NO: 274079 - DNA, 122 bp, Homo sapiens
ccccagaagaccattcctaccaacacttgtcctcacacgcccagtacagctgcttctcctcggccaccacctccatctgctactgcgcatcgtgtgaggcagaggacttggatgctctccag

SEQ ID NO: 274080 - DNA, 122 bp, Homo sapiens
ggttgagggtctccaggcctggagttggctggcaggagttgagcaggaagcaggtgggcacgcagggctgaggaatgtggcagggtgggggacagttgtcacagcaggtgggctccagtaac

SEQ ID NO: 274081 - DNA, 122 bp, Homo sapiens
ggccccggtcccactgggcccggcacaaagggcagctctgggtacctacaggccaggccccgactggcgcagagagtgcagcggctctcatattgcgaggtgacgcgactccctcccgcagg

SEQ ID NO: 274082 - DNA, 122 bp, Homo sapiens
ggaggacatactggctgccccccagacaggagcggcagtgcccgtggtcagcccgagctacgtctctccagaggcttgctctctgaccccagggccttggggtcatgccccctcaaggctaa

SEQ ID NO: 274083 - DNA, 122 bp, Homo sapiens
tcacaaaaggatgcttagatattttattcaaaatacaacaccattcatcactctgagcagcgatgtatagaaaggaaaagaaaaataaaccagccctcaaggaatccatccaaaatgagata

SEQ ID NO: 274084 - DNA, 122 bp, Homo sapiens
gactgttagtccctgcttacctgaaagccaagcgctctagcagagctttaaagttggagccgccaccctccctaccgccccatgccccttcaccccactccgaaattcaccgacctttgcat

SEQ ID NO: 274085 - DNA, 122 bp, Homo sapiens
tacggttgcactgccacccacagccacactgccgtctacggccgcactgctgtctacagccgcactgctgtctacagccgcactgccatctatagtcgcactaccacctacagtcgaacagc

SEQ ID NO: 274086 - DNA, 122 bp, Homo sapiens
caagggattggtatccccgtgcaaggaggttggcgaggcctcaggggactcccagttcagcgaatccgttagccttcctctgccttagtcacttccccgtgaggcactccgtgtttgtgtac

SEQ ID NO: 274087 - DNA, 122 bp, Homo sapiens
aactcagtgctgggatgcccacactgcccaccacgcggaagcctggcccggaagtgactccgagactaccactcccataaggtcttggggctttcttgcctagaactcccagaagcccatgc

SEQ ID NO: 274088 - DNA, 122 bp, Homo sapiens
ttaagccccatgctaaaactaccctaaatctctcctgttctaaactggccttggtggttgcgggtgggcaaattgttttttcattattgaaaaatataaatccttcatatatttgcacagag

SEQ ID NO: 274089 - DNA, 122 bp, Homo sapiens
ttctatggtctcaggtaatcttcacaaaacccgaggagaggaactgtcagtcccaccccacgaaagcggctactgaatctcagattgccccacgatcctggctctgcgagcgaggtcacgtt

SEQ ID NO: 274090 - DNA, 122 bp, Homo sapiens
gctggggctacccgccgccagagagcaggtgtcccagctgctgagggctccatctctggccgttccatgcatttagatgcccaggacgagggaggggccccagccactagggaggcatgccc

SEQ ID NO: 274091 - DNA, 122 bp, Homo sapiens
taccctccccctgcctcgatgatattactcccccagacttggaagccgctgccagagtgacgctttgatggtatctgcaagcgtttttgctgatcttatctctgccccctgaatattaattc

SEQ ID NO: 274092 - DNA, 122 bp, Homo sapiens
agtggggcccagctgggcctggaggccagggcgcccttccgggcagcagcttccctcactcgaagttaggaaagaagtcctattgaaattcagatgggtgacaggagggggaaaagagtgca

SEQ ID NO: 274093 - DNA, 122 bp, Homo sapiens
cagcctgggcagctgagcgagactctgtctaaaaaaacaaaacactcttggaagcgaaggcgggtggggatcacttgacgccaagagtttgaggccaggagtttgagaccagcctcggcaac

SEQ ID NO: 274094 - DNA, 122 bp, Homo sapiens
tcaatacggatggacactcctccaacatggtgtatcccatggggaagcgcgacgtgggcgcggccatgttccccacctgaccacgccgccgaggggtaccgaacgtcccaaagcacccactt

SEQ ID NO: 274095 - DNA, 122 bp, Homo sapiens
ggtcagcctgtggtctccatagcaacggtcggacgcgctgctaggttctggctctgactgcgcctgcgcggctggtcccgcggggtctcccgagtagcggaagatatttgtgggtctttgag

SEQ ID NO: 274096 - DNA, 122 bp, Homo sapiens
agcggggtgctcggttcccggagtgatggcggatgaggctgcctgtgagcgtgtccgaggcggtcctgtgatgttaaaggtacacgtggtccggacaaaaggcgccaaagtcggaacgattt

SEQ ID NO: 274097 - DNA, 122 bp, Homo sapiens
atcagcgcgccgccagcgggctccagtcttggggcggggccaagcggaggcggggggtagcgggggggcggggccaagcggaaacttcacaccggcgggaccaagtggtaccccggcccatg

SEQ ID NO: 274098 - DNA, 122 bp, Homo sapiens
cagattggggtagggcccacccatatgatctcattgaacctaatcacctttttcaaggcccgatcgccaaatacagtcacattctgaggtaccaaggcttaggacatatgaattttggggga

SEQ ID NO: 274099 - DNA, 122 bp, Homo sapiens
aaagcccttttcattgcaggagaagaggacaaagatactcagagagaaaaagtaaaagaccgaagaaggaggctggagagaccaggatccttccagctgaacaaagtcagccacaaagcaga

SEQ ID NO: 274100 - DNA, 122 bp, Homo sapiens
gccttttgcccaaagaaatattagttgcttcacctgaaatcctttcaaagaaagtctaatcgtctccactgcaactctgcctctgagtgaatccaacaacctctattcagagtacaagggga

SEQ ID NO: 274101 - DNA, 122 bp, Homo sapiens
cgtttcggtgcacttttgaagggtgcggaaagcgcttctctctggactttaatttgcgtacgcacgtgcgcatccacacgggggagaaacgtttcgtgtgtccctttcaaggctgcaacagg

SEQ ID NO: 274102 - DNA, 122 bp, Homo sapiens
ggcattcccggccccaaatcacactgcgggaagctccagcgttggtgcctgtttcgtctgcgcatgcgccgggacacgcctgcgcccttggccgcagtcagggctcccgagtggtcactctg

SEQ ID NO: 274103 - DNA, 122 bp, Homo sapiens
tgcagacgtggtacctgcatcaggggagctggtgaggcggtacacaagcacgctgctccccggggacacctgggcccagcagaccttccgggtggaacactggcccaacgagacctcggtcc

SEQ ID NO: 274104 - DNA, 122 bp, Homo sapiens
gcctcacctgggcctcgctttctgcactgcccggggctgctcccgagactgtgctgaaaccgatctgtgcacgccaagcagctctcagccagcgctcaacagccggaagcagttctgccacg

SEQ ID NO: 274105 - DNA, 122 bp, Homo sapiens
ctatcaagagtctcacctgggtccagacacatgaacttgcagcactctttggggtccttgcggtactgttggcagccctggggcctctcacagagagcagccacacacatctcaggctcccc

SEQ ID NO: 274106 - DNA, 122 bp, Homo sapiens
gtcctgagccccgccccgcagggaggcagctgaggccaggcgagaattcgagcacagtgccgttgggcaagtactgctgggggacccggcgcaccctccgcagctgctggcctgggtgctaa

SEQ ID NO: 274107 - DNA, 122 bp, Homo sapiens
ccccggcagccctcagcggcgccctgggccccctttctcgcggcggccaggggagctgttcgcagggcgtccagacctcaggccactggctcactttcttggagtgggtcccaaccagggaa

SEQ ID NO: 274108 - DNA, 122 bp, Homo sapiens
gtgtggtgtggacatcgggcttttcggaatgccccagggattctgatgggcggtaaagttcgagaactcctggcccacagcaatcccaaagctctgagcctgggctcctcccgaacctggcg

SEQ ID NO: 274109 - DNA, 122 bp, Homo sapiens
gcccggaatgtagaagcccagcgggacctgggggtctggggacgggacaggggcagaggccgggatggagacccaagggctcccgcgtctgctcccatccctggaaaaaacgcctctcttcc

SEQ ID NO: 274110 - DNA, 122 bp, Homo sapiens
gcatccatgttgtagcatgtgcaagcactttgttgctttttatggctgattacgattctacggtactgtatattgccgtttgtctatccactcatcagctgatggacatttctgtcatttct

SEQ ID NO: 274111 - DNA, 122 bp, Homo sapiens
tggagaaatgaggatgtctgtccctgtctgcctgggcaggccagattcctccccagcagccgggtctctccagaccctgattcggtgcctttctgtttaccagctacttcaatcccaaagtt

SEQ ID NO: 274112 - DNA, 122 bp, Homo sapiens
agcagacacacagccatccagatgtcgattgccttcacgtaggacacctacaacatccagcgacagaacgatcaaccttcttgaagtccttccgtggcctactgagtggattttcaacccct

SEQ ID NO: 274113 - DNA, 122 bp, Homo sapiens
ccccgcgcccagcccagggcgttatctgataaagctgtcccctctcccgaagtcacgatgcgtcaaaggccccacgcccgttctcaaactcatcaggagaaaagcaggacgctgcatcccta

SEQ ID NO: 274114 - DNA, 122 bp, Homo sapiens
agcgttcgaacccttctaaggccacttcctttctccagcctctcgcgcccagttgactcccggcaacacctcccgccgccacaaggagacgcccgaggacttccctccgacaaagccaaaaa

SEQ ID NO: 274115 - DNA, 122 bp, Homo sapiens
ggagagtccaaggggcttgcccgggagcttggtacctgctcatcagtcccccctaggcagcgtctaaagccagctcattccaagctgtcctcttgtgtggcagccttggtggccttgcaggc

SEQ ID NO: 274116 - DNA, 122 bp, Homo sapiens
ctgggcgtcctgtctcctccctgctcagtgactgtgccctggcctggagccctctccgggcggctttgcacccgcagcgcggcatctctccccgattgtgcagggatgccgggagggtcatc

SEQ ID NO: 274117 - DNA, 122 bp, Homo sapiens
agttggtgtgtgcttgaactaacctcacgctgaaaaagaggggcttttatagagctgcggcggagaaaagagacaaaaggagccctcctatctatcctgggctggttaggatgacgtgccat

SEQ ID NO: 274118 - DNA, 122 bp, Homo sapiens
ggagcggtgctgggtaggggtggcacggatctactgctccagctctagcaatttatcctgcgtggctggcaggccggctctcccggggaagggaagtggctgcagcccccgatgccgctcag

SEQ ID NO: 274119 - DNA, 122 bp, Homo sapiens
cctggaacacagagcatgcgagaaggagcagaggacgtgggtgccagggaaggaccctggcgtcagagccagggcctggacctgagttacccattaacggcactccactggttttcctttaa

SEQ ID NO: 274120 - DNA, 122 bp, Homo sapiens
ctgagctgagggttaatcagaaccagggtagccacacttccctttcagataattccagggcggctctgagtctctaaaacctgtgagaaatgccacagctgggagactttcctttcctcatt

SEQ ID NO: 274121 - DNA, 122 bp, Homo sapiens
ttcccgaagcgtactgaattgggattcaatatcagcaagactgaatcccaaattcttaaccgccttgaaaattatacctgaactactgtttaattacctctgtaacattgttcctgaattcc

SEQ ID NO: 274122 - DNA, 122 bp, Homo sapiens
gaaaagttaagcagggtgtttggaggcgagctgccatcatccaccgcctttgtctggaagcgcagggcctcacacgcgggatccatcggaagcccgagcattgtcaagctctgctgctgcac

SEQ ID NO: 274123 - DNA, 122 bp, Homo sapiens
tttttcacttttatcctttacggttagaaagccaagcatctattaaggagaggatgaatccgggcacagccaccaccacggcctctgcctctaaaacacataggaatccccggactgtgtgg

SEQ ID NO: 274124 - DNA, 122 bp, Homo sapiens
aggtctttttgactttgatgtgctttgactgcacatcagagtcaaacgagtcagaataagcgggacccctccacaggcatctcagccctcctaatttagcctttctgaagtggagccttggg

SEQ ID NO: 274125 - DNA, 122 bp, Homo sapiens
aggcggctgtagcccacatctcccgagcgacccccggcgcccgcccgccgcgcggaggcccgggccacacctcactggccgcttggcccatcccagtcagcgccgcgccgaaccccgtccgc

SEQ ID NO: 274126 - DNA, 122 bp, Homo sapiens
ttttatttttgaaacagggtctcactctgtggtccagactggactgcagtgttgcaatctcggctcactgcaacctctgcctcccaggctcaagcaaatcctcccatgtagcaatcctccca

SEQ ID NO: 274127 - DNA, 122 bp, Homo sapiens
ccggatattttttgtatttttagtagagatggggtttcaccatgctggccaggctggtctcgaactcctgacctcaagtgatcccccgacctaggcctccgaaagtgctgggattacaggca

SEQ ID NO: 274128 - DNA, 122 bp, Homo sapiens
gaaggtgactgaggacgctctcatccgcactgtctcttacaacatcctggcagacacgtacgcgcagactgagttctcgcgaacggttctgtacccatactgtgccccctacgccctggagc

SEQ ID NO: 274129 - DNA, 122 bp, Homo sapiens
tcaaccacactgcctgaggaggctgggagagggggaagggacgttaacaaagagaagatacggccttgcctctgaagaattttataatacagctggagaaccaagaaggggaaaaatatttt

SEQ ID NO: 274130 - DNA, 122 bp, Homo sapiens
gccaaccagcgcctgtctctgaacagccaatgaacacgcgtcttacagccaaggccgggtcgggagcgaggctgcggcgagtgcggcgctgacagagacgcgcgcgcgcgcgatcgcgctcg

SEQ ID NO: 274131 - DNA, 122 bp, Homo sapiens
tattcatgggcattgtttccatctgtcttttctacctgtgccacccctgccctgattccacggctgcctcaggcaggcaggcaaggagctaggccggtgcccggccctggcagcaaggggtc

SEQ ID NO: 274132 - DNA, 122 bp, Homo sapiens
tggcccacatgacggggggatgtagacggcagcggcgccagtcgctcctggcaccatggacgatgccacagtcctaaggaagaagggttacatcgtaggcatcaatcttggcaagggttcct

SEQ ID NO: 274133 - DNA, 122 bp, Homo sapiens
gaatggttctgaagccctttagccgcaccacagcgacccgtcagagctgatgggggacggcgggctcagtcaggcgcacaggcctgtgcctgcgtaacgaaacaccaggggggaaagccatc

SEQ ID NO: 274134 - DNA, 122 bp, Homo sapiens
aaaaaaaatttttttccatactgggttagacagtaaatattttaggttctgcaggccaaacggtctctgtcacaactattcagttctgcccttgtcgtccgaaagcagccatagaccatact

SEQ ID NO: 274135 - DNA, 122 bp, Homo sapiens
cgcctcagtgcgcatgtccactgggcgtcttctgctcagccgctttacccacgtggagaacgccagggagctgtgagggtgtgtggtctcgttcctgtcgtctggaatatttttcctctact

SEQ ID NO: 274136 - DNA, 122 bp, Homo sapiens
aaaaaaaaaaaagtgcttgtaaaaactggcaaaacatctgtacttgagtttacagcagtacgccaatatcaatttcctggttttgataacataccatgcatgcctatgtagcatatagcact

SEQ ID NO: 274137 - DNA, 122 bp, Homo sapiens
tcattctgtaccactgaatgtaactcctcacagcaagctggaaatgttttgggaattggacgagattaagacaaggacacagtttatcacgctggatgtaatctgaaaccattttatctcct

SEQ ID NO: 274138 - DNA, 122 bp, Homo sapiens
ccggccaaccacacacgtacccctagcaacagcaaacccagctgcaacagaacaaaagaccgaagtcctcgagcttcccttccatcttagggctcacgccgccccggttaggtttcattaga

SEQ ID NO: 274139 - DNA, 122 bp, Homo sapiens
ccaacttcgagacttgcagtcaaagcgatttttaaaatgacttgttttcaagcctctggccgccgcccactcttctggcccttggactttgaccaagatgttttctcgcagtttttgcaagg

SEQ ID NO: 274140 - DNA, 122 bp, Homo sapiens
tggtggggacaggatgggagggaggaagagcaggaagccagacacctttgggagctgccacgagttctttgggagcattagagctatatttggtgcaattaagttgctaattcagtaaaaac

SEQ ID NO: 274141 - DNA, 122 bp, Homo sapiens
aatagtttatcctgttcacattatgcagaatttcagtgtcgttaatccacaatgttagtacggtaacagaaacataaaggagaaaaaaggcaggtggggggaggttcatagtgtggcctgac

SEQ ID NO: 274142 - DNA, 122 bp, Homo sapiens
ctttgaaagttttgtttactgtgcttttagtcttcagaaactttagtttgtacttagtaacgagaattattcaaaatagaggattgtttttcatgaactcttcagtgctttctgtctgccct

SEQ ID NO: 274143 - DNA, 122 bp, Homo sapiens
gcagagccagagggcaggccggcttctcggtgtgtgcctaagaggatggatcggaggtcccgggctcagcagtggcgccgagctcgccataattacaacgacctgtgcccgcccataggccg

SEQ ID NO: 274144 - DNA, 122 bp, Homo sapiens
ctgggttgcataaggtggaaggaacttgctagtttgcaaaagacagctcttggcgggagccggaacccggagcccgccgactcgcgcacccctcctcatttactgccttcgacgcgcgccac

SEQ ID NO: 274145 - DNA, 122 bp, Homo sapiens
ggcgcgtctcagacctagcagaagtccggagcgtcaccctccgaccctcgctccgcctcccgctaggccctcctgccccgccctgcctaggttgagcatgagcgctggctgaggtgaaaacc

SEQ ID NO: 274146 - DNA, 122 bp, Homo sapiens
ctgtgtgagccgcgcgcccccgtgcccacagctctgccctggggcgtgcgttcacactcacgggcatacgtgctcatgcacacccccacccccaggcacactcccagccctcgcctgggttc

SEQ ID NO: 274147 - DNA, 122 bp, Homo sapiens
gtgacagcccggaagctgcggaagcggatgagggaagggcggccgtggccctgggggcggcgggagctgctttgcctccaccgatctccctgtgcggccctcatgtgctgtgctcgctgaca

SEQ ID NO: 274148 - DNA, 122 bp, Homo sapiens
tatgcactaaaacaaaggtccccaacccccaggccacggacaggcacctaggaaccaggccgcaaggcagggggtaagccgtaggagcttcatctgtttctacagccactccccatctggca

SEQ ID NO: 274149 - DNA, 122 bp, Homo sapiens
gtgacatctttcattattcatgaacaggaaggcgtgctcactttgccttggctatagcatcgtaatccctatttgctgggcagggcagtcttgggtgtttcttcgccttatgcataattcat

SEQ ID NO: 274150 - DNA, 122 bp, Homo sapiens
gggaactgaggcacagcgaggccaagcacgatgcccaagatcacacagccagcaggtggccgggaggggctcgaccccgtgctgtcaggcaccagagactcggctcttcagccccaggccag

SEQ ID NO: 274151 - DNA, 122 bp, Homo sapiens
gctcgttcaaacctcctcccctccctccgcagcccagggtttccccggcctcctgggggacgtgagatggacctgcagggtaacagcctttgtagatctcagaatggatcagaatcatttgt

SEQ ID NO: 274152 - DNA, 122 bp, Homo sapiens
atcagtgtggagatgaaggtataggatctggtagttgttactgcctccattttaagatgacggtgatggggggcagtgggtgccattaatgagatagagacccagaaaccattgtgaggagt

SEQ ID NO: 274153 - DNA, 122 bp, Homo sapiens
atacacatcagtttttaaatgcacacgcctatggaactcaagccatattaacatatagaacgttaccatcaccctagaaagttctttcatgccctttcttagttcccaaccagttctcccca

SEQ ID NO: 274154 - DNA, 122 bp, Homo sapiens
cagaagaatctgcggcggtctttagttggatccaagtctcaaatgtgcctggctctcgtccgggatgctcctgaacagctggtcctgaggaaagaaaatatcagctggtagtgatgcctaca

SEQ ID NO: 274155 - DNA, 122 bp, Homo sapiens
cacccttttcttccttccacagacccacagcctagagccttctttcctccccactgtccccgccacacttcccctgcctggcagcccaggcccagacaccctgcgattcagtggtttcacat

SEQ ID NO: 274156 - DNA, 122 bp, Homo sapiens
gggcggcggttccaggcagagtccagtcggggggtggcggttccaggcagagtccagttgcgtctgggatttgctgcagtcccagattttaagcccagattttctgtagccagttggtgctt

SEQ ID NO: 274157 - DNA, 122 bp, Homo sapiens
acagttcccgccgccacgcgacggaggaggaggcagaagacggggccgtgccagactagccgggtagcctggaaccacttcgccaacctgcaaaggcgtagcacttctccctcccagcctgc

SEQ ID NO: 274158 - DNA, 122 bp, Homo sapiens
agggaagggggccaaggggatctagagaagtaaatgcatggatgaccactctcgtgcatgcgttgtttgatcccacattcacacctttgcccggagatgccccctttgccaggggctctttg

SEQ ID NO: 274159 - DNA, 122 bp, Homo sapiens
taccctgggcgcgccgcgttcccgcctctttcactcaacccgccaatcaggctgcgggaacgctgccgtggtagccaataagaagacagaatgccgttgcactacgctagagggcgggagga

SEQ ID NO: 274160 - DNA, 122 bp, Homo sapiens
agtgaaaagagcaagttctttgggagtcagacagcatcggatccagcccagagcgcagcacgactagtagagtaacttagattaagtccttaaacttccagtgtcctcttttgtaaactggg

SEQ ID NO: 274161 - DNA, 122 bp, Homo sapiens
ccctgggtcgctctttttaagctcccctgagccggtgctgcgctcctctaattgggactccgagccggggctatttctggcgctggcgcggctccaagaaggcgtgagttcgcggccgctcc

SEQ ID NO: 274162 - DNA, 122 bp, Homo sapiens
ggaggagactgtgccagctgctgccactctgccctctgttgaaagccattttcctgtttccgtccagtcttctgccgtgtatacatgcctgaccactcttatgtgaccatacgcagccgcct

SEQ ID NO: 274163 - DNA, 122 bp, Homo sapiens
cccctcggctgggttgtacattcactgattgtcagaagtttctgatactgctgtgggggccggggaaggagtcaccaacagtctggtcctgtcctttggactctacacatcatagcggttca

SEQ ID NO: 274164 - DNA, 122 bp, Homo sapiens
cgcgttggctttgcgcctgtgagtgtgattcaagaacgtcccagtgcccttggctcctttcggagtgtgaccccgtgcttgcacgggacacgttacccagctcgggtgagaagggtatcttc

SEQ ID NO: 274165 - DNA, 122 bp, Homo sapiens
aaggttcatgcatatggactgcatctcatgcatgtacttaaaattatgggatggaggcaacgcacaagcacacaagggccaaagtaactaagcagtctatcaatcaaaaggcagatgctggc

SEQ ID NO: 274166 - DNA, 122 bp, Homo sapiens
tcttccgagatcccaccttggccgcaggggttgcgaataaggttgcgtccgatgggtctgcgcgcgcagaagcggcccagggggcaaggcctggcgttacgggcgggagactggcagctgcg

SEQ ID NO: 274167 - DNA, 122 bp, Homo sapiens
tgggctggagcttatctgatcaccttctgccacaaataagtgaacatatatgtatgtgttcgggtgtcatgttcaaatgcttttaggtttatgtataaatctgtactttgttgtttttctcg

SEQ ID NO: 274168 - DNA, 122 bp, Homo sapiens
ggggatcgttcccccagtttggcactagagacacacatgcattatctttcaaacatgttccgggcaaatcctccgggtctttttcacaacttgcttgtccttatttttattttctgacgcct

SEQ ID NO: 274169 - DNA, 122 bp, Homo sapiens
gcgcctgtatcctgaggttttctatggcagtgctgggccttccagttctcaggtaggccccgcttcccattgcatgaccccttcagtgaataataatttttttctgcctggtatgtatttat

SEQ ID NO: 274170 - DNA, 122 bp, Homo sapiens
accctctcccggcccctgtcgccattgtcggtcccaacgggtgagtgtgggagcagccagcgggtgctgtgtcctgcctctgccccgctgactcagtttccccgcctcctcctcagcaggca

SEQ ID NO: 274171 - DNA, 122 bp, Homo sapiens
cagcgaaggcgtagtagatgccgatggcggccgagatgaccagcatgcccgcgaacaccacgtagtcccacaccacgaaggtgccgatgccccgtggcgtgtccatggccgcacggtcgcct

SEQ ID NO: 274172 - DNA, 122 bp, Homo sapiens
gtgggggtggggagagggagtggcagagtgaccttacccctatgagactgagagaggccccgggcctacctcaaaggagtggggtcacaatgctagctagcagccagccccctcctggtccc

SEQ ID NO: 274173 - DNA, 122 bp, Homo sapiens
ctctacccagtcggttacttggacaagcaagtgcctgataccagcgtgcaagagacagaccggatcctggtggagaaggtacagaggtatagatgttaccgtagcccatgggccagtcctga

SEQ ID NO: 274174 - DNA, 122 bp, Homo sapiens
agggacacttcaattggaccatgatgagttaaagagtctggggaaaggaggatattccaccgtagggggacccatgtgatcagaagaaaagcaagtcatttcttcttggctggaatgtagag

SEQ ID NO: 274175 - DNA, 122 bp, Homo sapiens
ttagggttaaggttaggggcactgggggaggcgcctgcgctgccctcgtggttactcccacgtgctctggggcacgagggcgtccgccagaggcctggggactccacggaacgaagacctag

SEQ ID NO: 274176 - DNA, 122 bp, Homo sapiens
gcttggacgctgctgcggggctcgcatagaacctgctcctgccccagaggagtgactggccggttctagcattcattccctcgggttcctgcactcgcttgaacgcttcctctcgggaggag

SEQ ID NO: 274177 - DNA, 122 bp, Homo sapiens
tgaatgcgaggggagggcgcatccgagaggagggctttgcttgaaaggcgtcccctcccccgcagggcagaaagactctctgtttcaaggctaaggtaatcagcccaatctaatccgcctgt

SEQ ID NO: 274178 - DNA, 122 bp, Homo sapiens
catgaacgtcgattggccgaacggcagggcccgagcgggcaatgattggttgcgtccggccgtccgtgcggcggccgaggaggaaggtgggaggggcgttgctgagggtagctgggggcgag

SEQ ID NO: 274179 - DNA, 122 bp, Homo sapiens
agctatatttcttggggtccaaacctttctggtgctccgaaggaagttaataacagccttcgggtggtgatgctttaaattgctggcacttctctaatagctacaacctcccccctcccccc

SEQ ID NO: 274180 - DNA, 122 bp, Homo sapiens
tcctgggctcaagtgatcctagcacctcagcctcctgagtagctgggactacaggtatgccgtaccatgtagcttacgtaacatttcgtatttctgttagtcttgggatttttctaaggctt

SEQ ID NO: 274181 - DNA, 122 bp, Homo sapiens
agacatggttttgccatattgcccaggcttgtcttgaactcccgggctcaagcaatccaccggcctcagcctctgaaaatgctgggataacaggcttgaagtcactgctgccggaaaaaaca

SEQ ID NO: 274182 - DNA, 122 bp, Homo sapiens
taaactcacatcttcacagaggaaatgaacctatattcatctccataagatgctaagcctcgcttgtacatgtacattagctcctaagcttcacacacatttttatggtttcccaagtcaca

SEQ ID NO: 274183 - DNA, 122 bp, Homo sapiens
ttcctgtgggaggagctggaactggtgcgggaggaggtgaccttcatctatcagaagctccgtgagttcctggagcccacagccggtgtgtggggagggggtccttcttcagcctttgtccg

SEQ ID NO: 274184 - DNA, 122 bp, Homo sapiens
aaacagttccccgatgagagtttggaaggggcagaaaggaaagtaactatctggagcaggcgaagagtagcaacgcctcgggtgctaaaatcggaaaccccaccccctaccccacaaccctt

SEQ ID NO: 274185 - DNA, 122 bp, Homo sapiens
tgggctgctaccgcttgaggtgtgtggagcatgggagctggataggcatgtggccctggacgctgccccagccaacagccactcaggtgggggcctggtggggggcaggaaagagcctccca

SEQ ID NO: 274186 - DNA, 122 bp, Homo sapiens
cagctctcatatatgtatccttgtgctgtgaaatctaagtaaatgactctgtgtgtggtacgagggatataaaacagcacatttatctttcagtaaatacactggagttaggaagacagagt

SEQ ID NO: 274187 - DNA, 122 bp, Homo sapiens
cactctgttcccctcttaggggagttctcaacagaagacacactggaaagtggatgtcaccgggatgaagttagaaatcccaaaagtagactatttgagcaagatcgaattcaaaggcatca

SEQ ID NO: 274188 - DNA, 122 bp, Homo sapiens
aaatatgcgccctcccggacaccatccttggaagagaacctagttccttaccgatcctttcgtgcctcagtccacccagaccaattccagccttggtgaggcgtttccctctgaccaagcac

SEQ ID NO: 274189 - DNA, 122 bp, Homo sapiens
caccgggtgggtgagcgcggcacgcgagggaaatggaccggctgcgaggctgcgcgcggccgggcgggccgagctttatacctgggccttgtccccctgtccgcaccctttccctcgggggt

SEQ ID NO: 274190 - DNA, 122 bp, Homo sapiens
ccgacggggcgggcgcactcctgtctcctaaaacctccaagtgtgcatctgaggaacgcacggtgccctccccagaatccccttagcctctaggagggcgagacccagacagccctttagcc

SEQ ID NO: 274191 - DNA, 122 bp, Homo sapiens
tcactcttggcactttcttctctccattgcctttttctcctgacttgggtaagggtctgccgctcttcctcaccttccgggtcgggccttcggcattctaagtggagctttctggagaggga

SEQ ID NO: 274192 - DNA, 122 bp, Homo sapiens
gctccgccgcccgcaggaaaactcacaactaagggaccaggaaaaagcctctcagggtcgcgcgccttcagtgaggatcctaatttacaccccgagtgtggccccgtcaaagactagagcga

SEQ ID NO: 274193 - DNA, 122 bp, Homo sapiens
cgcggcggcgggaggcaaaaagccgcggcggcggcgggggcaaaaagctgcaaaaagccgcggcggcggggacaaaaagctagggcggcaaaaagccgcgctaacgggggtaaaaagccgcg

SEQ ID NO: 274194 - DNA, 122 bp, Homo sapiens
ggcacacagcttaggctcgaaccagccaatcggaatgcggagtcaccgggaaatttaaatcgcgccggccggctgcacgagccacacggtctttgagctgagtcgaggtggaccctttgaac

SEQ ID NO: 274195 - DNA, 122 bp, Homo sapiens
ccgccccggcctcgccccgcatgcgctcgcccgcccgccaggaggagcgcgccagccccgcgggcaagttctccagctccttcgccatcgacagcatcctgcgcaagcccttccgcagccgc

SEQ ID NO: 274196 - DNA, 122 bp, Homo sapiens
ccctcggggacagcccggccggccacgccgccgaactcgccatgggcctctctccgcatccgcatgtgcatccgcaaccgcttccgtcccgctgagcgcacgaaccctctcgctcctgtccc

SEQ ID NO: 274197 - DNA, 122 bp, Homo sapiens
gaaggaaatttggggggcaggggcatcactctgaccctctcccagcctaccagcgttgggcggctggcagagtggctttaaaagcacaatttttacctatggcttctcaaaataaagcaccc

SEQ ID NO: 274198 - DNA, 122 bp, Homo sapiens
cggcgccagccggccgctcggagtgcggggcccgccgaacccacgccctcccggaactcgcgctggcccacaagcgccgcgcgcagcctgggttcccgcccacgcctctccctccacgcctc

SEQ ID NO: 274199 - DNA, 122 bp, Homo sapiens
gaaaacatcagaagccaaaactcaagaacctctactaggctaactgattagtgaaaacgtcgtgttaacagcaaacgccttgagtgtagcgctcctactcctaacccccggctctctacacg

SEQ ID NO: 274200 - DNA, 122 bp, Homo sapiens
gccggcgggggtaggagagcggctagggcgcgagtgggaacagccgcagcggaggggccccggcgcggagcggggttcacgcagccgctagcgcccaggcgcctctcgccttctccttcagg

SEQ ID NO: 274201 - DNA, 122 bp, Homo sapiens
taggatggggcataggccagcccacacagcgcatttgtgtgacagggcgtcccactcagacgtctccatttccggtatctagagccggctgccctctaaaaatccccctgttacagtcggga

SEQ ID NO: 274202 - DNA, 122 bp, Homo sapiens
aaaaagcctgggaaataggctatttctgcaccccctgaccattcatgcagagcaggatatcggcttcagcccagaagcaatgctagaagttgagaggtttggagtagactgtgaagcagttc

SEQ ID NO: 274203 - DNA, 122 bp, Homo sapiens
gcccgcccactcatgcacccccgggtgactctccacaagcaggcgtgggtaggcagagggcggctcgctcaggccctgggatgctgcctgcacccctgcttcggcaccgggccccaaacccg

SEQ ID NO: 274204 - DNA, 122 bp, Homo sapiens
aaggctcgtgtgtaccgaagtataggggacctgtctgcagcaggagggactcgaaggacacggaggattatatcactgaaggcataagattcagaggtgcccgcggtctagcatcccccagt

SEQ ID NO: 274205 - DNA, 122 bp, Homo sapiens
ccactgtgcctggcctgtatcaacaacgctttgaaactttgaaataatactaaatttccacggtcactcatttatttgcttattcattcaaaaaaaacagatttttggtacttaccatgggc

SEQ ID NO: 274206 - DNA, 122 bp, Homo sapiens
acacatagcggccggtggacggctgaccccatgcccgcaggacctggccatgggctccgacgcagagggggagaagatcaaggactccatgaagctgatcgttccggtgctgctggacgcgg

SEQ ID NO: 274207 - DNA, 122 bp, Homo sapiens
tcttctcccgagattgcactagaatgaccattgtcattggaaggacacactccagaaaaccgtgtttacttcggactcaagatttcctggtgggcttaaaaaaaatggataggaaacagaac

SEQ ID NO: 274208 - DNA, 122 bp, Homo sapiens
cctgttcactggaaggttgccgggtggcggctgacagcctcaaagtcgcaattgagtctgcgcaccggccattcaggatgggacgaccttataccgcggtgaggcggcgtggcaggacgacc

SEQ ID NO: 274209 - DNA, 122 bp, Homo sapiens
caaaatgctgagattatagggttgagccaccccgcccgcccaggatgggacttttggttccggctccttcccggccgacaaatcccttcctggggccatgacttggtgaacccagggaccca

SEQ ID NO: 274210 - DNA, 122 bp, Homo sapiens
ctttctccacggtcacttcacagctaagatttctttctttccgagctgtagaaggcagaacgctctcgggaggacgaagtgatccgaagggatgtggcaagcgcactttccgatggagatgc

SEQ ID NO: 274211 - DNA, 122 bp, Homo sapiens
tgtgtgatcatcccactatttttttttctagagatggatgtctcattctgtcacccaggtcggagtgcaatcttggttcactgcagcctcgaattcccaggctcaagcaatgctcccaactc

SEQ ID NO: 274212 - DNA, 122 bp, Homo sapiens
tccgttcgcatctcaagagtgtccgtggggtatctctccggaaagagggaaaggaggcggcgacgatctgggacgccaccattcccgccacggccatttaggacccaggtcccggcgcgcgg

SEQ ID NO: 274213 - DNA, 122 bp, Homo sapiens
gtatatttgagatttctgttagcattttttttttgttgcaaatactgcaatttattgatacgtatagattgaaacatacttaggaggcttaagataatcaggaatagaggaagtgtccagtt

SEQ ID NO: 274214 - DNA, 122 bp, Homo sapiens
gagtaaaatcacatccaagttacaagcacgcaaattggaatttcgctggaaacactgacccgaccttcaccgaagcagcaaatcgcagtctctgctgctctgctcctgctctccaaggctta

SEQ ID NO: 274215 - DNA, 122 bp, Homo sapiens
tgtgtgtgtgtgtgtgcacgcgcacgcgtgcgcgtcctgagaactcggcacaggtgtgggcgcctacagccgaaagcaaaacggcccgcacttcctgcctccatctcaggaggctgagaggt

SEQ ID NO: 274216 - DNA, 122 bp, Homo sapiens
gacaggcaagcgcggggcgcgggacgcgggacgggcgcctttctctcccaaccctgcttgcgtcctagccccaccccgggacactgccacacagcgacagagcccaggagccagaaacttgg

SEQ ID NO: 274217 - DNA, 122 bp, Homo sapiens
gatggtccgaatctgctgcttggtccggactcagcatcattttggaggctgaggaggggtcggaaaattaatcagtaaaaggaatcagggtattttgctggaaggatggctgccgaggccta

SEQ ID NO: 274218 - DNA, 122 bp, Homo sapiens
gcgtaggcgcaggaacccttcgggggaatccctttagcagggagcgtatattgaagagtgcgtgcggaggtgagagcaataaactgataacggaaacagatggcatacttcgttttcagtta

SEQ ID NO: 274219 - DNA, 122 bp, Homo sapiens
cttaattggacagagggatgctttagttcaattctacagctatgttttgagtgcagattacgtgcaagcctgggaataccatcatgaggttttccaaggtataaacttcaaagtagtatgtg

SEQ ID NO: 274220 - DNA, 122 bp, Homo sapiens
acgacatcaacatcgtgcgggtgtcgggcatgcagcgcctggcgcagctcctgggagagccggccgagacccagggcaccaccgaggcccgagacctgcattgtctcctggtcacggtgagt

SEQ ID NO: 274221 - DNA, 122 bp, Homo sapiens
aggtggctctgtccgtggctggccagagtgtgaggtctgagacccctgcccctcctataccgacatgtcacggcaggctcgtgggggacccggccagatgcaaggacaacctgtggccgaca

SEQ ID NO: 274222 - DNA, 122 bp, Homo sapiens
ttaaagaagggttctgggggcatctggggccggtgactcttgctttgtccagcatgaaggcgtcaacaagaggcaaagggaaaaggagccggtctgcaggcggccagacccgtcagcatccc

SEQ ID NO: 274223 - DNA, 122 bp, Homo sapiens
cttcaagctatctggtttttagcgagcgagaagcaaaacgcctatgcgccgcccgggaatcgaacccgggtcgcaagaatgggaatcttgcatgataccactacaccagcggcgctgttgac

SEQ ID NO: 274224 - DNA, 122 bp, Homo sapiens
actcacttcgactcaggcacagcaggcaaagattcaatgggtagggccggaccgactgcccgaccttcgcggtgcttcacttgcctcactgcgcatgtgccaaagacaatcacccaaagtac

SEQ ID NO: 274225 - DNA, 122 bp, Homo sapiens
ctttgagtacctaatggaccgactggagaaggagtcgtactttgagagtcataataaaggcgaccctaatgcgctagtggacgaggatgctgtttgctgtatctgcaatgatggtgagtgcc

SEQ ID NO: 274226 - DNA, 122 bp, Homo sapiens
cactttatgtatcatacaaaagtttcattcgctggtggcagccacgggaaagactggccccgtagcactgattttccacctcccctccaggggactgggtcccaggagcagtgactgggcct

SEQ ID NO: 274227 - DNA, 122 bp, Homo sapiens
atttttgttagttttcagcatgcctgtctttcctactagagctaaaaggcagggtctgagcgtcttacgcgcctccatcttcaaggcgtagcacagtgactgaaaaaaactgacgttgaacg

SEQ ID NO: 274228 - DNA, 122 bp, Homo sapiens
gtgaggcgcttgcacccgagcttgccttaagtagccctcggcaaccacggacactcccgccgggtttgtgtcactctccacccacacagaccaggcagctgtctcctcgctcctgctcctcg

SEQ ID NO: 274229 - DNA, 122 bp, Homo sapiens
cttccttccttccttctttctttccttccttcttttctttctttctttctttttttttgacggagtcttgctctgtcactcaggctggagtgcagtggtgtgatctcagttcactgcaacct

SEQ ID NO: 274230 - DNA, 122 bp, Homo sapiens
gaacctgtctctcagcatctcgccctcccccgcccccttctcattttccgaagcactgtgcgaaactccttccgggcaaggccaagactcttaaagagacagagggcaacgtgctgccacga

SEQ ID NO: 274231 - DNA, 122 bp, Homo sapiens
aatgaaatgaaacacagttcacaccatttttcaattgttctaacttagtcttcagaagttcggaacagcaaccattgtcatgaaaatcttgtgaaaggaaaaatcactccaaggaaaaaagt

SEQ ID NO: 274232 - DNA, 122 bp, Homo sapiens
ttttttttcaaacttttacaaatgtagaaaccattcttagcttttgggcattaccaaacccggcagtggcaggctcggttcaccaacgtcatttgcagttccccgctttatgttatgggttt

SEQ ID NO: 274233 - DNA, 122 bp, Homo sapiens
ctctgaaatgggaaggagccttggtgtactggagaaactgagaagaggctggtgtggctgcggtctgacagcaatagaggaatttgtgaggcctgatattgtggacagagatcagacctaat

SEQ ID NO: 274234 - DNA, 122 bp, Homo sapiens
cgcctagtggtttcatgtgctacgtttcatctccggacatcaatgaactgcagacacccccgcgcggccctgacttagccagagggattccctggttggagctgggtgggtgattgtgatgc

SEQ ID NO: 274235 - DNA, 122 bp, Homo sapiens
ctccacgcctgcgcggctagcggatgaggacgttaatctcggccacactggcctccagcacgttctcggccgtggtcttgccgtgttgctccttgaggtgccgcctaatggcaggcttgtgg

SEQ ID NO: 274236 - DNA, 122 bp, Homo sapiens
acacacgctgtaacacacatgagtgctgtaaaacacgctgctgaatcttatttttgccatcggcctcagtttccctggcctctgagtgattaagtacacctgatagaagggatgaaaaccct

SEQ ID NO: 274237 - DNA, 122 bp, Homo sapiens
atgctgtgtggggaaggaaagggccaggtatctggtgtctggtacctggtatgtgtgggacgctttgctgagtacgtttattggggaggtctctgagaaactcagttgcacagaattggatt

SEQ ID NO: 274238 - DNA, 122 bp, Homo sapiens
gcagagccccacaccaccgtgaggatgggcttggagttcctcttggacccggggcgcggtcgctaagccagaagcggagtcgcgggcgcggggcggggcctggacccgggcctggacccgga

SEQ ID NO: 274239 - DNA, 122 bp, Homo sapiens
ggggcggggcctgagggaggggaccgggcagggccacagcggaaggcggtgtcgccgcaccgagaaggctcttgggaattgtagttctccggttgaagaaaaaagggattcattgttgtcca

SEQ ID NO: 274240 - DNA, 122 bp, Homo sapiens
ctgaagctctgaaatacctttgagggtgaatgaggtgcaaaggggaatagttagtctaaccgatggtataaaggccagccagcacaaaggctaaactaaatatttccatattttttttctag

SEQ ID NO: 274241 - DNA, 122 bp, Homo sapiens
cttatctggggtatgtatccaaatgacctaagacagtcttcctaataaacacttttggaccgcagggttcagactctcctggggtggaatctttttttgttacctttctttctgcctgctcg

SEQ ID NO: 274242 - DNA, 122 bp, Homo sapiens
gcgcctcagtcatatgacagaaattagtcacttcaaacggccacggcgcgcggggcggggcgcgaggcaaggccggcactcattggctggaggggggccgcatcacgtggcggcgcgcggag

SEQ ID NO: 274243 - DNA, 122 bp, Homo sapiens
ttgtgaatgagcctttaagcctgtctaggcaagcaagatcattgcggaagttttttgaggcggatagtagaaacactcatgtttgaatgttcagatgaacaatacggaaggacatcgtgaaa

SEQ ID NO: 274244 - DNA, 122 bp, Homo sapiens
caggctccggccctgggctggggagaggaagggacagggcggctggcgttgccctccccgcgcttcttggaaagagtgtgatccagagttgcgtctgtttggtagggagacaggctccgctt

SEQ ID NO: 274245 - DNA, 122 bp, Homo sapiens
ctcaaaaaaaaaaaaaaaaaaaaaaaaaacctcaccttctgactgccccactagtcatagcgcatgctgggttgatattgccacgtgtgaatatatgtctttacacactcataagatgtgag

SEQ ID NO: 274246 - DNA, 122 bp, Homo sapiens
cattggtcattatgatttggtttttccttctctggaaaagctttgggtcatgtgcagactcggggatgtcactaggcatccttcttggagatctctctgaggctgacaagtaagattggtct

SEQ ID NO: 274247 - DNA, 122 bp, Homo sapiens
tattggctgtggcagcccccgtgacgcggggtggtgactggctccggagtctgaggggttcgggcttgtcaggttctaggtaggtgcgtttcgcgccgccggcggtaggcgctgttgcccgg

SEQ ID NO: 274248 - DNA, 122 bp, Homo sapiens
cggggacctaggtatggggccgccgtaatggaaaggattccttaaacatactcaccgcggcgggagagctgagagcatggccaggtgccgcgtggggatctgcctcagtcacttaaagatcg

SEQ ID NO: 274249 - DNA, 122 bp, Homo sapiens
gggactgtgctaggtcttaatgagatgagccaagaaatagcagcaatgtcccctggaggacgaaaacactgctagctcaattttctctgtaacttgaaagggctataaaataagaaggtagt

SEQ ID NO: 274250 - DNA, 122 bp, Homo sapiens
ccctgccacctctggccccacagcctcgtacctttctgacgatgggtgaccagaaggacgcggccatagcaaccctggcccaggggacgcacttcctcgtagagctcgtccacctcggctcg

SEQ ID NO: 274251 - DNA, 122 bp, Homo sapiens
gggaagtgtagttcaacacttgaaggaaatgctttggagattgcgccacaaccagggcagcgtaaactacagttcccagagagcgccgcgtcgggagcggagccttttctcgctaacaccgc

SEQ ID NO: 274252 - DNA, 122 bp, Homo sapiens
cgttcatctgctctttcttctggtggtagcgggcctggcagcaggactccaggtagatctcgtcgatgccccagtagtcgagctcttggctgaagctgagcgcgcacatctcctccatcatg

SEQ ID NO: 274253 - DNA, 122 bp, Homo sapiens
gcctcctgagtagttgggattacaggcaggtccggataattttcatattttttgtagagacggggtttcatcatgttactgctgctctcaaactcctgggctcaggtgatctgcctgctttg

SEQ ID NO: 274254 - DNA, 122 bp, Homo sapiens
caaagtgctgggattataggtgtgagccaccgtgcccggcctggatctgttttcttagcacgcagtgaggaatctttgtacttaaggccagggcaacaaagtcaagaggtcaaggtgtaggg

SEQ ID NO: 274255 - DNA, 122 bp, Homo sapiens
acttgctgaacaatctcgtgttgttgtctgcccgctgggagagaacactgataagagaggcgattaggtgactaaatctgctggctgcccttacacaatgccagcaggtaactcatttgaag

SEQ ID NO: 274256 - DNA, 122 bp, Homo sapiens
aacctctccataaggctgcttgtatgtcttcatacttggtaggtggcttcccccagattgcgtgattcaggagagaggacaacaaggaaaacacaatgcttttttctcctcttgcaatgttt

SEQ ID NO: 274257 - DNA, 122 bp, Homo sapiens
gagcatgcaggctgcagatttcaggccgaccccgctagcaccaaagtccatgctgctgtccgtggcagctcagtttgaaaatggcctggtagaaagtccaggttgttgaactggtaaacgca

SEQ ID NO: 274258 - DNA, 122 bp, Homo sapiens
gggtcatccacaggctgctggaggctgctgtctgtctgctgacgccacagcttgttgtgccgctgtttgctgcggggagagagggtagaggaaggtgaggggaggaggatggtgcctggggg

SEQ ID NO: 274259 - DNA, 122 bp, Homo sapiens
ttataattggtatcatatgacatctattttaaaccttctagcactcagtgctcctgttaccgagatctctgtaggttctaatctaactgatttggcgactgcatgtgctgactccacagcag

SEQ ID NO: 274260 - DNA, 122 bp, Homo sapiens
atttgatcttggggccaagtgcttccagactttgttctctggccttaaaggtgaagagcccggcgctgaaggccacagacatcacggcggatttcacagagggccgcgttccgggagcgggt

SEQ ID NO: 274261 - DNA, 122 bp, Homo sapiens
tatcaataaaaatccttcgtagcattaatatagcacagcatgaatgtggctccatcctgacgttgtttaatattccatagtttacttcctttagattcttgctgttctgtcataacaaacct

SEQ ID NO: 274262 - DNA, 122 bp, Homo sapiens
cggctgggtttttgtgtctgaaatacatctaattctccagactgcagcccctctcagccccgagcacctgagcgctggggaggcccttattgagctcagcctggagaggggagggtcgcacg

SEQ ID NO: 274263 - DNA, 122 bp, Homo sapiens
tgtaaacccagtgcagtcctttttctcctccttaaacatccacactggcctttcaaagatcgaagtacattttctatagcttctgttcctgcttgcctggcaacttgtggggaagattgagg

SEQ ID NO: 274264 - DNA, 122 bp, Homo sapiens
gaggccaaagtggacagatcacctgaagtcaggagttcgagaccagcctgaccaacatggcgaaaccctgtctactaaaaatgcaaaaataattagccaggagtggtggcaggtgcctgtaa

SEQ ID NO: 274265 - DNA, 122 bp, Homo sapiens
ccagcgcagaaaaggagagccagccgctgcaggggcggcgagcacgcagcaggcacttaccgttgctgtacaataactggagtttatagtggatgccgttgttggttttctcgttgtttggc

SEQ ID NO: 274266 - DNA, 122 bp, Homo sapiens
gtcccttcccctcaacttctttcttatgcttctccctccctagcctccggaaagagcttccgggaggagcagtgtgaggctttcaacggctacaaccacagcaccaaccggctcactctcgc

SEQ ID NO: 274267 - DNA, 122 bp, Homo sapiens
tccccgtgttcatgagggcaggatgcgggtgcagtgtctgctgctcacggccaggcccgccggggccctgagcactcagcacttgctgcaggaatgaacgcgacccccaaagctggctcggg

SEQ ID NO: 274268 - DNA, 122 bp, Homo sapiens
gaggtggaggttgcagtgagccgagatcgcgccattgcactccagcctgggcaacaagagcgaaattccatctcaaaagaaaaaaaaaagggaatgaacatgtgtctgggaatgtctttgct

SEQ ID NO: 274269 - DNA, 122 bp, Homo sapiens
ctccgtctccccccggcttccccgcccctctcttcctccttctttccctcctccctctcccggcgcccgaaaggatcattgttagccgcccccgccccgcccaccccggctgtttatttatg

SEQ ID NO: 274270 - DNA, 122 bp, Homo sapiens
cttcagcataggctccaacctgaatgtgcacaggcggatccacaccggggagaagccctacgaatgccttgtctgcgggaaagccttcagcgaccactcatccctcaggagccacgtgaaaa

SEQ ID NO: 274271 - DNA, 122 bp, Homo sapiens
agcagtggtttcacctccccaatatacagttgctgcctgatggcacccaggccacccccacgcagttctgatgtgtcccttcaaggtcaaggccaaattgtggaaaacagtaaccactaacc

SEQ ID NO: 274272 - DNA, 122 bp, Homo sapiens
ggttttaatgaggcctcagatgagaaaacatcgcaggaagaagctgcattccttgcataacgtaagcattttctctccccttcaagcagagtgtactcagtgtctttttattattctgaaaa

SEQ ID NO: 274273 - DNA, 122 bp, Homo sapiens
ccattcatcctgatcgttcctccatgagacagggtccctttgttgctggctggaagcggccgggaagcgtgggctcgctgtggcatgggcaatgccacacggctccagggaagcgttcagct

SEQ ID NO: 274274 - DNA, 122 bp, Homo sapiens
gtccccacccgctccagttactccaaggctcaaggagaagcgctcatttggatcacgacccggggttcgccccacccaacaccctgcgactaagaagcgcttaaacaggaaacgggagccct

SEQ ID NO: 274275 - DNA, 122 bp, Homo sapiens
ggtagatgggaatcagtactcgcctctctcctcaggttccagctctgattttggctctgtcgctgccacccgctcatctttaacatgatacgctcagtgccttagacttaagtctctgacct

SEQ ID NO: 274276 - DNA, 122 bp, Homo sapiens
aagaggaccgtgcggagcgcggcggacactcacctcctcgccgtcgccagtcctcgccgccgcctctaccgctgctgcctccactgacagagaacagctgcggtctccgtgcaaccgaactt

SEQ ID NO: 274277 - DNA, 122 bp, Homo sapiens
ctaggagggggcgcagccctgggacccaggtgctggcgttgggggcggggggagccggcgcgagggactcgacccctcggagctacgagaatcaacttcacaagctcatgggaggggaaccg

SEQ ID NO: 274278 - DNA, 122 bp, Homo sapiens
gccgttgtcgtgtggcccattgcctttgcccacaaacagcacgcggtcaccaccaggacccgtggagctcaccagccccactgtggccacgccctcatcattgctggccacgaaagacttct

SEQ ID NO: 274279 - DNA, 122 bp, Homo sapiens
ggagagatttaccgcactccatacacgatggggaagtcatcccttttccagcccatgatgcgaagcaagcataatcagctgccgcacacatgtaattagaagaaataagaccagtaagagga

SEQ ID NO: 274280 - DNA, 122 bp, Homo sapiens
acccaggcggcctcttccggcatctctcggtgggatgtgctgcacccaggcggcctcttccggcatctctcggtgggatgtgctgcacccagatgttctcatcccacgtctctcagtaggat

SEQ ID NO: 274281 - DNA, 122 bp, Homo sapiens
cgcgagctcaatcaggccggccaggagaccctcgtgacgggctggggctaccacagcagccgagagaaggaggccaagagaaaccgcaccttcgtcctcaacttcatcaagattcccgtggt

SEQ ID NO: 274282 - DNA, 122 bp, Homo sapiens
tgggtgtggggtcgggcagtaatcattggcaagtgctgacggggccagaacctgtctggacgccacccctccgccctttagatctctcatgagagcggaagtggggtcccggtggctgagtc

SEQ ID NO: 274283 - DNA, 122 bp, Homo sapiens
tcaagaaaatgctctcttggacctcactttccgttgttagaaggcatatcttgggatgcgcgttattggtttgtggagatcgtccctttttttcccctctgttatgtggatgcaccctagtg

SEQ ID NO: 274284 - DNA, 122 bp, Homo sapiens
acaagctcctacgaaaagccaacgctccacgcccattttcgtcagggaatatgtacccatcggctttagataaataaggaaacagcaggctgaaccagaactaagagaaaattgggcagaga

SEQ ID NO: 274285 - DNA, 122 bp, Homo sapiens
aggaccgggcaaaatttgctgaatgagtgaatggaaggtgcgggggagagcgggggaggtcggagagtaggaatgggtggcccaggtcagccaacagggtcttaatgctgggctgaacgtcc

SEQ ID NO: 274286 - DNA, 122 bp, Homo sapiens
agggggagggggagggcaaagtcccagggccccaggagtggctctcaagggctcaggccccgaggcggtgtctggggttgggaggctcagtattgagaattccccatctccccagagtttct

SEQ ID NO: 274287 - DNA, 122 bp, Homo sapiens
tcctgaggccggattgtgcctggggtgctccaggaacaacaaagaggccagtgtgtaggccgggcgcagtggctcatgcctgtaatcacagcactgtgggaggctgaggcaggcggatcacc

SEQ ID NO: 274288 - DNA, 122 bp, Homo sapiens
gacaaacaggaagcaagcggcctcggggccgcggagatttctacggggcggcggaggggtcgccgcagcgcccccagtgggccgtcggcggaggcgcaagccgcgtggcagggaccgtgtgc

SEQ ID NO: 274289 - DNA, 122 bp, Homo sapiens
gtcccaaatttttccagcgcttccacgaggtctgcttccaccacagattcacagagtcctcgaacatggacgacgggtgaaacagaaactttatgatgacttccacctgcctcctagcaaga

SEQ ID NO: 274290 - DNA, 122 bp, Homo sapiens
tgagagtggagccttagctggagcaccatgggcacggccatcttagaggaaggcagcagccgtacggcagagaagatgctcatatccaggacaatttggaaaaataaacaaggtttgaagaa

SEQ ID NO: 274291 - DNA, 122 bp, Homo sapiens
aacccgatgaagaggagggaactttccgcagctccatccgccgtgagtctggggagactgcgggtattctggggagagggctggttccaaggaccgcttttcccggccctccctggctgcgt

SEQ ID NO: 274292 - DNA, 122 bp, Homo sapiens
ctccttgtgccaggcaccctgttgttgctggggaagcggaagggagagacaatcgttaatcggctaaatttctgccttctgagagctcagaatcaagaaataaataatagggcagtaaaagg

SEQ ID NO: 274293 - DNA, 122 bp, Homo sapiens
ttgggagggttggaggttgagggtgactaaggtaacgaccggagacagctggcgcttctgcgcgagtgaagggcgcccggtcccggcataaaaaaaaaaaaagttttgtcaacgatgcccgc

SEQ ID NO: 274294 - DNA, 122 bp, Homo sapiens
tatgacagccacctcagtggcagcaatgaattccatggcagctgggacatctgtgagccacgtgggttcctgggcagcaccaggaccatctagagagagaagcagaagatgtcagggtactg

SEQ ID NO: 274295 - DNA, 122 bp, Homo sapiens
tcaggcaaatgagtaacttttcttctctctcccaaacttctgcttagacctaacaattgacgcaaagcttcacttatttctacactagatttacagatttctctgagcagatctgtagtttg

SEQ ID NO: 274296 - DNA, 122 bp, Homo sapiens
gacggctgggtgactgcgccccacagtgcgggccagggccggggcgtcccggcagggaggcgaccgtcccctgaggccctcagcccctgccgcggcagcgcctaatgaagcgcggaaaggag

SEQ ID NO: 274297 - DNA, 122 bp, Homo sapiens
aattagatagttatcctcttgagtagaagtgactactaaaagaagtcactgagaaagtaacgaacacaccaagcctaatggtaaccgactctgaatagatacatgcaatacatagccataat

SEQ ID NO: 274298 - DNA, 122 bp, Homo sapiens
gggccctcctagagttccggccttaacgcctaggaacgtgccattggctcctgcgtttctcgttcccgtcgggaacgccactggctagtaccttgcctggcccccagtgctcaatccctggt

SEQ ID NO: 274299 - DNA, 122 bp, Homo sapiens
gcggccggccctcgcgaggctggggcacctttctccaggtcaccaatggctgcgggtagccggaggcttggcaggcaacccgcaggtcctcacccaggttggctgtgagctccagcggctgc

SEQ ID NO: 274300 - DNA, 122 bp, Homo sapiens
gtgcgtgggtgacaaccgtgtcgtcctgctggacccaaagcctgtggccaacgtcacctgcgtgaacaagcacctgcccatcaaagtgtcggacccgagccagccctgtgacttccactatg

SEQ ID NO: 274301 - DNA, 122 bp, Homo sapiens
gagcaactccccactcacctctctgactcctggatgaccagggccttttccagggcctcccggcctggccccagtggcagccccacggctgaaaggcagcccccattgggcagggtcaggga

SEQ ID NO: 274302 - DNA, 122 bp, Homo sapiens
ctcaagttatctgcccacctcagcctcccaaagcgctgggattacaggtgtgagccacctcgcctggacccccaggttcctgtccacgcttctgggactggctgtgcctggcgggcctctga

SEQ ID NO: 274303 - DNA, 122 bp, Homo sapiens
gcttggatgccaggaccggacttcatgttcgctcactcgtctgagggtcccagtggaaggcgactaactccccagagcgtgagaccggcttttcacgtccagccgcagcgagcgcggggaat

SEQ ID NO: 274304 - DNA, 122 bp, Homo sapiens
gctaagccccggtgagagttcccccctgcacagtgacatgtaggcctcctgcctgtggaacgcagggagctcacactcgccctggccccgggtgcacgggccacagcagcagctccccactc

SEQ ID NO: 274305 - DNA, 122 bp, Homo sapiens
ctcccctccctgctgcggaggcctgcgctcctggccttgccaccgcctggccgactttctcgtgaatgacagggcctggcagaaggctggcagtgaatggaagcagtcctgacacccgagct

SEQ ID NO: 274306 - DNA, 122 bp, Homo sapiens
acttccccactcggggcggagccgcagcctcgcgggggcggggcctggcgccggcggtggcgtcacaaaaggcgggaccacagtggtgtccgagaagtcaggcacgtagctcagcggcggcc

SEQ ID NO: 274307 - DNA, 122 bp, Homo sapiens
ggaattctattttttattttcaccctctctttgtgatcgatcactagagaacagttaccacgtgcctggctgcagtgagttttaggattccaggatcccaggtgtaggagaatgtacaaaac

SEQ ID NO: 274308 - DNA, 122 bp, Homo sapiens
ctgaggtggctggagtgcaccctgagggctgattctgtgttttccaaatgcacgtcccgtcgggaggtgggaacattcctcatggttgcaaattctttctctttctgcttctttactctctc

SEQ ID NO: 274309 - DNA, 122 bp, Homo sapiens
agtgctgtttcctcaccacagaggttcctgaggtcacagtgttttccaagtttcctgtgacgctgggtcagcccaacaccctcatctgtcttgtggacaacatctttcctcctgtggtcaac

SEQ ID NO: 274310 - DNA, 122 bp, Homo sapiens
gtgccgcgcagctggagaccagaagcctgaggcagctcggccctccccagcccaaagtgccgttattccgtttctgtatcagtaaacacgtttcattttccgtagaccagggaagggtgatg

SEQ ID NO: 274311 - DNA, 122 bp, Homo sapiens
agcttgcagtgagctgagatcgcgccactgcactccagcctgggaaacagagtgagactccgtcccccccgccaaaaaatatgggtcaactgggagtagacctgcccacaaaaagaccaaaa

SEQ ID NO: 274312 - DNA, 122 bp, Homo sapiens
gccaccagcaagattcccttctacctacctcctgatatcagcgctgggacccccgcatcccggctggacctacctcccgagtaaacaggatagctgcatcgtagtgctcctcatggtcatct

SEQ ID NO: 274313 - DNA, 122 bp, Homo sapiens
gaggatgaggtagcattcaaaattgtgttctacctgggcaagaaccagggattgacagcccgttctctttccccagtgctggccagagttacagaagttggactgtaaacattggcaactat

SEQ ID NO: 274314 - DNA, 122 bp, Homo sapiens
gtagcgggtgtagggggtggtggcggtcagggcgtgtgtgacagcatcgatgacaggggacgtgtctgtggagccactgctgcagtaggtctccatcttggcgatcttttcatcaaagtact

SEQ ID NO: 274315 - DNA, 122 bp, Homo sapiens
ttaaatcaagcgccttgccaattaagtgctgacttgggaagtggacgcaatcttagcagacgtccaaccgcaaattaaaccgcgcctgactctggggagtggacggggcagcgggacccttg

SEQ ID NO: 274316 - DNA, 122 bp, Homo sapiens
ctcccgggggccgtcgggcctgtgggtgaccgtgcaggccaggatctcccccttcccagtcgtgacaaccacagatggccccagatgccacgttagggttagtgcctcctgggggcgggatt

SEQ ID NO: 274317 - DNA, 122 bp, Homo sapiens
gtgaagtcttgggtccaagttttgggggtcccaggggtacatgggggtagagagtggagacgttaaagaactgcccttgaaagctgccaaatgccttcacgttttaccatttagagatgctt

SEQ ID NO: 274318 - DNA, 122 bp, Homo sapiens
ggggaggccctaggggcggggcttggcgggggtggggtcttggagggtcgcaggtcgcggcgctggggatggtgggagcctgcgcagctggctgggcggtctctttctctctctcctttttt

SEQ ID NO: 274319 - DNA, 122 bp, Homo sapiens
agcccagtgcctgcgcatgccgccttcgtctcacgtttctgaggacggggatgctcatgacgcacttgggaattgctagcacgagatgttggccacttttatcgttggagaggatagcgctg

SEQ ID NO: 274320 - DNA, 122 bp, Homo sapiens
attaaaagctcttctggccccacgccattagtgccctctgtgcgtacccaggactgagtacgttgaagaagaaagaagagaaaggtatagctaactcatgtaaaatcccttctcctttacac

SEQ ID NO: 274321 - DNA, 122 bp, Homo sapiens
ctcagtttccatatctgtcaaccaggggtggttccctggggtagtgtgagagtaaattcccgccgcctgaggtgtgcagagttcccgcccttcccggagccgggcgccccaggagcgctctc

SEQ ID NO: 274322 - DNA, 122 bp, Homo sapiens
ctggggtaaaactgtctcggatagggtccctgtttaactcaagagtaaatcctaatcttccgagtgcctgaagtaatggaaggttacaggaagaaaataaaaacaaagaaactgactagggt

SEQ ID NO: 274323 - DNA, 122 bp, Homo sapiens
ctactgcctccagacaatgcaggtcacaggggcacatcatatgggacctcctggagggctcgttctcatctcagatgtcaggaggcacggcccagaacgtgcagggccctgagatctgtgct

SEQ ID NO: 274324 - DNA, 122 bp, Homo sapiens
gctcactctttgctgtaaaatgaccactgacccaacataccaaagatatgtaaaattttacggacaacaaaaatgcatttaaatcccaaatgcgtaagttgctctttatcttttcagtttct

SEQ ID NO: 274325 - DNA, 122 bp, Homo sapiens
tggcatgacaggcctggacaccatcctctaaccggcactcctcatggggcccacaggctgcgccctcctggcaggtgacatggccacctggcccacactcacagcgccgctcacactcaggg

SEQ ID NO: 274326 - DNA, 122 bp, Homo sapiens
tctctgctttagtgacaaggtcccagcccacgctgccaggcactgctgtggcaccccctgcggcagtcccggatccgagcaacccccaatggctgtgtgtggaaggaggaagcgagaatgtg

SEQ ID NO: 274327 - DNA, 122 bp, Homo sapiens
gactgtggggcctgccggcgctctaaaggctctgtctgtctgtctgactgtgggacctgccggcgctctaaaggctctgtcgcaccttgtcttgaattaaggatccgctgcagagtagataa

SEQ ID NO: 274328 - DNA, 122 bp, Homo sapiens
ggtgcctggttaccagagttctaagttctgttcgtgtggtcatcatccaggaagtgaggtcgcttctttacggttctgtcccctagtccccttccttccataagacctactcaggactccac

SEQ ID NO: 274329 - DNA, 122 bp, Homo sapiens
gcagtaaacagtctccttccacaaaaccatggcgtcgctcaaatgtagcaccgtcgtctgcgtgatctgcttggagaagcccaaataccgctgtccagcctgccgcgtgccctagtgagcgg

SEQ ID NO: 274330 - DNA, 122 bp, Homo sapiens
gcgacgcgagctggaacctggggcggtgctctggcgcgtcgctatccaggggagctacgtcgagacggcaggccacttagcaccaatgcagacccgggagctttgaggaagccagaggcttc

SEQ ID NO: 274331 - DNA, 122 bp, Homo sapiens
cataaggagccacccagccttacagttatttttcttccctccgtgtcttcgtcatttccccgtgtcacatctcacataacatacggggtactgcagcccattacctggggtgtgtcagaatc

SEQ ID NO: 274332 - DNA, 122 bp, Homo sapiens
aacaaagtctcccgtgtgtgtgcttttctcttgtgctgtcagctgtctccccaaaacgcccgaataatcacagccaccacttcagggctgctgggccggtcgccctggcctggcttctcaga

SEQ ID NO: 274333 - DNA, 122 bp, Homo sapiens
ggtctctatttaaaagaacccacatctcctatgtgcagaagccagaatgtactgagaatccggcccatgattggattacagcagtgatgcagattcaaaggagaccaaattcacatgcccgg

SEQ ID NO: 274334 - DNA, 122 bp, Homo sapiens
tgacgctagaggacatctgcgggctggagcccggcctgccctacgagggcttggtccacacgctggccattgtctgcctgtcccaggccatcatgctgggctttgacagccacgaggccatg

SEQ ID NO: 274335 - DNA, 122 bp, Homo sapiens
cgtcccgctagtctgagagtatcgctttatttcctgcctgccagacccctcccctccgcccgcccggctcatcccttcagaaggccctcgtggctgcccacctttctcgccaatcgtggggg

SEQ ID NO: 274336 - DNA, 122 bp, Homo sapiens
taagcctgtcggaaaagcgcagtattggggtgggagtgacgcgattttcttggagccgtccgtcacccctttctttgactaggaaagggaactccctgaccccttgcgcttcccgagtgagg

SEQ ID NO: 274337 - DNA, 122 bp, Homo sapiens
cactatcttctttataatttctcgtataatattctaataaaggtcactcaattgtgacctcggcaagcataattcactgcagaggcagtggcctagagctgtcagtttcccctggaggctca

SEQ ID NO: 274338 - DNA, 122 bp, Homo sapiens
gccaggccaaaggcctggatcccaggctgtcccaggagatcccagtgactgtggatgatgcgttcttgtggtcacacttggcttactttccccacggagccgagcatcagtggtgctctgaa

SEQ ID NO: 274339 - DNA, 122 bp, Homo sapiens
aatgcattcatttaagggatagctgtctgtttgtggatttcttagggttgagtcattacacgaggcttatcagggacagggatcagtgcttcggtgtcactggtgaaaagaagctcataaaa

SEQ ID NO: 274340 - DNA, 122 bp, Homo sapiens
ggccatgaaacaatctttacatgaagcatccttatacaaattctgcatgctatcccattccgccttttattttcttcaagtgatgaaaaggaaggatgctcagagagaccagcaaggacatg

SEQ ID NO: 274341 - DNA, 122 bp, Homo sapiens
gggcgccagcgtcggcagcacgtgacacctcccccctgctcccattcatcaagggggggacggtgtcgtcctttcaattcatttatctgcaggaatgattgctgctatcagtctcgcgctca

SEQ ID NO: 274342 - DNA, 122 bp, Homo sapiens
gcccaggagggaggagagttcatcaggcctggacgccccaagcaaggccacgaggggaaccggtggaagaggggttggcggccggggaccggagtcgcctccccggggcagcccgcacgttc

SEQ ID NO: 274343 - DNA, 122 bp, Homo sapiens
ctccacccgcggtggccactctcctgctcgtttcccttcgccgccaccgcgctcgcaccgcgggcacaggacaaagcagtcttgtgcgctcctggagactgcccatgtggcccaaggagcct

SEQ ID NO: 274344 - DNA, 122 bp, Homo sapiens
aaaaacccaaataatggtattttacataagatgtttatttctctctcacataaaggaggtcgggtgatattccgtttgttaggatggctctgtgatcatcagagatccagactcttcctatc

SEQ ID NO: 274345 - DNA, 122 bp, Homo sapiens
tcaggtcacaatattcattacctcaaccatcttggatacttggccagtcttatcaaaccacgaatagcccagttttcagagtttgctctagaatccctgtcctggtttattctaagacaagt

SEQ ID NO: 274346 - DNA, 122 bp, Homo sapiens
cttctccgaggattgtgggagatgtagtttttccggcgccttcgcgtcctggcgcatcgacgcaggacgcacttccgcatgcgccgcactcccggccttagtcgggtgcgcgcgtgcagggc

SEQ ID NO: 274347 - DNA, 122 bp, Homo sapiens
tcttggcagttctgccctgcacagctctggcctccacagttctggttggtttgtcaaggacgtttttaatctccatggtaaaccccggccggcggggaaggggggtggcagggagagagtga

SEQ ID NO: 274348 - DNA, 122 bp, Homo sapiens
gcgcggggcgcgcaacgagcagccaaacagtcggagcggagagatcgaagggctagtgggcgtgggggccgcagccgaggcccgggtggaggggtccccgccgtccctcggccccctccccc

SEQ ID NO: 274349 - DNA, 122 bp, Homo sapiens
caaagagaattcaattacccctgcttaatctattcttcctgtctttcctaactcattttccgctaccatcatttactgggttgggcctgaaatctagggatcttcttgcttaaatcattccc

SEQ ID NO: 274350 - DNA, 122 bp, Homo sapiens
caccctccacaatgtgggtagtcctcatctaatcagctgaagggcctgaacagaacaaaacgctgacctccctgggcaagtgggaattttccagtagactgtttttggactgaaatttcaac

SEQ ID NO: 274351 - DNA, 122 bp, Homo sapiens
ccccttgtctgccccttgcccaccgctggagctacagagggccatgctggcctggaatagcggccactgatccaggataacatctttggcctgggatctgggggtgttgcaatgtgtatgac

SEQ ID NO: 274352 - DNA, 122 bp, Homo sapiens
gacgccgctgaagaagcatcgttaaagtctctcttcaccttgccgtcatgtctaagtcagcgtctccaaaagagcccgaacagctgaggaagctcttcattggagggttgagctttgaaaca

SEQ ID NO: 274353 - DNA, 122 bp, Homo sapiens
gaggtgggggttgggaggtagcttgagcccagaagtttaagacatgcctgggcagtatagcgagaccccattatccacaagcgaggaaaaagacaaaaaacaggtataacgacattagggta

SEQ ID NO: 274354 - DNA, 122 bp, Homo sapiens
ccccgaaggaggtggaagacctcacaaggggcatcaagggcaggagtggggaaggcgaagcgggcttgcagttcctccagcaggttaccagttagcctggcttctcgtgcaggtcaccgccg

SEQ ID NO: 274355 - DNA, 122 bp, Homo sapiens
gagagaggaaggaagaaatgaaggaaggaaggaaagaaagaaaaaataaaagagtgaaaacggactggagaagaagaaaccacagttgctgctatatccaccagcctctctgcatgtcctgg

SEQ ID NO: 274356 - DNA, 122 bp, Homo sapiens
acggccccggcgcgcgcctgcagctgctccaactggaagcgactggggatgagggcggagcgcaggtgacccagggcctccagcaccaaggggtcgcactgcaggcagccccagcctccggg

SEQ ID NO: 274357 - DNA, 122 bp, Homo sapiens
caccggctaaagcacgcaggcaggggataggcagacagcgcccgcctagccagggatacgcgtgttgcggctgagtcgggcacactggggttcaaatcccagcgctgccatttacaaatcac

SEQ ID NO: 274358 - DNA, 122 bp, Homo sapiens
taactttttgaatagtccccaaaggggaagaggccactgaatggaattggcagtggttgacgtgaagtggtgtgatgtttctcgtgtagactgaagagttgaccaccacttcagaaacacat

SEQ ID NO: 274359 - DNA, 122 bp, Homo sapiens
aggcagaggcaggaggattgcgtgagaacgggatgtcgagactgcagtgagccataatggcgccactgcaccccagcctgggcaacagagcaagaccctgtctcgagacaagttcgtcttgc

SEQ ID NO: 274360 - DNA, 122 bp, Homo sapiens
aaaatggtgcaggcattgtgaaaacaatttggcaattccttaaaaagcaaacataattatcgtacgatccacagttccaaatcctagatatacacccaaaagaattgaaaacagggactcag

SEQ ID NO: 274361 - DNA, 122 bp, Homo sapiens
atcacctcccgcttcgtctgtgcgcttttcctctccgcagccttcctgggccgcctcacgcgcgctcagccctgcgcgagctgcgcctctccagctctcaacgtctcaactgctgttcatcg

SEQ ID NO: 274362 - DNA, 122 bp, Homo sapiens
gatgccttcgtgcgcatcctgcaacctgaacgctatgacctgtggaaacgtgggcaagaccgggcagttgtggaccacatggagcccagggtaccagccagccaagagctgagcacccagaa

SEQ ID NO: 274363 - DNA, 122 bp, Homo sapiens
aacccgggacatgctcggtgagcgcccaggtcccgcgcacgcgcagaagcgctcggagcccgcaacccgctggtggagaaaaaagaggagagaaatcacctcagagttacgtcaggaaaggc

SEQ ID NO: 274364 - DNA, 122 bp, Homo sapiens
ccgatgagaaactcctgatggtcagtcaattcaagcagcaagtggcccggtccagggacacgctaggaagatcctcttgctgttgctaaggaaaatgcccggttggggacaggccgggaggc

SEQ ID NO: 274365 - DNA, 122 bp, Homo sapiens
gcagagccacaaaggcaattctccacgaatgcacttcttctgtgttatcttgtttgctttcgcctacaatcccttaaaaatgacataagccagtttcactggagattcatttactatctctt

SEQ ID NO: 274366 - DNA, 122 bp, Homo sapiens
ataatgccaagggcagagaaggaagtaaacatcctggccacctcctccgccttaaacgcccgcctaggttttacagtcaaataccaataatttcctgaaggctgagtgtcaaacacggtcgc

SEQ ID NO: 274367 - DNA, 122 bp, Homo sapiens
gacataaccttagaaaacacaaaggcagcaggaattgccacctcttgtgtagttaatcaacgattaatatgaagacatttcattattgtgaactatttgattgatgaacataaatctgaggg

SEQ ID NO: 274368 - DNA, 122 bp, Homo sapiens
ctgcggccgcgcagagcatgccgggagccgccggccgccggtgtccggaccgctcgcccccgtttggacccgacttcggttcttctggggtgttgatgctcctaaagcccgagagcacgtgt

SEQ ID NO: 274369 - DNA, 122 bp, Homo sapiens
gtgcattcctggatgttgagcgcttgcgcccggttcaggaccgggtccaaatgaggttggcgtgcgccgtgcaggtgaggagtgcgggtcacctccccccaaaagaccctgtgccaacctcc

SEQ ID NO: 274370 - DNA, 122 bp, Homo sapiens
ctgggggcctggcaaatgtcaacagcaggcggtgggtggggccacgagaggaacaaacagcggtgggtggggccgtggggctcaagggcggagcaaacgtcagcagtaggctgtgggcgggt

SEQ ID NO: 274371 - DNA, 122 bp, Homo sapiens
gtctgcggcggctgcagcggatgatggtggcggccggcccgctgggctgtgcctgtgtgtcgccgcggaaatcagcgccctgcgccgcgcgctgagcccctgcaggtccgccgcagccccag

SEQ ID NO: 274372 - DNA, 122 bp, Homo sapiens
tccgggatgcgggcactgcggtagagcccgtcctgcccccgccgcccgccgcccgccgcccgcctccgctgctaaacccgcggacaaccgccgggacgaccacccagagccaccagagcccc

SEQ ID NO: 274373 - DNA, 122 bp, Homo sapiens
ttttgagggtgggactatcctgcaaggtgtgactgcggtcgggttttccgtagccagtttcgcaccagggatccttgggaagcgctgggatggttcaactgggtggggtcagaagctgctcc

SEQ ID NO: 274374 - DNA, 122 bp, Homo sapiens
aaatcaccaccttgagcaaaggagttactgagggcacgaggatatcccataagcaaaacccgcagcagccaaaacagataggaccagcaattcgctccatcccttagaacatggtggctact

SEQ ID NO: 274375 - DNA, 122 bp, Homo sapiens
attaaaaagtcaacatccgcgcagccaggccccccacgtgctcgccctccaggctcggggcgtttcccaggcaggtaggggagcggttgctaacagtgcagcgccaatcacccctgacgctc

SEQ ID NO: 274376 - DNA, 122 bp, Homo sapiens
tggaagagctaggagagcttgcagacagggcagaatgtcagcagctgccatctcgtctcccgttaggtggaatctcagagccctcatctgagtaaggattgtggtaggattcagtgcgaact

SEQ ID NO: 274377 - DNA, 122 bp, Homo sapiens
tgcctgtgctgctcagtgtgggcggcccactgtctaccaccaggatgggcaggaagaacacgtcctgctcctgccggttgaagcccacgtgctgcgtgtgcactgcagcggtgttgtctgtt

SEQ ID NO: 274378 - DNA, 122 bp, Homo sapiens
aggtgtagttgaggctgtctgacacgtcggggtcatgggccgggatgcagccgatcacgccggtggggaaactgttggacttgttggtgacatagttgttgaagaggatctggaagtcgggc

SEQ ID NO: 274379 - DNA, 122 bp, Homo sapiens
tctgctagagatgctttctgtattagatacatgttgtcaacaactcagaggaaataaacacgtttggttataactaacatgcactgagcactccggggagcaggtgccatgctaagcccttt

SEQ ID NO: 274380 - DNA, 122 bp, Homo sapiens
ttgagagtgaagcccccctccagtccccacgtcgacatccagccgagaccccctacagcccggcaccaaatgagtaaggaccacagactacagtgagacccgcctaggccagcccgaacaaa

SEQ ID NO: 274381 - DNA, 122 bp, Homo sapiens
ttggaggcacccagagcacagaggctgggcctggtgtggagctctcggccgacctcgggccgggctttacagggcatgtcagttagggctctgcagaaaaacagaaccgaccggagacagat

SEQ ID NO: 274382 - DNA, 122 bp, Homo sapiens
gggccttcccggaggtcactcattttaccagctgctgctgttcccagaggccatggtgcccggcaacctcctgccgctccctgcacccacctgccgctccctgcacccccctgccgctccct

SEQ ID NO: 274383 - DNA, 122 bp, Homo sapiens
catatgaatgtatgatatttaatgtaagttttacatggcaccagagccttcataaggaaacgaagacctgaagaaacctgagcgttttataccaagcttgatgaagagtagactgttatgga

SEQ ID NO: 274384 - DNA, 122 bp, Homo sapiens
acaatttgacaaagagttttgcttgcttaatttggaattgaagttcaaatctgcacctagcgcaacataatgaaatactgattgggtaactttttaaaaatcagaataattactattcaaag

SEQ ID NO: 274385 - DNA, 122 bp, Homo sapiens
gactcaaccacaatattcaaacccaagccactttcctcagcgcttcgtttcattggctgccgctcgcgtgatgtcatcacgtcggacgctgtcacggctcgcggcagcttggcgccaagaag

SEQ ID NO: 274386 - DNA, 122 bp, Homo sapiens
ccatagcaacagtaattttacctacgtaaataaatgtcgattgtgctgagtctggaagcgcggacgacccaccttgagatgcatctagcgactgctcccagcatgtaggagcagttgtaaaa

SEQ ID NO: 274387 - DNA, 122 bp, Homo sapiens
cctgctccggtgccttctcccagtccttgagtgctgcctctgatggggactcaaaaacttcgtccgggtatgtggacagctcttcatggaggataccttcctgggcaaagaaggatgtgtcc

SEQ ID NO: 274388 - DNA, 122 bp, Homo sapiens
gtgttctgggtattgcacggaatgtgagtatgagcagctttggtcctctgcccagctaggcgagggaaggttggggtgttcattgcacggaatgtgagtacgagcggctttggtcctctgcc

SEQ ID NO: 274389 - DNA, 122 bp, Homo sapiens
agagtactctgggcaaaagaactggcagagacaccaacatgaagcatactcagaggaccacgtggatcagttcatcaggagcaaggggtacacgtgggtgatggtacggacatattaattaa

SEQ ID NO: 274390 - DNA, 122 bp, Homo sapiens
ctccgagggtggtgccaccagccctgccactcgcagtcctgacgggcaggggctgcggaccgcccggccttggacccatccggagccacaggttggaggagataagtagctgtccccgtgct

SEQ ID NO: 274391 - DNA, 122 bp, Homo sapiens
cttgggcatggagctctggctctggaaacgtgtgcagtgctgcccgccttgggcccttcgcgatctgagaaatgtgagcgtgctttgtccccaacaggctccacagccagaggcttcggcag

SEQ ID NO: 274392 - DNA, 122 bp, Homo sapiens
cccccccccgcatggccttctgggagttgtagttcggtcgcgagcgctgccgtcgggaggcgctccgaggttcgaggctgtgccccgcgaccccgccttcggcgctcggctcgcaggatgga

SEQ ID NO: 274393 - DNA, 122 bp, Homo sapiens
acttaattcagcccccaaaataggaaattcacagctggttaaacatctgtgggccactggcggctgagaatgttcaaacacttaaactgtgttttccagatcaagccaatccagaagtcttt

SEQ ID NO: 274394 - DNA, 122 bp, Homo sapiens
gacagcacgcgaggcagacagacacgtgctggggcgggcaggcgagcgcctcagtctggtcgcctggcggtgcctccggccccaacgcgcccgggccgccgcgggccgcgcgcgccgatgcc

SEQ ID NO: 274395 - DNA, 122 bp, Homo sapiens
cccttaaggcggagctccgcctaggtacatttggtgcggaacttgccccaagcagcaagtcgtggggaaatgtgaaaccagcaagaactgcccccagggaaattgaagataaaacacaaaac

SEQ ID NO: 274396 - DNA, 122 bp, Homo sapiens
tccaggtctccagagcagtaggagggccacagggctgctgggtgtagtcgccccggacctcgcggtggccaaggccaaggcggccggggcacggtaccctgttcggcctgggccgcaaccac

SEQ ID NO: 274397 - DNA, 122 bp, Homo sapiens
tgattgtgaagcgacaacttaattccctagtgcaaaatcaatacaatttaaatttactgtcggaactgacattctccagcaaactaaaagatttcttcttccaatgacatgagatcatttta

SEQ ID NO: 274398 - DNA, 122 bp, Homo sapiens
acaaaatggagagaagggcgggggaccaaagggcaggcaccgctgggtggggcgcagcggcgtgagcacgctgagggccgcgcgccgggggcgccaggattctgctccctgggctcgctgcc

SEQ ID NO: 274399 - DNA, 122 bp, Homo sapiens
acaaaatgaggaccatcatggcggtgccggaaatctcacccctcaatgcccacctggaatcggaagtctcaaaacctgtgtagcatatcacatgcagctgggtcgtttcctggctaggttac

SEQ ID NO: 274400 - DNA, 122 bp, Homo sapiens
ctcacgccctcccggctgtgggtgccaagcggccgaagtgtggtcggggaggcgccctcccgcccggccgcggaggcccgagggcggctgccggagggtgctcggcggcgaagccccctgac

SEQ ID NO: 274401 - DNA, 122 bp, Homo sapiens
cccctgagcttctgggaaatggacatggccagcaccgccttcaggttcctgcccagggcacggttccttcaggccggggatcccggggaggggttcttcccctcggccagggtcatcgtttt

SEQ ID NO: 274402 - DNA, 122 bp, Homo sapiens
ggcttctgggcctaggagcaacatcatctagtggctggtgtctgagcttaggaaagccaccgaagctcaactgccactgtggcagacactgtcaggcccccgcctgccagcgtgtgaaatgg

SEQ ID NO: 274403 - DNA, 122 bp, Homo sapiens
tgaaaagaggctcgacataaaaatgggtaaagagatcagactgacattggcatggtacagcgtggtgatttagagaacaaggggaaatgccagcagaagaggactgagagagaggggcaaac

SEQ ID NO: 274404 - DNA, 122 bp, Homo sapiens
ttgtcctccagagaggctcatgggcccctgaccctgcaggtactaccgtggtgcagtgggcgccctgctggtgtacgacatcgccaagcacctgacctatgagaacgtggagcgctggctga

SEQ ID NO: 274405 - DNA, 122 bp, Homo sapiens
cccgggctgcgcgcccccgccgccaccgcgcgccccctgttcgctcgctccttcgctcgccggctttaaagtctctgccaggatccatgctcacatgttacttcctgtatggaggcatggcc

SEQ ID NO: 274406 - DNA, 122 bp, Homo sapiens
gcgccatgcattagctgtagtgcgatctgaaattgcagccgagcagcctccgcgcgctcgcgcacttcaagaacgcattttccttactgtcacgtttatgccccgagtggtaatttcgcttc

SEQ ID NO: 274407 - DNA, 122 bp, Homo sapiens
acaagggctccattacctgggtggtgtcttccatcagcccacgaatcttctccacaacatcgtttctccggtgctggcgcagggcgctaattagctgggcgaggctggcctcggggccccgg

SEQ ID NO: 274408 - DNA, 122 bp, Homo sapiens
aaaaggttgttttgatagtgtacagcacagcctggataactgcaaagttggggtttaccacgtgacagagctaggtattaagcccaagtgacctgaatgatcactccttggaggtgacataa

SEQ ID NO: 274409 - DNA, 122 bp, Homo sapiens
gcaagctaactggccacagtgcaagcccaaggggacgagggattccagactctggacacacggccgaaatagccaactgtgggctcctggctacagaggaggtgagtggagccaggagaaga

SEQ ID NO: 274410 - DNA, 122 bp, Homo sapiens
gttcctgaaggagcggcttgcacggctgacgcaggctcggcgccggcttgcccagttccccggttaaccacactctgtccagccccgtagacgtgcacgcacactgtctgcccccgttcccg

SEQ ID NO: 274411 - DNA, 122 bp, Homo sapiens
ggtctcttccaggtcggagtttgtctccccgaacccaggcgtcccaaagcagctgggggccgccattttgccgtacggcactggctacgcccggactccggtgcgcagccagtggagctctt

SEQ ID NO: 274412 - DNA, 122 bp, Homo sapiens
aaaaacaaaaaggatgtccgtggaaactctggacttgcgcaattacaggaaaggccactacgctgacacatcatgtcaatggcactgagctaggaggtggcagttaggaatcccgtgcctca

SEQ ID NO: 274413 - DNA, 122 bp, Homo sapiens
ttcagagggttaggttgagatggttggcagtgagttcatgcatggctaaactgcaccatgcgagaaatcaatgggaactcaagggattgggaattaaggagctggggagaaaagaggggagg

SEQ ID NO: 274414 - DNA, 122 bp, Homo sapiens
aacgttatccccctactttgttcattcatttgctcctttattgagtatgacatatgtacccgatcttgtgcttcattatgggaatagaggaatgaataagtgttcttgcctgtattccactc

SEQ ID NO: 274415 - DNA, 122 bp, Homo sapiens
aggaaatgggggcggcgtgggaggccgaggtaagaggaaagggacccactggggctgcgtcgctgtgagtgagcctcgagccactccacaccgactctccggcggcccaagccggcgcgcga

SEQ ID NO: 274416 - DNA, 122 bp, Homo sapiens
gacgtaagtctagctagcagggccagtgtcctaggcggggctttcggcacagcagtttcacgcgcacctttcccttcaggccaagatggacaatcaggtgctgggctacaaggacctggctg

SEQ ID NO: 274417 - DNA, 122 bp, Homo sapiens
aggtaaagccaacaggatggatttgggaccacattggacaacgccatcggctgcaccggacgcccagcaacagtaggtaaattaggtcatcattaaattatcatgaggaaaaacgcataatc

SEQ ID NO: 274418 - DNA, 122 bp, Homo sapiens
ggagctggatgtgggccagggttctgtgtccatccctggtaccatgggggccctctacatcgagcggcctgcagatgtcgaagagggtttctctatccaggcccctctggtgtatcattttg

SEQ ID NO: 274419 - DNA, 122 bp, Homo sapiens
gctcctcacttcctagatgggatggcggcggccgggaagaggcgctcctcacttccttgacgggatgactgccgggaagaggcgctcctcacttccttgacgggatgactgccgggaagagg

SEQ ID NO: 274420 - DNA, 122 bp, Homo sapiens
ctctcctgaggagtctagcagagtccacgctcctcatggctcagcctggaattgctctgccgctgcagaacccggtgggtcactgggtgacggtggggtttagcacccccccagttggcccc

SEQ ID NO: 274421 - DNA, 122 bp, Homo sapiens
tgtctgcgggcagaaggttttgtgaacattggtgccaggattgcgatgggtcggtggcaccgagggcagcgctgcagtctgtggtaggtgccctagcagcagctatgctggagttactagag

SEQ ID NO: 274422 - DNA, 122 bp, Homo sapiens
gccggaccctaactcctcccaaccccctagagctgctgttccttgattcttcatctaaggcgaacaggtgaataatggctgaattcaggaagggacagtttctgttcatgctcatttaacat

SEQ ID NO: 274423 - DNA, 122 bp, Homo sapiens
gcgagcccagcactcagcggaacctgtagaagcgtcgggggttgccccgcttctgcgaaccgccctgggatgcgaggttcagcgtcactatctcatcctgggaaaggatgagatccgggtgg

SEQ ID NO: 274424 - DNA, 122 bp, Homo sapiens
acttattcatgtaaccaaacactatctgttccccaaaggcctactgaaattttaaaaattcgtaaaaaaaaattaaataacttgaaaaaaaaaacaacctgaatgagataccatcttacacc

SEQ ID NO: 274425 - DNA, 122 bp, Homo sapiens
ctcccatctgcctagctaaaggcgtccataaatccagctttcagagctctcaggggttggcgagactgccatggacctcagtcacatcacgatggaaacaattgaaaaccacttggcaaaaa

SEQ ID NO: 274426 - DNA, 122 bp, Homo sapiens
agtgaactgagcaacagcaagtgcaaaggccctgctagcaccatgagcacgatgagagatcgtccaggaggcggtgttgatgcggcaaagggcaacaggaagggcattaggacttgaaatcg

SEQ ID NO: 274427 - DNA, 122 bp, Homo sapiens
ctcctttaaaataactacggtagtgggtttttcctttttttcctcttttttccctctctgcggagaatcgaactgagggaactgaacaaaccgcccctgggtcccatgagggaaaaaaaccc

SEQ ID NO: 274428 - DNA, 122 bp, Homo sapiens
gggggtatcagcaaaattgcaagggagctgttctttgaagcctgacgtagagatggtgaacgcctcttagcctgcgtgcaaaaaaggacagaatggaggacagttgtcttctttatctggtg

SEQ ID NO: 274429 - DNA, 122 bp, Homo sapiens
cgccgtcctggtcagcttttggagtcttttctgaactccacacacaacctctgctggcgacgtggcagcagggggccgtcccccttctgcctcccttcccgctaccccccagctggcggcct

SEQ ID NO: 274430 - DNA, 122 bp, Homo sapiens
gaaggaagaaatctgcatgaccaaggatgaaggcagagtcaggtcagaagcaaggaagttcggtgaggcccaaagctaaacacagccatcattcctaggaagcccactggggagcactggct

SEQ ID NO: 274431 - DNA, 122 bp, Homo sapiens
gctaagctggccagggcgtctccaggcagtgaaacagaggcggggtcggcgggcgattagcggccgaggcacgctcctcttggggcgggctgggcgcccctcgctggggtgggacggggagg

SEQ ID NO: 274432 - DNA, 122 bp, Homo sapiens
ggaaaaggacctcggggctggggccctggggcgcatctgtggaggactgaggggccggagcgggccagtcaacaaaggctttgattatatggatatttttaaaagagggagaccccgcattg

SEQ ID NO: 274433 - DNA, 122 bp, Homo sapiens
ggaaagatcatcctgacattcttcagcctaaccagtaagttgctgctgactctgcatgctcgtgagacagcccaacctccatagtaattatcagtgcttataccaaggttcaaggctgcctt

SEQ ID NO: 274434 - DNA, 122 bp, Homo sapiens
gagacgaaggaacaatgcctaggcctcgggtgggtgtgggactggggactccccatcccccgcaccccacccacctcccgcgggctccggattatacgtgcgtaagagtctggtgggatgga

SEQ ID NO: 274435 - DNA, 122 bp, Homo sapiens
agccgtggctggggcgctggggtggcagctgccgcgggagcatcagctaccggcgtgaggcgaggcagggcacgcgcgccgtccgcagccccgttgcctgggctgcaggtccactgacgcgc

SEQ ID NO: 274436 - DNA, 122 bp, Homo sapiens
ttcctttcctctgagtggaactgtggggccctggaagtttgctagtcctggcaagtttgacgtgacggggacgcagtcatccaacctgcaggcggaggcccgcaggcactttctcctgtcat

SEQ ID NO: 274437 - DNA, 122 bp, Homo sapiens
tcactggccacagacttgctccttagaggcaaggccactggcaggctctcagttcctctacggaatgtgaaacgtgcctcatctccccagccgggaaagaaactccccaagagctgagccca

SEQ ID NO: 274438 - DNA, 122 bp, Homo sapiens
ctctccgagaaatgcatagaagaaataatgacgtaagctgtgccctctctctctccgcctcggctaccaaacagggaagggatccctgtccggtggacacatgactcacgtgaccttaccta

SEQ ID NO: 274439 - DNA, 122 bp, Homo sapiens
acagcgctcctctggaagtcggagcgctcagacctgccagaaccgacccggaaaccaaagcgtgacagccaggggttgctagagcggccggcgcggcgcagcgaaccatcgagtttagccag

SEQ ID NO: 274440 - DNA, 122 bp, Homo sapiens
tctgagatcttgttgatttaagccctgtgtctgtcaaggtatctgacacacacacacatgcgcgcacatgcacacacacacactccttaacaggcgtcaggctattctgagcactctaccct

SEQ ID NO: 274441 - DNA, 122 bp, Homo sapiens
gaggggcgatgatacttttctccgagggatgtagcgatcagaagagacctttgtgtggaacgctttgttcaccggtggaaagtttattatcatgattagtgttaacttgacagtgggcactt

SEQ ID NO: 274442 - DNA, 122 bp, Homo sapiens
cttgcagcactagatattcaagtctgtgacccttcccagctggagcagcaattaggagagcgatctgttccattcaaacccaaaaaaagaaaggattcaatgccagcaacacaaagcacagt

SEQ ID NO: 274443 - DNA, 122 bp, Homo sapiens
cggaggcggggctctcacgaggcttgtcctgattggggcagcgtgtttgggggtggggcccgggagaggcggggcaggcaatgggggctgggccgagatgagggcctgggggtgaggtgtgt

SEQ ID NO: 274444 - DNA, 122 bp, Homo sapiens
gggaagtaaggagcgtctgcctggccgcccatagtctgggatgtgaggagcccctctgcccggctgcccagtctgggaaatgaggagcacctcttcccggccgccatcccgtctaggaagtg

SEQ ID NO: 274445 - DNA, 122 bp, Homo sapiens
caccttgaaacatctggaaacctgaggtcttgccatgggttttacatcctgcaaatgccccgctgtgtgagagcacaggtttgaatctgctttttaaactatgaactgtaatgacttaagtg

SEQ ID NO: 274446 - DNA, 122 bp, Homo sapiens
ctgcctgcttaggggtctaggccgaggcagggggaggaccggacggccggccactcgccgcgaccagcaggagagaggggtgcctgccacaggttgtcaccctcgccgcctcccccggcggc

SEQ ID NO: 274447 - DNA, 122 bp, Homo sapiens
ggagggctcagggagaagtgagcagttgttttccctggctggagcgcggcgcggcggcggcgaggggggctgggacgctggccccgggccagggacacagtttttttttttttgttgtttaa

SEQ ID NO: 274448 - DNA, 122 bp, Homo sapiens
atacccacccgcgagggctcggcggcttttcgactcggcggggatgaactgtggcaacttcggcagcccccaccgcggtgcggaagtaaagagggcaacattggcgactgcggctcggaggg

SEQ ID NO: 274449 - DNA, 122 bp, Homo sapiens
aagggtgaatgtgttagttttcatgttggtacatgaataaaagctgtttgtgtggagcagcgttaggcctgcaccctcctgggtcacatgcttcactgtttcctgctggaaaattattgagt

SEQ ID NO: 274450 - DNA, 122 bp, Homo sapiens
ccagagatttggtaccagacacatgtggctgttatacatgatggaaatcccttccatggacgttattcctacccatgaaggaaaggagtctgaaagctgaaataatctgccaaagatcaaac

SEQ ID NO: 274451 - DNA, 122 bp, Homo sapiens
gcgatcgggaggcgcgggcactctctagcaggtggccgcagccatggaggagatctctgccgccgctgtcaaggtcgtgccgggcccggagcgcccgagccctttcagccagctagtctata

SEQ ID NO: 274452 - DNA, 122 bp, Homo sapiens
caattacacgctggcaccagaggatgaatatgatgtcctcatagaaggtgaactggagagcgatgaggcagagcaatgtgacaagtatgacgcccaggcactctcagcccagctggtgccat

SEQ ID NO: 274453 - DNA, 122 bp, Homo sapiens
tctgacagggcgtgctaaggtcagagtcagaagctgagcggaactctcagagctggacggcgagctgcacggtgagtagaaagctgactcacactttccacttacattttgaataaacatgt

SEQ ID NO: 274454 - DNA, 122 bp, Homo sapiens
acaaacagtggaggcagtgaccggctgggtattcactggatgcaacagtaactcccaatccgagcaacctgagccgccattggcggcaggtctgctccctaaaaggccagcacttgccaatc

SEQ ID NO: 274455 - DNA, 122 bp, Homo sapiens
aaatcgcagggcaacgaaggaggcgggggtctctggaggttacttctattagcgtcaatacgggcgaaatcaggggacctagcaggagcctgaaaacttcaagccaaacaaacagtgagatc

SEQ ID NO: 274456 - DNA, 122 bp, Homo sapiens
atgcaggggtcagatgactgtggactccaggccaaaggagaaaagagcaaagggtaaaggcgaaggaaataaaaaataggagggccaaaggagagtactctgtgaccctcaattaaggtcac

SEQ ID NO: 274457 - DNA, 122 bp, Homo sapiens
aaagtcagtttcataactcagatgtgtctccactaaaacattatgagaaacaaagtccggcgctctctaggcaaccgtgagggcttgagcactaactagatctgctcaagggcaagagagga

SEQ ID NO: 274458 - DNA, 122 bp, Homo sapiens
gttagatctaaacacttgattagagtcacattaaacatttgggctgggcatggtggctcacgcctgtaatcccagcactttgggaggctgaggcaggcagatcgcttgagcccaggagcttg

SEQ ID NO: 274459 - DNA, 122 bp, Homo sapiens
gcagcgaggtggcagcgaggtacagtcgcagagttctctggagaacgaacacccccgccgcgccccaccccccaggactggtggagactggaaggaacgagtccagaccacgggaccttccc

SEQ ID NO: 274460 - DNA, 122 bp, Homo sapiens
cctgttggattcacccaacgcaactcttgggagacactagaaatcaagaaaggaggaaaacgaggctttaatcttcttgggttcctccaacagcaggtgcagttcctgttgggcttgtagcc

SEQ ID NO: 274461 - DNA, 122 bp, Homo sapiens
gagaacttctggaaggagttctcaggcccgcgctacttacagtgcaggaagcaagcggggcgtgaagaggaggtagaaacacagacctccctagcaaagagggaggcggcgcagcgtctgcc

SEQ ID NO: 274462 - DNA, 122 bp, Homo sapiens
agcactgtccaaagaagtacagaaacaggcctggccgtggaaatgaggaactggatgactcgacaggcaagccgagagtctacagatggtagcatgaacagctacagctcagaaggaaagtg

SEQ ID NO: 274463 - DNA, 122 bp, Homo sapiens
ggaggaatgcgaggaaggggcaaagagagctggcggacggggggtgaatgtcctttgttccgtccagcagcctctcctgaggacacttgcatgctaggccctctgctcggtgatgccgggga

SEQ ID NO: 274464 - DNA, 122 bp, Homo sapiens
ggttccgcgcgcagggattttaaatgtcccgctctgagccgggcgcaggagcagccggcgcggccgccagcgcggtgtagggggcaggcgcggatcccgccaccgccgcgcgctcggcccgc

SEQ ID NO: 274465 - DNA, 122 bp, Homo sapiens
tttggagtggggctattctatgaggagtggtcccagtggggagggtgctggggcatggggcgccctgttagaaatatacaggctgggcctcactagccactagcagctccactcagagactc

SEQ ID NO: 274466 - DNA, 122 bp, Homo sapiens
ggaagcgtgtatttaaccggcagcccaggtgaccctaatgtgttcaagtttcagaatttccgtagttaatgttaaccccaaatgaacaaaaagaaataattatacaaatttaaacagcatga

SEQ ID NO: 274467 - DNA, 122 bp, Homo sapiens
aacggagctgaacaagttcagccacgtggattctccaaattcggaatgcaagggtgaggacgcgaccgatgaccagtttgaaagccccaagaaaaagtttaaattcaaattccctaagaagc

SEQ ID NO: 274468 - DNA, 122 bp, Homo sapiens
aggggagcaccatcatggcctgtccacccaggtctttgcccacaggtggggcccagcttccgagtgatactcttcctcaacctttcagttctcttcccccaaccctggacaaccatccctgg

SEQ ID NO: 274469 - DNA, 122 bp, Homo sapiens
gtagaaaaagtcgtggcattttactcgtcctggcctctttcaccctgatacagtgagactcgatctggagaaaaccctgaagtcccagcttctcccttagggaagcaacaggagtgggccat

SEQ ID NO: 274470 - DNA, 122 bp, Homo sapiens
ctcctgcctccagggcggtggagagccgggagcggcgcagagcaggtgactcccagccctcgggcccaagggaacttttaaatgagagatttccttgcttgttctgcctcctgcgtttctcc

SEQ ID NO: 274471 - DNA, 122 bp, Homo sapiens
ctgccgctccaggcagtgcctgctcttggttcttgcttattccagagcatcccactcattcgactggatccctcacttcatcctccacttctaccaaactccgtcctgccaaattttatgac

SEQ ID NO: 274472 - DNA, 122 bp, Homo sapiens
tataaagtcaggccacacagggtggagcatttgtagcctccccagttgacacagaacacacgcagcttgttatctcttctttttatctgcttagacccaggttctcagcctacctcacaacc

SEQ ID NO: 274473 - DNA, 122 bp, Homo sapiens
acaaaaagcactgaacaaaacaatgcacatgattcaatggcttatgataacctcaaatatcgtgctgcatgaagtggtcacttgcattggcagacccgtctcatatttcctcacctgccccc

SEQ ID NO: 274474 - DNA, 122 bp, Homo sapiens
gctgaggggtcacggtgagtctctgtgggtgcgggtcggagggatgcccaggtgcctcgtcgccccacggcccgggcggaggcgggtccggaacctcccccaagtccggcctcagcctggag

SEQ ID NO: 274475 - DNA, 122 bp, Homo sapiens
gatgtgcgacaagtcctacacgcatcccagttcgctgcgcaaacacatgaaggtaatcgccgcactctcgtcgccccctttgaggcaggagctctcttggctctcggcttggggtcgggcgg

SEQ ID NO: 274476 - DNA, 122 bp, Homo sapiens
ccacgggtccctcgggtccccaaatccaaactcacgccgggaagtacctcaacgcacttccgccctggcccaggctggacaaagcccaggtgctgctgagctggaaactcgctcttcaatga

SEQ ID NO: 274477 - DNA, 122 bp, Homo sapiens
gaaggattgaaaggatatgtcgaggcatctgtgtggtgtggaaggaaaaaaaaaaaacggcgcggcagaggtcccccatcgggcgaaagtgcctcccaaccgcacatgcgtgggtccctggg

SEQ ID NO: 274478 - DNA, 122 bp, Homo sapiens
attagttgtaaacaccactgcactccgatcagccagcccatctttttcataggcagaatgcgacagaagaagcctggagcaggctgtggggaagcgggagcctcgggagagagcccaatcca

SEQ ID NO: 274479 - DNA, 122 bp, Homo sapiens
gggccgcgccggcgcccttccaggtaggggcggggccaggcggcgcgggaggcgggcgcgcggctcccccacgtggtctcctcaagccgcctcgctgggacggcctcccagtcgcgaccttt

SEQ ID NO: 274480 - DNA, 122 bp, Homo sapiens
ggcccctagtcctgaaagtccccagttttgctttcctccaaaaatctgctccagcttccccgttccacccacatataatttagaactataaattccacaattccctgcggttaaggtagccg

SEQ ID NO: 274481 - DNA, 122 bp, Homo sapiens
ctcatggaaagaaaacgagcaccatcatagaaaacacgatgctgctccgaggactgcggccgactcagcctccccggcggcccggtccggagtgggcgcttctcctgtccttccacgagcca

SEQ ID NO: 274482 - DNA, 122 bp, Homo sapiens
ctggtatgtttcttcgttctagatttttatttctgcaaaagattttccccctctccttggcgttgtttccccatggggagtagcatctttctttttgagcaaagccaaatgaccaaggcacc

SEQ ID NO: 274483 - DNA, 122 bp, Homo sapiens
gtgctatcttttttatcctttttgtttacttatttctaatcgccagaggggtcattctttcgcacaaaatctgaaaaagtagacagaagtagaaagaaagatacaaccaaccaaataaacaa

SEQ ID NO: 274484 - DNA, 122 bp, Homo sapiens
gtaaaccgtatcccttcattcattgtcagcagcagcttcctggagccatttttcagctgccggccgcagcacccgggctgccgccgccgcctcgcaatccgttgcatcggccgcccccgacg

SEQ ID NO: 274485 - DNA, 122 bp, Homo sapiens
ccagcacagaggcccaaagacagaaggccaaccacagggcacagctgtcctggaggcccccggcggctccgcagccctccctgcctgctgctggaggcccctagcagctccctggccctccc

SEQ ID NO: 274486 - DNA, 122 bp, Homo sapiens
tcatctctcacttagattacctagtggcctcccagcaggtctccctgcttttccctctctcgcctccctctcctcacctcccctcaccctccagtctcttctcaaagcagcaggagaaatcc

SEQ ID NO: 274487 - DNA, 122 bp, Homo sapiens
ggatcctctgccttgtgatatctggagataagtcaacgccttgcaggacgcttacatgctcgggcagtacctctctcagcaacacctccatgcactggtatacaaagtccccctcaccccag

SEQ ID NO: 274488 - DNA, 122 bp, Homo sapiens
gtaacttgcaggtttttacctacacctgtgacgtggggaagagggagaacgtctacctgacggctgaaagagtccgcaaggaggttggcgaagtctcagtcctggtcaataatgctggtgtg

SEQ ID NO: 274489 - DNA, 122 bp, Homo sapiens
tgccacggcggcctgctacgtaggtatgcgtgtgccacggcggcctgctacgtaggtacgcgtgtgccatggtggtttgttacgtaggtacgcgtgtgccatggttgtttgctgcacctatt

SEQ ID NO: 274490 - DNA, 122 bp, Homo sapiens
aaaaagcaagcgatttatttttttcctctatatccttagtaaccggatctcctcgaattccgcgcacacgaagactcaggggagggggccgagtggacttcaccccgcatgagacgtctggc

SEQ ID NO: 274491 - DNA, 122 bp, Homo sapiens
agagacactgggcagacagatacacacacgcctcctgagtctcagaagtctggtgtgcatcgaacattaagcccctagcctactgagacttcacctcccagctgctcttctaccatctgatt

SEQ ID NO: 274492 - DNA, 122 bp, Homo sapiens
gtcacaagatatccccaaatcagaggcaactaacagacactctaatcatgttaaacttctcgcagttttatgaacaaaccattctctcctgcctctttgtaccttttccttctgcctgacac

SEQ ID NO: 274493 - DNA, 122 bp, Homo sapiens
ttcaaatgccccaaaagtatttttctccctatgcatttgttattcttttatatcacctatcgcaagttgtagttatatatctatgtatctatataggtatatatatatacacatatatagag

SEQ ID NO: 274494 - DNA, 122 bp, Homo sapiens
aaaaaaaaaaaaaaaaaaaaaaaaaaaaaagccagagaaggaggctaagataaaagaatacgggggataccagactcctgaaagtcaaggcaagaaggcggtcatgtgccgatctgaagcct

SEQ ID NO: 274495 - DNA, 122 bp, Homo sapiens
agcggcgagcagagtccagggtgcatcccgcgcttggcttccgtgcgcagcctccccgcgcggaggcacctggctccctctcggctctagaacgcgaacagttggcgttgagcacacaactc

SEQ ID NO: 274496 - DNA, 122 bp, Homo sapiens
gcgtgtgcatgggaggagtgtgtgtgcgcttgatgacgatgatggagcccagtgagccaccgtccgtggagtgtcagagcctcctaggatggccacgccgaaggtgcggaaggaggcggctg

SEQ ID NO: 274497 - DNA, 122 bp, Homo sapiens
aatctaaatttttttctatgaatccaaggagaggtggtataggggaaaaaaaaaaatcctcgactggaaggaccaagatctgcctggacaatggcattgcttgtttacacaggtgcaaatca

SEQ ID NO: 274498 - DNA, 122 bp, Homo sapiens
cgagcgtcctccctgctgcccctccaaatgccacccacaagtccgagccccccggggatacgagaaatgccaggacatcccagagcgccagagccagggccccgtctctccgcgcggaggag

SEQ ID NO: 274499 - DNA, 122 bp, Homo sapiens
acaaaaatcctgctctcaccatgccagaaatcagctcaacatttaggccccttgcaaagtcgcgctggcagcgctcgcctggctttgcagagcttttagagttacccaccggctcttcctct

SEQ ID NO: 274500 - DNA, 122 bp, Homo sapiens
acaacttcggaggaggagatgatcgtttggcagatgaggcccgggaggggagcgacttgccgatgccatcctgctgatgtctccacttctgctcccggcagggacttcctaagcggcagctt

SEQ ID NO: 274501 - DNA, 122 bp, Homo sapiens
agccactcattggggaccttcccttcgtgggggctgtgtcaatgttcttcatccgacgcccggtaagggaaaacaatgaaggggtatggggaagcaggagaaacagaggactgggaggatga

SEQ ID NO: 274502 - DNA, 122 bp, Homo sapiens
ttagcatgagtcaggctccctgtaggcaccaaaaaattatttctttaatcagaaaaataccgaggaccagaggaatgttgaaacaggaaaagacatgatcagagctgtgtttatataaatta

SEQ ID NO: 274503 - DNA, 122 bp, Homo sapiens
aaacacagcattctaatgtagtctgtagtttaatgataatctgtgtcttgaaacatttagcgtagtacttatacaaacctagatggcatagtgtactgcatgcctagcctatatagtatagc

SEQ ID NO: 274504 - DNA, 122 bp, Homo sapiens
ctgggaaggctggaggaggggtgctgggaggcaggagcacttctggcgtccagtctgaaccgcacctagttgggggcgatgcccatttccagactagacgattgaagcccgacgcgacagca

SEQ ID NO: 274505 - DNA, 122 bp, Homo sapiens
caacatatactcagtattgttcaatgccctttgtacacattatctcctttaatcctcaagcggtcctatgaagatggattaccctcattttacagttaaagaaactgaggacaaataagtta

SEQ ID NO: 274506 - DNA, 122 bp, Homo sapiens
gttcagttttgtggtcctcgtgcagctggttgtgtgttcatctgttgacatttggaggtgcggtgggggatgttaatcagaggagcagtacctgagagagggcctctttctcacacactgcg

SEQ ID NO: 274507 - DNA, 122 bp, Homo sapiens
aagatttctttagactatttacgatttccttgaggttttggacttctttgaacacctcctcgatcctgctgaattgcttcgggagctgaatagtcaaggggggcaggcttacctggtagggg

SEQ ID NO: 274508 - DNA, 122 bp, Homo sapiens
tagtgttaaaatggtttataaacatctcaagtaaattatcttttaaaacacaatggttctcgagcctgtatgtgcatgacaacaaacactaggggagatgcttaaaatgtagagatgcttgg

SEQ ID NO: 274509 - DNA, 122 bp, Homo sapiens
cacactcacactctgcctgggctctgtaagaacagcccggagcctccatccagttttcatcgcagaggaggcggggcggcagcgtgggcaggagctcaggccaggagaatccctactctaag

SEQ ID NO: 274510 - DNA, 122 bp, Homo sapiens
atgggaatcatgaactccttcgtcaacgacatctttgagcgtatcgccggagaagcgtcacgcctggcgcattacaacaagcgctcgaccatcacttcgagggagatccagacggccgtgcg

SEQ ID NO: 274511 - DNA, 122 bp, Homo sapiens
acatcaagacagctgtctgtgacatccacctcatggcctcaagatggctgtcaccttcatcggaaacagcactggcatccagtagctcttcaagcgcatctcggagcagttcactgccatgt

SEQ ID NO: 274512 - DNA, 122 bp, Homo sapiens
ggtgcagcatggactgagttcttgacaacagaatgtggtcagaagtgacatatgccaacacggggtctgggtgggggctcccccacatcctttccttgcctatgagctggaacataacacat

SEQ ID NO: 274513 - DNA, 122 bp, Homo sapiens
agagaaggaaattgaggcccaagaagctgcatgacttagccaagttcacggagtagaacccgggattggagcccgggacattgaaatgaaggcgtcttgcattgcagctccgttgcagcgca

SEQ ID NO: 274514 - DNA, 122 bp, Homo sapiens
ccatcactaactcaattgcctactattctgagggggcggatagagttcctgggatattcccgggaataccttcttaaagctgtattctctcaaagccaaaatcagtggagttggatgaagca

SEQ ID NO: 274515 - DNA, 122 bp, Homo sapiens
ttacaaccaagccgcggacaactcatgagtagggccgagattcctggtactgtggagaggcgcagagcatatgaacacctcaaacagatgattgtcacagggtgggaaatccttccatgaaa

SEQ ID NO: 274516 - DNA, 122 bp, Homo sapiens
tcctgtggcagagaaaagaggtagtgagcggtgtttcaggatgtgagggcccgcaggagccgagtcaggctctctccactgcctgcccgccaccgtgcaagctctggccggcgctgcccaca

SEQ ID NO: 274517 - DNA, 122 bp, Homo sapiens
caggtttccaggaccggtgggtgaatctacccggggaagttttggtggacaagagctgctcgccagctgtcggagtgggagaggccagcgtgctggctccatccacttcacctaacacctct

SEQ ID NO: 274518 - DNA, 122 bp, Homo sapiens
ggctgtcgtgagaacagtggctgcagatgtgagcggctggcaggaagtggccacttgaaccgcagatgcttcctgggctggtcagggaccgggggtgctggctgcagctgggaccccccccc

SEQ ID NO: 274519 - DNA, 122 bp, Homo sapiens
ttctcctcctctgaaaccccatgattcagcagcgtctcccatgtgtgctcaaaagttggacgtgcctccagcctaccctccaaagcagttgccataggctcttttcttccaaggttgggagg

SEQ ID NO: 274520 - DNA, 122 bp, Homo sapiens
cgatgccccaggtcccaggccccagaaggctggtcagcccccaggacaggaaccaggccacggctgaggactgtgagggtggcagacagaaggacaatcagacccaggctgcccaggcagag

SEQ ID NO: 274521 - DNA, 122 bp, Homo sapiens
ccatgctgggcctccagttcagaatgaaaatccactcttaaagaatctgctttaagaatccgatgaagcaagcactggctccctctctgcccccaatgtgcagcggcgccagtgcccagcag

SEQ ID NO: 274522 - DNA, 122 bp, Homo sapiens
taagataggtggatacatagagaaagcaaacaacattaattagccgggcgtggtgccacgcgcctgtaatcccagctactcgggaggctgaggttgcagtgagccgagatcacaccactgca

SEQ ID NO: 274523 - DNA, 122 bp, Homo sapiens
catggcaagcaagggcttgcaggacctgaagcaacaggtggaggggaccgcccaggaagccggtgaggatagcgcgcgacctagggctcaggcaggggcacctgcgtggatgcgcaggcaga

SEQ ID NO: 274524 - DNA, 122 bp, Homo sapiens
acattttttcccaatgaagttcttcctccctctgcagcgtccccagcctccagccagcttcgctagccagggacacaattggattgcaatttctagcacttcctggagatcaggtccctgaa

SEQ ID NO: 274525 - DNA, 122 bp, Homo sapiens
atttccaattagaaggcctaggtcccagctctgccccacagcgtggctttgggccaggcacgtcatagccctggaactctttcttcccattgttgagatgaagagggtgcacgatatgttcg

SEQ ID NO: 274526 - DNA, 122 bp, Homo sapiens
ctggttttcttcccaggtctaagtcagtcttgacgcctaatcgtcaaacccctggagtcccgtcccccaggaccattctatttcaccacctccctccaggtcccccactcctcccaccgccg

SEQ ID NO: 274527 - DNA, 122 bp, Homo sapiens
cagcatatagaatagaaaaaattgcatccagataagccgaccaatacagaaatgcatgcacggttgtatataaaatcatttctaaaatataaacaaactataaagaaaacaatataaacaat

SEQ ID NO: 274528 - DNA, 122 bp, Homo sapiens
tgggaggaaggcaggctctctggatcctgcccacccctgcctttcccttagccttccctgcggtggtacaaacacacagaccctttcaagtgagggcttcattggcaattcgtccagacaat

SEQ ID NO: 274529 - DNA, 122 bp, Homo sapiens
gcttgttgtactcacagttctcaagacctcacatgattcccccatcacaccatgtgggggcgacacacagagaagcaccagaatcagtcaggaggcaggagcatggaggggggaatatgtgg

SEQ ID NO: 274530 - DNA, 122 bp, Homo sapiens
aggtgatttgctttgctttgaagggggtcgacaaaggggctctcttggatcctcgtgggccgctgctcgcagtgtgaggcactttcacgactctcagagtcaagtcataggcgaagtcagga

SEQ ID NO: 274531 - DNA, 122 bp, Homo sapiens
agacggggtttcactccatgttggccaggcaggtctccacctcgatctcaggtgatccaccggactcggcctcccaaaatactgggattacaggccagagtcaccgcgaccggcctgcgtcc

SEQ ID NO: 274532 - DNA, 122 bp, Homo sapiens
atgatgagattcgtcagtttcgcaaggcctgtggggaggctcatcttaaaactatattagcgacaggagaacttggaactcttactaatgtctataaagccagtatgatagcaatgatggca

SEQ ID NO: 274533 - DNA, 122 bp, Homo sapiens
ggcttggtccccaaagtcacgcagctaccaagtggccgagcttgtggctgctccaagacccgagttcttcctgagtgccagggtagcatggcatggcaggtgccagagaatttggcaagtcc

SEQ ID NO: 274534 - DNA, 122 bp, Homo sapiens
gcacttgcacgacgtgggcctctgtgcagctctactttgtccttaactcctctgactcaacgttatcgcagtttgactctggagccactcaggtttttcctaagctcaactctagccagcta

SEQ ID NO: 274535 - DNA, 122 bp, Homo sapiens
atacgcactggttgtctggacctgagggcaggacgccgcattcattacactccttcttatcgtgtgtcaatatttgcctccaagattagggacccaaaatatttctggtccctgaccgcttc

SEQ ID NO: 274536 - DNA, 122 bp, Homo sapiens
tttttttgggtggcggggggttgcaagtgggaagcctgctgttcagctgccggggctctccgcctccccccacctgtatgaggctgggtctggggaacctgtgctcagcattccaccccctg

SEQ ID NO: 274537 - DNA, 122 bp, Homo sapiens
aatcaaaggcggggtacagggccagagggaggaggaaacaacttcccggttgctttcagacgcttcagagatcctctggaggcctgggggagcttttgagtactttatttcagttggtccct

SEQ ID NO: 274538 - DNA, 122 bp, Homo sapiens
agggaagacggcgggaaaaggtaagctaagctccctaggctttttgcgtgtgagtatagacgctccatcagacaaatttagcttgggttcttagatacccttggggaaaaaggcttgcagtt

SEQ ID NO: 274539 - DNA, 122 bp, Homo sapiens
cagctgggacccaactctccgtagcctatgggggccatccgcccaccccaccctccctgacgcaggggctgagagtatcagcagaggtcggctggctctgccctgtctcaggttggaaagct

SEQ ID NO: 274540 - DNA, 122 bp, Homo sapiens
tcggggttggggcctgtcggccggcctctccccatttttgtgacgtgtcaggggcagcagcggtgacggggccaccacacaaagccaggtcgtcgggcagtggtctcccaggctaagagccc

SEQ ID NO: 274541 - DNA, 122 bp, Homo sapiens
agctgagcgccctgggcgcccggcgccacgccttcttccgcagtccgcgccggatgcggccgctggtggaccgcctggagccgggcgagctcatccccaatggtcccttctccttctacgga

SEQ ID NO: 274542 - DNA, 122 bp, Homo sapiens
cgcaagcggcatgaaagggccctccgaggagaatgtcaccttttctgtcgcaaagaagctcgcgcggggcggctcccctttcgcttgcctcgctggaagagcctggcgctcagtgcgttgtg

SEQ ID NO: 274543 - DNA, 122 bp, Homo sapiens
gcttggcggagtcctttctggcacaagcgcctttgggtggattgaaacagcgcgatgtgacggacttgagatagtgctttcagcaggaaaaaaccagagaggaaaaaaatccaaaaacatca

SEQ ID NO: 274544 - DNA, 122 bp, Homo sapiens
agagaaagtgttttcaactttctgctctttttgaaaagtcatttatatgttatatttagccgggcaccgtggctcatgcctgtaatcccagcactttgggagacccaggtgggcggatcaca

SEQ ID NO: 274545 - DNA, 122 bp, Homo sapiens
gccaccacacccagccaagactcatttttaaaagaatgttgaccagagacagaagagaaacggatagaaggcagtttagaaacttctagatcaaagagactttttgtgaattgagctacagt

SEQ ID NO: 274546 - DNA, 122 bp, Homo sapiens
gtgtgtcatttctttttaaagtaaaaaggttaataacgatatgtttatcctcctaactttcggttaatcaatttagtcatttgaatcaaaccgtatgggagatatttttctgtaaagtaatg

SEQ ID NO: 274547 - DNA, 122 bp, Homo sapiens
tatggctgcttttgaattcctacagcacagctgagcagttacaacagagacggcatgatccgcaaagccgaaaatatttacagaaaatattttctgccctttagagtaaaagagccaatccc

SEQ ID NO: 274548 - DNA, 122 bp, Homo sapiens
ccgggcccttctgaccttggctgcccgcgagggtgggctagcgaccgggcgccggccccgcggctccgcaacctcccccggacaagtttcaggcgatgctgtgaagttcacgactggcatag

SEQ ID NO: 274549 - DNA, 122 bp, Homo sapiens
tttcataagggggaggatcaataacgcagtgttctgtttctgtttttgttcgtgtgtgcacgtgtatgtgtgcgtgcatgcgtctgtgtgcatgcgtgtgggttcagttcagacagcctcct

SEQ ID NO: 274550 - DNA, 122 bp, Homo sapiens
tcggtgagtgaacacagcgtgggagaatcgtgtgtgtgtggtgcccacgtggcacatgctcggtgaatgaacacagcgtgggagaatcgtgtgtgtgtggtgcccacgcggcacgtgcttgg

SEQ ID NO: 274551 - DNA, 122 bp, Homo sapiens
tcaattggccgcagggcgcacacaggccggtgctcaccgccacgttcccgttgcacggagcgctgcagacactgccagtcactggccgggagcctgacacgcagaggtccccgcacacgacc

SEQ ID NO: 274552 - DNA, 122 bp, Homo sapiens
taagaaggaacatatggtgtgcaggttactcaatcacatcttatctttggcacctgcctccgtcctgtaacttgcgatgctctgggggccagatcatgttatgtggctatgatatatttaat

SEQ ID NO: 274553 - DNA, 122 bp, Homo sapiens
ccttctcctccaggttctgtttttctgtgaattcttctagaaacccgagcagggcctttgcgtttctgaacctccattttctgcttttttatttacttgggtagtgctcgaagttccttgga

SEQ ID NO: 274554 - DNA, 122 bp, Homo sapiens
aacagagatgcctaaactaaaaggttatcctttgtccttattaaagtatgactgaaagctcgctggagaatatagtttctacatagagtcaaaacagtccttcgggctcacaaatttaatga

SEQ ID NO: 274555 - DNA, 122 bp, Homo sapiens
ttcctctcctgtatttggagatacacgtacaggtatgtcattaccgtgccaggggaataacgcacctcacacgcggtgcgggtttgcggcctagcagcagcggaccgcatcagctgcctagt

SEQ ID NO: 274556 - DNA, 122 bp, Homo sapiens
tttaggttgagagaaacaatttcgaatgaatgggggtctctccaacaaagcagtctagaacgggcccctgaggtttgaattcaggccttaggaatgccaaagctcactgagcgattctgttt

SEQ ID NO: 274557 - DNA, 122 bp, Homo sapiens
aacccccccctaccaaagatgacactcaacaccgagcaggaagcaaagacccctctgcaccggcgagccagcaccccactgcccctgtccccacggggccaccagcctggccgcctgagcac

SEQ ID NO: 274558 - DNA, 122 bp, Homo sapiens
gtcatctctcttagactcaggaccaatatcatcatcgctgttagactcggggccaatactcgtcatcactgttagactcagggccgatatctgtcatcgctgttagactcagggccgatatc

SEQ ID NO: 274559 - DNA, 122 bp, Homo sapiens
actcccaacagttgttttcagcagtctcacccgtgattttatgagtacaaaggcctatgtcgggatcccatattttttcccttcttccacgtctagttctgcgcactgttatcatttacgta

SEQ ID NO: 274560 - DNA, 122 bp, Homo sapiens
ccgcaggctgggcttgggtggcctcgggcacgtgacaggtggggcccgtgtcctgataaacggacaggaacaaaaggaacgcaaggtctgggacccacggctctgggagcagcgccacccag

SEQ ID NO: 274561 - DNA, 122 bp, Homo sapiens
tcagacaaagctgaacgaatacaggcaaccattggataatatcgctgccactccagccaacggaaagccgcctttaagtagggtcgcgaaggaaggcgctgcctcgcgttggaggagcttgc

SEQ ID NO: 274562 - DNA, 122 bp, Homo sapiens
aatcaagtcagaaacttgctgtttggctcgagttaggaaaacctagcctggtagttaccacgcaggttgaaaggccagtggggcataattaacgagccctcagggtccacgctcccgccctc

SEQ ID NO: 274563 - DNA, 122 bp, Homo sapiens
acgatagggaaggggcagtcggagtaggcgcaatcctgcagggtggcggggtccgggccgcgcacgagggagggcggggcgcagcgctgcaggggtcaggggtcaggggtcccggccccgcg

SEQ ID NO: 274564 - DNA, 122 bp, Homo sapiens
tctgtgtctctgccaccatccgtagtgcctgggatgtgaaaggcgatcaggaaacgttaccggaaggcacgtatagacgtggacctgtgggctcgggctggctgcgggtcactggtccctgc

SEQ ID NO: 274565 - DNA, 122 bp, Homo sapiens
attctcagtgggggcgggggctgagtggggcagggactccgcagcagtgagagcctctctcgtcctctcgtgctctcactggggctggtggtccgggggtcttactccttggaggccatgtg

SEQ ID NO: 274566 - DNA, 122 bp, Homo sapiens
aaaaaggtgggtgttttttctctttcagagtaatacatttagatacacgcaacatacatgcgtgggtggcaggaatgcaggttattcagcttagaagtaaacccaactgggtaaagtttatt

SEQ ID NO: 274567 - DNA, 122 bp, Homo sapiens
ctgtgcccaccctggcccaccctgccgggaccctccctttcccaccctgccctgcagtcccgccccctggaggagttgaatgatggattaatccttcatcactgatcaggtactgcctgctg

SEQ ID NO: 274568 - DNA, 122 bp, Homo sapiens
gtcctcaactgagaggcggggttgagccacctacccagaggcctctgcgcacgccaccggcgcacaggcgcagtaggacactgggcgccgcttagccgactcttactcctcctccccgcaat

SEQ ID NO: 274569 - DNA, 122 bp, Homo sapiens
ggttgtgactgaccgagacagcggcttgggcttcggcagagacttgagactgcgggcacccgctgccattaggattgttgaatgagctgtgagaagggagtgggggatatgggactcttaga

SEQ ID NO: 274570 - DNA, 122 bp, Homo sapiens
aaccagtaagtaggaagtattaaactcagcaatgcattagacagctagcggggcaagacacggaagtaaatggcacactggtcttaccttccaagagttttcaatctaattggaagggagta

SEQ ID NO: 274571 - DNA, 122 bp, Homo sapiens
aaggaatacgttggcccacatagttttttgttcctaggcacttacaagctgcctgggagtcgcaggctggaggccacagaagcccaggtccccggcctccaggcacttacaatctaaggcag

SEQ ID NO: 274572 - DNA, 122 bp, Homo sapiens
cctcacttgggaagcgcgaggggtcagggagttccctttccgagtcaaagaaaggggtgacggacgcacctggaaaatcgggtcactcccacccgaatacagcgcttttccgacgggcttaa

SEQ ID NO: 274573 - DNA, 122 bp, Homo sapiens
ggaggaaagctgagcccagtgactggctccaaaatgaatacacagggccgggtgcagtggcgcattcctgtaatcccagcactttcagaggctgaggcagataagattgctttgagctctgg

SEQ ID NO: 274574 - DNA, 122 bp, Homo sapiens
tttagttaagagttctaataagcagctgtttaatgagcacttgtgccagcccatatactacgggttttgtgtattattttaaaaagccttttaacgagcttttaacattttttaagtgagta

SEQ ID NO: 274575 - DNA, 122 bp, Homo sapiens
tttctgccacagggtagccttggcctctttcaggagattgctccatataattgtttctagcgcacagctggggacaggcccagcctttctcccaaccttccccctcgccccccgacggcttc

SEQ ID NO: 274576 - DNA, 122 bp, Homo sapiens
cctctggcgcggggatgttttccaaacgggctgcctgcgggagacggctgtgctgcagcccgagctcgaggggggagcgccgcctccgcaggcctcctgagacccgggcggctggggacgca

SEQ ID NO: 274577 - DNA, 122 bp, Homo sapiens
cctagttttccccgggatctggcttagtgttctgtcctgcaacccaagtgtgctgcagcacgtcttgaaaatcttgaaaggaaaggtttgaaaatcttacaggaaacgtcacgtggacgagg

SEQ ID NO: 274578 - DNA, 122 bp, Homo sapiens
cttgtccctaaagacccctggcagaaattagcatcctacaaggtggtgccggccaggagccggagattaggctgcgcctcaaagcatcccacccccgggtctggtgggagggaggagttcac

SEQ ID NO: 274579 - DNA, 122 bp, Homo sapiens
gttgagctctgtacaacacctgattgcaggagtgagccaccacgctcggcccaataattacgatttttttgagagcctggagaaaacatagtagtgttctctatggtggaaatgtttacata

SEQ ID NO: 274580 - DNA, 122 bp, Homo sapiens
cccctcaacatcccatcatgggcctgtggcaccttgggaagtaggccctaggcacacccacggcttctgcctcttcctcgggccatcctggctttccccaggccctacaggtagctgatgcg

SEQ ID NO: 274581 - DNA, 122 bp, Homo sapiens
gggttttggaggggttcctgaggaactggattccgagcttgctcgcaaggcgagacgttccgtggaggcggagtttacgatgtatccaagtctgacggccccagaaacgggtgtgcagggcg

SEQ ID NO: 274582 - DNA, 122 bp, Homo sapiens
agacgctccgttgcggtcgtggtggaacaggtggagcttgcctcgttgccttctgggaaacgaagtctcgctgaagagaggcggaactttgagtagcaggtggatccatagccaatgaagac

SEQ ID NO: 274583 - DNA, 122 bp, Homo sapiens
tgccctgggcccacctgcttctgttttctttgcttgggtcttgaggaattccagcagctgcgcggcgtgcacaagggctgccattgttctccgcctcagcgtggcggacaacgcgtccccag

SEQ ID NO: 274584 - DNA, 122 bp, Homo sapiens
ttctggtcgcacacgatggcttaagcttggagactgtgctgtgcaggagacagattccgccgcctcccccactcgggtctgtttttcagccgtggctccggcagtgggtctgattttatccc

SEQ ID NO: 274585 - DNA, 122 bp, Homo sapiens
gttcgctttcgtagagtttgaaatcagacagccttttctggaattcggtcttgagttccgcgattttgggaatgtagttcaggccatcgctttcatttctggaagccaatttcagggtggga

SEQ ID NO: 274586 - DNA, 122 bp, Homo sapiens
gggcaacagaccctgccctgcacagacccctgggcttcccaatgccacccaccagccagccgcccccatcagtctccatgtcgcaaaacacgttcaggggccgctcgcggttgccgttgagg

SEQ ID NO: 274587 - DNA, 122 bp, Homo sapiens
ggcgcgtgctcagtgtgctgggtaccaggcgactccgggacagggggtctcggccgtcggcgtcatggtttcgcgcgtgcagctcccgcctgagatccagctggctcagcgcctggcgggga

SEQ ID NO: 274588 - DNA, 122 bp, Homo sapiens
aatccttaaaaactcttagtctgtaaaagagtgttactctgacccaactccgccagaaggcgcctctcaggtttgttttctctaaaataaacctgtcttgactggcaagccacctttcgtgt

SEQ ID NO: 274589 - DNA, 122 bp, Homo sapiens
tcagccgccgccgccagatctattattgatgaactttccgaggcccgctaattaactgcgcgcacccacggcgggcgccgtggcggtggcggctgaaatacggcctgcatgtcccaatgtca

SEQ ID NO: 274590 - DNA, 122 bp, Homo sapiens
ctcttcgtaaaacaaacctgaaaatccattaccagcagtcaccaaatgctggcgccttgacgaatggccaaactgccagcatccgggaaatgccctgtgctgacaagtgacttgcaaaggag

SEQ ID NO: 274591 - DNA, 122 bp, Homo sapiens
attacataatctgcaaacactgcaaagcctcctaaaaggcatgctggcaggttaaaaggtcgttgtctggatgatagtcaagccacagagaaacaggtctgtgggggccagggggaaatatc

SEQ ID NO: 274592 - DNA, 122 bp, Homo sapiens
aagatggccgaataggaacagctcgggtctacagctcccagcgtgagtgaagcagaagaccggtgatttctgcatttccatctgaggtaccgggttcatctcactagggagtgccagacagt

SEQ ID NO: 274593 - DNA, 122 bp, Homo sapiens
gaaagtgggaagagggggaagccgatgtcagggtagccactcttctcaggtaagaagctccggtagctctttctccgcttctttggtttcacactgggtggcaccgatgcgtctggtgcggt

SEQ ID NO: 274594 - DNA, 122 bp, Homo sapiens
aagcgcttcctgttgacatcaacacactcttaggcctttctcctccgcgccctccaaggccggcatcgcccaggcgaccactggaccacgaaaaataaagtcatgccccccagcccccactc

SEQ ID NO: 274595 - DNA, 122 bp, Homo sapiens
ggaaaatcatcctcttcgggcagccagctccttccctgtcctcccgcttactatggactgcgggaagcaagaccctggtgatgatatgatggcagaaaataaaaataataatggtgactgta

SEQ ID NO: 274596 - DNA, 122 bp, Homo sapiens
cactccctcctgggtgacacagcaagaccctgtctctaaaaaataatatctttagcctggcgtggtggctcacgcctgtaatcccagcactttgggaggccgaggtgggcggatcacgaggt

SEQ ID NO: 274597 - DNA, 122 bp, Homo sapiens
gaagaacagtgaaaatgagactttttataacggtcttgtaacatcgggtgtctgggacgacgcacctgggtcagtcacaacaggtaatttatctccggtacgcaagtccctcccctagttcc

SEQ ID NO: 274598 - DNA, 122 bp, Homo sapiens
ctgctctgggctacaaggccgggccggcttgggttgagactcccgaggctgcaggcgaggcggtgggtacaaacttccgtagatcctgctgtttctctgaagaagaagaaaaacattggccc

SEQ ID NO: 274599 - DNA, 122 bp, Homo sapiens
tcagtttggaaaacaagacctaaaaagggaaggggatggggattgtggggagagagtgggcgaggtgcctttactacatgtgtgatctgaaaaccctgcttggttctgagctgcgtctattg

SEQ ID NO: 274600 - DNA, 122 bp, Homo sapiens
agataactgatgcacatcgggtcacctttcccaccctgatctcctcacatgcactatccccgggccctcacagtgctgcactgatggtcatgagagccccagcctgggcacacaggcacaca

SEQ ID NO: 274601 - DNA, 122 bp, Homo sapiens
tttccttttgaagctgaattccactgaacctatacttgaaccttatctagaggactacagcgtgtaattgggacaatcccctttctcattcctaagaggtgatgtggccgggcggacctcca

SEQ ID NO: 274602 - DNA, 122 bp, Homo sapiens
ttctagatattggtctccaaggatccttacatagcggaatgaggatggcagttacagcatcgcagtcctgttatttcctggcgcttggaggattgtgctctggtgaactttctgagtcaccc

SEQ ID NO: 274603 - DNA, 122 bp, Homo sapiens
atcacgaagttatccaatccactctgaaggatacctttgaacatagcttcaaaattcttacgccttttttttttgccactgtcttctatcagaaatataaagactccttcaactctgggcac

SEQ ID NO: 274604 - DNA, 122 bp, Homo sapiens
tgggcactaaaggtgcagactcggtggagccaaggggggcaaggtcagcagccctgggggcgcagccctgggggccccgccgtgggccacgcccagcgcgtccagtcctcatggccgcgtct

SEQ ID NO: 274605 - DNA, 122 bp, Homo sapiens
ctgcgaccggggagagggaaccctttacggggaaacagttttggggcccaccacccttggcgccgccgttaggagggtgtgaacatttctgctttaagagatacccgagcccctcaccgcct

SEQ ID NO: 274606 - DNA, 122 bp, Homo sapiens
gtgtgcccatccctccctgccccagcccaaagctacaggctacactggggcttagaccctcgcccagcaccaccaatgtccacgcccccaggccacggcaagggcggggctggccacgaggg

SEQ ID NO: 274607 - DNA, 122 bp, Homo sapiens
ggggatgcgggccggcatgtgcaccactgcacccacatggcagctccagagcggagcacacgcaccctggggcccggccactccacacaggcacgcacccagcagaaaccaccccctgccaa

SEQ ID NO: 274608 - DNA, 122 bp, Homo sapiens
gcagtcattagtcatagctccgttcccacacactgcctgatgtacaatcacattttgcagcggatgaatctttccacacagctgctctgctatgaataatccgtctctaggcccataaatca

SEQ ID NO: 274609 - DNA, 122 bp, Homo sapiens
ctcagttggtgatcaggaaggaatccctgaggaggcgacagttaagttacagcccagggccgggcgcggtggctcacgcctgtaatcccaacactttagaaggctgaggcaggcagatcatt

SEQ ID NO: 274610 - DNA, 122 bp, Homo sapiens
acaagcggctgagtgttgcatcctcaggtttaggcagcgaggcaggcagtctggtgaggccggcccagacgctgcctccgaagctgtgccactcaccccgggcaggcgctccctctgtctgc

SEQ ID NO: 274611 - DNA, 122 bp, Homo sapiens
ctggctcactggagaggtggtgtctgggagtgcacccccgaaaacccggcagcagcccggcgtcactccggctgttacctctgggagcagaaactaaaggggatccttattctttatacttt

SEQ ID NO: 274612 - DNA, 122 bp, Homo sapiens
tcattcttgtcctgaattggaaagtgagcggagtgtgacgggttcccatcttgaaccgtccggggttgagtagtacaataaactaacacggaactccagcttccaaaattctctccagtgcc

SEQ ID NO: 274613 - DNA, 122 bp, Homo sapiens
cagtgttcccagcgaggacgagtggtgagtgcggccctgcccgccgcggggagaccagagcgccccctacaaatccccagaggggcactgaggagatacaggagaggggcaggcgcgggggc

SEQ ID NO: 274614 - DNA, 122 bp, Homo sapiens
cgaggggcgtctcctccgccccgtactgcagggacatggtgctggagccgccgccgcccgcgccctgacaggccaggccaggccgagccaggccgccgcctccccagtccgcctccgccgcc

SEQ ID NO: 274615 - DNA, 122 bp, Homo sapiens
cctgggagagcacccggagctgcggaagagcctgctgccgcctctcatcatccacacggccgccacacccatgtcgctgcccaagagcaccagcacgggcctgggcgaggcgctgggccctg

SEQ ID NO: 274616 - DNA, 122 bp, Homo sapiens
ttcggggctctgacccacccacctcctccttttgtgccagcgctttttctggccagagagcgctggagacaagccccagcagagcgaaatatcctgaagtagctttctttgccccaatttgc

SEQ ID NO: 274617 - DNA, 122 bp, Homo sapiens
ttctttatattggaaactgtacctgttccctaattgggactaagaccactaataagtccacgttccctctttggtcgcttctctaagtacagacatctgcttaagaggcttcacgaagaata

SEQ ID NO: 274618 - DNA, 122 bp, Homo sapiens
ggacgtggaggcagaaaccatgtacaggtacggggtggtgaggcagcctctcttgggccccggggagcaggggaagggggtgcacgcgtcgtcggagtcgccgcagccctcaccctggtgct

SEQ ID NO: 274619 - DNA, 122 bp, Homo sapiens
agcagtatccccgagtgtcccccacatgcggctcctggcgttccacgctggtagccctgtcgatggcgatgcaattattttctaccacagcgttgtgttgtctgcgctcagggtaaagccat

SEQ ID NO: 274620 - DNA, 122 bp, Homo sapiens
ccgcgctcccttccccgcgtcccacttccctgcgccccgcttccccgcagcccccctccccgtgtgtgctcccacacagctgtcctgattgagcggttccagatcccaggcagcttttgtgg

SEQ ID NO: 274621 - DNA, 122 bp, Homo sapiens
tgggaactggctcaagttctcaggctccgggccagcaaaaactgtgggtgttgttggctgcggtccttgaacaatacccacagccagatgatcaggctcacacaatggcagcagctctggag

SEQ ID NO: 274622 - DNA, 122 bp, Homo sapiens
ttttccagtattttcactcataggatgcactttctctttctcatgatggttttaggtcagcgttagacctagtcctagctcctgccctctctgtaccattcagtgttccccacactgtcctt

SEQ ID NO: 274623 - DNA, 122 bp, Homo sapiens
tagtccctgagcgatcacttagtgattggttaccattgccttccaagttgctgtgatgctcgcttaggcttcctgcactggctggcctgtgtgtccctggttcctgcactgcctggcccgtg

SEQ ID NO: 274624 - DNA, 122 bp, Homo sapiens
ccccgcgctggcttgccctcctgttctccagagcaataaagttggacgagactaccccagcgccggccttttctccgctccacctgggctctcaataggcggaggggagtgcgccgaggctg

SEQ ID NO: 274625 - DNA, 122 bp, Homo sapiens
ttggacgcgggggacggggtgcggggtgctgggtgcggctggggccgtgaccctaggggccggtttgcgccgggagccggggcacggttccggccgtactcacggcgccgcgcggtgactcc

SEQ ID NO: 274626 - DNA, 122 bp, Homo sapiens
ggggctgacgtcttgcggcagcaagtcgagtgggcggtgcaggaccagccggtggccccccgcgtctgggaggctcccacaccaccagtctccacccaggggcagtagagggaggggaaggc

SEQ ID NO: 274627 - DNA, 122 bp, Homo sapiens
aggcggtaattctgcgagcagggctggccgcgctcctcagtgtggtacagggccatagcacggcgcgacccggtccctgcactggtccccaaccgcaggcacgcagcggctggggcacccgt

SEQ ID NO: 274628 - DNA, 122 bp, Homo sapiens
agggctgggactcgctagaagtcgttctgacctagcagcggctaaaagccttctggtgcccggggagacgcgcccggcgcccgcgtactattcattcccttcctcataactccacagcccag

SEQ ID NO: 274629 - DNA, 122 bp, Homo sapiens
gtcaaattatagtttaggttgatttagccaatcttataccctttcacaaaaataaaactgcgatggtctttgagctgtcaggatacatactgtgtgtagctgaaggtattaatcacagattt

SEQ ID NO: 274630 - DNA, 122 bp, Homo sapiens
ctattgggcccgctagcttcacagaagtcaaggccaggttaatgcatactatattattagcgaaataactaggtctttaacacctctccctccaaaaaacaaacacacaaaacagctttaac

SEQ ID NO: 274631 - DNA, 122 bp, Homo sapiens
ttgggatggatttttaaatacccagcaagatgtgaatgcagcagattgttggcagtaattcgtattaacgaagcggaagaagaacagcagtgtttgcttgcattctgagtctcctctcttcc

SEQ ID NO: 274632 - DNA, 122 bp, Homo sapiens
gcgcaagcgcggtccggctcttattcgcgccgcagcacccggatgaagaaggcggggtttcgggtgcaccaaggaagacactcaaggtcactttgtaacaactttattggcaactagccggg

SEQ ID NO: 274633 - DNA, 122 bp, Homo sapiens
cggctcctcaacgacatcagcacagctctgaggaaccccaacatccaaaggcagccaagccgccagagtgagcggccccggcctcagcctgtggtactgcgggggccatcggctgagatgca

SEQ ID NO: 274634 - DNA, 122 bp, Homo sapiens
cctgagcgcaggaaccatggtcttcattgctgcctcagcattagcggaagtgccacgggccggctcccagggggccagagtttcccaggaacaccattgagtaccactgaactagagtctgc

SEQ ID NO: 274635 - DNA, 122 bp, Homo sapiens
gggattacaggcatgagccaccgcgcgtggcctgtaattgttattaatcctgtgagtctccggctttctggaacttggccagcaggaggtgttggtgtttttcacagcaagaaggaagggcg

SEQ ID NO: 274636 - DNA, 122 bp, Homo sapiens
ttaaattagaagtgcgtttccacagggctcagcacagtgctgtgtgtgccacgtaaatgccggcacaggcagagatccacgtgcacttaagggcacccacttgaacacgcacacacgtaaat

SEQ ID NO: 274637 - DNA, 122 bp, Homo sapiens
cgtgcgccccctacacccttatttgtagaattctcgcgcctggtgtgcacttcctctgtccgactgtaaaaggaacaccttacccctgagaccttgcaggagcaccccctccccgcgcagtt

SEQ ID NO: 274638 - DNA, 122 bp, Homo sapiens
ccgccctttgaaaaggtgggccgcctctgcgccgctccccagcaagataaatcatgtactcgaaattaacttccattgagagggagggcaggaagaaaggctgatgggccggcgcggcggcg

SEQ ID NO: 274639 - DNA, 122 bp, Homo sapiens
gtacatcctggactggtggagccagcgagaggctggagctggagcctatcggctgggccccgcctcgcctcaggggacactgctcggagacaaagcccggggccctggccaagggcaccgcg

SEQ ID NO: 274640 - DNA, 122 bp, Homo sapiens
gaggggagaagggctctctgaggccccagggtatcagctggggccaccccaggtccccagcggccaactgtgcctgggctgtctccacccaacaaggagacatggaattgactctgttagga

SEQ ID NO: 274641 - DNA, 122 bp, Homo sapiens
tttctcagggctccggaggccagcggggctggaggcagacctcatcggcacttctgacaacggcaatttttgtgctcctcacaaccaacgagggtgtgatttttcccatctgtcttcccttc

SEQ ID NO: 274642 - DNA, 122 bp, Homo sapiens
accattcatccgcccattgggatagcccaggctctgagctcagcactccacccgtcactgcgattgcactaatcctcacccacccttgcaggcaggtattactgtgggcacagagaagtttg

SEQ ID NO: 274643 - DNA, 122 bp, Homo sapiens
gaagagtgcacgcaccgcccccacgcccgcacgtcgccacaccccttatgcgcatgcgcgcgtgagcaaaagtaacggtatgcccacccttgcgcagacggcaccgcgccagacacccgctc

SEQ ID NO: 274644 - DNA, 122 bp, Homo sapiens
ccctgcttcctctggcggaggcggcaggaaccgagagccaggtccagagcgccgaggagccggtctaggacgcagcaggtgggactcgcggcgctggcccgcaggcttcccgcacccccttc

SEQ ID NO: 274645 - DNA, 122 bp, Homo sapiens
gggaagctgagtggggagaggcctgtcctggccacttctcccaggctcggctctccttcccgcttttgccaggaaactgctagagaaagcagaaacaggggccaggagctgagcacaaagat

SEQ ID NO: 274646 - DNA, 122 bp, Homo sapiens
atgaggcccaaaatgttaacagtactgaggctgagaaaccatgtttaagactatagttaccgaaactcaactagattaccaaactgccaaaactcagaattcttaagcaaaagattaatcag

SEQ ID NO: 274647 - DNA, 122 bp, Homo sapiens
ctggtgagaacttggaggcccatcatagtcaaggaatggaacaagaccaactgagtcagacgagaagagagtttcttcagtttcagtttgagccaaaacctgatttatctgggatcatgttt

SEQ ID NO: 274648 - DNA, 122 bp, Homo sapiens
aggatcactgcctttatcagaaattgggcccggcagcactggggcgtgaggtggaggcaccgctgggaggagctgggcaatcttttgtgcttgagtcatgccagatactgtgctgggtgctg

SEQ ID NO: 274649 - DNA, 122 bp, Homo sapiens
gggacctccggcctccatccaaaggtagggctcagggctgtgtgctccaggctgctctcccgggcaccccacccctaagggcgggccctagtaccagtctctgcctgctccggctctccccg

SEQ ID NO: 274650 - DNA, 122 bp, Homo sapiens
ggaagagtttgaaacccagggacagggcttactcgcttacccttccttttcacattccaccgtctctacaactttcaaagtaagcacagaccgagggcaagggtctccaaccaggcccagcc

SEQ ID NO: 274651 - DNA, 122 bp, Homo sapiens
gaagagcaaggactatgtcccttttttgtgcagccaggcaggccctgtactttttctctgcgcgaccctcctcgggcagcaccgggtctcgaactctcacgccttactcccaagcaggttct

SEQ ID NO: 274652 - DNA, 122 bp, Homo sapiens
gcctcttctctgtgaagctgcagcagaagggggcacacgggggtcatctgtgcgaaagtccggaccgttgggcctcaagaggccacctgggtactccagcgcctgccacagctcgctggcac

SEQ ID NO: 274653 - DNA, 122 bp, Homo sapiens
cacctctcccagacccttctccttgacctctttagagcagccatccttggagttgctcaacgccctcttctcttctccctctgaaccacagcttggctcatctacttccgggttagctcaac

SEQ ID NO: 274654 - DNA, 122 bp, Homo sapiens
accgccctcaccatggtaagatccgagccaggacccgaactcctggggtccgagcctcaccgtctctccttgtcggcgggcctggggcaggggccggaggagccccgccctgagggtctagg

SEQ ID NO: 274655 - DNA, 122 bp, Homo sapiens
ccggcgatgtcccgaaagcggggcgtcggtgcctccccctcggcgccccagctcggctcgcggtgaccctgcagcccagggccgcagccagggactccccacaccgagcctccaaagagcca

SEQ ID NO: 274656 - DNA, 122 bp, Homo sapiens
ccggggtggtgtcggggtttcccggctcagcacattctcccctactccccacagccgccccgatattaatagccctgccgcagcccatccagctggctcagagccgttccccatgcccgggt

SEQ ID NO: 274657 - DNA, 122 bp, Homo sapiens
gccgacgccgcgttcagaaaggtgtggagggggctgggggcgcaggtcgcgatcaggctgcgtctcctgcccgcccagccacctgcggccctggccccaccctgccgctttgggccgctcgg

SEQ ID NO: 274658 - DNA, 122 bp, Homo sapiens
aagagtggtacagcaatattaacgtacatgtctttctcctctacctgattataaagttcccgaatggaacagttgtctcactgagttaataaattatttcactagattgaagttgttgtttt

SEQ ID NO: 274659 - DNA, 122 bp, Homo sapiens
ggagaaaaatgaagctggaggtgccggggattgaacccggggcctcgtgcatgctaagcacgcgctctaccactgagctacaccccccaacgctcaacgtgggccaaaatatttctatgacc

SEQ ID NO: 274660 - DNA, 122 bp, Homo sapiens
ccaaagatagaaagctgctttgtgattgcaaaggcagctaagcatttattcatgctcatgcgctggccaagttaatttccatattgctgagtgcacgaattgaaagcacttccctccagcac

SEQ ID NO: 274661 - DNA, 122 bp, Homo sapiens
tgaccccactggctcagcaaagtaactacataacaacctccttctgttacctatggcctccgggcagcaagaacattttctagtactggtccacctattctccagccggctgtatttacctg

SEQ ID NO: 274662 - DNA, 122 bp, Homo sapiens
acgcccaggtactgctcggctcacctggcgaggacagagcctcagggaccgggctgtggacggacagagaagtactgacgctgtaaaatcttcccagccctgtggttccattggacagaggg

SEQ ID NO: 274663 - DNA, 122 bp, Homo sapiens
gacttacattttaggggtttcatgtggtgggatcatttttgactttagtctcttgtattccgcttttccctaggtcctacggcactgtctggtgcattggactgagaatcaggagacaaagc

SEQ ID NO: 274664 - DNA, 122 bp, Homo sapiens
ttcccaagggcagcctgggcaaccccccttcggtataaggcctttaaatggccaggctcccgctccaacacccggtcacagctctgggctgccaactgaggctgccctagcaacaactgaca

SEQ ID NO: 274665 - DNA, 122 bp, Homo sapiens
cccgggcccggccctggcagcagctgccctgcactagcaggagtcgctgtggacgcccttcggcactcaaggaaaaaacgcttccagcgatgcaagcagctgcctttgctgcggctctgatt

SEQ ID NO: 274666 - DNA, 122 bp, Homo sapiens
cggagcacagttccagcccaactcgtattgggttcctttctccttgacaccctgtactgccgagaaaaagagatctctcctgtgagcccaagagagggggaaggaatggcggggtggggcgg

SEQ ID NO: 274667 - DNA, 122 bp, Homo sapiens
aattatcagccagctggccttgctccggcgcccagagctcacagggtgagtcaccatctgcggctgagcatccctgttcagtgagggagacagatcctgtcctggtccctcctcccagctgt

SEQ ID NO: 274668 - DNA, 122 bp, Homo sapiens
aaggtgcgggatggcatggattctgcaactctccccagcctccactgcgtttcgaagcgacgcccttgactgaggagtgtttttaataatcatctggccgacttggaagctggaggccgaag

SEQ ID NO: 274669 - DNA, 122 bp, Homo sapiens
tgtgctctatatcttattttaagaagcctagcctgagcctgtgtcaatgcgtttttgaagcgcaacttagaaatacgatctaaacagcttgagcctgggaggctgcggctgcagcacactgt

SEQ ID NO: 274670 - DNA, 122 bp, Homo sapiens
atgtagctgtcctgttttctccccattaatcacttcatgccccttttacatctgtctacccggatgactcactgttggattgtacaggaagaggcaaagactctgcacaattccagagggca

SEQ ID NO: 274671 - DNA, 122 bp, Homo sapiens
aagaagttagcgccaagatggcagcctggggtctttggggcccagaagaaacactggccccggggagttcagtcatcagggacttaggatgtgggggcttttcaaacagctttatttagacg

SEQ ID NO: 274672 - DNA, 122 bp, Homo sapiens
caccccttgttgctgggcttggaggggcctcttgaggaacttttaatttgcaggggtgcccgctatggacggggcattccagctgagacactgtgattttaaattaaatctttgtggtcttt

SEQ ID NO: 274673 - DNA, 122 bp, Homo sapiens
cattctgcttgggactgcagcaactcagccaattgttagctaatcctaaattagttgtgccgcttggggatatttgaattttcctagccagcttctgaaggctgaaggcctttaaggaattc

SEQ ID NO: 274674 - DNA, 122 bp, Homo sapiens
cgtgcgcgcagcctgcgcctcggtccgggtgggtctaaggatgatgattgatccgccgtgcgcacgccagcgcgttcctctgtggcaggagaggggggcctgcgtgtgaccgagcgtgcgtg

SEQ ID NO: 274675 - DNA, 122 bp, Homo sapiens
ctcttgaaacacagcatcatccaatacaaatacctatggggactgggctttaatcagtctcggtgggatctagaaacagaacagtggaagtagtagacactctttgggaggttcactttctc

SEQ ID NO: 274676 - DNA, 122 bp, Homo sapiens
gctcggggcccctgggcggcaggaacggcacgtccgctaggagcaggcagggtgctcgagcggccgccggcggctgcgtgccgaagccacagaggaggccgagtcccagcggtagggcccca

SEQ ID NO: 274677 - DNA, 122 bp, Homo sapiens
tccccttcgtgccactgctcccccctttgtgaccccactctgccacgtggtaaaagcttccggggggaggcattagttatttctgtctgaggagtttttgaccaaacgtaaacatcagagga

SEQ ID NO: 274678 - DNA, 122 bp, Homo sapiens
ggcctaattttcgaaccagctggtagtcatcttgatttccccattccaccacatgtgactcgtaatcccagtattctcgaggtctgtgtgtattaacatctgtgtaaactctggccctgctt

SEQ ID NO: 274679 - DNA, 122 bp, Homo sapiens
caggtgactctttcccttgataaagtcataggtaattcaggggctgggtgcggcggctcacgcatgtaatcccagcactttgggaggccaaggcgggcggatcacgaggtcaggagttcgag

SEQ ID NO: 274680 - DNA, 122 bp, Homo sapiens
acttggggctttccctaaggctctgcactggaatagatgaagaaatccaagagcgaccctcgttcttcacacgaggagaagaaatggacacgtgattgaccattaggcgccaccagggccaa

SEQ ID NO: 274681 - DNA, 122 bp, Homo sapiens
aagtgttgtgagaattaaacagttgatccattacgtgcttagaacagcactggcacaaagcgcgagtgccgtggtggctgctgtccgtgtcatcacggccgtgggaagcacgccaggtgagc

SEQ ID NO: 274682 - DNA, 122 bp, Homo sapiens
acctgggggaacgggcaggaggggcaccagggctcagcctggaagcactggctggtggggcgggggagggtgggtccctggggagaggcggctgggagggctcccagctcgtggagggcact

SEQ ID NO: 274683 - DNA, 122 bp, Homo sapiens
cccgtgtcactggtgggaggtgtgaagtgctcgtcgtcgtcaaagtgaatgtcacctaggcgccaggcgtgtgcaaactcctgcccgctcccatcgaaggcccgcggacagcccaggtgccg

SEQ ID NO: 274684 - DNA, 122 bp, Homo sapiens
gctgctgacggcccgggtccccagactcacgtttgtactcggccatcagcctcttgagcgcggtccccgccatggccccgcaacagctgcgccgagcgacctcgcctcagccgcgcgcgtgc

SEQ ID NO: 274685 - DNA, 122 bp, Homo sapiens
tcctcacgctctgctgacctgccttccttccatgcctctcagcccagctcctgacaaaggcgggaacctgagctcctcggctttaggaacgtcccccagagcccacggagcagcccgcccca

SEQ ID NO: 274686 - DNA, 122 bp, Homo sapiens
agtgagctaacaaaatatgttcattttgcatgtcaagtttggtggtgtggttcatttcaacggacacttcagtgcatctaacagtttcagtatcattattatgagttccctctcgtgccaaa

SEQ ID NO: 274687 - DNA, 122 bp, Homo sapiens
ttgtccggtgacgctgccagcgcccggagcaccaggggccgaaggggtccacagagcagccgcgggacccccggaaacccattgcgaccggccccaggagacccaccaccaggctcccactg

SEQ ID NO: 274688 - DNA, 122 bp, Homo sapiens
agtgctacactcctgcaccgggaacactgacacaggggtcacgaaaatgctaaaacaagacgtgcaagaattgttgcgctccgcacacgtaacaagggctctgcctccccctcccccaatct

SEQ ID NO: 274689 - DNA, 122 bp, Homo sapiens
ctggcttcacatataccaccacatatgacatttccatttagaaatttaacatatgcaaaacggaaaaccatttcagatcttccttcctcctctctcctatcatttattttattttattttga

SEQ ID NO: 274690 - DNA, 122 bp, Homo sapiens
gctcgagaaggtggcgttccgctgggtgaacacacacacgcacttgagaaggtggcattccgctgtgtgcagggtccagcgtgtgtcaagtaggtcaagatggtaggtcaagctgcttagtg

SEQ ID NO: 274691 - DNA, 122 bp, Homo sapiens
gttcatcttgcgcccggctctctggtgcagttttgtgggattcagaggtgggtcacagagcggcttcctagaaaggcaggacagtttcctgattagagatttgccatgccagacaatgggtg

SEQ ID NO: 274692 - DNA, 122 bp, Homo sapiens
tctcccagggccttccggcggggccgagggtaggaccgaggcacttcttccttgcaagcgcgtttatttgtattttcaaccacacttcagacgctactggtttataggaacgttaagtttac

SEQ ID NO: 274693 - DNA, 122 bp, Homo sapiens
atattaaaattaacagctccactatgttgcagatgtaatacacatgacagcagttacagacgtgcagattaagtgaaactataaagtgaaactttagggtgtggctatagataacaaagaac

SEQ ID NO: 274694 - DNA, 122 bp, Homo sapiens
gaggaacgctggtggcgaccagggctgtgtgtggggcctggccggtaggcacggagaggccgcacgctgggacgctgccggagtcagttttattagggaagaggggctccctgccccacccc

SEQ ID NO: 274695 - DNA, 122 bp, Homo sapiens
gcagcagcagctgtatgaagccggtgcgtcggctctgtgccctgcgtgagcccatgtgtgcggggcctttgtgttgcacttcactgagggccccggggtccactgggcacctgctgggctca

SEQ ID NO: 274696 - DNA, 122 bp, Homo sapiens
gggaaggggtgcagtagaccgcgctggaagagcagctctctggggaggggtctcccttgccgcggcaggcgcagcaggccggggaggggggttgcctaggagaggggccgggcggcggaggg

SEQ ID NO: 274697 - DNA, 122 bp, Homo sapiens
ctgcccgccctctccacctgcccccagagcttggcccacctgcgggtggagaagggccttcgcaccgtcggtctccccgcattccaagtaagtagcagcttccaaagttctgcgccctaatc

SEQ ID NO: 274698 - DNA, 122 bp, Homo sapiens
agggcaggcagacacggatcctgaaaggtacacacagaccgaacctgcagtgggaggggtcgccaacaggaccgactggccggggcggagggcagggcgcggctggcgcgcggcaggtggtc

SEQ ID NO: 274699 - DNA, 122 bp, Homo sapiens
aaaactatccccaagcatattccaaccacttctccgtagagctcattccttccgtgcatacgaagggcgccaatccttcctgtatccctcctacagataccgggtgactactgcttttgcgc

SEQ ID NO: 274700 - DNA, 122 bp, Homo sapiens
gaggccgggggatgaatcggcgggacttacgtcggttgggggcataacggctgcccttcacgggtactcccccaggcccagttacattagtggcttctgcgccctgggaaggtggtaaggga

SEQ ID NO: 274701 - DNA, 122 bp, Homo sapiens
ggagaagacgacgaagccggaggagaagctcgtcagggagttgatggaggtggtgacaatcgcgtccctgtaagaacaagacacgccgtctcaggaaccagctgagctgcagcagctgcaat

SEQ ID NO: 274702 - DNA, 122 bp, Homo sapiens
cactttaagcataagaacgatgagaaccaggagccaggcggccccgcgtagcggtgggagcgcaggtacccgagagtaccctctgggggccggcccggcgcgctcgctcctcctcgcctttc

SEQ ID NO: 274703 - DNA, 122 bp, Homo sapiens
cccaaggtaatctagtacgtggaaaagcggagggcaggagcctgtgccgtgcaagagctccggggagccaacaccgagcggcccttttgagagggtcccagcccctgagatgcgggagcccg

SEQ ID NO: 274704 - DNA, 122 bp, Homo sapiens
tagttgaagcccaccctttgcaggagtgatgtgaaaatgcaggaaagatttccgggctttcgggagcaggagaatcggcactctgggcactgccacccttctgtcagaaaggcccaagtcct

SEQ ID NO: 274705 - DNA, 122 bp, Homo sapiens
gaaagcaggccggcagggcgcagggctctgggcggccggggcgcacctgcgcgcgctttccggattataaaggagctgaagggggcagttttattttgtcattttgcttggggttcagggtt

SEQ ID NO: 274706 - DNA, 122 bp, Homo sapiens
cccctcggaatgtccccggggcgcccggcgcgctgaccccgaagccgcctccgccttcggcgcctgctgcctccctcggccaggcttgttgttcgggactgtgagcttcctggctcctgggc

SEQ ID NO: 274707 - DNA, 122 bp, Homo sapiens
aaaaaatggaggggggattcccctctcctctggggaatgactcaaacactgatgtggcagcgtacactattctacataaagccagggatgttaatccttttgggggataagaaaaagtggag

SEQ ID NO: 274708 - DNA, 122 bp, Homo sapiens
tgtacagctgtattacaaaataatataaaataatttaataaaagaagagatgatacatggcggtatacaaatcattgaatggcacaatacagcatggagacacagtgtatagtgcctgatcg

SEQ ID NO: 274709 - DNA, 122 bp, Homo sapiens
ccttcacctgctccccggccagcctcccagcgctctgcgcatgcatcacttcctccaggacgcacccccgccctgctcagcctggttgaaatgctttttaagtgccccatttaggtggtttt

SEQ ID NO: 274710 - DNA, 122 bp, Homo sapiens
gctagatatgcacaggtcgagttcctgacttcttggtggaatttttctagctcaagcactcgggagtcatcagccaatccctttccaaatgacgtggctaaacttaaagacgttttcaagga

SEQ ID NO: 274711 - DNA, 122 bp, Homo sapiens
cacacaatgaagcaggtcgcccaagattgaaagcgcgtttccagggcggaccccggtccccgcctttggccagcaaaagtacattctggcagggagggatctctgagccccgaagtgaggtc

SEQ ID NO: 274712 - DNA, 122 bp, Homo sapiens
gcaaggggatttaagcaccctgaagaaaagcggcaaaatgcacgggttaaatgaaaatgacgcccccatccgacagagcgtcactgggaacaggcaagtgcacggttagctgctcactctac

SEQ ID NO: 274713 - DNA, 122 bp, Homo sapiens
cagaccaggagaggtataatgacgcttctgcgcggtctgggaacctagctctttttgtaacgagttgttcagcatgaggcctagtcaccagggcccttcatgactggtctcaaggaacacag

SEQ ID NO: 274714 - DNA, 122 bp, Homo sapiens
ccaatttttcatatatatacatactttttttttttttttttagacttagtctcactctgtcgcccaggctagagtggagtggcgctatctccacttactgcaacctccgcctcccagattca

SEQ ID NO: 274715 - DNA, 122 bp, Homo sapiens
aggctaccccacagcactctctggcattggtgagcacctgggagcagtgggcccagggtgcgagggggataagggcattggggagctggggcagggtgtactgaagttcccttcggtagaga

SEQ ID NO: 274716 - DNA, 122 bp, Homo sapiens
attaagacccaatgttaactttatgaaaatggttcctaaggagattcacatctctgtgtccgaattctgtgtgcagcaaacatcatctcaagtgcgttttcccaactacgcttctttccagg

SEQ ID NO: 274717 - DNA, 122 bp, Homo sapiens
cacacctggcactgcagccagggacaggctgcattctctttacccagtgtccatctgtgccggctccagtttgtcagtttcccttccataaacccagaaacttcactagacaatgcaagaag

SEQ ID NO: 274718 - DNA, 122 bp, Homo sapiens
acctaacgtggccagcccttgtgtggacaaacagctgagaaaaggcattactaacatggacgtgaagaaagtcgcctcggtttttgggtgtgatgtggtgttggtgtcgtgttgttgcgaag

SEQ ID NO: 274719 - DNA, 122 bp, Homo sapiens
cgtggccttgccaaacagggtcatgaggctcccctgctcgtaggtggttcccgtattacccgcaggcttgtgatgtccacgctctccgcctttctattgtaggttccttcaatggtgcctta

SEQ ID NO: 274720 - DNA, 122 bp, Homo sapiens
gggaaggtgccagggtggccgccgcctcagtagcacgcggacggctggaaagtcagcccccgtttccgcctcacccaggattgctccactcggggcctttccgcatcccagccaccactcca

SEQ ID NO: 274721 - DNA, 122 bp, Homo sapiens
gaaagagcctgtgccacggggcaaaagcttacggagccgtcgggtgcaccgggggctgcccgaggccgaggactccccatgcagggcaccagtgctgcccaaagacctcttgctccctgaat

SEQ ID NO: 274722 - DNA, 122 bp, Homo sapiens
gtggccgtgcctggttggccgcggatcccggcgggcgccgcaaagcggcgggattgccagcgcagagctccggctctctgccttgtccctgggtccgagcaccggagcctctggtgtctgcg

SEQ ID NO: 274723 - DNA, 122 bp, Homo sapiens
cgaaatcctgacctcaggtgatccacccaccttggcctcccaaagtgctgggatcagagtcgtaagccactgcaccctgccctggagggaatgtttcaacctcataatcccggcctctcaaa

SEQ ID NO: 274724 - DNA, 122 bp, Homo sapiens
aacaacggaacgcggcttctcggaaaggaagagggacggggaaggagatctccggggcgccgcagaggcacaaagccaaggggtacttttgctgttcttggctgtaaattagactttgaaaa

SEQ ID NO: 274725 - DNA, 122 bp, Homo sapiens
ccatcctgtcccaggcccggatcatgaacatggaggcagggacgctggcaaagctgaacacgcccggggagctgtgcatccgagggtactgcgtcatgctgggctactggggtgagcctcag

SEQ ID NO: 274726 - DNA, 122 bp, Homo sapiens
ctgcggggttgcgggggctgaaggttcgggtccggctccggggctgcggtggtctctggccgcgcccaccctgtcccttcctttcttcgcttccccaaccttcgccccctcgttccgggctc

SEQ ID NO: 274727 - DNA, 122 bp, Homo sapiens
gataaagactaagcttctagaacaaagaggcccccaagcggagaagctcccagaggctagcggttcacgccatccgcaagcaacaggcgagactgcaggtgggccgggcccgctctccacct

SEQ ID NO: 274728 - DNA, 122 bp, Homo sapiens
cgtcagctgatcccccgcagatataaatctgccctgccccaaagccgtccagagcgcaggcgctaaccccgccccatccgggcctgcccgagctcaacagcgccctgactcagcgcctctga

SEQ ID NO: 274729 - DNA, 122 bp, Homo sapiens
tggtctggccaccaggcgggtcaagcggtgacctgggttagcagggcccagcggtggcggcgggacagaggccggcggtggcctcacctggggctgttctgcatggagcgcagggccaggct

SEQ ID NO: 274730 - DNA, 122 bp, Homo sapiens
tggacgtctggtgggtgagtgtgacgtcatgggggcgtaggcggagctcggtgagcggggcggggctctgcaagggctcaggccttgagctacctgcaccaccacgtggcccccgcggtggg

SEQ ID NO: 274731 - DNA, 122 bp, Homo sapiens
aagctcaaggtagttgctcagttaactactgttgagttagtatacatgacgtcctcgacacggtggaagcaggtaaaaggactgtttattcattgtgacctctcctgagtggcgagttgcca

SEQ ID NO: 274732 - DNA, 122 bp, Homo sapiens
ttgagaactgagaaaaataaccctctacatttggctagatgtggtcaccagtgaccttcacgagtgcagttccagtacagaggtgggacaaaagccagattgcaaggagttaatcataattc

SEQ ID NO: 274733 - DNA, 122 bp, Homo sapiens
gccaggtccgggagacggcggggctcactgtgccttcggacctacactctgctcgggggccggatttctgcaaagcgtccacttggaaagaagtttcacttgcagggaaggcgggtgtacgc

SEQ ID NO: 274734 - DNA, 122 bp, Homo sapiens
cagacctaggacccatgtcaggaaacgaggtcctggggatcagataccagtttcttcccccggctgatcctgtagctccgaaacttgtttagagcctgtttttataggagacggcaaatagc

SEQ ID NO: 274735 - DNA, 122 bp, Homo sapiens
gaggggaaggacccggcgtgaggaggacactaggtggcgcgcggaggacactaggtggcgcgggggacggtgtctcaggacagggagggtctgcagaatcccaggacctgggagaagaagcg

SEQ ID NO: 274736 - DNA, 122 bp, Homo sapiens
ggcggcccagcaaagtccttatcaaattcttggaggtgatcctgaagcgctcagaccgcgcgcggggcgagcgagcggggcgcggcgaggggcaagggcggggagggccccggcgctcagag

SEQ ID NO: 274737 - DNA, 122 bp, Homo sapiens
ccctgggacgtgtgcgtgtttccggggtctcctgcaaatgctcgtgcgtgtgcatttgcacgtggactcggtcaggcgtgtgcagacagcgcctgcaggtctgggtgggtgctgatctgagt

SEQ ID NO: 274738 - DNA, 122 bp, Homo sapiens
aggcttcggccaaaggagctgatgggatgacattatggtatgggaataggaaggagaaaacggcaacagagaagggagctgaggcccagagacattcacacactgaccaacctctgaatgcc

SEQ ID NO: 274739 - DNA, 122 bp, Homo sapiens
gcgcttccactctgcaggccggggctgaaataacccgagttccgttctcacagaaaggtgcggctgccacctcttgacacagaggccggatgggcaggtgtcctcgatggccaggccgtatc

SEQ ID NO: 274740 - DNA, 122 bp, Homo sapiens
tggagagtagatcagtgattgacagaggtgggggaaataggttatgactgctgatgggcacggggctgctttttggtatgatggtttggaattagtggtgatggttgcacaactctgtgaac

SEQ ID NO: 274741 - DNA, 122 bp, Homo sapiens
ggccagctggagctccgggtgggcgtgggcttggcgggccccgcactcggagcagccggccgtccctgccggccccgggcaatgaaggacttagcacccgggccagcagctgcggagagtgt

SEQ ID NO: 274742 - DNA, 122 bp, Homo sapiens
tacaggtccgtaagtgccatacaccaagcaaaatttctaccgcagaaataacactgtaatcgtttggggagcagtctgaccagtgttccctgagttacgccgaccgcccccaaccatccttc

SEQ ID NO: 274743 - DNA, 122 bp, Homo sapiens
gccggtgcagggagggccgcaggcccagccactcagctacgtttggcggttgctaggagacgcgagggcgtgcggcctgggggcggggctccgcggggcggggctttccccctcagccactg

SEQ ID NO: 274744 - DNA, 122 bp, Homo sapiens
acacctcccctttcccccaccaactcccccaaagtttctcccaacacatcctccggccggcgcccacacgcatacctgtcaccagccctgcctcgcatttgcgttctcgatccagttccatc

SEQ ID NO: 274745 - DNA, 122 bp, Homo sapiens
gaattatggatggttttatttttctcctttatcttattctgaattttaatttttttctaccgtgtacacatattacatttacaatatgccaaaaacagtaaatttttgttaaagtaaaacca

SEQ ID NO: 274746 - DNA, 122 bp, Homo sapiens
gagtgggtggaagtgctggtcctgttaaccatttcatcttacgcttttcacccaagcactcggtacatccttgtggaattgatgaactgtgttagacccttgacactttctggatgtgcact

SEQ ID NO: 274747 - DNA, 122 bp, Homo sapiens
gcgcaggaaagcgaaactacccggcaggagaaaaggcagcgctggcgcccggcccccttccgcccccaccaatcaccgggcggctccgcgctcagccaattagacgcggctgttccgtgggc

SEQ ID NO: 274748 - DNA, 122 bp, Homo sapiens
gggtgacttacgcttagagactccttccctctctctatgtgcctggcctgggcttcacttcgctgcctgcatggttcgtgggcaacaggtcttgaacttaggacatggacccattaatcata

SEQ ID NO: 274749 - DNA, 122 bp, Homo sapiens
catccagggcagggccaactaaacttccctctgaatgccactgcgctttatcaagacatccgtcatcatacaaaaatttaacttacttacagacacttctcacctacttggagtggtttttc

SEQ ID NO: 274750 - DNA, 122 bp, Homo sapiens
ggagggaggaaacaggagcgagcaggaacggggctccggttgctgcaggacggtccagcccggaggaggctgcgctccgggcagcggcgggcggcgccgccgggttgctcggagctcaggcc

SEQ ID NO: 274751 - DNA, 122 bp, Homo sapiens
tcccttgcagtcactgcctcatacttcctcggtccaagtgccgtcgcagccccggcctcgcgctctccgaggtcaccgtgtttcgcattcactgctcctgggtcacagtcccctcgctgtca

SEQ ID NO: 274752 - DNA, 122 bp, Homo sapiens
gaggaaccccattccagcccaccctcctctaccatccacagacctcacccctcttcctaccggatcttcatgccgcaaagccccaggtgggaggccagtctgcgccagtcattgccggtgat

SEQ ID NO: 274753 - DNA, 122 bp, Homo sapiens
ccagctgtggcaagtgactaccccttctcctggtcctctaagcctggcacggagcagctgcgcaggcagccacacaagagcctggaatggcctgatgccccttctgcatgccttatacatga

SEQ ID NO: 274754 - DNA, 122 bp, Homo sapiens
tttatgaaatgttgatcaatgaagctatttcaaatggttttagagaaggatcagagataacgggctagatagcatacattctaaacttgttttacatatagtttgagctccctgaaccactg

SEQ ID NO: 274755 - DNA, 122 bp, Homo sapiens
tagcttcccccgcccccgtcctcactagagtggagaactgaaagcgaacgctataaagggcgccagtgagaggggctggcctcctcttgccacgaggtcagacggcgagttcttagagaaaa

SEQ ID NO: 274756 - DNA, 122 bp, Homo sapiens
tccctgccacccctcagccgggacctagccctctcctggcacctccccccatcctgcccccgtcctggggtccccggctatggcagcccaggcctagacaccactttgagacgggagctccc

SEQ ID NO: 274757 - DNA, 122 bp, Homo sapiens
cccactggacactcctgggctcccatccttcctaccaagaaactttctctgtgaaacccacgaaacagctagaaatggagcccaaaagatagccaggataacagaccacagagaggatcaag

SEQ ID NO: 274758 - DNA, 122 bp, Homo sapiens
tgatagctctttatttagcttcctctctattagggcttttctctccctaggaatttggctcgagtttctgagggctggacaggaaggcaatctgagtgatgcattatcactctgcattcaga

SEQ ID NO: 274759 - DNA, 122 bp, Homo sapiens
atcccgcatcttgcaccccggatcccgcaccccgcatcctgcaccccgcatctctcactccgcatccggcaccccgcagctgcacgcaccgcaaccctcccgcggccccgcctcctgcactc

SEQ ID NO: 274760 - DNA, 122 bp, Homo sapiens
aaaactatttcttattgtacttgcagaatggatagcttgcttttagtagaagcattaggtcgtatactcagataatctaatagaaggtcagatttgattcctgcataagaaagtagagccaa

SEQ ID NO: 274761 - DNA, 122 bp, Homo sapiens
caaggaagaagcacgcggataacgcggcgaagcttcacagtctttgcgaggccgtcaaaacgagagatatttttggattgctccaagcttatgctgatggtgtggatcttacggaaaaaatc

SEQ ID NO: 274762 - DNA, 122 bp, Homo sapiens
aggggcgtggagttggtgctcctggtgcggttcgccgaggccctgtgaggcagcaggctccgcatcacgtccaggtggccggcggcagaggcggcccacagcggcggcgagccctcgatggt

SEQ ID NO: 274763 - DNA, 122 bp, Homo sapiens
catctcgggctcctagaggcttcaggcaggaggagccacgtgagagagaaaccctgcctacggtgacctccagttcctagaccacccactcggagcacggcgctcggctgtgcccgtgagcc

SEQ ID NO: 274764 - DNA, 122 bp, Homo sapiens
gatctctaaaagaaagaggcatcttgtctacaaaaactttgcatctgcgttgctgaacggcgatttcacttcctccaaaaagaggcaagaaggaagtcccacatctgctttctttctctgtt

SEQ ID NO: 274765 - DNA, 122 bp, Homo sapiens
gccgtcactgatgtggcaaactcagcctctgggcagaccggctggaaatagaaacgtctccgcttcacgatggcgcacgcccggacgtccccttccgagagcgggtcccctttgtcccccga

SEQ ID NO: 274766 - DNA, 122 bp, Homo sapiens
ggtcccaggaatgtgcatcttgggggtacatctactaaagagttgacctggaaaaggtggcggggaaattattgcttttgcacagggaaaaaatatgaaattcctggatagtaattagacaa

SEQ ID NO: 274767 - DNA, 122 bp, Homo sapiens
acgggcaatttcccactgataccaggacacggaggaattggaattccatcacaacacacgcgtgcgctcacacacaccttgtgagattgcccataacgacgccctggaagggcattgcctga

SEQ ID NO: 274768 - DNA, 122 bp, Homo sapiens
agagttcaaaggacaagaatgctgtgtgttcatacactgagctcttcgaagtaggaacttcgccctataaagcagaagagtggtgtttttttcttcttcttcttcttttgtggtttcacata

SEQ ID NO: 274769 - DNA, 122 bp, Homo sapiens
gaagtcctgatctgcctacactgcatacagtgcggctggggttgagttggtctccgtccccgctcagtttgggagaatcttgaccagaccctgccacccgagggctttgattcctggtctat

SEQ ID NO: 274770 - DNA, 122 bp, Homo sapiens
gggagatggggctttgcggaattgctagggagggtcacttgggcttttgccaaatccacccggattggagaagaatgggacgggaaccagtctctttggggagaggctccagttaccttttg

SEQ ID NO: 274771 - DNA, 122 bp, Homo sapiens
actgcaccctgctccagtcccggctggtccagccctgaactgtttaaccgcctcggctaccgaataagcccgagcagccggtcctccagtggctccgctccccgttctctgtgggctcaaaa

SEQ ID NO: 274772 - DNA, 122 bp, Homo sapiens
cagccggccggggagcagggtgattcagggcccagctcctccggcgaggcctgtcacagtcgcttgtcaactgcagtctgaggcctggggttcagctacaagtcccgcccgtgggcgactcc

SEQ ID NO: 274773 - DNA, 122 bp, Homo sapiens
aaaatgacacgtagcacaatgttcttgaatgatgtcatttccttaagtggtttgtaacatcgatgaggaaaaaaaattggtttatgcgtcatttcattttatttttatttattttttgagac

SEQ ID NO: 274774 - DNA, 122 bp, Homo sapiens
tggtgttcaccgacctgcagcgacgcacgctgatcgccatcttcaaggagaacaagcggccgtccaaggagatgcaggtcaccatctcgcagcagctcggcttggagctcaacaccgtcagc

SEQ ID NO: 274775 - DNA, 122 bp, Homo sapiens
cggccctggttgagccccctcagccatgagaaaatcaaatcaatgtgccattcttccaggcgcgaggcagcagcggctgcagttcaacatgaaaggaggcttcctccctgcctgctaattac

SEQ ID NO: 274776 - DNA, 122 bp, Homo sapiens
tgtgggggtggggcctgcggtgtgggagtggccggcggcatctggtatcctagcaactgccgctgcgggccgtgaccgctaagtcctgggagctgttgggctctgggaccgcagttgctgaa

SEQ ID NO: 274777 - DNA, 122 bp, Homo sapiens
aagcgccttcctggtgcctccctaggtgccactgaggggagttctttgccccaagcctttcgggaaagctcagggcgtgggggcagaggggctcttgttttcaccttctcgaaattagagcc

SEQ ID NO: 274778 - DNA, 122 bp, Homo sapiens
caggtcccgccgcctgacggctcgcggctgggattgaagccggaccttccgcctcacaggcgctcctcagccgctgaggcccggcccagctcccaccgccggagtctcacaaacaaagtctc

SEQ ID NO: 274779 - DNA, 122 bp, Homo sapiens
ggctggaggcatgggagcgcgcagagcccatggtagcaggggccacagtgcccccactcccggatggcaccccagcaccagggacagtgacagaggtggctgcagcagtagtgatggtggtg

SEQ ID NO: 274780 - DNA, 122 bp, Homo sapiens
agatgggaggattgattgagcccagtaggttgaggttatagtgagctgagattgtgccaccgcatttcagcctgggtgacatttcagcctgagaacaaggctctgtctcaaaaaaataaaaa

SEQ ID NO: 274781 - DNA, 122 bp, Homo sapiens
gaaaaacgtctctagacattgcccattgtctcctggtggtgggtgggggggtgggggggtcgccaaaatcttcccaattgaggatgactacactaaagtaaggtgtgtgtctgtgtgtgttt

SEQ ID NO: 274782 - DNA, 122 bp, Homo sapiens
agcagtgacatcacaagaaaaaccaccaaccagggccaaggagaccagagcccagcacctcgcccaaaggaccccagtcagaggccccatctcagacccgaggctagcatgggctgcaggct

SEQ ID NO: 274783 - DNA, 122 bp, Homo sapiens
ctctgggctggcgactccttgagaagggctctctctggtcccaggtggtatttacttaaccgtatcatcatctgcttcattcgtgttcccttcatgtccatcatgtgaggacgggaactgac

SEQ ID NO: 274784 - DNA, 122 bp, Homo sapiens
tccactctctcccccgccctaatctccaggccagtgagcgacttcagcatccagatcgggcgtgggcgggtgatattgacagagacctgctgcagatgcagtaacagcagcagctgtggcgt

SEQ ID NO: 274785 - DNA, 122 bp, Homo sapiens
tggatgtcttttatgtccaaattccaatgagcagaactgagcaaataaaagggaattggacgaattcagttttggctccaccaaatagcctaactggtgacagaaggggccgggggaagaag

SEQ ID NO: 274786 - DNA, 122 bp, Homo sapiens
cgatcccgcagtcgagtggagaaccgagtcccgacctaaggtcgaatcatcaggcgtccccgtcacccaacaacccactcaggcacttccggtaagaaatctagtgcccttggctcggaacc

SEQ ID NO: 274787 - DNA, 122 bp, Homo sapiens
catctccaagggctaccgctgcccttggcaggagttcgtcagctaccgggactaccagagcgatggccgaagtcacacccccagccccaacgactaccgaaatttcaacaagtaaggcgggg

SEQ ID NO: 274788 - DNA, 122 bp, Homo sapiens
gagaggagagctgggccggggctgtgagtggcctcccttggtcaggtgttcactcctggacggtgcccaggggcagagagtgtgattgaccggtcaggagccacaggtggcagcagctccca

SEQ ID NO: 274789 - DNA, 122 bp, Homo sapiens
ttgatgaagaaggtgtgagctaggatttggggtcttgggatttctcaagccaagagatgtcgttactcttttggaccactggacatttgtttgtcatttctagatacagttctccacaattc

SEQ ID NO: 274790 - DNA, 122 bp, Homo sapiens
tggaaaaagagaaggttaaaccctcacaggattggcccacccccgtcccgccgcgtgctgcgcaggcgcgttttacctaaccaccattttccgtcaagttttagccaatgagttgatttgga

SEQ ID NO: 274791 - DNA, 122 bp, Homo sapiens
caaggagccttgtccgcgcattccagcggcagaaacggaatgtctgggcgaggcggccagcggcgcggtggtcacctcccgcccctgccctaagccccgagccggctgcaactgggtgggct

SEQ ID NO: 274792 - DNA, 122 bp, Homo sapiens
gattttgttgcaaatagtttatctaagagatgcaggaaacaccagtaggaggtggggaagcgagacaaagaagggaaaacagtcaataaagggtgcggtatcaagccagataccacttataa

SEQ ID NO: 274793 - DNA, 122 bp, Homo sapiens
accccgaactgcaaggggacggggtgtgtgaggggctgtaggggcagccagggcccaagacggtcttccatcccataccagcccagaccactctgccctgagccacagtgacctcaacatcc

SEQ ID NO: 274794 - DNA, 122 bp, Homo sapiens
ggaaagtgctggggaagttaggaatgcagcctggacgtcagcacagcatctttggagatccgaagaagatcgtcacagaagagtttgtgcgcagagggtacctgatttataaaccggtgccc

SEQ ID NO: 274795 - DNA, 122 bp, Homo sapiens
cgccgcccaccaagggtccccagttggaaaggaaaagagagagcgcgcccctgtatggagcggaaaggaaagggagtaaaatgaatcccaaacttttcggcttacctcttcttcctgtctga

SEQ ID NO: 274796 - DNA, 122 bp, Homo sapiens
ccgtctgcccgggctgagagccacgcagggcatccaccctgtcatttagcacctcggctacgcaatggtgggtggtttcccaaagcgcgtgccctcgcagccactcgcgctcgcctcgccgc

SEQ ID NO: 274797 - DNA, 122 bp, Homo sapiens
ccgggaccggcagaggggtgcggcggggcgggcccaggggtctctggcggccggaagaaccgggaccctgccaggcccctcccgcgggcagggcggcccctcgccggctcctcccccaccgc

SEQ ID NO: 274798 - DNA, 122 bp, Homo sapiens
acagtagcaccatgagactgttctcagcctcattttaaagatgagagttgaagcacagagcggtaaagaaacttgcccaagctaaggtcacacagctacgaagtgcaaaggctggatttcaa

SEQ ID NO: 274799 - DNA, 122 bp, Homo sapiens
cacaaggaattagtaaaattacagtacagatcaagttccccaaatcatttttaaaagaaacgatcaatactaaatattagcagctaaaacatcattgattcttgtggctttagaactttcac

SEQ ID NO: 274800 - DNA, 122 bp, Homo sapiens
ggttctcacaccatccagataatgtatggctgcgacgtggggtcggacgggcgcttcctccgcgggtaccggcaggacgcctacgacggcaaggattacatcgccctgaacgaggacctgcg

SEQ ID NO: 274801 - DNA, 122 bp, Homo sapiens
gctacatctctgcttggtgtcagaggggatgctggtgggatatgagtgggggctgcatggcgaagcctgtctctagttgcattctggctcagggaaggtgggcttgcttcctccctaaggag

SEQ ID NO: 274802 - DNA, 122 bp, Homo sapiens
gatccgagggcctggcagtccagtgtccgcgtcttccgggtgactctggttgtcccggatcgcggcggcggcggcggtggcggcggctgagggacccgcggccccggacacagcggcaccgg

SEQ ID NO: 274803 - DNA, 122 bp, Homo sapiens
tcaagtgcctatctttgagccaatcaagacagccccctctgattggctagggctggctcacgtgcccacctaggaggaggaggtggggtcagtccatctagaccccttgggctgagagcagg

SEQ ID NO: 274804 - DNA, 122 bp, Homo sapiens
accaaatacataggttttggcagcacatagatttctgtggttttgctatgcttttagcagcggctgtaaaaagcattgcacactaagcattgctagattgccaaacaaacctaattacattt

SEQ ID NO: 274805 - DNA, 122 bp, Homo sapiens
ccttgctagaatgtaagacctaagaggataaagctgcatttgtcttacacaaagttgcatcgtcagtgcccagaacaattcctggaatagactcctataggttgaggtaggattacaggcag

SEQ ID NO: 274806 - DNA, 122 bp, Homo sapiens
agcgttcattggaaaaatatcccatgggaaatgatatcaagtgatgcccaatttcagtcccgaagggcaattttaaaatgattcaccgtgtatatcagatagtttaccaaaccagtctgggg

SEQ ID NO: 274807 - DNA, 122 bp, Homo sapiens
gcggcagggcagcaggggacgacaggcagcccccgtggccggcccaccccttcacagttccggggccctgctgcgtggcccgccctgcaccctaagctccccagcccccctgcccaggcctc

SEQ ID NO: 274808 - DNA, 122 bp, Homo sapiens
ccttcagcggcgagagctgcagctgctgcgggtccgtaatgtgcagcagcgggacgcggacggagagcatggtggtagcgcggcaaaggagagtgaggggccgggaccgggcggctgggatg

SEQ ID NO: 274809 - DNA, 122 bp, Homo sapiens
gagaaggagcgcgtgctgcgctaccagcgggagatccagggagggtacatggacatgtaccgccgcaaccaggcactggagcaggaactgcgggcactgcgggagccccccacaccctggag

SEQ ID NO: 274810 - DNA, 122 bp, Homo sapiens
acagggcgccctgggcggcggcagcttggccggcccgctgcctagcgcgcccccgaggggcggtaatggaacgtacctttggctgaagaaagagtgctcccggccagcgcggggtcgcctag

SEQ ID NO: 274811 - DNA, 122 bp, Homo sapiens
gcacgtggatgaaatccatcaccgtggtggccagcggggagcgcccgggcgccatcggcgcgtcctgctccaccagggcgaccctgggcgctgagaagcgggaatcttccttggggaccagg

SEQ ID NO: 274812 - DNA, 122 bp, Homo sapiens
ctcacagctagctgcaggagtgagcccagggaaacccgcagtagagcagcccagccaacccgacagtcagggggaaaaattgttttaagccactttcagtttcgcgtagtttgttatgcaac

SEQ ID NO: 274813 - DNA, 122 bp, Homo sapiens
gagggagataaaacccagcctccggtgccagggggacagctgagcagtggggccagctcccgcccacccccaggagactggtgaggagagctgtccggctgagcagcagcatgcatggtcct

SEQ ID NO: 274814 - DNA, 122 bp, Homo sapiens
tgggtcctatcctcctcactgtccgtctctactcggtctcgaaaagtggcccctgtctggcgttctacccagtgtagcgttggcaaccacagcagccgcaacctaacggcggacgaagactg

SEQ ID NO: 274815 - DNA, 122 bp, Homo sapiens
gttaacaagttggctcctgctttactacggggggtccctggcagctcctctgttgaaggacgcatggggcatctgtgccgctctcgtagggacgtttgcagggccttgtgtgactgtgttca

SEQ ID NO: 274816 - DNA, 122 bp, Homo sapiens
gattaggctggtctcaagtgatccacctgcctcagcctcccaaagtgctgggattacaggcgtgagccactgtgcccagtcattagctgattatttttatgtaattaggacaagttggcatc

SEQ ID NO: 274817 - DNA, 122 bp, Homo sapiens
attggttaaaatagtaaactgatagcagttgcaaaatagtcatcaatcaccaggcagtgtcgcttaaactacagaaaggtttccagaagtgagatgctggaagccagagagagaacaatttg

SEQ ID NO: 274818 - DNA, 122 bp, Homo sapiens
actggcagctccccgaggagctggtctgactccactctgggtctccagtactgcagggcccgacccacgggaggcctcaggaagctttgagggtgaattgaaatccttcttccccatatctt

SEQ ID NO: 274819 - DNA, 122 bp, Homo sapiens
ggagctccttcgtgggcccctgaggacgcctggatgggcactcaccctaaggtcaggaggcgcgagaggagcagggcgccgtccaggcccctaacccaggcagaacactcccaggcagctct

SEQ ID NO: 274820 - DNA, 122 bp, Homo sapiens
attccactcgcagtctgcgtgtgggggaaacgagtgcccggcgtatgaaacgcctaacttcgcgaaataaagagagacgtataaaagttcaagaattctgtccagactcaagggccctttct

SEQ ID NO: 274821 - DNA, 122 bp, Homo sapiens
ttgatagtgcccttctctacctgagccgcttgaaactgggtcgggccagggccccctgagcgaccactcgaggctgcagtgcccctgacctgggcatcctaagacttcatctgggccatagg

SEQ ID NO: 274822 - DNA, 122 bp, Homo sapiens
tacccggaggttcagctgccaggactggtggctgagccagggagcgtggcagaaggtgatcgggaaccctgatccctgcacgaacacaatcgttgtgattaaatgatgcttctcatattcag

SEQ ID NO: 274823 - DNA, 122 bp, Homo sapiens
ttttttttttgagacggagttttgctctgtcgcccaggtgggagtgcaatgatgcgatctcggctcactgcaacctccacctccagggttcaagcgattctcctgcctcagcctcccaagta

SEQ ID NO: 274824 - DNA, 122 bp, Homo sapiens
accagggacacggtggctctgacggtgcctggggcttcctccaccttcacactagggacacggtggctctgacagtgcccggggcttcctccatttcacaccagggacatggtggctctgac

SEQ ID NO: 274825 - DNA, 122 bp, Homo sapiens
agtcaaagaaaggggtgacggacgcacctggaaaatcgggtcactcccacccgaatattgcgcttttcagaccggcttaagaaacggcgcaccgcgagactatatcccacacctggctcaga

SEQ ID NO: 274826 - DNA, 122 bp, Homo sapiens
taggaagatgcagaaacaagattagagccaaaccagtcagtcaactgttggtctttttcacgttttactaatactcgtataactagtaagtttcctggcaggttccagttggaaaaactcga

SEQ ID NO: 274827 - DNA, 122 bp, Homo sapiens
acttgccagttcatgtcttataaaaccttaggtgtctagtgataggtgtccaagcataatcgtaggaggataccaggccaatgagaattggcagactcatgcactaacaaaatgcatatagt

SEQ ID NO: 274828 - DNA, 122 bp, Homo sapiens
gcacactgtgctgtggggaacacgatcacacagacaaggctgagtgaggcagcaccctaccgcccacagtttaagaacaagaacacctgcattgcgatttttcttttcttttttttttgaga

SEQ ID NO: 274829 - DNA, 122 bp, Homo sapiens
tcgccgccccccgcctccctgcccccggggcgcgcgcacacacactcactcacacacgcacgcacacacacatcctcccggcccggccgcagccgcggcggcaataaaacatcctggcacgt

SEQ ID NO: 274830 - DNA, 122 bp, Homo sapiens
ttccagcaggcatgcaactttaattacttctcagtgtaccacagaggtggcctgcagcaccgggtgtgacagcaaggtatgccaccagtaagggggatgtctcagcagctgccagcactctg

SEQ ID NO: 274831 - DNA, 122 bp, Homo sapiens
gaacttcccagaagcgcgcaggaggcatggtgcgcatgcgtgtagccacctcaaaggcggcgggaagttggttttctgagtagcaactgagcagcttgaagacggattggaagtagcagacc

SEQ ID NO: 274832 - DNA, 122 bp, Homo sapiens
tttttgccggggcttgccgtgagccctacgctgctctgaagaaagccgggctggggtgagcgtgatggatgaggtgtctggcttcacaaaccctgtgtgggggggttgtggtgagaggaaac

SEQ ID NO: 274833 - DNA, 122 bp, Homo sapiens
ctgagtatgactttttctctttctttctccctttcccttatgtactgggttttcctttaacggtccataatgccaaactatgtcattccccatcctcctattgttcctatttatttaatgaa

SEQ ID NO: 274834 - DNA, 122 bp, Homo sapiens
gccgggattgtttcctggggtgggggcaacaggtcgttgcaggtgttggctgggcgcctacgtcaggcagggccccgggacgggactgcagggctccgagccctgggatgaacctgactgcc

SEQ ID NO: 274835 - DNA, 122 bp, Homo sapiens
taacctctacaagagcatctcctttttcactacaaatggaaacaaatggtctataaagagcgggaccctgctgatggtcaattctcagccactgtgtggtctcccagccctgcccaaatggg

SEQ ID NO: 274836 - DNA, 122 bp, Homo sapiens
gctggaaccctaggccggccgcgcaaggccccctgggaccggtagtgctgggcgtggcctcgggactacatatcccagtggcccccgtgcggcgactttagctgctgctgtctcagccgctc

SEQ ID NO: 274837 - DNA, 122 bp, Homo sapiens
cgcgctctttaacccgcctcccagccccgccttcggccaatccgcatccgaggcgctgcgcgccccaggctgaaaagagagcccctgagcccgacagccaatggaaggaagaagagggaaat

SEQ ID NO: 274838 - DNA, 122 bp, Homo sapiens
tttggttttctattttgaaaaacgcagctggctgtttaaggaagataatatccaccagggcgcctggcccagaaaaggcgctctgtaagtggtaggtggatcctgtctaatcaacgccaatt

SEQ ID NO: 274839 - DNA, 122 bp, Homo sapiens
tttccctgttcttcaggcgtctgcaaccctcctgggttgcggcgtctgctcgcccttctgcgtccgcagctcggtccccacgttcccgctcgctgggccccacaggccaggagcgttgcccc

SEQ ID NO: 274840 - DNA, 122 bp, Homo sapiens
aaaagccatttaaaatgctctgcttgctgatgaaagctgtggtttctttgctctcggctacgattctgtcaactcagggtagtaacactgctgagcgcgtgctgatctgaagctctgattgg

SEQ ID NO: 274841 - DNA, 122 bp, Homo sapiens
tgccccggatttgttttctaaccttggcacctggaaggcagcctccccatcacagctcgccgccgtgagaacggtcatgggcccggctgcaggaccggcattgcctaccacgtccagcctcc

SEQ ID NO: 274842 - DNA, 122 bp, Homo sapiens
gcctcccaggttcaggtgattctcctgccttagcttcctgagtagctgggaccacaggtacgtgccactgcacctggctaagttttgtattttttaatagaggcagggtttcaccatgttgg

SEQ ID NO: 274843 - DNA, 122 bp, Homo sapiens
ggaactccccagtggagcgcaggcgaccccgaccaacctcctgcttggctcagggggctacgtttccccgcccgtccgcacccgagccccccacgcccgggatctgggcagccggccggggg

SEQ ID NO: 274844 - DNA, 122 bp, Homo sapiens
ccaaggatcccctagtttccttggcacaaccacactgacctccttgccactccctgcccacgtcagggactctgcactgcctgtccctctatgtgggacactcttgcccccgcgttatccac

SEQ ID NO: 274845 - DNA, 122 bp, Homo sapiens
atctgctctctgatgtgggcagaattaggagctcctaagaaaaccctgagtcctgttccccgggtctcctttggttcactgccaatctactcaggcttgctggcaggtgagtaagtggttag

SEQ ID NO: 274846 - DNA, 122 bp, Homo sapiens
cgcgccgcgctcccaggttctgtctcgccgcaccccggcgggcactggcgcgggcaaggacgctggcggggagaacgccctgggctcaacgtactccagaatcgaatgttgagagaagcagt

SEQ ID NO: 274847 - DNA, 122 bp, Homo sapiens
tggccatctggtctcactgggtaagtattcttcttcatctccctcaaggcaaaatttgaccgttagggtggctgttataattatctggctgaatattcccaagagaggtatggggtttctta

SEQ ID NO: 274848 - DNA, 122 bp, Homo sapiens
tttcccttcaccctccccgtccccgcacctgtgcagtaaactgcgccttctgctgctcggcggccaccaggcgctgcaactccgcttcatcggcttcgcccagctccgccattgttcgcctc

SEQ ID NO: 274849 - DNA, 122 bp, Homo sapiens
agacacttccagtctgcaaaaaggacaaaataaaatctgcaggtcagtgcagatgcatcacgagagacaaagaaaatacacaaaaacaagtcattcaccaggggagaacgtctttacacgtg

SEQ ID NO: 274850 - DNA, 122 bp, Homo sapiens
ctgggatctgacttaagagcctcccccagcctgtaattggtcagaggccgcgcacagctccgctcgttccaggtgagtaaagcgcctggactcagacgtaattgattctgactgatatccag

SEQ ID NO: 274851 - DNA, 122 bp, Homo sapiens
tacatagcacctcaggccagacccattatgccattcaaaagctctacacatttcaatggccgggcatggaagctcacgtctgtaatctcagcaccttgggaggccgaggcaggcagatcact

SEQ ID NO: 274852 - DNA, 122 bp, Homo sapiens
gccatgggcttaccatagaaggaacaaactcttaatcttagaactgctttaggcagtgggcgtgatggttaaaaactcggcctttggcgtcgacctcagacggagatctaccaattaggaaa

SEQ ID NO: 274853 - DNA, 122 bp, Homo sapiens
cccttgtccttgccttgcaggcccagtggttctcagcacccctgcccagctcatcgctcccgtggtggtggccaaggggactctctccatcaccacgacagaaatctacttcgaggtagatg

SEQ ID NO: 274854 - DNA, 122 bp, Homo sapiens
gaccagccctgcggccgcagcccgggaaagcgcagccccgcgggcggggcgcagcgtgggcgcctggccggatccggctcaatgggtggccgcccccacccagctcccaggcttccccgtcc

SEQ ID NO: 274855 - DNA, 122 bp, Homo sapiens
aaggtggggcagtctttcctccagctcccctccccgtccctcccacctcccgctgcaaggcgtcaggacagcagggcccagcaaccctgtgaagcagagccaggggctgccagaggcccggc

SEQ ID NO: 274856 - DNA, 122 bp, Homo sapiens
gactcctttggcgataaaactactgcagaacacaccaaaatgtgggacttcaccaaacaccgtctgcatgaggcatagacctaggggaaagccgaggcaggaaaagagaatgaggagagttg

SEQ ID NO: 274857 - DNA, 122 bp, Homo sapiens
gtactatatttacccatgtgatagaggttggatgattgtattgagtatgacctagcattccgcaagcataccttgagttaaagcctgtgagctgcggtacagtcacttcatcctgtaaagcc

SEQ ID NO: 274858 - DNA, 122 bp, Homo sapiens
tattattgaataaagcacttaacacgaagctggcccccagcgggcccttaatagtttccgcggtggctgtcgtagctggactacagaccccgcctcctgagcggcccgaagccccgcccctt

SEQ ID NO: 274859 - DNA, 122 bp, Homo sapiens
ctcttccccttctgtacccctttgctgtttgtccccctcctcccgggtcctggagtccgtcgtgttccaacagtttttgctcttattcccgtgggctgcctgggcctcctttcacccgtgag

SEQ ID NO: 274860 - DNA, 122 bp, Homo sapiens
actcatccttccatgtgtgtcctcgtggccaatttgtctttgcacgggatggaaagctgacgagatggactatttttttccccttaaaaataattacatgccagatgctcgttccaagttct

SEQ ID NO: 274861 - DNA, 122 bp, Homo sapiens
gcgagcggggtccatggtgcagggggtcgggcggcccgctgggcaaggcgtccgagaaagcgcctggcgggaggaggtgcgcggctttctgctccaggcggcccgggtgcccgctttatgcg

SEQ ID NO: 274862 - DNA, 122 bp, Homo sapiens
ggatcaccagcgagctcagagtcctccccacgaccgccccagggtgggcatttttaaaagcggaggaagggagggaacacactctttggtgctgtgcccaccttgcctcgcacagagcgggc

SEQ ID NO: 274863 - DNA, 122 bp, Homo sapiens
gaatgaaactgctaagggtgggatgtcaggcactggtgggggatgtttccgaatggggcccgttggtcctcagtgaagcggcagctactgggcctgagaagggatgtaggggcgctggaatg

SEQ ID NO: 274864 - DNA, 122 bp, Homo sapiens
agaagccaagtcagaacaccccatacttcccaggcctctctccaaagtcctgttagaaatcgaattccaggagaccaggcaggggcagcctaggccctgggcccctaggaagtgctccgtga

SEQ ID NO: 274865 - DNA, 122 bp, Homo sapiens
ggcggcacggtttattttattttacctgttttcctcggagggcgcgaagactgccacccgcgcggggacctgggatcgacgactttgatactaggcggtatcccggagggctaagtcggcgg

SEQ ID NO: 274866 - DNA, 122 bp, Homo sapiens
ctcgagccgctggtaagagacccagtgcccaggaccccttgccccaaggcttttgtcggccgttcagaccccagcgctgtctctgttacgtcggaggcccccgaccgcgtgggagcgaatgg

SEQ ID NO: 274867 - DNA, 122 bp, Homo sapiens
agttcaagaccagcctgggcaacatggtaaaactctgtctactaaattgcaaaaattagccgggcatgatggcgggcacctgtagtcccagctactcgggaggctgaggcaggagaattgct

SEQ ID NO: 274868 - DNA, 122 bp, Homo sapiens
tggccaacgagagcgcagggcggagccaaatcttaaaggatccgggagctaagccagacccgggtggcggtggcagctgcgaaacccagggagccgatgccacgtgacccaatgtggacttc

SEQ ID NO: 274869 - DNA, 122 bp, Homo sapiens
ggcgggcggattacttgaggtcaggggttcgagaccagcctggcccacatggcgaaattccgtctctactgaaaatacaaaaattagctgaacctggtggtatgcgcctataatcccagcta

SEQ ID NO: 274870 - DNA, 122 bp, Homo sapiens
tccctgagccttagggagggtgcttggggttgtctggcttcagcagcggtgccttggcgtcggaaaacaggtcgggcccggtgagagtcccagtgagggagggtcaccggctgttgaatcat

SEQ ID NO: 274871 - DNA, 122 bp, Homo sapiens
acctggggtccagtttctccaccacagcagtgtttctagagtgcactgaaccaatccgagcgagagagagaggcaacatctgcctccaggagaaggaaatccggccccttttgagaggcgcc

SEQ ID NO: 274872 - DNA, 122 bp, Homo sapiens
gcggcctccggccggggagggcgctgtgcgggcggcgctgggggcgggccgggggcggagcgcggggcgccggctgctctggcggctcccgcggctccggctggcggcttcgggccctgcac

SEQ ID NO: 274873 - DNA, 122 bp, Homo sapiens
ttaagagctgtaacactcaccgcgaaggtctgcagcttcactactgagccagcgagaccacgaacccaccagaaggaaaaaactccaaacacatctgaacctcagaagggacagactccaga

SEQ ID NO: 274874 - DNA, 122 bp, Homo sapiens
ggcacggcgggcccgcgaggagcagcagccttccggctgcggagctgctccaggaagtctcgggctccggaggtccctctgccgcccctaacccctgcggcgcccagtgccgcgcagagccg

SEQ ID NO: 274875 - DNA, 122 bp, Homo sapiens
gcacctactacaagactggcaccacctttagacttgaaagcacatagtctatcacatgttcgcacacacatttctttactgaattcttccaagatcccaaggggaggcactaatctactcat

SEQ ID NO: 274876 - DNA, 122 bp, Homo sapiens
cctgcccgctattctgcgccctctctgacaggccctgaacagaagtgtggaaatgccttccgggagggtgctagcgaagtcactgtcacgcctgcaagttggactcaactgtaacacttttt

SEQ ID NO: 274877 - DNA, 122 bp, Homo sapiens
gggctgggcatctgtatgtggtgtggtggctagccgtgcatggtcatgtctggccccacgcgtggccccggagggtacacatttgtgtccatgcacgcggtgcctctgcagccaggctgcag

SEQ ID NO: 274878 - DNA, 122 bp, Homo sapiens
gaggaggagccggcgcgcgcgccacccaggcggggcggtgcttccagggggcgagtaggccgccaccgccaccgccaccgccaccactgccagaatcgcctctcgggggtcgccgggtgtct

SEQ ID NO: 274879 - DNA, 122 bp, Homo sapiens
cttccttcagccccttcctttcccatgtgatcccacttggcagccaacccagcctaaggccgtcttatccaaggccggcccctcagcggctccgcccatcttagtcccagcaggcctgatct

SEQ ID NO: 274880 - DNA, 122 bp, Homo sapiens
tcccaaatacagagtccacttttgcaaaaatgctgtctagtctcttctcctttgctgctgcggcattccctaggggctgtcagacacttgagagcctggttcctccaagtctaggctcttcc

SEQ ID NO: 274881 - DNA, 122 bp, Homo sapiens
agagccgagcccagggccatggaccagccctgtgtgagccgagcaggcgctgtggatggacgaacggactgacggacggacgtgcaaggacgagggaggaagacagaccccaccaaggcagg

SEQ ID NO: 274882 - DNA, 122 bp, Homo sapiens
tctctccctcccttcatctctgcctccctccgtctcttgctctgtgtgtgtgtgcacacgcgcgcgcatgtgtttgccttgtaagttaggttttaggtttgttttcattttatatgagtttt

SEQ ID NO: 274883 - DNA, 122 bp, Homo sapiens
agtttgcgagcgagggagcgggtgccggtaactgaacggatgcaaggcgatgtgcatgagcgcagacctgtgggggccggcggcgggtgtatccctggctcaaaggaaaaggcccgcgcgta

SEQ ID NO: 274884 - DNA, 122 bp, Homo sapiens
aagatggaacgattcgggtttctattcacaaggttattgaaggcatggcggtggggaccgcgcaaaagagatgagagtgtggggggaaaggggtttctgttctaataagggcttagcacgct

SEQ ID NO: 274885 - DNA, 122 bp, Homo sapiens
gcctctttccatgcacctaccacctacacctgctgctttcaaagaaaccacaacctggaccgggaacagaactggacgtgccaaaatgcctgaggacacttcatcgaatgtggctggcttga

SEQ ID NO: 274886 - DNA, 122 bp, Homo sapiens
tttccacaaaccttcactgagagcatgcttcgtgccttgggggctcaaaaatgaaagacacgttccctactctcaggaatttcacaggctggtgcggggagacacacagataagtagaccat

SEQ ID NO: 274887 - DNA, 122 bp, Homo sapiens
ccgctgagcctcgcggtgacagccgcctttggcagcgagcgctcggggcacttctatccccgcctctcaaagggtggggacagccgtttccagatttgaattttttctgttctttattttta

SEQ ID NO: 274888 - DNA, 122 bp, Homo sapiens
ctgctgctggtatccctggacctctgcaccagaggaggcggggcaggctggacttggggccgtgcggggcccagagtgctcctgccggttcccgagggctggcttcttatcctgcaaacaag

SEQ ID NO: 274889 - DNA, 122 bp, Homo sapiens
gccacactgggggtcatctctccgaggaggtcatctctccgagggcctcccacagaggtgcggctggagcctgtcctcccaggcagggccagtgcccccacaggacaccctgcccctcaggg

SEQ ID NO: 274890 - DNA, 122 bp, Homo sapiens
ctcccgcctgcccgccgcagtcgcagttgatggctggggtctgggctgtgcggggcgcagcggcccaaacccagtttgctcctggctctcgggagactggaggatttcatcggagccccgcg

SEQ ID NO: 274891 - DNA, 122 bp, Homo sapiens
gagcgaaacaaagagtcaagggttgtggctcctggaaccggcattccctctgtccacagccgccccaggactctgctgggccggggtcggggcttcccactaggggctcccaaggctacgag

SEQ ID NO: 274892 - DNA, 122 bp, Homo sapiens
gttgctttcatttttgtctgggggtggagggaatcattcctggcccatctttttagagcgcgttgccagaaaaaagtaagatttcaatgaagggtagctctttcctgagagagtgggatgtg

SEQ ID NO: 274893 - DNA, 122 bp, Homo sapiens
cacgagggcggggccagagttcaactctccaagaccttcgaaggggcggggccaggacttcgccctcgggtctcgcgcagtagggttagagccaggaatcagcccccttgtcccgccccccg

SEQ ID NO: 274894 - DNA, 122 bp, Homo sapiens
gaagctagggaactagtgctgcgcgtgcgcaacagtgctgaagcgggggtggggcggaggcgagtctgcgggggttttggggggtgtcgaggcctctattctgccccagagcgctggcgaag

SEQ ID NO: 274895 - DNA, 122 bp, Homo sapiens
cctccttggtaacacatgggactgggacttttaataccacccgacaggcccagcttgtctcgtcaagcgctaagtaaatggactcacgtcctatatgagggtttgaagttccatcacattct

SEQ ID NO: 274896 - DNA, 122 bp, Homo sapiens
cattacacttccagactggcttcttctgggcatctaatttgttcatgaagtgttgaacttcggaggacctgccagcattcaggggatttcagcccgactcagcactgttgatgttgttatgt

SEQ ID NO: 274897 - DNA, 122 bp, Homo sapiens
gcaaagctctataaaaaagggttcccctacctcttttctttctttctttcttttttgagacggagtttccctcttgttgcccagactagagtgcagcagcgcgatctcagctcactgcaacc

SEQ ID NO: 274898 - DNA, 122 bp, Homo sapiens
caccaccaacccctcccctgcctctcggccctccccgccgggcggggccagcgacgccatcgtgacagctccttaaagggccagtgcccagcacagggttcggccgagacggggtggaaggg

SEQ ID NO: 274899 - DNA, 122 bp, Homo sapiens
ttcactttggggtgtattcttactcctttatcttgttgcaatgcctgatccagctaagtccgctcccgccccgaagaagggctccaagaaggcggtgaccaaggcgcagaagaaggatggca

SEQ ID NO: 274900 - DNA, 122 bp, Homo sapiens
ttctccccgcaggcacccgctggggtattcacggccgctctggtcatggagtagggtcttcgcttgagttttgggggaagagtttcacaactagggagttgtgagcgctgctccagctgctc

SEQ ID NO: 274901 - DNA, 122 bp, Homo sapiens
gtccctccaggtcacgggtgcctcgggggtagcccacagccttgctgcaacgatcttggccgcccgcgcagatgactggggacttggccggcatgggctggtatggaatggtcatgactctc

SEQ ID NO: 274902 - DNA, 122 bp, Homo sapiens
aggtgcacggccagaagttggcacaacctgtgaatcgctggtttgggcaccatatggatacggtcaagaaatcaccacagactaagtgtgaccatattaaggaattactagtgattcttcag

SEQ ID NO: 274903 - DNA, 122 bp, Homo sapiens
ttttttttttttttttttgagatggagtctggctgttgcccaggatgcagtgcagtggcgcgatctcggctcactgcaagctccgcctcccaggttcacgccactctcctgcctcagcctcc

SEQ ID NO: 274904 - DNA, 122 bp, Homo sapiens
gggcaagaggagtcctcagaggtccttcattcagcggttccgggaggtctgggaagcccacggcctggctggggcagggtcaacgccgccaggccgccatggtcctgtgctggctgctgctt

SEQ ID NO: 274905 - DNA, 122 bp, Homo sapiens
ctctccgccggctggaacacagcgtcatccagagcaggctctgcccatcttttccttagccgggtagtagaagtggcctctgcctactgaaccgtgctgctgtagggcacacgcagccacag

SEQ ID NO: 274906 - DNA, 122 bp, Homo sapiens
tcctcgcaatcgtttccccttttcttggaaaactaggactgaggatactgtttcccttcacggaggagaccagcacagataaaagaatattaatcctttttatcacgagatcagttcctctg

SEQ ID NO: 274907 - DNA, 122 bp, Homo sapiens
atttgcccagggcggccactaccggcttcccctggagtatcttagaagcaactctcttcacgtcttccggcttctcgttgcggatgaacgtgcacagctcctgcggcagctttctggagcga

SEQ ID NO: 274908 - DNA, 122 bp, Homo sapiens
gtgcaccaggcctcacgtggactccagcgtattgagtgggaacaggttgtggttggtgggcgtggaaaagtagagctgctcactcgacgcgtggttgtcgcacgggctgcttagccccagcg

SEQ ID NO: 274909 - DNA, 122 bp, Homo sapiens
gtcataggcggtggagttcctgtccaaggctgtggacagtccaaacatcaaggcagtggacgaggctgtgatcttgctccaggagatcggtatgtaggggctgggctgggctgggctgggga

SEQ ID NO: 274910 - DNA, 122 bp, Homo sapiens
cttaaagagaaattagccccggctggtaggtgtctctcggcggcgtggagggactagggccggtctgtgtgtggctgcccggaggagctgaccaattggtcatggtgctgaaacctttgtgg

SEQ ID NO: 274911 - DNA, 122 bp, Homo sapiens
atgcaatatatcgttgggttaccaggcttcaaattccaccttggccgtttactagctgtacgacctaggtcaaatgaattctgtcttctcatctgcaacatggggaaaatatttcatcagtc

SEQ ID NO: 274912 - DNA, 122 bp, Homo sapiens
agagcagacttcgaggattggagtggaactccgcgcgcacgcgggggctgtcgtgatgcgcgtgctggagacccagactctaaacagaaggatccaaagacccttctcacctaacccaggag

SEQ ID NO: 274913 - DNA, 122 bp, Homo sapiens
tagtgattcgtatttgctgctcagaccaaacatttggaacctttcctcttgtttgggctccgtatccctctgactatatgttattattattgctcttattaattatttttaaatatatatct

SEQ ID NO: 274914 - DNA, 122 bp, Homo sapiens
tcattatgttgcccaggctggtcttgaactcttgggctcaagtgatcctcctgcctcagtcgcccaaagcactaggattacaggtgtgtgccactgggcctggcctaaggggacctttgatt

SEQ ID NO: 274915 - DNA, 122 bp, Homo sapiens
ggtgatgagggctctgctctcgtgaatggaataacgcattcatggattgatgggttatcacgcagtgggactggtggatttataggaagaggaagagagacctgagctagcactcagccccc

SEQ ID NO: 274916 - DNA, 122 bp, Homo sapiens
cccggcctgccggcgcggagcacggcggcaggaaaccattctcttctcccattgggagcgcgacccgccattcactagcgggccttcggggcaccctgatcagtttcctcaggttcagccaa

SEQ ID NO: 274917 - DNA, 122 bp, Homo sapiens
gatgcagggggaggggcattgggccgggctttccagctgcaaacacgtctggcgccgaggcgggcccattttgtgcctcctggggacggaccgtgggcggcgcgcagcggcgggacgcgttt

SEQ ID NO: 274918 - DNA, 122 bp, Homo sapiens
gcgacgacgtcgtcgacgggggtggccgtgggagctgagcacggagaagactccctctctcggaagccggatcccgagccgggcaggatggatcaccaccagccggggactgggcgctacca

SEQ ID NO: 274919 - DNA, 122 bp, Homo sapiens
cgccgtcctggagccccgcggcccctgtccaagaaactccacaggcccagaagacgccgacgctcacaggaactgaagattccaactacccacagacactgatgttttgccggaaacgtaaa

SEQ ID NO: 274920 - DNA, 122 bp, Homo sapiens
tgtgtgtgtgtggtgtggtgtgtgtaagcagtgaggttgttttagggccagtccttcctccgccactttgctgactcaaagacccagaggctttcttggggtgcaggtaccatgattccttg

SEQ ID NO: 274921 - DNA, 122 bp, Homo sapiens
acagggtgctgttggctggggtggagctgaggagggaccgccagagaaagtgatgacttgcgtttagatcatgttacttttgaggggcccatgagaacttcagggatctggagctcaggaag

SEQ ID NO: 274922 - DNA, 122 bp, Homo sapiens
caccccaacccttctgtttcgcacctctctcccgagggctcctcctgggcagccagcaaacgcccgctcctcggcccgcccacccagctgcctgcaaaccccgggcctgccactccctgtag

SEQ ID NO: 274923 - DNA, 122 bp, Homo sapiens
gacgcgtttgacagctgctctggagccgaggatcacaataagagaaggcgcgtgaggctccggcagcaaacaccagccaggcaggcagcggtaatcacagtgagcaaagttgaagactataa

SEQ ID NO: 274924 - DNA, 122 bp, Homo sapiens
accaatgggcgctggtttgcggcgcctgcgcgttctcttgtttacaggaggcacgtggggcgcgcagggtagggagagcgggaggctgctggcctgaggctaaagctagtcactgacctcta

SEQ ID NO: 274925 - DNA, 122 bp, Homo sapiens
gcgtgtgccataggttagagcctctgccggggctgggtgccctttgtgccagcggtcccacgcccaggtactgctcggctcacctggcgaggacagagcctcagggaccgggctgtggacgg

SEQ ID NO: 274926 - DNA, 122 bp, Homo sapiens
gatgcggacgggcacatcaagctcacagactacggcatgtgcaaggtgcgtgccttggaccgcctcccctgaccatcccgcatgtgcgtctcggggcgcctgtcccgcggggtagtgtctac

SEQ ID NO: 274927 - DNA, 122 bp, Homo sapiens
tggagaaagacagctgcacagtaactatccaacagaattcaccaatttctgactcccagccgttgggaaacatgaggacatggccagggcataatccacactctgcagaaggaataaacctg

SEQ ID NO: 274928 - DNA, 122 bp, Homo sapiens
tctgtcgctcttgtctgtctgtctctgctctttcctcggcctctctccccagacctggcccggccgccctgtctccgcaggctagatccgaggtggcagctccagcccccgggctcgccccc

SEQ ID NO: 274929 - DNA, 122 bp, Homo sapiens
ggaaaagttgaaaaatacgtagaatgtgtatgtcagatgctacaacctgaccctaagatccgacttctctgcatggtcatcaagctggaatcaagacttttaaaaccaagtgcccattcccc

SEQ ID NO: 274930 - DNA, 122 bp, Homo sapiens
acaaacaccgcctccttttggggttcactgcgcagaacccttcagggaaggttgataagccgaacatacagatataattgcactgaagtatagtaacaaccgtgataaaataggagcaggga

SEQ ID NO: 274931 - DNA, 122 bp, Homo sapiens
tccgacaacttgcgcggcagtctgggtgcttgttttccggctcttagctccaaccgaatccgagcttctctggggctctgtgaatgaaacgtgtcggggagagataatcctttggctgctaa

SEQ ID NO: 274932 - DNA, 122 bp, Homo sapiens
tgcagggcaggcggtggtgaactgcagccctagtccccaggtttttcatgcttggcacatcgaggctcttcggcccccaggaccagcagactcgccatgcgtggctcggattcgggctggag

SEQ ID NO: 274933 - DNA, 122 bp, Homo sapiens
gaagaaaggagaaaaataaatcccatactttgggcttcctcctacctggctcgccaaacccgtagagggtcttgagtgcaagttgtccagattcttggggttttgaacaaagaattgaacaa

SEQ ID NO: 274934 - DNA, 122 bp, Homo sapiens
agttaacacgtcacacagtcaagttaacacgtcaaactgaccatcacaggttagttaacacgtcacacagccaagttaacacgtcacactgaccatcacaggttagttaacacgtcactcag

SEQ ID NO: 274935 - DNA, 122 bp, Homo sapiens
tcccatggcccccggcactcacatgatggtctaggggttctctcccttccaagaaccccccgtcctggggccccagcactcacatgatggtctgggggttctgcagcacacaggcctttggt

SEQ ID NO: 274936 - DNA, 122 bp, Homo sapiens
caaaaagtttcagtctagtgagagagatagacctctacaccaaaaattatagtcatggtgcgcttagagtgttacggtgacacagaggagggacatttaaatcagactggtaggtaggaagg

SEQ ID NO: 274937 - DNA, 122 bp, Homo sapiens
gggactgtcaacggaagggaaggaaccaatgatgggagtgagagcccagaactcggtgttcgaagtgggtaatttatgggaggggcatacctacgagcagacaatgcactcagacaaggaag

SEQ ID NO: 274938 - DNA, 122 bp, Homo sapiens
cttgccaaggcagcatgggttaccagtccctgtgtaagtgaggtgtaaatacagtggcaacgacaacaagaaacgcatacaattgcattgattgcctggatctgttgcagtgttagggacag

SEQ ID NO: 274939 - DNA, 122 bp, Homo sapiens
taggattgcatccgcgctgccacggggctgtttctccggggcatttctaggcactttgttcggcttaccctgcagcacagaattagtactcctgtcaggagctgctctgggtgaccaggagt

SEQ ID NO: 274940 - DNA, 122 bp, Homo sapiens
cccgtgtgcatggagctctggggagctttcttctgtgtatctgagttatttatgagttgacgactcactagctggctttttgctgcctctgtccagagaacgttatagtgacacgacggccc

SEQ ID NO: 274941 - DNA, 122 bp, Homo sapiens
gggagaccagccagtggtccttctaactgaaaaggatgctaggtcaattttttatgacctcgagtctgtgaaggctcagacctgctgaaacctaggaggggatgtccagtgtaagaaaatct

SEQ ID NO: 274942 - DNA, 122 bp, Homo sapiens
gttttgttgatctgtaagtcgctcgagtccagttgaattttaaacgcggctctttgtttccgatttttccttttgctcgtggacagggatccgtcctgagcgtgccgggacctgaggtatgt

SEQ ID NO: 274943 - DNA, 122 bp, Homo sapiens
tttctgtttctggaaaagcaagcaccccagtactactcggagcctgagaatgactgactgcgtgactatgcacaaattatttcaccttctgccttgtcaccaaggattaattaatcattgca

SEQ ID NO: 274944 - DNA, 122 bp, Homo sapiens
gcatattctgtatgtcttaggaacctaaaggtgcagccagccatttatacctgagtgactcgaagcaagtcacataaaatctctgtacttcagtctcttgatttaaaaaatgactcaaatta

SEQ ID NO: 274945 - DNA, 122 bp, Homo sapiens
gagcccttggcttctgcctttcccagccatgacccacagctttcctggcttcatccccaacgcccagtgcatgacttcactcctctgggacagtttccacaggtgtaaaatgagatgcacaa

SEQ ID NO: 274946 - DNA, 122 bp, Homo sapiens
cacctcagtgcctcccaaatcagaagtttcttttcttcaatcttggactgcaatgattcccgactattcttcaggctaaaagactccctctttggagtgaatgaataaatatacacttggca

SEQ ID NO: 274947 - DNA, 122 bp, Homo sapiens
ggtcgcggtagtcgggcaggtggcgcaggatgaattccatgcgggccttccattgcttctcgctctctgagtaggagcggaactgctccgcgaagtcggccgcctgccgcacccccgaaacc

SEQ ID NO: 274948 - DNA, 122 bp, Homo sapiens
ggctttgtcagctgccacagtggctttcctggtttctgtgaaggttccagactaaagggccggtcagggatgttgaggagctatgctttgttcaactagtaagtatgttgcaggagtaaatg

SEQ ID NO: 274949 - DNA, 122 bp, Homo sapiens
agagaataatttacaagttaatttatgtctttctagtccattcgttttcccttaaaataacgtacttctcctgaaaagaattgcctatattccccatctcctccttccccctggagaaaggg

SEQ ID NO: 274950 - DNA, 122 bp, Homo sapiens
cctgtcctttactgcttaggcacgctgtcaataatccggtttattttaatttcatggaggcgaagtttcattggcctgatgtgtcttaacatttatccggtttcccctagagccggtacccc

SEQ ID NO: 274951 - DNA, 122 bp, Homo sapiens
tctgtcaatctcctgctagccacgttccctctgggctgagaggccaattgaaaattattacgctcatccctcagccggctggcaggcggctgcaatttcagtgttcatgtagaagacgaagg

SEQ ID NO: 274952 - DNA, 122 bp, Homo sapiens
taactgacttggcattgattgggacagacctggtcttctgtgggtgtggctgaccctaggcgtggacatgggagtctctgagaggctttggatgagcctcctccaccctcacaccgaccagc

SEQ ID NO: 274953 - DNA, 122 bp, Homo sapiens
ctcctctctctgtggggactgagctcctcggcatatgcactgtccccgctgcagggctggcggggtcccaggatggcactcgagggcctgcgtccaccagcatggtgcatgttcccagaggc

SEQ ID NO: 274954 - DNA, 122 bp, Homo sapiens
tgtgagtttttatgtacttggtctttgtttttgttattcatcctgtgtcctccctcttcccgatgtgctgttttacctaggagttagtctgctttctgaggatcttttagagagaggctgtg

SEQ ID NO: 274955 - DNA, 122 bp, Homo sapiens
tttattaaatgactgttagactcatttaataggtgggctctgggtccttcccccgctggccggtatgcattttgaagtcacctcaccaggcctccttcaaggcagcaccacctttcagggtc

SEQ ID NO: 274956 - DNA, 122 bp, Homo sapiens
ccagacagaaagtgggagaaaatataccctgctgcagtgacaccaccctcagagaaaccacgatggcaagggagctggctcaggacattgagtcctcaaaacaatgctttcactagtctcct

SEQ ID NO: 274957 - DNA, 122 bp, Homo sapiens
tgttggtggtgactcactgctactccgatgattggaaacacatgttcccgccgagaggcgcgtttattactcacagccgagggttcttggacgacatggacgtcaacagggagaggggtggg

SEQ ID NO: 274958 - DNA, 122 bp, Homo sapiens
gcaacacccgatccgcctcggggactgggaaagttccctccagggctcccacaggcgctccgcctcctgaactcccattggctgctttcgacgttgtgctccaccctttccgggcggggcgg

SEQ ID NO: 274959 - DNA, 122 bp, Homo sapiens
taacaggtttagtaattcctcatgaggttacagatgtatgttgagggaggagtggtaaagcggtaagatttggtgtcacagaagcttaagctacaggctcatggcacttacttgtcccatcc

SEQ ID NO: 274960 - DNA, 122 bp, Homo sapiens
gggaaggggaggagatgggggcggccgcggagaaatagagcggagctgctgggaacagcgcgccgagcagccgcttagaggcctgaaacagggccagctcctgtcctagataaggcggcggg

SEQ ID NO: 274961 - DNA, 122 bp, Homo sapiens
agctggggctcgggccttccatgttctctctgaccatcttgggtgtcctctgttttcgcccggctgactgtcctgtggtcaccccaccttccctatggttggtgcagcaggaagtggggagt

SEQ ID NO: 274962 - DNA, 122 bp, Homo sapiens
ccgtggctacggacgccccgcgccaattggctgagcgctgtcacgtgttaagagcgagcccgccctgccgagcgcctgctggccccacctcgttttcgtccaattctgggaggggcagcgag

SEQ ID NO: 274963 - DNA, 122 bp, Homo sapiens
tctcaggggaaagaaacagcaggaattactctgtccccagctccaggccggcagaggacccgagtgaggtccccgggttccccgggcaagcagcagggaccgaggagggcaccgcgtcccga

SEQ ID NO: 274964 - DNA, 122 bp, Homo sapiens
catggagactaatttatgagtacatcctgatgtgtgatcagttggtactgggattacaggcgtgagccattgcgcccagccagtaccacattttcagtctcagtcatgatcataattatttc

SEQ ID NO: 274965 - DNA, 122 bp, Homo sapiens
cgatgaaatagcagaagactctgggaagcagcgtgcaacgagtggcaaaggagcccctaacgctctttcttctgtgctcgccccgccccctccggcgtgggccccgccccgactaagcccca

SEQ ID NO: 274966 - DNA, 122 bp, Homo sapiens
ctcgtcgggggcgcggcctggggacgtggagcatcagatggggcggggacacgctgggggcggtacctagagcggggatttggagcggggacagaggagacgagcgccgggaccgggcaggg

SEQ ID NO: 274967 - DNA, 122 bp, Homo sapiens
aaggagcctaccaaggtagccagtgggcggaccactccagcccctgtcaatcagacagatcgggaaaaggagaaggccaaagccaaggcagtggccttggactcagacaacatctccttgaa

SEQ ID NO: 274968 - DNA, 122 bp, Homo sapiens
tcctgtgccctggtgagtgggtgggtctgcctggctggccctgtggtgggctgtggctcccgggttgctaagctggttccttttcctcatttataaaagggtgaggaaattccttatagggg

SEQ ID NO: 274969 - DNA, 122 bp, Homo sapiens
atgacattaggcaagtacccagaatctctagtttctttatccgtaccaaggagctaatatcgccttgatgggtgcaaacccatgaagactactttcgttaattaacaaaagtatgtagagct

SEQ ID NO: 274970 - DNA, 122 bp, Homo sapiens
cacctggtgatctgacaaggcagcttcttaacccggttgaggagggtgtctgctgtcccccggtgcaggggctctgggcgaagcagggccacaccccggcgggaagggccccctcgagactc

SEQ ID NO: 274971 - DNA, 122 bp, Homo sapiens
gatccaggggcttccgggtgcgaatagtgcccagccgcgggtgaatggagaactttccgccgagatcaccagaagaaatcctgtaaaagattggttctgaggagtctgaaaaagagagaggg

SEQ ID NO: 274972 - DNA, 122 bp, Homo sapiens
ataacaaaaactgttctgcctctcaacctggaggaggtgatgtggcaagaggcatcttgacgaaagcatgtgtaaaagaacatgtcagagaagccaggaaaaggattgatgtcctgctaagt

SEQ ID NO: 274973 - DNA, 122 bp, Homo sapiens
aataatctttatatatctcttgagaatttttgaatgaaatgaaatgtgtatcacctagcacggtgcaaggcctgtaaaataaatgttagcctattttagaagtagagttttccactattaat

SEQ ID NO: 274974 - DNA, 122 bp, Homo sapiens
gcatgatttggagtccctgcaaaagaaatgctctggtagcttagctacaaaaactcccttcgcctccttgctgtaggagtaaaaggagggtggaatcatgtgagtgatgaagggtggaactg

SEQ ID NO: 274975 - DNA, 122 bp, Homo sapiens
gcccggcccagcccagcccctaggcaacctgcgcccgccagtgcaacagagtgccccaggcggccgcaaatgcgtcaaggaaggggaagccacaggccccagtaaggtattcctgggaggga

SEQ ID NO: 274976 - DNA, 122 bp, Homo sapiens
cagaggcggtccgggctagaaggggattagtggaggacatctcggcagggctgctgtaggcggatgttgtccagtcagagcggaaccgtgacctgtgatacgtatacttttcatttttgccg

SEQ ID NO: 274977 - DNA, 122 bp, Homo sapiens
tctgggatggctttggatcagaagttcgttggatgtggccgaccgcgggtgcttcgggagcgatgggtgagttgatttggctctctggacttcccagccagcacctccccattgcccgcttc

SEQ ID NO: 274978 - DNA, 122 bp, Homo sapiens
gccctgccagctactcagaatgctctcaatatgaacatgaattcagccagtattgctccccggattgcaaactcagttccccatgggaaccaggcaggtcacaaaaatgagggaagcaggct

SEQ ID NO: 274979 - DNA, 122 bp, Homo sapiens
ccgcgtcgccaagggcagtcattggcggccgcagacggaggaggacggcgttggccgggacgcggacagcgcagggcagcggcgggggcgcgggccggggccacgggcgcaggggccggagc

SEQ ID NO: 274980 - DNA, 122 bp, Homo sapiens
tcccccaggccttgagcctggctttgcagctcctgctgccccagggcaggtggtggtggccgcccagccctcacccagccccgagtcctgtgtggaaggcgattcctcccactttaccgggg

SEQ ID NO: 274981 - DNA, 122 bp, Homo sapiens
gtttttgtattttttgtggagatggtgtctcactttgttgaccaggctgatcttaaactccggagctcaagcaatccactgcctccgtgtcccaaagttctgggattagaggcatgagtcac

SEQ ID NO: 274982 - DNA, 122 bp, Homo sapiens
gcggcgcgcttgagagtacagtccccttcccagcgcccgattggacagggccttaggccccgccccttcagtcctgagtgacgggagatgcaatcagacacggcgctgagtgaggccaggtt

SEQ ID NO: 274983 - DNA, 122 bp, Homo sapiens
tccagctactggggagtgcatggagaacatgcccctccactcggtcacatactcagccttcgggtcaccttttcagccagaaatggtcattccctggtgcctctggtgaaggctcactgaga

SEQ ID NO: 274984 - DNA, 122 bp, Homo sapiens
gccggccactgcagtactcacaccgcacgcctgggctctgcctctggcccgggttgggggcggccgccgctatctctggacccttgtctcgaaatccgcacggggtccgagggtgcccgggg

SEQ ID NO: 274985 - DNA, 122 bp, Homo sapiens
cgcgggctcgggtccccaccaggacaaggcggcctctgtgccgacccagctgattcctctcgggctgcaaatcccttccggctgacagccctgccggctggggccaggcaagggaacgggaa

SEQ ID NO: 274986 - DNA, 122 bp, Homo sapiens
acgccgagcagccgcggggacctagcggggccgagaggggcggcttggagctgggggatgcgggcgcagcggggcagctggttcttacggtgagggcgcccccggtgaggtctgggctcagg

SEQ ID NO: 274987 - DNA, 122 bp, Homo sapiens
gtcattcaaaaaaccacgttacaccctaatgtgtactaaggatcgtgtaaggccaatgagcgcgtggagctctttctcttacagcaccccctggagataaagttaagccgtacgtggctgaa

SEQ ID NO: 274988 - DNA, 122 bp, Homo sapiens
ggggcgcgggcggggcggggctggtgcgcagagctgtccagcaccccgaggcggggcgtgcgcccccggcccgccccagccgcctccgcccgcccagccagcgccactgcggctcggcgggc

SEQ ID NO: 274989 - DNA, 122 bp, Homo sapiens
ccttagagtttgggattctggaattcgatccttcatggataggcagctggacacagaggtcgtgggtgagctggaggagcaggcccggatgtgaggcaggttccccatctgctgtgggtcag

SEQ ID NO: 274990 - DNA, 122 bp, Homo sapiens
tcagcctcaatgtttgttattgttgttcgggttcaggttgcttctgccccgccccatcgacgcaatctccaccaatcaatggcgtggtcgttttgagggacaagtggtgagagccaatcatc

SEQ ID NO: 274991 - DNA, 122 bp, Homo sapiens
agtcatgctggagttcttcccccaagagggatgggtgatagggtccacgtggtcaggctgcggagattcaaggaatgccacccacccatggccctgaatgggaccaaccctgttgagcaatg

SEQ ID NO: 274992 - DNA, 122 bp, Homo sapiens
tgggtgctgggcagatgattggtggagactcagcttcttagcaactagaccggcccctgccgctccgcagggagcctggtacccgcctggagttcctttcccagtgctttcccataggcatc

SEQ ID NO: 274993 - DNA, 122 bp, Homo sapiens
ctggttctagaaagagcccaggtttgcaatcagacttgggttcgcagcccagtgcccccacgtccagagcctgtcccctcagctgtgtactgggtggtgctgggggccagtgggacggcagc

SEQ ID NO: 274994 - DNA, 122 bp, Homo sapiens
cttctcctcctgtgctccccagcatggcagacatcaccaccacccacccagggcttaacacgccctgcaggatctggccctggcttcagcgctcacttcaccctgctttgcaccctgtgccc

SEQ ID NO: 274995 - DNA, 122 bp, Homo sapiens
actcccgagacacatgcaaacgcccatggctcttccttacctttcccatagaagaatttgcggtaataataggccccaaggtcaatgtgttctatgatgtagcgcttcactttctccctgtg

SEQ ID NO: 274996 - DNA, 122 bp, Homo sapiens
gcgctcccccggagctctggagttctcccgggatctctcctcggctagagcccaggccagcgcgcgagccgctctttgtggcagagcatcctcttttgaaaccagaattctcttcccattag

SEQ ID NO: 274997 - DNA, 122 bp, Homo sapiens
gttcccaagggtgacagtgtcctggggtcacacgggctcaaaccgaggtcgatttccgaacgctcactttggagcaggatgcgagcccgggccacgattgggtcaggttgcgccgctcgcgt

SEQ ID NO: 274998 - DNA, 122 bp, Homo sapiens
agagagagagagagaaagagagagagagagagaaagagagagagagagagagagagagagcgagagagcgcacgcatttcaaagcagggagaaccacaagtacaaaggcattaagtaagaaa

SEQ ID NO: 274999 - DNA, 122 bp, Homo sapiens
ctccctttatagaaatgaagagcaaggactttgggtagctttctttagttctcaagacctcgtcagcagagctggcctgaaggcaacacagtaggcaggtgcctgcatggcatcctattacc

SEQ ID NO: 275000 - DNA, 122 bp, Homo sapiens
tgcggaccctgctccgctactacaaccagagcgaggcgggtgagtgaccccggcccggggcgcagatcacttactccccgctccatgcctcacggacggccctggtcccctgagtctccggg

SEQ ID NO: 275001 - DNA, 122 bp, Homo sapiens
cagaatgtgatagaagggacactgtagggtttctgaggctcggcttccttctggctctgccggggtcctggcagcatcctccagggcccagcctccatgccaggaggaaaccaggccatggg

SEQ ID NO: 275002 - DNA, 122 bp, Homo sapiens
cagtttttatcaccctcaaccacaaaaagatacaacttctgatttcaaaatgaccactttcggctgggatagtggctcacgcttgtaatcccaaaactttgagaggccgaggcaggtggacc

SEQ ID NO: 275003 - DNA, 122 bp, Homo sapiens
agaacatgaaaataacgtccaatcagagtaggcgtagatgtttctctcatccaatcagaacgtgaagtccgagaaccaggcctgcacaaccccccagtatataaggtatgctaagggggcgt

SEQ ID NO: 275004 - DNA, 122 bp, Homo sapiens
taggctcacccctgactcagcacccagccctgtcaacacggttgagtcagcacccacgcccggcagccccaggtggagtcccaggaccataggctcaagctgatttgtcaggtgccagggct

SEQ ID NO: 275005 - DNA, 122 bp, Homo sapiens
atgggtgatgagctcactctggactgcgggagagcccaggctaggtgccaagcaaagtcccgcggcgaatgccattcagagtcaaagccggctgggcttctgcgtccctgcgacttggagaa

SEQ ID NO: 275006 - DNA, 122 bp, Homo sapiens
ctgtctcggcctcccagcccaggctgggtctctttgcccaggttgggcggggccgatggccgttggaagccccgtctccacggagacccgaggccgccagaccgcctgtcaggggctgccct

SEQ ID NO: 275007 - DNA, 122 bp, Homo sapiens
gaggcggtggcgggatcggaggcttagggccgctctggcccgggccaggacccatggggccgcgattctgattgaggcccatgccgggcggcggagaacggaagtcgtggaggccgccgcgg

SEQ ID NO: 275008 - DNA, 122 bp, Homo sapiens
acgcaaaagccaccggagccttctgtggccggctggagcgtcctctgggaatgcgaggaacgctgttatctggagcccagctgccctgagcactgtctctgggaacacccgcgtccttcctc

SEQ ID NO: 275009 - DNA, 122 bp, Homo sapiens
aaagatggcgaccacgaccaaagcttttacatcacagatgacccggatgacaacgccgaccgcagcgaaacgtccagcatagcggacccgagctccccaaatccattcggatccagcaatcc

SEQ ID NO: 275010 - DNA, 122 bp, Homo sapiens
ctttgccagaaagcactagattccatgacagtccttgatatttatggtgggcaattaacccgaattctcaggttcccaaatatggaaagaatgacatgttcagatagaaaggcactgtgggg

SEQ ID NO: 275011 - DNA, 122 bp, Homo sapiens
gtctgtgtatgtgctgggagatgattgcttcagtagatattttaggggctctaatccatccggtttcatgttgcataaatcaactccaaatgatactgctgaggggcttaagacagtgggaa

SEQ ID NO: 275012 - DNA, 122 bp, Homo sapiens
aaaagagaaaaagcccacaggctttggtagggaagatctgggtttccattccagcgctgccgctggtgatgggacaatgggcgggggctctgagccacaggttcctcggggcacatgcagac

SEQ ID NO: 275013 - DNA, 122 bp, Homo sapiens
ctttttatggtatttactcaattccaatgaaatgccaactgaaaagctgctcagcggagccgagtacagcattgaacttctatcccattctgcccccgtcccttgggagctggcagcacttc

SEQ ID NO: 275014 - DNA, 122 bp, Homo sapiens
ttaaattaaggagccagatgtttttagtcaggctatcctgacaagacttgacctaaacttcgtttttattggtcataacagtccaattatattcttggccaattttgtccaacggacaagaa

SEQ ID NO: 275015 - DNA, 122 bp, Homo sapiens
agctgcacctgcccgggaagcctggcctgggcacgccctgcgccagcctcacactgggcccgcccacaccgcccgcctccatgcccaacctcgccgaggccacgctcgcggacgtgatgccc

SEQ ID NO: 275016 - DNA, 122 bp, Homo sapiens
agttcagctgaaaaaccaacaaaagggcctccctgctatacccgggggctcatgagtcaccggggctttgggggagtgccaacatcatcatgacacagcaagaatcttatcagaccaatggg

SEQ ID NO: 275017 - DNA, 122 bp, Homo sapiens
cccgccgcaggaccggaggcgtttcttcaacagcagcggcagcagcgacgccagcatcggcgacccctcgcagtccgacgatcctgacgatcccgacgaccccgacttccccggcagcccgg

SEQ ID NO: 275018 - DNA, 122 bp, Homo sapiens
ccagcatgtcgggtcccctagccagggcctggtgtacgtggtcgagggccctggaagccccgatggcctaggaggagcaggcgggcggggcggcgggtgtcgctggccggtagagagcttcg

SEQ ID NO: 275019 - DNA, 122 bp, Homo sapiens
tggagacctgagcagacactaacagttaccagcgctggaggccacacccctcagataacgcgggcgccccttagttgcctgcctgagaaaactggatgctgcccaagggatgtagtttgttc

SEQ ID NO: 275020 - DNA, 122 bp, Homo sapiens
acacctgtgcgctcccacagatatgctcgcaatgcaggtgtaaggtccccctcacacctgcgcgcttccgcggtctccctccccgcatccccattaagggactggggtcccgttacaggtgc

SEQ ID NO: 275021 - DNA, 122 bp, Homo sapiens
cttctgcgcaaagccctggatctgaaacattgtggctctgactcaccagccttcagctgccgctgaaaatcactcttagaacaccacagtaattgttgcagacatgatctgctgatggatgt

SEQ ID NO: 275022 - DNA, 122 bp, Homo sapiens
cccgaggagatcccacaaccgacccagcccccgaggagaccccagaaccgacccagcccccgaggagatcccacaaccgacccagcccccacggagaacccagaaccgacccagcacctggg

SEQ ID NO: 275023 - DNA, 122 bp, Homo sapiens
agtagcaaccacatgaataagacaatagtaaataaatgtaatcagttcaaaaactattaccgaatgccttctgagcatgtatgcacctacagaaaattcagaaagggaacacgatctccaac

SEQ ID NO: 275024 - DNA, 122 bp, Homo sapiens
tcacatgccttgctgggcagccctctcacagggtatgagctggaacacatgcttgggctccgatcctctagcctggccagcacatccctccccacctctcccagccctgctataccactagt

SEQ ID NO: 275025 - DNA, 122 bp, Homo sapiens
aaggcagagacagccgttccgtgtttctcccccagccgcagcggccagggagccgctcctcgtcttgcttccggttgatgtgtcgttggtactcctcctcggatgccctctcctgaagccat

SEQ ID NO: 275026 - DNA, 122 bp, Homo sapiens
aaagggcgcggtgggggtggggggtgacgggaggaaggaggtgaagaaacgccaccagatcgtatctcctgtaaagacagccttgactcaagcatgcgttagagcacgtgtcagggccgacc

SEQ ID NO: 275027 - DNA, 122 bp, Homo sapiens
aggaggcgcgttggctgcgcagagagcgcgcttcccagctggagagcctaggaacggtggcgcgggcggaggcgacagcgaggacccaaggctggggtttcctgcttggatcaggagtgcct

SEQ ID NO: 275028 - DNA, 122 bp, Homo sapiens
ggcgaggaggcccagatcccaccacagccgcttccggccggttccacccagcccctcccccgtctggggactccggccccatacactcaccatttcccggcttctgggtgtcccggtgtcct

SEQ ID NO: 275029 - DNA, 122 bp, Homo sapiens
ggtggtcgatgggaccgcgccacagagcgggggcagcactcataagggaggctcaggccacgcaggagcccatggcggggtgggtaaggctcaggcatggtgggctgcaggttccgagccct

SEQ ID NO: 275030 - DNA, 122 bp, Homo sapiens
ctggtgtttgtacccaagtgaacctcacccgatggcttccatcctttccaccttcctcaccggcttttgagctccctcaggcatccctgacaatccagcaggacggactcctccctgctccc

SEQ ID NO: 275031 - DNA, 122 bp, Homo sapiens
gcccaggcccgggccttccccttagtggtcctggtgcccagcatttgggtcttcagagtgcggcaccacacgcccgcaagcctcttgggaggctgagcctgtccctgtgggtttgcgcttgt

SEQ ID NO: 275032 - DNA, 122 bp, Homo sapiens
ggcagcgcccccgaaccctagcgcagcccaggaagcggtcggaggagactgtcctggccgcggtggcagccccatccggagtggctgtgacagcagcaatggcaacagcttctacacagtgg

SEQ ID NO: 275033 - DNA, 122 bp, Homo sapiens
cctagtgcccatgttttcactggacggcactgaactgcaactggacctggaatcctgttacgcacaggtctgcctcccagagatggtgtgcggaacccccatccgggagatgtggcaggatt

SEQ ID NO: 275034 - DNA, 122 bp, Homo sapiens
agacctatttcgtccatccacatatctttggagaagcattcccagatcctttgccatcctcggaaagggcttccaaggcgcttggctcctagctctacacttcctttacacaggttcccgtt

SEQ ID NO: 275035 - DNA, 122 bp, Homo sapiens
tctcccaactcccacctgaccccgtctcagaatattctagtctcctccccacccacagcccgccgtctagctccgcagcagcttaggagccctgaaggtgagtttgtagtccctggtccttc

SEQ ID NO: 275036 - DNA, 122 bp, Homo sapiens
gaaatacgggtagtaatattgttgatacatgaagtacaagacattctccctttttttccccggttgtgctggcatttgctgacagttgtaaaaacttgttgttgttatatgcagagacaact

SEQ ID NO: 275037 - DNA, 122 bp, Homo sapiens
gatgtgaggagagacactaggggactaagcatggcctggaacctgctgccttccttggcccgcgctcctcacaccctcctactcccaactctcctctctttcctcatttattattattattt

SEQ ID NO: 275038 - DNA, 122 bp, Homo sapiens
atgaagacctgtgcaaaataaatccctttatatacatttgaggaggttgttgggctcaaacgaaggagagataattaatcccaaatattcatgggctgggtttgcctccaaggcaataagtt

SEQ ID NO: 275039 - DNA, 122 bp, Homo sapiens
tccctcactggagcttcagcggtcggaacgcgggggtggggcatgtcctgccgaaatttgcgtccttagagcggaagtacggccggaagcccgccatagagtttagtggccagagcgactct

SEQ ID NO: 275040 - DNA, 122 bp, Homo sapiens
cggctcctggcccttgccggttggtgttgcgcgtctgagatgacgcccctgcggtaggagcggggtttccctgatcaccgcttcttttgaccatcttttctggcagggccttgtatttttaa

SEQ ID NO: 275041 - DNA, 122 bp, Homo sapiens
taagaccattcttgaattcccttctctatgattccatccttacttttaattgtgctttggcgatctgtgtagcttttgcatagcaagataatgagctgatcggccaatgcaaggattttagt

SEQ ID NO: 275042 - DNA, 122 bp, Homo sapiens
caagggtcagaggctggatgggaccacagaccttgaagttggcttccatctcagagaagacgcccagctttccccggagagcagtgcacaccaggctgcagagagacagggtcacgcctata

SEQ ID NO: 275043 - DNA, 122 bp, Homo sapiens
aagcagaaatcggcttgtcttgtttgtataactgtgggtttgttttagataagccacccccgccccatccccatgcaagttcccaccatgaatatgcctaaactggggtggaaactttttcc

SEQ ID NO: 275044 - DNA, 122 bp, Homo sapiens
cagacagggcagcctggcagaggcgctcctcacctcccagacggggtggccgggcagaggcgcccacttcccagacggggcggccgaatcccggctctttcatgttttagctgttgggcttt

SEQ ID NO: 275045 - DNA, 122 bp, Homo sapiens
acaacaaaaaaaggacagatgaaggttttcaactttcagtaaaggcagaggagcttgttacggattcgcctccccacaagagcagttagaaaaactggataaaaatgtgccccgcccccaat

SEQ ID NO: 275046 - DNA, 122 bp, Homo sapiens
gctcgccgtgcttggggggcttgtgtgagaggtgtggactgtggggcctgaaatgtgctccgggggcacctgcggccaaggcccccttccgaggtcccgctgcccctcccagactgcaccgt

SEQ ID NO: 275047 - DNA, 122 bp, Homo sapiens
tggaaaatggaagcaaggcccccaaagccatcaggatggctccagagggggcccctaacccgcagggactcgctctgtacgtaatcactgaggaaatcattgtcagcctgcctgcactcaca

SEQ ID NO: 275048 - DNA, 122 bp, Homo sapiens
tgtcagagagcgaaggtgtctttttgccatctccttggtcttcaccagagtgggcggccccgctgcccacacattatgttctccagtagtatctgggggttcagatcccccttctctgggag

SEQ ID NO: 275049 - DNA, 122 bp, Homo sapiens
tccaacctgagctttaacagctttgcagtccccatatgggaagttgtatagatgtgggcccggtggcagggacagcaccactccaagtacattttgctgtagagaatgtatccacagataat

SEQ ID NO: 275050 - DNA, 122 bp, Homo sapiens
taagtacacaagggacaggagggttttgcgagaaaggcgggcgctctgccctgttctgcccgtgacatgatgacgtaagaacgactcccagaaactgcctgagtcgcctgcgtccccagctc

SEQ ID NO: 275051 - DNA, 122 bp, Homo sapiens
acaggtcgtagtgcttttaagggctcaccaactagggttcgaaatctctgcattgcctgacgcgaggccttccaggagcaggtcagacaacattgctcagccacccagggtcccagcgctac

SEQ ID NO: 275052 - DNA, 122 bp, Homo sapiens
cgtccaccccaagcccgtgtggaggcgcggccagcacgggccaggaaggccgagccccagcggatttgaatcagaccccgcccccagcgccacgtggaccaccacagcctcgcccactgcag

SEQ ID NO: 275053 - DNA, 122 bp, Homo sapiens
gcccgccacacccgtgaccctcgggcagcaccaccttccagtccgggccgtgacccagaacggaaagcatgcggttcccacgaacagtttagccggcaacgcttacggtgaggccctggccc

SEQ ID NO: 275054 - DNA, 122 bp, Homo sapiens
catttaagtaccctgcaccaaaaagtaaatcaatattaagtttaaagaaaaaaaaacccacgtagtcttagtgctgtttacccacttccttcgaaaaggcgtgtggtgtgacctgttgctgc

SEQ ID NO: 275055 - DNA, 122 bp, Homo sapiens
tgccgctgccgctgctaccgctgccgctgctaccgctgccgctgctactgccgccgccgccgccaccagaactcttgctgctcgctgagcccgcccctgcctggggatgggctgagcttgac

SEQ ID NO: 275056 - DNA, 122 bp, Homo sapiens
gagctcgttttcttttcctctaggcagagaagaggcgatggcggcgatggcatctctcggcgccctggcgctgctcctgctgtccagcctctcccgctgctcaggtagcggcccagccgggg

SEQ ID NO: 275057 - DNA, 122 bp, Homo sapiens
ttgctgacaattcaaaacttctgccgcctctcctgggatgccagtgggtgactctctctccgaacagcaggcgtgacccgcagtcaccaactctgctcccgcccctctcccgggggccacta

SEQ ID NO: 275058 - DNA, 122 bp, Homo sapiens
gtgaaggtgcacgaggaagatgaagctgggatcgagcagggcagggcctgggagaggaagcgcgggactcctgcctggcgtccacgagctgcccatgggcatccctgccccctgggggacca

SEQ ID NO: 275059 - DNA, 122 bp, Homo sapiens
ctttcctcaacggctgaggcacctgggaagaactgaacccacctcacttgccctggacagcggcgccgacgaacttcgcacgaagcccgtccactggacggctgcgcgctgccaagggaatc

SEQ ID NO: 275060 - DNA, 122 bp, Homo sapiens
acccaggagagaagggatgaaggcctttggtcctccacatgagggccccctccaaggactcgtggcctcccgcattgagacttatgggggccggcatcgagcctctgctcagagcactgctg

SEQ ID NO: 275061 - DNA, 122 bp, Homo sapiens
cataaaaaataagaaaaacttcagacagtttgtataagtcaacaggagaaactcaaaaaacgtggggaaagaaatatgctgggctgtgttttatcagcacaagagcaatgagtcatttaggg

SEQ ID NO: 275062 - DNA, 122 bp, Homo sapiens
tatagtgctctgtgactgacttgtttcaactaacatgaggttcatccatgttgtagcatgcgtcaatacttagtttcttttttttttttttgagacggagtctcgctttgtcacccaggctg

SEQ ID NO: 275063 - DNA, 122 bp, Homo sapiens
ataagatttccacgttacagggtcatacacgactgactgctgtggacactgagtacatgacgggacctatggtcccctggagagaagcagggtggatcacacggggaccataggccacagtg

SEQ ID NO: 275064 - DNA, 122 bp, Homo sapiens
gagatgcggcttctgctttctgccgtttcctgcccctcggctggccgccggctttacagacgccacaaatccaccgcgtccaaagcctagctcgtcctcaggcctccgagtctcctgtgcgc

SEQ ID NO: 275065 - DNA, 122 bp, Homo sapiens
ggtgtgtagtaggctgaaccaccttggtttgggaaagtacacgctatgatgttagcaggacgaaatcgcctaaccacatatttctcagagtatcacatccccatcataatgcgacgcctaac

SEQ ID NO: 275066 - DNA, 122 bp, Homo sapiens
aggtgttgacattactactatccatgtgatttcactctccatggggcacctggccatgtccggaggcatttttgatcctcaccactgggaggtacagggcagagatgcggctaaaccgtcta

SEQ ID NO: 275067 - DNA, 122 bp, Homo sapiens
gcaggtgtagttaggaacagaaatcaaccccacctccccttggctagtcactgtgaaaagcgtgcgtaaggcaattgaatcgagggttaagggttcatcttgctaatgtcaaaagtgacact

SEQ ID NO: 275068 - DNA, 122 bp, Homo sapiens
aagatctaccgcagagagcggctgtcgagggaagtccggaggaggccccgaaggccaagccggcctgggctgcttaatcactcggtaggggccgggacggtccctggaactccctcccccca

SEQ ID NO: 275069 - DNA, 122 bp, Homo sapiens
cctgcagggtctctgcccgtttctccaaccaagggtcgctgggaggtttgggatgcaccgcggtctgactgggtcccaggccgccttccgctgggagggagcaggaccccgcctcgcagccc

SEQ ID NO: 275070 - DNA, 122 bp, Homo sapiens
gtccttgctgccttcttctgaggtgggccaagttcagagcagccttggcagactctcaagcgtcccttccacctcccgcttgcctcaaccctgaagccactaccgtcaggtcacatggggcc

SEQ ID NO: 275071 - DNA, 122 bp, Homo sapiens
accaagccccaacctgcagctgctctgcagacgagcttcagacaggagttcaggaagctgcggtctagattatgtgtggctgacacttctgcctcacacgacacgctgttggagtttctccc

SEQ ID NO: 275072 - DNA, 122 bp, Homo sapiens
taaaaatatgtatgtacaaaagcagcaccagcatttggtgcttccggtccacaggcgccacgtgtcttccaggactatctctgtggccagttgtacctgaagcctctgcagagagtacaaaa

SEQ ID NO: 275073 - DNA, 122 bp, Homo sapiens
cacttctcagaaacatcaaaacgtggcgtgggaaaacccgattccgtggggaaggcgggccgcctaacacaaagctgtctttccgtaaaaatcagtcggccttcacagggttacagaaaatt

SEQ ID NO: 275074 - DNA, 122 bp, Homo sapiens
gcaccaatcccgctcgtcggcctctttctcggcctccaatgagcttctagagtgttatcacgccagtctccttccgcgactgattggccggggtcttcctagtgtgagcggccctggccaat

SEQ ID NO: 275075 - DNA, 122 bp, Homo sapiens
tgtgtcgccgcctagtctccggtcttggtgctctcccgggggtgccccaaggagccagtgcgcgctgcgggctgggaaggaggcgccgctcagctagtcctcctcctcctcctcgtctttct

SEQ ID NO: 275076 - DNA, 122 bp, Homo sapiens
cgagcgcctctctgctggcactcgccccgcagcgctgcccgccgggcggaaataggaaggcggctaccgtcacctcctcgccactcggcgaccggggcacagctgacccccccctcccgccc

SEQ ID NO: 275077 - DNA, 122 bp, Homo sapiens
aagtatggacggccgggccgggccgggccgggcggagcgtgaagccgggttagggcccgccgggtttgggcccaccggctctcatcggtcatcaagaacttgcagaaagccgggcacggtgg

SEQ ID NO: 275078 - DNA, 122 bp, Homo sapiens
cctctgctctgtagatataatgctaggatagatacagtgctaccattagcaacaggaaggcgtcacaaggattctggaaccttctgagggcaaatctgctttgtcatgacctcagtttcaga

SEQ ID NO: 275079 - DNA, 122 bp, Homo sapiens
tgtggcatctgggtaatgggagaaggttgagcttccctcacgtagagaattgctgcagggcgccctagagcagctctacacagccctggtcaggactgctgcttcaggaagttgtgtctgag

SEQ ID NO: 275080 - DNA, 122 bp, Homo sapiens
tgggaggccgaggtgacagcaggtgagggccgggtgcggatggggaagtgagacaagcaccgtgtgggtattactcattccgctctactaaggaggctgctggcaagcggaacttctagcct

SEQ ID NO: 275081 - DNA, 122 bp, Homo sapiens
tgcttcggcagcgttctacaggagaaatacgactggtcagagacagacccctggcttcgccgtgatccgccaccaccacgcacgccaagcagccctgggtgtcctcggggggcagtgctgca

SEQ ID NO: 275082 - DNA, 122 bp, Homo sapiens
tctaggggaaaggaggtagttaactagattgcagctctgccttccgactgggtaggccaacgtcggactcagagtcttccctgagcagaaggccaaagttacggcctctgagcaagaatatc

SEQ ID NO: 275083 - DNA, 122 bp, Homo sapiens
aacagcctgccggacatcgtcatctggatgctgcagggagacaagcgtgtggcataccagcgggtgcccgcccaccaagtcctcttctcccggcggggtgccaactactgtggcaagaattg

SEQ ID NO: 275084 - DNA, 122 bp, Homo sapiens
gttaaggagtgcttgagcaggggcctcgggagacccgaaccagcctccttgcccgcaatccggtgtagaggaaaaaaaggaaacaggagttctgccaggtcctttcaggccttggggttgcc

SEQ ID NO: 275085 - DNA, 122 bp, Homo sapiens
cattttttttttggtttggaactcctgcactggtcctgtgatgtgactgcagccgccaggcgcgtgcgcagtgtacactgcgtgcgcatacgcgagcccgttgcgcctgcgcgcggtgcggc

SEQ ID NO: 275086 - DNA, 122 bp, Homo sapiens
cctggacctgtgactgatccacagcaggcatgtgatctaagcctgatagatcaggtccctcgctgggcttgctgcagctggagaagaagcagctccatgctgctttggggggggcatggtgc

SEQ ID NO: 275087 - DNA, 122 bp, Homo sapiens
ctagggatgtgcggccccggagctgtgccgccgcctcgccagaagctggttgggcagccgcgttcttggatgacttctccttagtactgttcattgcctggtcccatagaactttctgtcat

SEQ ID NO: 275088 - DNA, 122 bp, Homo sapiens
ggacaccagacgctcagggagcaggaggccaaaaagggcagagccgcctccaggagctggcgagggaggcgccagcagccgtcatgtccaggaatgtgagcccccgacccctcaaccctgca

SEQ ID NO: 275089 - DNA, 122 bp, Homo sapiens
tgggcggcttctttcctggacgcgtttgctcctggcagtcttgtccgcccttgcctgtagcggtccgcaccctgtagtgtgttcttttgcccatttccgggaatggtttatcctctttgaga

SEQ ID NO: 275090 - DNA, 122 bp, Homo sapiens
gggagactgaggcaggagaatggcatgaaccgggaggcccagcttgcagtgagctaagatcgcgccactgcactccagcctgggtgacagaaagagactccttctcaaaaaataaactaaaa

SEQ ID NO: 275091 - DNA, 122 bp, Homo sapiens
ccaactcctggccgcaagtaatctgcccacttcagcctcccaaagtgttgggattataggcgtgagccaccgagcccagctagtacacagaataccattttttacttaagtatattaatcta

SEQ ID NO: 275092 - DNA, 122 bp, Homo sapiens
acccttgtgaagaccccgaccctagcggaacgggacctgcgctaacacccaggcagcccgcgctacctgccgctcagctctggagcctctcacgtcacggacttggcagctgaacaacatga

SEQ ID NO: 275093 - DNA, 122 bp, Homo sapiens
gctgagccggtacctgacgctggacggcttcgacgccatgttccgggaggccaaccacaacgtgtcagcgccctacgggaggatcaccctgcacgtcttctgggagctcaactatgacttcc

SEQ ID NO: 275094 - DNA, 122 bp, Homo sapiens
ctctgtttctggctggttgcatctgatccgctagataaatgttgcctctagcaggaattgcggtgtgtgttcagaaacataaagttgttgcttaatgagaccaaggaggtgacagggccagc

SEQ ID NO: 275095 - DNA, 122 bp, Homo sapiens
ggtcagggtgatgtggcgggctgaggccagggatgtggacagcttgacgggcggcgaggccgctggcgcttataccgacctggctcctgtaacgcgtgcgggaagtttcatcatgcctgcga

SEQ ID NO: 275096 - DNA, 122 bp, Homo sapiens
cggccacctgtcctctctcgcccacgctgcctgggaggcgcgcttctgccgccttcttgccgcgctcgctctagcctcgcccactcctgcggccttacagggccgaacctcaccctgccctg

SEQ ID NO: 275097 - DNA, 122 bp, Homo sapiens
gcgactccgcaagcccacccccgctcccagcgcctcggaaccggccaagggagtggggcccgcagacagcccaggtcgaggccgaaagccaactccacagcaccccaccgcgaagtccttgt

SEQ ID NO: 275098 - DNA, 122 bp, Homo sapiens
gccgggcgcaagggcaggccaggccgggagggcggatggcggtggggacggcggtggcctcgggccgggcgggcgcccagatatagcggctcagggccaatcggcggcggggcgggcgggcg

SEQ ID NO: 275099 - DNA, 122 bp, Homo sapiens
cccctcccaggccacttatggatgagacagcattttggccacatcccctctgggcacagtcgactgctcagttggttctgggagctacttgttagctgaatctctgggacaggggttggcct

SEQ ID NO: 275100 - DNA, 122 bp, Homo sapiens
cggcctgccggcgctctaaaggctctgtctgtctgtctgtctgactgtggggcggcctgccggcgctctaaaggctctgtctgtctgtctgactgtggggcggcctgccggcgctctaaagg

SEQ ID NO: 275101 - DNA, 122 bp, Homo sapiens
gccacccggcgcctcgcccctcgaccccgcggcagctgggcccgggcgctctgcttccctcggccctttgtggctctagtttattttccagttaatgaaatgggagactgagtccctgccgc

SEQ ID NO: 275102 - DNA, 122 bp, Homo sapiens
ttgactgaatgaaagaaaatgactttgtgtgaattccaagcctaggccttgagagacctccgaacaagcaaataaaaaataaaaaaaaagaaaccatgtggagacacttacatttgaaggcg

SEQ ID NO: 275103 - DNA, 122 bp, Homo sapiens
agccgatggatgcaactagaccctcaggagggaacccagccggaagccgattgcatttcacgtggagctgaggaggggagcctcacccctggatggagctcagcccctttttggaagatggg

SEQ ID NO: 275104 - DNA, 122 bp, Homo sapiens
ccggccgggactggagtcccggcgcaacacatggcttttataaaaatctccggattacctcgctatcaaaagctcccgaagcccttgcagggggaatttacaggcgcccacctccggctccc

SEQ ID NO: 275105 - DNA, 122 bp, Homo sapiens
tgctcacagaccccacgccgtggaccctggcggccagaggcagggatgacccaccctgggcgatagccacaccgtgcaggaagcccggtgctctgctctctgaagctaaacgaattcatgtc

SEQ ID NO: 275106 - DNA, 122 bp, Homo sapiens
tcgcccgggatttccgccgaggcggtgcagctaccgcgccgtgttgtcctctgtctgcaccgccgctgacggaaagctaggcccttctggagacccgctttcccaagggcgcggcctcctgg

SEQ ID NO: 275107 - DNA, 122 bp, Homo sapiens
gacgcgccgagcttgggcaggagccccatggctgcgggcggctggccgggcgcggagtggcgcggggtcggggcgcctcgggctggagcggccgggcgggtgagaggcgaccgcggcggcag

SEQ ID NO: 275108 - DNA, 122 bp, Homo sapiens
acacacacacacacacgtatatacacagagagagagagagctcacctggtacttctctttcgtttcatggtgacacattacagtgcacacaacttgaccagcttacaggtgctagaaatgga

SEQ ID NO: 275109 - DNA, 122 bp, Homo sapiens
gtctcaagcagtcctcccacctcaggctcccaaagtgttaggattacaggcgtgagccaccgcccctggcaatactatacaattttataagggacttgagcatccttggatcttggtatctg

SEQ ID NO: 275110 - DNA, 122 bp, Homo sapiens
ccagtcctaaaggacccagaaaagaacactgaagtctctctccactctttgtaaactccccggaggtgacagagccctcatttttccaggaagaggtcaagattttcctgtgtgcattgtga

SEQ ID NO: 275111 - DNA, 122 bp, Homo sapiens
ggttaagatataaacaatactatattataactctctgtccctctggtgaattttctatttcgtaaagtgatttcaagttctttatatcctctgaatttcgtaagaatccagtaaggtcagca

SEQ ID NO: 275112 - DNA, 122 bp, Homo sapiens
gctactaagggaacttgggaggatcccacctcagccttcgtgactagtgaggtgcgcaaacgcccgagttttccctggtgcgcgggttccgcctttgcagtgccctccacccttcctggtgt

SEQ ID NO: 275113 - DNA, 122 bp, Homo sapiens
gattcttttttttttttttcacgtggctaacttcttgatgtagctttgctagattcattccgcatctaaactgcttacctctcattcctccgtgcccccgtattgaggcctttcttctaaca

SEQ ID NO: 275114 - DNA, 122 bp, Homo sapiens
cacctagcactgccccatgagccttgcttcatcatggtgctggatgcagggcagggagagcgtactttcctcgctgtggcccttgggctggtgctggcttccatcttagtggtggtagcctg

SEQ ID NO: 275115 - DNA, 122 bp, Homo sapiens
tcggccgcggactctaggccaatgacgggccaggacacgggcgatttctgcgggccagggcggcggaggtgggacttccgcttcgtcgcgtgacgtcatctccgtgagcaggattggccctg

SEQ ID NO: 275116 - DNA, 122 bp, Homo sapiens
tcagccctcagcccggcttcccgggctggccccgccactcagcagcccctccccatcctccgaaaacccaagctcacctctgggttccggctgggtgggggttgccaggagacggttgccag

SEQ ID NO: 275117 - DNA, 122 bp, Homo sapiens
gtgccgcgcatgcacatttcaaatacaatcttccagcttgctgcctgttctcacacctcccggttacttctcctcttcccagggacccagacggggagagggtgctgggcgccggcaagcca

SEQ ID NO: 275118 - DNA, 122 bp, Homo sapiens
ccttgggagggtgcagaacgggcttagccaatatgaagaggcccctcagggccaggcggacgccgcgcccccgctcccaacagccggcagcccggggtcaggccgccacttcccgggagcct

SEQ ID NO: 275119 - DNA, 122 bp, Homo sapiens
gggcgctcggagaggacgactgcggagtcatcctctccgtccccgggccaacccggggaacgcggcgcccccaccccctgcgccgtgtaacgccgggatcaggacactttccgctgggaggc

SEQ ID NO: 275120 - DNA, 122 bp, Homo sapiens
tggtaaggaaagtgagtcagtgaggattccaaggtctccagcctggctgttggtgagtgccgacagcatcagcataaagagagagagagaaagagagagaactcaggagctggtctaagaga

SEQ ID NO: 275121 - DNA, 122 bp, Homo sapiens
gtgcagctgctaaaaggggcagggtttcttttgacgtgatgaaaatgcttcagaatcagccgtggggatggctaaacagatccacgtacacgcaaacctccactgactgcacacgtgaaacg

SEQ ID NO: 275122 - DNA, 122 bp, Homo sapiens
cagacagagcagacagcccaggaaggagactttgaggacgctgcattttggacagaagggcgagggaaggaacatcgcagcaggaggaagcaatacaggaaatagaattttcaagaatctgt

SEQ ID NO: 275123 - DNA, 122 bp, Homo sapiens
acatagatttgtggataaatcagaaatcccttaaaagatatttaagtatctgcactttctcgcctaatataatttccaactataatcatcactggcaccacttattcctttgctagattcat

SEQ ID NO: 275124 - DNA, 122 bp, Homo sapiens
ctcctaagtagcagggactacagggcgcacacccaacttttttttttttttttaatttttcgtagagaaaggctggtctcctgagctaaaggatctgcctgcctctgcctcccaaagtgctg

SEQ ID NO: 275125 - DNA, 122 bp, Homo sapiens
ccggtctctgtgcccaacagccaaccgcctgccatggagactttctttaggagacatttccgggggaaggtgccaggccctggagaggggcagcagcggcccagcagcgtggggctgcccac

SEQ ID NO: 275126 - DNA, 122 bp, Homo sapiens
ttaaaattcatttatttatgtttttgagatggagtctcactgttacccaggctggagggccgaggcgtgatctctgctcagtgcaacctctgcctcccggattcaagcaattcttctacctc

SEQ ID NO: 275127 - DNA, 122 bp, Homo sapiens
agctgaagtgtaacttgactgcttgactgctttttgcaggcctcgggtggttcatcccgccggagaggaatggcgagaacctggagtgttgactggcaaaacatttgcagacgcggtttttc

SEQ ID NO: 275128 - DNA, 122 bp, Homo sapiens
aacacaaattcgtaaactttcttaaaacattatgaaatttaggcagggcacagcggctcacgcctgtaatcccagcactttgtgaggctgaggcaggcagatcacttgaggtcaggagttcg

SEQ ID NO: 275129 - DNA, 122 bp, Homo sapiens
ctgagaggccgcgaggtttcggcctgagatcccgtgaaggcgagaaatctcgcgatttctcgggagaggaatcggttaggagaagggggattcctcactcagctgtgcgctctgatttcgtg

SEQ ID NO: 275130 - DNA, 122 bp, Homo sapiens
cttatgcacatgatctctcttttcaggaatggcaaaacagaggtaaatagatcgtttacacgtaaacctgatgtctggttggggaggtgaaacaaacagaaacaagacacaactgtatcacc

SEQ ID NO: 275131 - DNA, 122 bp, Homo sapiens
tcgaccaccactagcagggctagggcgcactgtcgtggtcgttttggttggccccctccgcggcccgcccacctctctccctgggagcccaggcccgcgttccgggtcctctcccgccgagg

SEQ ID NO: 275132 - DNA, 122 bp, Homo sapiens
aggctcaagctgccatttctgacataagtggcaatgttaagtgatgggcgcacagccggccggattctgccatcccaggcctagaacctgccccatggtcacggtcgagctcgggagcgccg

SEQ ID NO: 275133 - DNA, 122 bp, Homo sapiens
ggtcctcgggggagggtggggccatccgtcggggtgtctggtggccaccagctctgctggcgtgggcaggtgtgacccccaccccagggacagccggctgatgtccagcgtggaaaagtacc

SEQ ID NO: 275134 - DNA, 122 bp, Homo sapiens
acctggatggggcggagggagaaccacagagaggaatggatgctgacttcatagagtttgcggtctggttgtaaacacgggacttgaactcgaataactcaaggagtgtgatgagggcccat

SEQ ID NO: 275135 - DNA, 122 bp, Homo sapiens
gcctcgtggaggctgaggtgagtcctggaggtgcgtggttggggcggagagcattatctgcggctccgattttgcagattctggctgaggcgttcgtgatgtcagcagcagccgagacgggc

SEQ ID NO: 275136 - DNA, 122 bp, Homo sapiens
tctgacaaaatgacagctcctgttatgttgctgctgctgccgccaatggacagcctttaacgtgcccgccagccctgctccaccgccggcctgggctcacatggccccatccctcctcgaac

SEQ ID NO: 275137 - DNA, 122 bp, Homo sapiens
tgcaggtcctggtcctagaggcatgaaaaggaccccagaagacactgcctttgtataatccgtttgctatcccgaggtgattcacggagtttctggggattggcgcaggctggcgctgggaa

SEQ ID NO: 275138 - DNA, 122 bp, Homo sapiens
gaagctggttatgaataaagctcaacactggaaccacatgttgctgttgatgtgaagggccgttgctgggcagtactgttagagcaccatcaaacagagtcaaggaaacaggatcttccatg

SEQ ID NO: 275139 - DNA, 122 bp, Homo sapiens
tatgttatgttaagtttcgtgatccatcaagtgttggcgtggcccagcatctaactaacacggtttttattgacagagctctgatagttgttccttgtgcagaaggttggtatctcgctttt

SEQ ID NO: 275140 - DNA, 122 bp, Homo sapiens
gaacttcttaaaatatttaatgttaatattccttatgatttccaaaaaaaagtgtatgtgcgtgtgtgtgcacatgcacagattgatgaatagtgtgcattgttttttaacttatttgaaca

SEQ ID NO: 275141 - DNA, 122 bp, Homo sapiens
aagccgggccggccccggcgatccccaccatctatgctctccttggatgggcccttggtccgaccaccagcaggggccgcccttggaagggaactcctgctcctgccgggccagccacagac

SEQ ID NO: 275142 - DNA, 122 bp, Homo sapiens
cagagaatttgaataactcaccacacagtcagtaaattatggagccaggattatagtgtgcgccctcacataccacattaatggtaacagcagcactagcagcaacaacttctcatcttatt

SEQ ID NO: 275143 - DNA, 122 bp, Homo sapiens
ccggcctcccaccagcagccagccgggccaggttaggctgggatcagctacgtcaggccccgcctccgcgaccgttaccaccgccgggggagggcggccaatcgagcccgagcgcgtcgagg

SEQ ID NO: 275144 - DNA, 122 bp, Homo sapiens
tagctataatcatcatcatcattgtcattgtcatgaagttgaatattcatccctcatccccgccgtctctggactctataacccagcccttcccttccccccaccccagttcctccgctggg

SEQ ID NO: 275145 - DNA, 122 bp, Homo sapiens
tatatttctttctgtgttgtggtcaaaaaaattcaacaagcaccactctcaagcacatcacgggcactcagtagacagcactgagagacctagcctgtgatgaggtatgaggcaggaggaca

SEQ ID NO: 275146 - DNA, 122 bp, Homo sapiens
caacaatttctggaactttgctattcatataagtccttagctgtacggcccttaggcaaccggagatgagattctatttatatacagccaagttctggcttcatacttcccctcacatggtt

SEQ ID NO: 275147 - DNA, 122 bp, Homo sapiens
ccattagccggctaagtgctcccagggaggggggaccgcgcggcataagagtgggtgaggcgaagccagggcagaggggggcggaagaagcttttcctgcattcagctaagtgcggcagaag

SEQ ID NO: 275148 - DNA, 122 bp, Homo sapiens
attacttgactctagaataacaaggttttgtgactgaaactcaaatgaaaagtggttgctcgtgtgttttacaagtcatgttctattgtgacattctttgttcttgagtcttaactgttaat

SEQ ID NO: 275149 - DNA, 122 bp, Homo sapiens
cttcctgctgtcctatgcttcctatcccctagggttagtggtgcgtgttgggtggtggagcgagggatcccttggagcaaggttcttagagaactttgggtctgaaagcagctcaaaccttc

SEQ ID NO: 275150 - DNA, 122 bp, Homo sapiens
ctgcgaggtccagggatgactcactcacccagcaagtcggtgaccttgtccgtaagggcccgggatgcccggatgaacgcgttgtcgctttcgtcatacttcatcttcatctcgaagaaccc

SEQ ID NO: 275151 - DNA, 122 bp, Homo sapiens
gctgtcatttaattcacaaacactaattaattacagccatgttaaaaggggtgtttgggacggtttggtagttccttttgaagaaaacctgtgtcttgaaaatgcatatgaaagattaccag

SEQ ID NO: 275152 - DNA, 122 bp, Homo sapiens
gaacagaatcacactcttcacgccgccttggagccaaaattagtttagccgcgagaagtccgggcaaccaatcggaaacaaccaaggaacagttgcatggcgacactctggttccgccttcg

SEQ ID NO: 275153 - DNA, 122 bp, Homo sapiens
gttgggctagactaagcttagaggtcccaaattctaaaactctttgtggacttaatttcccgaataggggaagggccatttctagctctgtaaggatgacagcagttgacaaatgtccacag

SEQ ID NO: 275154 - DNA, 122 bp, Homo sapiens
aatgaaaacttgagtaagacaggcagccaaagccacagcggggacgttcccagcctggctcgcttccggcactgacgcctccagccgcgacctctagacttcagcccttccattggtcgtcc

SEQ ID NO: 275155 - DNA, 122 bp, Homo sapiens
ctgtgacaaagaaggaagcctgggtgtagaaactgatttcagctcccctctgaagttgggcgtctctctttgctgaccacttgggaatttttttttcttgcttctgacccacctctcccctt

SEQ ID NO: 275156 - DNA, 122 bp, Homo sapiens
gcactgcaatatcttcgctcctcacctgataaggctgccgcagcggtgcaggatgctttccgtcaacatgcctcccagagtatagcttctgacagccctgcttccagcccttgcctccaccc

SEQ ID NO: 275157 - DNA, 122 bp, Homo sapiens
gcacatacgagccacgcaggcccgcacgccccactacccaccccaggggagcagcgacctcgggctctgccccgcccaccctgcccacctgcaggggttccatccggagggtgtgctgggcg

SEQ ID NO: 275158 - DNA, 122 bp, Homo sapiens
aggcccccggctcggggcagggcagggccggcggcggcgagccggagcccgccccctgcccgggccccgccgagccctcggagcccacccatggggcacctgccccttgcgcctccttgccc

SEQ ID NO: 275159 - DNA, 122 bp, Homo sapiens
tcccccacaaacaaatatccttaaaagatgtacaaaactcgagggggcggagcccgctgccgagggcagggcagggtggggcggggcggggatcaagcaggggcagggctggcgctgcggcc

SEQ ID NO: 275160 - DNA, 122 bp, Homo sapiens
gaggagtctgtccttatcttggggaatcgagaagaaagctgtggggatatttttaaatgacggtttccccttgacaattgtccacaagattaataaaggaagattctgagcccttaccctgt

SEQ ID NO: 275161 - DNA, 122 bp, Homo sapiens
gggagggggcggcccccacacctggacccgcggacacctgggcggaaccccaagccgcagcgatagaacggccctttggaaatcagattacctggatcctggttttctccgcattcatttcc

SEQ ID NO: 275162 - DNA, 122 bp, Homo sapiens
acacacacacacacacacacacacacacacacacagctgaaagtcactctgagtcccggtcgtttctgtgtagtaagagcccatctctgcatgccactcgatggggcaggccagctttgagc

SEQ ID NO: 275163 - DNA, 122 bp, Homo sapiens
ttgggtatttatgacctcctttcaggccggttctatcaataagaaccctcagggtatccacgtaaaaccctcaacctggaggttataatctctccccaacaatgggactgtctttggctaat

SEQ ID NO: 275164 - DNA, 122 bp, Homo sapiens
gggaggggccgggctcagactgggacgggcgggactccagttgataggagcaagacatgacgaaacaatgactggggggcggggcatggcggggatgtggccacacccagtgtcagaatctg

SEQ ID NO: 275165 - DNA, 122 bp, Homo sapiens
cagttccctgggccccgagccaaggacactgaggtaaggagaaaagatgatggccatcttcgaggtctatcagcgggccaaggcctggcctggccccagagccagggatccgactcagtgct

SEQ ID NO: 275166 - DNA, 122 bp, Homo sapiens
aagcgtggagctgaaattgtgtacgaatgtgtggggtctaagtgtgccagtgtgtcgtcgcgaaggtttgtcattgtgggtgtatgtgacatacaccagtataccaggctgccagtgtctgg

SEQ ID NO: 275167 - DNA, 122 bp, Homo sapiens
agacttccctctagaatcctccaacatggagcctcttgcagcttacccgctaaaatgttccgggcccagagcaaaggtatttgcagttttgctgtctatagttctatgcacagtaacgctat

SEQ ID NO: 275168 - DNA, 122 bp, Homo sapiens
ggaggctcggccgacaggggcgggggccgcgcagccggggactttcaggaactgcaggagcgtgcggcgcgggagtagccgagcgcccagcggctgggcctgagcgtcgagactcggggccg

SEQ ID NO: 275169 - DNA, 122 bp, Homo sapiens
caagctggccacagctttcaagaatgaagtggttggggaatgaggttaggggaatccctccgagacactggaaggtgaattaatcatcaaaggggctccctggtttctcttcctaagagtat

SEQ ID NO: 275170 - DNA, 122 bp, Homo sapiens
gccggtgccccgcacagcagccagcagctcccagcccaggcaggaggtgcactggcctcccggcggccttttgaggcctaagagctccaagccctgcccttcgtgccctctgcactagacgc

SEQ ID NO: 275171 - DNA, 122 bp, Homo sapiens
cggagcctggccaggccggtagccgctccgcgcggaccaggcgtccctctcccgtccccgcggcctccccaccacctatggggtctgtccccgcccggccggaccctctttcgccctcctca

SEQ ID NO: 275172 - DNA, 122 bp, Homo sapiens
ttaccctgggctcatcacattctactctgggatcccaccacactttacacagtgcatatgcgtccattagaacatctgatacacgatgttgtctgtttgcaggcaggacttctcctcttacc

SEQ ID NO: 275173 - DNA, 122 bp, Homo sapiens
tccctacactccacttctgcccagctcctgtccagctgtgagttcacttgaggcctctcccgtgaaatctgccctctcggtctgaggtcagggaactcctgtaagacgcaaaaggcccacgg

SEQ ID NO: 275174 - DNA, 122 bp, Homo sapiens
gctcatcccacacactcggtgctagtcactgctgtgtgtttacatgagtaatggagctgccgggggaggggagttgtaagcagagcgctgagcctcgcagctcgcattcggagggaagctga

SEQ ID NO: 275175 - DNA, 122 bp, Homo sapiens
tggcttagggcggaaacagattctctgcataagaaggggaacgaaagatggcggcggaaacgctgctgtccagtttgttaggactgctgcttctgggactcctgttacccgcaagtctgacc

SEQ ID NO: 275176 - DNA, 122 bp, Homo sapiens
tggccaccagctactgcgggaggctctgggaggccagcggaaggcgcagcgcgcggtggacggtgctcgggcgtagagggggagagcggccggtagagggggagagcagaccagcccggccg

SEQ ID NO: 275177 - DNA, 122 bp, Homo sapiens
ccacactctgtccccttgcaagtaaagaaatgcaccaagcagggcttatgcagcagccctcggtctggcctggctggagctataaacatgcatgctccgaaaagccgcctcgcggaaggtat

SEQ ID NO: 275178 - DNA, 122 bp, Homo sapiens
gacctgcgtccatcaccccacgccagcggcctgcgtccatcaccccacgccagcggcctgcgtccatcaccccacgccagcggcctgcgtccatcaccccacaccagcggcctgcgtccatc

SEQ ID NO: 275179 - DNA, 122 bp, Homo sapiens
agggaaggccggggacaaggtcaggggagcgcgaggatccactgccctcgagggtgccctcggccacgtggggggcggctcctccacccccctcctcccacctgccgccaccccccactgtc

SEQ ID NO: 275180 - DNA, 122 bp, Homo sapiens
gccaatcacagagctgcttattgagatacgcggggttgcgacttggcggcgggagccaagcgcttgagctgtcactggagtggttgagaggtgggggaaggacagggtagggtggggtgggg

SEQ ID NO: 275181 - DNA, 122 bp, Homo sapiens
ttaagagtcatcaccactccctaatctcaagtacccaggaacacaaacactgcggaagaacgcagggacctctgcctaggaaaaccagacacccttgttcacatgtttatctgctgaccttc

SEQ ID NO: 275182 - DNA, 122 bp, Homo sapiens
ttggggataatccatggccaccgtgatggtgaggctctcccaaggctaattctcccatcccgcaagggcaagagccctttccagatgctcctgcagagatgacaaaccatgagaagggtgct

SEQ ID NO: 275183 - DNA, 122 bp, Homo sapiens
gattttaggttcatttttcaacatgttacactgaggtgcctttagatacccaacaggagacgtccagtgtgttacagaatttagaatatatggattgaagatgcacactaatgagtcatgtg

SEQ ID NO: 275184 - DNA, 122 bp, Homo sapiens
gctcttctgaaatgtgagtgtataaggctcgcacacccacaggctgtgatgctgctattccgactcagttcttggtgatgctgatgaagtggtccaagcccacagaggatgctgctggagtc

SEQ ID NO: 275185 - DNA, 122 bp, Homo sapiens
tctcctgtcagctccctgccccgaagcaggaaggcatgctctagatggtggtctttgcctcggtgactaccccccttttgactggcccttccttagttcttgggaagacttgattcagagat

SEQ ID NO: 275186 - DNA, 122 bp, Homo sapiens
ttggcattctgatctatgcatcagactctcaccagtttgttagtgagactgtcatttccccggtggcagattgcctgtaaatcctcagtactaaagctggatccagccatggacatgcagct

SEQ ID NO: 275187 - DNA, 122 bp, Homo sapiens
gggtgcctccatgcggcagctgcacaggggcaactcctcaaaccctcgctctgtctccagcgaagatgtgtcattggacaccccttggatggaggaaaagaggagctgagggaggctctgca

SEQ ID NO: 275188 - DNA, 122 bp, Homo sapiens
ctcttggtccagtcagtgccgccacgttcagacagcattttccactaacctcagggtcagcgcaatccgggggctccaactccaattcggctgagcttcccgcgacggcttcctacggctcc

SEQ ID NO: 275189 - DNA, 122 bp, Homo sapiens
cctcctaaataccttcctgcgacattaacacaggtaggaaagactcggagcttccatccacgtggtcactggctctgtccatctgcccccaggggtgtcatgtttggtagggccagtgaacg

SEQ ID NO: 275190 - DNA, 122 bp, Homo sapiens
gttaaaactatttcctcggaacagctctgaaagagtttgccaaccagagtaaaatcacttcgcagagataaacgagcggaaacgtattcagaagagagagatcgcggaagcaagggcagcgg

SEQ ID NO: 275191 - DNA, 122 bp, Homo sapiens
ctgtcccggccgcctgcctgcccgcagggcctatatgagctgatgcttcggtgctggagccgggagtctgagcagcgaccacccttttcccagctgcatcggttcctggcagaggatgcact

SEQ ID NO: 275192 - DNA, 122 bp, Homo sapiens
taagaccagcccagttgccttatctgacatggaatctttttcctgtctggcttgcagcagcgaagtgtttctggtcaggttgcctccaccaaacctgattgaagcaaaagggtgacatgctc

SEQ ID NO: 275193 - DNA, 122 bp, Homo sapiens
atcatgagacatcaccctgcacctgtgataggctccacactctacaagccagctgcccttcgcttgacttccaagcaggggaaagcagctgtggctgtatatgatgtctcacgagttgtgcc

SEQ ID NO: 275194 - DNA, 122 bp, Homo sapiens
tgggacagccaaaggccggcccgggcggttcttccccaggtggtccggggcgtcccgggccgcactggcctggcccatgggccccgaagaaggcgctcacccaaggaccactgtccgagcgg

SEQ ID NO: 275195 - DNA, 122 bp, Homo sapiens
tgccaccaagtgccatgggatagggacccctctccatgaggggatgggaggtgacctcagcgcactctgtctcaacctgaagcctacacccaggctagcaagagaaagtaggatcaaccctg

SEQ ID NO: 275196 - DNA, 122 bp, Homo sapiens
taatccggtcttgagctgaacgttaaccggctgaaaggagcacctgtccttcgccaggagcgcagcctcaaccggcgcctgagtgcgggaagacgtctatccccctacagctctatgactcg

SEQ ID NO: 275197 - DNA, 122 bp, Homo sapiens
tgctctgcctccccacggcactgcctccaggcctcacgggcctcccgcctgtcctggcgccgccgtcgcatggccagaacgtggcactgccaactcccggctgcccctctgcctggcctccc

SEQ ID NO: 275198 - DNA, 122 bp, Homo sapiens
tggctaggcctgggtccgatctaaataggaaggtaattctagtgttccgcaaatccttgccgaattccatcccggccaaagcagggacccgggggagcctctggtcgcacccgagacagttc

SEQ ID NO: 275199 - DNA, 122 bp, Homo sapiens
tgaaaggaagaagtatgcctagaagaaaagcttctataagaagatcccagcgtttcatctcggcagtctgcagctctgcctcaagttaaccctgaaacaagaaatcaggcttaggggagcat

SEQ ID NO: 275200 - DNA, 122 bp, Homo sapiens
acgctcagctggctgtgagctcgctccgtgcccagggtgttggacatctcacaggtatatcggcccgcatcctctgccaccacgttctgaaccaccaggagctggttgtcaggggtcaagtg

SEQ ID NO: 275201 - DNA, 122 bp, Homo sapiens
cggggccctctggccatgagaagggagggtggccgagagagcatggagtcctccccggcacggagctgcagaccccaggactgggcatgggtgaagcactcgcagctcactcccctctgtga

SEQ ID NO: 275202 - DNA, 122 bp, Homo sapiens
ttttaacttttcattcatgtttctgacttagaatgatcgaggctcaggccctggaaggaccgtaaacatttggccagcttggtttggatacctggcagagaccaggttctgagaagcaatgg

SEQ ID NO: 275203 - DNA, 122 bp, Homo sapiens
caattgcttaaagactgaggttaacttgccagtggcaggcttgagagatgagagaactaacgtcagaggatagatggtttcttgtacaaataacacccccttatgtattgttctccaccacc

SEQ ID NO: 275204 - DNA, 122 bp, Homo sapiens
ccgggctagcgctcacaggaatgctccaaaatcattcaggtttatttggcaactgagcaacgaggcacataaacattatgcaggccacctggccgggcaggatccggcagcgtcctccgggc

SEQ ID NO: 275205 - DNA, 122 bp, Homo sapiens
ctggggaaagaaagagaaacagcactttgtaatggcatcctaatcttgttaccaaacaaacggggcttgttgccctatacgcacagaagccaatattatggcgctgattttttgagaaaagt

SEQ ID NO: 275206 - DNA, 122 bp, Homo sapiens
ttactattgtaattgttttaaggtgccacaaacagtgcccatataagacagtgaacttcacggagaaacattgtatgttctgactattccatcaaccaatcgtctccccacctccctccttc

SEQ ID NO: 275207 - DNA, 122 bp, Homo sapiens
ccttccatatgtcagtagtgtttctgctatctagttgttcatctcactggcgaacaagcgcgcagcctgtgggaagctcccaagttcctcgggccctttttggaagagcttctaagatatat

SEQ ID NO: 275208 - DNA, 122 bp, Homo sapiens
catcttcattaggaggagccacgcaggcctggttaagtaacataggatgcacccacataacgggattccacacagactatacacagaatcacctccaagatgcactgatagcaagctgcaga

SEQ ID NO: 275209 - DNA, 122 bp, Homo sapiens
cctaggtatgtggtgtgatcagtcaataaaattatcctctgattctaaaaccactcaagtcggcttctctgggccatatttccataaattggtatttataacattttttacaatattgggcc

SEQ ID NO: 275210 - DNA, 122 bp, Homo sapiens
ggccgccgcgttaatcccgccgcctcccacccgcacagcgggcgctcggcctgtattagccggataaacatattccttgaggcgaagcctgggaagtgccaggattagagcctgcagcttaa

SEQ ID NO: 275211 - DNA, 122 bp, Homo sapiens
ggcttgtcaatggcagagccttcctgaaagtcaggttctcctgtcagggtggagacccagcggctttcaggagcaaaaaagaagtctccaaaccgacacgctttgctcagcgttgacatata

SEQ ID NO: 275212 - DNA, 122 bp, Homo sapiens
atgaaaccagcagcccggcatgcggagtcagcaccacacacacacagaccggaaaccacacgcagacttgcacagctcactcggtcccgcgaagagggacgagacaagacgcaggtcagtcc

SEQ ID NO: 275213 - DNA, 122 bp, Homo sapiens
tggccgacggagcgtacactcaagatgatgaccgacggagcgtacactcgagttgatgaccgatggagtgtacactctggaaaactactcagagttcctaatcagcttgtgccacgaccagc

SEQ ID NO: 275214 - DNA, 122 bp, Homo sapiens
ctttttccagcttcatgtctctgggcagctgcccctctttcccaccacgggctcccaccccggctgaattccctgaaggggataaattctctgctgagtgggtattccacctaaaacggaga

SEQ ID NO: 275215 - DNA, 122 bp, Homo sapiens
gcagggaacggtttggcaccgctctcgtttcggcggcgttgctgcctgtcttgctttcctcgttttgagccagccctacaaaaatgaaagtggctccttttgaataagctgaatcgggcttt

SEQ ID NO: 275216 - DNA, 122 bp, Homo sapiens
tggttttcagcctcagccatcaaacaaacaggctgtgtgttgtaggagtggtcatttaaccgcactaagcctcaaatgtttcctctgtaaaattagaacattaggttcaattaaagccattt

SEQ ID NO: 275217 - DNA, 122 bp, Homo sapiens
ttaagtgaacagatctggaagatcctaaggaggcaaaattgacaggactttgtgactaatcgaatgagtaatcaaaggagagaagtctgataatactcaagtttctggctactgcagatgga

SEQ ID NO: 275218 - DNA, 122 bp, Homo sapiens
catacatgtcgtcgccgtattcgttgaggaggctgtaggcctcctccacgcacttgcgctcgttcatattgcaggtgatgaggatgccctgtagcccgggctctagctgacggggcccgcca

SEQ ID NO: 275219 - DNA, 122 bp, Homo sapiens
gaagcctcactgaggtggtgacattgcggaaggactccagcagctgaggtgcagtccttgcggcagtctaggggagcattgtggacagaggcactgacaggtgaggaagatctgtgggaggg

SEQ ID NO: 275220 - DNA, 122 bp, Homo sapiens
caaggtcctccgcgcgcgactacgctcataaaaggaaaaaaaagcgtgtgcggttctcgacgtgccgccaatcttcgaacgcaggtctgtgatcatccgcagactccgaaaaagggttcgag

SEQ ID NO: 275221 - DNA, 122 bp, Homo sapiens
gcggggcgggtcacatggcggtggcgcggtagcgcgcgatgcagcacaggctagaggctgcgcaagcgcggggcccgcccctgggaccctccgggccgggcggtttggccccttagcgcccg

SEQ ID NO: 275222 - DNA, 122 bp, Homo sapiens
gccggacgactggccctatgtggtctccatcacctgcctcaagcacaagtcggggggtcacgctgtgagtgcctgcccgcctccttgcccccagcccctggctcccgcccccaccgacaccc

SEQ ID NO: 275223 - DNA, 122 bp, Homo sapiens
ttcgctttttgcccagttctgttgcccagtttggagtgcaatagcgtcatctcagctcaccgcaacctccacctcctgggttcaagcgattctcctcctcagcctccagagtagctgggatt

SEQ ID NO: 275224 - DNA, 122 bp, Homo sapiens
cagcagagtccagcgtggagttaaccttcagtttctttgcagcgattttggccgccctggcgggagggggctgttccatcatgtgggagaggaagggccggggagcctagggggtggcgggt

SEQ ID NO: 275225 - DNA, 122 bp, Homo sapiens
ccttctctggtgttccttgttttagctgacgacactcgagagcgccaattttcctagattcgattttgtggtttggaactgtggttttggaatccagagtagtcgcctcgttctagtatgta

SEQ ID NO: 275226 - DNA, 122 bp, Homo sapiens
cagcccgctgaccacgctcttctcagtggagagccgggtgggaactgtgccaggggatgccgccccaactctgcacagcaggtctcctctcgcccccggcctctgcacgggtgactcagtgt

SEQ ID NO: 275227 - DNA, 122 bp, Homo sapiens
cgcagttggaagcccgggcgctcttaccgaaagcgcgagcccggacttccccgccacgatcgatgtggccagtctgcgcctgccgcagttcccgctcgcaccccggcccctcgcagagtccc

SEQ ID NO: 275228 - DNA, 122 bp, Homo sapiens
gccagcgaccacttctgtgaccttgggtctccactttcccatctgtaaagtggggcgaatcgtgctgaactctcagcactgtcttcagcacttaaagagataacaaatgcaaagcccccaaa

SEQ ID NO: 275229 - DNA, 122 bp, Homo sapiens
cctcagcctggggagggaggcaggtgaggagctgctagtcaccacctatcacaggacccacgtgggtatcagggggcaagtcctctcatgcccaggccctgtctcaccacaggaggcagaaa

SEQ ID NO: 275230 - DNA, 122 bp, Homo sapiens
gaggacggaatgctggtcggttgtttcatccaaattgcagaacggcggggcagcatcaggcggttggtttatatcagtggaggagtctttagaacgggctggtttctgtttagacttaggaa

SEQ ID NO: 275231 - DNA, 122 bp, Homo sapiens
gtgataccctgttgatacatctgctttagactgctaacagtaaaaaaaacttacatagtgcgtttgttatgtcttctagtgcgtttgttatgtcttttaaaacattatggcataattcaaat

SEQ ID NO: 275232 - DNA, 122 bp, Homo sapiens
tgtggggaggaggggcagagcagcaacagctctgagcagttacctctgccctggggagcacgtgggtgaatctcagcgctcccctgtacatggaggggcagccctcaagcctcctcctgcca

SEQ ID NO: 275233 - DNA, 122 bp, Homo sapiens
tctttgtcctgcatgtatctgctgggttttctcatgcgtttgctccctccccaccgaatccggatttccttactaaaccctaagctcctcagggccaagggctacagcctgcctttcaccgg

SEQ ID NO: 275234 - DNA, 122 bp, Homo sapiens
cgacgcgtaacaccaggaacacgctggtttctggttggggaagtggtgaccttgcccacacgggctgccaggagtgtgcgcgcgctcacgcaccggggactcttggccagagctgggcagcg

SEQ ID NO: 275235 - DNA, 122 bp, Homo sapiens
aaaattgagacagttacaggttaaataacttgtccatgcccacaagggccaggactcaaacgcaaggtatctgactctaaagcccttcctggttccacatttcacatggctctctgcacaca

SEQ ID NO: 275236 - DNA, 122 bp, Homo sapiens
gactggcccgcagcggtgaaaggcctttggggtccctagctcctcagggactcctctgcgcgctccgggatccatacctggcaagcaatagcgcggcgaaagccgcacgccatgtccacctc

SEQ ID NO: 275237 - DNA, 122 bp, Homo sapiens
aacctacttaatgacaccatcctgtccctccctggcttttgagtacctaggaaaggggctcgtggggaggcagagtcagaaggggcagctgctctcaggttccacttttcctggtctgtttt

SEQ ID NO: 275238 - DNA, 122 bp, Homo sapiens
cggccgggacccgggacgctggatggccgctgggtcagcctgcaccggagccagcaggagcgcaagcgggtgatgcaggaggcctgcgccaagtaccgggcgagcagcagccgccgggccgt

SEQ ID NO: 275239 - DNA, 122 bp, Homo sapiens
gttgccaagtgctaaaagttggtttcccaactcagaatgaaggaaccaggcttgtgcgtccgatgggcattgacattctggaaaacaagaataagaagctgtagcggcgcctgtaagtgggc

SEQ ID NO: 275240 - DNA, 122 bp, Homo sapiens
tctcccgcgtgcccactgcgttcttggtcacccagggcaacagccaattggggtcgaaatcgtcctccctgtgtgcaaggccgggttctgtccggaaccaggctccaggtgaacattcgcag

SEQ ID NO: 275241 - DNA, 122 bp, Homo sapiens
gaccgccaaagagcgggtgcctggttcctgcggaggctgccgggcgggtgccgaggttgccgagatgcgggaggtttgaacacaaggatgggacagaggcgaggatcggggctcctgggtgg

SEQ ID NO: 275242 - DNA, 122 bp, Homo sapiens
gggcaccgcctgtctgcccttctaccgctcttcggccgcctgcggcaccggggaccaaggcgcgctctttgggaacctgtccacggccaacccgcggcagcagatgaacgggttgacctcgt

SEQ ID NO: 275243 - DNA, 122 bp, Homo sapiens
ttcccgggctgtctttgggtttccgagtgcatgacgcgagggggactgaacggcgcggtgcggcatgcttcacttggacagctgctcttgtgggtcaggcagagagagactccctcgaggaa

SEQ ID NO: 275244 - DNA, 122 bp, Homo sapiens
gaatcgtggggccattcataacctgcttgagctgtcctcggcaggccggggggaggtgcgcgcttccagggactctcccggtgtttactacgtcgtgcctgagaaaccaggcgggggcgggg

SEQ ID NO: 275245 - DNA, 122 bp, Homo sapiens
tgggtggggagtgcgagtctgacaaaaaccttcttaaactctggaaatccagatctttaccgccccctcttttttcagtacgaaggaacgaggggaaagtgcgcgcgcgcgcgcgcgtgtgt

SEQ ID NO: 275246 - DNA, 122 bp, Homo sapiens
aagcggacctgaagctgtggctgcagtgcctggcacgcgggaggcgagagcctgcagtcccgtgtccccgtagcaaaatggaacggagaggtgaccaagaagagccgagcatcagaaaagat

SEQ ID NO: 275247 - DNA, 122 bp, Homo sapiens
aggaggtggctaatcctcacaaggctctccatgagggaagctcacccctataaatccaggcgggcgcttcgttacccaggagcccaaggtgcagctccgggacgcttcttttcaaggccggg

SEQ ID NO: 275248 - DNA, 122 bp, Homo sapiens
gttctctccgtccccgatccactcgggctccggcagctgctgcttgggcgccttcggcatcgcggtggcagaactagaaacgagttacagatagaaactagaatatgctttttaaaaaaaca

SEQ ID NO: 275249 - DNA, 122 bp, Homo sapiens
cttcccgggtcccagggaggcctccttcacctgggcctggggcgccgctgtggctggagccgttgcccggagagccccgggggggcggctccgcgtggggttcggcgaccgtcaggtggaag

SEQ ID NO: 275250 - DNA, 122 bp, Homo sapiens
gtcgccctgttccccactgacccttgcttttgaagttcgggagcatctggaagtacaacccgctctaggcatgctcaaagccccaggcctctctgctgcaggctgggtagacagcaggaacc

SEQ ID NO: 275251 - DNA, 122 bp, Homo sapiens
agaaggatgaatgactttagatggactaatgtcactgttaagatctctggtgtcattctccgtgtaattttatttttaaaatccacacaatcaaaatgttaaaacttgcacgcaaacagtgc

SEQ ID NO: 275252 - DNA, 122 bp, Homo sapiens
cccgtggacggtgaaaggggcttgtcttccacacgctgccctgtccatatcatcccggcacgaatgatgtttggggcagagctgcccggcctccccgggtggtgcccatttgttttcctcag

SEQ ID NO: 275253 - DNA, 122 bp, Homo sapiens
gttccgggcgcttggagaagatggtgctgcggcggctgctggccgccctgctgcacagcccgcagctggtggaacgtctgtcagagtcgcggcctatccgacgtgcggcgcagctcacggcc

SEQ ID NO: 275254 - DNA, 122 bp, Homo sapiens
agaagaaaaagaaatagagtcacctgggagaaaggaccagtgtgaccttcaggcaagcgccgggtttgtcccttaggctgaaataccatttatgttgtcagtataacaagaactcctcattc

SEQ ID NO: 275255 - DNA, 122 bp, Homo sapiens
cctgcacggtcccgccccaaaggcacgcagacacgccccctttcctggtcattccccctgcgaagtcagttccactctagttacaggattggggcggggccagaaaggcgcaggcgcaacgg

SEQ ID NO: 275256 - DNA, 122 bp, Homo sapiens
cctctaagagggctctcaagctttaaaacatttccaatccaaatatgtagctctaagactcgggcccacccccactccccttctcagtgaccacccagggctcattcagaagctccttattt

SEQ ID NO: 275257 - DNA, 122 bp, Homo sapiens
agcgccagaggtatgaagcctcctacctccaacattgggagatggaggtcctgggggcctcgggccgagcccggctttgctcccctttggcgtaggtgcctgcgtcttgacccccaccgaag

SEQ ID NO: 275258 - DNA, 122 bp, Homo sapiens
gagtagctgtgggaagcccaccgctctcacccatgcaaggcgacccacgtttcccggcaacgctggtcaaagaaaggactggatacctggtaggtagccatggtggtggccgtggggacggg

SEQ ID NO: 275259 - DNA, 122 bp, Homo sapiens
gtccctggcccctgaggtccctgactcagagccatattcagtacttccagtgggggcgcccggtgcccagcacccacctcatcgaggtgcggcccacccaggaccccgccaagccgcagcgg

SEQ ID NO: 275260 - DNA, 122 bp, Homo sapiens
ccactgcctctgaagaccccctttaggacccaaggatcaaaatccctacctcagggtgcccgtcttgttttccctgtcctaaaaaaaaaaaaaaaaaaaaagactaagggactggtcatact

SEQ ID NO: 275261 - DNA, 122 bp, Homo sapiens
gtggagagacgtccgggaaaacgcgacagcttccttcagtgacagcacgctggagcggggcgggactttggtggaggtggaaggcaaatcattcaggtggtttcccaggtgggaagaagggt

SEQ ID NO: 275262 - DNA, 122 bp, Homo sapiens
gcagtaaggacgagaccttgacctccggctgcagcgagagacaaaggaccgaccacatcccggaagccgacctgtcccctccagctgcctgcctgattggacgttcccagcccagcatccct

SEQ ID NO: 275263 - DNA, 122 bp, Homo sapiens
ccggaagtgggcgccaaattcggaagtgtggcagcagataggaatcgaagggcactcattcgcttggctctctgtcccgcccactacccggaagtgtggcccgggtccagaaccaagagcgc

SEQ ID NO: 275264 - DNA, 122 bp, Homo sapiens
ataaatgagcgatcaggcgaaggtaaacaaaggcgggctgagggaggtgtagggggagtccgggctggctgcgccacgcttacttagcattacaaaacccttttacaaatcgagacaattag

SEQ ID NO: 275265 - DNA, 122 bp, Homo sapiens
tgtttaactcgtatacagatgaacattccagttgatcactctgaagctttttggctaaagcgtttgggtttagagcttccattactcattcgccttgcccaaggcctcagcaaccgacgttc

SEQ ID NO: 275266 - DNA, 122 bp, Homo sapiens
acaaacaccatgggtttgaagtgtcctgttgacatggccatggccactttccccgtggaccgtggcaagtttttgtttttggtttttgttgtttgtttgagacaaggtctcactttgtggcc

SEQ ID NO: 275267 - DNA, 122 bp, Homo sapiens
agttgccacttgtgctttggagattcctcaacacttttggaaatcataaaggtgagaagacgggataacttgcctcactagactttcagtgtagacatactgtggctcttgaagaaaagttg

SEQ ID NO: 275268 - DNA, 122 bp, Homo sapiens
cccattccctgtgtcacaagacatcccagccgtggcacgtgcactctcatacagacgcaacgtcaccattcgcacggtagggcacatccttggctctatcacgcacataatattgcacacac

SEQ ID NO: 275269 - DNA, 122 bp, Homo sapiens
tttatttggggcctcacagtaatctaggaaagcttttcagaagagagccattctcagcaccgaggtgtcctgcagaccaggacactccagcaggctcttggaactgctttcctgggatggaa

SEQ ID NO: 275270 - DNA, 122 bp, Homo sapiens
tggagagaggagctccacaggcctgcggcctctctgcgtaggcagaggtttacaggaggacggctcacgtttattaagccccaccattgaggaaccaaggtgagcgagaggcccgccgagcg

SEQ ID NO: 275271 - DNA, 122 bp, Homo sapiens
tggggggcgaggcggggccagggctgcgcgtggggctgggtgtcccattgaaaaggcggacgcactccggcagcccagcactctctcacttctggccagggaacgtggaaggcgcaccgaca

SEQ ID NO: 275272 - DNA, 122 bp, Homo sapiens
aggccaaagcccttgttttcacctgttttgggatcctgttgagtaggagtttgctgggggcgcccgtgcaggacccccttgagggcagttggggaggcacgtgaggagcaggacagcgcata

SEQ ID NO: 275273 - DNA, 122 bp, Homo sapiens
caggagagcatacagtttgtatctgccattgaggagccactattcttgggcagactccttcgtgaagagcaggtggggccagaattgaatgctttcttaggacatttcaccactgctatcca

SEQ ID NO: 275274 - DNA, 122 bp, Homo sapiens
atgttgtgtgcatttacaatttcaactgagcactcttttaaattcatgtttctttatatacgccccactctccttttaacagttcactagtcctgactccttcatcaaaacatgttttttca

SEQ ID NO: 275275 - DNA, 122 bp, Homo sapiens
ctaagtcgggaaggttccttgcggttcgcggcgtgccggacgtgacaaacggaagccgcacgtctcactagtaccctcgcagacggacagcgccagggagcaatggcagcgcgccgaccgcg

SEQ ID NO: 275276 - DNA, 122 bp, Homo sapiens
gaggctcctcccgccgggggctggagccgcgggggcggcccgagcagcgaaggccccgcccgggccaaccgcctgcctggtccgccctctggtcgccgcctgctccaaggccctcctccccc

SEQ ID NO: 275277 - DNA, 122 bp, Homo sapiens
tttttaaaacgcaccgtttactgagcacatactgtgtgtcagggacttgacttgcattaccggatctaaaattcttgaagtcatccactccttctcacaattattagcagattctgtagtct

SEQ ID NO: 275278 - DNA, 122 bp, Homo sapiens
aaaatatcctggaagggtcagagcaggtgccctggcccagaaactatgcagacctcttggcgatgttacccccaggaactacctcccgtggacctcagagctccatctgggtaccttggcca

SEQ ID NO: 275279 - DNA, 122 bp, Homo sapiens
caaagagagatggggccacccacgttcactgtattacgaccctcattagacagaaaaggacgtctgtgattgaggaaagattttccaacgacatccctcagttgcccatcaaagttgcctac

SEQ ID NO: 275280 - DNA, 122 bp, Homo sapiens
gaaagctgaatgactcccgccctcccacctccaacagatgccatcagcgctgcgaatccccgggttatcgacgacagcagagcccgcaagctctccacagatctgaagcggtgcacctacta

SEQ ID NO: 275281 - DNA, 122 bp, Homo sapiens
gggttcaagggatgctcccgcctcagcctcccacagtgctgggattccaggggggagccccgtgccagccctaaaggactttaaaataagcatctccaaggtgctcaaagagccacaggaca

SEQ ID NO: 275282 - DNA, 122 bp, Homo sapiens
aaatatttaaccacctgtattggttttctgttgctgccataacaaatgacaacacacttacgatttaaacaacacaaatttactttcttttggctctgtgggttgtgagtccatcccaggtc

SEQ ID NO: 275283 - DNA, 122 bp, Homo sapiens
ggtctctcctggcgtgacggcgagccaggctgaaggatgcagaagctgagggctgcgaagcgccactgcctgctcgccccccgacggagtcggggttgcgacgggggaacggagctgccggg

SEQ ID NO: 275284 - DNA, 122 bp, Homo sapiens
ttttccaaagcagcaagccacgcccctcccgcgctcgcgaaatccgagacccgccctttccggaagttttgacactgtgcgccccgagtaatgtgatggagagggtaatcatccggtccgtt

SEQ ID NO: 275285 - DNA, 122 bp, Homo sapiens
aaaaaatatattgcgtggtttgcagatactcacgattccttgttcttgaatgtgcccgtccgtgatgatttcatgtggaataaacttcccactgtggccactgtgactcggagtcatccccc

SEQ ID NO: 275286 - DNA, 122 bp, Homo sapiens
tggcagggcctattgagtctgtctatgagattttgttatcattagtgagagagatgaaaacgcagaaggcttaaacctatgctattacctacctatatccagtgcacttgtaccctgccaca

SEQ ID NO: 275287 - DNA, 122 bp, Homo sapiens
aaacaatgcctttgagggtcaggggcatagttgggactagaacccaggtctcctgtctctcgggccagtggtcagtccactttcacttccccaccctctgacttttgcttctccttccttgc

SEQ ID NO: 275288 - DNA, 122 bp, Homo sapiens
ctagaaccttcagtaggcttttctgggttgcagggacccggaaaagcagcggcttccactcggggggcgggtcccaagggtcttgctgctgctctggggccgtttggactcctggtgttggg

SEQ ID NO: 275289 - DNA, 122 bp, Homo sapiens
tcagtgaaacttcctaatcttgctttatcaacaaatgtctgttttcttattccagatctacgtcaatcctatctatatttcagggccaaatttcatttctatcttctgaactttaccaatta

SEQ ID NO: 275290 - DNA, 122 bp, Homo sapiens
aatgtaatttgaatgaacttgaagttgtcagagacacataaaagccaataagcacagacccggagacacccaaaagccaatcaagacagacccagagacacacaagagccaatgagcacaga

SEQ ID NO: 275291 - DNA, 122 bp, Homo sapiens
gtgacttggtcatacaagcaaacatggcaaaaccctctcagaacccaaaagaacagcacacggatgaaccaaatgtgaggaaagcagctgtgatattttgggtggagagaaacacaagggca

SEQ ID NO: 275292 - DNA, 122 bp, Homo sapiens
tgtcattcgaatggttctggggtgagcccgggtgccgctgggccgcctggggccccttgccgtgtacctgctccacttccagggtccctttcagaggcctcttgcatttctggccccaacct

SEQ ID NO: 275293 - DNA, 122 bp, Homo sapiens
gtgaggcgcagtaatgaggcggcacgtggacagagtggaggcgccagcctcccagaaatgcggggggttccgggtgggcagagcttggcagcaggcgtggtctcttcgaggagcaccacggc

SEQ ID NO: 275294 - DNA, 122 bp, Homo sapiens
acagaggccgggccgcccttcccccgctccgtagggggcgccccgggactccgcggccgccgtcgccaccgtcagacgcactgtccccgatccccgacccaccccgggcggcggggcgctca

SEQ ID NO: 275295 - DNA, 122 bp, Homo sapiens
ttgtgatcttcagcctgtacacagatgtgtcgtaggcctgtgcttgcatctgcacgcccacgagtcacacacgcagtcagcatcctgtgtggccgcagacatcacctacactaggaccacac

SEQ ID NO: 275296 - DNA, 122 bp, Homo sapiens
gacatagaaaaaactcaatttgtgaaaactgatagaaaatgaaatggggaggtgtggaatcgttcactgtggaaattgctcttgcagtactgggagatctcctagcattggatgagttaaga

SEQ ID NO: 275297 - DNA, 122 bp, Homo sapiens
ctcaagtggaaccctgacttcacttttacaatttattgtacccaacaggatcacgttttgcgaggcataaactgtgcccatttctcatcgagtaagaaataaaatcctccaaacccaaccca

SEQ ID NO: 275298 - DNA, 122 bp, Homo sapiens
cacgcggtgggcatcccgagcacctgcccggccgtatgggacccgcctgcaggcaggacacggccacgcagcctcaggtgctcagaacacgccgggaccccgctgctgccgctcaccttcag

SEQ ID NO: 275299 - DNA, 122 bp, Homo sapiens
gtgggcaacagctgcgtgtggcctgtgctgtttctctcctgacaaggaccttgcaaacagcgtggaaatgcgcgagccagcggtcaaacccctcttcaccatgcacggagctcagccgtcct

SEQ ID NO: 275300 - DNA, 122 bp, Homo sapiens
attaaaaaaaaaaaaaaaggaatccgagatactgtcgtttgttgccggcctcggcgtggacgccccgaccatgggccacgcagggcgtctgcctcctcccaccttccgcagacctcaggcct

SEQ ID NO: 275301 - DNA, 122 bp, Homo sapiens
gggcgcccccaggcttggggtcggggctcagtcccccggagagcgggggtcccggagggacggcccagagggagaggcggcggccgggagcgggggagactgggcgggccggactggccgga

SEQ ID NO: 275302 - DNA, 122 bp, Homo sapiens
cctacgatttaattctttaaaactttttaaattttattataaaataacacttccaggatacggacttgctgtgggaggaatatgtaatcaggccactcaaaaatgcctgcacttgaggctga

SEQ ID NO: 275303 - DNA, 122 bp, Homo sapiens
aacatttaggtttcttttaatatattttaaaatgaagttatataaaaaatacagtaaccacggttgcctttgtgctcaaatctttggccataccagagtctaaattatccctccctgtgagg

SEQ ID NO: 275304 - DNA, 122 bp, Homo sapiens
atggtgagtggatgcctcggtctcggggctttagatgcatggaggttcccttttcttgcccgtatgccagcctagggcccgtctcgcgcgtcgcaggggccggatggcgttagattgctagc

SEQ ID NO: 275305 - DNA, 122 bp, Homo sapiens
tatcgctgattttaagcccttttgcatttgccagccgttgacattaagaggcatgtttaacggtgccaacagcatctccttttccttctcctcttcctcttcttcttcttcctcctcctcct

SEQ ID NO: 275306 - DNA, 122 bp, Homo sapiens
cactgtaggctggagcggggttggatcaaatgcctttggcgcgggaactgagtgctggcccgggagaccctccggagagctcgcgggctcggcctcggcctcggcctcggccttcggccgcg

SEQ ID NO: 275307 - DNA, 122 bp, Homo sapiens
agaatgcagctttcaggattcaggaaagatttttctgcacaggcaagtcagttgcagtcgcgtgttattgccaccagaggacacaatgatcctgctaacatgatgaaagactctcccagcgg

SEQ ID NO: 275308 - DNA, 122 bp, Homo sapiens
tgtgtttgtgctgggaggagtggtgaccctcacctcacagtcacctcctctctggatcctcgtgaggtataaagacgagtcctccaccaccagtcaggcacactctaccaccatgaatccac

SEQ ID NO: 275309 - DNA, 122 bp, Homo sapiens
ccaggaaaggaggccagctctagcccggcgccggagttggggagcactcccagccgcgcgcgcaccgccctgcttcaagccagcgacaggagtgactcgctgccccaccccacagcctcccg

SEQ ID NO: 275310 - DNA, 122 bp, Homo sapiens
cagggccatccaacatctccccaggggaattccggtccctactttagtttaaaattctagcgcccttccccgttggcccctcacactccggtctcaaggttctcagctttctttccacccct

SEQ ID NO: 275311 - DNA, 122 bp, Homo sapiens
cttacctcaggcagctgggggatctgaatgagccgcttgaagtactgcaggttgctggagcggtagaacagatctttcaacctaggggtggagaaggacctgaggggtgctgggtgtcttca

SEQ ID NO: 275312 - DNA, 122 bp, Homo sapiens
ggggccccagtctccgagggacgcagcggacacctgtcgcaggtggccggccaccggggtcgccacccccagtgtcccccagcagcgggaccgcggggtccccaccccggggcggaatcccc

SEQ ID NO: 275313 - DNA, 122 bp, Homo sapiens
ccccagggctcttctctcaagttcccctcaagtacagggcacaggcctgatggggcgtagcggacagtccctgcactcatggccaggaacacgggacatgtccctcgggcggggcacccagc

SEQ ID NO: 275314 - DNA, 122 bp, Homo sapiens
aaggaaaggacgaaaggctgcagctgctgcaaaagaaaccagagcaagttttccagagcccgaagcttcctttcctggggctgtgagaagtcactctgcccccagcggcagcacaaactctg

SEQ ID NO: 275315 - DNA, 122 bp, Homo sapiens
caggtacagcgcacccttgtgcccggaggaaggatcgaagccgtagaggctccatggctccgaaggaaaaattaaaatggcacctaacctggcaatctctgtgagtcccaatggcagtgtct

SEQ ID NO: 275316 - DNA, 122 bp, Homo sapiens
aaacatgcttgccagcctcaaaccttcaaattttctttaccaaaacccaggctcagacctcgagaccagggtccagcctgtttaaggagctccccagaccccgcacttctagctgcgttcaa

SEQ ID NO: 275317 - DNA, 122 bp, Homo sapiens
gaactttaatggtaagccgatttttcatgtttgccagtaagctcctgtgaggggttgagacggcggaagcttaagagtgcagtgttcctcccctccttgcctctagaggcatgctgacttcc

SEQ ID NO: 275318 - DNA, 122 bp, Homo sapiens
cctagctgtcttcagcacccacccgctccaaacttccggtgcaaataaaccctggggaggcgactgagccatggccagggaaaaggataggctcttcccgcacctgcctctcggacgggcac

SEQ ID NO: 275319 - DNA, 122 bp, Homo sapiens
cccggctgcggcagcgatgccggtccttggagctggagcggggagtccaggaggcggcagcgctccggagagagacgccctggtcccccgccgcgcgttcccgcctctgtgccctggggggg

SEQ ID NO: 275320 - DNA, 122 bp, Homo sapiens
tcccaaaagtacatatacaaccaattgcaaagaatactggtgatacaatggcaggtgaaacgaagatagtctacagggcaatttgatttacatcccacctagtgatgaggagtgaaagactg

SEQ ID NO: 275321 - DNA, 122 bp, Homo sapiens
acctggctgcgcttattaatccgttaagctcgctctgtcacgggcgccgtgatgtgctcacgcgcccactccctcaggtttaaaaggcgcgttgcccggcaacagaagaaactgctggctta

SEQ ID NO: 275322 - DNA, 122 bp, Homo sapiens
aagttgcatgaaggggtctctttgaggcgggctcggggacaagggcggcccgtgttccgccgtgggggtggggaacacgcacaggcccaccccccaccctggtcaacggcctcgggtcgggc

SEQ ID NO: 275323 - DNA, 122 bp, Homo sapiens
gggactgcccgaaacgcgcgctctctcggtccgcacccccgccttgcacattgcacgagccggagccccaggaggcaaaccaagttcccaactcagcccctcgcgcttggatgaacgagcgc

SEQ ID NO: 275324 - DNA, 122 bp, Homo sapiens
gatgacccccctctaggacaaggcaactccccagggccccgccaccactgaccacaggagcggtgcccagcacccaggagttccccaagggtccaggtttgtgccacccacacccacactca

SEQ ID NO: 275325 - DNA, 122 bp, Homo sapiens
tactgcatctggtgttatatcccataagtctcttttaatctagaacatgcattcttaacccgggggtgggagggtgatattatcccccagggagtgaaaattggttcttgaggaatgaaaaa

SEQ ID NO: 275326 - DNA, 122 bp, Homo sapiens
tgttagtggcacttcctgaagttaacccctgaagagagcccatgctctctagcttttcaccgtgtaggtttgggagcctacaagtacctttaatattcttggactataaaatgagatggttt

SEQ ID NO: 275327 - DNA, 122 bp, Homo sapiens
ccaaattaaaaacacaaatacacacacacgcccctacttagttcctaaaactcaagggcacgcgcacacacctacttatttcctaaaattcaagctcgcaccaaggagatccacaaggatag

SEQ ID NO: 275328 - DNA, 122 bp, Homo sapiens
catccccctgggcctgcatttaatgtgcccactctcctctgttcatgttcctttgcccaccgcgtccttatgcccccgttcccacgccactctgttccactcctccagccgtcctaccgcct

SEQ ID NO: 275329 - DNA, 122 bp, Homo sapiens
tgtacagaggacttaagagttaagctcccttagttatccaattgaaagatttggcataagcgcaccaactataattaaggaaatgactcaagtgacaggcattctaccaccggaaggtattt

SEQ ID NO: 275330 - DNA, 122 bp, Homo sapiens
gctagaaagtaatcaaagggagttgaaacctaacagtgaacttcaacacaaatcaacacgcgggtcagaaggacagcagtttcctcagcaattcatataaggcctttggagaaatatggaaa

SEQ ID NO: 275331 - DNA, 122 bp, Homo sapiens
gttaactggaaatcactggtctggcatgaaatctctaaagctggttgaatgcacccaccacgagcttccctataaaatcctgacattccagacacgctaggaaagggtccttcagactcagt

SEQ ID NO: 275332 - DNA, 122 bp, Homo sapiens
gcaagtttgttttccagatggaaaacactgtgcacaattgcgtgcctcacacaggtgtctcgtcttctctttataggttaacacctaaaggagataattacttaaaatccatcattcattcg

SEQ ID NO: 275333 - DNA, 122 bp, Homo sapiens
aacccgccactcgcgcacgccccctcccatcactttttaactttaaagactcgacacgaacgcccggcctccgaattctctctcgccagggtcaccggcagccgccccaacctcgtccacgt

SEQ ID NO: 275334 - DNA, 122 bp, Homo sapiens
gcccggcgcagaagcgggacgtcggcttctaggggcccaggccggcggcggcgatggcctcggcagctgtggagagcttcgtgaccaagcaactggacctgctggagcttgagagagacgcg

SEQ ID NO: 275335 - DNA, 122 bp, Homo sapiens
ccccacacaccctccacagctgctggcccagttactaagcccctcactccccgaggcctgcggcccccagcggccacttggagtgcagggccgccaaacccacgcccacccggaactcgcgc

SEQ ID NO: 275336 - DNA, 122 bp, Homo sapiens
cggccacgttccgagtctcggctgccatgatcccagtccggggtttctctaccaaatccacgtggaggcgcaggccagaggcgcaagttaatgacgcagccatgcgcgttggtggcagttcc

SEQ ID NO: 275337 - DNA, 122 bp, Homo sapiens
cagcctccagagactcttcgtccattggccagcgagagtgtcaattcccaggctccctcccgcgcgccagcctgctcttccaggcgggaaaagttcagcttagacaggcaagagagaagtct

SEQ ID NO: 275338 - DNA, 122 bp, Homo sapiens
tcattcctttccttccctgacttatgcctgtagttttctatcatcccagtaggtggcacacggccgtgtgcctctcttctggggcaggctcgctttacaaatcccaggcatgttcctgtgca

SEQ ID NO: 275339 - DNA, 122 bp, Homo sapiens
cctccccacccgcccggggccctcgccaagtggctgctaacaaagcccagggcccggctgcgggatggttgactgacaaagtcatgcctgcctagccagcttcctcgtgcagcacggtgaag

SEQ ID NO: 275340 - DNA, 122 bp, Homo sapiens
tgggacgcacatttctccatttctaaatgaagctggtcagggccattccaaagggttctacgggtttttctctgcacataggcacaaagtcaagctggtgagtgggggctgaaagccagcct

SEQ ID NO: 275341 - DNA, 122 bp, Homo sapiens
atcctgagatgggccgcagagcagagagctcggcgggagtgaggctgggggaccatctgccgggctggtgcctcggctctaccatgctgactcacagcttgcctgtcaggtagagctgctct

SEQ ID NO: 275342 - DNA, 122 bp, Homo sapiens
ctgcacctcgccctggccaggttctggccatgctggacgtcacagcgggaaactgccctgcgctcccaccaccaggccacaccaattccatgatgatacagtagtgaggaagatgcccagct

SEQ ID NO: 275343 - DNA, 122 bp, Homo sapiens
tgacctcgtgatccgcccgcctcggcctcccaaagtgctgggactacaggcgtgagccaccgcgcccggccaattcatgtatttttctgtagggatggtgactccctttgtttccaaggcct

SEQ ID NO: 275344 - DNA, 122 bp, Homo sapiens
gagcgcacctggctgcgcgcgctcgggtgtttacgcggcgtcttggcaacggtggagctgcgcgccctccgctcgaccaaaagtgacccacgcagaacgtggcctcccattggacgcgataa

SEQ ID NO: 275345 - DNA, 122 bp, Homo sapiens
tgacaggcgagagctttgcaatgtgcgctgtgaaacccacgctcttggcagcttgcaaaccgttacttacatgttccttttccaaggcacagtggagtgtggttcagaagctttggaaatag

SEQ ID NO: 275346 - DNA, 122 bp, Homo sapiens
ggggttgttttcttttttaaaaacctgaaaatgaggaaatgaatctcgtaagctctgagtcgagaaaatctaacatctcaggttcttggcaggacatgtgataccaatcaggcctcttataa

SEQ ID NO: 275347 - DNA, 122 bp, Homo sapiens
ggtttataagagtgtgtcattccccacatcgtggtgacttctacttggaaatgtgacctgcgaaggtctccttgcttatatacctcagcgtctcctgatattagggtattttcaaattcctc

SEQ ID NO: 275348 - DNA, 122 bp, Homo sapiens
gttccttctttcacactcagctgagtttgcagaaatgccatggtgtgatgacgtgattcacgtctgtctttccgtctagactggaaaccccctgggggactgagatgtacgtcaaccatggt

SEQ ID NO: 275349 - DNA, 122 bp, Homo sapiens
gtgctaggagcccgggagccgcggctttagctcagctcagctgagcggaggggtggccaccgtgtgccaagcgggggtcacacacagggccaaccccaacacctccaccgcggagtgtgagc

SEQ ID NO: 275350 - DNA, 122 bp, Homo sapiens
ggggtcagggagttccctttcctagtcaaagaaagggatgacggacagcacctggaaaatcgggtcactaccacccgaatactgtgcttttccacgggcttaaaacacggcgcaccagtaga

SEQ ID NO: 275351 - DNA, 122 bp, Homo sapiens
gctaagtttttataaaaataatgcattcaaatattacttctgcaatttttctaagagtaacgggaaatagatcttgcatcctacagtatactgggtgattgttggtggagcctggtaaatct

SEQ ID NO: 275352 - DNA, 122 bp, Homo sapiens
gccaggagccatggtactgaaggacagtgcgccataactcagagaaccagggagggttggcggaggctcacagggaccgggttaccccagggccttgtgacagtactacccctagtatcaga

SEQ ID NO: 275353 - DNA, 122 bp, Homo sapiens
gcagcgcctcctggtgtggtttgtgggtggcacccgtgccctccacgccatggagcacggcgttcccactgggcatgcgctggtcttccttctcttcctgtggctctccacaagtggagacg

SEQ ID NO: 275354 - DNA, 122 bp, Homo sapiens
aggccttgacctggccacagcagacaccatgggaggaatgtggattgttggttggggagacggacataagacacaaatcacaacatggtattgtgttatgcaatatgggcaagaatggagct

SEQ ID NO: 275355 - DNA, 122 bp, Homo sapiens
cccaggtcagggatcaaagcggttcccaggcgcgcccttggcccgcgggaaaccactgcccggtcttggtccaggcggcccgtcctacggtccagggttcctatttccgagcctcagggacc

SEQ ID NO: 275356 - DNA, 122 bp, Homo sapiens
aactactgtccctgcattaaatattttggttggggtgacctcggagcataatttaacctccgagcaacctatgctaagactaaacaagtttaagcgaattactatacatatattgacccaat

SEQ ID NO: 275357 - DNA, 122 bp, Homo sapiens
ggaaggaatgaggtgggggtgggagacacctaagccgagtacacaggaaacagggtcattcgatggagactgtcatttgaaaaataacatgatgatatcaattttgttgctgttgtttttgc

SEQ ID NO: 275358 - DNA, 122 bp, Homo sapiens
catctgggtaacaccaaaatgtattactaccctaaatcgccatgaactggagccctttcccggctaactcccacaaagatttctgttctcaagccaacatggaaacaactagacgggacaca

SEQ ID NO: 275359 - DNA, 122 bp, Homo sapiens
tgggcaggtgtgggcccctcgcctcccggggcaggaaggtgggaggggcgacactgaccacgtctggaggcagcgcctgcacgtcgttaaaggtcgtctccaaggtattggcgtccacgttc

SEQ ID NO: 275360 - DNA, 122 bp, Homo sapiens
cggcgccgggggctcttcaggctcagggcataggcaggcggcggccgcgttttctggagacggtcgctctcggagggaccctgcaattgcccgagaccgagagtgggcgctgcctgaaagtt

SEQ ID NO: 275361 - DNA, 122 bp, Homo sapiens
tatggacatgttgtgggtctttatttgtgacatccaaacgcactgcattgcaggacttcccgctgacgcttcatgagctcacctggtatggttcaccaagtcctaataaactcctacctggc

SEQ ID NO: 275362 - DNA, 122 bp, Homo sapiens
ttaccacgtttcccccaagattccaaacatctgggggcagagcctttgcctcccttgtagcgccacggtgcctcagaaccaggtgctgattaattggttgcttgtaacccacagcatagagt

SEQ ID NO: 275363 - DNA, 122 bp, Homo sapiens
tcagcctaggcgcctggctgctggaagagtccattagggatggccaaggcagggtgttcccgacgccagagcgcggacctggctgcccgctgcggagagcagagtgcgcagcccggggcggc

SEQ ID NO: 275364 - DNA, 122 bp, Homo sapiens
ccgcttctccgcccggggcagcagcctccgcgacatggcggcgcagaacccgcctccccccgcctctcattgggggagggacacgcccgtcacccgccgcccccacccgatagggggagcca

SEQ ID NO: 275365 - DNA, 122 bp, Homo sapiens
gaacataagaaggtgactgataacttggcagctgtgccagttctctcctgtactctttcccgcctcctcacaccccaatgcctcatgatttcttcctcaaatctttttttcttgcttggatt

SEQ ID NO: 275366 - DNA, 122 bp, Homo sapiens
actagtttaaagtagtgaaaacagattttattcagtaattgttaacagtaggagaaagagcggagctgcattctgatttgcacagaggtgactgggcaatttaaagcagggagtcaagtgaa

SEQ ID NO: 275367 - DNA, 122 bp, Homo sapiens
aagtttcggttgaggagtaagagctgccgcgggagcagtaacccgcgcgggggaggccgacgtcggtcggagagggggtacgagagctgctggtggtgttgtcgtggccggagcggcccgcg

SEQ ID NO: 275368 - DNA, 122 bp, Homo sapiens
aagcccaatactagtgaggcaagaagaagtgggagggattctgaaagagactgaagtggacgaacttgagatgccagagaaaagcctgggctgctctcctggcagccaagagagaagccatg

SEQ ID NO: 275369 - DNA, 122 bp, Homo sapiens
ggaatcgttcacatcgcagcaagccagcagggacacaggtgtgcggccaggccccggtgccgctgtccttgctccagggcgacaaggcccttcgcaaccaccacagccctcgtaggcgctta

SEQ ID NO: 275370 - DNA, 122 bp, Homo sapiens
ggaaggtgagaaacaggcaagttcaaggcctggttactatgataatagagcagcccccttcgagtgaccctaggaaccaagcccaacaaaggaggggatttttttttttttttttttttttg

SEQ ID NO: 275371 - DNA, 122 bp, Homo sapiens
acaaaccctcctgctgcaaggattgtccctgggaagctgggggaggagcctgcgtgcttccgcgtctcccttgactcctgcctgtccgaggccagaatgggactgcgctgattagagaggga

SEQ ID NO: 275372 - DNA, 122 bp, Homo sapiens
cactcctaatcccattttaaaacaaggaagcggaaggcttcagtggccggccatgggtcacgcagtcacagagccaggccccgctccctgccaggccccactctgctggcctcgctgtggac

SEQ ID NO: 275373 - DNA, 122 bp, Homo sapiens
tgatcaggccggaaccagacagtcccactcctgcttttttgagacacggtctcgctctgtcgcccaggctggagctcggtggtgtgatctcagctcactgcaacctccgcttcctgggttca

SEQ ID NO: 275374 - DNA, 122 bp, Homo sapiens
cccctgccctccctctagatgggtctggagaatcttaaccaatcaagcttgaaggctgagcgcagatgtcactttttttgtatgtgtggaggaggagaactggtgtgggaaaatcaatataa

SEQ ID NO: 275375 - DNA, 122 bp, Homo sapiens
atgcccacgtaaacatgtccacgtgaatacgggtgccgaatgcccacataaacatgtccacgtgaatacaggtgccgccgaatgcccacataaacatgtccacgtgaatacaggcgctgaat

SEQ ID NO: 275376 - DNA, 122 bp, Homo sapiens
tccactattcagtttgttccttaatagtagaccatgcctgattggtgttttacacatctccggctatgtctgacacttgtggatgctcagaaagtggggaaggaaggaaagatacgatggta

SEQ ID NO: 275377 - DNA, 122 bp, Homo sapiens
tatagattttgaggtctgtgaaggcttgtgttacctctttctattcagtatacagctacacgagtaacagagaaaggtaaagagtaacacaaggaaaatgctgtttcgcacaggtcctggta

SEQ ID NO: 275378 - DNA, 122 bp, Homo sapiens
agggtttaagcagcaggatgttgaaagttattcaacagctagcagatgtttattaggtgccgactatgtgtcaggcaccgaggttacagcagagaacaaaagtggcaaactccctgtcctac

SEQ ID NO: 275379 - DNA, 122 bp, Homo sapiens
aacaaaaggggtgggggttcccagcaggaaggctcacacctgcaggaggccacacgtgagcgtgtgtacatgtgcgtgtgtgcttgtgcagggcgctcccagcctccaggtgatctgctgcc

SEQ ID NO: 275380 - DNA, 122 bp, Homo sapiens
ttgaacaaatgcagcaacggacggctgctctgtgtagacagggggcttgatgaggggccccggtccgtcccaaagtgctctgagtcagagaccgacgaggattacatcgtcctcagggctcc

SEQ ID NO: 275381 - DNA, 122 bp, Homo sapiens
ggagcgtcatcacaccagagcccaggctgcggtgcacaggatggctttgcccaatatagacggtcactttgaggactgattggaaaatgcagggcagataagcggcacgcagtaggccttca

SEQ ID NO: 275382 - DNA, 122 bp, Homo sapiens
gctcccatcccaggacctgacggggtaactagatccctggctttctgggcaagctccctccggagggcgggaggagagtgacaggcccgatcttgcaccccagctatgtgggccggaagcgg

SEQ ID NO: 275383 - DNA, 122 bp, Homo sapiens
tttcgtgggcagaattttgaggctacaatgagcgcggacaacaaaaggattctcttgaggcgtgcagcgggccacattgtgttacaagaagcccagtcaacagacttttcagtgaagtgtgt

SEQ ID NO: 275384 - DNA, 122 bp, Homo sapiens
tacagtttgggcaaaaggaataccaccaggcaaattgttttcaaatctatctaatttcttcgagacttttcctgtttgtttttctaaaatcaccttctctccttccatggcaacaggacaag

SEQ ID NO: 275385 - DNA, 122 bp, Homo sapiens
agggaacattcagcataatttattcagccccgtgcaggggcagaaggccaaagtgcacctcgcacaggccatagggccctcttacagcatcctgatacagctgctcaggctcgatgaggtag

SEQ ID NO: 275386 - DNA, 122 bp, Homo sapiens
caactaatttctgcattaatgcaataggaacttcaggctgcccttggtaagaatcagagacgatatccttggtatttgaatctttatctcagctaggatattttctcctttgcatcaataca

SEQ ID NO: 275387 - DNA, 122 bp, Homo sapiens
gcccagttcagtgtctggcacagaagtgggactgtttaatggctggccccgcccgggggtcgcccaaatgtcccgccttcagagtcctcgttctctagggacaccctagtgcgacccccgcc

SEQ ID NO: 275388 - DNA, 122 bp, Homo sapiens
catttgctctttcttttcgattttttacccttttttctcggcttagtttggtacctggagcgagagcttctccgcccttccaccaaccccacaggccgcttcgcgggtggagccctctgcct

SEQ ID NO: 275389 - DNA, 122 bp, Homo sapiens
agcgtccctgattggataatgcttgaggccccgccccctcaggtcctgagttacagaagacgtgatccgatgctggactgagtgaagaaagagagacagtctaagctgcagccttttctttt

SEQ ID NO: 275390 - DNA, 122 bp, Homo sapiens
ctccaggtgtctgagcagccacctagtgcagtgacccatcggggcttcccttgtggcctccgcggtccagaacctctcccaggtgtgatggatcctccaagccgctctttgagccgctgtcc

SEQ ID NO: 275391 - DNA, 122 bp, Homo sapiens
ccacctgcgcttgcgcaggggaggaacacgcagtccggaaaaacgccggggattctgggtcgcgcagccgtggagctacctcaaggcggaactggggagtccagggcttcggcagcctgaac

SEQ ID NO: 275392 - DNA, 122 bp, Homo sapiens
cagctaatcccgcccgccagcccccgtcctctctctctttctccctagctgaaggcgccacgggccgtgtgtcgttgccttccacttttggcgtcccaacgtctctccgctcccatctttct

SEQ ID NO: 275393 - DNA, 122 bp, Homo sapiens
aagtaacttgttcaagccctcagagctagtaagtgtagagctagaattcaaacctaggtgcgctagtcctcaaactggaacttccgctcctgatattttgtttaaggatggaggcgtggagg

SEQ ID NO: 275394 - DNA, 122 bp, Homo sapiens
cccaccaccacgcccagccaattttctttttttttcttttttcttatccagacgaagtctcgcactgtcgcccgggccggagtgcagtgtcgcgatctcggctcactgcaacctccgcctcc

SEQ ID NO: 275395 - DNA, 122 bp, Homo sapiens
tagccctctcccccaacgtcgccctcccggggtccttgtctagtctcagcaggcggcaaacggaccccaggcgtctggcgctcacccaggagactgcccagcggtttctggagagagcgcta

SEQ ID NO: 275396 - DNA, 122 bp, Homo sapiens
acagtggccgcgcagcgagcaatgacccgggatcgggagccgacagaagggcacgcctggcgcggccacgcacagaacccagggccaggcaacgcggggcagaggtgttgggtgacctcggg

SEQ ID NO: 275397 - DNA, 122 bp, Homo sapiens
gaggagttcgcgcgcttcgacagcgacgtgggggagttccgggcggtgacggagctggggcggcctgctgcggagtactggaacagccagaaggacatcctggaggagaagcgggcagtgcc

SEQ ID NO: 275398 - DNA, 122 bp, Homo sapiens
acgagtggccccgaggccacgcacccacagactatgcccgctggcgggaggctcaggccccgtaccgtgtgcaatgggcggccaactatgaaccctacgtggtggtgccacgagactgtccc

SEQ ID NO: 275399 - DNA, 122 bp, Homo sapiens
ctgcctgatatcccagtgccactggaagaaacggacctagccaggacggcgagggggacacgaggaaagactagtcgagagacagaccccccccggaattctgagcaccaaaaggtaagggc

SEQ ID NO: 275400 - DNA, 122 bp, Homo sapiens
ccaactttgaataaaccctccagccatctcttccatattcatatttgccaacataagtgacgaatgatgtcattaacaaacactcacttccttcctctgtggatgctccactcatcaaagat

SEQ ID NO: 275401 - DNA, 122 bp, Homo sapiens
gtcattaagaaatgaaatgccttcctgcagaattttcacacagtcattaccatctgatagcgtttgatctttgagtcatggctgaagtgacccagattcaaactggcgattattaatgtcaa

SEQ ID NO: 275402 - DNA, 122 bp, Homo sapiens
agcgctctgctgcgccctgggcgcagtactggcccggttcctgcacccgcactgcggcggcggcggggcttgaggatttggggctaagctaaacctcacaaaacataccaccaccctcgccc

SEQ ID NO: 275403 - DNA, 122 bp, Homo sapiens
aatgacaaagacaaaaatgtgtgttattctttattaaatttatgcaagcatcaatgtttccgttaccagtcacctcagaccatagctgcgtgcttcctgtgcagactcagagagacatggtg

SEQ ID NO: 275404 - DNA, 122 bp, Homo sapiens
attgcataaaatagactgcctttctcctgtgttgacgctatctgccgtatatttatgcttcggaagaagtccttgaaaagaaattttctctcatcaaatctgagctttgtttcgccttacaa

SEQ ID NO: 275405 - DNA, 122 bp, Homo sapiens
ctcagtgctggtaaaaataaaatagagtaaagtaaagggtgggggtagagttgaggggggcgtgatcagatttctgttcaaataggatggtctttttgctgtgaacttaagactgctctaag

SEQ ID NO: 275406 - DNA, 122 bp, Homo sapiens
ggggatggacgtaggagagggcaccgcagacaaaaagaaaaaaaaaaaagaatgagcagacgcagctggagcgtgttaccaccatgcccggttctgtcaggtggtgcagagttagaataaac

SEQ ID NO: 275407 - DNA, 122 bp, Homo sapiens
agtgtgtgtggaatatttattgcctctttgctgctaggaaaaatatctccctggacggggcgtttctactcgctgctggatccctcttatgctaagaacaacatccccatcattgcttctgt

SEQ ID NO: 275408 - DNA, 122 bp, Homo sapiens
aaacataatgctgaattgtaagccccactgtatacttacttccaaggctgaatacacattcgaagtgtctaatattcttgatgtttgttgtaggaagcattaaataatatttggaagaaaaa

SEQ ID NO: 275409 - DNA, 122 bp, Homo sapiens
ttcctgtgcccctttaacagccatcggcctctgcgtccaccctgcacacccacggcagggcggcaaacccagagcacgccgcacagccctgcttgcgcacagccctgctcccgcgcgcccgt

SEQ ID NO: 275410 - DNA, 122 bp, Homo sapiens
ttggaataatttgttgttctttttctaaattctttctgtcattgccaaggtcattaattacgtaggttttattcttttctaattcattcgctcatttgtagttttccgatttcatcatttaa

SEQ ID NO: 275411 - DNA, 122 bp, Homo sapiens
tgtttaaacagcagaatttttttacctgaccattagcaagagagaaaagctggttttttacgtagtatctgtgaaatctccaagaaacaaggaaacaagagtcaatacagaaagttttagcc

SEQ ID NO: 275412 - DNA, 122 bp, Homo sapiens
ggcgggtaacctggggcaagttctcagctctgcgcactgcctgcctagtgctgttaatggcggcagggtggctgggtgaggccggtgactgctggctttctcacacttcctgacaatctgca

SEQ ID NO: 275413 - DNA, 122 bp, Homo sapiens
aagatttgaaatgtagagggtagccccgggttccttattattttgtttctgtggagctcccgagagtcttcacagtggctgcctgacaattgctttttgtgttaacgtcagccccattaggt

SEQ ID NO: 275414 - DNA, 122 bp, Homo sapiens
taacagaccaagcaccaaagggtggaacagctcaaggttgcatttaggagactccagcctcggccgcccgtgactcctcgacgagccccacctctctcggttccagcatccggcccgcccct

SEQ ID NO: 275415 - DNA, 122 bp, Homo sapiens
cggggccggacggggtagggcggggcgcgcgcagttttccggcggcccctggcccgcccgcgtctggagctccgattctgggaggtccccggcgcccacttcattcacccctctcgttgcag

SEQ ID NO: 275416 - DNA, 122 bp, Homo sapiens
ccatcttagagcaaggcccagcttgcagcaggaggagctgcaggccgcccaccctagccacggcccctgccctggcaggaagcttccaagagtaaacactgcctaatcgtcccgcccagtag

SEQ ID NO: 275417 - DNA, 122 bp, Homo sapiens
ctaaatctgaaacctcaaagcctttccagcagatagagatggataggagctggtgagggacgcttgggtcaactgaaggggcccagtgagacacatgaccaattttggaacaggctaatctg

SEQ ID NO: 275418 - DNA, 122 bp, Homo sapiens
ctcgagacaccagcaacaatggagccccaagtggtggggggatgtgctagagttctctcacgcctgccgcgcacagctcagcgagccatgggtgggggattacatgtttcagctagtttact

SEQ ID NO: 275419 - DNA, 122 bp, Homo sapiens
gcccgggaggtgttcaagacccagggggtgatcaagtacatggggccggcaggtgagggccgggacggcgcgtgctggggagggacccggggccttgtggcgcggctcctttcccgcctcag

SEQ ID NO: 275420 - DNA, 122 bp, Homo sapiens
agggggagcccagcggctccgttgcgccctctgtcggccgccagcctccattgcacgcggcgccgcccacctgcgcactgggaccccggccctgggccgaccaggaaccccttgcgcccgcg

SEQ ID NO: 275421 - DNA, 122 bp, Homo sapiens
gggggcgggcgcggtaccttttggacagatccatgaggaccccggagaagagcttctccccgaagcggaacgacacgacaagcgcgtcctcaatgatgtggtccagcgtgacccgcacctcc

SEQ ID NO: 275422 - DNA, 122 bp, Homo sapiens
ctccagggtgcgctcggggcaggccccaagagccagagaaacggaaaagtgccggggaggcgattaggaagagaagacattaaaaagcccagccctgaaagacaggcagccgagctgaaaaa

SEQ ID NO: 275423 - DNA, 122 bp, Homo sapiens
tcccacagtcgggcagcgctgatggcacacagaggcaggggatgagagcacgtttttgagcgcctactgtgtgcctgctggggcagatgctagccgaggtgcctgcgggcattgcacgccct

SEQ ID NO: 275424 - DNA, 122 bp, Homo sapiens
cggtccctggagtgtgggtaaaagcttctggggtctgaggggaccactgtacctgatcagcgcgcaatccgcccttttgtattatttaagaaaggcaccagtaagccttctcctctagggcg

SEQ ID NO: 275425 - DNA, 122 bp, Homo sapiens
ggccatcctaggagcccctggtgcctctccagcatcttccaccccaccgcggccctctcccgcttcccacagctcaggcaggaggtgacccctgtttgtctcctggagctgctaaagagagg

SEQ ID NO: 275426 - DNA, 122 bp, Homo sapiens
agagacaaagcagccgcatccacagctgggcgcgagcttctcctgggagctgtggcagagcgctctctgctgctcaccccatgctccgcaggcctgcaggagcgaacacagaacaccccaaa

SEQ ID NO: 275427 - DNA, 122 bp, Homo sapiens
ttcctcagccgttctacttttacgttccttttctcagtctaaaagtcgagttccgctcttcggaggcactttggaaagttcataaaagtatgaagaagtagaaaaaaacaaattccccatct

SEQ ID NO: 275428 - DNA, 122 bp, Homo sapiens
ggtttcagttcttatgccttcaagtagaactgaacgatgctccccccacccccgcccctccgcccgtgcttggaagggcctggtaaaatcaagagtaaaatgcaatcccaagagatgaacta

SEQ ID NO: 275429 - DNA, 122 bp, Homo sapiens
ctggaccacacgcggcccacggcgctcaccagccccgagctgagctcctggagtgcatcccgggcctcgctgaaggccaagctcctccgcaggtgagttgccaagggactgccgcgtgactg

SEQ ID NO: 275430 - DNA, 122 bp, Homo sapiens
acccgagggttggcagaggtcccctaagccctcggcctgttccgaccgcgcgcgagtctccgcaccactcggtgcccttgaccgcggacctcgctgcctctccattggcccggccggtcacg

SEQ ID NO: 275431 - DNA, 122 bp, Homo sapiens
gaagatgctgcagatgggacaaacagcccatgtagagatgcagatttgggagtgactagccgaggtctcctggatgtatcagagagccagttggaaaggttgtagatgagagggccttaagc

SEQ ID NO: 275432 - DNA, 122 bp, Homo sapiens
gtttttgcttggctctgcttgccagctgttcccctctgcactgtcagggagggctcctgtcggggtcaggcgggctttctgtttgtccagttagaggacctgtctctccaggacgcaggtcc

SEQ ID NO: 275433 - DNA, 122 bp, Homo sapiens
atttcaacacccacgtgtgggttaaaccaaacctaatcgagtgttggctaaacccaaacacgatgagttagagcttccaacatctaagttcttggacgtctgctgattagggttttctatgg

SEQ ID NO: 275434 - DNA, 122 bp, Homo sapiens
caaagacagttgctgtgttctggaccgttgttttgaccacggcaattagcagacctgagacggaaaacgttcccctgcgaccctagcaggggcgcggcgtgggggtggctcgcttcttcaga

SEQ ID NO: 275435 - DNA, 122 bp, Homo sapiens
ggcggtggccgcgctgagataggctgcggagggatgattggcgtcttggcgcccaatgggcgctggcgggcggccttgagtacctgcgctgggcgggcgggaacggcgcgcggcgagctgag

SEQ ID NO: 275436 - DNA, 122 bp, Homo sapiens
cggttctagtcggtgtgcggaatcccccttttctttccagtatttttctttttaaaaaaacggcacaacaggagtcgggggtctcctgcccgccccttctccagtccgccgccaaaacctac

SEQ ID NO: 275437 - DNA, 122 bp, Homo sapiens
aggccgtggtggatgatgacgccaacaacgccaaggctgtggtgaagaccttccacgagacggtgcggccccggggggcgagggcggggagcagggccccgggaacccggcggggtgtgtct

SEQ ID NO: 275438 - DNA, 122 bp, Homo sapiens
acttgccagtctccataactgtgtgagtagagtccttacaataaatctttcagccaggcgcggtggctcacgcctgtaatcccagcactttgggaggccaaggtggggggatcacaaggtca

SEQ ID NO: 275439 - DNA, 122 bp, Homo sapiens
cttgcccctctaccccaccccccactttaaaaatggcattgggccaggttcagtggttcacgccagcactttgggagatggaggcaggcagatcacctgaggtcaggagttcgagaccagcc

SEQ ID NO: 275440 - DNA, 122 bp, Homo sapiens
gccgggcatctctatcttgctggaagtcatggtggcgggccgggtgtccctagcccgcggcgtggggcagtgcgggctgtgcgcgcggtccgcggcccgggggcgcgctcgcctgtatatag

SEQ ID NO: 275441 - DNA, 122 bp, Homo sapiens
aaaattggctgttccattgggtagtgttttcctagcacattgtggctggctggctcagggcgctatatcatgcttattaatttatgtatgtaatgtgatacttagcatttattgtttgttat

SEQ ID NO: 275442 - DNA, 122 bp, Homo sapiens
ccatctccctgctgcatgcccacctgccaagccactgccagcctctctttggggtctgagcgccagtatgtgaagtgttgccttctattaatatagttacgcagagacggaggttaagggta

SEQ ID NO: 275443 - DNA, 122 bp, Homo sapiens
cttaccaggctgaaccagtgcagagaaggtggcagggcctgccagggaacagctggctcacgtgtgtgggaggagtggtgggctacgtggtgggcagaaggccctcttggaggcccagtcag

SEQ ID NO: 275444 - DNA, 122 bp, Homo sapiens
cagaaataagttactgagaattcttctgtctaacattatacgaagaaatcacgtttccaacgaaggacacaaagaggtccatatatccacttgctgaatttacaaggagagtgtctccaaac

SEQ ID NO: 275445 - DNA, 122 bp, Homo sapiens
cgcggtgccaacctgcacctggaggagacgctggccgagttctgggcccgcctgctcgagcgcctcttcaagcagctgcacccccagctgctgctgcctgatgactacctggactgcctggg

SEQ ID NO: 275446 - DNA, 122 bp, Homo sapiens
ccagacgcgccttctcgctttttcctttctgggccggggccctaaactcccggaactcgccgcaagaggagcgttgaaaacaaaagggacagcccaagctgtcccgcccgctgcgcccgagg

SEQ ID NO: 275447 - DNA, 122 bp, Homo sapiens
aaaatccctgcgcgctggctgccgcccagagccagagcccgcgatgcaatgaaagttttgcgtccagtgcccggtgtgcggccccttctctgcctttgctagcctccggaaccacccaccgc

SEQ ID NO: 275448 - DNA, 122 bp, Homo sapiens
ctgaggccagcggctgaggcttggcttctgcggggctgatatgggggattggttcaaacccgtgtgctccgcagggcttgaagagaacataaagcttttcaaggttttggtatgagaattat

SEQ ID NO: 275449 - DNA, 122 bp, Homo sapiens
tataatgaaccccatcaagccataagagtccgagctcacctggggcgccctagagaaactcgacatattcctctactagcaggaccgtacgtccttctcctagtagccacgccgggtcactc

SEQ ID NO: 275450 - DNA, 122 bp, Homo sapiens
ctgcagcgcccgtagctccacgctccgccccgccgccgctgattgtcccgcgccttgtgacgtcacacgcgggtttttaaggccgaaccctaggcaggctctgcagaggcagcggttggagg

SEQ ID NO: 275451 - DNA, 122 bp, Homo sapiens
gcggagtcggcgaggctggactatggggtggagctgagcaggcggcgctcggcccccggccgctgcgggcatcctgcctcctgggcggggcgcagggcagagagaggcggggtctgggccgg

SEQ ID NO: 275452 - DNA, 122 bp, Homo sapiens
tgcatctggaactcttgggggccattgtgctacttcctagggagaggaagagaggtaagccgggcagaggaaagcatctccaagaggcctgaagccacggatgcccaaggtccagtgtatgt

SEQ ID NO: 275453 - DNA, 122 bp, Homo sapiens
ccagagaagggaccggtggccaatggaaaaggaaaaagggtgagagtccagccaatagtgcggtagggcctgaattagaacgacttccccacttccgtcgggttccacccatgcgctttccc

SEQ ID NO: 275454 - DNA, 122 bp, Homo sapiens
gccgggtgcggattcgggttccggacgcaaggctgcgagttctccgctgcttgttgtggccggggttactgcggcgaccgccagagcagccttggcgctatgttggagccaggggctacccc

SEQ ID NO: 275455 - DNA, 122 bp, Homo sapiens
ccaaactgccatgaaacttgcaaccaaggtgtgacactacccctggctacaattgtctaccgttgccaggcctttggaaactgctgcttttgccaccagggcctttgtgcaaaagggcactt

SEQ ID NO: 275456 - DNA, 122 bp, Homo sapiens
ttttcagtcaacattggtgaaggacacagtccactgcctgcggaggccccgaggaacacgcgtgtaaaagctgcgcccagacccgcagatcccacagcagcagcctttggtctcgcgccaag

SEQ ID NO: 275457 - DNA, 122 bp, Homo sapiens
cgaagacagacagttctgcattgaattcccgaactcctgaacatcatagaagagtagagacgtcacaacctttaggcttatgtcttagagggcttctcagtactgtctgccatacctacaca

SEQ ID NO: 275458 - DNA, 122 bp, Homo sapiens
aattgttacttcagaggtcacgctggggaccctgaatccccctgttttcagggtcagtagcgaatttttaagctgaggggtgtagctgatggccctcagactgaatcaggtctgtggagaca

SEQ ID NO: 275459 - DNA, 122 bp, Homo sapiens
cgcgggaccccgggaggtgctctccccccaccagccctggcccctttccgcagcgaccatcgggcagtagtgtttacaaagttcacacccaaattggtgcagcctcaagaaacagttactta

SEQ ID NO: 275460 - DNA, 122 bp, Homo sapiens
ctgcacaggtcacgtgacgcgcccctagcccggctctatttggctgcaagagcgctctgtcgcctgcctcggactctgtttcccagaagtcttcctggaaactacatttcgcagggggcttt

SEQ ID NO: 275461 - DNA, 122 bp, Homo sapiens
ggaaagccgccagaaagaaggcgattggatggcggcggcgctctggggcgtagcgtcgcccgggccccgcccaccgctgccttcctctgctgggctccagagccactgaggcctgagcgaga

SEQ ID NO: 275462 - DNA, 122 bp, Homo sapiens
gcagtcggggatgaagcggtcgggtgatgctcccaagtccgcagtcggggatgaagcggtcgggtgacacacctagctcagccctcccaggccacctgcagctcccagcctgtgctgtgcag

SEQ ID NO: 275463 - DNA, 122 bp, Homo sapiens
tcctgcggctcgagctcctccgaaggcgggggcgcggggcccctcccgcagtcctggggacgacaaaagtctcctggcactgggggcaagagaccagaaaaaggagtgatgggaattcgagg

SEQ ID NO: 275464 - DNA, 122 bp, Homo sapiens
tgctggcttggtcatggcttgctcctcagtttgtaggagactctcccactctcccatctgcgcgctcttatcagtcctgaaaagaacccctggcagccaggagcaggtattcctatcgtcct

SEQ ID NO: 275465 - DNA, 122 bp, Homo sapiens
aagtgatctgcccacctcggcctcccaaagtgctgggattacaggcatgagccactgtgccggcctacaatcagttcttaagagaaaaaagaaaagcgctttgtggatacattcagaacttt

SEQ ID NO: 275466 - DNA, 122 bp, Homo sapiens
tcacccctcgacagacagacagacctggggcggacgcactgcccacggtcccctggtgcccgaattccgaaaatatcagaggcctaagcccaagagctcctggaacacccatcccagagagg

SEQ ID NO: 275467 - DNA, 122 bp, Homo sapiens
ccaagggaaaaagggcaggtggctgcccgggagcagtcaagcgtgctctttctaataacacgctccagtcctgggtaggctctcgtattattccacacaccctcaggatgggaaacagaaac

SEQ ID NO: 275468 - DNA, 122 bp, Homo sapiens
ccatcagcattggcaggagaggggccgatctccacccccccatccctacccatgaccctccgcagggactccccaagtcggaagatggagagttttagattgtgcaccttcccctgctcccc

SEQ ID NO: 275469 - DNA, 122 bp, Homo sapiens
ttgctccagcgagggggcaggcagggtgggggcggagccttggtgccgtagctccggctacgccccctcgctgctcctctgcgggcctccgtcccggcccaactccgcccctgtcccttcca

SEQ ID NO: 275470 - DNA, 122 bp, Homo sapiens
ataagagccgagattgcaggggcctgcacgccgtcctgaagtcgcgttctgtcttttagccgtgtgctcctgcaccaaataccgccttcacgcatgcctccaaatcagtgatgctttgaaaa

SEQ ID NO: 275471 - DNA, 122 bp, Homo sapiens
cttctacccgcgtcatcagcggagtgggcagagcccccgatgggaccaggtacgcgcggccgggcagcccaacaggtgccagccccagaaatgggttccaacagggtgactccagcctctcc

SEQ ID NO: 275472 - DNA, 122 bp, Homo sapiens
tcagatggctgaactctgcactgactctcagagggctgcttctgctgagcgttccctgtgcgttccggaagcagctcctgtgggcgacacccgatggggaccgcgcttcgctccgcaaacat

SEQ ID NO: 275473 - DNA, 122 bp, Homo sapiens
tgtgaaagggagcggggagaacggaacatggacccaaagacactggcactggcagagctccgcctggggccgatgccttaggcagtacagtactggtcatcttgattggggtgcacctatgg

SEQ ID NO: 275474 - DNA, 122 bp, Homo sapiens
gcccagcggagccgagggcgggtggtgcgggggttcctgggtaggttcgtcccgacgggccgcgggcggattgaagggagggttgggcccgccggcagccccggcgggtccaggcccccggc

SEQ ID NO: 275475 - DNA, 122 bp, Homo sapiens
tccgcgggtctgcacttgccttccgaacaactgcacaacaggtgcaaattaaaatgaaaacggcagcggagccgggcaaacagaatctgctgacctggtttgaataccaattgacgggggaa

SEQ ID NO: 275476 - DNA, 122 bp, Homo sapiens
caggtcccttagacattggttactgactgtgcaaatgagagctggaaactgctgtttccccgggtccatgttgtcttagagttcttttaactgcaaggaacaaaagctcttttgagatggct

SEQ ID NO: 275477 - DNA, 122 bp, Homo sapiens
tttctcatgctgggggatgccggtacttacttggctatgaaaatcaccaccaatcctgcacggtttcccggcgggcagccccgtaatcgcggtgcggcagctggtgccgcggctgagcccag

SEQ ID NO: 275478 - DNA, 122 bp, Homo sapiens
ggctgggggaggtgaagggtcactgggtgtctttgccgtatgccgaaggcacactgcggccggcgattctggtctctgcagatttccaaacctcgccgctgcgtctagcacccctgggtcat

SEQ ID NO: 275479 - DNA, 122 bp, Homo sapiens
taagagggacaagcccctgttctcacgcagggctgagaaccagtgtcggctgcctgctcgcgaaatgcaaagcattagaggggtactgagagtggtgaggaatgccgctaagaccggggtgg

SEQ ID NO: 275480 - DNA, 122 bp, Homo sapiens
tcacctccgtcccatcatctcgctggttaaacgtggaaaaacggggtcttgagctctccacggtctcccctctggttgggccggaacaaagatttataaaagcagtgttgaaaaatctttct

SEQ ID NO: 275481 - DNA, 122 bp, Homo sapiens
ccggttccagcctcgcgcgccagcccctgtcggccccggcctgcaccttcatccccaggacgtcccgatagaaacgcgccgtctggaagcggtttcccactttgaatacgaagtgcagagct

SEQ ID NO: 275482 - DNA, 122 bp, Homo sapiens
acctcatctctaaaaaaaaaaaaaaaaaaaaaaaaaaggagagagcaagacattttatatcgtatatgtttttgtattgtattgtgttgctttttgtctatattttgaaggcactttaaaat

SEQ ID NO: 275483 - DNA, 122 bp, Homo sapiens
tgcagctggttgtctgctgacatttttttcaaatgttcattgtaccattttgctgctactcgaatcgctctatcattcctgtcattagcattttctccctgttcttgttctacataggtttc

SEQ ID NO: 275484 - DNA, 122 bp, Homo sapiens
cagccacctgcatctttagtcagctgtgaacattagagagttcttcatattgaactcaaacgtgtcttcctttagtttcccctggtcctagtactcttcctggagccatacaccatagagag

SEQ ID NO: 275485 - DNA, 122 bp, Homo sapiens
ccccagggctgtctgaccccagatttggcacttattcccaggagcagccaggataggggccgcaaggaagaggtagctgtgctttagatcagagccaggctgccctggatcatcacaagctg

SEQ ID NO: 275486 - DNA, 122 bp, Homo sapiens
aaggcatccaacgtacacgacctgacttctcactcccatttataaagccggtgatacagtcggattctaacccccattccacaggggaggaaactgaggctcaaagaaacaaatcgtaagtc

SEQ ID NO: 275487 - DNA, 122 bp, Homo sapiens
gtggccagctgcttgcgcggggctttgccgccagtggacttacgagctgtttgcttcgtgcgtgccataggaatgggtttcaagcaatggtcacaactgaacaaacagttgttcttactcct

SEQ ID NO: 275488 - DNA, 122 bp, Homo sapiens
tgatgttttggctgtaatttaggttagaaattgtggtcatctgaacgaagatagtggaaacgaggatggagagacctgttcagaattaggagctaaactgcaagtcaatttcatggtccttg

SEQ ID NO: 275489 - DNA, 122 bp, Homo sapiens
agtgacgacaggggtttgctttcgtaagcagcatcgttttcactactacagaagcacatacgccgcgtgcagcttaggcccgagcaaagtccctgctcccctagacccagtcccttcaggtg

SEQ ID NO: 275490 - DNA, 122 bp, Homo sapiens
ccgcccggcgtgcgcaggcggagcggaccagccccgcggggctcccgggggacggccagccgcccagcgggcatccacaggctgcagaggctccaacccaggacttggctcgcgtcttcggg

SEQ ID NO: 275491 - DNA, 122 bp, Homo sapiens
tggatccagaacatggggcggactcaggcagcggcgggaatcaggcggactcgtttggaccgaagcctccgccaggcaccgaagccgtgaagtcgcctgcgcagcaaagggagcctccgggg

SEQ ID NO: 275492 - DNA, 122 bp, Homo sapiens
ttagagcccccacgggagcctcccgggcccggctccggccccacacacccccagccatggcggcccttgcctgcagcacctgccgctgctcctcctgcgaagttgtgcccaggactgaccta

SEQ ID NO: 275493 - DNA, 122 bp, Homo sapiens
agcagacccttcatttccggctctgggtccggctaggccttctgggaaatgtagtcccttcggaggcaccgggcggaaagggagctagagcattctgggaaatggagttctcagtggtgctg

SEQ ID NO: 275494 - DNA, 122 bp, Homo sapiens
atgtctgcgcactcttcaccaagtagggggacctgagttcttttccactttcctgctctccgcgtccgtgtgcggctagcccctcgctcagctgcatttctatcgggcactcgactccccgg

SEQ ID NO: 275495 - DNA, 122 bp, Homo sapiens
gacgcaacagcgcagtagagagcacgcatcacccaacaggagcgtgaggttcagacacaacggcgcagcgcagggcacgcgtcacccaatgggcgtgaggttcggacacgacggcacagtgc

SEQ ID NO: 275496 - DNA, 122 bp, Homo sapiens
caccttatttacctgcctctcctatccagataaagtttgtcaaatgtcaacaagtaaatacgaggcttcaaaagatgtacatcagactctaaaaacaactctcaaagagaatttccaaaata

SEQ ID NO: 275497 - DNA, 122 bp, Homo sapiens
gtcgaggtgcagagtagcagccggccagggacgctggggtgatgggggtgtcgccgccgccgcttgggggccgccggcgtcccgcaccccggggccccgagccccgcatcttctccgagcct

SEQ ID NO: 275498 - DNA, 122 bp, Homo sapiens
ccaggtgggctccaggccaagctcgcagaggggccaggtgtgctctggcggtgagagggccgcgcgtcccggcacacaccccgcccatttcagcaccctctccaccctcctcagatgaccag

SEQ ID NO: 275499 - DNA, 122 bp, Homo sapiens
tggaaataaagcctgtctacatttgaagtgaatcagatcactagattccttgcttagcttcgtaataacactattttcctggtcttgccatcagacaaggtggattattaagatcttgagac

SEQ ID NO: 275500 - DNA, 122 bp, Homo sapiens
tacaggcaccccacaagcccttttcccagcacctacatatgagggagctgatgtcactcacgtgatttttgtctcctgacaggaccctaaattgtaagtgtgaccccaggggcagaatcagc

SEQ ID NO: 275501 - DNA, 122 bp, Homo sapiens
gcgcccagccatgcgcgccgcctgctgagtccgggcgccgcacgctgagccctccgcccgcgagccgcgctcagctcgggggtgattagttgctttttgttgttttttaatttgggccgcgg

SEQ ID NO: 275502 - DNA, 122 bp, Homo sapiens
gcaaacccacctagtgctagaggacaaacacaccccgttcttgggaggagacctcagaggcgctttgtaatgtggctctggcgccacctggtgattattcctagaatttttcctgtaactcc

SEQ ID NO: 275503 - DNA, 122 bp, Homo sapiens
ggtgcctcgttttccttttggggaagacggaagtaatgtctccctggggggcggggacggcgggggtgggcagctgcagtaaggaatacattggacaatgtctgtcaagcgtctacccttgc

SEQ ID NO: 275504 - DNA, 122 bp, Homo sapiens
gcgcccccctcgccgggccccgccccgcgccccccgccccgcccgcgccccccgccgggccgcgccccccgccccccatgcaccacctcctggagcagtcggcggacatggcgaccgcgctg

SEQ ID NO: 275505 - DNA, 122 bp, Homo sapiens
atgcatacacacattccgggtgtatttcatacttcctcccccaaacacttcttttttcagcgattttagaattatccaactttctaagaaaggactttgggaattatgtagatttctcattt

SEQ ID NO: 275506 - DNA, 122 bp, Homo sapiens
gcgcgtgcccgcagacaaaggccggcgccgagcccgcagcagcgccagcgccggcgccggcggaatggactacaactcccaggagtctccccgcgagcccgcccgccgggccgtgggtctcg

SEQ ID NO: 275507 - DNA, 122 bp, Homo sapiens
actccctttcatgttacactggacacaattagaagtacgtagagatccccatttatcaagcgtgcaatgtactcaggacaagggaaattctgccggcagattctggagacttccaggcactg

SEQ ID NO: 275508 - DNA, 122 bp, Homo sapiens
ccccgttcaaggggtctgcagctcttcaaacaatcagtgtggatggccaattaataaccacgggagacggctacggccaggtgggatcctattccaaaacatgggcaaagagccatttggtg

SEQ ID NO: 275509 - DNA, 122 bp, Homo sapiens
gtaagaggcggggaaatgaatattaatttatcatgattaggcaaatccggcagggagagccgattccggcggaggaggctaaaaagatgaatttcagcaataaaattaaataaggacggacg

SEQ ID NO: 275510 - DNA, 122 bp, Homo sapiens
acccatcgcaggctcatgccaggggccgagtgagcaggatgcctgggttcacactactggcgaggacacagcggtcatcaggctacgtgaccgtataagtggtctcccagggcccctctacc

SEQ ID NO: 275511 - DNA, 122 bp, Homo sapiens
gtgtgtgtgtgtgagggtccccagttgactaccgggatgcactgccacttttcggcctggcgggctctgggactccttggtctccgtaggaggccatcctaggccttcggaggaggcgctcc

SEQ ID NO: 275512 - DNA, 122 bp, Homo sapiens
cgggtcgtcccacatggggctgtgctgcacctggaagcccggggtggtgggcgtcgggggcgaggagggcttgtagtaaaccgacccggagtgcggcatcatctcctcagactgggggggca

SEQ ID NO: 275513 - DNA, 122 bp, Homo sapiens
cgccctgggcagggaacttccggttgcggggaagggcggcgtcctctcctagggacttgtcgcacgcggcttctcgtcgcgttccgtcttgcacgcctcgcagcctagctccgcgcgagttc

SEQ ID NO: 275514 - DNA, 122 bp, Homo sapiens
tctaagaactcattcttggcgttcactgcaagctataaactctgcaagtggtgcacccgacgtgatcgccttgaagttatgcgtgaaaggaggagagctcatcaattttaagaaaatcccgg

SEQ ID NO: 275515 - DNA, 122 bp, Homo sapiens
gacgtgcgtatgggtgagtcaggtggacaggattgcgtatgggcggatcaggtggacaggcgtgcgtatgggcgagtcaggtggacaggattgcgtatggtcgggtcaggtgggcaggcgtg

SEQ ID NO: 275516 - DNA, 122 bp, Homo sapiens
gctgcaggtggtggctggggacccgcgagggggcgcccctctgggtagggtctggctgagcgggcttgcaagcccgggaggcggctgagagaccctggacactgttcctgctccctcgccac

SEQ ID NO: 275517 - DNA, 122 bp, Homo sapiens
gggaaagaacatggactgggtgggagagagccttctttagaaggaaatactggcaaaatccggtattgcaaagttttgaaaaaatccatcctgccgggcacggtggctcacgcctgtaatcc

SEQ ID NO: 275518 - DNA, 122 bp, Homo sapiens
caagtcacatgagttgcatcttcgaggctgcatggttaggaaagatgcctcatttaaacgcgcagcaggtgagacatgcccctcgttttgttcttgcaggccaagccccagagtgggcgtgg

SEQ ID NO: 275519 - DNA, 122 bp, Homo sapiens
gtgaacaatacagacacatttcctgacctcacaaatcctccaatcttctgatctttgagtcgatttatttttagtaacttctgaagatagaattattcttcatggtgtcattataatttaat
